United States Patent Application Publication US 2005/0255487 A1 - sequence listing, part 2

SEQ ID NO: 25818 - RNA, 19 nt, Homo sapiens
  misc_RNA (1)...(19): siRNA sense strand
ccucagagcuccugcacaa

SEQ ID NO: 25819 - RNA, 19 nt, Homo sapiens
  misc_RNA (1)...(19): siRNA sense strand
uuaaagagcugcgaacuca

SEQ ID NO: 25820 - RNA, 19 nt, Homo sapiens
  misc_RNA (1)...(19): siRNA sense strand
ugaaagcccuagaucagaa

SEQ ID NO: 25821 - RNA, 19 nt, Homo sapiens
  misc_RNA (1)...(19): siRNA sense strand
cccgagagcuccuuaaaga

SEQ ID NO: 25822 - RNA, 19 nt, Homo sapiens
  misc_RNA (1)...(19): siRNA sense strand
uaacaaagaaccacagaau

SEQ ID NO: 25823 - RNA, 19 nt, Homo sapiens
  misc_RNA (1)...(19): siRNA sense strand
gaugguggcagagcaauua

SEQ ID NO: 25824 - RNA, 19 nt, Homo sapiens
  misc_RNA (1)...(19): siRNA sense strand
caggguguauuaucucaua

SEQ ID NO: 25825 - RNA, 19 nt, Homo sapiens
  misc_RNA (1)...(19): siRNA sense strand
uaugaagccuugaaagaga

SEQ ID NO: 25826 - RNA, 19 nt, Homo sapiens
  misc_RNA (1)...(19): siRNA sense strand
uguagaagcucuggagaaa

SEQ ID NO: 25827 - RNA, 19 nt, Homo sapiens
  misc_RNA (1)...(19): siRNA sense strand
gagagaaucaucuuaaugg

SEQ ID NO: 25828 - RNA, 19 nt, Homo sapiens
  misc_RNA (1)...(19): siRNA sense strand
ucagagagaaucaucuuaa

SEQ ID NO: 25829 - RNA, 19 nt, Homo sapiens
  misc_RNA (1)...(19): siRNA sense strand
acaaagaaccacagaauuc

SEQ ID NO: 25830 - RNA, 19 nt, Homo sapiens
  misc_RNA (1)...(19): siRNA sense strand
ugagaaggaucgaaugcuu

SEQ ID NO: 25831 - RNA, 19 nt, Homo sapiens
  misc_RNA (1)...(19): siRNA sense strand
agagauggauucuaauaca

SEQ ID NO: 25832 - RNA, 19 nt, Homo sapiens
  misc_RNA (1)...(19): siRNA sense strand
gcucagagaagcaguugaa

SEQ ID NO: 25833 - RNA, 19 nt, Homo sapiens
  misc_RNA (1)...(19): siRNA sense strand
gagaaggaucgaaugcuuu

SEQ ID NO: 25834 - RNA, 19 nt, Homo sapiens
  misc_RNA (1)...(19): siRNA sense strand
cuaauauggugcuuauguu

SEQ ID NO: 25835 - RNA, 19 nt, Homo sapiens
  misc_RNA (1)...(19): siRNA sense strand
gcugcgaacucaagucuag

SEQ ID NO: 25836 - RNA, 19 nt, Homo sapiens
  misc_RNA (1)...(19): siRNA sense strand
gguuugcacucaagaccua

SEQ ID NO: 25837 - RNA, 19 nt, Homo sapiens
  misc_RNA (1)...(19): siRNA sense strand
agaaggaucgaaugcuuua

SEQ ID NO: 25838 - RNA, 19 nt, Homo sapiens
  misc_RNA (1)...(19): siRNA sense strand
ggacgugaaccucaggaaa

SEQ ID NO: 25839 - RNA, 19 nt, Homo sapiens
  misc_RNA (1)...(19): siRNA sense strand
cagagagaaucaucuuaau

SEQ ID NO: 25840 - RNA, 19 nt, Homo sapiens
  misc_RNA (1)...(19): siRNA sense strand
gcagagagcacagacuaug

SEQ ID NO: 25841 - RNA, 19 nt, Homo sapiens
  misc_RNA (1)...(19): siRNA sense strand
gaacucagagagaaucauc

SEQ ID NO: 25842 - RNA, 19 nt, Homo sapiens
  misc_RNA (1)...(19): siRNA sense strand
gaaagauuccccacaauug

SEQ ID NO: 25843 - RNA, 19 nt, Homo sapiens
  misc_RNA (1)...(19): siRNA sense strand
cuaauacagucauugaaag

SEQ ID NO: 25844 - RNA, 19 nt, Homo sapiens
  misc_RNA (1)...(19): siRNA sense strand
cugcaagacccucaagaua

SEQ ID NO: 25845 - RNA, 19 nt, Homo sapiens
  misc_RNA (1)...(19): siRNA sense strand
aggaucgaaugcuuuauaa

SEQ ID NO: 25846 - RNA, 19 nt, Homo sapiens
  misc_RNA (1)...(19): siRNA sense strand
ggcaaaagcuuguuggaau

SEQ ID NO: 25847 - RNA, 19 nt, Homo sapiens
  misc_RNA (1)...(19): siRNA sense strand
gcugguuccuguucauuca

SEQ ID NO: 25848 - RNA, 19 nt, Homo sapiens
  misc_RNA (1)...(19): siRNA sense strand
gaaagcccuagaucagaaa

SEQ ID NO: 25849 - RNA, 19 nt, Homo sapiens
  misc_RNA (1)...(19): siRNA sense strand
cgagaucauuggcuuucuu

SEQ ID NO: 25850 - RNA, 19 nt, Homo sapiens
  misc_RNA (1)...(19): siRNA sense strand
gagauggauucuaauacag

SEQ ID NO: 25851 - RNA, 19 nt, Homo sapiens
  misc_RNA (1)...(19): siRNA sense strand
gcucuuggccuucuacuac

SEQ ID NO: 25852 - RNA, 19 nt, Homo sapiens
  misc_RNA (1)...(19): siRNA sense strand
ccauggugcugcugcaaga

SEQ ID NO: 25853 - RNA, 19 nt, Homo sapiens
  misc_RNA (1)...(19): siRNA sense strand
gaaagagauggauucuaau

SEQ ID NO: 25854 - RNA, 19 nt, Homo sapiens
  misc_RNA (1)...(19): siRNA sense strand
uagaagcucuggagaaagc

SEQ ID NO: 25855 - RNA, 19 nt, Homo sapiens
  misc_RNA (1)...(19): siRNA sense strand
gacgugaaccucaggaaau

SEQ ID NO: 25856 - RNA, 19 nt, Homo sapiens
  misc_RNA (1)...(19): siRNA sense strand
gagaaucaucuuaauggau

SEQ ID NO: 25857 - RNA, 19 nt, Homo sapiens
  misc_RNA (1)...(19): siRNA sense strand
ggucuuggguaugcaccua

SEQ ID NO: 25858 - RNA, 19 nt, Homo sapiens
  misc_RNA (1)...(19): siRNA sense strand
gaagcauauuucugaacug

SEQ ID NO: 25859 - RNA, 19 nt, Homo sapiens
  misc_RNA (1)...(19): siRNA sense strand
ugaagcauauuucugaacu

SEQ ID NO: 25860 - RNA, 19 nt, Homo sapiens
  misc_RNA (1)...(19): siRNA sense strand
aaggaucgaaugcuuuaua

SEQ ID NO: 25861 - RNA, 19 nt, Homo sapiens
  misc_RNA (1)...(19): siRNA sense strand
uuucagcacucagauuuga

SEQ ID NO: 25862 - RNA, 19 nt, Homo sapiens
  misc_RNA (1)...(19): siRNA sense strand
uccagacacugaagcauau

SEQ ID NO: 25863 - RNA, 19 nt, Homo sapiens
  misc_RNA (1)...(19): siRNA sense strand
gaaauccuccagccagagu

SEQ ID NO: 25864 - RNA, 19 nt, Homo sapiens
  misc_RNA (1)...(19): siRNA sense strand
guaugcaccuauagauuac

SEQ ID NO: 25865 - RNA, 19 nt, Homo sapiens
  misc_RNA (1)...(19): siRNA sense strand
ucagcacucagauuugaua

SEQ ID NO: 25866 - RNA, 19 nt, Homo sapiens
  misc_RNA (1)...(19): siRNA sense strand
gagagcugguuccuguuca

SEQ ID NO: 25867 - RNA, 19 nt, Homo sapiens
  misc_RNA (1)...(19): siRNA sense strand
ugcaagacccucaagauau

SEQ ID NO: 25868 - RNA, 19 nt, Homo sapiens
  misc_RNA (1)...(19): siRNA sense strand
gcaaaagcuuguuggaauc

SEQ ID NO: 25869 - RNA, 19 nt, Homo sapiens
  misc_RNA (1)...(19): siRNA sense strand
ucaggcaccuucuccucaa

SEQ ID NO: 25870 - RNA, 19 nt, Homo sapiens
  misc_RNA (1)...(19): siRNA sense strand
ggauucuaauacagucauu

SEQ ID NO: 25871 - RNA, 19 nt, Homo sapiens
  misc_RNA (1)...(19): siRNA sense strand
ucaagaccuacuuuccuua

SEQ ID NO: 25872 - RNA, 19 nt, Homo sapiens
  misc_RNA (1)...(19): siRNA sense strand
gcacucaagaccuacuuuc

SEQ ID NO: 25873 - RNA, 19 nt, Homo sapiens
  misc_RNA (1)...(19): siRNA sense strand
uuacuauccugguuugcuu

SEQ ID NO: 25874 - RNA, 19 nt, Homo sapiens
  misc_RNA (1)...(19): siRNA sense strand
uaauauggugcuuauguug

SEQ ID NO: 25875 - RNA, 19 nt, Homo sapiens
  misc_RNA (1)...(19): siRNA sense strand
uguaugaagccuugaaaga

SEQ ID NO: 25876 - RNA, 19 nt, Homo sapiens
  misc_RNA (1)...(19): siRNA sense strand
gagaucauuggcuuucuug

SEQ ID NO: 25877 - RNA, 19 nt, Homo sapiens
  misc_RNA (1)...(19): siRNA sense strand
gauguaugaagccuugaaa

SEQ ID NO: 25878 - RNA, 19 nt, Homo sapiens
  misc_RNA (1)...(19): siRNA sense strand
ucuaauauggugcuuaugu

SEQ ID NO: 25879 - RNA, 19 nt, Homo sapiens
  misc_RNA (1)...(19): siRNA sense strand
agacuaugguccaggugaa

SEQ ID NO: 25880 - RNA, 19 nt, Homo sapiens
  misc_RNA (1)...(19): siRNA sense strand
ucagagaagcaguugaaga

SEQ ID NO: 25881 - RNA, 19 nt, Homo sapiens
  misc_RNA (1)...(19): siRNA sense strand
cacugaagcauauuucuga

SEQ ID NO: 25882 - RNA, 19 nt, Homo sapiens
  misc_RNA (1)...(19): siRNA sense strand
cagcugcgguuugcacuca

SEQ ID NO: 25883 - RNA, 19 nt, Homo sapiens
  misc_RNA (1)...(19): siRNA sense strand
agagaaucaucuuaaugga

SEQ ID NO: 25884 - RNA, 19 nt, Homo sapiens
  misc_RNA (1)...(19): siRNA sense strand
gcucaagauucaguagauc

SEQ ID NO: 25885 - RNA, 19 nt, Homo sapiens
  misc_RNA (1)...(19): siRNA sense strand
ggguguauuaucucauaua

SEQ ID NO: 25886 - RNA, 19 nt, Homo sapiens
  misc_RNA (1)...(19): siRNA sense strand
gaaucgucuuggcauugaa

SEQ ID NO: 25887 - RNA, 19 nt, Homo sapiens
  misc_RNA (1)...(19): siRNA sense strand
ggcucaagauucaguagau

SEQ ID NO: 25888 - RNA, 19 nt, Homo sapiens
  misc_RNA (1)...(19): siRNA sense strand
ggugugcacuccuggaaac

SEQ ID NO: 25889 - RNA, 19 nt, Homo sapiens
  misc_RNA (1)...(19): siRNA sense strand
ggguaugcaccuauagauu

SEQ ID NO: 25890 - RNA, 19 nt, Homo sapiens
  misc_RNA (1)...(19): siRNA sense strand
ggaucgaaugcuuuauaaa

SEQ ID NO: 25891 - RNA, 19 nt, Homo sapiens
  misc_RNA (1)...(19): siRNA sense strand
guaugaagccuugaaagag

SEQ ID NO: 25892 - RNA, 19 nt, Homo sapiens
  misc_RNA (1)...(19): siRNA sense strand
cucaagaccuacuuuccuu

SEQ ID NO: 25893 - RNA, 19 nt, Homo sapiens
  misc_RNA (1)...(19): siRNA sense strand
agauuacuauccugguuug

SEQ ID NO: 25894 - RNA, 19 nt, Homo sapiens
  misc_RNA (1)...(19): siRNA sense strand
ucacacugcugagauaacu

SEQ ID NO: 25895 - RNA, 19 nt, Homo sapiens
  misc_RNA (1)...(19): siRNA sense strand
cagagaagcaguugaagac

SEQ ID NO: 25896 - RNA, 19 nt, Homo sapiens
  misc_RNA (1)...(19): siRNA sense strand
cuacuuuccuuacacuucu

SEQ ID NO: 25897 - RNA, 19 nt, Homo sapiens
  misc_RNA (1)...(19): siRNA sense strand
agagagaaucaucuuaaug

SEQ ID NO: 25898 - RNA, 19 nt, Homo sapiens
  misc_RNA (1)...(19): siRNA sense strand
guacagauggaaucgucuu

SEQ ID NO: 25899 - RNA, 19 nt, Homo sapiens
  misc_RNA (1)...(19): siRNA sense strand
ucagagcuccugcacaaca

SEQ ID NO: 25900 - RNA, 19 nt, Homo sapiens
  misc_RNA (1)...(19): siRNA sense strand
uacagucauugaaagauuc

SEQ ID NO: 25901 - RNA, 19 nt, Homo sapiens
  misc_RNA (1)...(19): siRNA sense strand
gcauugaaagcccuagauc

SEQ ID NO: 25902 - RNA, 19 nt, Homo sapiens
  misc_RNA (1)...(19): siRNA sense strand
uggcucaguuccaggaguu

SEQ ID NO: 25903 - RNA, 19 nt, Homo sapiens
  misc_RNA (1)...(19): siRNA sense strand
gaggaugggcugagauggu

SEQ ID NO: 25904 - RNA, 19 nt, Homo sapiens
  misc_RNA (1)...(19): siRNA sense strand
gaugaaaccugaugacucu

SEQ ID NO: 25905 - RNA, 19 nt, Homo sapiens
  misc_RNA (1)...(19): siRNA sense strand
gacaucaaccucucuguua

SEQ ID NO: 25906 - RNA, 19 nt, Homo sapiens
  misc_RNA (1)...(19): siRNA sense strand
gaggauagguguggccauu

SEQ ID NO: 25907 - RNA, 19 nt, Homo sapiens
  misc_RNA (1)...(19): siRNA sense strand
gaaugguccuuaugaacga

SEQ ID NO: 25908 - RNA, 19 nt, Homo sapiens
  misc_RNA (1)...(19): siRNA sense strand
gacgagcccuacacauuug

SEQ ID NO: 25909 - RNA, 19 nt, Homo sapiens
  misc_RNA (1)...(19): siRNA sense strand
ugacgagcccuacacauuu

SEQ ID NO: 25910 - RNA, 19 nt, Homo sapiens
  misc_RNA (1)...(19): siRNA sense strand
gaccagaggcgacccaaga

SEQ ID NO: 25911 - RNA, 19 nt, Homo sapiens
  misc_RNA (1)...(19): siRNA sense strand
ggacagaugaaaccugaug

SEQ ID NO: 25912 - RNA, 19 nt, Homo sapiens
  misc_RNA (1)...(19): siRNA sense strand
caaauuggcugcacuuacc

SEQ ID NO: 25913 - RNA, 19 nt, Homo sapiens
  misc_RNA (1)...(19): siRNA sense strand
ggacauggagcuggaaaug

SEQ ID NO: 25914 - RNA, 19 nt, Homo sapiens
  misc_RNA (1)...(19): siRNA sense strand
acaucaaccucucuguuaa

SEQ ID NO: 25915 - RNA, 19 nt, Homo sapiens
  misc_RNA (1)...(19): siRNA sense strand
gaagggaacgaagcccaua

SEQ ID NO: 25916 - RNA, 19 nt, Homo sapiens
  misc_RNA (1)...(19): siRNA sense strand
gaaggaggcgagaguguuc

SEQ ID NO: 25917 - RNA, 19 nt, Homo sapiens
  misc_RNA (1)...(19): siRNA sense strand
aaacuucggcuccauguug

SEQ ID NO: 25918 - RNA, 19 nt, Homo sapiens
  misc_RNA (1)...(19): siRNA sense strand
agaaugcguugaugccaaa

SEQ ID NO: 25919 - RNA, 19 nt, Homo sapiens
  misc_RNA (1)...(19): siRNA sense strand
acucuaagccucccguaua

SEQ ID NO: 25920 - RNA, 19 nt, Homo sapiens
  misc_RNA (1)...(19): siRNA sense strand
gcagcucacucaccacucu

SEQ ID NO: 25921 - RNA, 19 nt, Homo sapiens
  misc_RNA (1)...(19): siRNA sense strand
cacgagacauucagaagug

SEQ ID NO: 25922 - RNA, 19 nt, Homo sapiens
  misc_RNA (1)...(19): siRNA sense strand
ggauagguguggccauugg

SEQ ID NO: 25923 - RNA, 19 nt, Homo sapiens
  misc_RNA (1)...(19): siRNA sense strand
ggaaggaggcgagaguguu

SEQ ID NO: 25924 - RNA, 19 nt, Homo sapiens
  misc_RNA (1)...(19): siRNA sense strand
gcacgagacauucagaagu

SEQ ID NO: 25925 - RNA, 19 nt, Homo sapiens
  misc_RNA (1)...(19): siRNA sense strand
caucaucaagcaccucuuu

SEQ ID NO: 25926 - RNA, 19 nt, Homo sapiens
  misc_RNA (1)...(19): siRNA sense strand
ccauaugcaaguccaauuu

SEQ ID NO: 25927 - RNA, 19 nt, Homo sapiens
  misc_RNA (1)...(19): siRNA sense strand
ggccgaggauuccgacuuc

SEQ ID NO: 25928 - RNA, 19 nt, Homo sapiens
  misc_RNA (1)...(19): siRNA sense strand
caaggagaaugcguugaug

SEQ ID NO: 25929 - RNA, 19 nt, Homo sapiens
  misc_RNA (1)...(19): siRNA sense strand
gaaaccugaugacucuaag

SEQ ID NO: 25930 - RNA, 19 nt, Homo sapiens
  misc_RNA (1)...(19): siRNA sense strand
acaccaggaugucuucaau

SEQ ID NO: 25931 - RNA, 19 nt, Homo sapiens
  misc_RNA (1)...(19): siRNA sense strand
ucaaucagccuacacucaa

SEQ ID NO: 25932 - RNA, 19 nt, Homo sapiens
  misc_RNA (1)...(19): siRNA sense strand
uguaggcccuggaaacaga

SEQ ID NO: 25933 - RNA, 19 nt, Homo sapiens
  misc_RNA (1)...(19): siRNA sense strand
ugaaaccugaugacucuaa

SEQ ID NO: 25934 - RNA, 19 nt, Homo sapiens
  misc_RNA (1)...(19): siRNA sense strand
gcaaguccaauuuuaagua

SEQ ID NO: 25935 - RNA, 19 nt, Homo sapiens
  misc_RNA (1)...(19): siRNA sense strand
gagacuacacagacuucua

SEQ ID NO: 25936 - RNA, 19 nt, Homo sapiens
  misc_RNA (1)...(19): siRNA sense strand
gcaccuuccagccaccaua

SEQ ID NO: 25937 - RNA, 19 nt, Homo sapiens
  misc_RNA (1)...(19): siRNA sense strand
agacuacacagacuucuau

SEQ ID NO: 25938 - RNA, 19 nt, Homo sapiens
  misc_RNA (1)...(19): siRNA sense strand
uguuggaacugucguggaa

SEQ ID NO: 25939 - RNA, 19 nt, Homo sapiens
  misc_RNA (1)...(19): siRNA sense strand
caaggcccaugagcacauu

SEQ ID NO: 25940 - RNA, 19 nt, Homo sapiens
  misc_RNA (1)...(19): siRNA sense strand
caacgucggaaucauguuc

SEQ ID NO: 25941 - RNA, 19 nt, Homo sapiens
  misc_RNA (1)...(19): siRNA sense strand
ugacaucaaccucucuguu

SEQ ID NO: 25942 - RNA, 19 nt, Homo sapiens
  misc_RNA (1)...(19): siRNA sense strand
ccaaacaccaggaugucuu

SEQ ID NO: 25943 - RNA, 19 nt, Homo sapiens
  misc_RNA (1)...(19): siRNA sense strand
ugccguaucugugccauga

SEQ ID NO: 25944 - RNA, 19 nt, Homo sapiens
  misc_RNA (1)...(19): siRNA sense strand
accaggaugucuucaauca

SEQ ID NO: 25945 - RNA, 19 nt, Homo sapiens
  misc_RNA (1)...(19): siRNA sense strand
gacccaagaccgaggauag

SEQ ID NO: 25946 - RNA, 19 nt, Homo sapiens
  misc_RNA (1)...(19): siRNA sense strand
ggagugcacgagacauuca

SEQ ID NO: 25947 - RNA, 19 nt, Homo sapiens
  misc_RNA (1)...(19): siRNA sense strand
gaaggcccaugggacagau

SEQ ID NO: 25948 - RNA, 19 nt, Homo sapiens
  misc_RNA (1)...(19): siRNA sense strand
ccugaaaggagaaggaaug

SEQ ID NO: 25949 - RNA, 19 nt, Homo sapiens
  misc_RNA (1)...(19): siRNA sense strand
ccaggcggcuaccauaugc

SEQ ID NO: 25950 - RNA, 19 nt, Homo sapiens
  misc_RNA (1)...(19): siRNA sense strand
caucggcuuuggccagugu

SEQ ID NO: 25951 - RNA, 19 nt, Homo sapiens
  misc_RNA (1)...(19): siRNA sense strand
caccauaggagacuacaca

SEQ ID NO: 25952 - RNA, 19 nt, Homo sapiens
  misc_RNA (1)...(19): siRNA sense strand
caaacaccaggaugucuuc

SEQ ID NO: 25953 - RNA, 19 nt, Homo sapiens
  misc_RNA (1)...(19): siRNA sense strand
cucuaagccucccguauau

SEQ ID NO: 25954 - RNA, 19 nt, Homo sapiens
  misc_RNA (1)...(19): siRNA sense strand
augcguugaugccaaauug

SEQ ID NO: 25955 - RNA, 19 nt, Homo sapiens
  misc_RNA (1)...(19): siRNA sense strand
acaaggagaaugcguugau

SEQ ID NO: 25956 - RNA, 19 nt, Homo sapiens
  misc_RNA (1)...(19): siRNA sense strand
guccuguccucuccaaaca

SEQ ID NO: 25957 - RNA, 19 nt, Homo sapiens
  misc_RNA (1)...(19): siRNA sense strand
ucggaagugugcauucauc

SEQ ID NO: 25958 - RNA, 19 nt, Homo sapiens
  misc_RNA (1)...(19): siRNA sense strand
gagagccgauccccauuuc

SEQ ID NO: 25959 - RNA, 19 nt, Homo sapiens
  misc_RNA (1)...(19): siRNA sense strand
gccaggcggcuaccauaug

SEQ ID NO: 25960 - RNA, 19 nt, Homo sapiens
  misc_RNA (1)...(19): siRNA sense strand
uaaccugaaaggagaagga

SEQ ID NO: 25961 - RNA, 19 nt, Homo sapiens
  misc_RNA (1)...(19): siRNA sense strand
gaugcucucaugcccuuug

SEQ ID NO: 25962 - RNA, 19 nt, Homo sapiens
  misc_RNA (1)...(19): siRNA sense strand
uuggaaugguccuuaugaa

SEQ ID NO: 25963 - RNA, 19 nt, Homo sapiens
  misc_RNA (1)...(19): siRNA sense strand
gaaucauguucagggacaa

SEQ ID NO: 25964 - RNA, 19 nt, Homo sapiens
  misc_RNA (1)...(19): siRNA sense strand
gcccaugggacagaugaaa

SEQ ID NO: 25965 - RNA, 19 nt, Homo sapiens
  misc_RNA (1)...(19): siRNA sense strand
ggaagugugcauucaucuc

SEQ ID NO: 25966 - RNA, 19 nt, Homo sapiens
  misc_RNA (1)...(19): siRNA sense strand
augacgagcccuacacauu

SEQ ID NO: 25967 - RNA, 19 nt, Homo sapiens
  misc_RNA (1)...(19): siRNA sense strand
cuaagccucccguauaugg

SEQ ID NO: 25968 - RNA, 19 nt, Homo sapiens
  misc_RNA (1)...(19): siRNA sense strand
gacagaugaaaccugauga

SEQ ID NO: 25969 - RNA, 19 nt, Homo sapiens
  misc_RNA (1)...(19): siRNA sense strand
cuacacagacuucuauucc

SEQ ID NO: 25970 - RNA, 19 nt, Homo sapiens
  misc_RNA (1)...(19): siRNA sense strand
caaucagccuacacucaac

SEQ ID NO: 25971 - RNA, 19 nt, Homo sapiens
  misc_RNA (1)...(19): siRNA sense strand
ggagagccgauccccauuu

SEQ ID NO: 25972 - RNA, 19 nt, Homo sapiens
  misc_RNA (1)...(19): siRNA sense strand
ggaaggaucugucuugaua

SEQ ID NO: 25973 - RNA, 19 nt, Homo sapiens
  misc_RNA (1)...(19): siRNA sense strand
gcaggaagcuucaaaugua

SEQ ID NO: 25974 - RNA, 19 nt, Homo sapiens
  misc_RNA (1)...(19): siRNA sense strand
ggaaauaauugcauggaua

SEQ ID NO: 25975 - RNA, 19 nt, Homo sapiens
  misc_RNA (1)...(19): siRNA sense strand
gaaaguggcugucucaaug

SEQ ID NO: 25976 - RNA, 19 nt, Homo sapiens
  misc_RNA (1)...(19): siRNA sense strand
ggaggaaauugcauuaaua

SEQ ID NO: 25977 - RNA, 19 nt, Homo sapiens
  misc_RNA (1)...(19): siRNA sense strand
gaaaggaacugcacagaca

SEQ ID NO: 25978 - RNA, 19 nt, Homo sapiens
  misc_RNA (1)...(19): siRNA sense strand
ggaaggagcugcaaagauc

SEQ ID NO: 25979 - RNA, 19 nt, Homo sapiens
  misc_RNA (1)...(19): siRNA sense strand
gcacugaucuggacgaaug

SEQ ID NO: 25980 - RNA, 19 nt, Homo sapiens
  misc_RNA (1)...(19): siRNA sense strand
gaaagaacuuaaccaacua

SEQ ID NO: 25981 - RNA, 19 nt, Homo sapiens
  misc_RNA (1)...(19): siRNA sense strand
gggaagaacugugaagaua

SEQ ID NO: 25982 - RNA, 19 nt, Homo sapiens
  misc_RNA (1)...(19): siRNA sense strand
gaucgaaucuggaaaugaa

SEQ ID NO: 25983 - RNA, 19 nt, Homo sapiens
  misc_RNA (1)...(19): siRNA sense strand
ccaaauaucugccuaagug

SEQ ID NO: 25984 - RNA, 19 nt, Homo sapiens
  misc_RNA (1)...(19): siRNA sense strand
gaugacaugugaagauaua

SEQ ID NO: 25985 - RNA, 19 nt, Homo sapiens
  misc_RNA (1)...(19): siRNA sense strand
aaacaugacuguacugaaa

SEQ ID NO: 25986 - RNA, 19 nt, Homo sapiens
  misc_RNA (1)...(19): siRNA sense strand
gaagaacugugaagauaug

SEQ ID NO: 25987 - RNA, 19 nt, Homo sapiens
  misc_RNA (1)...(19): siRNA sense strand
gaacaucugugucuuugga

SEQ ID NO: 25988 - RNA, 19 nt, Homo sapiens
  misc_RNA (1)...(19): siRNA sense strand
gagcagauaucgaugaaug

SEQ ID NO: 25989 - RNA, 19 nt, Homo sapiens
  misc_RNA (1)...(19): siRNA sense strand
aaaggguacucaagaauua

SEQ ID NO: 25990 - RNA, 19 nt, Homo sapiens
  misc_RNA (1)...(19): siRNA sense strand
gaaggcagcuaugaaugua

SEQ ID NO: 25991 - RNA, 19 nt, Homo sapiens
  misc_RNA (1)...(19): siRNA sense strand
gaaagccugugaagauauu

SEQ ID NO: 25992 - RNA, 19 nt, Homo sapiens
  misc_RNA (1)...(19): siRNA sense strand
cgaaugagcuacuguuaug

SEQ ID NO: 25993 - RNA, 19 nt, Homo sapiens
  misc_RNA (1)...(19): siRNA sense strand
gaaauacuccuggaaguuu

SEQ ID NO: 25994 - RNA, 19 nt, Homo sapiens
  misc_RNA (1)...(19): siRNA sense strand
ucacaacaaugacuguaua

SEQ ID NO: 25995 - RNA, 19 nt, Homo sapiens
  misc_RNA (1)...(19): siRNA sense strand
gggaaagccugugaagaua

SEQ ID NO: 25996 - RNA, 19 nt, Homo sapiens
  misc_RNA (1)...(19): siRNA sense strand
uaacaagguucgaauccua

SEQ ID NO: 25997 - RNA, 19 nt, Homo sapiens
  misc_RNA (1)...(19): siRNA sense strand
gaacacauccgaguacaaa

SEQ ID NO: 25998 - RNA, 19 nt, Homo sapiens
  misc_RNA (1)...(19): siRNA sense strand
ggagaaggcuguguagaug

SEQ ID NO: 25999 - RNA, 19 nt, Homo sapiens
  misc_RNA (1)...(19): siRNA sense strand
caaugaaugucuucuagaa

SEQ ID NO: 26000 - RNA, 19 nt, Homo sapiens
  misc_RNA (1)...(19): siRNA sense strand
gaaccaguguguugaugaa

SEQ ID NO: 26001 - RNA, 19 nt, Homo sapiens
  misc_RNA (1)...(19): siRNA sense strand
gacagaggaucauaucauu

SEQ ID NO: 26002 - RNA, 19 nt, Homo sapiens
  misc_RNA (1)...(19): siRNA sense strand
gaauguguaucaaugaaga

SEQ ID NO: 26003 - RNA, 19 nt, Homo sapiens
  misc_RNA (1)...(19): siRNA sense strand
gcaaugaucguaaugaaug

SEQ ID NO: 26004 - RNA, 19 nt, Homo sapiens
  misc_RNA (1)...(19): siRNA sense strand
cgaguuggcuguguugaua

SEQ ID NO: 26005 - RNA, 19 nt, Homo sapiens
  misc_RNA (1)...(19): siRNA sense strand
gguaaaggguacucaagaa

SEQ ID NO: 26006 - RNA, 19 nt, Homo sapiens
  misc_RNA (1)...(19): siRNA sense strand
gggaaugaauguguagaua

SEQ ID NO: 26007 - RNA, 19 nt, Homo sapiens
  misc_RNA (1)...(19): siRNA sense strand
ccagugggauucuucuaua

SEQ ID NO: 26008 - RNA, 19 nt, Homo sapiens
  misc_RNA (1)...(19): siRNA sense strand
gugaagauauugaugaaug

SEQ ID NO: 26009 - RNA, 19 nt, Homo sapiens
  misc_RNA (1)...(19): siRNA sense strand
guauagauguugaugaaug

SEQ ID NO: 26010 - RNA, 19 nt, Homo sapiens
  misc_RNA (1)...(19): siRNA sense strand
gcuacuaccugaaugaaga

SEQ ID NO: 26011 - RNA, 19 nt, Homo sapiens
  misc_RNA (1)...(19): siRNA sense strand
uuacaacucugacgaauca

SEQ ID NO: 26012 - RNA, 19 nt, Homo sapiens
  misc_RNA (1)...(19): siRNA sense strand
caaacacagucagcaguua

SEQ ID NO: 26013 - RNA, 19 nt, Homo sapiens
  misc_RNA (1)...(19): siRNA sense strand
gaacuuaaccaacuagaag

SEQ ID NO: 26014 - RNA, 19 nt, Homo sapiens
  misc_RNA (1)...(19): siRNA sense strand
ugacacaguuggaagcuuu

SEQ ID NO: 26015 - RNA, 19 nt, Homo sapiens
  misc_RNA (1)...(19): siRNA sense strand
ggccggaucugcaauaaug

SEQ ID NO: 26016 - RNA, 19 nt, Homo sapiens
  misc_RNA (1)...(19): siRNA sense strand
auacaacacugcaauauuc

SEQ ID NO: 26017 - RNA, 19 nt, Homo sapiens
  misc_RNA (1)...(19): siRNA sense strand
gaaccucauuggcacauau

SEQ ID NO: 26018 - RNA, 19 nt, Homo sapiens
  misc_RNA (1)...(19): siRNA sense strand
caauacagaugguuccuau

SEQ ID NO: 26019 - RNA, 19 nt, Homo sapiens
  misc_RNA (1)...(19): siRNA sense strand
gaaauuggaguugguguuu

SEQ ID NO: 26020 - RNA, 19 nt, Homo sapiens
  misc_RNA (1)...(19): siRNA sense strand
cuacaaaccugaucuaaaa

SEQ ID NO: 26021 - RNA, 19 nt, Homo sapiens
  misc_RNA (1)...(19): siRNA sense strand
gugaagauauggaugaaug

SEQ ID NO: 26022 - RNA, 19 nt, Homo sapiens
  misc_RNA (1)...(19): siRNA sense strand
ggagaucgcccugggauuu

SEQ ID NO: 26023 - RNA, 19 nt, Homo sapiens
  misc_RNA (1)...(19): siRNA sense strand
ugacgaaucacaacagaua

SEQ ID NO: 26024 - RNA, 19 nt, Homo sapiens
  misc_RNA (1)...(19): siRNA sense strand
gggaggaccuguguggaua

SEQ ID NO: 26025 - RNA, 19 nt, Homo sapiens
  misc_RNA (1)...(19): siRNA sense strand
cgacauuuauaccgguuua

SEQ ID NO: 26026 - RNA, 19 nt, Homo sapiens
  misc_RNA (1)...(19): siRNA sense strand
gaacaugugccuuaaugga

SEQ ID NO: 26027 - RNA, 19 nt, Homo sapiens
  misc_RNA (1)...(19): siRNA sense strand
gggaggaaauugcauuaau

SEQ ID NO: 26028 - RNA, 19 nt, Homo sapiens
  misc_RNA (1)...(19): siRNA sense strand
gccaagacaucaaugaaug

SEQ ID NO: 26029 - RNA, 19 nt, Homo sapiens
  misc_RNA (1)...(19): siRNA sense strand
gaagggaguuaccaguguu

SEQ ID NO: 26030 - RNA, 19 nt, Homo sapiens
  misc_RNA (1)...(19): siRNA sense strand
caagggauuuaucuacaaa

SEQ ID NO: 26031 - RNA, 19 nt, Homo sapiens
  misc_RNA (1)...(19): siRNA sense strand
gaucauaucauugcauuug

SEQ ID NO: 26032 - RNA, 19 nt, Homo sapiens
  misc_RNA (1)...(19): siRNA sense strand
caaagaacccgaugucugu

SEQ ID NO: 26033 - RNA, 19 nt, Homo sapiens
  misc_RNA (1)...(19): siRNA sense strand
ugagaagugugaagauauu

SEQ ID NO: 26034 - RNA, 19 nt, Homo sapiens
  misc_RNA (1)...(19): siRNA sense strand
aaugcgggcuuucauguua

SEQ ID NO: 26035 - RNA, 19 nt, Homo sapiens
  misc_RNA (1)...(19): siRNA sense strand
agaaagaacuuaaccaacu

SEQ ID NO: 26036 - RNA, 19 nt, Homo sapiens
  misc_RNA (1)...(19): siRNA sense strand
cguaaugaaugucaagaaa

SEQ ID NO: 26037 - RNA, 19 nt, Homo sapiens
  misc_RNA (1)...(19): siRNA sense strand
ggaaauugcauuaauacug

SEQ ID NO: 26038 - RNA, 19 nt, Homo sapiens
  misc_RNA (1)...(19): siRNA sense strand
agacagccaucuuugcuuu

SEQ ID NO: 26039 - RNA, 19 nt, Homo sapiens
  misc_RNA (1)...(19): siRNA sense strand
ggaaauggaaccugcaaga

SEQ ID NO: 26040 - RNA, 19 nt, Homo sapiens
  misc_RNA (1)...(19): siRNA sense strand
gaccugugauggagaauug

SEQ ID NO: 26041 - RNA, 19 nt, Homo sapiens
  misc_RNA (1)...(19): siRNA sense strand
ugaacagucuccuuuguga

SEQ ID NO: 26042 - RNA, 19 nt, Homo sapiens
  misc_RNA (1)...(19): siRNA sense strand
guauugauguugaugaaug

SEQ ID NO: 26043 - RNA, 19 nt, Homo sapiens
  misc_RNA (1)...(19): siRNA sense strand
caagggugcugccaguaaa

SEQ ID NO: 26044 - RNA, 19 nt, Homo sapiens
  misc_RNA (1)...(19): siRNA sense strand
agacauugaugaguguuua

SEQ ID NO: 26045 - RNA, 19 nt, Homo sapiens
  misc_RNA (1)...(19): siRNA sense strand
gaaugaauguguagauacu

SEQ ID NO: 26046 - RNA, 19 nt, Homo sapiens
  misc_RNA (1)...(19): siRNA sense strand
gcgagugucccuuugguua

SEQ ID NO: 26047 - RNA, 19 nt, Homo sapiens
  misc_RNA (1)...(19): siRNA sense strand
caacacagauggcaguuuu

SEQ ID NO: 26048 - RNA, 19 nt, Homo sapiens
  misc_RNA (1)...(19): siRNA sense strand
ccaaguugaucccauaugu

SEQ ID NO: 26049 - RNA, 19 nt, Homo sapiens
  misc_RNA (1)...(19): siRNA sense strand
gcacuguguuucuggaaug

SEQ ID NO: 26050 - RNA, 19 nt, Homo sapiens
  misc_RNA (1)...(19): siRNA sense strand
gcaagguuauucacgaugu

SEQ ID NO: 26051 - RNA, 19 nt, Homo sapiens
  misc_RNA (1)...(19): siRNA sense strand
gagugucccuuugguuaua

SEQ ID NO: 26052 - RNA, 19 nt, Homo sapiens
  misc_RNA (1)...(19): siRNA sense strand
gaacuugccggaacacaau

SEQ ID NO: 26053 - RNA, 19 nt, Homo sapiens
  misc_RNA (1)...(19): siRNA sense strand
gauacagccugcagcaaug

SEQ ID NO: 26054 - RNA, 19 nt, Homo sapiens
  misc_RNA (1)...(19): siRNA sense strand
gauacccgcucuggaaauu

SEQ ID NO: 26055 - RNA, 19 nt, Homo sapiens
  misc_RNA (1)...(19): siRNA sense strand
agaauaccaugggaucuua

SEQ ID NO: 26056 - RNA, 19 nt, Homo sapiens
  misc_RNA (1)...(19): siRNA sense strand
caugaagacuuguguagau

SEQ ID NO: 26057 - RNA, 19 nt, Homo sapiens
  misc_RNA (1)...(19): siRNA sense strand
gugaagauauagaugaaug

SEQ ID NO: 26058 - RNA, 19 nt, Homo sapiens
  misc_RNA (1)...(19): siRNA sense strand
ccaaauggaaucugugaaa

SEQ ID NO: 26059 - RNA, 19 nt, Homo sapiens
  misc_RNA (1)...(19): siRNA sense strand
caccauacguccugcauug

SEQ ID NO: 26060 - RNA, 19 nt, Homo sapiens
  misc_RNA (1)...(19): siRNA sense strand
cauggacagugcaucaaua

SEQ ID NO: 26061 - RNA, 19 nt, Homo sapiens
  misc_RNA (1)...(19): siRNA sense strand
gugaugaugugaaugaaug

SEQ ID NO: 26062 - RNA, 19 nt, Homo sapiens
  misc_RNA (1)...(19): siRNA sense strand
gggaguguauugauguuga

SEQ ID NO: 26063 - RNA, 19 nt, Homo sapiens
  misc_RNA (1)...(19): siRNA sense strand
aaacugaugccuccaauau

SEQ ID NO: 26064 - RNA, 19 nt, Homo sapiens
  misc_RNA (1)...(19): siRNA sense strand
gaaugcaccucugacauca

SEQ ID NO: 26065 - RNA, 19 nt, Homo sapiens
  misc_RNA (1)...(19): siRNA sense strand
aaucaugguuucauccuuu

SEQ ID NO: 26066 - RNA, 19 nt, Homo sapiens
  misc_RNA (1)...(19): siRNA sense strand
gauaugagaagaaguuugu

SEQ ID NO: 26067 - RNA, 19 nt, Homo sapiens
  misc_RNA (1)...(19): siRNA sense strand
gcuuugcucuugauucuga

SEQ ID NO: 26068 - RNA, 19 nt, Homo sapiens
  misc_RNA (1)...(19): siRNA sense strand
gaaauggaaccugcaagaa

SEQ ID NO: 26069 - RNA, 19 nt, Homo sapiens
  misc_RNA (1)...(19): siRNA sense strand
caacagauacuugaucgaa

SEQ ID NO: 26070 - RNA, 19 nt, Homo sapiens
  misc_RNA (1)...(19): siRNA sense strand
ggacuguggcuuucaagaa

SEQ ID NO: 26071 - RNA, 19 nt, Homo sapiens
  misc_RNA (1)...(19): siRNA sense strand
ucacagaggugcuacaaaa

SEQ ID NO: 26072 - RNA, 19 nt, Homo sapiens
  misc_RNA (1)...(19): siRNA sense strand
gggaagaacucaaaggaaa

SEQ ID NO: 26073 - RNA, 19 nt, Homo sapiens
  misc_RNA (1)...(19): siRNA sense strand
uaaagcagguuauccauuc

SEQ ID NO: 26074 - RNA, 19 nt, Homo sapiens
  misc_RNA (1)...(19): siRNA sense strand
ucuggaauguugucaauua

SEQ ID NO: 26075 - RNA, 19 nt, Homo sapiens
  misc_RNA (1)...(19): siRNA sense strand
ggaaauaucuccccaggaa

SEQ ID NO: 26076 - RNA, 19 nt, Homo sapiens
  misc_RNA (1)...(19): siRNA sense strand
aagaagagcuuggccuaua

SEQ ID NO: 26077 - RNA, 19 nt, Homo sapiens
  misc_RNA (1)...(19): siRNA sense strand
gcuaugauaugccuuuguu

SEQ ID NO: 26078 - RNA, 19 nt, Homo sapiens
  misc_RNA (1)...(19): siRNA sense strand
ggaauuaccauccugauca

SEQ ID NO: 26079 - RNA, 19 nt, Homo sapiens
  misc_RNA (1)...(19): siRNA sense strand
gcucuguacuugauauuuc

SEQ ID NO: 26080 - RNA, 19 nt, Homo sapiens
  misc_RNA (1)...(19): siRNA sense strand
cagaggaucguguuuauga

SEQ ID NO: 26081 - RNA, 19 nt, Homo sapiens
  misc_RNA (1)...(19): siRNA sense strand
aaggagaaaugcaacauau

SEQ ID NO: 26082 - RNA, 19 nt, Homo sapiens
  misc_RNA (1)...(19): siRNA sense strand
gaggaagccugggagcaaa

SEQ ID NO: 26083 - RNA, 19 nt, Homo sapiens
  misc_RNA (1)...(19): siRNA sense strand
gaaaguaauaggagagcaa

SEQ ID NO: 26084 - RNA, 19 nt, Homo sapiens
  misc_RNA (1)...(19): siRNA sense strand
aaacaagguuccagaggau

SEQ ID NO: 26085 - RNA, 19 nt, Homo sapiens
  misc_RNA (1)...(19): siRNA sense strand
ggagaaaugcaacauaucu

SEQ ID NO: 26086 - RNA, 19 nt, Homo sapiens
  misc_RNA (1)...(19): siRNA sense strand
gaauuaccauccugaucau

SEQ ID NO: 26087 - RNA, 19 nt, Homo sapiens
  misc_RNA (1)...(19): siRNA sense strand
gagaccaagugcuuuaugg

SEQ ID NO: 26088 - RNA, 19 nt, Homo sapiens
  misc_RNA (1)...(19): siRNA sense strand
cacaaauucugacugcuau

SEQ ID NO: 26089 - RNA, 19 nt, Homo sapiens
  misc_RNA (1)...(19): siRNA sense strand
agaagagcuuggccuauau

SEQ ID NO: 26090 - RNA, 19 nt, Homo sapiens
  misc_RNA (1)...(19): siRNA sense strand
gaacgggaauuaccauccu

SEQ ID NO: 26091 - RNA, 19 nt, Homo sapiens
  misc_RNA (1)...(19): siRNA sense strand
cuugauauuucacacauug

SEQ ID NO: 26092 - RNA, 19 nt, Homo sapiens
  misc_RNA (1)...(19): siRNA sense strand
ggaucguguuuaugaagaa

SEQ ID NO: 26093 - RNA, 19 nt, Homo sapiens
  misc_RNA (1)...(19): siRNA sense strand
acacaaauucugacugcua

SEQ ID NO: 26094 - RNA, 19 nt, Homo sapiens
  misc_RNA (1)...(19): siRNA sense strand
cauccacaguugccagaaa

SEQ ID NO: 26095 - RNA, 19 nt, Homo sapiens
  misc_RNA (1)...(19): siRNA sense strand
gaagaagagcuuggccuau

SEQ ID NO: 26096 - RNA, 19 nt, Homo sapiens
  misc_RNA (1)...(19): siRNA sense strand
auacauggcugacaguuuu

SEQ ID NO: 26097 - RNA, 19 nt, Homo sapiens
  misc_RNA (1)...(19): siRNA sense strand
gaagaacucaaaggaaaca

SEQ ID NO: 26098 - RNA, 19 nt, Homo sapiens
  misc_RNA (1)...(19): siRNA sense strand
aauucugacugcuaugaua

SEQ ID NO: 26099 - RNA, 19 nt, Homo sapiens
  misc_RNA (1)...(19): siRNA sense strand
caaauucugacugcuauga

SEQ ID NO: 26100 - RNA, 19 nt, Homo sapiens
  misc_RNA (1)...(19): siRNA sense strand
gaaaggagaaaugcaacau

SEQ ID NO: 26101 - RNA, 19 nt, Homo sapiens
  misc_RNA (1)...(19): siRNA sense strand
ccacaguugccagaaauuu

SEQ ID NO: 26102 - RNA, 19 nt, Homo sapiens
  misc_RNA (1)...(19): siRNA sense strand
ccagugugccugcauuuga

SEQ ID NO: 26103 - RNA, 19 nt, Homo sapiens
  misc_RNA (1)...(19): siRNA sense strand
aaaggagaaaugcaacaua

SEQ ID NO: 26104 - RNA, 19 nt, Homo sapiens
  misc_RNA (1)...(19): siRNA sense strand
cagugugccugcauuugaa

SEQ ID NO: 26105 - RNA, 19 nt, Homo sapiens
  misc_RNA (1)...(19): siRNA sense strand
aauaggagagcaaaucuug

SEQ ID NO: 26106 - RNA, 19 nt, Homo sapiens
  misc_RNA (1)...(19): siRNA sense strand
cacaggagccuuccagugu

SEQ ID NO: 26107 - RNA, 19 nt, Homo sapiens
  misc_RNA (1)...(19): siRNA sense strand
gaugcuguuucucaccauu

SEQ ID NO: 26108 - RNA, 19 nt, Homo sapiens
  misc_RNA (1)...(19): siRNA sense strand
ggacacagaaaguaauagg

SEQ ID NO: 26109 - RNA, 19 nt, Homo sapiens
  misc_RNA (1)...(19): siRNA sense strand
ucaucaaccugaagaagag

SEQ ID NO: 26110 - RNA, 19 nt, Homo sapiens
  misc_RNA (1)...(19): siRNA sense strand
uccagaggaucguguuuau

SEQ ID NO: 26111 - RNA, 19 nt, Homo sapiens
  misc_RNA (1)...(19): siRNA sense strand
gugaugaugcuguuucuca

SEQ ID NO: 26112 - RNA, 19 nt, Homo sapiens
  misc_RNA (1)...(19): siRNA sense strand
gaagagcuuggccuauauc

SEQ ID NO: 26113 - RNA, 19 nt, Homo sapiens
  misc_RNA (1)...(19): siRNA sense strand
ugucugcucuguacuugau

SEQ ID NO: 26114 - RNA, 19 nt, Homo sapiens
  misc_RNA (1)...(19): siRNA sense strand
gcauuugaagucuuggaaa

SEQ ID NO: 26115 - RNA, 19 nt, Homo sapiens
  misc_RNA (1)...(19): siRNA sense strand
gaucguguuuaugaagaau

SEQ ID NO: 26116 - RNA, 19 nt, Homo sapiens
  misc_RNA (1)...(19): siRNA sense strand
guaauaggagagcaaaucu

SEQ ID NO: 26117 - RNA, 19 nt, Homo sapiens
  misc_RNA (1)...(19): siRNA sense strand
caucauuuaaagcagguua

SEQ ID NO: 26118 - RNA, 19 nt, Homo sapiens
  misc_RNA (1)...(19): siRNA sense strand
gagaaaugcaacauaucug

SEQ ID NO: 26119 - RNA, 19 nt, Homo sapiens
  misc_RNA (1)...(19): siRNA sense strand
cauacauggcugacaguuu

SEQ ID NO: 26120 - RNA, 19 nt, Homo sapiens
  misc_RNA (1)...(19): siRNA sense strand
guagugaugaugcuguuuc

SEQ ID NO: 26121 - RNA, 19 nt, Homo sapiens
  misc_RNA (1)...(19): siRNA sense strand
acacauugagggagacauu

SEQ ID NO: 26122 - RNA, 19 nt, Homo sapiens
  misc_RNA (1)...(19): siRNA sense strand
gaucaucaaccugaagaag

SEQ ID NO: 26123 - RNA, 19 nt, Homo sapiens
  misc_RNA (1)...(19): siRNA sense strand
cuccucccauugauuuaua

SEQ ID NO: 26124 - RNA, 19 nt, Homo sapiens
  misc_RNA (1)...(19): siRNA sense strand
ugucuccucccauugauuu

SEQ ID NO: 26125 - RNA, 19 nt, Homo sapiens
  misc_RNA (1)...(19): siRNA sense strand
agaggaucguguuuaugaa

SEQ ID NO: 26126 - RNA, 19 nt, Homo sapiens
  misc_RNA (1)...(19): siRNA sense strand
ggaagaacucaaaggaaac

SEQ ID NO: 26127 - RNA, 19 nt, Homo sapiens
  misc_RNA (1)...(19): siRNA sense strand
uuaaagcagguuauccauu

SEQ ID NO: 26128 - RNA, 19 nt, Homo sapiens
  misc_RNA (1)...(19): siRNA sense strand
gaggaucguguuuaugaag

SEQ ID NO: 26129 - RNA, 19 nt, Homo sapiens
  misc_RNA (1)...(19): siRNA sense strand
cuggaauguugucaauuau

SEQ ID NO: 26130 - RNA, 19 nt, Homo sapiens
  misc_RNA (1)...(19): siRNA sense strand
uuugagaccaagugcuuua

SEQ ID NO: 26131 - RNA, 19 nt, Homo sapiens
  misc_RNA (1)...(19): siRNA sense strand
guugucugcucuguacuug

SEQ ID NO: 26132 - RNA, 19 nt, Homo sapiens
  misc_RNA (1)...(19): siRNA sense strand
cuacuuacagugaguugga

SEQ ID NO: 26133 - RNA, 19 nt, Homo sapiens
  misc_RNA (1)...(19): siRNA sense strand
uuucuggaauguugucaau

SEQ ID NO: 26134 - RNA, 19 nt, Homo sapiens
  misc_RNA (1)...(19): siRNA sense strand
ucaggcagacuauugaagu

SEQ ID NO: 26135 - RNA, 19 nt, Homo sapiens
  misc_RNA (1)...(19): siRNA sense strand
gggaauuaccauccugauc

SEQ ID NO: 26136 - RNA, 19 nt, Homo sapiens
  misc_RNA (1)...(19): siRNA sense strand
guacuugauauuucacaca

SEQ ID NO: 26137 - RNA, 19 nt, Homo sapiens
  misc_RNA (1)...(19): siRNA sense strand
gccugcauuugaagucuug

SEQ ID NO: 26138 - RNA, 19 nt, Homo sapiens
  misc_RNA (1)...(19): siRNA sense strand
auauucagcuacuuacagu

SEQ ID NO: 26139 - RNA, 19 nt, Homo sapiens
  misc_RNA (1)...(19): siRNA sense strand
ggacuugguagugcugugu

SEQ ID NO: 26140 - RNA, 19 nt, Homo sapiens
  misc_RNA (1)...(19): siRNA sense strand
gauaugccuuuguuuugga

SEQ ID NO: 26141 - RNA, 19 nt, Homo sapiens
  misc_RNA (1)...(19): siRNA sense strand
aggaucguguuuaugaaga

SEQ ID NO: 26142 - RNA, 19 nt, Homo sapiens
  misc_RNA (1)...(19): siRNA sense strand
aaaguaauaggagagcaaa

SEQ ID NO: 26143 - RNA, 19 nt, Homo sapiens
  misc_RNA (1)...(19): siRNA sense strand
ucugaaaggagaaaugcaa

SEQ ID NO: 26144 - RNA, 19 nt, Homo sapiens
  misc_RNA (1)...(19): siRNA sense strand
gacacagaaaguaauagga

SEQ ID NO: 26145 - RNA, 19 nt, Homo sapiens
  misc_RNA (1)...(19): siRNA sense strand
gcauacauggcugacaguu

SEQ ID NO: 26146 - RNA, 19 nt, Homo sapiens
  misc_RNA (1)...(19): siRNA sense strand
uaauaggagagcaaaucuu

SEQ ID NO: 26147 - RNA, 19 nt, Homo sapiens
  misc_RNA (1)...(19): siRNA sense strand
acucaaaggaaacaagguu

SEQ ID NO: 26148 - RNA, 19 nt, Homo sapiens
  misc_RNA (1)...(19): siRNA sense strand
agaggaagccugggagcaa

SEQ ID NO: 26149 - RNA, 19 nt, Homo sapiens
  misc_RNA (1)...(19): siRNA sense strand
uaaaggaacuggaccauuu

SEQ ID NO: 26150 - RNA, 19 nt, Homo sapiens
  misc_RNA (1)...(19): siRNA sense strand
ggagagagauggccuagaa

SEQ ID NO: 26151 - RNA, 19 nt, Homo sapiens
  misc_RNA (1)...(19): siRNA sense strand
gaaauccauuguucucuaa

SEQ ID NO: 26152 - RNA, 19 nt, Homo sapiens
  misc_RNA (1)...(19): siRNA sense strand
ggaaauccauuguucucua

SEQ ID NO: 26153 - RNA, 19 nt, Homo sapiens
  misc_RNA (1)...(19): siRNA sense strand
agaauaagcuggcaccauu

SEQ ID NO: 26154 - RNA, 19 nt, Homo sapiens
  misc_RNA (1)...(19): siRNA sense strand
caacagaggcgacccauau

SEQ ID NO: 26155 - RNA, 19 nt, Homo sapiens
  misc_RNA (1)...(19): siRNA sense strand
gccgaaaacuggaauauua

SEQ ID NO: 26156 - RNA, 19 nt, Homo sapiens
  misc_RNA (1)...(19): siRNA sense strand
gaagcgagguggucauucu

SEQ ID NO: 26157 - RNA, 19 nt, Homo sapiens
  misc_RNA (1)...(19): siRNA sense strand
caaacgagcuguguuccaa

SEQ ID NO: 26158 - RNA, 19 nt, Homo sapiens
  misc_RNA (1)...(19): siRNA sense strand
guacguccauccuuuaaca

SEQ ID NO: 26159 - RNA, 19 nt, Homo sapiens
  misc_RNA (1)...(19): siRNA sense strand
ggacggaagcccacgauga

SEQ ID NO: 26160 - RNA, 19 nt, Homo sapiens
  misc_RNA (1)...(19): siRNA sense strand
guucacgacuuccuucuga

SEQ ID NO: 26161 - RNA, 19 nt, Homo sapiens
  misc_RNA (1)...(19): siRNA sense strand
gagacuaaauccuucuuca

SEQ ID NO: 26162 - RNA, 19 nt, Homo sapiens
  misc_RNA (1)...(19): siRNA sense strand
cgaguacucucaaguuuua

SEQ ID NO: 26163 - RNA, 19 nt, Homo sapiens
  misc_RNA (1)...(19): siRNA sense strand
ugaagcugcuggaugaauu

SEQ ID NO: 26164 - RNA, 19 nt, Homo sapiens
  misc_RNA (1)...(19): siRNA sense strand
gcagggagacuaaauccuu

SEQ ID NO: 26165 - RNA, 19 nt, Homo sapiens
  misc_RNA (1)...(19): siRNA sense strand
caaggaguguggaguugaa

SEQ ID NO: 26166 - RNA, 19 nt, Homo sapiens
  misc_RNA (1)...(19): siRNA sense strand
cagaucauauucuaaagga

SEQ ID NO: 26167 - RNA, 19 nt, Homo sapiens
  misc_RNA (1)...(19): siRNA sense strand
uaacagaagaagcaauuga

SEQ ID NO: 26168 - RNA, 19 nt, Homo sapiens
  misc_RNA (1)...(19): siRNA sense strand
gaagagauggagagagaug

SEQ ID NO: 26169 - RNA, 19 nt, Homo sapiens
  misc_RNA (1)...(19): siRNA sense strand
uugaagagauggagagaga

SEQ ID NO: 26170 - RNA, 19 nt, Homo sapiens
  misc_RNA (1)...(19): siRNA sense strand
ggaccaagaccucaugaca

SEQ ID NO: 26171 - RNA, 19 nt, Homo sapiens
  misc_RNA (1)...(19): siRNA sense strand
gagcaguaccgcaggauug

SEQ ID NO: 26172 - RNA, 19 nt, Homo sapiens
  misc_RNA (1)...(19): siRNA sense strand
uggaaaggcuggaguacug

SEQ ID NO: 26173 - RNA, 19 nt, Homo sapiens
  misc_RNA (1)...(19): siRNA sense strand
gagcugagucucuuaaugg

SEQ ID NO: 26174 - RNA, 19 nt, Homo sapiens
  misc_RNA (1)...(19): siRNA sense strand
uggugaagcugcuggauga

SEQ ID NO: 26175 - RNA, 19 nt, Homo sapiens
  misc_RNA (1)...(19): siRNA sense strand
ggacaucgaguacucucaa

SEQ ID NO: 26176 - RNA, 19 nt, Homo sapiens
  misc_RNA (1)...(19): siRNA sense strand
uguaugagcuggacaucga

SEQ ID NO: 26177 - RNA, 19 nt, Homo sapiens
  misc_RNA (1)...(19): siRNA sense strand
cgauagcauuuaccaguga

SEQ ID NO: 26178 - RNA, 19 nt, Homo sapiens
  misc_RNA (1)...(19): siRNA sense strand
gacggaagcccacgaugaa

SEQ ID NO: 26179 - RNA, 19 nt, Homo sapiens
  misc_RNA (1)...(19): siRNA sense strand
caacacagccccucacaaa

SEQ ID NO: 26180 - RNA, 19 nt, Homo sapiens
  misc_RNA (1)...(19): siRNA sense strand
ucaugacacuuccuauuca

SEQ ID NO: 26181 - RNA, 19 nt, Homo sapiens
  misc_RNA (1)...(19): siRNA sense strand
gcauuuaccagugaccaua

SEQ ID NO: 26182 - RNA, 19 nt, Homo sapiens
  misc_RNA (1)...(19): siRNA sense strand
cagauacuauaaucaagug

SEQ ID NO: 26183 - RNA, 19 nt, Homo sapiens
  misc_RNA (1)...(19): siRNA sense strand
cugagucucuuaauggaaa

SEQ ID NO: 26184 - RNA, 19 nt, Homo sapiens
  misc_RNA (1)...(19): siRNA sense strand
gggaggcccugaaacucuu

SEQ ID NO: 26185 - RNA, 19 nt, Homo sapiens
  misc_RNA (1)...(19): siRNA sense strand
gaagaagcaauugaagaga

SEQ ID NO: 26186 - RNA, 19 nt, Homo sapiens
  misc_RNA (1)...(19): siRNA sense strand
ucacacaguauccacagua

SEQ ID NO: 26187 - RNA, 19 nt, Homo sapiens
  misc_RNA (1)...(19): siRNA sense strand
cagaagaagcaauugaaga

SEQ ID NO: 26188 - RNA, 19 nt, Homo sapiens
  misc_RNA (1)...(19): siRNA sense strand
aagaagcaauugaagagau

SEQ ID NO: 26189 - RNA, 19 nt, Homo sapiens
  misc_RNA (1)...(19): siRNA sense strand
gguaagcgccacuguccaa

SEQ ID NO: 26190 - RNA, 19 nt, Homo sapiens
  misc_RNA (1)...(19): siRNA sense strand
gcgagguggucauucuguu

SEQ ID NO: 26191 - RNA, 19 nt, Homo sapiens
  misc_RNA (1)...(19): siRNA sense strand
gagaagcgagguggucauu

SEQ ID NO: 26192 - RNA, 19 nt, Homo sapiens
  misc_RNA (1)...(19): siRNA sense strand
agaagcaauugaagagaug

SEQ ID NO: 26193 - RNA, 19 nt, Homo sapiens
  misc_RNA (1)...(19): siRNA sense strand
ucaaacagacgaaucuauc

SEQ ID NO: 26194 - RNA, 19 nt, Homo sapiens
  misc_RNA (1)...(19): siRNA sense strand
caaacagacgaaucuauca

SEQ ID NO: 26195 - RNA, 19 nt, Homo sapiens
  misc_RNA (1)...(19): siRNA sense strand
gaagcugcuggaugaauug

SEQ ID NO: 26196 - RNA, 19 nt, Homo sapiens
  misc_RNA (1)...(19): siRNA sense strand
gccaaggaguguggaguug

SEQ ID NO: 26197 - RNA, 19 nt, Homo sapiens
  misc_RNA (1)...(19): siRNA sense strand
caaguucaaccgcagaaga

SEQ ID NO: 26198 - RNA, 19 nt, Homo sapiens
  misc_RNA (1)...(19): siRNA sense strand
caagaccucaugacacuuc

SEQ ID NO: 26199 - RNA, 19 nt, Homo sapiens
  misc_RNA (1)...(19): siRNA sense strand
gcuauugcuuucacacagu

SEQ ID NO: 26200 - RNA, 19 nt, Homo sapiens
  misc_RNA (1)...(19): siRNA sense strand
gagagggcauggugaagcu

SEQ ID NO: 26201 - RNA, 19 nt, Homo sapiens
  misc_RNA (1)...(19): siRNA sense strand
caucgaguacucucaaguu

SEQ ID NO: 26202 - RNA, 19 nt, Homo sapiens
  misc_RNA (1)...(19): siRNA sense strand
ggaagcccacgaugaagug

SEQ ID NO: 26203 - RNA, 19 nt, Homo sapiens
  misc_RNA (1)...(19): siRNA sense strand
caccacaggcagcagcuua

SEQ ID NO: 26204 - RNA, 19 nt, Homo sapiens
  misc_RNA (1)...(19): siRNA sense strand
acacagccccucacaaaua

SEQ ID NO: 26205 - RNA, 19 nt, Homo sapiens
  misc_RNA (1)...(19): siRNA sense strand
cuauugcuuucacacagua

SEQ ID NO: 26206 - RNA, 19 nt, Homo sapiens
  misc_RNA (1)...(19): siRNA sense strand
auucacacauccagucaaa

SEQ ID NO: 26207 - RNA, 19 nt, Homo sapiens
  misc_RNA (1)...(19): siRNA sense strand
ugacacuuccuauucagaa

SEQ ID NO: 26208 - RNA, 19 nt, Homo sapiens
  misc_RNA (1)...(19): siRNA sense strand
cuagaaagggcuauugcuu

SEQ ID NO: 26209 - RNA, 19 nt, Homo sapiens
  misc_RNA (1)...(19): siRNA sense strand
aaacagacgaaucuaucaa

SEQ ID NO: 26210 - RNA, 19 nt, Homo sapiens
  misc_RNA (1)...(19): siRNA sense strand
gugcuuugcagaucauauu

SEQ ID NO: 26211 - RNA, 19 nt, Homo sapiens
  misc_RNA (1)...(19): siRNA sense strand
gccauuuacagauacuaua

SEQ ID NO: 26212 - RNA, 19 nt, Homo sapiens
  misc_RNA (1)...(19): siRNA sense strand
acaggcagcagcuuaaaug

SEQ ID NO: 26213 - RNA, 19 nt, Homo sapiens
  misc_RNA (1)...(19): siRNA sense strand
gagagagauggccuagaaa

SEQ ID NO: 26214 - RNA, 19 nt, Homo sapiens
  misc_RNA (1)...(19): siRNA sense strand
cugaaacucuuggagaugu

SEQ ID NO: 26215 - RNA, 19 nt, Homo sapiens
  misc_RNA (1)...(19): siRNA sense strand
cgagguggucauucuguuu

SEQ ID NO: 26216 - RNA, 19 nt, Homo sapiens
  misc_RNA (1)...(19): siRNA sense strand
ccucaugacacuuccuauu

SEQ ID NO: 26217 - RNA, 19 nt, Homo sapiens
  misc_RNA (1)...(19): siRNA sense strand
aaacaugggaggcccugaa

SEQ ID NO: 26218 - RNA, 19 nt, Homo sapiens
  misc_RNA (1)...(19): siRNA sense strand
ugaaacucuuggagauguu

SEQ ID NO: 26219 - RNA, 19 nt, Homo sapiens
  misc_RNA (1)...(19): siRNA sense strand
agaagaagcaauugaagag

SEQ ID NO: 26220 - RNA, 19 nt, Homo sapiens
  misc_RNA (1)...(19): siRNA sense strand
cguccauccuuuaacagaa

SEQ ID NO: 26221 - RNA, 19 nt, Homo sapiens
  misc_RNA (1)...(19): siRNA sense strand
ccaagauucaagagcagua

SEQ ID NO: 26222 - RNA, 19 nt, Homo sapiens
  misc_RNA (1)...(19): siRNA sense strand
cuuugcagaucauauucua

SEQ ID NO: 26223 - RNA, 19 nt, Homo sapiens
  misc_RNA (1)...(19): siRNA sense strand
gcagaucauauucuaaagg

SEQ ID NO: 26224 - RNA, 19 nt, Homo sapiens
  misc_RNA (1)...(19): siRNA sense strand
acagacgaaucuaucaaag

SEQ ID NO: 26225 - RNA, 19 nt, Homo sapiens
  misc_RNA (1)...(19): siRNA sense strand
cgacugguguggcaaucca

SEQ ID NO: 26226 - RNA, 19 nt, Homo sapiens
  misc_RNA (1)...(19): siRNA sense strand
auauugaaacgcuguauga

SEQ ID NO: 26227 - RNA, 19 nt, Homo sapiens
  misc_RNA (1)...(19): siRNA sense strand
gaccucaugacacuuccua

SEQ ID NO: 26228 - RNA, 19 nt, Homo sapiens
  misc_RNA (1)...(19): siRNA sense strand
ccagugaccauauugaaac

SEQ ID NO: 26229 - RNA, 19 nt, Homo sapiens
  misc_RNA (1)...(19): siRNA sense strand
gagagauggccuagaaagg

SEQ ID NO: 26230 - RNA, 19 nt, Homo sapiens
  misc_RNA (1)...(19): siRNA sense strand
uuggagauguucacgacuu

SEQ ID NO: 26231 - RNA, 19 nt, Homo sapiens
  misc_RNA (1)...(19): siRNA sense strand
ccacaggcagcagcuuaaa

SEQ ID NO: 26232 - RNA, 19 nt, Homo sapiens
  misc_RNA (1)...(19): siRNA sense strand
gcagcuggagggucuguca

SEQ ID NO: 26233 - RNA, 19 nt, Homo sapiens
  misc_RNA (1)...(19): siRNA sense strand
gguuggguccucaaacaga

SEQ ID NO: 26234 - RNA, 19 nt, Homo sapiens
  misc_RNA (1)...(19): siRNA sense strand
accaagaccucaugacacu

SEQ ID NO: 26235 - RNA, 19 nt, Homo sapiens
  misc_RNA (1)...(19): siRNA sense strand
ucauggaaaggcuggagua

SEQ ID NO: 26236 - RNA, 19 nt, Homo sapiens
  misc_RNA (1)...(19): siRNA sense strand
uaagcuggcaccauucauc

SEQ ID NO: 26237 - RNA, 19 nt, Homo sapiens
  misc_RNA (1)...(19): siRNA sense strand
ggagacuaaauccuucuuc

SEQ ID NO: 26238 - RNA, 19 nt, Homo sapiens
  misc_RNA (1)...(19): siRNA sense strand
guccauccuuuaacagaag

SEQ ID NO: 26239 - RNA, 19 nt, Homo sapiens
  misc_RNA (1)...(19): siRNA sense strand
aacagaagaagcaauugaa

SEQ ID NO: 26240 - RNA, 19 nt, Homo sapiens
  misc_RNA (1)...(19): siRNA sense strand
gcauucacacauccaguca

SEQ ID NO: 26241 - RNA, 19 nt, Homo sapiens
  misc_RNA (1)...(19): siRNA sense strand
ccaaggaguguggaguuga

SEQ ID NO: 26242 - RNA, 19 nt, Homo sapiens
  misc_RNA (1)...(19): siRNA sense strand
cugguuggguccucaaaca

SEQ ID NO: 26243 - RNA, 19 nt, Homo sapiens
  misc_RNA (1)...(19): siRNA sense strand
cuaaaggaacuggaccauu

SEQ ID NO: 26244 - RNA, 19 nt, Homo sapiens
  misc_RNA (1)...(19): siRNA sense strand
ucacgacuuccuucugaga

SEQ ID NO: 26245 - RNA, 19 nt, Homo sapiens
  misc_RNA (1)...(19): siRNA sense strand
gcuguccgcucugugucaa

SEQ ID NO: 26246 - RNA, 19 nt, Homo sapiens
  misc_RNA (1)...(19): siRNA sense strand
gaaacucuuggagauguuc

SEQ ID NO: 26247 - RNA, 19 nt, Homo sapiens
  misc_RNA (1)...(19): siRNA sense strand
aucgaguacucucaaguuu

SEQ ID NO: 26248 - RNA, 19 nt, Homo sapiens
  misc_RNA (1)...(19): siRNA sense strand
cacaucaccuccucaucca

SEQ ID NO: 26249 - RNA, 19 nt, Homo sapiens
  misc_RNA (1)...(19): siRNA sense strand
caaagaaguuaccaaagaa

SEQ ID NO: 26250 - RNA, 19 nt, Homo sapiens
  misc_RNA (1)...(19): siRNA sense strand
acaaagaaguuaccaaaga

SEQ ID NO: 26251 - RNA, 19 nt, Homo sapiens
  misc_RNA (1)...(19): siRNA sense strand
gaaaccaguuccagacuug

SEQ ID NO: 26252 - RNA, 19 nt, Homo sapiens
  misc_RNA (1)...(19): siRNA sense strand
gcaaacaauuuacuaguag

SEQ ID NO: 26253 - RNA, 19 nt, Homo sapiens
  misc_RNA (1)...(19): siRNA sense strand
ggcuuuagcucgugaagua

SEQ ID NO: 26254 - RNA, 19 nt, Homo sapiens
  misc_RNA (1)...(19): siRNA sense strand
uuacuucccucuagagaua

SEQ ID NO: 26255 - RNA, 19 nt, Homo sapiens
  misc_RNA (1)...(19): siRNA sense strand
ugaaaggguugauugauga

SEQ ID NO: 26256 - RNA, 19 nt, Homo sapiens
  misc_RNA (1)...(19): siRNA sense strand
gaagaggugucaggaaaug

SEQ ID NO: 26257 - RNA, 19 nt, Homo sapiens
  misc_RNA (1)...(19): siRNA sense strand
gaagugaagccgaucauga

SEQ ID NO: 26258 - RNA, 19 nt, Homo sapiens
  misc_RNA (1)...(19): siRNA sense strand
gccaauaaccgugauaaua

SEQ ID NO: 26259 - RNA, 19 nt, Homo sapiens
  misc_RNA (1)...(19): siRNA sense strand
ggacauugauauuaagauc

SEQ ID NO: 26260 - RNA, 19 nt, Homo sapiens
  misc_RNA (1)...(19): siRNA sense strand
gagcucaguugguugauau

SEQ ID NO: 26261 - RNA, 19 nt, Homo sapiens
  misc_RNA (1)...(19): siRNA sense strand
ggucauugccaaagacuua

SEQ ID NO: 26262 - RNA, 19 nt, Homo sapiens
  misc_RNA (1)...(19): siRNA sense strand
uaacagacaugccgcagau

SEQ ID NO: 26263 - RNA, 19 nt, Homo sapiens
  misc_RNA (1)...(19): siRNA sense strand
gaucaugaaggaacacaua

SEQ ID NO: 26264 - RNA, 19 nt, Homo sapiens
  misc_RNA (1)...(19): siRNA sense strand
caagagaggccaugcuaaa

SEQ ID NO: 26265 - RNA, 19 nt, Homo sapiens
  misc_RNA (1)...(19): siRNA sense strand
ucuggcaucuucacaaaua

SEQ ID NO: 26266 - RNA, 19 nt, Homo sapiens
  misc_RNA (1)...(19): siRNA sense strand
gaugaagacuggaacuaca

SEQ ID NO: 26267 - RNA, 19 nt, Homo sapiens
  misc_RNA (1)...(19): siRNA sense strand
uaggagaguuugucaguga

SEQ ID NO: 26268 - RNA, 19 nt, Homo sapiens
  misc_RNA (1)...(19): siRNA sense strand
agagagaccugguggaaau

SEQ ID NO: 26269 - RNA, 19 nt, Homo sapiens
  misc_RNA (1)...(19): siRNA sense strand
gagguggacauugauauua

SEQ ID NO: 26270 - RNA, 19 nt, Homo sapiens
  misc_RNA (1)...(19): siRNA sense strand
ucacaaagaaguuaccaaa

SEQ ID NO: 26271 - RNA, 19 nt, Homo sapiens
  misc_RNA (1)...(19): siRNA sense strand
ucaguugguugauaugaaa

SEQ ID NO: 26272 - RNA, 19 nt, Homo sapiens
  misc_RNA (1)...(19): siRNA sense strand
gacuggagguggacauuga

SEQ ID NO: 26273 - RNA, 19 nt, Homo sapiens
  misc_RNA (1)...(19): siRNA sense strand
gaacuggaaguacuggaaa

SEQ ID NO: 26274 - RNA, 19 nt, Homo sapiens
  misc_RNA (1)...(19): siRNA sense strand
gagaauggaguuagagaga

SEQ ID NO: 26275 - RNA, 19 nt, Homo sapiens
  misc_RNA (1)...(19): siRNA sense strand
gagaggccaugcuaaaucu

SEQ ID NO: 26276 - RNA, 19 nt, Homo sapiens
  misc_RNA (1)...(19): siRNA sense strand
aaguagaucugaaggacua

SEQ ID NO: 26277 - RNA, 19 nt, Homo sapiens
  misc_RNA (1)...(19): siRNA sense strand
caaguuacagcaaacaauu

SEQ ID NO: 26278 - RNA, 19 nt, Homo sapiens
  misc_RNA (1)...(19): siRNA sense strand
ccaauaaccgugauaauac

SEQ ID NO: 26279 - RNA, 19 nt, Homo sapiens
  misc_RNA (1)...(19): siRNA sense strand
cgugguaaaucuucaaguu

SEQ ID NO: 26280 - RNA, 19 nt, Homo sapiens
  misc_RNA (1)...(19): siRNA sense strand
aggcaacacuuaccacuga

SEQ ID NO: 26281 - RNA, 19 nt, Homo sapiens
  misc_RNA (1)...(19): siRNA sense strand
ggagguggacauugauauu

SEQ ID NO: 26282 - RNA, 19 nt, Homo sapiens
  misc_RNA (1)...(19): siRNA sense strand
ggagagaguaccacacaga

SEQ ID NO: 26283 - RNA, 19 nt, Homo sapiens
  misc_RNA (1)...(19): siRNA sense strand
uugaagaggugucaggaaa

SEQ ID NO: 26284 - RNA, 19 nt, Homo sapiens
  misc_RNA (1)...(19): siRNA sense strand
caacacuuaccacugauaa

SEQ ID NO: 26285 - RNA, 19 nt, Homo sapiens
  misc_RNA (1)...(19): siRNA sense strand
caauaaggauucucauucg

SEQ ID NO: 26286 - RNA, 19 nt, Homo sapiens
  misc_RNA (1)...(19): siRNA sense strand
gaacacauagcaccaagag

SEQ ID NO: 26287 - RNA, 19 nt, Homo sapiens
  misc_RNA (1)...(19): siRNA sense strand
gaauucccuucccguggua

SEQ ID NO: 26288 - RNA, 19 nt, Homo sapiens
  misc_RNA (1)...(19): siRNA sense strand
gacacugccucaacuggaa

SEQ ID NO: 26289 - RNA, 19 nt, Homo sapiens
  misc_RNA (1)...(19): siRNA sense strand
cgaagaugguucugacugu

SEQ ID NO: 26290 - RNA, 19 nt, Homo sapiens
  misc_RNA (1)...(19): siRNA sense strand
gaaggacuaugaagaucag

SEQ ID NO: 26291 - RNA, 19 nt, Homo sapiens
  misc_RNA (1)...(19): siRNA sense strand
ggaaguacuggaaaccaaa

SEQ ID NO: 26292 - RNA, 19 nt, Homo sapiens
  misc_RNA (1)...(19): siRNA sense strand
ugaagccgaucaugaagga

SEQ ID NO: 26293 - RNA, 19 nt, Homo sapiens
  misc_RNA (1)...(19): siRNA sense strand
gugguaaaucuucaaguua

SEQ ID NO: 26294 - RNA, 19 nt, Homo sapiens
  misc_RNA (1)...(19): siRNA sense strand
guugaccacuaauauaaug

SEQ ID NO: 26295 - RNA, 19 nt, Homo sapiens
  misc_RNA (1)...(19): siRNA sense strand
ugucgagggucaugcagua

SEQ ID NO: 26296 - RNA, 19 nt, Homo sapiens
  misc_RNA (1)...(19): siRNA sense strand
gcuauaaaauggcagauga

SEQ ID NO: 26297 - RNA, 19 nt, Homo sapiens
  misc_RNA (1)...(19): siRNA sense strand
ggaugaaaggguugauuga

SEQ ID NO: 26298 - RNA, 19 nt, Homo sapiens
  misc_RNA (1)...(19): siRNA sense strand
aaucuggcaucuucacaaa

SEQ ID NO: 26299 - RNA, 19 nt, Homo sapiens
  misc_RNA (1)...(19): siRNA sense strand
gcagaugagaauggaguua

SEQ ID NO: 26300 - RNA, 19 nt, Homo sapiens
  misc_RNA (1)...(19): siRNA sense strand
gaacaggucauugccaaag

SEQ ID NO: 26301 - RNA, 19 nt, Homo sapiens
  misc_RNA (1)...(19): siRNA sense strand
cagaagaacaauaaggauu

SEQ ID NO: 26302 - RNA, 19 nt, Homo sapiens
  misc_RNA (1)...(19): siRNA sense strand
gcaacacuuaccacugaua

SEQ ID NO: 26303 - RNA, 19 nt, Homo sapiens
  misc_RNA (1)...(19): siRNA sense strand
gcccaaggguuguggaaag

SEQ ID NO: 26304 - RNA, 19 nt, Homo sapiens
  misc_RNA (1)...(19): siRNA sense strand
gacaauggcacucugaauc

SEQ ID NO: 26305 - RNA, 19 nt, Homo sapiens
  misc_RNA (1)...(19): siRNA sense strand
acaauaaggauucucauuc

SEQ ID NO: 26306 - RNA, 19 nt, Homo sapiens
  misc_RNA (1)...(19): siRNA sense strand
gaaagcaagagcuauaaaa

SEQ ID NO: 26307 - RNA, 19 nt, Homo sapiens
  misc_RNA (1)...(19): siRNA sense strand
gagagaguaccacacagaa

SEQ ID NO: 26308 - RNA, 19 nt, Homo sapiens
  misc_RNA (1)...(19): siRNA sense strand
ggacaauggcacucugaau

SEQ ID NO: 26309 - RNA, 19 nt, Homo sapiens
  misc_RNA (1)...(19): siRNA sense strand
ggaacuggaaguacuggaa

SEQ ID NO: 26310 - RNA, 19 nt, Homo sapiens
  misc_RNA (1)...(19): siRNA sense strand
ugaaaccaguuccagacuu

SEQ ID NO: 26311 - RNA, 19 nt, Homo sapiens
  misc_RNA (1)...(19): siRNA sense strand
gaagcgcaaagucauagaa

SEQ ID NO: 26312 - RNA, 19 nt, Homo sapiens
  misc_RNA (1)...(19): siRNA sense strand
gauggucacaaagaaguua

SEQ ID NO: 26313 - RNA, 19 nt, Homo sapiens
  misc_RNA (1)...(19): siRNA sense strand
agacuuacuucccucuaga

SEQ ID NO: 26314 - RNA, 19 nt, Homo sapiens
  misc_RNA (1)...(19): siRNA sense strand
uagcacgaguuacaacaga

SEQ ID NO: 26315 - RNA, 19 nt, Homo sapiens
  misc_RNA (1)...(19): siRNA sense strand
uuacuaguagcacgaguua

SEQ ID NO: 26316 - RNA, 19 nt, Homo sapiens
  misc_RNA (1)...(19): siRNA sense strand
uguuagagcucaguugguu

SEQ ID NO: 26317 - RNA, 19 nt, Homo sapiens
  misc_RNA (1)...(19): siRNA sense strand
ucacaaauacaaaggaauc

SEQ ID NO: 26318 - RNA, 19 nt, Homo sapiens
  misc_RNA (1)...(19): siRNA sense strand
gaaucuggcaucuucacaa

SEQ ID NO: 26319 - RNA, 19 nt, Homo sapiens
  misc_RNA (1)...(19): siRNA sense strand
ggaccuggaaguacuggaa

SEQ ID NO: 26320 - RNA, 19 nt, Homo sapiens
  misc_RNA (1)...(19): siRNA sense strand
acaucaaucugccugcaaa

SEQ ID NO: 26321 - RNA, 19 nt, Homo sapiens
  misc_RNA (1)...(19): siRNA sense strand
gaaaggguugauugaugaa

SEQ ID NO: 26322 - RNA, 19 nt, Homo sapiens
  misc_RNA (1)...(19): siRNA sense strand
agguggacauugauauuaa

SEQ ID NO: 26323 - RNA, 19 nt, Homo sapiens
  misc_RNA (1)...(19): siRNA sense strand
cagcauggacugcagauag

SEQ ID NO: 26324 - RNA, 19 nt, Homo sapiens
  misc_RNA (1)...(19): siRNA sense strand
uggcauagguacucuggau

SEQ ID NO: 26325 - RNA, 19 nt, Homo sapiens
  misc_RNA (1)...(19): siRNA sense strand
gaaguacuggaaaccgaaa

SEQ ID NO: 26326 - RNA, 19 nt, Homo sapiens
  misc_RNA (1)...(19): siRNA sense strand
uggugaaggugacuuucua

SEQ ID NO: 26327 - RNA, 19 nt, Homo sapiens
  misc_RNA (1)...(19): siRNA sense strand
ggaaggcauuaacagacau

SEQ ID NO: 26328 - RNA, 19 nt, Homo sapiens
  misc_RNA (1)...(19): siRNA sense strand
gaucagcagaagcaacuug

SEQ ID NO: 26329 - RNA, 19 nt, Homo sapiens
  misc_RNA (1)...(19): siRNA sense strand
gaccacuaauauaauggaa

SEQ ID NO: 26330 - RNA, 19 nt, Homo sapiens
  misc_RNA (1)...(19): siRNA sense strand
cacauugucuggcauaggu

SEQ ID NO: 26331 - RNA, 19 nt, Homo sapiens
  misc_RNA (1)...(19): siRNA sense strand
uuacuaagacuguuauugg

SEQ ID NO: 26332 - RNA, 19 nt, Homo sapiens
  misc_RNA (1)...(19): siRNA sense strand
ggaacgcgaggccuaacaa

SEQ ID NO: 26333 - RNA, 19 nt, Homo sapiens
  misc_RNA (1)...(19): siRNA sense strand
augaaaggguugauugaug

SEQ ID NO: 26334 - RNA, 19 nt, Homo sapiens
  misc_RNA (1)...(19): siRNA sense strand
caaggguuguggaaagaca

SEQ ID NO: 26335 - RNA, 19 nt, Homo sapiens
  misc_RNA (1)...(19): siRNA sense strand
uuucuucucaccuauguua

SEQ ID NO: 26336 - RNA, 19 nt, Homo sapiens
  misc_RNA (1)...(19): siRNA sense strand
aaacuggucacuucuaaag

SEQ ID NO: 26337 - RNA, 19 nt, Homo sapiens
  misc_RNA (1)...(19): siRNA sense strand
ucguugaccacuaauauaa

SEQ ID NO: 26338 - RNA, 19 nt, Homo sapiens
  misc_RNA (1)...(19): siRNA sense strand
ugaaagcaagagcuauaaa

SEQ ID NO: 26339 - RNA, 19 nt, Homo sapiens
  misc_RNA (1)...(19): siRNA sense strand
cuucacaaauacaaaggaa

SEQ ID NO: 26340 - RNA, 19 nt, Homo sapiens
  misc_RNA (1)...(19): siRNA sense strand
guggugaccuccgaagaug

SEQ ID NO: 26341 - RNA, 19 nt, Homo sapiens
  misc_RNA (1)...(19): siRNA sense strand
gaacuacaaaugcccuucu

SEQ ID NO: 26342 - RNA, 19 nt, Homo sapiens
  misc_RNA (1)...(19): siRNA sense strand
uggaaguacuggaaaccaa

SEQ ID NO: 26343 - RNA, 19 nt, Homo sapiens
  misc_RNA (1)...(19): siRNA sense strand
caaaggaauccaguucuca

SEQ ID NO: 26344 - RNA, 19 nt, Homo sapiens
  misc_RNA (1)...(19): siRNA sense strand
ccaagagaggccaugcuaa

SEQ ID NO: 26345 - RNA, 19 nt, Homo sapiens
  misc_RNA (1)...(19): siRNA sense strand
cagaugaggccggaaguga

SEQ ID NO: 26346 - RNA, 19 nt, Homo sapiens
  misc_RNA (1)...(19): siRNA sense strand
agaagaacaauaaggauuc

SEQ ID NO: 26347 - RNA, 19 nt, Homo sapiens
  misc_RNA (1)...(19): siRNA sense strand
ucucauucguugaccacua

SEQ ID NO: 26348 - RNA, 19 nt, Homo sapiens
  misc_RNA (1)...(19): siRNA sense strand
cucauucguugaccacuaa

SEQ ID NO: 26349 - RNA, 19 nt, Homo sapiens
  misc_RNA (1)...(19): siRNA sense strand
caaagaaguuaccaaagaa

SEQ ID NO: 26350 - RNA, 19 nt, Homo sapiens
  misc_RNA (1)...(19): siRNA sense strand
acaaagaaguuaccaaaga

SEQ ID NO: 26351 - RNA, 19 nt, Homo sapiens
  misc_RNA (1)...(19): siRNA sense strand
gaaaccaguuccagacuug

SEQ ID NO: 26352 - RNA, 19 nt, Homo sapiens
  misc_RNA (1)...(19): siRNA sense strand
gcaaacaauuuacuaguag

SEQ ID NO: 26353 - RNA, 19 nt, Homo sapiens
  misc_RNA (1)...(19): siRNA sense strand
ggcuuuagcucgugaagua

SEQ ID NO: 26354 - RNA, 19 nt, Homo sapiens
  misc_RNA (1)...(19): siRNA sense strand
uuacuucccucuagagaua

SEQ ID NO: 26355 - RNA, 19 nt, Homo sapiens
  misc_RNA (1)...(19): siRNA sense strand
ugaaaggguugauugauga

SEQ ID NO: 26356 - RNA, 19 nt, Homo sapiens
  misc_RNA (1)...(19): siRNA sense strand
gaagaggugucaggaaaug

SEQ ID NO: 26357 - RNA, 19 nt, Homo sapiens
  misc_RNA (1)...(19): siRNA sense strand
gaagugaagccgaucauga

SEQ ID NO: 26358 - RNA, 19 nt, Homo sapiens
  misc_RNA (1)...(19): siRNA sense strand
gccaauaaccgugauaaua

SEQ ID NO: 26359 - RNA, 19 nt, Homo sapiens
  misc_RNA (1)...(19): siRNA sense strand
ggacauugauauuaagauc

SEQ ID NO: 26360 - RNA, 19 nt, Homo sapiens
  misc_RNA (1)...(19): siRNA sense strand
gagcucaguugguugauau

SEQ ID NO: 26361 - RNA, 19 nt, Homo sapiens
  misc_RNA (1)...(19): siRNA sense strand
ggucauugccaaagacuua

SEQ ID NO: 26362 - RNA, 19 nt, Homo sapiens
  misc_RNA (1)...(19): siRNA sense strand
uaacagacaugccgcagau

SEQ ID NO: 26363 - RNA, 19 nt, Homo sapiens
  misc_RNA (1)...(19): siRNA sense strand
gaucaugaaggaacacaua

SEQ ID NO: 26364 - RNA, 19 nt, Homo sapiens
  misc_RNA (1)...(19): siRNA sense strand
caagagaggccaugcuaaa

SEQ ID NO: 26365 - RNA, 19 nt, Homo sapiens
  misc_RNA (1)...(19): siRNA sense strand
ucuggcaucuucacaaaua

SEQ ID NO: 26366 - RNA, 19 nt, Homo sapiens
  misc_RNA (1)...(19): siRNA sense strand
gaugaagacuggaacuaca

SEQ ID NO: 26367 - RNA, 19 nt, Homo sapiens
  misc_RNA (1)...(19): siRNA sense strand
uaggagaguuugucaguga

SEQ ID NO: 26368 - RNA, 19 nt, Homo sapiens
  misc_RNA (1)...(19): siRNA sense strand
agagagaccugguggaaau

SEQ ID NO: 26369 - RNA, 19 nt, Homo sapiens
  misc_RNA (1)...(19): siRNA sense strand
gagguggacauugauauua

SEQ ID NO: 26370 - RNA, 19 nt, Homo sapiens
  misc_RNA (1)...(19): siRNA sense strand
ucacaaagaaguuaccaaa

SEQ ID NO: 26371 - RNA, 19 nt, Homo sapiens
  misc_RNA (1)...(19): siRNA sense strand
ucaguugguugauaugaaa

SEQ ID NO: 26372 - RNA, 19 nt, Homo sapiens
  misc_RNA (1)...(19): siRNA sense strand
gacuggagguggacauuga

SEQ ID NO: 26373 - RNA, 19 nt, Homo sapiens
  misc_RNA (1)...(19): siRNA sense strand
gaacuggaaguacuggaaa

SEQ ID NO: 26374 - RNA, 19 nt, Homo sapiens
  misc_RNA (1)...(19): siRNA sense strand
gagaauggaguuagagaga

SEQ ID NO: 26375 - RNA, 19 nt, Homo sapiens
  misc_RNA (1)...(19): siRNA sense strand
gagaggccaugcuaaaucu

SEQ ID NO: 26376 - RNA, 19 nt, Homo sapiens
  misc_RNA (1)...(19): siRNA sense strand
aaguagaucugaaggacua

SEQ ID NO: 26377 - RNA, 19 nt, Homo sapiens
  misc_RNA (1)...(19): siRNA sense strand
caaguuacagcaaacaauu

SEQ ID NO: 26378 - RNA, 19 nt, Homo sapiens
  misc_RNA (1)...(19): siRNA sense strand
ccaauaaccgugauaauac

SEQ ID NO: 26379 - RNA, 19 nt, Homo sapiens
  misc_RNA (1)...(19): siRNA sense strand
cgugguaaaucuucaaguu

SEQ ID NO: 26380 - RNA, 19 nt, Homo sapiens
  misc_RNA (1)...(19): siRNA sense strand
aggcaacacuuaccacuga

SEQ ID NO: 26381 - RNA, 19 nt, Homo sapiens
  misc_RNA (1)...(19): siRNA sense strand
ggagguggacauugauauu

SEQ ID NO: 26382 - RNA, 19 nt, Homo sapiens
  misc_RNA (1)...(19): siRNA sense strand
ggagagaguaccacacaga

SEQ ID NO: 26383 - RNA, 19 nt, Homo sapiens
  misc_RNA (1)...(19): siRNA sense strand
uugaagaggugucaggaaa

SEQ ID NO: 26384 - RNA, 19 nt, Homo sapiens
  misc_RNA (1)...(19): siRNA sense strand
caacacuuaccacugauaa

SEQ ID NO: 26385 - RNA, 19 nt, Homo sapiens
  misc_RNA (1)...(19): siRNA sense strand
caauaaggauucucauucg

SEQ ID NO: 26386 - RNA, 19 nt, Homo sapiens
  misc_RNA (1)...(19): siRNA sense strand
gaacacauagcaccaagag

SEQ ID NO: 26387 - RNA, 19 nt, Homo sapiens
  misc_RNA (1)...(19): siRNA sense strand
gaauucccuucccguggua

SEQ ID NO: 26388 - RNA, 19 nt, Homo sapiens
  misc_RNA (1)...(19): siRNA sense strand
gacacugccucaacuggaa

SEQ ID NO: 26389 - RNA, 19 nt, Homo sapiens
  misc_RNA (1)...(19): siRNA sense strand
cgaagaugguucugacugu

SEQ ID NO: 26390 - RNA, 19 nt, Homo sapiens
  misc_RNA (1)...(19): siRNA sense strand
gaaggacuaugaagaucag

SEQ ID NO: 26391 - RNA, 19 nt, Homo sapiens
  misc_RNA (1)...(19): siRNA sense strand
ggaaguacuggaaaccaaa

SEQ ID NO: 26392 - RNA, 19 nt, Homo sapiens
  misc_RNA (1)...(19): siRNA sense strand
ugaagccgaucaugaagga

SEQ ID NO: 26393 - RNA, 19 nt, Homo sapiens
  misc_RNA (1)...(19): siRNA sense strand
gugguaaaucuucaaguua

SEQ ID NO: 26394 - RNA, 19 nt, Homo sapiens
  misc_RNA (1)...(19): siRNA sense strand
guugaccacuaauauaaug

SEQ ID NO: 26395 - RNA, 19 nt, Homo sapiens
  misc_RNA (1)...(19): siRNA sense strand
ugucgagggucaugcagua

SEQ ID NO: 26396 - RNA, 19 nt, Homo sapiens
  misc_RNA (1)...(19): siRNA sense strand
gcuauaaaauggcagauga

SEQ ID NO: 26397 - RNA, 19 nt, Homo sapiens
  misc_RNA (1)...(19): siRNA sense strand
ggaugaaaggguugauuga

SEQ ID NO: 26398 - RNA, 19 nt, Homo sapiens
  misc_RNA (1)...(19): siRNA sense strand
aaucuggcaucuucacaaa

SEQ ID NO: 26399 - RNA, 19 nt, Homo sapiens
  misc_RNA (1)...(19): siRNA sense strand
gcagaugagaauggaguua

SEQ ID NO: 26400 - RNA, 19 nt, Homo sapiens
  misc_RNA (1)...(19): siRNA sense strand
gaacaggucauugccaaag

SEQ ID NO: 26401 - RNA, 19 nt, Homo sapiens
  misc_RNA (1)...(19): siRNA sense strand
cagaagaacaauaaggauu

SEQ ID NO: 26402 - RNA, 19 nt, Homo sapiens
  misc_RNA (1)...(19): siRNA sense strand
gcaacacuuaccacugaua

SEQ ID NO: 26403 - RNA, 19 nt, Homo sapiens
  misc_RNA (1)...(19): siRNA sense strand
gcccaaggguuguggaaag

SEQ ID NO: 26404 - RNA, 19 nt, Homo sapiens
  misc_RNA (1)...(19): siRNA sense strand
gacaauggcacucugaauc

SEQ ID NO: 26405 - RNA, 19 nt, Homo sapiens
  misc_RNA (1)...(19): siRNA sense strand
acaauaaggauucucauuc

SEQ ID NO: 26406 - RNA, 19 nt, Homo sapiens
  misc_RNA (1)...(19): siRNA sense strand
gaaagcaagagcuauaaaa

SEQ ID NO: 26407 - RNA, 19 nt, Homo sapiens
  misc_RNA (1)...(19): siRNA sense strand
gagagaguaccacacagaa

SEQ ID NO: 26408 - RNA, 19 nt, Homo sapiens
  misc_RNA (1)...(19): siRNA sense strand
ggacaauggcacucugaau

SEQ ID NO: 26409 - RNA, 19 nt, Homo sapiens
  misc_RNA (1)...(19): siRNA sense strand
ggaacuggaaguacuggaa

SEQ ID NO: 26410 - RNA, 19 nt, Homo sapiens
  misc_RNA (1)...(19): siRNA sense strand
ugaaaccaguuccagacuu

SEQ ID NO: 26411 - RNA, 19 nt, Homo sapiens
  misc_RNA (1)...(19): siRNA sense strand
gaagcgcaaagucauagaa

SEQ ID NO: 26412 - RNA, 19 nt, Homo sapiens
  misc_RNA (1)...(19): siRNA sense strand
gauggucacaaagaaguua

SEQ ID NO: 26413 - RNA, 19 nt, Homo sapiens
  misc_RNA (1)...(19): siRNA sense strand
agacuuacuucccucuaga

SEQ ID NO: 26414 - RNA, 19 nt, Homo sapiens
  misc_RNA (1)...(19): siRNA sense strand
uagcacgaguuacaacaga

SEQ ID NO: 26415 - RNA, 19 nt, Homo sapiens
  misc_RNA (1)...(19): siRNA sense strand
uuacuaguagcacgaguua

SEQ ID NO: 26416 - RNA, 19 nt, Homo sapiens
  misc_RNA (1)...(19): siRNA sense strand
uguuagagcucaguugguu

SEQ ID NO: 26417 - RNA, 19 nt, Homo sapiens
  misc_RNA (1)...(19): siRNA sense strand
ucacaaauacaaaggaauc

SEQ ID NO: 26418 - RNA, 19 nt, Homo sapiens
  misc_RNA (1)...(19): siRNA sense strand
gaaucuggcaucuucacaa

SEQ ID NO: 26419 - RNA, 19 nt, Homo sapiens
  misc_RNA (1)...(19): siRNA sense strand
ggaccuggaaguacuggaa

SEQ ID NO: 26420 - RNA, 19 nt, Homo sapiens
  misc_RNA (1)...(19): siRNA sense strand
acaucaaucugccugcaaa

SEQ ID NO: 26421 - RNA, 19 nt, Homo sapiens
  misc_RNA (1)...(19): siRNA sense strand
gaaaggguugauugaugaa

SEQ ID NO: 26422 - RNA, 19 nt, Homo sapiens
  misc_RNA (1)...(19): siRNA sense strand
agguggacauugauauuaa

SEQ ID NO: 26423 - RNA, 19 nt, Homo sapiens
  misc_RNA (1)...(19): siRNA sense strand
cagcauggacugcagauag

SEQ ID NO: 26424 - RNA, 19 nt, Homo sapiens
  misc_RNA (1)...(19): siRNA sense strand
uggcauagguacucuggau

SEQ ID NO: 26425 - RNA, 19 nt, Homo sapiens
  misc_RNA (1)...(19): siRNA sense strand
gaaguacuggaaaccgaaa

SEQ ID NO: 26426 - RNA, 19 nt, Homo sapiens
  misc_RNA (1)...(19): siRNA sense strand
uggugaaggugacuuucua

SEQ ID NO: 26427 - RNA, 19 nt, Homo sapiens
  misc_RNA (1)...(19): siRNA sense strand
ggaaggcauuaacagacau

SEQ ID NO: 26428 - RNA, 19 nt, Homo sapiens
  misc_RNA (1)...(19): siRNA sense strand
gaucagcagaagcaacuug

SEQ ID NO: 26429 - RNA, 19 nt, Homo sapiens
  misc_RNA (1)...(19): siRNA sense strand
gaccacuaauauaauggaa

SEQ ID NO: 26430 - RNA, 19 nt, Homo sapiens
  misc_RNA (1)...(19): siRNA sense strand
cacauugucuggcauaggu

SEQ ID NO: 26431 - RNA, 19 nt, Homo sapiens
  misc_RNA (1)...(19): siRNA sense strand
uuacuaagacuguuauugg

SEQ ID NO: 26432 - RNA, 19 nt, Homo sapiens
  misc_RNA (1)...(19): siRNA sense strand
ggaacgcgaggccuaacaa

SEQ ID NO: 26433 - RNA, 19 nt, Homo sapiens
  misc_RNA (1)...(19): siRNA sense strand
augaaaggguugauugaug

SEQ ID NO: 26434 - RNA, 19 nt, Homo sapiens
  misc_RNA (1)...(19): siRNA sense strand
caaggguuguggaaagaca

SEQ ID NO: 26435 - RNA, 19 nt, Homo sapiens
  misc_RNA (1)...(19): siRNA sense strand
uuucuucucaccuauguua

SEQ ID NO: 26436 - RNA, 19 nt, Homo sapiens
  misc_RNA (1)...(19): siRNA sense strand
aaacuggucacuucuaaag

SEQ ID NO: 26437 - RNA, 19 nt, Homo sapiens
  misc_RNA (1)...(19): siRNA sense strand
ucguugaccacuaauauaa

SEQ ID NO: 26438 - RNA, 19 nt, Homo sapiens
  misc_RNA (1)...(19): siRNA sense strand
ugaaagcaagagcuauaaa

SEQ ID NO: 26439 - RNA, 19 nt, Homo sapiens
  misc_RNA (1)...(19): siRNA sense strand
cuucacaaauacaaaggaa

SEQ ID NO: 26440 - RNA, 19 nt, Homo sapiens
  misc_RNA (1)...(19): siRNA sense strand
guggugaccuccgaagaug

SEQ ID NO: 26441 - RNA, 19 nt, Homo sapiens
  misc_RNA (1)...(19): siRNA sense strand
gaacuacaaaugcccuucu

SEQ ID NO: 26442 - RNA, 19 nt, Homo sapiens
  misc_RNA (1)...(19): siRNA sense strand
uggaaguacuggaaaccaa

SEQ ID NO: 26443 - RNA, 19 nt, Homo sapiens
  misc_RNA (1)...(19): siRNA sense strand
caaaggaauccaguucuca

SEQ ID NO: 26444 - RNA, 19 nt, Homo sapiens
  misc_RNA (1)...(19): siRNA sense strand
ccaagagaggccaugcuaa

SEQ ID NO: 26445 - RNA, 19 nt, Homo sapiens
  misc_RNA (1)...(19): siRNA sense strand
cagaugaggccggaaguga

SEQ ID NO: 26446 - RNA, 19 nt, Homo sapiens
  misc_RNA (1)...(19): siRNA sense strand
agaagaacaauaaggauuc

SEQ ID NO: 26447 - RNA, 19 nt, Homo sapiens
  misc_RNA (1)...(19): siRNA sense strand
ucucauucguugaccacua

SEQ ID NO: 26448 - RNA, 19 nt, Homo sapiens
  misc_RNA (1)...(19): siRNA sense strand
cucauucguugaccacuaa

SEQ ID NO: 26449 - RNA, 19 nt, Homo sapiens
  misc_RNA (1)...(19): siRNA sense strand
ggccaacacugucaaguuu

SEQ ID NO: 26450 - RNA, 19 nt, Homo sapiens
  misc_RNA (1)...(19): siRNA sense strand
gaauacggguccaucaauc

SEQ ID NO: 26451 - RNA, 19 nt, Homo sapiens
  misc_RNA (1)...(19): siRNA sense strand
gcaggagcaucgcauugga

SEQ ID NO: 26452 - RNA, 19 nt, Homo sapiens
  misc_RNA (1)...(19): siRNA sense strand
caucugacaagggaaauua

SEQ ID NO: 26453 - RNA, 19 nt, Homo sapiens
  misc_RNA (1)...(19): siRNA sense strand
gcaccauacuggaccaaca

SEQ ID NO: 26454 - RNA, 19 nt, Homo sapiens
  misc_RNA (1)...(19): siRNA sense strand
gcacuggagccucauuaug

SEQ ID NO: 26455 - RNA, 19 nt, Homo sapiens
  misc_RNA (1)...(19): siRNA sense strand
aaaguguggucccaucuga

SEQ ID NO: 26456 - RNA, 19 nt, Homo sapiens
  misc_RNA (1)...(19): siRNA sense strand
cauuggaggcuacaaggua

SEQ ID NO: 26457 - RNA, 19 nt, Homo sapiens
  misc_RNA (1)...(19): siRNA sense strand
aguugaggauaccacauua

SEQ ID NO: 26458 - RNA, 19 nt, Homo sapiens
  misc_RNA (1)...(19): siRNA sense strand
gaaaguguggucccaucug

SEQ ID NO: 26459 - RNA, 19 nt, Homo sapiens
  misc_RNA (1)...(19): siRNA sense strand
cagcacuggagccucauua

SEQ ID NO: 26460 - RNA, 19 nt, Homo sapiens
  misc_RNA (1)...(19): siRNA sense strand
ggaacccaaugccaaccau

SEQ ID NO: 26461 - RNA, 19 nt, Homo sapiens
  misc_RNA (1)...(19): siRNA sense strand
ugaauacggguccaucaau

SEQ ID NO: 26462 - RNA, 19 nt, Homo sapiens
  misc_RNA (1)...(19): siRNA sense strand
acacguaccaccuggaugu

SEQ ID NO: 26463 - RNA, 19 nt, Homo sapiens
  misc_RNA (1)...(19): siRNA sense strand
ucugacaagggaaauuaua

SEQ ID NO: 26464 - RNA, 19 nt, Homo sapiens
  misc_RNA (1)...(19): siRNA sense strand
cauacuggaccaacacaga

SEQ ID NO: 26465 - RNA, 19 nt, Homo sapiens
  misc_RNA (1)...(19): siRNA sense strand
ccaacacugucaaguuucg

SEQ ID NO: 26466 - RNA, 19 nt, Homo sapiens
  misc_RNA (1)...(19): siRNA sense strand
gaggcuacaagguacgaaa

SEQ ID NO: 26467 - RNA, 19 nt, Homo sapiens
  misc_RNA (1)...(19): siRNA sense strand
cguaccaccuggauguugu

SEQ ID NO: 26468 - RNA, 19 nt, Homo sapiens
  misc_RNA (1)...(19): siRNA sense strand
ucaguuuaguugaggauac

SEQ ID NO: 26469 - RNA, 19 nt, Homo sapiens
  misc_RNA (1)...(19): siRNA sense strand
ggaaaguguggucccaucu

SEQ ID NO: 26470 - RNA, 19 nt, Homo sapiens
  misc_RNA (1)...(19): siRNA sense strand
uaguugaggauaccacauu

SEQ ID NO: 26471 - RNA, 19 nt, Homo sapiens
  misc_RNA (1)...(19): siRNA sense strand
gcuacaagguacgaaacca

SEQ ID NO: 26472 - RNA, 19 nt, Homo sapiens
  misc_RNA (1)...(19): siRNA sense strand
cacuggagccucauuaugg

SEQ ID NO: 26473 - RNA, 19 nt, Homo sapiens
  misc_RNA (1)...(19): siRNA sense strand
cggccaacacugucaaguu

SEQ ID NO: 26474 - RNA, 19 nt, Homo sapiens
  misc_RNA (1)...(19): siRNA sense strand
acuggagccucauuaugga

SEQ ID NO: 26475 - RNA, 19 nt, Homo sapiens
  misc_RNA (1)...(19): siRNA sense strand
uaagcaggagcaucgcauu

SEQ ID NO: 26476 - RNA, 19 nt, Homo sapiens
  misc_RNA (1)...(19): siRNA sense strand
ggagccucauuauggaaag

SEQ ID NO: 26477 - RNA, 19 nt, Homo sapiens
  misc_RNA (1)...(19): siRNA sense strand
ggccaacacugucaaguuu

SEQ ID NO: 26478 - RNA, 19 nt, Homo sapiens
  misc_RNA (1)...(19): siRNA sense strand
gaauacggguccaucaauc

SEQ ID NO: 26479 - RNA, 19 nt, Homo sapiens
  misc_RNA (1)...(19): siRNA sense strand
gcaggagcaucgcauugga

SEQ ID NO: 26480 - RNA, 19 nt, Homo sapiens
  misc_RNA (1)...(19): siRNA sense strand
caucugacaagggaaauua

SEQ ID NO: 26481 - RNA, 19 nt, Homo sapiens
  misc_RNA (1)...(19): siRNA sense strand
gcaccauacuggaccaaca

SEQ ID NO: 26482 - RNA, 19 nt, Homo sapiens
  misc_RNA (1)...(19): siRNA sense strand
gcacuggagccucauuaug

SEQ ID NO: 26483 - RNA, 19 nt, Homo sapiens
  misc_RNA (1)...(19): siRNA sense strand
aaaguguggucccaucuga

SEQ ID NO: 26484 - RNA, 19 nt, Homo sapiens
  misc_RNA (1)...(19): siRNA sense strand
cauuggaggcuacaaggua

SEQ ID NO: 26485 - RNA, 19 nt, Homo sapiens
  misc_RNA (1)...(19): siRNA sense strand
aguugaggauaccacauua

SEQ ID NO: 26486 - RNA, 19 nt, Homo sapiens
  misc_RNA (1)...(19): siRNA sense strand
gaaaguguggucccaucug

SEQ ID NO: 26487 - RNA, 19 nt, Homo sapiens
  misc_RNA (1)...(19): siRNA sense strand
cagcacuggagccucauua

SEQ ID NO: 26488 - RNA, 19 nt, Homo sapiens
  misc_RNA (1)...(19): siRNA sense strand
ggaacccaaugccaaccau

SEQ ID NO: 26489 - RNA, 19 nt, Homo sapiens
  misc_RNA (1)...(19): siRNA sense strand
ugaauacggguccaucaau

SEQ ID NO: 26490 - RNA, 19 nt, Homo sapiens
  misc_RNA (1)...(19): siRNA sense strand
acacguaccaccuggaugu

SEQ ID NO: 26491 - RNA, 19 nt, Homo sapiens
  misc_RNA (1)...(19): siRNA sense strand
ucugacaagggaaauuaua

SEQ ID NO: 26492 - RNA, 19 nt, Homo sapiens
  misc_RNA (1)...(19): siRNA sense strand
cauacuggaccaacacaga

SEQ ID NO: 26493 - RNA, 19 nt, Homo sapiens
  misc_RNA (1)...(19): siRNA sense strand
ccaacacugucaaguuucg

SEQ ID NO: 26494 - RNA, 19 nt, Homo sapiens
  misc_RNA (1)...(19): siRNA sense strand
gaggcuacaagguacgaaa

SEQ ID NO: 26495 - RNA, 19 nt, Homo sapiens
  misc_RNA (1)...(19): siRNA sense strand
cguaccaccuggauguugu

SEQ ID NO: 26496 - RNA, 19 nt, Homo sapiens
  misc_RNA (1)...(19): siRNA sense strand
ucaguuuaguugaggauac

SEQ ID NO: 26497 - RNA, 19 nt, Homo sapiens
  misc_RNA (1)...(19): siRNA sense strand
ggaaaguguggucccaucu

SEQ ID NO: 26498 - RNA, 19 nt, Homo sapiens
  misc_RNA (1)...(19): siRNA sense strand
uaguugaggauaccacauu

SEQ ID NO: 26499 - RNA, 19 nt, Homo sapiens
  misc_RNA (1)...(19): siRNA sense strand
gcuacaagguacgaaacca

SEQ ID NO: 26500 - RNA, 19 nt, Homo sapiens
  misc_RNA (1)...(19): siRNA sense strand
cacuggagccucauuaugg

SEQ ID NO: 26501 - RNA, 19 nt, Homo sapiens
  misc_RNA (1)...(19): siRNA sense strand
cggccaacacugucaaguu

SEQ ID NO: 26502 - RNA, 19 nt, Homo sapiens
  misc_RNA (1)...(19): siRNA sense strand
acuggagccucauuaugga

SEQ ID NO: 26503 - RNA, 19 nt, Homo sapiens
  misc_RNA (1)...(19): siRNA sense strand
uaagcaggagcaucgcauu

SEQ ID NO: 26504 - RNA, 19 nt, Homo sapiens
  misc_RNA (1)...(19): siRNA sense strand
ggagccucauuauggaaag

SEQ ID NO: 26505 - RNA, 19 nt, Homo sapiens
  misc_RNA (1)...(19): siRNA sense strand
ggccaacacugucaaguuu

SEQ ID NO: 26506 - RNA, 19 nt, Homo sapiens
  misc_RNA (1)...(19): siRNA sense strand
gaauacggguccaucaauc

SEQ ID NO: 26507 - RNA, 19 nt, Homo sapiens
  misc_RNA (1)...(19): siRNA sense strand
gcaggagcaucgcauugga

SEQ ID NO: 26508 - RNA, 19 nt, Homo sapiens
  misc_RNA (1)...(19): siRNA sense strand
caucugacaagggaaauua

SEQ ID NO: 26509 - RNA, 19 nt, Homo sapiens
  misc_RNA (1)...(19): siRNA sense strand
gcaccauacuggaccaaca

SEQ ID NO: 26510 - RNA, 19 nt, Homo sapiens
  misc_RNA (1)...(19): siRNA sense strand
gcacuggagccucauuaug

SEQ ID NO: 26511 - RNA, 19 nt, Homo sapiens
  misc_RNA (1)...(19): siRNA sense strand
aaaguguggucccaucuga

SEQ ID NO: 26512 - RNA, 19 nt, Homo sapiens
  misc_RNA (1)...(19): siRNA sense strand
cauuggaggcuacaaggua

SEQ ID NO: 26513 - RNA, 19 nt, Homo sapiens
  misc_RNA (1)...(19): siRNA sense strand
aguugaggauaccacauua

SEQ ID NO: 26514 - RNA, 19 nt, Homo sapiens
  misc_RNA (1)...(19): siRNA sense strand
gaaaguguggucccaucug

SEQ ID NO: 26515 - RNA, 19 nt, Homo sapiens
  misc_RNA (1)...(19): siRNA sense strand
cagcacuggagccucauua

SEQ ID NO: 26516 - RNA, 19 nt, Homo sapiens
  misc_RNA (1)...(19): siRNA sense strand
ggaacccaaugccaaccau

SEQ ID NO: 26517 - RNA, 19 nt, Homo sapiens
  misc_RNA (1)...(19): siRNA sense strand
ugaauacggguccaucaau

SEQ ID NO: 26518 - RNA, 19 nt, Homo sapiens
  misc_RNA (1)...(19): siRNA sense strand
acacguaccaccuggaugu

SEQ ID NO: 26519 - RNA, 19 nt, Homo sapiens
  misc_RNA (1)...(19): siRNA sense strand
ucugacaagggaaauuaua

SEQ ID NO: 26520 - RNA, 19 nt, Homo sapiens
  misc_RNA (1)...(19): siRNA sense strand
cauacuggaccaacacaga

SEQ ID NO: 26521 - RNA, 19 nt, Homo sapiens
  misc_RNA (1)...(19): siRNA sense strand
ccaacacugucaaguuucg

SEQ ID NO: 26522 - RNA, 19 nt, Homo sapiens
  misc_RNA (1)...(19): siRNA sense strand
gaggcuacaagguacgaaa

SEQ ID NO: 26523 - RNA, 19 nt, Homo sapiens
  misc_RNA (1)...(19): siRNA sense strand
cguaccaccuggauguugu

SEQ ID NO: 26524 - RNA, 19 nt, Homo sapiens
  misc_RNA (1)...(19): siRNA sense strand
ucaguuuaguugaggauac

SEQ ID NO: 26525 - RNA, 19 nt, Homo sapiens
  misc_RNA (1)...(19): siRNA sense strand
ggaaaguguggucccaucu

SEQ ID NO: 26526 - RNA, 19 nt, Homo sapiens
  misc_RNA (1)...(19): siRNA sense strand
uaguugaggauaccacauu

SEQ ID NO: 26527 - RNA, 19 nt, Homo sapiens
  misc_RNA (1)...(19): siRNA sense strand
gcuacaagguacgaaacca

SEQ ID NO: 26528 - RNA, 19 nt, Homo sapiens
  misc_RNA (1)...(19): siRNA sense strand
cacuggagccucauuaugg

SEQ ID NO: 26529 - RNA, 19 nt, Homo sapiens
  misc_RNA (1)...(19): siRNA sense strand
cggccaacacugucaaguu

SEQ ID NO: 26530 - RNA, 19 nt, Homo sapiens
  misc_RNA (1)...(19): siRNA sense strand
acuggagccucauuaugga

SEQ ID NO: 26531 - RNA, 19 nt, Homo sapiens
  misc_RNA (1)...(19): siRNA sense strand
uaagcaggagcaucgcauu

SEQ ID NO: 26532 - RNA, 19 nt, Homo sapiens
  misc_RNA (1)...(19): siRNA sense strand
ggagccucauuauggaaag

SEQ ID NO: 26533 - RNA, 19 nt, Homo sapiens
  misc_RNA (1)...(19): siRNA sense strand
ggccaacacugucaaguuu

SEQ ID NO: 26534 - RNA, 19 nt, Homo sapiens
  misc_RNA (1)...(19): siRNA sense strand
gaauacggguccaucaauc

SEQ ID NO: 26535 - RNA, 19 nt, Homo sapiens
  misc_RNA (1)...(19): siRNA sense strand
gcaggagcaucgcauugga

SEQ ID NO: 26536 - RNA, 19 nt, Homo sapiens
  misc_RNA (1)...(19): siRNA sense strand
caucugacaagggaaauua

SEQ ID NO: 26537 - RNA, 19 nt, Homo sapiens
  misc_RNA (1)...(19): siRNA sense strand
gcaccauacuggaccaaca

SEQ ID NO: 26538 - RNA, 19 nt, Homo sapiens
  misc_RNA (1)...(19): siRNA sense strand
gcacuggagccucauuaug

SEQ ID NO: 26539 - RNA, 19 nt, Homo sapiens
  misc_RNA (1)...(19): siRNA sense strand
aaaguguggucccaucuga

SEQ ID NO: 26540 - RNA, 19 nt, Homo sapiens
  misc_RNA (1)...(19): siRNA sense strand
cauuggaggcuacaaggua

SEQ ID NO: 26541 - RNA, 19 nt, Homo sapiens
  misc_RNA (1)...(19): siRNA sense strand
aguugaggauaccacauua

SEQ ID NO: 26542 - RNA, 19 nt, Homo sapiens
  misc_RNA (1)...(19): siRNA sense strand
gaaaguguggucccaucug

SEQ ID NO: 26543 - RNA, 19 nt, Homo sapiens
  misc_RNA (1)...(19): siRNA sense strand
cagcacuggagccucauua

SEQ ID NO: 26544 - RNA, 19 nt, Homo sapiens
  misc_RNA (1)...(19): siRNA sense strand
ggaacccaaugccaaccau

SEQ ID NO: 26545 - RNA, 19 nt, Homo sapiens
  misc_RNA (1)...(19): siRNA sense strand
ugaauacggguccaucaau

SEQ ID NO: 26546 - RNA, 19 nt, Homo sapiens
  misc_RNA (1)...(19): siRNA sense strand
acacguaccaccuggaugu

SEQ ID NO: 26547 - RNA, 19 nt, Homo sapiens
  misc_RNA (1)...(19): siRNA sense strand
ucugacaagggaaauuaua

SEQ ID NO: 26548 - RNA, 19 nt, Homo sapiens
  misc_RNA (1)...(19): siRNA sense strand
cauacuggaccaacacaga

SEQ ID NO: 26549 - RNA, 19 nt, Homo sapiens
  misc_RNA (1)...(19): siRNA sense strand
ccaacacugucaaguuucg

SEQ ID NO: 26550 - RNA, 19 nt, Homo sapiens
  misc_RNA (1)...(19): siRNA sense strand
gaggcuacaagguacgaaa

SEQ ID NO: 26551 - RNA, 19 nt, Homo sapiens
  misc_RNA (1)...(19): siRNA sense strand
cguaccaccuggauguugu

SEQ ID NO: 26552 - RNA, 19 nt, Homo sapiens
  misc_RNA (1)...(19): siRNA sense strand
ucaguuuaguugaggauac

SEQ ID NO: 26553 - RNA, 19 nt, Homo sapiens
  misc_RNA (1)...(19): siRNA sense strand
ggaaaguguggucccaucu

SEQ ID NO: 26554 - RNA, 19 nt, Homo sapiens
  misc_RNA (1)...(19): siRNA sense strand
uaguugaggauaccacauu

SEQ ID NO: 26555 - RNA, 19 nt, Homo sapiens
  misc_RNA (1)...(19): siRNA sense strand
gcuacaagguacgaaacca

SEQ ID NO: 26556 - RNA, 19 nt, Homo sapiens
  misc_RNA (1)...(19): siRNA sense strand
cacuggagccucauuaugg

SEQ ID NO: 26557 - RNA, 19 nt, Homo sapiens
  misc_RNA (1)...(19): siRNA sense strand
cggccaacacugucaaguu

SEQ ID NO: 26558 - RNA, 19 nt, Homo sapiens
  misc_RNA (1)...(19): siRNA sense strand
acuggagccucauuaugga

SEQ ID NO: 26559 - RNA, 19 nt, Homo sapiens
  misc_RNA (1)...(19): siRNA sense strand
uaagcaggagcaucgcauu

SEQ ID NO: 26560 - RNA, 19 nt, Homo sapiens
  misc_RNA (1)...(19): siRNA sense strand
ggagccucauuauggaaag

SEQ ID NO: 26561 - RNA, 19 nt, Homo sapiens
  misc_RNA (1)...(19): siRNA sense strand
ggccaacacugucaaguuu

SEQ ID NO: 26562 - RNA, 19 nt, Homo sapiens
  misc_RNA (1)...(19): siRNA sense strand
gaauacggguccaucaauc

SEQ ID NO: 26563 - RNA, 19 nt, Homo sapiens
  misc_RNA (1)...(19): siRNA sense strand
gcaggagcaucgcauugga

SEQ ID NO: 26564 - RNA, 19 nt, Homo sapiens
  misc_RNA (1)...(19): siRNA sense strand
caucugacaagggaaauua

SEQ ID NO: 26565 - RNA, 19 nt, Homo sapiens
  misc_RNA (1)...(19): siRNA sense strand
gcaccauacuggaccaaca

SEQ ID NO: 26566 - RNA, 19 nt, Homo sapiens
  misc_RNA (1)...(19): siRNA sense strand
gcacuggagccucauuaug

SEQ ID NO: 26567 - RNA, 19 nt, Homo sapiens
  misc_RNA (1)...(19): siRNA sense strand
aaaguguggucccaucuga

SEQ ID NO: 26568 - RNA, 19 nt, Homo sapiens
  misc_RNA (1)...(19): siRNA sense strand
cauuggaggcuacaaggua

SEQ ID NO: 26569 - RNA, 19 nt, Homo sapiens
  misc_RNA (1)...(19): siRNA sense strand
aguugaggauaccacauua

SEQ ID NO: 26570 - RNA, 19 nt, Homo sapiens
  misc_RNA (1)...(19): siRNA sense strand
gaaaguguggucccaucug

SEQ ID NO: 26571 - RNA, 19 nt, Homo sapiens
  misc_RNA (1)...(19): siRNA sense strand
cagcacuggagccucauua

SEQ ID NO: 26572 - RNA, 19 nt, Homo sapiens
  misc_RNA (1)...(19): siRNA sense strand
ggaacccaaugccaaccau

SEQ ID NO: 26573 - RNA, 19 nt, Homo sapiens
  misc_RNA (1)...(19): siRNA sense strand
ugaauacggguccaucaau

SEQ ID NO: 26574 - RNA, 19 nt, Homo sapiens
  misc_RNA (1)...(19): siRNA sense strand
acacguaccaccuggaugu

SEQ ID NO: 26575 - RNA, 19 nt, Homo sapiens
  misc_RNA (1)...(19): siRNA sense strand
ucugacaagggaaauuaua

SEQ ID NO: 26576 - RNA, 19 nt, Homo sapiens
  misc_RNA (1)...(19): siRNA sense strand
cauacuggaccaacacaga

SEQ ID NO: 26577 - RNA, 19 nt, Homo sapiens
  misc_RNA (1)...(19): siRNA sense strand
ccaacacugucaaguuucg

SEQ ID NO: 26578 - RNA, 19 nt, Homo sapiens
  misc_RNA (1)...(19): siRNA sense strand
gaggcuacaagguacgaaa

SEQ ID NO: 26579 - RNA, 19 nt, Homo sapiens
  misc_RNA (1)...(19): siRNA sense strand
cguaccaccuggauguugu

SEQ ID NO: 26580 - RNA, 19 nt, Homo sapiens
  misc_RNA (1)...(19): siRNA sense strand
ucaguuuaguugaggauac

SEQ ID NO: 26581 - RNA, 19 nt, Homo sapiens
  misc_RNA (1)...(19): siRNA sense strand
ggaaaguguggucccaucu

SEQ ID NO: 26582 - RNA, 19 nt, Homo sapiens
  misc_RNA (1)...(19): siRNA sense strand
uaguugaggauaccacauu

SEQ ID NO: 26583 - RNA, 19 nt, Homo sapiens
  misc_RNA (1)...(19): siRNA sense strand
gcuacaagguacgaaacca

SEQ ID NO: 26584 - RNA, 19 nt, Homo sapiens
  misc_RNA (1)...(19): siRNA sense strand
cacuggagccucauuaugg

SEQ ID NO: 26585 - RNA, 19 nt, Homo sapiens
  misc_RNA (1)...(19): siRNA sense strand
cggccaacacugucaaguu

SEQ ID NO: 26586 - RNA, 19 nt, Homo sapiens
  misc_RNA (1)...(19): siRNA sense strand
acuggagccucauuaugga

SEQ ID NO: 26587 - RNA, 19 nt, Homo sapiens
  misc_RNA (1)...(19): siRNA sense strand
uaagcaggagcaucgcauu

SEQ ID NO: 26588 - RNA, 19 nt, Homo sapiens
  misc_RNA (1)...(19): siRNA sense strand
ggagccucauuauggaaag

SEQ ID NO: 26589 - RNA, 19 nt, Homo sapiens
  misc_RNA (1)...(19): siRNA sense strand
ggccaacacugucaaguuu

SEQ ID NO: 26590 - RNA, 19 nt, Homo sapiens
  misc_RNA (1)...(19): siRNA sense strand
gaauacggguccaucaauc

SEQ ID NO: 26591 - RNA, 19 nt, Homo sapiens
  misc_RNA (1)...(19): siRNA sense strand
gcaggagcaucgcauugga

SEQ ID NO: 26592 - RNA, 19 nt, Homo sapiens
  misc_RNA (1)...(19): siRNA sense strand
caucugacaagggaaauua

SEQ ID NO: 26593 - RNA, 19 nt, Homo sapiens
  misc_RNA (1)...(19): siRNA sense strand
gcaccauacuggaccaaca

SEQ ID NO: 26594 - RNA, 19 nt, Homo sapiens
  misc_RNA (1)...(19): siRNA sense strand
gcacuggagccucauuaug

SEQ ID NO: 26595 - RNA, 19 nt, Homo sapiens
  misc_RNA (1)...(19): siRNA sense strand
aaaguguggucccaucuga

SEQ ID NO: 26596 - RNA, 19 nt, Homo sapiens
  misc_RNA (1)...(19): siRNA sense strand
cauuggaggcuacaaggua

SEQ ID NO: 26597 - RNA, 19 nt, Homo sapiens
  misc_RNA (1)...(19): siRNA sense strand
aguugaggauaccacauua

SEQ ID NO: 26598 - RNA, 19 nt, Homo sapiens
  misc_RNA (1)...(19): siRNA sense strand
gaaaguguggucccaucug

SEQ ID NO: 26599 - RNA, 19 nt, Homo sapiens
  misc_RNA (1)...(19): siRNA sense strand
cagcacuggagccucauua

SEQ ID NO: 26600 - RNA, 19 nt, Homo sapiens
  misc_RNA (1)...(19): siRNA sense strand
ggaacccaaugccaaccau

SEQ ID NO: 26601 - RNA, 19 nt, Homo sapiens
  misc_RNA (1)...(19): siRNA sense strand
ugaauacggguccaucaau

SEQ ID NO: 26602 - RNA, 19 nt, Homo sapiens
  misc_RNA (1)...(19): siRNA sense strand
acacguaccaccuggaugu

SEQ ID NO: 26603 - RNA, 19 nt, Homo sapiens
  misc_RNA (1)...(19): siRNA sense strand
ucugacaagggaaauuaua

SEQ ID NO: 26604 - RNA, 19 nt, Homo sapiens
  misc_RNA (1)...(19): siRNA sense strand
cauacuggaccaacacaga

SEQ ID NO: 26605 - RNA, 19 nt, Homo sapiens
  misc_RNA (1)...(19): siRNA sense strand
ccaacacugucaaguuucg

SEQ ID NO: 26606 - RNA, 19 nt, Homo sapiens
  misc_RNA (1)...(19): siRNA sense strand
gaggcuacaagguacgaaa

SEQ ID NO: 26607 - RNA, 19 nt, Homo sapiens
  misc_RNA (1)...(19): siRNA sense strand
cguaccaccuggauguugu

SEQ ID NO: 26608 - RNA, 19 nt, Homo sapiens
  misc_RNA (1)...(19): siRNA sense strand
ucaguuuaguugaggauac

SEQ ID NO: 26609 - RNA, 19 nt, Homo sapiens
  misc_RNA (1)...(19): siRNA sense strand
ggaaaguguggucccaucu

SEQ ID NO: 26610 - RNA, 19 nt, Homo sapiens
  misc_RNA (1)...(19): siRNA sense strand
uaguugaggauaccacauu

SEQ ID NO: 26611 - RNA, 19 nt, Homo sapiens
  misc_RNA (1)...(19): siRNA sense strand
gcuacaagguacgaaacca

SEQ ID NO: 26612 - RNA, 19 nt, Homo sapiens
  misc_RNA (1)...(19): siRNA sense strand
cacuggagccucauuaugg

SEQ ID NO: 26613 - RNA, 19 nt, Homo sapiens
  misc_RNA (1)...(19): siRNA sense strand
cggccaacacugucaaguu

SEQ ID NO: 26614 - RNA, 19 nt, Homo sapiens
  misc_RNA (1)...(19): siRNA sense strand
acuggagccucauuaugga

SEQ ID NO: 26615 - RNA, 19 nt, Homo sapiens
  misc_RNA (1)...(19): siRNA sense strand
uaagcaggagcaucgcauu

SEQ ID NO: 26616 - RNA, 19 nt, Homo sapiens
  misc_RNA (1)...(19): siRNA sense strand
ggagccucauuauggaaag

SEQ ID NO: 26617 - RNA, 19 nt, Homo sapiens
  misc_RNA (1)...(19): siRNA sense strand
ggccaacacugucaaguuu

SEQ ID NO: 26618 - RNA, 19 nt, Homo sapiens
  misc_RNA (1)...(19): siRNA sense strand
gaauacggguccaucaauc

SEQ ID NO: 26619 - RNA, 19 nt, Homo sapiens
  misc_RNA (1)...(19): siRNA sense strand
gcaggagcaucgcauugga

SEQ ID NO: 26620 - RNA, 19 nt, Homo sapiens
  misc_RNA (1)...(19): siRNA sense strand
caucugacaagggaaauua

SEQ ID NO: 26621 - RNA, 19 nt, Homo sapiens
  misc_RNA (1)...(19): siRNA sense strand
gcaccauacuggaccaaca

SEQ ID NO: 26622 - RNA, 19 nt, Homo sapiens
  misc_RNA (1)...(19): siRNA sense strand
gcacuggagccucauuaug

SEQ ID NO: 26623 - RNA, 19 nt, Homo sapiens
  misc_RNA (1)...(19): siRNA sense strand
aaaguguggucccaucuga

SEQ ID NO: 26624 - RNA, 19 nt, Homo sapiens
  misc_RNA (1)...(19): siRNA sense strand
cauuggaggcuacaaggua

SEQ ID NO: 26625 - RNA, 19 nt, Homo sapiens
  misc_RNA (1)...(19): siRNA sense strand
aguugaggauaccacauua

SEQ ID NO: 26626 - RNA, 19 nt, Homo sapiens
  misc_RNA (1)...(19): siRNA sense strand
gaaaguguggucccaucug

SEQ ID NO: 26627 - RNA, 19 nt, Homo sapiens
  misc_RNA (1)...(19): siRNA sense strand
cagcacuggagccucauua

SEQ ID NO: 26628 - RNA, 19 nt, Homo sapiens
  misc_RNA (1)...(19): siRNA sense strand
ggaacccaaugccaaccau

SEQ ID NO: 26629 - RNA, 19 nt, Homo sapiens
  misc_RNA (1)...(19): siRNA sense strand
ugaauacggguccaucaau

SEQ ID NO: 26630 - RNA, 19 nt, Homo sapiens
  misc_RNA (1)...(19): siRNA sense strand
acacguaccaccuggaugu

SEQ ID NO: 26631 - RNA, 19 nt, Homo sapiens
  misc_RNA (1)...(19): siRNA sense strand
ucugacaagggaaauuaua

SEQ ID NO: 26632 - RNA, 19 nt, Homo sapiens
  misc_RNA (1)...(19): siRNA sense strand
cauacuggaccaacacaga

SEQ ID NO: 26633 - RNA, 19 nt, Homo sapiens
  misc_RNA (1)...(19): siRNA sense strand
ccaacacugucaaguuucg

SEQ ID NO: 26634 - RNA, 19 nt, Homo sapiens
  misc_RNA (1)...(19): siRNA sense strand
gaggcuacaagguacgaaa

SEQ ID NO: 26635 - RNA, 19 nt, Homo sapiens
  misc_RNA (1)...(19): siRNA sense strand
cguaccaccuggauguugu

SEQ ID NO: 26636 - RNA, 19 nt, Homo sapiens
  misc_RNA (1)...(19): siRNA sense strand
ucaguuuaguugaggauac

SEQ ID NO: 26637 - RNA, 19 nt, Homo sapiens
  misc_RNA (1)...(19): siRNA sense strand
ggaaaguguggucccaucu

SEQ ID NO: 26638 - RNA, 19 nt, Homo sapiens
  misc_RNA (1)...(19): siRNA sense strand
uaguugaggauaccacauu

SEQ ID NO: 26639 - RNA, 19 nt, Homo sapiens
  misc_RNA (1)...(19): siRNA sense strand
gcuacaagguacgaaacca

SEQ ID NO: 26640 - RNA, 19 nt, Homo sapiens
  misc_RNA (1)...(19): siRNA sense strand
cacuggagccucauuaugg

SEQ ID NO: 26641 - RNA, 19 nt, Homo sapiens
  misc_RNA (1)...(19): siRNA sense strand
cggccaacacugucaaguu

SEQ ID NO: 26642 - RNA, 19 nt, Homo sapiens
  misc_RNA (1)...(19): siRNA sense strand
acuggagccucauuaugga

SEQ ID NO: 26643 - RNA, 19 nt, Homo sapiens
  misc_RNA (1)...(19): siRNA sense strand
uaagcaggagcaucgcauu

SEQ ID NO: 26644 - RNA, 19 nt, Homo sapiens
  misc_RNA (1)...(19): siRNA sense strand
ggagccucauuauggaaag

SEQ ID NO: 26645 - RNA, 19 nt, Homo sapiens
  misc_RNA (1)...(19): siRNA sense strand
ggccaacacugucaaguuu

SEQ ID NO: 26646 - RNA, 19 nt, Homo sapiens
  misc_RNA (1)...(19): siRNA sense strand
gaauacggguccaucaauc

SEQ ID NO: 26647 - RNA, 19 nt, Homo sapiens
  misc_RNA (1)...(19): siRNA sense strand
gcaggagcaucgcauugga

SEQ ID NO: 26648 - RNA, 19 nt, Homo sapiens
  misc_RNA (1)...(19): siRNA sense strand
caucugacaagggaaauua

SEQ ID NO: 26649 - RNA, 19 nt, Homo sapiens
  misc_RNA (1)...(19): siRNA sense strand
gcaccauacuggaccaaca

SEQ ID NO: 26650 - RNA, 19 nt, Homo sapiens
  misc_RNA (1)...(19): siRNA sense strand
gcacuggagccucauuaug

SEQ ID NO: 26651 - RNA, 19 nt, Homo sapiens
  misc_RNA (1)...(19): siRNA sense strand
aaaguguggucccaucuga

SEQ ID NO: 26652 - RNA, 19 nt, Homo sapiens
  misc_RNA (1)...(19): siRNA sense strand
cauuggaggcuacaaggua

SEQ ID NO: 26653 - RNA, 19 nt, Homo sapiens
  misc_RNA (1)...(19): siRNA sense strand
aguugaggauaccacauua

SEQ ID NO: 26654 - RNA, 19 nt, Homo sapiens
  misc_RNA (1)...(19): siRNA sense strand
gaaaguguggucccaucug

SEQ ID NO: 26655 - RNA, 19 nt, Homo sapiens
  misc_RNA (1)...(19): siRNA sense strand
cagcacuggagccucauua

SEQ ID NO: 26656 - RNA, 19 nt, Homo sapiens
  misc_RNA (1)...(19): siRNA sense strand
ggaacccaaugccaaccau

SEQ ID NO: 26657 - RNA, 19 nt, Homo sapiens
  misc_RNA (1)...(19): siRNA sense strand
ugaauacggguccaucaau

SEQ ID NO: 26658 - RNA, 19 nt, Homo sapiens
  misc_RNA (1)...(19): siRNA sense strand
acacguaccaccuggaugu

SEQ ID NO: 26659 - RNA, 19 nt, Homo sapiens
  misc_RNA (1)...(19): siRNA sense strand
ucugacaagggaaauuaua

SEQ ID NO: 26660 - RNA, 19 nt, Homo sapiens
  misc_RNA (1)...(19): siRNA sense strand
cauacuggaccaacacaga

SEQ ID NO: 26661 - RNA, 19 nt, Homo sapiens
  misc_RNA (1)...(19): siRNA sense strand
ccaacacugucaaguuucg

SEQ ID NO: 26662 - RNA, 19 nt, Homo sapiens
  misc_RNA (1)...(19): siRNA sense strand
gaggcuacaagguacgaaa

SEQ ID NO: 26663 - RNA, 19 nt, Homo sapiens
  misc_RNA (1)...(19): siRNA sense strand
cguaccaccuggauguugu

SEQ ID NO: 26664 - RNA, 19 nt, Homo sapiens
  misc_RNA (1)...(19): siRNA sense strand
ucaguuuaguugaggauac

SEQ ID NO: 26665 - RNA, 19 nt, Homo sapiens
  misc_RNA (1)...(19): siRNA sense strand
ggaaaguguggucccaucu

SEQ ID NO: 26666 - RNA, 19 nt, Homo sapiens
  misc_RNA (1)...(19): siRNA sense strand
uaguugaggauaccacauu

SEQ ID NO: 26667 - RNA, 19 nt, Homo sapiens
  misc_RNA (1)...(19): siRNA sense strand
gcuacaagguacgaaacca

SEQ ID NO: 26668 - RNA, 19 nt, Homo sapiens
  misc_RNA (1)...(19): siRNA sense strand
cacuggagccucauuaugg

SEQ ID NO: 26669 - RNA, 19 nt, Homo sapiens
  misc_RNA (1)...(19): siRNA sense strand
cggccaacacugucaaguu

SEQ ID NO: 26670 - RNA, 19 nt, Homo sapiens
  misc_RNA (1)...(19): siRNA sense strand
acuggagccucauuaugga

SEQ ID NO: 26671 - RNA, 19 nt, Homo sapiens
  misc_RNA (1)...(19): siRNA sense strand
uaagcaggagcaucgcauu

SEQ ID NO: 26672 - RNA, 19 nt, Homo sapiens
  misc_RNA (1)...(19): siRNA sense strand
ggagccucauuauggaaag

SEQ ID NO: 26673 - RNA, 19 nt, Homo sapiens
  misc_RNA (1)...(19): siRNA sense strand
ggccaacacugucaaguuu

SEQ ID NO: 26674 - RNA, 19 nt, Homo sapiens
  misc_RNA (1)...(19): siRNA sense strand
gaauacggguccaucaauc

SEQ ID NO: 26675 - RNA, 19 nt, Homo sapiens
  misc_RNA (1)...(19): siRNA sense strand
gcaggagcaucgcauugga

SEQ ID NO: 26676 - RNA, 19 nt, Homo sapiens
  misc_RNA (1)...(19): siRNA sense strand
caucugacaagggaaauua

SEQ ID NO: 26677 - RNA, 19 nt, Homo sapiens
  misc_RNA (1)...(19): siRNA sense strand
gcaccauacuggaccaaca

SEQ ID NO: 26678 - RNA, 19 nt, Homo sapiens
  misc_RNA (1)...(19): siRNA sense strand
gcacuggagccucauuaug

SEQ ID NO: 26679 - RNA, 19 nt, Homo sapiens
  misc_RNA (1)...(19): siRNA sense strand
aaaguguggucccaucuga

SEQ ID NO: 26680 - RNA, 19 nt, Homo sapiens
  misc_RNA (1)...(19): siRNA sense strand
cauuggaggcuacaaggua

SEQ ID NO: 26681 - RNA, 19 nt, Homo sapiens
  misc_RNA (1)...(19): siRNA sense strand
aguugaggauaccacauua

SEQ ID NO: 26682 - RNA, 19 nt, Homo sapiens
  misc_RNA (1)...(19): siRNA sense strand
gaaaguguggucccaucug

SEQ ID NO: 26683 - RNA, 19 nt, Homo sapiens
  misc_RNA (1)...(19): siRNA sense strand
cagcacuggagccucauua

SEQ ID NO: 26684 - RNA, 19 nt, Homo sapiens
  misc_RNA (1)...(19): siRNA sense strand
ggaacccaaugccaaccau

SEQ ID NO: 26685 - RNA, 19 nt, Homo sapiens
  misc_RNA (1)...(19): siRNA sense strand
ugaauacggguccaucaau

SEQ ID NO: 26686 - RNA, 19 nt, Homo sapiens
  misc_RNA (1)...(19): siRNA sense strand
acacguaccaccuggaugu

SEQ ID NO: 26687 - RNA, 19 nt, Homo sapiens
  misc_RNA (1)...(19): siRNA sense strand
ucugacaagggaaauuaua

SEQ ID NO: 26688 - RNA, 19 nt, Homo sapiens
  misc_RNA (1)...(19): siRNA sense strand
cauacuggaccaacacaga

SEQ ID NO: 26689 - RNA, 19 nt, Homo sapiens
  misc_RNA (1)...(19): siRNA sense strand
ccaacacugucaaguuucg

SEQ ID NO: 26690 - RNA, 19 nt, Homo sapiens
  misc_RNA (1)...(19): siRNA sense strand
gaggcuacaagguacgaaa

SEQ ID NO: 26691 - RNA, 19 nt, Homo sapiens
  misc_RNA (1)...(19): siRNA sense strand
cguaccaccuggauguugu

SEQ ID NO: 26692 - RNA, 19 nt, Homo sapiens
  misc_RNA (1)...(19): siRNA sense strand
ucaguuuaguugaggauac

SEQ ID NO: 26693 - RNA, 19 nt, Homo sapiens
  misc_RNA (1)...(19): siRNA sense strand
ggaaaguguggucccaucu

SEQ ID NO: 26694 - RNA, 19 nt, Homo sapiens
  misc_RNA (1)...(19): siRNA sense strand
uaguugaggauaccacauu

SEQ ID NO: 26695 - RNA, 19 nt, Homo sapiens
  misc_RNA (1)...(19): siRNA sense strand
gcuacaagguacgaaacca

SEQ ID NO: 26696 - RNA, 19 nt, Homo sapiens
  misc_RNA (1)...(19): siRNA sense strand
cacuggagccucauuaugg

SEQ ID NO: 26697 - RNA, 19 nt, Homo sapiens
  misc_RNA (1)...(19): siRNA sense strand
cggccaacacugucaaguu

SEQ ID NO: 26698 - RNA, 19 nt, Homo sapiens
  misc_RNA (1)...(19): siRNA sense strand
acuggagccucauuaugga

SEQ ID NO: 26699 - RNA, 19 nt, Homo sapiens
  misc_RNA (1)...(19): siRNA sense strand
uaagcaggagcaucgcauu

SEQ ID NO: 26700 - RNA, 19 nt, Homo sapiens
  misc_RNA (1)...(19): siRNA sense strand
ggagccucauuauggaaag

SEQ ID NO: 26701 - RNA, 19 nt, Homo sapiens
  misc_RNA (1)...(19): siRNA sense strand
ggccaacacugucaaguuu

SEQ ID NO: 26702 - RNA, 19 nt, Homo sapiens
  misc_RNA (1)...(19): siRNA sense strand
gaauacggguccaucaauc

SEQ ID NO: 26703 - RNA, 19 nt, Homo sapiens
  misc_RNA (1)...(19): siRNA sense strand
gcaggagcaucgcauugga

SEQ ID NO: 26704 - RNA, 19 nt, Homo sapiens
  misc_RNA (1)...(19): siRNA sense strand
caucugacaagggaaauua

SEQ ID NO: 26705 - RNA, 19 nt, Homo sapiens
  misc_RNA (1)...(19): siRNA sense strand
gcaccauacuggaccaaca

SEQ ID NO: 26706 - RNA, 19 nt, Homo sapiens
  misc_RNA (1)...(19): siRNA sense strand
gcacuggagccucauuaug

SEQ ID NO: 26707 - RNA, 19 nt, Homo sapiens
  misc_RNA (1)...(19): siRNA sense strand
aaaguguggucccaucuga

SEQ ID NO: 26708 - RNA, 19 nt, Homo sapiens
  misc_RNA (1)...(19): siRNA sense strand
cauuggaggcuacaaggua

SEQ ID NO: 26709 - RNA, 19 nt, Homo sapiens
  misc_RNA (1)...(19): siRNA sense strand
aguugaggauaccacauua

SEQ ID NO: 26710 - RNA, 19 nt, Homo sapiens
  misc_RNA (1)...(19): siRNA sense strand
gaaaguguggucccaucug

SEQ ID NO: 26711 - RNA, 19 nt, Homo sapiens
  misc_RNA (1)...(19): siRNA sense strand
cagcacuggagccucauua

SEQ ID NO: 26712 - RNA, 19 nt, Homo sapiens
  misc_RNA (1)...(19): siRNA sense strand
ggaacccaaugccaaccau

SEQ ID NO: 26713 - RNA, 19 nt, Homo sapiens
  misc_RNA (1)...(19): siRNA sense strand
ugaauacggguccaucaau

SEQ ID NO: 26714 - RNA, 19 nt, Homo sapiens
  misc_RNA (1)...(19): siRNA sense strand
acacguaccaccuggaugu

SEQ ID NO: 26715 - RNA, 19 nt, Homo sapiens
  misc_RNA (1)...(19): siRNA sense strand
ucugacaagggaaauuaua

SEQ ID NO: 26716 - RNA, 19 nt, Homo sapiens
  misc_RNA (1)...(19): siRNA sense strand
cauacuggaccaacacaga

SEQ ID NO: 26717 - RNA, 19 nt, Homo sapiens
  misc_RNA (1)...(19): siRNA sense strand
ccaacacugucaaguuucg

SEQ ID NO: 26718 - RNA, 19 nt, Homo sapiens
  misc_RNA (1)...(19): siRNA sense strand
gaggcuacaagguacgaaa

SEQ ID NO: 26719 - RNA, 19 nt, Homo sapiens
  misc_RNA (1)...(19): siRNA sense strand
cguaccaccuggauguugu

SEQ ID NO: 26720 - RNA, 19 nt, Homo sapiens
  misc_RNA (1)...(19): siRNA sense strand
ucaguuuaguugaggauac

SEQ ID NO: 26721 - RNA, 19 nt, Homo sapiens
  misc_RNA (1)...(19): siRNA sense strand
ggaaaguguggucccaucu

SEQ ID NO: 26722 - RNA, 19 nt, Homo sapiens
  misc_RNA (1)...(19): siRNA sense strand
uaguugaggauaccacauu

SEQ ID NO: 26723 - RNA, 19 nt, Homo sapiens
  misc_RNA (1)...(19): siRNA sense strand
gcuacaagguacgaaacca

SEQ ID NO: 26724 - RNA, 19 nt, Homo sapiens
  misc_RNA (1)...(19): siRNA sense strand
cacuggagccucauuaugg

SEQ ID NO: 26725 - RNA, 19 nt, Homo sapiens
  misc_RNA (1)...(19): siRNA sense strand
cggccaacacugucaaguu

SEQ ID NO: 26726 - RNA, 19 nt, Homo sapiens
  misc_RNA (1)...(19): siRNA sense strand
acuggagccucauuaugga

SEQ ID NO: 26727 - RNA, 19 nt, Homo sapiens
  misc_RNA (1)...(19): siRNA sense strand
uaagcaggagcaucgcauu

SEQ ID NO: 26728 - RNA, 19 nt, Homo sapiens
  misc_RNA (1)...(19): siRNA sense strand
ggagccucauuauggaaag

SEQ ID NO: 26729 - RNA, 19 nt, Homo sapiens
  misc_RNA (1)...(19): siRNA sense strand
ggccaacacugucaaguuu

SEQ ID NO: 26730 - RNA, 19 nt, Homo sapiens
  misc_RNA (1)...(19): siRNA sense strand
gaauacggguccaucaauc

SEQ ID NO: 26731 - RNA, 19 nt, Homo sapiens
  misc_RNA (1)...(19): siRNA sense strand
gcaggagcaucgcauugga

SEQ ID NO: 26732 - RNA, 19 nt, Homo sapiens
  misc_RNA (1)...(19): siRNA sense strand
caucugacaagggaaauua

SEQ ID NO: 26733 - RNA, 19 nt, Homo sapiens
  misc_RNA (1)...(19): siRNA sense strand
gcaccauacuggaccaaca

SEQ ID NO: 26734 - RNA, 19 nt, Homo sapiens
  misc_RNA (1)...(19): siRNA sense strand
gcacuggagccucauuaug

SEQ ID NO: 26735 - RNA, 19 nt, Homo sapiens
  misc_RNA (1)...(19): siRNA sense strand
aaaguguggucccaucuga

SEQ ID NO: 26736 - RNA, 19 nt, Homo sapiens
  misc_RNA (1)...(19): siRNA sense strand
cauuggaggcuacaaggua

SEQ ID NO: 26737 - RNA, 19 nt, Homo sapiens
  misc_RNA (1)...(19): siRNA sense strand
aguugaggauaccacauua

SEQ ID NO: 26738 - RNA, 19 nt, Homo sapiens
  misc_RNA (1)...(19): siRNA sense strand
gaaaguguggucccaucug

SEQ ID NO: 26739 - RNA, 19 nt, Homo sapiens
  misc_RNA (1)...(19): siRNA sense strand
cagcacuggagccucauua

SEQ ID NO: 26740 - RNA, 19 nt, Homo sapiens
  misc_RNA (1)...(19): siRNA sense strand
ggaacccaaugccaaccau

SEQ ID NO: 26741 - RNA, 19 nt, Homo sapiens
  misc_RNA (1)...(19): siRNA sense strand
ugaauacggguccaucaau

SEQ ID NO: 26742 - RNA, 19 nt, Homo sapiens
  misc_RNA (1)...(19): siRNA sense strand
acacguaccaccuggaugu

SEQ ID NO: 26743 - RNA, 19 nt, Homo sapiens
  misc_RNA (1)...(19): siRNA sense strand
ucugacaagggaaauuaua

SEQ ID NO: 26744 - RNA, 19 nt, Homo sapiens
  misc_RNA (1)...(19): siRNA sense strand
cauacuggaccaacacaga

SEQ ID NO: 26745 - RNA, 19 nt, Homo sapiens
  misc_RNA (1)...(19): siRNA sense strand
ccaacacugucaaguuucg

SEQ ID NO: 26746 - RNA, 19 nt, Homo sapiens
  misc_RNA (1)...(19): siRNA sense strand
gaggcuacaagguacgaaa

SEQ ID NO: 26747 - RNA, 19 nt, Homo sapiens
  misc_RNA (1)...(19): siRNA sense strand
cguaccaccuggauguugu

SEQ ID NO: 26748 - RNA, 19 nt, Homo sapiens
  misc_RNA (1)...(19): siRNA sense strand
ucaguuuaguugaggauac

SEQ ID NO: 26749 - RNA, 19 nt, Homo sapiens
  misc_RNA (1)...(19): siRNA sense strand
ggaaaguguggucccaucu

SEQ ID NO: 26750 - RNA, 19 nt, Homo sapiens
  misc_RNA (1)...(19): siRNA sense strand
uaguugaggauaccacauu

SEQ ID NO: 26751 - RNA, 19 nt, Homo sapiens
  misc_RNA (1)...(19): siRNA sense strand
gcuacaagguacgaaacca

SEQ ID NO: 26752 - RNA, 19 nt, Homo sapiens
  misc_RNA (1)...(19): siRNA sense strand
cacuggagccucauuaugg

SEQ ID NO: 26753 - RNA, 19 nt, Homo sapiens
  misc_RNA (1)...(19): siRNA sense strand
cggccaacacugucaaguu

SEQ ID NO: 26754 - RNA, 19 nt, Homo sapiens
  misc_RNA (1)...(19): siRNA sense strand
acuggagccucauuaugga

SEQ ID NO: 26755 - RNA, 19 nt, Homo sapiens
  misc_RNA (1)...(19): siRNA sense strand
uaagcaggagcaucgcauu

SEQ ID NO: 26756 - RNA, 19 nt, Homo sapiens
  misc_RNA (1)...(19): siRNA sense strand
ggagccucauuauggaaag

SEQ ID NO: 26757 - RNA, 19 nt, Homo sapiens
  misc_RNA (1)...(19): siRNA sense strand
ggccaacacugucaaguuu

SEQ ID NO: 26758 - RNA, 19 nt, Homo sapiens
  misc_RNA (1)...(19): siRNA sense strand
gaauacggguccaucaauc

SEQ ID NO: 26759 - RNA, 19 nt, Homo sapiens
  misc_RNA (1)...(19): siRNA sense strand
gcaggagcaucgcauugga

SEQ ID NO: 26760 - RNA, 19 nt, Homo sapiens
  misc_RNA (1)...(19): siRNA sense strand
caucugacaagggaaauua

SEQ ID NO: 26761 - RNA, 19 nt, Homo sapiens
  misc_RNA (1)...(19): siRNA sense strand
gcaccauacuggaccaaca

SEQ ID NO: 26762 - RNA, 19 nt, Homo sapiens
  misc_RNA (1)...(19): siRNA sense strand
gcacuggagccucauuaug

SEQ ID NO: 26763 - RNA, 19 nt, Homo sapiens
  misc_RNA (1)...(19): siRNA sense strand
aaaguguggucccaucuga

SEQ ID NO: 26764 - RNA, 19 nt, Homo sapiens
  misc_RNA (1)...(19): siRNA sense strand
cauuggaggcuacaaggua

SEQ ID NO: 26765 - RNA, 19 nt, Homo sapiens
  misc_RNA (1)...(19): siRNA sense strand
aguugaggauaccacauua

SEQ ID NO: 26766 - RNA, 19 nt, Homo sapiens
  misc_RNA (1)...(19): siRNA sense strand
gaaaguguggucccaucug

SEQ ID NO: 26767 - RNA, 19 nt, Homo sapiens
  misc_RNA (1)...(19): siRNA sense strand
cagcacuggagccucauua

SEQ ID NO: 26768 - RNA, 19 nt, Homo sapiens
  misc_RNA (1)...(19): siRNA sense strand
ggaacccaaugccaaccau

SEQ ID NO: 26769 - RNA, 19 nt, Homo sapiens
  misc_RNA (1)...(19): siRNA sense strand
ugaauacggguccaucaau

SEQ ID NO: 26770 - RNA, 19 nt, Homo sapiens
  misc_RNA (1)...(19): siRNA sense strand
acacguaccaccuggaugu

SEQ ID NO: 26771 - RNA, 19 nt, Homo sapiens
  misc_RNA (1)...(19): siRNA sense strand
ucugacaagggaaauuaua

SEQ ID NO: 26772 - RNA, 19 nt, Homo sapiens
  misc_RNA (1)...(19): siRNA sense strand
cauacuggaccaacacaga

SEQ ID NO: 26773 - RNA, 19 nt, Homo sapiens
  misc_RNA (1)...(19): siRNA sense strand
ccaacacugucaaguuucg

SEQ ID NO: 26774 - RNA, 19 nt, Homo sapiens
  misc_RNA (1)...(19): siRNA sense strand
gaggcuacaagguacgaaa

SEQ ID NO: 26775 - RNA, 19 nt, Homo sapiens
  misc_RNA (1)...(19): siRNA sense strand
cguaccaccuggauguugu

SEQ ID NO: 26776 - RNA, 19 nt, Homo sapiens
  misc_RNA (1)...(19): siRNA sense strand
ucaguuuaguugaggauac

SEQ ID NO: 26777 - RNA, 19 nt, Homo sapiens
  misc_RNA (1)...(19): siRNA sense strand
ggaaaguguggucccaucu

SEQ ID NO: 26778 - RNA, 19 nt, Homo sapiens
  misc_RNA (1)...(19): siRNA sense strand
uaguugaggauaccacauu

SEQ ID NO: 26779 - RNA, 19 nt, Homo sapiens
  misc_RNA (1)...(19): siRNA sense strand
gcuacaagguacgaaacca

SEQ ID NO: 26780 - RNA, 19 nt, Homo sapiens
  misc_RNA (1)...(19): siRNA sense strand
cacuggagccucauuaugg

SEQ ID NO: 26781 - RNA, 19 nt, Homo sapiens
  misc_RNA (1)...(19): siRNA sense strand
cggccaacacugucaaguu

SEQ ID NO: 26782 - RNA, 19 nt, Homo sapiens
  misc_RNA (1)...(19): siRNA sense strand
acuggagccucauuaugga

SEQ ID NO: 26783 - RNA, 19 nt, Homo sapiens
  misc_RNA (1)...(19): siRNA sense strand
uaagcaggagcaucgcauu

SEQ ID NO: 26784 - RNA, 19 nt, Homo sapiens
  misc_RNA (1)...(19): siRNA sense strand
ggagccucauuauggaaag

SEQ ID NO: 26785 - RNA, 19 nt, Homo sapiens
  misc_RNA (1)...(19): siRNA sense strand
ggccaacacugucaaguuu

SEQ ID NO: 26786 - RNA, 19 nt, Homo sapiens
  misc_RNA (1)...(19): siRNA sense strand
gaauacggguccaucaauc

SEQ ID NO: 26787 - RNA, 19 nt, Homo sapiens
  misc_RNA (1)...(19): siRNA sense strand
gcaggagcaucgcauugga

SEQ ID NO: 26788 - RNA, 19 nt, Homo sapiens
  misc_RNA (1)...(19): siRNA sense strand
caucugacaagggaaauua

SEQ ID NO: 26789 - RNA, 19 nt, Homo sapiens
  misc_RNA (1)...(19): siRNA sense strand
gcaccauacuggaccaaca

SEQ ID NO: 26790 - RNA, 19 nt, Homo sapiens
  misc_RNA (1)...(19): siRNA sense strand
gcacuggagccucauuaug

SEQ ID NO: 26791 - RNA, 19 nt, Homo sapiens
  misc_RNA (1)...(19): siRNA sense strand
aaaguguggucccaucuga

SEQ ID NO: 26792 - RNA, 19 nt, Homo sapiens
  misc_RNA (1)...(19): siRNA sense strand
cauuggaggcuacaaggua

SEQ ID NO: 26793 - RNA, 19 nt, Homo sapiens
  misc_RNA (1)...(19): siRNA sense strand
aguugaggauaccacauua

SEQ ID NO: 26794 - RNA, 19 nt, Homo sapiens
  misc_RNA (1)...(19): siRNA sense strand
gaaaguguggucccaucug

SEQ ID NO: 26795 - RNA, 19 nt, Homo sapiens
  misc_RNA (1)...(19): siRNA sense strand
cagcacuggagccucauua

SEQ ID NO: 26796 - RNA, 19 nt, Homo sapiens
  misc_RNA (1)...(19): siRNA sense strand
ggaacccaaugccaaccau

SEQ ID NO: 26797 - RNA, 19 nt, Homo sapiens
  misc_RNA (1)...(19): siRNA sense strand
ugaauacggguccaucaau

SEQ ID NO: 26798 - RNA, 19 nt, Homo sapiens
  misc_RNA (1)...(19): siRNA sense strand
acacguaccaccuggaugu

SEQ ID NO: 26799 - RNA, 19 nt, Homo sapiens
  misc_RNA (1)...(19): siRNA sense strand
ucugacaagggaaauuaua

SEQ ID NO: 26800 - RNA, 19 nt, Homo sapiens
  misc_RNA (1)...(19): siRNA sense strand
cauacuggaccaacacaga

SEQ ID NO: 26801 - RNA, 19 nt, Homo sapiens
  misc_RNA (1)...(19): siRNA sense strand
ccaacacugucaaguuucg

SEQ ID NO: 26802 - RNA, 19 nt, Homo sapiens
  misc_RNA (1)...(19): siRNA sense strand
gaggcuacaagguacgaaa

SEQ ID NO: 26803 - RNA, 19 nt, Homo sapiens
  misc_RNA (1)...(19): siRNA sense strand
cguaccaccuggauguugu

SEQ ID NO: 26804 - RNA, 19 nt, Homo sapiens
  misc_RNA (1)...(19): siRNA sense strand
ucaguuuaguugaggauac

SEQ ID NO: 26805 - RNA, 19 nt, Homo sapiens
  misc_RNA (1)...(19): siRNA sense strand
ggaaaguguggucccaucu

SEQ ID NO: 26806 - RNA, 19 nt, Homo sapiens
  misc_RNA (1)...(19): siRNA sense strand
uaguugaggauaccacauu

SEQ ID NO: 26807 - RNA, 19 nt, Homo sapiens
  misc_RNA (1)...(19): siRNA sense strand
gcuacaagguacgaaacca

SEQ ID NO: 26808 - RNA, 19 nt, Homo sapiens
  misc_RNA (1)...(19): siRNA sense strand
cacuggagccucauuaugg

SEQ ID NO: 26809 - RNA, 19 nt, Homo sapiens
  misc_RNA (1)...(19): siRNA sense strand
cggccaacacugucaaguu

SEQ ID NO: 26810 - RNA, 19 nt, Homo sapiens
  misc_RNA (1)...(19): siRNA sense strand
acuggagccucauuaugga

SEQ ID NO: 26811 - RNA, 19 nt, Homo sapiens
  misc_RNA (1)...(19): siRNA sense strand
uaagcaggagcaucgcauu

SEQ ID NO: 26812 - RNA, 19 nt, Homo sapiens
  misc_RNA (1)...(19): siRNA sense strand
ggagccucauuauggaaag

SEQ ID NO: 26813 - RNA, 19 nt, Homo sapiens
  misc_RNA (1)...(19): siRNA sense strand
ggacgaggcugaggacaca

SEQ ID NO: 26814 - RNA, 19 nt, Homo sapiens
  misc_RNA (1)...(19): siRNA sense strand
ugucggaccuggugucuga

SEQ ID NO: 26815 - RNA, 19 nt, Homo sapiens
  misc_RNA (1)...(19): siRNA sense strand
gcaucaagcugcggcauca

SEQ ID NO: 26816 - RNA, 19 nt, Homo sapiens
  misc_RNA (1)...(19): siRNA sense strand
ugaaagacgaugccacuga

SEQ ID NO: 26817 - RNA, 19 nt, Homo sapiens
  misc_RNA (1)...(19): siRNA sense strand
ccgugaagaugcugaaaga

SEQ ID NO: 26818 - RNA, 19 nt, Homo sapiens
  misc_RNA (1)...(19): siRNA sense strand
ugaugaagaucgcagacuu

SEQ ID NO: 26819 - RNA, 19 nt, Homo sapiens
  misc_RNA (1)...(19): siRNA sense strand
gaggacaacgugaugaaga

SEQ ID NO: 26820 - RNA, 19 nt, Homo sapiens
  misc_RNA (1)...(19): siRNA sense strand
agauggagaugaugaagau

SEQ ID NO: 26821 - RNA, 19 nt, Homo sapiens
  misc_RNA (1)...(19): siRNA sense strand
ggacggcacacccuacguu

SEQ ID NO: 26822 - RNA, 19 nt, Homo sapiens
  misc_RNA (1)...(19): siRNA sense strand
guacuuggccucccagaag

SEQ ID NO: 26823 - RNA, 19 nt, Homo sapiens
  misc_RNA (1)...(19): siRNA sense strand
gaugaucgggaaacacaaa

SEQ ID NO: 26824 - RNA, 19 nt, Homo sapiens
  misc_RNA (1)...(19): siRNA sense strand
ugucugagauggagaugau

SEQ ID NO: 26825 - RNA, 19 nt, Homo sapiens
  misc_RNA (1)...(19): siRNA sense strand
ugcacaaccucgacuacua

SEQ ID NO: 26826 - RNA, 19 nt, Homo sapiens
  misc_RNA (1)...(19): siRNA sense strand
acacacgaccuguacauga

SEQ ID NO: 26827 - RNA, 19 nt, Homo sapiens
  misc_RNA (1)...(19): siRNA sense strand
ucaagcacguggaggugaa

SEQ ID NO: 26828 - RNA, 19 nt, Homo sapiens
  misc_RNA (1)...(19): siRNA sense strand
ccgagcggauggacaagaa

SEQ ID NO: 26829 - RNA, 19 nt, Homo sapiens
  misc_RNA (1)...(19): siRNA sense strand
gcacaaccucgacuacuac

SEQ ID NO: 26830 - RNA, 19 nt, Homo sapiens
  misc_RNA (1)...(19): siRNA sense strand
gagauggagaugaugaaga

SEQ ID NO: 26831 - RNA, 19 nt, Homo sapiens
  misc_RNA (1)...(19): siRNA sense strand
gcacacacgaccuguacau

SEQ ID NO: 26832 - RNA, 19 nt, Homo sapiens
  misc_RNA (1)...(19): siRNA sense strand
uguacgugcugguggagua

SEQ ID NO: 26833 - RNA, 19 nt, Homo sapiens
  misc_RNA (1)...(19): siRNA sense strand
gacggcacacccuacguua

SEQ ID NO: 26834 - RNA, 19 nt, Homo sapiens
  misc_RNA (1)...(19): siRNA sense strand
cacacgaccuguacaugau

SEQ ID NO: 26835 - RNA, 19 nt, Homo sapiens
  misc_RNA (1)...(19): siRNA sense strand
caaccucgacuacuacaag

SEQ ID NO: 26836 - RNA, 19 nt, Homo sapiens
  misc_RNA (1)...(19): siRNA sense strand
ugaagaugaucgggaaaca

SEQ ID NO: 26837 - RNA, 19 nt, Homo sapiens
  misc_RNA (1)...(19): siRNA sense strand
acaccugcgucguggagaa

SEQ ID NO: 26838 - RNA, 19 nt, Homo sapiens
  misc_RNA (1)...(19): siRNA sense strand
ggaccuggugucugagaug

SEQ ID NO: 26839 - RNA, 19 nt, Homo sapiens
  misc_RNA (1)...(19): siRNA sense strand
gcagcauccggcagacgua

SEQ ID NO: 26840 - RNA, 19 nt, Homo sapiens
  misc_RNA (1)...(19): siRNA sense strand
caccguagccgugaagaug

SEQ ID NO: 26841 - RNA, 19 nt, Homo sapiens
  misc_RNA (1)...(19): siRNA sense strand
ccaucggcauugacaagga

SEQ ID NO: 26842 - RNA, 19 nt, Homo sapiens
  misc_RNA (1)...(19): siRNA sense strand
gaagaugcugaaagacgau

SEQ ID NO: 26843 - RNA, 19 nt, Homo sapiens
  misc_RNA (1)...(19): siRNA sense strand
gaccgaggacaacgugaug

SEQ ID NO: 26844 - RNA, 19 nt, Homo sapiens
  misc_RNA (1)...(19): siRNA sense strand
ggagccuggucauggaaag

SEQ ID NO: 26845 - RNA, 19 nt, Homo sapiens
  misc_RNA (1)...(19): siRNA sense strand
aggacaacgugaugaagau

SEQ ID NO: 26846 - RNA, 19 nt, Homo sapiens
  misc_RNA (1)...(19): siRNA sense strand
cgucguggagaacaaguuu

SEQ ID NO: 26847 - RNA, 19 nt, Homo sapiens
  misc_RNA (1)...(19): siRNA sense strand
agugacgucugguccuuug

SEQ ID NO: 26848 - RNA, 19 nt, Homo sapiens
  misc_RNA (1)...(19): siRNA sense strand
uggagaugaugaagaugau

SEQ ID NO: 26849 - RNA, 19 nt, Homo sapiens
  misc_RNA (1)...(19): siRNA sense strand
cggaggccaucggcauuga

SEQ ID NO: 26850 - RNA, 19 nt, Homo sapiens
  misc_RNA (1)...(19): siRNA sense strand
aagaugaucgggaaacaca

SEQ ID NO: 26851 - RNA, 19 nt, Homo sapiens
  misc_RNA (1)...(19): siRNA sense strand
gcaguggagccuggucaug

SEQ ID NO: 26852 - RNA, 19 nt, Homo sapiens
  misc_RNA (1)...(19): siRNA sense strand
agagugacgucugguccuu

SEQ ID NO: 26853 - RNA, 19 nt, Homo sapiens
  misc_RNA (1)...(19): siRNA sense strand
ggacaacgugaugaagauc

SEQ ID NO: 26854 - RNA, 19 nt, Homo sapiens
  misc_RNA (1)...(19): siRNA sense strand
ggacgaggcugaggacaca

SEQ ID NO: 26855 - RNA, 19 nt, Homo sapiens
  misc_RNA (1)...(19): siRNA sense strand
ugucggaccuggugucuga

SEQ ID NO: 26856 - RNA, 19 nt, Homo sapiens
  misc_RNA (1)...(19): siRNA sense strand
gcaucaagcugcggcauca

SEQ ID NO: 26857 - RNA, 19 nt, Homo sapiens
  misc_RNA (1)...(19): siRNA sense strand
ugaaagacgaugccacuga

SEQ ID NO: 26858 - RNA, 19 nt, Homo sapiens
  misc_RNA (1)...(19): siRNA sense strand
ccgugaagaugcugaaaga

SEQ ID NO: 26859 - RNA, 19 nt, Homo sapiens
  misc_RNA (1)...(19): siRNA sense strand
ugaugaagaucgcagacuu

SEQ ID NO: 26860 - RNA, 19 nt, Homo sapiens
  misc_RNA (1)...(19): siRNA sense strand
gaggacaacgugaugaaga

SEQ ID NO: 26861 - RNA, 19 nt, Homo sapiens
  misc_RNA (1)...(19): siRNA sense strand
agauggagaugaugaagau

SEQ ID NO: 26862 - RNA, 19 nt, Homo sapiens
  misc_RNA (1)...(19): siRNA sense strand
ggacggcacacccuacguu

SEQ ID NO: 26863 - RNA, 19 nt, Homo sapiens
  misc_RNA (1)...(19): siRNA sense strand
guacuuggccucccagaag

SEQ ID NO: 26864 - RNA, 19 nt, Homo sapiens
  misc_RNA (1)...(19): siRNA sense strand
gaugaucgggaaacacaaa

SEQ ID NO: 26865 - RNA, 19 nt, Homo sapiens
  misc_RNA (1)...(19): siRNA sense strand
ugucugagauggagaugau

SEQ ID NO: 26866 - RNA, 19 nt, Homo sapiens
  misc_RNA (1)...(19): siRNA sense strand
ugcacaaccucgacuacua

SEQ ID NO: 26867 - RNA, 19 nt, Homo sapiens
  misc_RNA (1)...(19): siRNA sense strand
acacacgaccuguacauga

SEQ ID NO: 26868 - RNA, 19 nt, Homo sapiens
  misc_RNA (1)...(19): siRNA sense strand
ucaagcacguggaggugaa

SEQ ID NO: 26869 - RNA, 19 nt, Homo sapiens
  misc_RNA (1)...(19): siRNA sense strand
ccgagcggauggacaagaa

SEQ ID NO: 26870 - RNA, 19 nt, Homo sapiens
  misc_RNA (1)...(19): siRNA sense strand
gcacaaccucgacuacuac

SEQ ID NO: 26871 - RNA, 19 nt, Homo sapiens
  misc_RNA (1)...(19): siRNA sense strand
gagauggagaugaugaaga

SEQ ID NO: 26872 - RNA, 19 nt, Homo sapiens
  misc_RNA (1)...(19): siRNA sense strand
gcacacacgaccuguacau

SEQ ID NO: 26873 - RNA, 19 nt, Homo sapiens
  misc_RNA (1)...(19): siRNA sense strand
uguacgugcugguggagua

SEQ ID NO: 26874 - RNA, 19 nt, Homo sapiens
  misc_RNA (1)...(19): siRNA sense strand
gacggcacacccuacguua

SEQ ID NO: 26875 - RNA, 19 nt, Homo sapiens
  misc_RNA (1)...(19): siRNA sense strand
cacacgaccuguacaugau

SEQ ID NO: 26876 - RNA, 19 nt, Homo sapiens
  misc_RNA (1)...(19): siRNA sense strand
caaccucgacuacuacaag

SEQ ID NO: 26877 - RNA, 19 nt, Homo sapiens
  misc_RNA (1)...(19): siRNA sense strand
ugaagaugaucgggaaaca

SEQ ID NO: 26878 - RNA, 19 nt, Homo sapiens
  misc_RNA (1)...(19): siRNA sense strand
acaccugcgucguggagaa

SEQ ID NO: 26879 - RNA, 19 nt, Homo sapiens
  misc_RNA (1)...(19): siRNA sense strand
ggaccuggugucugagaug

SEQ ID NO: 26880 - RNA, 19 nt, Homo sapiens
  misc_RNA (1)...(19): siRNA sense strand
gcagcauccggcagacgua

SEQ ID NO: 26881 - RNA, 19 nt, Homo sapiens
  misc_RNA (1)...(19): siRNA sense strand
caccguagccgugaagaug

SEQ ID NO: 26882 - RNA, 19 nt, Homo sapiens
  misc_RNA (1)...(19): siRNA sense strand
ccaucggcauugacaagga

SEQ ID NO: 26883 - RNA, 19 nt, Homo sapiens
  misc_RNA (1)...(19): siRNA sense strand
gaagaugcugaaagacgau

SEQ ID NO: 26884 - RNA, 19 nt, Homo sapiens
  misc_RNA (1)...(19): siRNA sense strand
gaccgaggacaacgugaug

SEQ ID NO: 26885 - RNA, 19 nt, Homo sapiens
  misc_RNA (1)...(19): siRNA sense strand
ggagccuggucauggaaag

SEQ ID NO: 26886 - RNA, 19 nt, Homo sapiens
  misc_RNA (1)...(19): siRNA sense strand
aggacaacgugaugaagau

SEQ ID NO: 26887 - RNA, 19 nt, Homo sapiens
  misc_RNA (1)...(19): siRNA sense strand
cgucguggagaacaaguuu

SEQ ID NO: 26888 - RNA, 19 nt, Homo sapiens
  misc_RNA (1)...(19): siRNA sense strand
agugacgucugguccuuug

SEQ ID NO: 26889 - RNA, 19 nt, Homo sapiens
  misc_RNA (1)...(19): siRNA sense strand
uggagaugaugaagaugau

SEQ ID NO: 26890 - RNA, 19 nt, Homo sapiens
  misc_RNA (1)...(19): siRNA sense strand
cggaggccaucggcauuga

SEQ ID NO: 26891 - RNA, 19 nt, Homo sapiens
  misc_RNA (1)...(19): siRNA sense strand
aagaugaucgggaaacaca

SEQ ID NO: 26892 - RNA, 19 nt, Homo sapiens
  misc_RNA (1)...(19): siRNA sense strand
gcaguggagccuggucaug

SEQ ID NO: 26893 - RNA, 19 nt, Homo sapiens
  misc_RNA (1)...(19): siRNA sense strand
agagugacgucugguccuu

SEQ ID NO: 26894 - RNA, 19 nt, Homo sapiens
  misc_RNA (1)...(19): siRNA sense strand
ggacaacgugaugaagauc

SEQ ID NO: 26895 - RNA, 19 nt, Homo sapiens
  misc_RNA (1)...(19): siRNA sense strand
gcaagaaguugauuauaug

SEQ ID NO: 26896 - RNA, 19 nt, Homo sapiens
  misc_RNA (1)...(19): siRNA sense strand
ggcaagaaguugauuauau

SEQ ID NO: 26897 - RNA, 19 nt, Homo sapiens
  misc_RNA (1)...(19): siRNA sense strand
acacugaguuugacuauga

SEQ ID NO: 26898 - RNA, 19 nt, Homo sapiens
  misc_RNA (1)...(19): siRNA sense strand
ccagugagcugucagucua

SEQ ID NO: 26899 - RNA, 19 nt, Homo sapiens
  misc_RNA (1)...(19): siRNA sense strand
uagaagaauugccuaauga

SEQ ID NO: 26900 - RNA, 19 nt, Homo sapiens
  misc_RNA (1)...(19): siRNA sense strand
gagccaauaucacaacuau

SEQ ID NO: 26901 - RNA, 19 nt, Homo sapiens
  misc_RNA (1)...(19): siRNA sense strand
ucgcagagauuucuucauu

SEQ ID NO: 26902 - RNA, 19 nt, Homo sapiens
  misc_RNA (1)...(19): siRNA sense strand
gcugaucucugcauuggaa

SEQ ID NO: 26903 - RNA, 19 nt, Homo sapiens
  misc_RNA (1)...(19): siRNA sense strand
gcagagauuucuucauucu

SEQ ID NO: 26904 - RNA, 19 nt, Homo sapiens
  misc_RNA (1)...(19): siRNA sense strand
ccacacaauugaaagaaau

SEQ ID NO: 26905 - RNA, 19 nt, Homo sapiens
  misc_RNA (1)...(19): siRNA sense strand
uaacuaccagccaauauaa

SEQ ID NO: 26906 - RNA, 19 nt, Homo sapiens
  misc_RNA (1)...(19): siRNA sense strand
gacuaugacuuaugcaaug

SEQ ID NO: 26907 - RNA, 19 nt, Homo sapiens
  misc_RNA (1)...(19): siRNA sense strand
ucuccaaccuucccaaauu

SEQ ID NO: 26908 - RNA, 19 nt, Homo sapiens
  misc_RNA (1)...(19): siRNA sense strand
gagcugaaucuaagcgaua

SEQ ID NO: 26909 - RNA, 19 nt, Homo sapiens
  misc_RNA (1)...(19): siRNA sense strand
ccaacaaccugcucuacau

SEQ ID NO: 26910 - RNA, 19 nt, Homo sapiens
  misc_RNA (1)...(19): siRNA sense strand
ggucaucuguggcugcuau

SEQ ID NO: 26911 - RNA, 19 nt, Homo sapiens
  misc_RNA (1)...(19): siRNA sense strand
gcacccauuucuuucuuug

SEQ ID NO: 26912 - RNA, 19 nt, Homo sapiens
  misc_RNA (1)...(19): siRNA sense strand
gaagaauugccuaaugaug

SEQ ID NO: 26913 - RNA, 19 nt, Homo sapiens
  misc_RNA (1)...(19): siRNA sense strand
ucucugagcuucauccaau

SEQ ID NO: 26914 - RNA, 19 nt, Homo sapiens
  misc_RNA (1)...(19): siRNA sense strand
gauagaggcagauguguuc

SEQ ID NO: 26915 - RNA, 19 nt, Homo sapiens
  misc_RNA (1)...(19): siRNA sense strand
caagauucauucucuccaa

SEQ ID NO: 26916 - RNA, 19 nt, Homo sapiens
  misc_RNA (1)...(19): siRNA sense strand
caacacccauccaaggaau

SEQ ID NO: 26917 - RNA, 19 nt, Homo sapiens
  misc_RNA (1)...(19): siRNA sense strand
ugaguuugacuaugacuua

SEQ ID NO: 26918 - RNA, 19 nt, Homo sapiens
  misc_RNA (1)...(19): siRNA sense strand
agaauugccuaaugauguu

SEQ ID NO: 26919 - RNA, 19 nt, Homo sapiens
  misc_RNA (1)...(19): siRNA sense strand
ugacagcuaucaccuugga

SEQ ID NO: 26920 - RNA, 19 nt, Homo sapiens
  misc_RNA (1)...(19): siRNA sense strand
gcugcuauauccacaucua

SEQ ID NO: 26921 - RNA, 19 nt, Homo sapiens
  misc_RNA (1)...(19): siRNA sense strand
ccaacuagaugagcugaau

SEQ ID NO: 26922 - RNA, 19 nt, Homo sapiens
  misc_RNA (1)...(19): siRNA sense strand
uuacauacuugucccucua

SEQ ID NO: 26923 - RNA, 19 nt, Homo sapiens
  misc_RNA (1)...(19): siRNA sense strand
cuaacuaccagccaauaua

SEQ ID NO: 26924 - RNA, 19 nt, Homo sapiens
  misc_RNA (1)...(19): siRNA sense strand
cuccaaccuucccaaauua

SEQ ID NO: 26925 - RNA, 19 nt, Homo sapiens
  misc_RNA (1)...(19): siRNA sense strand
gcuaucaccuuggaaagau

SEQ ID NO: 26926 - RNA, 19 nt, Homo sapiens
  misc_RNA (1)...(19): siRNA sense strand
caacccaugugaagauauc

SEQ ID NO: 26927 - RNA, 19 nt, Homo sapiens
  misc_RNA (1)...(19): siRNA sense strand
uuaagcaccuuccagaugu

SEQ ID NO: 26928 - RNA, 19 nt, Homo sapiens
  misc_RNA (1)...(19): siRNA sense strand
acauaaacauccacacaau

SEQ ID NO: 26929 - RNA, 19 nt, Homo sapiens
  misc_RNA (1)...(19): siRNA sense strand
gaaucuaccugcugcucau

SEQ ID NO: 26930 - RNA, 19 nt, Homo sapiens
  misc_RNA (1)...(19): siRNA sense strand
caaccuucaauaucuguua

SEQ ID NO: 26931 - RNA, 19 nt, Homo sapiens
  misc_RNA (1)...(19): siRNA sense strand
ugaaaugcaagcccaaauu

SEQ ID NO: 26932 - RNA, 19 nt, Homo sapiens
  misc_RNA (1)...(19): siRNA sense strand
caaagauucugcugguucu

SEQ ID NO: 26933 - RNA, 19 nt, Homo sapiens
  misc_RNA (1)...(19): siRNA sense strand
uaucacaacuaugccauug

SEQ ID NO: 26934 - RNA, 19 nt, Homo sapiens
  misc_RNA (1)...(19): siRNA sense strand
caauggaacccaacuagau

SEQ ID NO: 26935 - RNA, 19 nt, Homo sapiens
  misc_RNA (1)...(19): siRNA sense strand
uaacauaaacauccacaca

SEQ ID NO: 26936 - RNA, 19 nt, Homo sapiens
  misc_RNA (1)...(19): siRNA sense strand
cagcagaggauuugacaug

SEQ ID NO: 26937 - RNA, 19 nt, Homo sapiens
  misc_RNA (1)...(19): siRNA sense strand
aaguguggcugcuaugaaa

SEQ ID NO: 26938 - RNA, 19 nt, Homo sapiens
  misc_RNA (1)...(19): siRNA sense strand
auaaacauccacacaauug

SEQ ID NO: 26939 - RNA, 19 nt, Homo sapiens
  misc_RNA (1)...(19): siRNA sense strand
ccauugaacugagguuugu

SEQ ID NO: 26940 - RNA, 19 nt, Homo sapiens
  misc_RNA (1)...(19): siRNA sense strand
ccucaucacuguguccaaa

SEQ ID NO: 26941 - RNA, 19 nt, Homo sapiens
  misc_RNA (1)...(19): siRNA sense strand
ucaauguccuggccuuugu

SEQ ID NO: 26942 - RNA, 19 nt, Homo sapiens
  misc_RNA (1)...(19): siRNA sense strand
gacaaugaguccagcuaca

SEQ ID NO: 26943 - RNA, 19 nt, Homo sapiens
  misc_RNA (1)...(19): siRNA sense strand
uaaggcaagaaguugauua

SEQ ID NO: 26944 - RNA, 19 nt, Homo sapiens
  misc_RNA (1)...(19): siRNA sense strand
gguacaacauccucagagu

SEQ ID NO: 26945 - RNA, 19 nt, Homo sapiens
  misc_RNA (1)...(19): siRNA sense strand
gauguucacaagauucauu

SEQ ID NO: 26946 - RNA, 19 nt, Homo sapiens
  misc_RNA (1)...(19): siRNA sense strand
gcaaguguggcugcuauga

SEQ ID NO: 26947 - RNA, 19 nt, Homo sapiens
  misc_RNA (1)...(19): siRNA sense strand
guugauauccauaccaaga

SEQ ID NO: 26948 - RNA, 19 nt, Homo sapiens
  misc_RNA (1)...(19): siRNA sense strand
ccagguuccuuaugugcaa

SEQ ID NO: 26949 - RNA, 19 nt, Homo sapiens
  misc_RNA (1)...(19): siRNA sense strand
cauaaacauccacacaauu

SEQ ID NO: 26950 - RNA, 19 nt, Homo sapiens
  misc_RNA (1)...(19): siRNA sense strand
ggcaucagcagcuacauga

SEQ ID NO: 26951 - RNA, 19 nt, Homo sapiens
  misc_RNA (1)...(19): siRNA sense strand
aaacauccacacaauugaa

SEQ ID NO: 26952 - RNA, 19 nt, Homo sapiens
  misc_RNA (1)...(19): siRNA sense strand
gcaucugccugcccaugga

SEQ ID NO: 26953 - RNA, 19 nt, Homo sapiens
  misc_RNA (1)...(19): siRNA sense strand
gaacaucauagugcuagug

SEQ ID NO: 26954 - RNA, 19 nt, Homo sapiens
  misc_RNA (1)...(19): siRNA sense strand
gcagaggauuugacaugac

SEQ ID NO: 26955 - RNA, 19 nt, Homo sapiens
  misc_RNA (1)...(19): siRNA sense strand
ccaaauuuauaggacagaa

SEQ ID NO: 26956 - RNA, 19 nt, Homo sapiens
  misc_RNA (1)...(19): siRNA sense strand
ugucacagcuguaugucau

SEQ ID NO: 26957 - RNA, 19 nt, Homo sapiens
  misc_RNA (1)...(19): siRNA sense strand
caguugauauccauaccaa

SEQ ID NO: 26958 - RNA, 19 nt, Homo sapiens
  misc_RNA (1)...(19): siRNA sense strand
gagcaaggugacagagauu

SEQ ID NO: 26959 - RNA, 19 nt, Homo sapiens
  misc_RNA (1)...(19): siRNA sense strand
aggcagauguguucuccaa

SEQ ID NO: 26960 - RNA, 19 nt, Homo sapiens
  misc_RNA (1)...(19): siRNA sense strand
aaugcaagcccaaauuuau

SEQ ID NO: 26961 - RNA, 19 nt, Homo sapiens
  misc_RNA (1)...(19): siRNA sense strand
gccaauaucacaacuaugc

SEQ ID NO: 26962 - RNA, 19 nt, Homo sapiens
  misc_RNA (1)...(19): siRNA sense strand
ccagaaccuucccaaccuu

SEQ ID NO: 26963 - RNA, 19 nt, Homo sapiens
  misc_RNA (1)...(19): siRNA sense strand
aagaauugccuaaugaugu

SEQ ID NO: 26964 - RNA, 19 nt, Homo sapiens
  misc_RNA (1)...(19): siRNA sense strand
ucacaacuaugccauugac

SEQ ID NO: 26965 - RNA, 19 nt, Homo sapiens
  misc_RNA (1)...(19): siRNA sense strand
ggugauagaggcagaugug

SEQ ID NO: 26966 - RNA, 19 nt, Homo sapiens
  misc_RNA (1)...(19): siRNA sense strand
caaccuggccuuugcugau

SEQ ID NO: 26967 - RNA, 19 nt, Homo sapiens
  misc_RNA (1)...(19): siRNA sense strand
ggccaucacugggaacauc

SEQ ID NO: 26968 - RNA, 19 nt, Homo sapiens
  misc_RNA (1)...(19): siRNA sense strand
gaguuugacuaugacuuau

SEQ ID NO: 26969 - RNA, 19 nt, Homo sapiens
  misc_RNA (1)...(19): siRNA sense strand
aagauucauucucuccaaa

SEQ ID NO: 26970 - RNA, 19 nt, Homo sapiens
  misc_RNA (1)...(19): siRNA sense strand
agagcaaggugacagagau

SEQ ID NO: 26971 - RNA, 19 nt, Homo sapiens
  misc_RNA (1)...(19): siRNA sense strand
ggaauggccacugcucuuc

SEQ ID NO: 26972 - RNA, 19 nt, Homo sapiens
  misc_RNA (1)...(19): siRNA sense strand
caaguguggcugcuaugaa

SEQ ID NO: 26973 - RNA, 19 nt, Homo sapiens
  misc_RNA (1)...(19): siRNA sense strand
cagccaauauaaacucaca

SEQ ID NO: 26974 - RNA, 19 nt, Homo sapiens
  misc_RNA (1)...(19): siRNA sense strand
uaagccagaugcauucaac

SEQ ID NO: 26975 - RNA, 19 nt, Homo sapiens
  misc_RNA (1)...(19): siRNA sense strand
uaaacauccacacaauuga

SEQ ID NO: 26976 - RNA, 19 nt, Homo sapiens
  misc_RNA (1)...(19): siRNA sense strand
cuucccaaauuacaugaaa

SEQ ID NO: 26977 - RNA, 19 nt, Homo sapiens
  misc_RNA (1)...(19): siRNA sense strand
cuuccucuaugccaucuuu

SEQ ID NO: 26978 - RNA, 19 nt, Homo sapiens
  misc_RNA (1)...(19): siRNA sense strand
ucacugacuuccucugcau

SEQ ID NO: 26979 - RNA, 19 nt, Homo sapiens
  misc_RNA (1)...(19): siRNA sense strand
ucacagcuguaugucaugu

SEQ ID NO: 26980 - RNA, 19 nt, Homo sapiens
  misc_RNA (1)...(19): siRNA sense strand
cuuaugcaaugaagugguu

SEQ ID NO: 26981 - RNA, 19 nt, Homo sapiens
  misc_RNA (1)...(19): siRNA sense strand
gaaccuucccaaccuucaa

SEQ ID NO: 26982 - RNA, 19 nt, Homo sapiens
  misc_RNA (1)...(19): siRNA sense strand
gagagcaaggugacagaga

SEQ ID NO: 26983 - RNA, 19 nt, Homo sapiens
  misc_RNA (1)...(19): siRNA sense strand
ucuacacucugacagcuau

SEQ ID NO: 26984 - RNA, 19 nt, Homo sapiens
  misc_RNA (1)...(19): siRNA sense strand
uaagcaccuuccagauguu

SEQ ID NO: 26985 - RNA, 19 nt, Homo sapiens
  misc_RNA (1)...(19): siRNA sense strand
ucuaugccaucuuuaccaa

SEQ ID NO: 26986 - RNA, 19 nt, Homo sapiens
  misc_RNA (1)...(19): siRNA sense strand
gaauggccacugcucuuca

SEQ ID NO: 26987 - RNA, 19 nt, Homo sapiens
  misc_RNA (1)...(19): siRNA sense strand
ucaccaagcuucgagucau

SEQ ID NO: 26988 - RNA, 19 nt, Homo sapiens
  misc_RNA (1)...(19): siRNA sense strand
uuccagauguucacaagau

SEQ ID NO: 26989 - RNA, 19 nt, Homo sapiens
  misc_RNA (1)...(19): siRNA sense strand
ggcacccauuucuuucuuu

SEQ ID NO: 26990 - RNA, 19 nt, Homo sapiens
  misc_RNA (1)...(19): siRNA sense strand
cagcuacagcagaggauuu

SEQ ID NO: 26991 - RNA, 19 nt, Homo sapiens
  misc_RNA (1)...(19): siRNA sense strand
uugaaagugugauucuaug

SEQ ID NO: 26992 - RNA, 19 nt, Homo sapiens
  misc_RNA (1)...(19): siRNA sense strand
caacaaccugcucuacauc

SEQ ID NO: 26993 - RNA, 19 nt, Homo sapiens
  misc_RNA (1)...(19): siRNA sense strand
augcaagcccaaauuuaua

SEQ ID NO: 26994 - RNA, 19 nt, Homo sapiens
  misc_RNA (1)...(19): siRNA sense strand
uggcugcuaugaaaugcaa

SEQ ID NO: 26995 - RNA, 19 nt, Homo sapiens
  misc_RNA (1)...(19): siRNA sense strand
gcaagaaguugauuauaug

SEQ ID NO: 26996 - RNA, 19 nt, Homo sapiens
  misc_RNA (1)...(19): siRNA sense strand
ggcaagaaguugauuauau

SEQ ID NO: 26997 - RNA, 19 nt, Homo sapiens
  misc_RNA (1)...(19): siRNA sense strand
acacugaguuugacuauga

SEQ ID NO: 26998 - RNA, 19 nt, Homo sapiens
  misc_RNA (1)...(19): siRNA sense strand
ccagugagcugucagucua

SEQ ID NO: 26999 - RNA, 19 nt, Homo sapiens
  misc_RNA (1)...(19): siRNA sense strand
uagaagaauugccuaauga

SEQ ID NO: 27000 - RNA, 19 nt, Homo sapiens
  misc_RNA (1)...(19): siRNA sense strand
gagccaauaucacaacuau

SEQ ID NO: 27001 - RNA, 19 nt, Homo sapiens
  misc_RNA (1)...(19): siRNA sense strand
ucgcagagauuucuucauu

SEQ ID NO: 27002 - RNA, 19 nt, Homo sapiens
  misc_RNA (1)...(19): siRNA sense strand
gcugaucucugcauuggaa

SEQ ID NO: 27003 - RNA, 19 nt, Homo sapiens
  misc_RNA (1)...(19): siRNA sense strand
gcagagauuucuucauucu

SEQ ID NO: 27004 - RNA, 19 nt, Homo sapiens
  misc_RNA (1)...(19): siRNA sense strand
ccacacaauugaaagaaau

SEQ ID NO: 27005 - RNA, 19 nt, Homo sapiens
  misc_RNA (1)...(19): siRNA sense strand
uaacuaccagccaauauaa

SEQ ID NO: 27006 - RNA, 19 nt, Homo sapiens
  misc_RNA (1)...(19): siRNA sense strand
gacuaugacuuaugcaaug

SEQ ID NO: 27007 - RNA, 19 nt, Homo sapiens
  misc_RNA (1)...(19): siRNA sense strand
ucuccaaccuucccaaauu

SEQ ID NO: 27008 - RNA, 19 nt, Homo sapiens
  misc_RNA (1)...(19): siRNA sense strand
gagcugaaucuaagcgaua

SEQ ID NO: 27009 - RNA, 19 nt, Homo sapiens
  misc_RNA (1)...(19): siRNA sense strand
ccaacaaccugcucuacau

SEQ ID NO: 27010 - RNA, 19 nt, Homo sapiens
  misc_RNA (1)...(19): siRNA sense strand
ggucaucuguggcugcuau

SEQ ID NO: 27011 - RNA, 19 nt, Homo sapiens
  misc_RNA (1)...(19): siRNA sense strand
gcacccauuucuuucuuug

SEQ ID NO: 27012 - RNA, 19 nt, Homo sapiens
  misc_RNA (1)...(19): siRNA sense strand
gaagaauugccuaaugaug

SEQ ID NO: 27013 - RNA, 19 nt, Homo sapiens
  misc_RNA (1)...(19): siRNA sense strand
ucucugagcuucauccaau

SEQ ID NO: 27014 - RNA, 19 nt, Homo sapiens
  misc_RNA (1)...(19): siRNA sense strand
gauagaggcagauguguuc

SEQ ID NO: 27015 - RNA, 19 nt, Homo sapiens
  misc_RNA (1)...(19): siRNA sense strand
caagauucauucucuccaa

SEQ ID NO: 27016 - RNA, 19 nt, Homo sapiens
  misc_RNA (1)...(19): siRNA sense strand
caacacccauccaaggaau

SEQ ID NO: 27017 - RNA, 19 nt, Homo sapiens
  misc_RNA (1)...(19): siRNA sense strand
ugaguuugacuaugacuua

SEQ ID NO: 27018 - RNA, 19 nt, Homo sapiens
  misc_RNA (1)...(19): siRNA sense strand
agaauugccuaaugauguu

SEQ ID NO: 27019 - RNA, 19 nt, Homo sapiens
  misc_RNA (1)...(19): siRNA sense strand
ugacagcuaucaccuugga

SEQ ID NO: 27020 - RNA, 19 nt, Homo sapiens
  misc_RNA (1)...(19): siRNA sense strand
gcugcuauauccacaucua

SEQ ID NO: 27021 - RNA, 19 nt, Homo sapiens
  misc_RNA (1)...(19): siRNA sense strand
ccaacuagaugagcugaau

SEQ ID NO: 27022 - RNA, 19 nt, Homo sapiens
  misc_RNA (1)...(19): siRNA sense strand
uuacauacuugucccucua

SEQ ID NO: 27023 - RNA, 19 nt, Homo sapiens
  misc_RNA (1)...(19): siRNA sense strand
cuaacuaccagccaauaua

SEQ ID NO: 27024 - RNA, 19 nt, Homo sapiens
  misc_RNA (1)...(19): siRNA sense strand
cuccaaccuucccaaauua

SEQ ID NO: 27025 - RNA, 19 nt, Homo sapiens
  misc_RNA (1)...(19): siRNA sense strand
gcuaucaccuuggaaagau

SEQ ID NO: 27026 - RNA, 19 nt, Homo sapiens
  misc_RNA (1)...(19): siRNA sense strand
caacccaugugaagauauc

SEQ ID NO: 27027 - RNA, 19 nt, Homo sapiens
  misc_RNA (1)...(19): siRNA sense strand
uuaagcaccuuccagaugu

SEQ ID NO: 27028 - RNA, 19 nt, Homo sapiens
  misc_RNA (1)...(19): siRNA sense strand
acauaaacauccacacaau

SEQ ID NO: 27029 - RNA, 19 nt, Homo sapiens
  misc_RNA (1)...(19): siRNA sense strand
gaaucuaccugcugcucau

SEQ ID NO: 27030 - RNA, 19 nt, Homo sapiens
  misc_RNA (1)...(19): siRNA sense strand
caaccuucaauaucuguua

SEQ ID NO: 27031 - RNA, 19 nt, Homo sapiens
  misc_RNA (1)...(19): siRNA sense strand
ugaaaugcaagcccaaauu

SEQ ID NO: 27032 - RNA, 19 nt, Homo sapiens
  misc_RNA (1)...(19): siRNA sense strand
caaagauucugcugguucu

SEQ ID NO: 27033 - RNA, 19 nt, Homo sapiens
  misc_RNA (1)...(19): siRNA sense strand
uaucacaacuaugccauug

SEQ ID NO: 27034 - RNA, 19 nt, Homo sapiens
  misc_RNA (1)...(19): siRNA sense strand
caauggaacccaacuagau

SEQ ID NO: 27035 - RNA, 19 nt, Homo sapiens
  misc_RNA (1)...(19): siRNA sense strand
uaacauaaacauccacaca

SEQ ID NO: 27036 - RNA, 19 nt, Homo sapiens
  misc_RNA (1)...(19): siRNA sense strand
cagcagaggauuugacaug

SEQ ID NO: 27037 - RNA, 19 nt, Homo sapiens
  misc_RNA (1)...(19): siRNA sense strand
aaguguggcugcuaugaaa

SEQ ID NO: 27038 - RNA, 19 nt, Homo sapiens
  misc_RNA (1)...(19): siRNA sense strand
auaaacauccacacaauug

SEQ ID NO: 27039 - RNA, 19 nt, Homo sapiens
  misc_RNA (1)...(19): siRNA sense strand
ccauugaacugagguuugu

SEQ ID NO: 27040 - RNA, 19 nt, Homo sapiens
  misc_RNA (1)...(19): siRNA sense strand
ccucaucacuguguccaaa

SEQ ID NO: 27041 - RNA, 19 nt, Homo sapiens
  misc_RNA (1)...(19): siRNA sense strand
ucaauguccuggccuuugu

SEQ ID NO: 27042 - RNA, 19 nt, Homo sapiens
  misc_RNA (1)...(19): siRNA sense strand
gacaaugaguccagcuaca

SEQ ID NO: 27043 - RNA, 19 nt, Homo sapiens
  misc_RNA (1)...(19): siRNA sense strand
uaaggcaagaaguugauua

SEQ ID NO: 27044 - RNA, 19 nt, Homo sapiens
  misc_RNA (1)...(19): siRNA sense strand
gguacaacauccucagagu

SEQ ID NO: 27045 - RNA, 19 nt, Homo sapiens
  misc_RNA (1)...(19): siRNA sense strand
gauguucacaagauucauu

SEQ ID NO: 27046 - RNA, 19 nt, Homo sapiens
  misc_RNA (1)...(19): siRNA sense strand
gcaaguguggcugcuauga

SEQ ID NO: 27047 - RNA, 19 nt, Homo sapiens
  misc_RNA (1)...(19): siRNA sense strand
guugauauccauaccaaga

SEQ ID NO: 27048 - RNA, 19 nt, Homo sapiens
  misc_RNA (1)...(19): siRNA sense strand
ccagguuccuuaugugcaa

SEQ ID NO: 27049 - RNA, 19 nt, Homo sapiens
  misc_RNA (1)...(19): siRNA sense strand
cauaaacauccacacaauu

SEQ ID NO: 27050 - RNA, 19 nt, Homo sapiens
  misc_RNA (1)...(19): siRNA sense strand
ggcaucagcagcuacauga

SEQ ID NO: 27051 - RNA, 19 nt, Homo sapiens
  misc_RNA (1)...(19): siRNA sense strand
aaacauccacacaauugaa

SEQ ID NO: 27052 - RNA, 19 nt, Homo sapiens
  misc_RNA (1)...(19): siRNA sense strand
gcaucugccugcccaugga

SEQ ID NO: 27053 - RNA, 19 nt, Homo sapiens
  misc_RNA (1)...(19): siRNA sense strand
gaacaucauagugcuagug

SEQ ID NO: 27054 - RNA, 19 nt, Homo sapiens
  misc_RNA (1)...(19): siRNA sense strand
gcagaggauuugacaugac

SEQ ID NO: 27055 - RNA, 19 nt, Homo sapiens
  misc_RNA (1)...(19): siRNA sense strand
ccaaauuuauaggacagaa

SEQ ID NO: 27056 - RNA, 19 nt, Homo sapiens
  misc_RNA (1)...(19): siRNA sense strand
ugucacagcuguaugucau

SEQ ID NO: 27057 - RNA, 19 nt, Homo sapiens
  misc_RNA (1)...(19): siRNA sense strand
caguugauauccauaccaa

SEQ ID NO: 27058 - RNA, 19 nt, Homo sapiens
  misc_RNA (1)...(19): siRNA sense strand
gagcaaggugacagagauu

SEQ ID NO: 27059 - RNA, 19 nt, Homo sapiens
  misc_RNA (1)...(19): siRNA sense strand
aggcagauguguucuccaa

SEQ ID NO: 27060 - RNA, 19 nt, Homo sapiens
  misc_RNA (1)...(19): siRNA sense strand
aaugcaagcccaaauuuau

SEQ ID NO: 27061 - RNA, 19 nt, Homo sapiens
  misc_RNA (1)...(19): siRNA sense strand
gccaauaucacaacuaugc

SEQ ID NO: 27062 - RNA, 19 nt, Homo sapiens
  misc_RNA (1)...(19): siRNA sense strand
ccagaaccuucccaaccuu

SEQ ID NO: 27063 - RNA, 19 nt, Homo sapiens
  misc_RNA (1)...(19): siRNA sense strand
aagaauugccuaaugaugu

SEQ ID NO: 27064 - RNA, 19 nt, Homo sapiens
  misc_RNA (1)...(19): siRNA sense strand
ucacaacuaugccauugac

SEQ ID NO: 27065 - RNA, 19 nt, Homo sapiens
  misc_RNA (1)...(19): siRNA sense strand
ggugauagaggcagaugug

SEQ ID NO: 27066 - RNA, 19 nt, Homo sapiens
  misc_RNA (1)...(19): siRNA sense strand
caaccuggccuuugcugau

SEQ ID NO: 27067 - RNA, 19 nt, Homo sapiens
  misc_RNA (1)...(19): siRNA sense strand
ggccaucacugggaacauc

SEQ ID NO: 27068 - RNA, 19 nt, Homo sapiens
  misc_RNA (1)...(19): siRNA sense strand
gaguuugacuaugacuuau

SEQ ID NO: 27069 - RNA, 19 nt, Homo sapiens
  misc_RNA (1)...(19): siRNA sense strand
aagauucauucucuccaaa

SEQ ID NO: 27070 - RNA, 19 nt, Homo sapiens
  misc_RNA (1)...(19): siRNA sense strand
agagcaaggugacagagau

SEQ ID NO: 27071 - RNA, 19 nt, Homo sapiens
  misc_RNA (1)...(19): siRNA sense strand
ggaauggccacugcucuuc

SEQ ID NO: 27072 - RNA, 19 nt, Homo sapiens
  misc_RNA (1)...(19): siRNA sense strand
caaguguggcugcuaugaa

SEQ ID NO: 27073 - RNA, 19 nt, Homo sapiens
  misc_RNA (1)...(19): siRNA sense strand
cagccaauauaaacucaca

SEQ ID NO: 27074 - RNA, 19 nt, Homo sapiens
  misc_RNA (1)...(19): siRNA sense strand
uaagccagaugcauucaac

SEQ ID NO: 27075 - RNA, 19 nt, Homo sapiens
  misc_RNA (1)...(19): siRNA sense strand
uaaacauccacacaauuga

SEQ ID NO: 27076 - RNA, 19 nt, Homo sapiens
  misc_RNA (1)...(19): siRNA sense strand
cuucccaaauuacaugaaa

SEQ ID NO: 27077 - RNA, 19 nt, Homo sapiens
  misc_RNA (1)...(19): siRNA sense strand
cuuccucuaugccaucuuu

SEQ ID NO: 27078 - RNA, 19 nt, Homo sapiens
  misc_RNA (1)...(19): siRNA sense strand
ucacugacuuccucugcau

SEQ ID NO: 27079 - RNA, 19 nt, Homo sapiens
  misc_RNA (1)...(19): siRNA sense strand
ucacagcuguaugucaugu

SEQ ID NO: 27080 - RNA, 19 nt, Homo sapiens
  misc_RNA (1)...(19): siRNA sense strand
cuuaugcaaugaagugguu

SEQ ID NO: 27081 - RNA, 19 nt, Homo sapiens
  misc_RNA (1)...(19): siRNA sense strand
gaaccuucccaaccuucaa

SEQ ID NO: 27082 - RNA, 19 nt, Homo sapiens
  misc_RNA (1)...(19): siRNA sense strand
gagagcaaggugacagaga

SEQ ID NO: 27083 - RNA, 19 nt, Homo sapiens
  misc_RNA (1)...(19): siRNA sense strand
ucuacacucugacagcuau

SEQ ID NO: 27084 - RNA, 19 nt, Homo sapiens
  misc_RNA (1)...(19): siRNA sense strand
uaagcaccuuccagauguu

SEQ ID NO: 27085 - RNA, 19 nt, Homo sapiens
  misc_RNA (1)...(19): siRNA sense strand
ucuaugccaucuuuaccaa

SEQ ID NO: 27086 - RNA, 19 nt, Homo sapiens
  misc_RNA (1)...(19): siRNA sense strand
gaauggccacugcucuuca

SEQ ID NO: 27087 - RNA, 19 nt, Homo sapiens
  misc_RNA (1)...(19): siRNA sense strand
ucaccaagcuucgagucau

SEQ ID NO: 27088 - RNA, 19 nt, Homo sapiens
  misc_RNA (1)...(19): siRNA sense strand
uuccagauguucacaagau

SEQ ID NO: 27089 - RNA, 19 nt, Homo sapiens
  misc_RNA (1)...(19): siRNA sense strand
ggcacccauuucuuucuuu

SEQ ID NO: 27090 - RNA, 19 nt, Homo sapiens
  misc_RNA (1)...(19): siRNA sense strand
cagcuacagcagaggauuu

SEQ ID NO: 27091 - RNA, 19 nt, Homo sapiens
  misc_RNA (1)...(19): siRNA sense strand
uugaaagugugauucuaug

SEQ ID NO: 27092 - RNA, 19 nt, Homo sapiens
  misc_RNA (1)...(19): siRNA sense strand
caacaaccugcucuacauc

SEQ ID NO: 27093 - RNA, 19 nt, Homo sapiens
  misc_RNA (1)...(19): siRNA sense strand
augcaagcccaaauuuaua

SEQ ID NO: 27094 - RNA, 19 nt, Homo sapiens
  misc_RNA (1)...(19): siRNA sense strand
uggcugcuaugaaaugcaa

SEQ ID NO: 27095 - RNA, 19 nt, Homo sapiens
  misc_RNA (1)...(19): siRNA sense strand
gaaugaauguucuccauga

SEQ ID NO: 27096 - RNA, 19 nt, Homo sapiens
  misc_RNA (1)...(19): siRNA sense strand
gcacagcagguguauacua

SEQ ID NO: 27097 - RNA, 19 nt, Homo sapiens
  misc_RNA (1)...(19): siRNA sense strand
auaaagcaguucccuguaa

SEQ ID NO: 27098 - RNA, 19 nt, Homo sapiens
  misc_RNA (1)...(19): siRNA sense strand
gcucucaacuccagcaugu

SEQ ID NO: 27099 - RNA, 19 nt, Homo sapiens
  misc_RNA (1)...(19): siRNA sense strand
caucuacucuuuccaucuu

SEQ ID NO: 27100 - RNA, 19 nt, Homo sapiens
  misc_RNA (1)...(19): siRNA sense strand
ucaggaagcugugggcauu

SEQ ID NO: 27101 - RNA, 19 nt, Homo sapiens
  misc_RNA (1)...(19): siRNA sense strand
gggauccagucaacacauu

SEQ ID NO: 27102 - RNA, 19 nt, Homo sapiens
  misc_RNA (1)...(19): siRNA sense strand
gauaaagcaguucccugua

SEQ ID NO: 27103 - RNA, 19 nt, Homo sapiens
  misc_RNA (1)...(19): siRNA sense strand
ggcucaaccucgucuuuaa

SEQ ID NO: 27104 - RNA, 19 nt, Homo sapiens
  misc_RNA (1)...(19): siRNA sense strand
ugaauguucuccaugacuu

SEQ ID NO: 27105 - RNA, 19 nt, Homo sapiens
  misc_RNA (1)...(19): siRNA sense strand
cagcuucgccaucggauuu

SEQ ID NO: 27106 - RNA, 19 nt, Homo sapiens
  misc_RNA (1)...(19): siRNA sense strand
gaaagauaaagccgaccua

SEQ ID NO: 27107 - RNA, 19 nt, Homo sapiens
  misc_RNA (1)...(19): siRNA sense strand
uaaagccgaccuacagauu

SEQ ID NO: 27108 - RNA, 19 nt, Homo sapiens
  misc_RNA (1)...(19): siRNA sense strand
gaggaaggaaugaauguuc

SEQ ID NO: 27109 - RNA, 19 nt, Homo sapiens
  misc_RNA (1)...(19): siRNA sense strand
gauaaagccgaccuacaga

SEQ ID NO: 27110 - RNA, 19 nt, Homo sapiens
  misc_RNA (1)...(19): siRNA sense strand
uuaaguggauucucuuugg

SEQ ID NO: 27111 - RNA, 19 nt, Homo sapiens
  misc_RNA (1)...(19): siRNA sense strand
gggcacagcagguguauac

SEQ ID NO: 27112 - RNA, 19 nt, Homo sapiens
  misc_RNA (1)...(19): siRNA sense strand
gaaccugggcacgcucuuu

SEQ ID NO: 27113 - RNA, 19 nt, Homo sapiens
  misc_RNA (1)...(19): siRNA sense strand
cgccucagcucuauuguag

SEQ ID NO: 27114 - RNA, 19 nt, Homo sapiens
  misc_RNA (1)...(19): siRNA sense strand
ggauccagucaacacauua

SEQ ID NO: 27115 - RNA, 19 nt, Homo sapiens
  misc_RNA (1)...(19): siRNA sense strand
augccagccucaagaaaua

SEQ ID NO: 27116 - RNA, 19 nt, Homo sapiens
  misc_RNA (1)...(19): siRNA sense strand
uaaguggauucucuuugga

SEQ ID NO: 27117 - RNA, 19 nt, Homo sapiens
  misc_RNA (1)...(19): siRNA sense strand
gaauguucuccaugacuuu

SEQ ID NO: 27118 - RNA, 19 nt, Homo sapiens
  misc_RNA (1)...(19): siRNA sense strand
gaucgcagaccucaggaau

SEQ ID NO: 27119 - RNA, 19 nt, Homo sapiens
  misc_RNA (1)...(19): siRNA sense strand
aagucgagcuggucuucua

SEQ ID NO: 27120 - RNA, 19 nt, Homo sapiens
  misc_RNA (1)...(19): siRNA sense strand
ccacauccacagcaucuau

SEQ ID NO: 27121 - RNA, 19 nt, Homo sapiens
  misc_RNA (1)...(19): siRNA sense strand
agauuucggugcuugaaug

SEQ ID NO: 27122 - RNA, 19 nt, Homo sapiens
  misc_RNA (1)...(19): siRNA sense strand
ucaagggacuggguguaga

SEQ ID NO: 27123 - RNA, 19 nt, Homo sapiens
  misc_RNA (1)...(19): siRNA sense strand
uaaagcaguucccuguaac

SEQ ID NO: 27124 - RNA, 19 nt, Homo sapiens
  misc_RNA (1)...(19): siRNA sense strand
ggucacaucuacucuuucc

SEQ ID NO: 27125 - RNA, 19 nt, Homo sapiens
  misc_RNA (1)...(19): siRNA sense strand
cacagcagguguauacuac

SEQ ID NO: 27126 - RNA, 19 nt, Homo sapiens
  misc_RNA (1)...(19): siRNA sense strand
uauaaugccagccucaaga

SEQ ID NO: 27127 - RNA, 19 nt, Homo sapiens
  misc_RNA (1)...(19): siRNA sense strand
ccucaggaaugccuucuac

SEQ ID NO: 27128 - RNA, 19 nt, Homo sapiens
  misc_RNA (1)...(19): siRNA sense strand
aagccgaccuacagauuuc

SEQ ID NO: 27129 - RNA, 19 nt, Homo sapiens
  misc_RNA (1)...(19): siRNA sense strand
ggaggaaggaaugaauguu

SEQ ID NO: 27130 - RNA, 19 nt, Homo sapiens
  misc_RNA (1)...(19): siRNA sense strand
aggaagcugugggcauuaa

SEQ ID NO: 27131 - RNA, 19 nt, Homo sapiens
  misc_RNA (1)...(19): siRNA sense strand
aaagccgaccuacagauuu

SEQ ID NO: 27132 - RNA, 19 nt, Homo sapiens
  misc_RNA (1)...(19): siRNA sense strand
ccuguggacucuggagaaa

SEQ ID NO: 27133 - RNA, 19 nt, Homo sapiens
  misc_RNA (1)...(19): siRNA sense strand
ccaggugaauuaccaagac

SEQ ID NO: 27134 - RNA, 19 nt, Homo sapiens
  misc_RNA (1)...(19): siRNA sense strand
uuucggugcuugaauguca

SEQ ID NO: 27135 - RNA, 19 nt, Homo sapiens
  misc_RNA (1)...(19): siRNA sense strand
ucgcagaccucaggaaugc

SEQ ID NO: 27136 - RNA, 19 nt, Homo sapiens
  misc_RNA (1)...(19): siRNA sense strand
ggaagcugugggcauuaaa

SEQ ID NO: 27137 - RNA, 19 nt, Homo sapiens
  misc_RNA (1)...(19): siRNA sense strand
ggugcgagcagccagaaug

SEQ ID NO: 27138 - RNA, 19 nt, Homo sapiens
  misc_RNA (1)...(19): siRNA sense strand
cuaccuugcugcucauuuu

SEQ ID NO: 27139 - RNA, 19 nt, Homo sapiens
  misc_RNA (1)...(19): siRNA sense strand
cagcagguguauacuacgu

SEQ ID NO: 27140 - RNA, 19 nt, Homo sapiens
  misc_RNA (1)...(19): siRNA sense strand
gauuuuaucugcugcucaa

SEQ ID NO: 27141 - RNA, 19 nt, Homo sapiens
  misc_RNA (1)...(19): siRNA sense strand
agauaaagccgaccuacag

SEQ ID NO: 27142 - RNA, 19 nt, Homo sapiens
  misc_RNA (1)...(19): siRNA sense strand
ucacaucuacucuuuccau

SEQ ID NO: 27143 - RNA, 19 nt, Homo sapiens
  misc_RNA (1)...(19): siRNA sense strand
uggcucaaccucgucuuua

SEQ ID NO: 27144 - RNA, 19 nt, Homo sapiens
  misc_RNA (1)...(19): siRNA sense strand
cgucuuugacuccuugaaa

SEQ ID NO: 27145 - RNA, 19 nt, Homo sapiens
  misc_RNA (1)...(19): siRNA sense strand
gcucaagggacugggugua

SEQ ID NO: 27146 - RNA, 19 nt, Homo sapiens
  misc_RNA (1)...(19): siRNA sense strand
auggucacaucuacucuuu

SEQ ID NO: 27147 - RNA, 19 nt, Homo sapiens
  misc_RNA (1)...(19): siRNA sense strand
uugccagccuccucaagaa

SEQ ID NO: 27148 - RNA, 19 nt, Homo sapiens
  misc_RNA (1)...(19): siRNA sense strand
gaagcugugggcauuaaac

SEQ ID NO: 27149 - RNA, 19 nt, Homo sapiens
  misc_RNA (1)...(19): siRNA sense strand
uuggguagcugugauugga

SEQ ID NO: 27150 - RNA, 19 nt, Homo sapiens
  misc_RNA (1)...(19): siRNA sense strand
cacauccacagcaucuaua

SEQ ID NO: 27151 - RNA, 19 nt, Homo sapiens
  misc_RNA (1)...(19): siRNA sense strand
ugucaggcauugcuguuac

SEQ ID NO: 27152 - RNA, 19 nt, Homo sapiens
  misc_RNA (1)...(19): siRNA sense strand
aggaaugaauguucuccau

SEQ ID NO: 27153 - RNA, 19 nt, Homo sapiens
  misc_RNA (1)...(19): siRNA sense strand
gcucaaccucgucuuuaag

SEQ ID NO: 27154 - RNA, 19 nt, Homo sapiens
  misc_RNA (1)...(19): siRNA sense strand
gcugaaugucugucuguca

SEQ ID NO: 27155 - RNA, 19 nt, Homo sapiens
  misc_RNA (1)...(19): siRNA sense strand
gcuggucuucuacgucuug

SEQ ID NO: 27156 - RNA, 19 nt, Homo sapiens
  misc_RNA (1)...(19): siRNA sense strand
cagcaaguggcucccauuc

SEQ ID NO: 27157 - RNA, 19 nt, Homo sapiens
  misc_RNA (1)...(19): siRNA sense strand
ucauuaccuucuuccuguu

SEQ ID NO: 27158 - RNA, 19 nt, Homo sapiens
  misc_RNA (1)...(19): siRNA sense strand
ucaaccucgucuuuaagug

SEQ ID NO: 27159 - RNA, 19 nt, Homo sapiens
  misc_RNA (1)...(19): siRNA sense strand
ccaucugguuccaucuuca

SEQ ID NO: 27160 - RNA, 19 nt, Homo sapiens
  misc_RNA (1)...(19): siRNA sense strand
ccauuccgccucagcucua

SEQ ID NO: 27161 - RNA, 19 nt, Homo sapiens
  misc_RNA (1)...(19): siRNA sense strand
uaaugccagccucaagaaa

SEQ ID NO: 27162 - RNA, 19 nt, Homo sapiens
  misc_RNA (1)...(19): siRNA sense strand
aggaaggaaugaauguucu

SEQ ID NO: 27163 - RNA, 19 nt, Homo sapiens
  misc_RNA (1)...(19): siRNA sense strand
gaacgagccuuccaacuuc

SEQ ID NO: 27164 - RNA, 19 nt, Homo sapiens
  misc_RNA (1)...(19): siRNA sense strand
ccagaaauccugcaguuua

SEQ ID NO: 27165 - RNA, 19 nt, Homo sapiens
  misc_RNA (1)...(19): siRNA sense strand
cagaaauccugcaguuuaa

SEQ ID NO: 27166 - RNA, 19 nt, Homo sapiens
  misc_RNA (1)...(19): siRNA sense strand
ggaacgaccuggacuacau

SEQ ID NO: 27167 - RNA, 19 nt, Homo sapiens
  misc_RNA (1)...(19): siRNA sense strand
aaccugagcuccucugaaa

SEQ ID NO: 27168 - RNA, 19 nt, Homo sapiens
  misc_RNA (1)...(19): siRNA sense strand
gaucgugaaugagcuggua

SEQ ID NO: 27169 - RNA, 19 nt, Homo sapiens
  misc_RNA (1)...(19): siRNA sense strand
ggagggacuucacguucaa

SEQ ID NO: 27170 - RNA, 19 nt, Homo sapiens
  misc_RNA (1)...(19): siRNA sense strand
aaacagcaaugccauggau

SEQ ID NO: 27171 - RNA, 19 nt, Homo sapiens
  misc_RNA (1)...(19): siRNA sense strand
ugaacgagccuuccaacuu

SEQ ID NO: 27172 - RNA, 19 nt, Homo sapiens
  misc_RNA (1)...(19): siRNA sense strand
gcuacgaggugcccuugga

SEQ ID NO: 27173 - RNA, 19 nt, Homo sapiens
  misc_RNA (1)...(19): siRNA sense strand
gagaaccgccuccacuuca

SEQ ID NO: 27174 - RNA, 19 nt, Homo sapiens
  misc_RNA (1)...(19): siRNA sense strand
gggacacgcccauuuguga

SEQ ID NO: 27175 - RNA, 19 nt, Homo sapiens
  misc_RNA (1)...(19): siRNA sense strand
ggacaugguggcugaguuc

SEQ ID NO: 27176 - RNA, 19 nt, Homo sapiens
  misc_RNA (1)...(19): siRNA sense strand
ggacuucacguucaacaag

SEQ ID NO: 27177 - RNA, 19 nt, Homo sapiens
  misc_RNA (1)...(19): siRNA sense strand
gcuacaagcuggagaaccu

SEQ ID NO: 27178 - RNA, 19 nt, Homo sapiens
  misc_RNA (1)...(19): siRNA sense strand
gaaccugagcuccucugaa

SEQ ID NO: 27179 - RNA, 19 nt, Homo sapiens
  misc_RNA (1)...(19): siRNA sense strand
gaacgaccuggacuacaug

SEQ ID NO: 27180 - RNA, 19 nt, Homo sapiens
  misc_RNA (1)...(19): siRNA sense strand
ccagagcagugcccacaca

SEQ ID NO: 27181 - RNA, 19 nt, Homo sapiens
  misc_RNA (1)...(19): siRNA sense strand
ugccagaaauccugcaguu

SEQ ID NO: 27182 - RNA, 19 nt, Homo sapiens
  misc_RNA (1)...(19): siRNA sense strand
ucaaagauccagcuaacag

SEQ ID NO: 27183 - RNA, 19 nt, Homo sapiens
  misc_RNA (1)...(19): siRNA sense strand
cggagggacuucacguuca

SEQ ID NO: 27184 - RNA, 19 nt, Homo sapiens
  misc_RNA (1)...(19): siRNA sense strand
ccugagcuccucugaaaug

SEQ ID NO: 27185 - RNA, 19 nt, Homo sapiens
  misc_RNA (1)...(19): siRNA sense strand
gacggcauguggauugaca

SEQ ID NO: 27186 - RNA, 19 nt, Homo sapiens
  misc_RNA (1)...(19): siRNA sense strand
gcacauccuacuccaugau

SEQ ID NO: 27187 - RNA, 19 nt, Homo sapiens
  misc_RNA (1)...(19): siRNA sense strand
ggacacgcccauuugugau

SEQ ID NO: 27188 - RNA, 19 nt, Homo sapiens
  misc_RNA (1)...(19): siRNA sense strand
ccacuucacgaucaaagau

SEQ ID NO: 27189 - RNA, 19 nt, Homo sapiens
  misc_RNA (1)...(19): siRNA sense strand
acaacagccugcucagucu

SEQ ID NO: 27190 - RNA, 19 nt, Homo sapiens
  misc_RNA (1)...(19): siRNA sense strand
ccaacaaugagcuggagaa

SEQ ID NO: 27191 - RNA, 19 nt, Homo sapiens
  misc_RNA (1)...(19): siRNA sense strand
agagcguggugcagcagua

SEQ ID NO: 27192 - RNA, 19 nt, Homo sapiens
  misc_RNA (1)...(19): siRNA sense strand
acacacaggucaucuuccu

SEQ ID NO: 27193 - RNA, 19 nt, Homo sapiens
  misc_RNA (1)...(19): siRNA sense strand
ggcacauccuacuccauga

SEQ ID NO: 27194 - RNA, 19 nt, Homo sapiens
  misc_RNA (1)...(19): siRNA sense strand
cuacacacaggucaucuuc

SEQ ID NO: 27195 - RNA, 19 nt, Homo sapiens
  misc_RNA (1)...(19): siRNA sense strand
ugagaaccgccuccacuuc

SEQ ID NO: 27196 - RNA, 19 nt, Homo sapiens
  misc_RNA (1)...(19): siRNA sense strand
gccagaaauccugcaguuu

SEQ ID NO: 27197 - RNA, 19 nt, Homo sapiens
  misc_RNA (1)...(19): siRNA sense strand
ggcuggacgugaugaugga

SEQ ID NO: 27198 - RNA, 19 nt, Homo sapiens
  misc_RNA (1)...(19): siRNA sense strand
cccaggagccguacagcuu

SEQ ID NO: 27199 - RNA, 19 nt, Homo sapiens
  misc_RNA (1)...(19): siRNA sense strand
acauccuacuccaugauuu

SEQ ID NO: 27200 - RNA, 19 nt, Homo sapiens
  misc_RNA (1)...(19): siRNA sense strand
gccaggugguggagaacau

SEQ ID NO: 27201 - RNA, 19 nt, Homo sapiens
  misc_RNA (1)...(19): siRNA sense strand
agcaguaccuggacguugu

SEQ ID NO: 27202 - RNA, 19 nt, Homo sapiens
  misc_RNA (1)...(19): siRNA sense strand
cgccuccacuucacgauca

SEQ ID NO: 27203 - RNA, 19 nt, Homo sapiens
  misc_RNA (1)...(19): siRNA sense strand
guugaugggagagcaguuu

SEQ ID NO: 27204 - RNA, 19 nt, Homo sapiens
  misc_RNA (1)...(19): siRNA sense strand
gucccugucuccaacuuca

SEQ ID NO: 27205 - RNA, 19 nt, Homo sapiens
  misc_RNA (1)...(19): siRNA sense strand
cccagcagguccucuccaa

SEQ ID NO: 27206 - RNA, 19 nt, Homo sapiens
  misc_RNA (1)...(19): siRNA sense strand
caggagccguacagcuuca

SEQ ID NO: 27207 - RNA, 19 nt, Homo sapiens
  misc_RNA (1)...(19): siRNA sense strand
guugugggauacccguuca

SEQ ID NO: 27208 - RNA, 19 nt, Homo sapiens
  misc_RNA (1)...(19): siRNA sense strand
cauccuacuccaugauuuc

SEQ ID NO: 27209 - RNA, 19 nt, Homo sapiens
  misc_RNA (1)...(19): siRNA sense strand
caguuucucuccacacacu

SEQ ID NO: 27210 - RNA, 19 nt, Homo sapiens
  misc_RNA (1)...(19): siRNA sense strand
guucuuugcggaccaguuc

SEQ ID NO: 27211 - RNA, 19 nt, Homo sapiens
  misc_RNA (1)...(19): siRNA sense strand
gaagacaguuggccauuua

SEQ ID NO: 27212 - RNA, 19 nt, Homo sapiens
  misc_RNA (1)...(19): siRNA sense strand
ggaccaaucugacuauaaa

SEQ ID NO: 27213 - RNA, 19 nt, Homo sapiens
  misc_RNA (1)...(19): siRNA sense strand
gaagaggaaucccaauauu

SEQ ID NO: 27214 - RNA, 19 nt, Homo sapiens
  misc_RNA (1)...(19): siRNA sense strand
ggaauuuaguggcuaguua

SEQ ID NO: 27215 - RNA, 19 nt, Homo sapiens
  misc_RNA (1)...(19): siRNA sense strand
acacucacguuaacuauua

SEQ ID NO: 27216 - RNA, 19 nt, Homo sapiens
  misc_RNA (1)...(19): siRNA sense strand
ggacauugauuauauugga

SEQ ID NO: 27217 - RNA, 19 nt, Homo sapiens
  misc_RNA (1)...(19): siRNA sense strand
caaggugguugauguuaua

SEQ ID NO: 27218 - RNA, 19 nt, Homo sapiens
  misc_RNA (1)...(19): siRNA sense strand
ggccauuucuuccuuauuu

SEQ ID NO: 27219 - RNA, 19 nt, Homo sapiens
  misc_RNA (1)...(19): siRNA sense strand
guucucagauauuggauua

SEQ ID NO: 27220 - RNA, 19 nt, Homo sapiens
  misc_RNA (1)...(19): siRNA sense strand
gcucauaccacucaguuua

SEQ ID NO: 27221 - RNA, 19 nt, Homo sapiens
  misc_RNA (1)...(19): siRNA sense strand
gaaaggaggaagcuacgua

SEQ ID NO: 27222 - RNA, 19 nt, Homo sapiens
  misc_RNA (1)...(19): siRNA sense strand
ggaacucacuccuuugaau

SEQ ID NO: 27223 - RNA, 19 nt, Homo sapiens
  misc_RNA (1)...(19): siRNA sense strand
uagugaagcuccaaacuuu

SEQ ID NO: 27224 - RNA, 19 nt, Homo sapiens
  misc_RNA (1)...(19): siRNA sense strand
ugaucaaacugguguauuu

SEQ ID NO: 27225 - RNA, 19 nt, Homo sapiens
  misc_RNA (1)...(19): siRNA sense strand
ugauuuagcuggauggauu

SEQ ID NO: 27226 - RNA, 19 nt, Homo sapiens
  misc_RNA (1)...(19): siRNA sense strand
cgacuggccuuaugucaau

SEQ ID NO: 27227 - RNA, 19 nt, Homo sapiens
  misc_RNA (1)...(19): siRNA sense strand
gaacucacuccuuugaauu

SEQ ID NO: 27228 - RNA, 19 nt, Homo sapiens
  misc_RNA (1)...(19): siRNA sense strand
ggaauuuucuucuggauuu

SEQ ID NO: 27229 - RNA, 19 nt, Homo sapiens
  misc_RNA (1)...(19): siRNA sense strand
gaaccucaccaucaucauu

SEQ ID NO: 27230 - RNA, 19 nt, Homo sapiens
  misc_RNA (1)...(19): siRNA sense strand
gcaugaagaugagcuguuc

SEQ ID NO: 27231 - RNA, 19 nt, Homo sapiens
  misc_RNA (1)...(19): siRNA sense strand
gcaggaagaguaaauaaag

SEQ ID NO: 27232 - RNA, 19 nt, Homo sapiens
  misc_RNA (1)...(19): siRNA sense strand
gcacugagcccucccacau

SEQ ID NO: 27233 - RNA, 19 nt, Homo sapiens
  misc_RNA (1)...(19): siRNA sense strand
ugacagcgauggcaguuuc

SEQ ID NO: 27234 - RNA, 19 nt, Homo sapiens
  misc_RNA (1)...(19): siRNA sense strand
gcagcuggauucucuaugg

SEQ ID NO: 27235 - RNA, 19 nt, Homo sapiens
  misc_RNA (1)...(19): siRNA sense strand
ugaagacuuuagcacuuua

SEQ ID NO: 27236 - RNA, 19 nt, Homo sapiens
  misc_RNA (1)...(19): siRNA sense strand
aagaggaaucccaauauua

SEQ ID NO: 27237 - RNA, 19 nt, Homo sapiens
  misc_RNA (1)...(19): siRNA sense strand
guaccuauaaggaugauuu

SEQ ID NO: 27238 - RNA, 19 nt, Homo sapiens
  misc_RNA (1)...(19): siRNA sense strand
ugaagacaguuggccauuu

SEQ ID NO: 27239 - RNA, 19 nt, Homo sapiens
  misc_RNA (1)...(19): siRNA sense strand
ucccagcccuucccaagua

SEQ ID NO: 27240 - RNA, 19 nt, Homo sapiens
  misc_RNA (1)...(19): siRNA sense strand
agaauuauuuccgaggaua

SEQ ID NO: 27241 - RNA, 19 nt, Homo sapiens
  misc_RNA (1)...(19): siRNA sense strand
ggauacgaguggugguuga

SEQ ID NO: 27242 - RNA, 19 nt, Homo sapiens
  misc_RNA (1)...(19): siRNA sense strand
aauuggaacucacuccuuu

SEQ ID NO: 27243 - RNA, 19 nt, Homo sapiens
  misc_RNA (1)...(19): siRNA sense strand
ccucuggcaugcugaauga

SEQ ID NO: 27244 - RNA, 19 nt, Homo sapiens
  misc_RNA (1)...(19): siRNA sense strand
gguauacacucacguuaac

SEQ ID NO: 27245 - RNA, 19 nt, Homo sapiens
  misc_RNA (1)...(19): siRNA sense strand
uuaagcagcuggauucucu

SEQ ID NO: 27246 - RNA, 19 nt, Homo sapiens
  misc_RNA (1)...(19): siRNA sense strand
gaugaaagaagcuaagaag

SEQ ID NO: 27247 - RNA, 19 nt, Homo sapiens
  misc_RNA (1)...(19): siRNA sense strand
gcuacccgcuuccuccaaa

SEQ ID NO: 27248 - RNA, 19 nt, Homo sapiens
  misc_RNA (1)...(19): siRNA sense strand
ggccuuaugucaaucuuca

SEQ ID NO: 27249 - RNA, 19 nt, Homo sapiens
  misc_RNA (1)...(19): siRNA sense strand
ucagcugacugccuauuau

SEQ ID NO: 27250 - RNA, 19 nt, Homo sapiens
  misc_RNA (1)...(19): siRNA sense strand
uuagcuggauggauuauau

SEQ ID NO: 27251 - RNA, 19 nt, Homo sapiens
  misc_RNA (1)...(19): siRNA sense strand
aagaugagcuguucacacu

SEQ ID NO: 27252 - RNA, 19 nt, Homo sapiens
  misc_RNA (1)...(19): siRNA sense strand
gagcuacagguaugguaua

SEQ ID NO: 27253 - RNA, 19 nt, Homo sapiens
  misc_RNA (1)...(19): siRNA sense strand
acaacaauuugccaccuuu

SEQ ID NO: 27254 - RNA, 19 nt, Homo sapiens
  misc_RNA (1)...(19): siRNA sense strand
aagaagaggaaucccaaua

SEQ ID NO: 27255 - RNA, 19 nt, Homo sapiens
  misc_RNA (1)...(19): siRNA sense strand
gacuacaacuggaccaauc

SEQ ID NO: 27256 - RNA, 19 nt, Homo sapiens
  misc_RNA (1)...(19): siRNA sense strand
gagaauuauuuccgaggau

SEQ ID NO: 27257 - RNA, 19 nt, Homo sapiens
  misc_RNA (1)...(19): siRNA sense strand
guucauugcaggaagagua

SEQ ID NO: 27258 - RNA, 19 nt, Homo sapiens
  misc_RNA (1)...(19): siRNA sense strand
cacaaucaguauuauagga

SEQ ID NO: 27259 - RNA, 19 nt, Homo sapiens
  misc_RNA (1)...(19): siRNA sense strand
cuacguagcucugacugau

SEQ ID NO: 27260 - RNA, 19 nt, Homo sapiens
  misc_RNA (1)...(19): siRNA sense strand
uaugaacaguugccuuaug

SEQ ID NO: 27261 - RNA, 19 nt, Homo sapiens
  misc_RNA (1)...(19): siRNA sense strand
ugaaagaagcuaagaagag

SEQ ID NO: 27262 - RNA, 19 nt, Homo sapiens
  misc_RNA (1)...(19): siRNA sense strand
uaagggaucuuuuagugaa

SEQ ID NO: 27263 - RNA, 19 nt, Homo sapiens
  misc_RNA (1)...(19): siRNA sense strand
cccgacuucuaguaaauua

SEQ ID NO: 27264 - RNA, 19 nt, Homo sapiens
  misc_RNA (1)...(19): siRNA sense strand
caaucugacuauaaagugu

SEQ ID NO: 27265 - RNA, 19 nt, Homo sapiens
  misc_RNA (1)...(19): siRNA sense strand
ccaacacaaucaguauuau

SEQ ID NO: 27266 - RNA, 19 nt, Homo sapiens
  misc_RNA (1)...(19): siRNA sense strand
gaagacuuuagcacuuuaa

SEQ ID NO: 27267 - RNA, 19 nt, Homo sapiens
  misc_RNA (1)...(19): siRNA sense strand
uuuaggacguguugaaguu

SEQ ID NO: 27268 - RNA, 19 nt, Homo sapiens
  misc_RNA (1)...(19): siRNA sense strand
acuaugaacaguugccuua

SEQ ID NO: 27269 - RNA, 19 nt, Homo sapiens
  misc_RNA (1)...(19): siRNA sense strand
ucugaagacuuuagcacuu

SEQ ID NO: 27270 - RNA, 19 nt, Homo sapiens
  misc_RNA (1)...(19): siRNA sense strand
guguugaaguuacagcaaa

SEQ ID NO: 27271 - RNA, 19 nt, Homo sapiens
  misc_RNA (1)...(19): siRNA sense strand
acacugagccugcaugaag

SEQ ID NO: 27272 - RNA, 19 nt, Homo sapiens
  misc_RNA (1)...(19): siRNA sense strand
cugaagacuuuagcacuuu

SEQ ID NO: 27273 - RNA, 19 nt, Homo sapiens
  misc_RNA (1)...(19): siRNA sense strand
caaggucuccagcgaguga

SEQ ID NO: 27274 - RNA, 19 nt, Homo sapiens
  misc_RNA (1)...(19): siRNA sense strand
uccaacacaaucaguauua

SEQ ID NO: 27275 - RNA, 19 nt, Homo sapiens
  misc_RNA (1)...(19): siRNA sense strand
gcauccaacacaaucagua

SEQ ID NO: 27276 - RNA, 19 nt, Homo sapiens
  misc_RNA (1)...(19): siRNA sense strand
aaggaugauuucaauguug

SEQ ID NO: 27277 - RNA, 19 nt, Homo sapiens
  misc_RNA (1)...(19): siRNA sense strand
gcacuagaugagaauuauu

SEQ ID NO: 27278 - RNA, 19 nt, Homo sapiens
  misc_RNA (1)...(19): siRNA sense strand
uggcugggcugcaauugga

SEQ ID NO: 27279 - RNA, 19 nt, Homo sapiens
  misc_RNA (1)...(19): siRNA sense strand
gaggucauauaaugccaau

SEQ ID NO: 27280 - RNA, 19 nt, Homo sapiens
  misc_RNA (1)...(19): siRNA sense strand
agaagaggaaucccaauau

SEQ ID NO: 27281 - RNA, 19 nt, Homo sapiens
  misc_RNA (1)...(19): siRNA sense strand
caaaguugacugggaagaa

SEQ ID NO: 27282 - RNA, 19 nt, Homo sapiens
  misc_RNA (1)...(19): siRNA sense strand
aagaauggcugggcugcaa

SEQ ID NO: 27283 - RNA, 19 nt, Homo sapiens
  misc_RNA (1)...(19): siRNA sense strand
cagacaucccugugaauuu

SEQ ID NO: 27284 - RNA, 19 nt, Homo sapiens
  misc_RNA (1)...(19): siRNA sense strand
uuuggugccucuuugcaua

SEQ ID NO: 27285 - RNA, 19 nt, Homo sapiens
  misc_RNA (1)...(19): siRNA sense strand
gaauggcugggcugcaauu

SEQ ID NO: 27286 - RNA, 19 nt, Homo sapiens
  misc_RNA (1)...(19): siRNA sense strand
gauuuagcuggauggauua

SEQ ID NO: 27287 - RNA, 19 nt, Homo sapiens
  misc_RNA (1)...(19): siRNA sense strand
ugaagacccuggcgagcau

SEQ ID NO: 27288 - RNA, 19 nt, Homo sapiens
  misc_RNA (1)...(19): siRNA sense strand
gggagaugcggguugauga

SEQ ID NO: 27289 - RNA, 19 nt, Homo sapiens
  misc_RNA (1)...(19): siRNA sense strand
agacaucccugugaauuuu

SEQ ID NO: 27290 - RNA, 19 nt, Homo sapiens
  misc_RNA (1)...(19): siRNA sense strand
gguuacaggugauuuagcu

SEQ ID NO: 27291 - RNA, 19 nt, Homo sapiens
  misc_RNA (1)...(19): siRNA sense strand
uagaagugccagaggaauu

SEQ ID NO: 27292 - RNA, 19 nt, Homo sapiens
  misc_RNA (1)...(19): siRNA sense strand
gggcugcaauuggaacuca

SEQ ID NO: 27293 - RNA, 19 nt, Homo sapiens
  misc_RNA (1)...(19): siRNA sense strand
caggguuacaggugauuua

SEQ ID NO: 27294 - RNA, 19 nt, Homo sapiens
  misc_RNA (1)...(19): siRNA sense strand
uaugggagaugcggguuga

SEQ ID NO: 27295 - RNA, 19 nt, Homo sapiens
  misc_RNA (1)...(19): siRNA sense strand
uacgaguggugguugauga

SEQ ID NO: 27296 - RNA, 19 nt, Homo sapiens
  misc_RNA (1)...(19): siRNA sense strand
agaagugccagaggaauuu

SEQ ID NO: 27297 - RNA, 19 nt, Homo sapiens
  misc_RNA (1)...(19): siRNA sense strand
gccgaugcauccaacacaa

SEQ ID NO: 27298 - RNA, 19 nt, Homo sapiens
  misc_RNA (1)...(19): siRNA sense strand
gucauaaacauucuaagug

SEQ ID NO: 27299 - RNA, 19 nt, Homo sapiens
  misc_RNA (1)...(19): siRNA sense strand
uagggaaccucaccaucau

SEQ ID NO: 27300 - RNA, 19 nt, Homo sapiens
  misc_RNA (1)...(19): siRNA sense strand
aaaguugacugggaagaag

SEQ ID NO: 27301 - RNA, 19 nt, Homo sapiens
  misc_RNA (1)...(19): siRNA sense strand
caaguaccuauaaggauga

SEQ ID NO: 27302 - RNA, 19 nt, Homo sapiens
  misc_RNA (1)...(19): siRNA sense strand
gaauuuaguggcuaguuac

SEQ ID NO: 27303 - RNA, 19 nt, Homo sapiens
  misc_RNA (1)...(19): siRNA sense strand
uaucagcucauaccacuca

SEQ ID NO: 27304 - RNA, 19 nt, Homo sapiens
  misc_RNA (1)...(19): siRNA sense strand
cuuugaauuugcacaguuu

SEQ ID NO: 27305 - RNA, 19 nt, Homo sapiens
  misc_RNA (1)...(19): siRNA sense strand
cuggauggauuauauaugc

SEQ ID NO: 27306 - RNA, 19 nt, Homo sapiens
  misc_RNA (1)...(19): siRNA sense strand
ggugguauuuugauuagaa

SEQ ID NO: 27307 - RNA, 19 nt, Homo sapiens
  misc_RNA (1)...(19): siRNA sense strand
caggaagaguaaauaaagg

SEQ ID NO: 27308 - RNA, 19 nt, Homo sapiens
  misc_RNA (1)...(19): siRNA sense strand
gacuauaaagugugauguu

SEQ ID NO: 27309 - RNA, 19 nt, Homo sapiens
  misc_RNA (1)...(19): siRNA sense strand
gugaugggcagacaacaga

SEQ ID NO: 27310 - RNA, 19 nt, Homo sapiens
  misc_RNA (1)...(19): siRNA sense strand
caauuugccaccuuuguuc

SEQ ID NO: 27311 - RNA, 19 nt, Homo sapiens
  misc_RNA (1)...(19): siRNA sense strand
ggaagaagaucccguacaa

SEQ ID NO: 27312 - RNA, 19 nt, Homo sapiens
  misc_RNA (1)...(19): siRNA sense strand
ccaacaaccucaugccuua

SEQ ID NO: 27313 - RNA, 19 nt, Homo sapiens
  misc_RNA (1)...(19): siRNA sense strand
gcacagguguccgggauua

SEQ ID NO: 27314 - RNA, 19 nt, Homo sapiens
  misc_RNA (1)...(19): siRNA sense strand
agaagccucuggauuauua

SEQ ID NO: 27315 - RNA, 19 nt, Homo sapiens
  misc_RNA (1)...(19): siRNA sense strand
uaaggaagcugaaagaaca

SEQ ID NO: 27316 - RNA, 19 nt, Homo sapiens
  misc_RNA (1)...(19): siRNA sense strand
gcagaauccuucaggcuuu

SEQ ID NO: 27317 - RNA, 19 nt, Homo sapiens
  misc_RNA (1)...(19): siRNA sense strand
gcuggaggcuggcuacuug

SEQ ID NO: 27318 - RNA, 19 nt, Homo sapiens
  misc_RNA (1)...(19): siRNA sense strand
gagaaggccucugggaaga

SEQ ID NO: 27319 - RNA, 19 nt, Homo sapiens
  misc_RNA (1)...(19): siRNA sense strand
gcagagaaggugcugguaa

SEQ ID NO: 27320 - RNA, 19 nt, Homo sapiens
  misc_RNA (1)...(19): siRNA sense strand
gcaaugacuaugacacaga

SEQ ID NO: 27321 - RNA, 19 nt, Homo sapiens
  misc_RNA (1)...(19): siRNA sense strand
ggucaucgauaacuuccau

SEQ ID NO: 27322 - RNA, 19 nt, Homo sapiens
  misc_RNA (1)...(19): siRNA sense strand
gggccacauugcagccuua

SEQ ID NO: 27323 - RNA, 19 nt, Homo sapiens
  misc_RNA (1)...(19): siRNA sense strand
gggaggcccugaaugucuu

SEQ ID NO: 27324 - RNA, 19 nt, Homo sapiens
  misc_RNA (1)...(19): siRNA sense strand
gcuauucagugcugcagau

SEQ ID NO: 27325 - RNA, 19 nt, Homo sapiens
  misc_RNA (1)...(19): siRNA sense strand
gaaggccucugggaagaag

SEQ ID NO: 27326 - RNA, 19 nt, Homo sapiens
  misc_RNA (1)...(19): siRNA sense strand
aucgauaacuuccauaaug

SEQ ID NO: 27327 - RNA, 19 nt, Homo sapiens
  misc_RNA (1)...(19): siRNA sense strand
cagagaaggugcugguaac

SEQ ID NO: 27328 - RNA, 19 nt, Homo sapiens
  misc_RNA (1)...(19): siRNA sense strand
gacgggaggcccugaaugu

SEQ ID NO: 27329 - RNA, 19 nt, Homo sapiens
  misc_RNA (1)...(19): siRNA sense strand
ccuacagcgucucuucaaa

SEQ ID NO: 27330 - RNA, 19 nt, Homo sapiens
  misc_RNA (1)...(19): siRNA sense strand
cugaaugucuuuggcaaug

SEQ ID NO: 27331 - RNA, 19 nt, Homo sapiens
  misc_RNA (1)...(19): siRNA sense strand
ugaaugucuuuggcaauga

SEQ ID NO: 27332 - RNA, 19 nt, Homo sapiens
  misc_RNA (1)...(19): siRNA sense strand
gaagcugaaagaacagugu

SEQ ID NO: 27333 - RNA, 19 nt, Homo sapiens
  misc_RNA (1)...(19): siRNA sense strand
gcagcucagccacugugua

SEQ ID NO: 27334 - RNA, 19 nt, Homo sapiens
  misc_RNA (1)...(19): siRNA sense strand
ccuuagggcuggacaggau

SEQ ID NO: 27335 - RNA, 19 nt, Homo sapiens
  misc_RNA (1)...(19): siRNA sense strand
cuacuugccuguggucauc

SEQ ID NO: 27336 - RNA, 19 nt, Homo sapiens
  misc_RNA (1)...(19): siRNA sense strand
ugccuguggucaucgauaa

SEQ ID NO: 27337 - RNA, 19 nt, Homo sapiens
  misc_RNA (1)...(19): siRNA sense strand
gaaugucuuuggcaaugac

SEQ ID NO: 27338 - RNA, 19 nt, Homo sapiens
  misc_RNA (1)...(19): siRNA sense strand
cagaauccuucaggcuuug

SEQ ID NO: 27339 - RNA, 19 nt, Homo sapiens
  misc_RNA (1)...(19): siRNA sense strand
gugauguggcagccuguua

SEQ ID NO: 27340 - RNA, 19 nt, Homo sapiens
  misc_RNA (1)...(19): siRNA sense strand
ccacauugcagccuuaagg

SEQ ID NO: 27341 - RNA, 19 nt, Homo sapiens
  misc_RNA (1)...(19): siRNA sense strand
ggacaggaugugugaggau

SEQ ID NO: 27342 - RNA, 19 nt, Homo sapiens
  misc_RNA (1)...(19): siRNA sense strand
cuggauuauuacagaguua

SEQ ID NO: 27343 - RNA, 19 nt, Homo sapiens
  misc_RNA (1)...(19): siRNA sense strand
gcaaguccaaguucuucau

SEQ ID NO: 27344 - RNA, 19 nt, Homo sapiens
  misc_RNA (1)...(19): siRNA sense strand
ucgauaacuuccauaaugc

SEQ ID NO: 27345 - RNA, 19 nt, Homo sapiens
  misc_RNA (1)...(19): siRNA sense strand
uugaggagauggacauuuu

SEQ ID NO: 27346 - RNA, 19 nt, Homo sapiens
  misc_RNA (1)...(19): siRNA sense strand
gaagaagaucccguacaag

SEQ ID NO: 27347 - RNA, 19 nt, Homo sapiens
  misc_RNA (1)...(19): siRNA sense strand
caguguggcugccggaucu

SEQ ID NO: 27348 - RNA, 19 nt, Homo sapiens
  misc_RNA (1)...(19): siRNA sense strand
gccgcucuguggaguuuga

SEQ ID NO: 27349 - RNA, 19 nt, Homo sapiens
  misc_RNA (1)...(19): siRNA sense strand
ucaucgauaacuuccauaa

SEQ ID NO: 27350 - RNA, 19 nt, Homo sapiens
  misc_RNA (1)...(19): siRNA sense strand
gcacgggcacaggcuauuc

SEQ ID NO: 27351 - RNA, 19 nt, Homo sapiens
  misc_RNA (1)...(19): siRNA sense strand
gcagaugguccaggcuaug

SEQ ID NO: 27352 - RNA, 19 nt, Homo sapiens
  misc_RNA (1)...(19): siRNA sense strand
uuauggcggucauccacuu

SEQ ID NO: 27353 - RNA, 19 nt, Homo sapiens
  misc_RNA (1)...(19): siRNA sense strand
caaguucuucaucgaggaa

SEQ ID NO: 27354 - RNA, 19 nt, Homo sapiens
  misc_RNA (1)...(19): siRNA sense strand
cagcucagccacuguguac

SEQ ID NO: 27355 - RNA, 19 nt, Homo sapiens
  misc_RNA (1)...(19): siRNA sense strand
ucaagggagugauucagua

SEQ ID NO: 27356 - RNA, 19 nt, Homo sapiens
  misc_RNA (1)...(19): siRNA sense strand
gaccaguucaucucacuua

SEQ ID NO: 27357 - RNA, 19 nt, Homo sapiens
  misc_RNA (1)...(19): siRNA sense strand
gagccaaggugcugugcuu

SEQ ID NO: 27358 - RNA, 19 nt, Homo sapiens
  misc_RNA (1)...(19): siRNA sense strand
gccacgcgcugcucauuga

SEQ ID NO: 27359 - RNA, 19 nt, Homo sapiens
  misc_RNA (1)...(19): siRNA sense strand
gcgccaaugugaagaagug

SEQ ID NO: 27360 - RNA, 19 nt, Homo sapiens
  misc_RNA (1)...(19): siRNA sense strand
gggaacacacggacuacaa

SEQ ID NO: 27361 - RNA, 19 nt, Homo sapiens
  misc_RNA (1)...(19): siRNA sense strand
caguucaucucacuuaugg

SEQ ID NO: 27362 - RNA, 19 nt, Homo sapiens
  misc_RNA (1)...(19): siRNA sense strand
cagcucagcauccuuggaa

SEQ ID NO: 27363 - RNA, 19 nt, Homo sapiens
  misc_RNA (1)...(19): siRNA sense strand
agggagugauucaguacua

SEQ ID NO: 27364 - RNA, 19 nt, Homo sapiens
  misc_RNA (1)...(19): siRNA sense strand
gcucaucaccaacucuaau

SEQ ID NO: 27365 - RNA, 19 nt, Homo sapiens
  misc_RNA (1)...(19): siRNA sense strand
ccuuggaaguggccacgua

SEQ ID NO: 27366 - RNA, 19 nt, Homo sapiens
  misc_RNA (1)...(19): siRNA sense strand
ccugagacguggcgacuac

SEQ ID NO: 27367 - RNA, 19 nt, Homo sapiens
  misc_RNA (1)...(19): siRNA sense strand
guuuauggcagccgcauga

SEQ ID NO: 27368 - RNA, 19 nt, Homo sapiens
  misc_RNA (1)...(19): siRNA sense strand
aggaugggcuggugucucu

SEQ ID NO: 27369 - RNA, 19 nt, Homo sapiens
  misc_RNA (1)...(19): siRNA sense strand
ggaacacacggacuacaac

SEQ ID NO: 27370 - RNA, 19 nt, Homo sapiens
  misc_RNA (1)...(19): siRNA sense strand
ucacuuaugggacagaaag

SEQ ID NO: 27371 - RNA, 19 nt, Homo sapiens
  misc_RNA (1)...(19): siRNA sense strand
gagacguggcgacuacaga

SEQ ID NO: 27372 - RNA, 19 nt, Homo sapiens
  misc_RNA (1)...(19): siRNA sense strand
caucauggaccaguucauc

SEQ ID NO: 27373 - RNA, 19 nt, Homo sapiens
  misc_RNA (1)...(19): siRNA sense strand
ccaguucaucucacuuaug

SEQ ID NO: 27374 - RNA, 19 nt, Homo sapiens
  misc_RNA (1)...(19): siRNA sense strand
gcacauccaggagcacuac

SEQ ID NO: 27375 - RNA, 19 nt, Homo sapiens
  misc_RNA (1)...(19): siRNA sense strand
gugcucaucaccaacucua

SEQ ID NO: 27376 - RNA, 19 nt, Homo sapiens
  misc_RNA (1)...(19): siRNA sense strand
gguacaacuggaagagcua

SEQ ID NO: 27377 - RNA, 19 nt, Homo sapiens
  misc_RNA (1)...(19): siRNA sense strand
gggagugauucaguacuac

SEQ ID NO: 27378 - RNA, 19 nt, Homo sapiens
  misc_RNA (1)...(19): siRNA sense strand
ggacugccaccuucuaccu

SEQ ID NO: 27379 - RNA, 19 nt, Homo sapiens
  misc_RNA (1)...(19): siRNA sense strand
gcgggacugccaccuucua

SEQ ID NO: 27380 - RNA, 19 nt, Homo sapiens
  misc_RNA (1)...(19): siRNA sense strand
gcucagcauccuuggaagu

SEQ ID NO: 27381 - RNA, 19 nt, Homo sapiens
  misc_RNA (1)...(19): siRNA sense strand
ggacaggccuaucuucuau

SEQ ID NO: 27382 - RNA, 19 nt, Homo sapiens
  misc_RNA (1)...(19): siRNA sense strand
caacggcgcugcccucauu

SEQ ID NO: 27383 - RNA, 19 nt, Homo sapiens
  misc_RNA (1)...(19): siRNA sense strand
ggagaugguuggcagauau

SEQ ID NO: 27384 - RNA, 19 nt, Homo sapiens
  misc_RNA (1)...(19): siRNA sense strand
ggagauugaugacagcauu

SEQ ID NO: 27385 - RNA, 19 nt, Homo sapiens
  misc_RNA (1)...(19): siRNA sense strand
ggacaacaccuucgucuuc

SEQ ID NO: 27386 - RNA, 19 nt, Homo sapiens
  misc_RNA (1)...(19): siRNA sense strand
uggcagauauuaugaagaa

SEQ ID NO: 27387 - RNA, 19 nt, Homo sapiens
  misc_RNA (1)...(19): siRNA sense strand
ggaagcagaccacguuuga

SEQ ID NO: 27388 - RNA, 19 nt, Homo sapiens
  misc_RNA (1)...(19): siRNA sense strand
gcccuggacuucauuaaga

SEQ ID NO: 27389 - RNA, 19 nt, Homo sapiens
  misc_RNA (1)...(19): siRNA sense strand
acaggccuaucuucuauua

SEQ ID NO: 27390 - RNA, 19 nt, Homo sapiens
  misc_RNA (1)...(19): siRNA sense strand
ggucacaacucacaaucug

SEQ ID NO: 27391 - RNA, 19 nt, Homo sapiens
  misc_RNA (1)...(19): siRNA sense strand
ugacagcauugggaagaua

SEQ ID NO: 27392 - RNA, 19 nt, Homo sapiens
  misc_RNA (1)...(19): siRNA sense strand
gggagaugguuggcagaua

SEQ ID NO: 27393 - RNA, 19 nt, Homo sapiens
  misc_RNA (1)...(19): siRNA sense strand
ucagacagggcauugauuu

SEQ ID NO: 27394 - RNA, 19 nt, Homo sapiens
  misc_RNA (1)...(19): siRNA sense strand
gcaacugggcggucaugaa

SEQ ID NO: 27395 - RNA, 19 nt, Homo sapiens
  misc_RNA (1)...(19): siRNA sense strand
gcagaccacguuugaagga

SEQ ID NO: 27396 - RNA, 19 nt, Homo sapiens
  misc_RNA (1)...(19): siRNA sense strand
gcaagauugucggcaagug

SEQ ID NO: 27397 - RNA, 19 nt, Homo sapiens
  misc_RNA (1)...(19): siRNA sense strand
ccagagagaccccgaauuu

SEQ ID NO: 27398 - RNA, 19 nt, Homo sapiens
  misc_RNA (1)...(19): siRNA sense strand
ggcccaacaucccugugua

SEQ ID NO: 27399 - RNA, 19 nt, Homo sapiens
  misc_RNA (1)...(19): siRNA sense strand
gaugacagcauugggaaga

SEQ ID NO: 27400 - RNA, 19 nt, Homo sapiens
  misc_RNA (1)...(19): siRNA sense strand
caacucacaaucuggaaga

SEQ ID NO: 27401 - RNA, 19 nt, Homo sapiens
  misc_RNA (1)...(19): siRNA sense strand
guacagggacugggagaug

SEQ ID NO: 27402 - RNA, 19 nt, Homo sapiens
  misc_RNA (1)...(19): siRNA sense strand
gacaacaccuucgucuucu

SEQ ID NO: 27403 - RNA, 19 nt, Homo sapiens
  misc_RNA (1)...(19): siRNA sense strand
gacagggcauugauuucug

SEQ ID NO: 27404 - RNA, 19 nt, Homo sapiens
  misc_RNA (1)...(19): siRNA sense strand
gaacuucagacagggcauu

SEQ ID NO: 27405 - RNA, 19 nt, Homo sapiens
  misc_RNA (1)...(19): siRNA sense strand
caacaccuucgucuucuuc

SEQ ID NO: 27406 - RNA, 19 nt, Homo sapiens
  misc_RNA (1)...(19): siRNA sense strand
caacugggcggucaugaac

SEQ ID NO: 27407 - RNA, 19 nt, Homo sapiens
  misc_RNA (1)...(19): siRNA sense strand
gagaugguuggcagauauu

SEQ ID NO: 27408 - RNA, 19 nt, Homo sapiens
  misc_RNA (1)...(19): siRNA sense strand
gcaccuccgggcugugaaa

SEQ ID NO: 27409 - RNA, 19 nt, Homo sapiens
  misc_RNA (1)...(19): siRNA sense strand
caacgcccaugccagaaac

SEQ ID NO: 27410 - RNA, 19 nt, Homo sapiens
  misc_RNA (1)...(19): siRNA sense strand
aagccaaccucacccagau

SEQ ID NO: 27411 - RNA, 19 nt, Homo sapiens
  misc_RNA (1)...(19): siRNA sense strand
cggauuugaugagugguuu

SEQ ID NO: 27412 - RNA, 19 nt, Homo sapiens
  misc_RNA (1)...(19): siRNA sense strand
ccaacgcccaugccagaaa

SEQ ID NO: 27413 - RNA, 19 nt, Homo sapiens
  misc_RNA (1)...(19): siRNA sense strand
gaugguuggcagauauuau

SEQ ID NO: 27414 - RNA, 19 nt, Homo sapiens
  misc_RNA (1)...(19): siRNA sense strand
gaagcagaccacguuugaa

SEQ ID NO: 27415 - RNA, 19 nt, Homo sapiens
  misc_RNA (1)...(19): siRNA sense strand
guuggcagauauuaugaag

SEQ ID NO: 27416 - RNA, 19 nt, Homo sapiens
  misc_RNA (1)...(19): siRNA sense strand
gggaagcagaccacguuug

SEQ ID NO: 27417 - RNA, 19 nt, Homo sapiens
  misc_RNA (1)...(19): siRNA sense strand
cuacacaccgcaggagauu

SEQ ID NO: 27418 - RNA, 19 nt, Homo sapiens
  misc_RNA (1)...(19): siRNA sense strand
acacaccgcaggagauugu

SEQ ID NO: 27419 - RNA, 19 nt, Homo sapiens
  misc_RNA (1)...(19): siRNA sense strand
gaagcacggauuugaugag

SEQ ID NO: 27420 - RNA, 19 nt, Homo sapiens
  misc_RNA (1)...(19): siRNA sense strand
uggacaggccuaucuucua

SEQ ID NO: 27421 - RNA, 19 nt, Homo sapiens
  misc_RNA (1)...(19): siRNA sense strand
gagauugaugacagcauug

SEQ ID NO: 27422 - RNA, 19 nt, Homo sapiens
  misc_RNA (1)...(19): siRNA sense strand
ccucugugcucgccaucga

SEQ ID NO: 27423 - RNA, 19 nt, Homo sapiens
  misc_RNA (1)...(19): siRNA sense strand
gcagcaucauggaccucuu

SEQ ID NO: 27424 - RNA, 19 nt, Homo sapiens
  misc_RNA (1)...(19): siRNA sense strand
aagcagaccacguuugaag

SEQ ID NO: 27425 - RNA, 19 nt, Homo sapiens
  misc_RNA (1)...(19): siRNA sense strand
ugaagcacggauuugauga

SEQ ID NO: 27426 - RNA, 19 nt, Homo sapiens
  misc_RNA (1)...(19): siRNA sense strand
gauggacaggccuaucuuc

SEQ ID NO: 27427 - RNA, 19 nt, Homo sapiens
  misc_RNA (1)...(19): siRNA sense strand
cauccgcaauggcuucuac

SEQ ID NO: 27428 - RNA, 19 nt, Homo sapiens
  misc_RNA (1)...(19): siRNA sense strand
ccagaucuaccugcaggaa

SEQ ID NO: 27429 - RNA, 19 nt, Homo sapiens
  misc_RNA (1)...(19): siRNA sense strand
gcacggcaccaccccuuuu

SEQ ID NO: 27430 - RNA, 19 nt, Homo sapiens
  misc_RNA (1)...(19): siRNA sense strand
acacgaagcugccccugau

SEQ ID NO: 27431 - RNA, 19 nt, Homo sapiens
  misc_RNA (1)...(19): siRNA sense strand
aaacaaaggugccaugaug

SEQ ID NO: 27432 - RNA, 19 nt, Homo sapiens
  misc_RNA (1)...(19): siRNA sense strand
gaucuagccuccaucauga

SEQ ID NO: 27433 - RNA, 19 nt, Homo sapiens
  misc_RNA (1)...(19): siRNA sense strand
gaucucagcaggccuauaa

SEQ ID NO: 27434 - RNA, 19 nt, Homo sapiens
  misc_RNA (1)...(19): siRNA sense strand
gcaaacgaccaucagcaua

SEQ ID NO: 27435 - RNA, 19 nt, Homo sapiens
  misc_RNA (1)...(19): siRNA sense strand
gccaggagcuacucaggaa

SEQ ID NO: 27436 - RNA, 19 nt, Homo sapiens
  misc_RNA (1)...(19): siRNA sense strand
caaacgaccaucagcauau

SEQ ID NO: 27437 - RNA, 19 nt, Homo sapiens
  misc_RNA (1)...(19): siRNA sense strand
acaacccgcugcaggauga

SEQ ID NO: 27438 - RNA, 19 nt, Homo sapiens
  misc_RNA (1)...(19): siRNA sense strand
caaguaugacaaccucuuu

SEQ ID NO: 27439 - RNA, 19 nt, Homo sapiens
  misc_RNA (1)...(19): siRNA sense strand
gcugcacgcucauuacuac

SEQ ID NO: 27440 - RNA, 19 nt, Homo sapiens
  misc_RNA (1)...(19): siRNA sense strand
uagccuccaucaugaagaa

SEQ ID NO: 27441 - RNA, 19 nt, Homo sapiens
  misc_RNA (1)...(19): siRNA sense strand
uaugacaaccucuuugaga

SEQ ID NO: 27442 - RNA, 19 nt, Homo sapiens
  misc_RNA (1)...(19): siRNA sense strand
gugaugaucuagccuccau

SEQ ID NO: 27443 - RNA, 19 nt, Homo sapiens
  misc_RNA (1)...(19): siRNA sense strand
aaacgaccaucagcauauc

SEQ ID NO: 27444 - RNA, 19 nt, Homo sapiens
  misc_RNA (1)...(19): siRNA sense strand
gguaugggccagcaguuuc

SEQ ID NO: 27445 - RNA, 19 nt, Homo sapiens
  misc_RNA (1)...(19): siRNA sense strand
ggcagcugcacgcucauua

SEQ ID NO: 27446 - RNA, 19 nt, Homo sapiens
  misc_RNA (1)...(19): siRNA sense strand
guacagccgccaggagcua

SEQ ID NO: 27447 - RNA, 19 nt, Homo sapiens
  misc_RNA (1)...(19): siRNA sense strand
uggaaccgauccucagcaa

SEQ ID NO: 27448 - RNA, 19 nt, Homo sapiens
  misc_RNA (1)...(19): siRNA sense strand
gaaaacaaaggugccauga

SEQ ID NO: 27449 - RNA, 19 nt, Homo sapiens
  misc_RNA (1)...(19): siRNA sense strand
ccaaguaugacaaccucuu

SEQ ID NO: 27450 - RNA, 19 nt, Homo sapiens
  misc_RNA (1)...(19): siRNA sense strand
cagcaaccuuccgggcaaa

SEQ ID NO: 27451 - RNA, 19 nt, Homo sapiens
  misc_RNA (1)...(19): siRNA sense strand
auucaugguuggcuacgaa

SEQ ID NO: 27452 - RNA, 19 nt, Homo sapiens
  misc_RNA (1)...(19): siRNA sense strand
ucagcaggccuauaagagu

SEQ ID NO: 27453 - RNA, 19 nt, Homo sapiens
  misc_RNA (1)...(19): siRNA sense strand
caugguuggcuacgaaaug

SEQ ID NO: 27454 - RNA, 19 nt, Homo sapiens
  misc_RNA (1)...(19): siRNA sense strand
ggcaaacgaccaucagcau

SEQ ID NO: 27455 - RNA, 19 nt, Homo sapiens
  misc_RNA (1)...(19): siRNA sense strand
gagacguccuuucccuacu

SEQ ID NO: 27456 - RNA, 19 nt, Homo sapiens
  misc_RNA (1)...(19): siRNA sense strand
aguaugacaaccucuuuga

SEQ ID NO: 27457 - RNA, 19 nt, Homo sapiens
  misc_RNA (1)...(19): siRNA sense strand
gccacuguccggaaauuca

SEQ ID NO: 27458 - RNA, 19 nt, Homo sapiens
  misc_RNA (1)...(19): siRNA sense strand
gcaaacgaccaucagcaua

SEQ ID NO: 27459 - RNA, 19 nt, Homo sapiens
  misc_RNA (1)...(19): siRNA sense strand
caaacgaccaucagcauau

SEQ ID NO: 27460 - RNA, 19 nt, Homo sapiens
  misc_RNA (1)...(19): siRNA sense strand
acaacccgcugcaggauga

SEQ ID NO: 27461 - RNA, 19 nt, Homo sapiens
  misc_RNA (1)...(19): siRNA sense strand
aaacgaccaucagcauauc

SEQ ID NO: 27462 - RNA, 19 nt, Homo sapiens
  misc_RNA (1)...(19): siRNA sense strand
uggaaccgauccucagcaa

SEQ ID NO: 27463 - RNA, 19 nt, Homo sapiens
  misc_RNA (1)...(19): siRNA sense strand
cagcaaccuuccgggcaaa

SEQ ID NO: 27464 - RNA, 19 nt, Homo sapiens
  misc_RNA (1)...(19): siRNA sense strand
ggcaaacgaccaucagcau

SEQ ID NO: 27465 - RNA, 19 nt, Homo sapiens
  misc_RNA (1)...(19): siRNA sense strand
aaacaaaggugccaugaug

SEQ ID NO: 27466 - RNA, 19 nt, Homo sapiens
  misc_RNA (1)...(19): siRNA sense strand
gaucucagcaggccuauaa

SEQ ID NO: 27467 - RNA, 19 nt, Homo sapiens
  misc_RNA (1)...(19): siRNA sense strand
gcaaacgaccaucagcaua

SEQ ID NO: 27468 - RNA, 19 nt, Homo sapiens
  misc_RNA (1)...(19): siRNA sense strand
gccaggagcuacucaggaa

SEQ ID NO: 27469 - RNA, 19 nt, Homo sapiens
  misc_RNA (1)...(19): siRNA sense strand
caaacgaccaucagcauau

SEQ ID NO: 27470 - RNA, 19 nt, Homo sapiens
  misc_RNA (1)...(19): siRNA sense strand
acaacccgcugcaggauga

SEQ ID NO: 27471 - RNA, 19 nt, Homo sapiens
  misc_RNA (1)...(19): siRNA sense strand
aaacgaccaucagcauauc

SEQ ID NO: 27472 - RNA, 19 nt, Homo sapiens
  misc_RNA (1)...(19): siRNA sense strand
gguaugggccagcaguuuc

SEQ ID NO: 27473 - RNA, 19 nt, Homo sapiens
  misc_RNA (1)...(19): siRNA sense strand
guacagccgccaggagcua

SEQ ID NO: 27474 - RNA, 19 nt, Homo sapiens
  misc_RNA (1)...(19): siRNA sense strand
uggaaccgauccucagcaa

SEQ ID NO: 27475 - RNA, 19 nt, Homo sapiens
  misc_RNA (1)...(19): siRNA sense strand
gaaaacaaaggugccauga

SEQ ID NO: 27476 - RNA, 19 nt, Homo sapiens
  misc_RNA (1)...(19): siRNA sense strand
cagcaaccuuccgggcaaa

SEQ ID NO: 27477 - RNA, 19 nt, Homo sapiens
  misc_RNA (1)...(19): siRNA sense strand
ucagcaggccuauaagagu

SEQ ID NO: 27478 - RNA, 19 nt, Homo sapiens
  misc_RNA (1)...(19): siRNA sense strand
ggcaaacgaccaucagcau

SEQ ID NO: 27479 - RNA, 19 nt, Homo sapiens
  misc_RNA (1)...(19): siRNA sense strand
ggagagaucuuguaucgua

SEQ ID NO: 27480 - RNA, 19 nt, Homo sapiens
  misc_RNA (1)...(19): siRNA sense strand
gaacaugggcgauauagua

SEQ ID NO: 27481 - RNA, 19 nt, Homo sapiens
  misc_RNA (1)...(19): siRNA sense strand
gcagauggauugaauaugu

SEQ ID NO: 27482 - RNA, 19 nt, Homo sapiens
  misc_RNA (1)...(19): siRNA sense strand
gcuacaaguuccuaaauaa

SEQ ID NO: 27483 - RNA, 19 nt, Homo sapiens
  misc_RNA (1)...(19): siRNA sense strand
gcucugugcucuccaauuu

SEQ ID NO: 27484 - RNA, 19 nt, Homo sapiens
  misc_RNA (1)...(19): siRNA sense strand
ggaagaauaucgcuuugau

SEQ ID NO: 27485 - RNA, 19 nt, Homo sapiens
  misc_RNA (1)...(19): siRNA sense strand
ggauucagcuacuuaaaga

SEQ ID NO: 27486 - RNA, 19 nt, Homo sapiens
  misc_RNA (1)...(19): siRNA sense strand
ccucauggauccaaauuaa

SEQ ID NO: 27487 - RNA, 19 nt, Homo sapiens
  misc_RNA (1)...(19): siRNA sense strand
gauggugguuggaagaaua

SEQ ID NO: 27488 - RNA, 19 nt, Homo sapiens
  misc_RNA (1)...(19): siRNA sense strand
uaagauuccuucugucaaa

SEQ ID NO: 27489 - RNA, 19 nt, Homo sapiens
  misc_RNA (1)...(19): siRNA sense strand
gaauaucgcuuugauggau

SEQ ID NO: 27490 - RNA, 19 nt, Homo sapiens
  misc_RNA (1)...(19): siRNA sense strand
ccacggagucuaagaauuu

SEQ ID NO: 27491 - RNA, 19 nt, Homo sapiens
  misc_RNA (1)...(19): siRNA sense strand
gaucuuguaucguauuuca

SEQ ID NO: 27492 - RNA, 19 nt, Homo sapiens
  misc_RNA (1)...(19): siRNA sense strand
cauaugaguuuaagcauuc

SEQ ID NO: 27493 - RNA, 19 nt, Homo sapiens
  misc_RNA (1)...(19): siRNA sense strand
gggcgucccuauucucuuu

SEQ ID NO: 27494 - RNA, 19 nt, Homo sapiens
  misc_RNA (1)...(19): siRNA sense strand
aacaauagcugaggaugua

SEQ ID NO: 27495 - RNA, 19 nt, Homo sapiens
  misc_RNA (1)...(19): siRNA sense strand
gcaauguacuaccaagaau

SEQ ID NO: 27496 - RNA, 19 nt, Homo sapiens
  misc_RNA (1)...(19): siRNA sense strand
gguguuacguccaugcuuu

SEQ ID NO: 27497 - RNA, 19 nt, Homo sapiens
  misc_RNA (1)...(19): siRNA sense strand
ggauaugaauagauuggaa

SEQ ID NO: 27498 - RNA, 19 nt, Homo sapiens
  misc_RNA (1)...(19): siRNA sense strand
acagggauaugaauagauu

SEQ ID NO: 27499 - RNA, 19 nt, Homo sapiens
  misc_RNA (1)...(19): siRNA sense strand
gaauagauuggaagaaaga

SEQ ID NO: 27500 - RNA, 19 nt, Homo sapiens
  misc_RNA (1)...(19): siRNA sense strand
gcggagagaucuuguaucg

SEQ ID NO: 27501 - RNA, 19 nt, Homo sapiens
  misc_RNA (1)...(19): siRNA sense strand
uauaagcaguuuagccaaa

SEQ ID NO: 27502 - RNA, 19 nt, Homo sapiens
  misc_RNA (1)...(19): siRNA sense strand
guugauggaugccgaaaug

SEQ ID NO: 27503 - RNA, 19 nt, Homo sapiens
  misc_RNA (1)...(19): siRNA sense strand
gaagaugccuugacuuacc

SEQ ID NO: 27504 - RNA, 19 nt, Homo sapiens
  misc_RNA (1)...(19): siRNA sense strand
ucaaaggccuuggauacaa

SEQ ID NO: 27505 - RNA, 19 nt, Homo sapiens
  misc_RNA (1)...(19): siRNA sense strand
gagaucuuguaucguauuu

SEQ ID NO: 27506 - RNA, 19 nt, Homo sapiens
  misc_RNA (1)...(19): siRNA sense strand
ccaaaucacaagcuucuuu

SEQ ID NO: 27507 - RNA, 19 nt, Homo sapiens
  misc_RNA (1)...(19): siRNA sense strand
ccauggcaauuccagauaa

SEQ ID NO: 27508 - RNA, 19 nt, Homo sapiens
  misc_RNA (1)...(19): siRNA sense strand
uggaacaccugaagagcua

SEQ ID NO: 27509 - RNA, 19 nt, Homo sapiens
  misc_RNA (1)...(19): siRNA sense strand
gguuagacuucccaagaaa

SEQ ID NO: 27510 - RNA, 19 nt, Homo sapiens
  misc_RNA (1)...(19): siRNA sense strand
gaaaaugggagcuguauau

SEQ ID NO: 27511 - RNA, 19 nt, Homo sapiens
  misc_RNA (1)...(19): siRNA sense strand
gaauauggagggcaucaga

SEQ ID NO: 27512 - RNA, 19 nt, Homo sapiens
  misc_RNA (1)...(19): siRNA sense strand
caccaaagcagaauaaauc

SEQ ID NO: 27513 - RNA, 19 nt, Homo sapiens
  misc_RNA (1)...(19): siRNA sense strand
gaagaacauuggagaaaau

SEQ ID NO: 27514 - RNA, 19 nt, Homo sapiens
  misc_RNA (1)...(19): siRNA sense strand
aaaugaaggugguauugau

SEQ ID NO: 27515 - RNA, 19 nt, Homo sapiens
  misc_RNA (1)...(19): siRNA sense strand
caagguuucucaggugauu

SEQ ID NO: 27516 - RNA, 19 nt, Homo sapiens
  misc_RNA (1)...(19): siRNA sense strand
gcgcagguauaagcaguuu

SEQ ID NO: 27517 - RNA, 19 nt, Homo sapiens
  misc_RNA (1)...(19): siRNA sense strand
uuacguccaugcuuuauca

SEQ ID NO: 27518 - RNA, 19 nt, Homo sapiens
  misc_RNA (1)...(19): siRNA sense strand
gaaucaaaggccuuggaua

SEQ ID NO: 27519 - RNA, 19 nt, Homo sapiens
  misc_RNA (1)...(19): siRNA sense strand
aaacaugaaggcaauaaga

SEQ ID NO: 27520 - RNA, 19 nt, Homo sapiens
  misc_RNA (1)...(19): siRNA sense strand
ugacagggauaugaauaga

SEQ ID NO: 27521 - RNA, 19 nt, Homo sapiens
  misc_RNA (1)...(19): siRNA sense strand
agaaggcuaucucaauuuc

SEQ ID NO: 27522 - RNA, 19 nt, Homo sapiens
  misc_RNA (1)...(19): siRNA sense strand
gauggaugccgaaauguau

SEQ ID NO: 27523 - RNA, 19 nt, Homo sapiens
  misc_RNA (1)...(19): siRNA sense strand
ggagaucgacccguacuug

SEQ ID NO: 27524 - RNA, 19 nt, Homo sapiens
  misc_RNA (1)...(19): siRNA sense strand
cagugaauauuucggacua

SEQ ID NO: 27525 - RNA, 19 nt, Homo sapiens
  misc_RNA (1)...(19): siRNA sense strand
ggaaaaguagcuucuuaua

SEQ ID NO: 27526 - RNA, 19 nt, Homo sapiens
  misc_RNA (1)...(19): siRNA sense strand
cgcuacaaguuccuaaaua

SEQ ID NO: 27527 - RNA, 19 nt, Homo sapiens
  misc_RNA (1)...(19): siRNA sense strand
gccgaaauguauacaaaca

SEQ ID NO: 27528 - RNA, 19 nt, Homo sapiens
  misc_RNA (1)...(19): siRNA sense strand
ggaccuagagggacucaug

SEQ ID NO: 27529 - RNA, 19 nt, Homo sapiens
  misc_RNA (1)...(19): siRNA sense strand
gcauucaguugauggcaau

SEQ ID NO: 27530 - RNA, 19 nt, Homo sapiens
  misc_RNA (1)...(19): siRNA sense strand
gaauguggaucugccgaau

SEQ ID NO: 27531 - RNA, 19 nt, Homo sapiens
  misc_RNA (1)...(19): siRNA sense strand
caagcaagagcuacacuga

SEQ ID NO: 27532 - RNA, 19 nt, Homo sapiens
  misc_RNA (1)...(19): siRNA sense strand
cagauggauugaauauguu

SEQ ID NO: 27533 - RNA, 19 nt, Homo sapiens
  misc_RNA (1)...(19): siRNA sense strand
caaacaggcgcuaccuuga

SEQ ID NO: 27534 - RNA, 19 nt, Homo sapiens
  misc_RNA (1)...(19): siRNA sense strand
gaagaauaucgcuuugaug

SEQ ID NO: 27535 - RNA, 19 nt, Homo sapiens
  misc_RNA (1)...(19): siRNA sense strand
gcagauuguuugccuacuc

SEQ ID NO: 27536 - RNA, 19 nt, Homo sapiens
  misc_RNA (1)...(19): siRNA sense strand
uagagggacucaugaucuu

SEQ ID NO: 27537 - RNA, 19 nt, Homo sapiens
  misc_RNA (1)...(19): siRNA sense strand
cacggagucuaagaauuua

SEQ ID NO: 27538 - RNA, 19 nt, Homo sapiens
  misc_RNA (1)...(19): siRNA sense strand
gcagguauaagcaguuuag

SEQ ID NO: 27539 - RNA, 19 nt, Homo sapiens
  misc_RNA (1)...(19): siRNA sense strand
ggaauacagcuucauaaaa

SEQ ID NO: 27540 - RNA, 19 nt, Homo sapiens
  misc_RNA (1)...(19): siRNA sense strand
ggauaagucgcuggcauuu

SEQ ID NO: 27541 - RNA, 19 nt, Homo sapiens
  misc_RNA (1)...(19): siRNA sense strand
ucagcuacuuaaagaguuu

SEQ ID NO: 27542 - RNA, 19 nt, Homo sapiens
  misc_RNA (1)...(19): siRNA sense strand
gagagaucuuguaucguau

SEQ ID NO: 27543 - RNA, 19 nt, Homo sapiens
  misc_RNA (1)...(19): siRNA sense strand
cauaaugggcgucccuauu

SEQ ID NO: 27544 - RNA, 19 nt, Homo sapiens
  misc_RNA (1)...(19): siRNA sense strand
augaagaugccuugacuua

SEQ ID NO: 27545 - RNA, 19 nt, Homo sapiens
  misc_RNA (1)...(19): siRNA sense strand
uaucauaguccucuuagau

SEQ ID NO: 27546 - RNA, 19 nt, Homo sapiens
  misc_RNA (1)...(19): siRNA sense strand
cagcagauggauugaauau

SEQ ID NO: 27547 - RNA, 19 nt, Homo sapiens
  misc_RNA (1)...(19): siRNA sense strand
ggaccacagcacugacuuu

SEQ ID NO: 27548 - RNA, 19 nt, Homo sapiens
  misc_RNA (1)...(19): siRNA sense strand
ugaaggugauaaugugaau

SEQ ID NO: 27549 - RNA, 19 nt, Homo sapiens
  misc_RNA (1)...(19): siRNA sense strand
aaauugugcuagauucaga

SEQ ID NO: 27550 - RNA, 19 nt, Homo sapiens
  misc_RNA (1)...(19): siRNA sense strand
aggcggcaguuucauuuaa

SEQ ID NO: 27551 - RNA, 19 nt, Homo sapiens
  misc_RNA (1)...(19): siRNA sense strand
gaaauaaugagaguuacca

SEQ ID NO: 27552 - RNA, 19 nt, Homo sapiens
  misc_RNA (1)...(19): siRNA sense strand
uaagcaguuuagccaaauu

SEQ ID NO: 27553 - RNA, 19 nt, Homo sapiens
  misc_RNA (1)...(19): siRNA sense strand
gggauaagucgcuggcauu

SEQ ID NO: 27554 - RNA, 19 nt, Homo sapiens
  misc_RNA (1)...(19): siRNA sense strand
gagaucgacccguacuuga

SEQ ID NO: 27555 - RNA, 19 nt, Homo sapiens
  misc_RNA (1)...(19): siRNA sense strand
ucauaguccucuuagaugu

SEQ ID NO: 27556 - RNA, 19 nt, Homo sapiens
  misc_RNA (1)...(19): siRNA sense strand
aaacaggcgcuaccuugaa

SEQ ID NO: 27557 - RNA, 19 nt, Homo sapiens
  misc_RNA (1)...(19): siRNA sense strand
gaguggcccucauccuuca

SEQ ID NO: 27558 - RNA, 19 nt, Homo sapiens
  misc_RNA (1)...(19): siRNA sense strand
ugaaggcaauaagaucauu

SEQ ID NO: 27559 - RNA, 19 nt, Homo sapiens
  misc_RNA (1)...(19): siRNA sense strand
aaggugguauugauaaguu

SEQ ID NO: 27560 - RNA, 19 nt, Homo sapiens
  misc_RNA (1)...(19): siRNA sense strand
ccaggcggcaguuucauuu

SEQ ID NO: 27561 - RNA, 19 nt, Homo sapiens
  misc_RNA (1)...(19): siRNA sense strand
gaauuugggcauccugaau

SEQ ID NO: 27562 - RNA, 19 nt, Homo sapiens
  misc_RNA (1)...(19): siRNA sense strand
aacaggcgcuaccuugaaa

SEQ ID NO: 27563 - RNA, 19 nt, Homo sapiens
  misc_RNA (1)...(19): siRNA sense strand
gccacggagucuaagaauu

SEQ ID NO: 27564 - RNA, 19 nt, Homo sapiens
  misc_RNA (1)...(19): siRNA sense strand
ugaauagauuggaagaaag

SEQ ID NO: 27565 - RNA, 19 nt, Homo sapiens
  misc_RNA (1)...(19): siRNA sense strand
gcaugggcuugguggagaa

SEQ ID NO: 27566 - RNA, 19 nt, Homo sapiens
  misc_RNA (1)...(19): siRNA sense strand
cugaagagcuacaagaacu

SEQ ID NO: 27567 - RNA, 19 nt, Homo sapiens
  misc_RNA (1)...(19): siRNA sense strand
caaaggccuuggauacaac

SEQ ID NO: 27568 - RNA, 19 nt, Homo sapiens
  misc_RNA (1)...(19): siRNA sense strand
gcaagagcuacacugacua

SEQ ID NO: 27569 - RNA, 19 nt, Homo sapiens
  misc_RNA (1)...(19): siRNA sense strand
gagccaugaucaggcauug

SEQ ID NO: 27570 - RNA, 19 nt, Homo sapiens
  misc_RNA (1)...(19): siRNA sense strand
cguccaugcuuuaucauca

SEQ ID NO: 27571 - RNA, 19 nt, Homo sapiens
  misc_RNA (1)...(19): siRNA sense strand
guuggaagaauaucgcuuu

SEQ ID NO: 27572 - RNA, 19 nt, Homo sapiens
  misc_RNA (1)...(19): siRNA sense strand
aaauucagcagauggauug

SEQ ID NO: 27573 - RNA, 19 nt, Homo sapiens
  misc_RNA (1)...(19): siRNA sense strand
guacacagccaugcuucaa

SEQ ID NO: 27574 - RNA, 19 nt, Homo sapiens
  misc_RNA (1)...(19): siRNA sense strand
gcugggaaguuuuaagauu

SEQ ID NO: 27575 - RNA, 19 nt, Homo sapiens
  misc_RNA (1)...(19): siRNA sense strand
uggaauacagcuucauaaa

SEQ ID NO: 27576 - RNA, 19 nt, Homo sapiens
  misc_RNA (1)...(19): siRNA sense strand
gaggauguaucaggaaugc

SEQ ID NO: 27577 - RNA, 19 nt, Homo sapiens
  misc_RNA (1)...(19): siRNA sense strand
uaacaauagcugaggaugu

SEQ ID NO: 27578 - RNA, 19 nt, Homo sapiens
  misc_RNA (1)...(19): siRNA sense strand
gaauauuucggacuacaag

SEQ ID NO: 27579 - RNA, 19 nt, Homo sapiens
  misc_RNA (1)...(19): siRNA sense strand
ggagaucauuucggagaug

SEQ ID NO: 27580 - RNA, 19 nt, Homo sapiens
  misc_RNA (1)...(19): siRNA sense strand
gaccagagcccacuacaac

SEQ ID NO: 27581 - RNA, 19 nt, Homo sapiens
  misc_RNA (1)...(19): siRNA sense strand
gcuuggagcuucggaguuc

SEQ ID NO: 27582 - RNA, 19 nt, Homo sapiens
  misc_RNA (1)...(19): siRNA sense strand
gccuauggccgaucuguuu

SEQ ID NO: 27583 - RNA, 19 nt, Homo sapiens
  misc_RNA (1)...(19): siRNA sense strand
gugugaagauggcugcauu

SEQ ID NO: 27584 - RNA, 19 nt, Homo sapiens
  misc_RNA (1)...(19): siRNA sense strand
aggagcagcugaccacaga

SEQ ID NO: 27585 - RNA, 19 nt, Homo sapiens
  misc_RNA (1)...(19): siRNA sense strand
aggaacagcggcagaagua

SEQ ID NO: 27586 - RNA, 19 nt, Homo sapiens
  misc_RNA (1)...(19): siRNA sense strand
ccaggaaccagcugauuca

SEQ ID NO: 27587 - RNA, 19 nt, Homo sapiens
  misc_RNA (1)...(19): siRNA sense strand
ugggauuucugacgaguau

SEQ ID NO: 27588 - RNA, 19 nt, Homo sapiens
  misc_RNA (1)...(19): siRNA sense strand
gagcagcugaccacagaug

SEQ ID NO: 27589 - RNA, 19 nt, Homo sapiens
  misc_RNA (1)...(19): siRNA sense strand
gaggaauaacugugggaaa

SEQ ID NO: 27590 - RNA, 19 nt, Homo sapiens
  misc_RNA (1)...(19): siRNA sense strand
aggaauaacugugggaaag

SEQ ID NO: 27591 - RNA, 19 nt, Homo sapiens
  misc_RNA (1)...(19): siRNA sense strand
ggauuucugacgaguauca

SEQ ID NO: 27592 - RNA, 19 nt, Homo sapiens
  misc_RNA (1)...(19): siRNA sense strand
gccaaucgcaacgaaguuu

SEQ ID NO: 27593 - RNA, 19 nt, Homo sapiens
  misc_RNA (1)...(19): siRNA sense strand
gagcuucggaguucugcuu

SEQ ID NO: 27594 - RNA, 19 nt, Homo sapiens
  misc_RNA (1)...(19): siRNA sense strand
gagaaaggcgggagaacac

SEQ ID NO: 27595 - RNA, 19 nt, Homo sapiens
  misc_RNA (1)...(19): siRNA sense strand
cacuacaacucauccaaca

SEQ ID NO: 27596 - RNA, 19 nt, Homo sapiens
  misc_RNA (1)...(19): siRNA sense strand
gggagaucauuucggagau

SEQ ID NO: 27597 - RNA, 19 nt, Homo sapiens
  misc_RNA (1)...(19): siRNA sense strand
caagagcuacacccucaau

SEQ ID NO: 27598 - RNA, 19 nt, Homo sapiens
  misc_RNA (1)...(19): siRNA sense strand
cgucaugcacccuaucuau

SEQ ID NO: 27599 - RNA, 19 nt, Homo sapiens
  misc_RNA (1)...(19): siRNA sense strand
cuacaacucauccaacaag

SEQ ID NO: 27600 - RNA, 19 nt, Homo sapiens
  misc_RNA (1)...(19): siRNA sense strand
uggaggccgugaacaccua

SEQ ID NO: 27601 - RNA, 19 nt, Homo sapiens
  misc_RNA (1)...(19): siRNA sense strand
gccaggaaccagcugauuc

SEQ ID NO: 27602 - RNA, 19 nt, Homo sapiens
  misc_RNA (1)...(19): siRNA sense strand
uauggccgaucuguuugua

SEQ ID NO: 27603 - RNA, 19 nt, Homo sapiens
  misc_RNA (1)...(19): siRNA sense strand
cgagaaaggcgggagaaca

SEQ ID NO: 27604 - RNA, 19 nt, Homo sapiens
  misc_RNA (1)...(19): siRNA sense strand
gaugguuucucugcugaag

SEQ ID NO: 27605 - RNA, 19 nt, Homo sapiens
  misc_RNA (1)...(19): siRNA sense strand
ggcuacaggucggcgauga

SEQ ID NO: 27606 - RNA, 19 nt, Homo sapiens
  misc_RNA (1)...(19): siRNA sense strand
gaggaacagcggcagaagu

SEQ ID NO: 27607 - RNA, 19 nt, Homo sapiens
  misc_RNA (1)...(19): siRNA sense strand
gccgaucuguuuguagugu

SEQ ID NO: 27608 - RNA, 19 nt, Homo sapiens
  misc_RNA (1)...(19): siRNA sense strand
agaccuggaucacgaacuc

SEQ ID NO: 27609 - RNA, 19 nt, Homo sapiens
  misc_RNA (1)...(19): siRNA sense strand
gaaccuggaggccgugaac

SEQ ID NO: 27610 - RNA, 19 nt, Homo sapiens
  misc_RNA (1)...(19): siRNA sense strand
uggccgaucuguuuguagu

SEQ ID NO: 27611 - RNA, 19 nt, Homo sapiens
  misc_RNA (1)...(19): siRNA sense strand
gcgaggaacagcggcagaa

SEQ ID NO: 27612 - RNA, 19 nt, Homo sapiens
  misc_RNA (1)...(19): siRNA sense strand
cagcugaccacagaugaga

SEQ ID NO: 27613 - RNA, 19 nt, Homo sapiens
  misc_RNA (1)...(19): siRNA sense strand
uacaacucauccaacaaga

SEQ ID NO: 27614 - RNA, 19 nt, Homo sapiens
  misc_RNA (1)...(19): siRNA sense strand
gagaacacagagccaacug

SEQ ID NO: 27615 - RNA, 19 nt, Homo sapiens
  misc_RNA (1)...(19): siRNA sense strand
ggaggugccagaggagaau

SEQ ID NO: 27616 - RNA, 19 nt, Homo sapiens
  misc_RNA (1)...(19): siRNA sense strand
ccaguccucccucgucaug

SEQ ID NO: 27617 - RNA, 19 nt, Homo sapiens
  misc_RNA (1)...(19): siRNA sense strand
gaagauggaauucucugua

SEQ ID NO: 27618 - RNA, 19 nt, Homo sapiens
  misc_RNA (1)...(19): siRNA sense strand
ggagaucauuucggagaug

SEQ ID NO: 27619 - RNA, 19 nt, Homo sapiens
  misc_RNA (1)...(19): siRNA sense strand
gaccagagcccacuacaac

SEQ ID NO: 27620 - RNA, 19 nt, Homo sapiens
  misc_RNA (1)...(19): siRNA sense strand
gcuuggagcuucggaguuc

SEQ ID NO: 27621 - RNA, 19 nt, Homo sapiens
  misc_RNA (1)...(19): siRNA sense strand
gccuauggccgaucuguuu

SEQ ID NO: 27622 - RNA, 19 nt, Homo sapiens
  misc_RNA (1)...(19): siRNA sense strand
gugugaagauggcugcauu

SEQ ID NO: 27623 - RNA, 19 nt, Homo sapiens
  misc_RNA (1)...(19): siRNA sense strand
aggagcagcugaccacaga

SEQ ID NO: 27624 - RNA, 19 nt, Homo sapiens
  misc_RNA (1)...(19): siRNA sense strand
aggaacagcggcagaagua

SEQ ID NO: 27625 - RNA, 19 nt, Homo sapiens
  misc_RNA (1)...(19): siRNA sense strand
ccaggaaccagcugauuca

SEQ ID NO: 27626 - RNA, 19 nt, Homo sapiens
  misc_RNA (1)...(19): siRNA sense strand
aagauggaauucucuguag

SEQ ID NO: 27627 - RNA, 19 nt, Homo sapiens
  misc_RNA (1)...(19): siRNA sense strand
ugggauuucugacgaguau

SEQ ID NO: 27628 - RNA, 19 nt, Homo sapiens
  misc_RNA (1)...(19): siRNA sense strand
gagcagcugaccacagaug

SEQ ID NO: 27629 - RNA, 19 nt, Homo sapiens
  misc_RNA (1)...(19): siRNA sense strand
gaggaauaacugugggaaa

SEQ ID NO: 27630 - RNA, 19 nt, Homo sapiens
  misc_RNA (1)...(19): siRNA sense strand
aggaauaacugugggaaag

SEQ ID NO: 27631 - RNA, 19 nt, Homo sapiens
  misc_RNA (1)...(19): siRNA sense strand
ggauuucugacgaguauca

SEQ ID NO: 27632 - RNA, 19 nt, Homo sapiens
  misc_RNA (1)...(19): siRNA sense strand
gccaaucgcaacgaaguuu

SEQ ID NO: 27633 - RNA, 19 nt, Homo sapiens
  misc_RNA (1)...(19): siRNA sense strand
gagcuucggaguucugcuu

SEQ ID NO: 27634 - RNA, 19 nt, Homo sapiens
  misc_RNA (1)...(19): siRNA sense strand
gagaaaggcgggagaacac

SEQ ID NO: 27635 - RNA, 19 nt, Homo sapiens
  misc_RNA (1)...(19): siRNA sense strand
cacuacaacucauccaaca

SEQ ID NO: 27636 - RNA, 19 nt, Homo sapiens
  misc_RNA (1)...(19): siRNA sense strand
gggagaucauuucggagau

SEQ ID NO: 27637 - RNA, 19 nt, Homo sapiens
  misc_RNA (1)...(19): siRNA sense strand
caagagcuacacccucaau

SEQ ID NO: 27638 - RNA, 19 nt, Homo sapiens
  misc_RNA (1)...(19): siRNA sense strand
cgucaugcacccuaucuau

SEQ ID NO: 27639 - RNA, 19 nt, Homo sapiens
  misc_RNA (1)...(19): siRNA sense strand
cuacaacucauccaacaag

SEQ ID NO: 27640 - RNA, 19 nt, Homo sapiens
  misc_RNA (1)...(19): siRNA sense strand
uggaggccgugaacaccua

SEQ ID NO: 27641 - RNA, 19 nt, Homo sapiens
  misc_RNA (1)...(19): siRNA sense strand
gccaggaaccagcugauuc

SEQ ID NO: 27642 - RNA, 19 nt, Homo sapiens
  misc_RNA (1)...(19): siRNA sense strand
uauggccgaucuguuugua

SEQ ID NO: 27643 - RNA, 19 nt, Homo sapiens
  misc_RNA (1)...(19): siRNA sense strand
cgagaaaggcgggagaaca

SEQ ID NO: 27644 - RNA, 19 nt, Homo sapiens
  misc_RNA (1)...(19): siRNA sense strand
gaugguuucucugcugaag

SEQ ID NO: 27645 - RNA, 19 nt, Homo sapiens
  misc_RNA (1)...(19): siRNA sense strand
ggcuacaggucggcgauga

SEQ ID NO: 27646 - RNA, 19 nt, Homo sapiens
  misc_RNA (1)...(19): siRNA sense strand
gaggaacagcggcagaagu

SEQ ID NO: 27647 - RNA, 19 nt, Homo sapiens
  misc_RNA (1)...(19): siRNA sense strand
gccgaucuguuuguagugu

SEQ ID NO: 27648 - RNA, 19 nt, Homo sapiens
  misc_RNA (1)...(19): siRNA sense strand
agaccuggaucacgaacuc

SEQ ID NO: 27649 - RNA, 19 nt, Homo sapiens
  misc_RNA (1)...(19): siRNA sense strand
gaaccuggaggccgugaac

SEQ ID NO: 27650 - RNA, 19 nt, Homo sapiens
  misc_RNA (1)...(19): siRNA sense strand
uggccgaucuguuuguagu

SEQ ID NO: 27651 - RNA, 19 nt, Homo sapiens
  misc_RNA (1)...(19): siRNA sense strand
gcgaggaacagcggcagaa

SEQ ID NO: 27652 - RNA, 19 nt, Homo sapiens
  misc_RNA (1)...(19): siRNA sense strand
cagcugaccacagaugaga

SEQ ID NO: 27653 - RNA, 19 nt, Homo sapiens
  misc_RNA (1)...(19): siRNA sense strand
uacaacucauccaacaaga

SEQ ID NO: 27654 - RNA, 19 nt, Homo sapiens
  misc_RNA (1)...(19): siRNA sense strand
gagaacacagagccaacug

SEQ ID NO: 27655 - RNA, 19 nt, Homo sapiens
  misc_RNA (1)...(19): siRNA sense strand
ggaggugccagaggagaau

SEQ ID NO: 27656 - RNA, 19 nt, Homo sapiens
  misc_RNA (1)...(19): siRNA sense strand
ccaguccucccucgucaug

SEQ ID NO: 27657 - RNA, 19 nt, Homo sapiens
  misc_RNA (1)...(19): siRNA sense strand
gcaagcagaucuacaacau

SEQ ID NO: 27658 - RNA, 19 nt, Homo sapiens
  misc_RNA (1)...(19): siRNA sense strand
gcucauagguggcaaguac

SEQ ID NO: 27659 - RNA, 19 nt, Homo sapiens
  misc_RNA (1)...(19): siRNA sense strand
ugaagaugcugcccaccua

SEQ ID NO: 27660 - RNA, 19 nt, Homo sapiens
  misc_RNA (1)...(19): siRNA sense strand
gagcagaagggaacaaugu

SEQ ID NO: 27661 - RNA, 19 nt, Homo sapiens
  misc_RNA (1)...(19): siRNA sense strand
ccacgaugaucuccugcua

SEQ ID NO: 27662 - RNA, 19 nt, Homo sapiens
  misc_RNA (1)...(19): siRNA sense strand
gaccggcacugcugagaug

SEQ ID NO: 27663 - RNA, 19 nt, Homo sapiens
  misc_RNA (1)...(19): siRNA sense strand
uggaggagaugcagaaugu

SEQ ID NO: 27664 - RNA, 19 nt, Homo sapiens
  misc_RNA (1)...(19): siRNA sense strand
gcacgaagacaucgauaag

SEQ ID NO: 27665 - RNA, 19 nt, Homo sapiens
  misc_RNA (1)...(19): siRNA sense strand
gggcuucaccuucuccuuu

SEQ ID NO: 27666 - RNA, 19 nt, Homo sapiens
  misc_RNA (1)...(19): siRNA sense strand
ugagacggaugcagaagga

SEQ ID NO: 27667 - RNA, 19 nt, Homo sapiens
  misc_RNA (1)...(19): siRNA sense strand
gaagaggccagugugaaga

SEQ ID NO: 27668 - RNA, 19 nt, Homo sapiens
  misc_RNA (1)...(19): siRNA sense strand
ucucggcgguggccuguaa

SEQ ID NO: 27669 - RNA, 19 nt, Homo sapiens
  misc_RNA (1)...(19): siRNA sense strand
gagaugcucuucgacuaca

SEQ ID NO: 27670 - RNA, 19 nt, Homo sapiens
  misc_RNA (1)...(19): siRNA sense strand
gaugaucuccugcuacuac

SEQ ID NO: 27671 - RNA, 19 nt, Homo sapiens
  misc_RNA (1)...(19): siRNA sense strand
gcacuaacuucagggugau

SEQ ID NO: 27672 - RNA, 19 nt, Homo sapiens
  misc_RNA (1)...(19): siRNA sense strand
gagcagauccuggcagagu

SEQ ID NO: 27673 - RNA, 19 nt, Homo sapiens
  misc_RNA (1)...(19): siRNA sense strand
gaagaccaaacaccagaug

SEQ ID NO: 27674 - RNA, 19 nt, Homo sapiens
  misc_RNA (1)...(19): siRNA sense strand
agaccaaacaccagaugua

SEQ ID NO: 27675 - RNA, 19 nt, Homo sapiens
  misc_RNA (1)...(19): siRNA sense strand
cugagaugcucuucgacua

SEQ ID NO: 27676 - RNA, 19 nt, Homo sapiens
  misc_RNA (1)...(19): siRNA sense strand
ggaccuggguggcacuaac

SEQ ID NO: 27677 - RNA, 19 nt, Homo sapiens
  misc_RNA (1)...(19): siRNA sense strand
aaauggaugugguggcaau

SEQ ID NO: 27678 - RNA, 19 nt, Homo sapiens
  misc_RNA (1)...(19): siRNA sense strand
gacgagagcucugcaaacc

SEQ ID NO: 27679 - RNA, 19 nt, Homo sapiens
  misc_RNA (1)...(19): siRNA sense strand
ccaaacaccagauguacuc

SEQ ID NO: 27680 - RNA, 19 nt, Homo sapiens
  misc_RNA (1)...(19): siRNA sense strand
gcugcgagaucaccuucau

SEQ ID NO: 27681 - RNA, 19 nt, Homo sapiens
  misc_RNA (1)...(19): siRNA sense strand
gaucuccugcuacuacgaa

SEQ ID NO: 27682 - RNA, 19 nt, Homo sapiens
  misc_RNA (1)...(19): siRNA sense strand
acgaguuccugcuggagua

SEQ ID NO: 27683 - RNA, 19 nt, Homo sapiens
  misc_RNA (1)...(19): siRNA sense strand
gcucuucgacuacaucucu

SEQ ID NO: 27684 - RNA, 19 nt, Homo sapiens
  misc_RNA (1)...(19): siRNA sense strand
cugcugagaugcucuucga

SEQ ID NO: 27685 - RNA, 19 nt, Homo sapiens
  misc_RNA (1)...(19): siRNA sense strand
ucagggugaugcuggugaa

SEQ ID NO: 27686 - RNA, 19 nt, Homo sapiens
  misc_RNA (1)...(19): siRNA sense strand
ggacgagagcucugcaaac

SEQ ID NO: 27687 - RNA, 19 nt, Homo sapiens
  misc_RNA (1)...(19): siRNA sense strand
ggcacgaagacaucgauaa

SEQ ID NO: 27688 - RNA, 19 nt, Homo sapiens
  misc_RNA (1)...(19): siRNA sense strand
gcagauccuggcagaguuc

SEQ ID NO: 27689 - RNA, 19 nt, Homo sapiens
  misc_RNA (1)...(19): siRNA sense strand
gggugaugcuggugaaggu

SEQ ID NO: 27690 - RNA, 19 nt, Homo sapiens
  misc_RNA (1)...(19): siRNA sense strand
ugaagaggccagugugaag

SEQ ID NO: 27691 - RNA, 19 nt, Homo sapiens
  misc_RNA (1)...(19): siRNA sense strand
guggauggcuccguguaca

SEQ ID NO: 27692 - RNA, 19 nt, Homo sapiens
  misc_RNA (1)...(19): siRNA sense strand
ugguggcaauggugaauga

SEQ ID NO: 27693 - RNA, 19 nt, Homo sapiens
  misc_RNA (1)...(19): siRNA sense strand
gagaggggacuuugaaaug

SEQ ID NO: 27694 - RNA, 19 nt, Homo sapiens
  misc_RNA (1)...(19): siRNA sense strand
gaccaaacaccagauguac

SEQ ID NO: 27695 - RNA, 19 nt, Homo sapiens
  misc_RNA (1)...(19): siRNA sense strand
gcaaugccugcuacaugga

SEQ ID NO: 27696 - RNA, 19 nt, Homo sapiens
  misc_RNA (1)...(19): siRNA sense strand
ggcuucaccuucuccuuuc

SEQ ID NO: 27697 - RNA, 19 nt, Homo sapiens
  misc_RNA (1)...(19): siRNA sense strand
gcacugcugagaugcucuu

SEQ ID NO: 27698 - RNA, 19 nt, Homo sapiens
  misc_RNA (1)...(19): siRNA sense strand
ggaugcagaaggagaugga

SEQ ID NO: 27699 - RNA, 19 nt, Homo sapiens
  misc_RNA (1)...(19): siRNA sense strand
ccgcagcgaggacguaaug

SEQ ID NO: 27700 - RNA, 19 nt, Homo sapiens
  misc_RNA (1)...(19): siRNA sense strand
caaggccucaggagcagaa

SEQ ID NO: 27701 - RNA, 19 nt, Homo sapiens
  misc_RNA (1)...(19): siRNA sense strand
ccuguaagaaggccuguau

SEQ ID NO: 27702 - RNA, 19 nt, Homo sapiens
  misc_RNA (1)...(19): siRNA sense strand
caugaagaggccaguguga

SEQ ID NO: 27703 - RNA, 19 nt, Homo sapiens
  misc_RNA (1)...(19): siRNA sense strand
ggagcagaagggaacaaug

SEQ ID NO: 27704 - RNA, 19 nt, Homo sapiens
  misc_RNA (1)...(19): siRNA sense strand
ggacguaaugcgcaucacu

SEQ ID NO: 27705 - RNA, 19 nt, Homo sapiens
  misc_RNA (1)...(19): siRNA sense strand
gaccaccgacugcgacauc

SEQ ID NO: 27706 - RNA, 19 nt, Homo sapiens
  misc_RNA (1)...(19): siRNA sense strand
ggaggaggaccugaagaag

SEQ ID NO: 27707 - RNA, 19 nt, Homo sapiens
  misc_RNA (1)...(19): siRNA sense strand
gcuggagacccaugaagag

SEQ ID NO: 27708 - RNA, 19 nt, Homo sapiens
  misc_RNA (1)...(19): siRNA sense strand
cugcaaugccugcuacaug

SEQ ID NO: 27709 - RNA, 19 nt, Homo sapiens
  misc_RNA (1)...(19): siRNA sense strand
ggcuggagacccaugaaga

SEQ ID NO: 27710 - RNA, 19 nt, Homo sapiens
  misc_RNA (1)...(19): siRNA sense strand
guaagaaggccuguaugcu

SEQ ID NO: 27711 - RNA, 19 nt, Homo sapiens
  misc_RNA (1)...(19): siRNA sense strand
acgaugaucuccugcuacu

SEQ ID NO: 27712 - RNA, 19 nt, Homo sapiens
  misc_RNA (1)...(19): siRNA sense strand
aggaggaggaccugaagaa

SEQ ID NO: 27713 - RNA, 19 nt, Homo sapiens
  misc_RNA (1)...(19): siRNA sense strand
ucugcgagacgcuaucaaa

SEQ ID NO: 27714 - RNA, 19 nt, Homo sapiens
  misc_RNA (1)...(19): siRNA sense strand
gcaagcagaucuacaacau

SEQ ID NO: 27715 - RNA, 19 nt, Homo sapiens
  misc_RNA (1)...(19): siRNA sense strand
gcucauagguggcaaguac

SEQ ID NO: 27716 - RNA, 19 nt, Homo sapiens
  misc_RNA (1)...(19): siRNA sense strand
ugaagaugcugcccaccua

SEQ ID NO: 27717 - RNA, 19 nt, Homo sapiens
  misc_RNA (1)...(19): siRNA sense strand
gagcagaagggaacaaugu

SEQ ID NO: 27718 - RNA, 19 nt, Homo sapiens
  misc_RNA (1)...(19): siRNA sense strand
ccacgaugaucuccugcua

SEQ ID NO: 27719 - RNA, 19 nt, Homo sapiens
  misc_RNA (1)...(19): siRNA sense strand
gaccggcacugcugagaug

SEQ ID NO: 27720 - RNA, 19 nt, Homo sapiens
  misc_RNA (1)...(19): siRNA sense strand
uggaggagaugcagaaugu

SEQ ID NO: 27721 - RNA, 19 nt, Homo sapiens
  misc_RNA (1)...(19): siRNA sense strand
gcacgaagacaucgauaag

SEQ ID NO: 27722 - RNA, 19 nt, Homo sapiens
  misc_RNA (1)...(19): siRNA sense strand
gggcuucaccuucuccuuu

SEQ ID NO: 27723 - RNA, 19 nt, Homo sapiens
  misc_RNA (1)...(19): siRNA sense strand
ugagacggaugcagaagga

SEQ ID NO: 27724 - RNA, 19 nt, Homo sapiens
  misc_RNA (1)...(19): siRNA sense strand
gaagaggccagugugaaga

SEQ ID NO: 27725 - RNA, 19 nt, Homo sapiens
  misc_RNA (1)...(19): siRNA sense strand
ucucggcgguggccuguaa

SEQ ID NO: 27726 - RNA, 19 nt, Homo sapiens
  misc_RNA (1)...(19): siRNA sense strand
gagaugcucuucgacuaca

SEQ ID NO: 27727 - RNA, 19 nt, Homo sapiens
  misc_RNA (1)...(19): siRNA sense strand
gaugaucuccugcuacuac

SEQ ID NO: 27728 - RNA, 19 nt, Homo sapiens
  misc_RNA (1)...(19): siRNA sense strand
gcacuaacuucagggugau

SEQ ID NO: 27729 - RNA, 19 nt, Homo sapiens
  misc_RNA (1)...(19): siRNA sense strand
gagcagauccuggcagagu

SEQ ID NO: 27730 - RNA, 19 nt, Homo sapiens
  misc_RNA (1)...(19): siRNA sense strand
gaagaccaaacaccagaug

SEQ ID NO: 27731 - RNA, 19 nt, Homo sapiens
  misc_RNA (1)...(19): siRNA sense strand
agaccaaacaccagaugua

SEQ ID NO: 27732 - RNA, 19 nt, Homo sapiens
  misc_RNA (1)...(19): siRNA sense strand
cugagaugcucuucgacua

SEQ ID NO: 27733 - RNA, 19 nt, Homo sapiens
  misc_RNA (1)...(19): siRNA sense strand
ggaccuggguggcacuaac

SEQ ID NO: 27734 - RNA, 19 nt, Homo sapiens
  misc_RNA (1)...(19): siRNA sense strand
aaauggaugugguggcaau

SEQ ID NO: 27735 - RNA, 19 nt, Homo sapiens
  misc_RNA (1)...(19): siRNA sense strand
gacgagagcucugcaaacc

SEQ ID NO: 27736 - RNA, 19 nt, Homo sapiens
  misc_RNA (1)...(19): siRNA sense strand
ccaaacaccagauguacuc

SEQ ID NO: 27737 - RNA, 19 nt, Homo sapiens
  misc_RNA (1)...(19): siRNA sense strand
gcugcgagaucaccuucau

SEQ ID NO: 27738 - RNA, 19 nt, Homo sapiens
  misc_RNA (1)...(19): siRNA sense strand
gaucuccugcuacuacgaa

SEQ ID NO: 27739 - RNA, 19 nt, Homo sapiens
  misc_RNA (1)...(19): siRNA sense strand
acgaguuccugcuggagua

SEQ ID NO: 27740 - RNA, 19 nt, Homo sapiens
  misc_RNA (1)...(19): siRNA sense strand
gcucuucgacuacaucucu

SEQ ID NO: 27741 - RNA, 19 nt, Homo sapiens
  misc_RNA (1)...(19): siRNA sense strand
cugcugagaugcucuucga

SEQ ID NO: 27742 - RNA, 19 nt, Homo sapiens
  misc_RNA (1)...(19): siRNA sense strand
ucagggugaugcuggugaa

SEQ ID NO: 27743 - RNA, 19 nt, Homo sapiens
  misc_RNA (1)...(19): siRNA sense strand
ggacgagagcucugcaaac

SEQ ID NO: 27744 - RNA, 19 nt, Homo sapiens
  misc_RNA (1)...(19): siRNA sense strand
ggcacgaagacaucgauaa

SEQ ID NO: 27745 - RNA, 19 nt, Homo sapiens
  misc_RNA (1)...(19): siRNA sense strand
gcagauccuggcagaguuc

SEQ ID NO: 27746 - RNA, 19 nt, Homo sapiens
  misc_RNA (1)...(19): siRNA sense strand
gggugaugcuggugaaggu

SEQ ID NO: 27747 - RNA, 19 nt, Homo sapiens
  misc_RNA (1)...(19): siRNA sense strand
ugaagaggccagugugaag

SEQ ID NO: 27748 - RNA, 19 nt, Homo sapiens
  misc_RNA (1)...(19): siRNA sense strand
guggauggcuccguguaca

SEQ ID NO: 27749 - RNA, 19 nt, Homo sapiens
  misc_RNA (1)...(19): siRNA sense strand
ugguggcaauggugaauga

SEQ ID NO: 27750 - RNA, 19 nt, Homo sapiens
  misc_RNA (1)...(19): siRNA sense strand
gagaggggacuuugaaaug

SEQ ID NO: 27751 - RNA, 19 nt, Homo sapiens
  misc_RNA (1)...(19): siRNA sense strand
gaccaaacaccagauguac

SEQ ID NO: 27752 - RNA, 19 nt, Homo sapiens
  misc_RNA (1)...(19): siRNA sense strand
gcaaugccugcuacaugga

SEQ ID NO: 27753 - RNA, 19 nt, Homo sapiens
  misc_RNA (1)...(19): siRNA sense strand
ggcuucaccuucuccuuuc

SEQ ID NO: 27754 - RNA, 19 nt, Homo sapiens
  misc_RNA (1)...(19): siRNA sense strand
gcacugcugagaugcucuu

SEQ ID NO: 27755 - RNA, 19 nt, Homo sapiens
  misc_RNA (1)...(19): siRNA sense strand
ggaugcagaaggagaugga

SEQ ID NO: 27756 - RNA, 19 nt, Homo sapiens
  misc_RNA (1)...(19): siRNA sense strand
ccgcagcgaggacguaaug

SEQ ID NO: 27757 - RNA, 19 nt, Homo sapiens
  misc_RNA (1)...(19): siRNA sense strand
caaggccucaggagcagaa

SEQ ID NO: 27758 - RNA, 19 nt, Homo sapiens
  misc_RNA (1)...(19): siRNA sense strand
ccuguaagaaggccuguau

SEQ ID NO: 27759 - RNA, 19 nt, Homo sapiens
  misc_RNA (1)...(19): siRNA sense strand
caugaagaggccaguguga

SEQ ID NO: 27760 - RNA, 19 nt, Homo sapiens
  misc_RNA (1)...(19): siRNA sense strand
ggagcagaagggaacaaug

SEQ ID NO: 27761 - RNA, 19 nt, Homo sapiens
  misc_RNA (1)...(19): siRNA sense strand
ggacguaaugcgcaucacu

SEQ ID NO: 27762 - RNA, 19 nt, Homo sapiens
  misc_RNA (1)...(19): siRNA sense strand
gaccaccgacugcgacauc

SEQ ID NO: 27763 - RNA, 19 nt, Homo sapiens
  misc_RNA (1)...(19): siRNA sense strand
ggaggaggaccugaagaag

SEQ ID NO: 27764 - RNA, 19 nt, Homo sapiens
  misc_RNA (1)...(19): siRNA sense strand
gcuggagacccaugaagag

SEQ ID NO: 27765 - RNA, 19 nt, Homo sapiens
  misc_RNA (1)...(19): siRNA sense strand
cugcaaugccugcuacaug

SEQ ID NO: 27766 - RNA, 19 nt, Homo sapiens
  misc_RNA (1)...(19): siRNA sense strand
ggcuggagacccaugaaga

SEQ ID NO: 27767 - RNA, 19 nt, Homo sapiens
  misc_RNA (1)...(19): siRNA sense strand
guaagaaggccuguaugcu

SEQ ID NO: 27768 - RNA, 19 nt, Homo sapiens
  misc_RNA (1)...(19): siRNA sense strand
acgaugaucuccugcuacu

SEQ ID NO: 27769 - RNA, 19 nt, Homo sapiens
  misc_RNA (1)...(19): siRNA sense strand
aggaggaggaccugaagaa

SEQ ID NO: 27770 - RNA, 19 nt, Homo sapiens
  misc_RNA (1)...(19): siRNA sense strand
ucugcgagacgcuaucaaa

SEQ ID NO: 27771 - RNA, 19 nt, Homo sapiens
  misc_RNA (1)...(19): siRNA sense strand
gcaagcagaucuacaacau

SEQ ID NO: 27772 - RNA, 19 nt, Homo sapiens
  misc_RNA (1)...(19): siRNA sense strand
gcucauagguggcaaguac

SEQ ID NO: 27773 - RNA, 19 nt, Homo sapiens
  misc_RNA (1)...(19): siRNA sense strand
ugaagaugcugcccaccua

SEQ ID NO: 27774 - RNA, 19 nt, Homo sapiens
  misc_RNA (1)...(19): siRNA sense strand
gagcagaagggaacaaugu

SEQ ID NO: 27775 - RNA, 19 nt, Homo sapiens
  misc_RNA (1)...(19): siRNA sense strand
ccacgaugaucuccugcua

SEQ ID NO: 27776 - RNA, 19 nt, Homo sapiens
  misc_RNA (1)...(19): siRNA sense strand
gaccggcacugcugagaug

SEQ ID NO: 27777 - RNA, 19 nt, Homo sapiens
  misc_RNA (1)...(19): siRNA sense strand
uggaggagaugcagaaugu

SEQ ID NO: 27778 - RNA, 19 nt, Homo sapiens
  misc_RNA (1)...(19): siRNA sense strand
gcacgaagacaucgauaag

SEQ ID NO: 27779 - RNA, 19 nt, Homo sapiens
  misc_RNA (1)...(19): siRNA sense strand
gggcuucaccuucuccuuu

SEQ ID NO: 27780 - RNA, 19 nt, Homo sapiens
  misc_RNA (1)...(19): siRNA sense strand
ugagacggaugcagaagga

SEQ ID NO: 27781 - RNA, 19 nt, Homo sapiens
  misc_RNA (1)...(19): siRNA sense strand
gaagaggccagugugaaga

SEQ ID NO: 27782 - RNA, 19 nt, Homo sapiens
  misc_RNA (1)...(19): siRNA sense strand
ucucggcgguggccuguaa

SEQ ID NO: 27783 - RNA, 19 nt, Homo sapiens
  misc_RNA (1)...(19): siRNA sense strand
gagaugcucuucgacuaca

SEQ ID NO: 27784 - RNA, 19 nt, Homo sapiens
  misc_RNA (1)...(19): siRNA sense strand
gaugaucuccugcuacuac

SEQ ID NO: 27785 - RNA, 19 nt, Homo sapiens
  misc_RNA (1)...(19): siRNA sense strand
gcacuaacuucagggugau

SEQ ID NO: 27786 - RNA, 19 nt, Homo sapiens
  misc_RNA (1)...(19): siRNA sense strand
gagcagauccuggcagagu

SEQ ID NO: 27787 - RNA, 19 nt, Homo sapiens
  misc_RNA (1)...(19): siRNA sense strand
gaagaccaaacaccagaug

SEQ ID NO: 27788 - RNA, 19 nt, Homo sapiens
  misc_RNA (1)...(19): siRNA sense strand
agaccaaacaccagaugua

SEQ ID NO: 27789 - RNA, 19 nt, Homo sapiens
  misc_RNA (1)...(19): siRNA sense strand
cugagaugcucuucgacua

SEQ ID NO: 27790 - RNA, 19 nt, Homo sapiens
  misc_RNA (1)...(19): siRNA sense strand
ggaccuggguggcacuaac

SEQ ID NO: 27791 - RNA, 19 nt, Homo sapiens
  misc_RNA (1)...(19): siRNA sense strand
aaauggaugugguggcaau

SEQ ID NO: 27792 - RNA, 19 nt, Homo sapiens
  misc_RNA (1)...(19): siRNA sense strand
gacgagagcucugcaaacc

SEQ ID NO: 27793 - RNA, 19 nt, Homo sapiens
  misc_RNA (1)...(19): siRNA sense strand
ccaaacaccagauguacuc

SEQ ID NO: 27794 - RNA, 19 nt, Homo sapiens
  misc_RNA (1)...(19): siRNA sense strand
gcugcgagaucaccuucau

SEQ ID NO: 27795 - RNA, 19 nt, Homo sapiens
  misc_RNA (1)...(19): siRNA sense strand
gaucuccugcuacuacgaa

SEQ ID NO: 27796 - RNA, 19 nt, Homo sapiens
  misc_RNA (1)...(19): siRNA sense strand
acgaguuccugcuggagua

SEQ ID NO: 27797 - RNA, 19 nt, Homo sapiens
  misc_RNA (1)...(19): siRNA sense strand
gcucuucgacuacaucucu

SEQ ID NO: 27798 - RNA, 19 nt, Homo sapiens
  misc_RNA (1)...(19): siRNA sense strand
cugcugagaugcucuucga

SEQ ID NO: 27799 - RNA, 19 nt, Homo sapiens
  misc_RNA (1)...(19): siRNA sense strand
ucagggugaugcuggugaa

SEQ ID NO: 27800 - RNA, 19 nt, Homo sapiens
  misc_RNA (1)...(19): siRNA sense strand
ggacgagagcucugcaaac

SEQ ID NO: 27801 - RNA, 19 nt, Homo sapiens
  misc_RNA (1)...(19): siRNA sense strand
ggcacgaagacaucgauaa

SEQ ID NO: 27802 - RNA, 19 nt, Homo sapiens
  misc_RNA (1)...(19): siRNA sense strand
gcagauccuggcagaguuc

SEQ ID NO: 27803 - RNA, 19 nt, Homo sapiens
  misc_RNA (1)...(19): siRNA sense strand
gggugaugcuggugaaggu

SEQ ID NO: 27804 - RNA, 19 nt, Homo sapiens
  misc_RNA (1)...(19): siRNA sense strand
ugaagaggccagugugaag

SEQ ID NO: 27805 - RNA, 19 nt, Homo sapiens
  misc_RNA (1)...(19): siRNA sense strand
guggauggcuccguguaca

SEQ ID NO: 27806 - RNA, 19 nt, Homo sapiens
  misc_RNA (1)...(19): siRNA sense strand
ugguggcaauggugaauga

SEQ ID NO: 27807 - RNA, 19 nt, Homo sapiens
  misc_RNA (1)...(19): siRNA sense strand
gagaggggacuuugaaaug

SEQ ID NO: 27808 - RNA, 19 nt, Homo sapiens
  misc_RNA (1)...(19): siRNA sense strand
gaccaaacaccagauguac

SEQ ID NO: 27809 - RNA, 19 nt, Homo sapiens
  misc_RNA (1)...(19): siRNA sense strand
gcaaugccugcuacaugga

SEQ ID NO: 27810 - RNA, 19 nt, Homo sapiens
  misc_RNA (1)...(19): siRNA sense strand
ggcuucaccuucuccuuuc

SEQ ID NO: 27811 - RNA, 19 nt, Homo sapiens
  misc_RNA (1)...(19): siRNA sense strand
gcacugcugagaugcucuu

SEQ ID NO: 27812 - RNA, 19 nt, Homo sapiens
  misc_RNA (1)...(19): siRNA sense strand
ggaugcagaaggagaugga

SEQ ID NO: 27813 - RNA, 19 nt, Homo sapiens
  misc_RNA (1)...(19): siRNA sense strand
ccgcagcgaggacguaaug

SEQ ID NO: 27814 - RNA, 19 nt, Homo sapiens
  misc_RNA (1)...(19): siRNA sense strand
caaggccucaggagcagaa

SEQ ID NO: 27815 - RNA, 19 nt, Homo sapiens
  misc_RNA (1)...(19): siRNA sense strand
ccuguaagaaggccuguau

SEQ ID NO: 27816 - RNA, 19 nt, Homo sapiens
  misc_RNA (1)...(19): siRNA sense strand
caugaagaggccaguguga

SEQ ID NO: 27817 - RNA, 19 nt, Homo sapiens
  misc_RNA (1)...(19): siRNA sense strand
ggagcagaagggaacaaug

SEQ ID NO: 27818 - RNA, 19 nt, Homo sapiens
  misc_RNA (1)...(19): siRNA sense strand
ggacguaaugcgcaucacu

SEQ ID NO: 27819 - RNA, 19 nt, Homo sapiens
  misc_RNA (1)...(19): siRNA sense strand
gaccaccgacugcgacauc

SEQ ID NO: 27820 - RNA, 19 nt, Homo sapiens
  misc_RNA (1)...(19): siRNA sense strand
ggaggaggaccugaagaag

SEQ ID NO: 27821 - RNA, 19 nt, Homo sapiens
  misc_RNA (1)...(19): siRNA sense strand
gcuggagacccaugaagag

SEQ ID NO: 27822 - RNA, 19 nt, Homo sapiens
  misc_RNA (1)...(19): siRNA sense strand
cugcaaugccugcuacaug

SEQ ID NO: 27823 - RNA, 19 nt, Homo sapiens
  misc_RNA (1)...(19): siRNA sense strand
ggcuggagacccaugaaga

SEQ ID NO: 27824 - RNA, 19 nt, Homo sapiens
  misc_RNA (1)...(19): siRNA sense strand
guaagaaggccuguaugcu

SEQ ID NO: 27825 - RNA, 19 nt, Homo sapiens
  misc_RNA (1)...(19): siRNA sense strand
acgaugaucuccugcuacu

SEQ ID NO: 27826 - RNA, 19 nt, Homo sapiens
  misc_RNA (1)...(19): siRNA sense strand
aggaggaggaccugaagaa

SEQ ID NO: 27827 - RNA, 19 nt, Homo sapiens
  misc_RNA (1)...(19): siRNA sense strand
ucugcgagacgcuaucaaa

SEQ ID NO: 27828 - RNA, 19 nt, Homo sapiens
  misc_RNA (1)...(19): siRNA sense strand
caaauaugccagaggauua

SEQ ID NO: 27829 - RNA, 19 nt, Homo sapiens
  misc_RNA (1)...(19): siRNA sense strand
uaagaaagcauuccgcuaa

SEQ ID NO: 27830 - RNA, 19 nt, Homo sapiens
  misc_RNA (1)...(19): siRNA sense strand
gcuggugagugacaaagua

SEQ ID NO: 27831 - RNA, 19 nt, Homo sapiens
  misc_RNA (1)...(19): siRNA sense strand
gcagacccaucgccuuuga

SEQ ID NO: 27832 - RNA, 19 nt, Homo sapiens
  misc_RNA (1)...(19): siRNA sense strand
auagaaggcuggugaguga

SEQ ID NO: 27833 - RNA, 19 nt, Homo sapiens
  misc_RNA (1)...(19): siRNA sense strand
gaaaaggucaccagauaaa

SEQ ID NO: 27834 - RNA, 19 nt, Homo sapiens
  misc_RNA (1)...(19): siRNA sense strand
ugucuuaacugcaauacau

SEQ ID NO: 27835 - RNA, 19 nt, Homo sapiens
  misc_RNA (1)...(19): siRNA sense strand
gagcagugacucaaauaug

SEQ ID NO: 27836 - RNA, 19 nt, Homo sapiens
  misc_RNA (1)...(19): siRNA sense strand
gcuaaaagguguggaugua

SEQ ID NO: 27837 - RNA, 19 nt, Homo sapiens
  misc_RNA (1)...(19): siRNA sense strand
aagaaagcauuccgcuaaa

SEQ ID NO: 27838 - RNA, 19 nt, Homo sapiens
  misc_RNA (1)...(19): siRNA sense strand
cugaaaaggucaccagaua

SEQ ID NO: 27839 - RNA, 19 nt, Homo sapiens
  misc_RNA (1)...(19): siRNA sense strand
gguugugucuuaacugcaa

SEQ ID NO: 27840 - RNA, 19 nt, Homo sapiens
  misc_RNA (1)...(19): siRNA sense strand
ugagacaacguacgacaaa

SEQ ID NO: 27841 - RNA, 19 nt, Homo sapiens
  misc_RNA (1)...(19): siRNA sense strand
caaauggcagugcuuccua

SEQ ID NO: 27842 - RNA, 19 nt, Homo sapiens
  misc_RNA (1)...(19): siRNA sense strand
gguuuaccauauucuaaga

SEQ ID NO: 27843 - RNA, 19 nt, Homo sapiens
  misc_RNA (1)...(19): siRNA sense strand
ucaaauaugccagaggauu

SEQ ID NO: 27844 - RNA, 19 nt, Homo sapiens
  misc_RNA (1)...(19): siRNA sense strand
ugacuugggucugggcuau

SEQ ID NO: 27845 - RNA, 19 nt, Homo sapiens
  misc_RNA (1)...(19): siRNA sense strand
caaaguagggcaggcaugu

SEQ ID NO: 27846 - RNA, 19 nt, Homo sapiens
  misc_RNA (1)...(19): siRNA sense strand
gaaggcuggugagugacaa

SEQ ID NO: 27847 - RNA, 19 nt, Homo sapiens
  misc_RNA (1)...(19): siRNA sense strand
gucaccagauaaacaaaug

SEQ ID NO: 27848 - RNA, 19 nt, Homo sapiens
  misc_RNA (1)...(19): siRNA sense strand
cagcggcucuugcgaugca

SEQ ID NO: 27849 - RNA, 19 nt, Homo sapiens
  misc_RNA (1)...(19): siRNA sense strand
gaugaugaccugucguuuu

SEQ ID NO: 27850 - RNA, 19 nt, Homo sapiens
  misc_RNA (1)...(19): siRNA sense strand
ggucugggcuaugaaacca

SEQ ID NO: 27851 - RNA, 19 nt, Homo sapiens
  misc_RNA (1)...(19): siRNA sense strand
caacguacgacaaaauauu

SEQ ID NO: 27852 - RNA, 19 nt, Homo sapiens
  misc_RNA (1)...(19): siRNA sense strand
aaaggucaccagauaaaca

SEQ ID NO: 27853 - RNA, 19 nt, Homo sapiens
  misc_RNA (1)...(19): siRNA sense strand
gacaacguacgacaaaaua

SEQ ID NO: 27854 - RNA, 19 nt, Homo sapiens
  misc_RNA (1)...(19): siRNA sense strand
uauucaagccaccauuaaa

SEQ ID NO: 27855 - RNA, 19 nt, Homo sapiens
  misc_RNA (1)...(19): siRNA sense strand
uaaaagguguggauguauc

SEQ ID NO: 27856 - RNA, 19 nt, Homo sapiens
  misc_RNA (1)...(19): siRNA sense strand
cagcugagacaacguacga

SEQ ID NO: 27857 - RNA, 19 nt, Homo sapiens
  misc_RNA (1)...(19): siRNA sense strand
gaaaccaaggaggaacuga

SEQ ID NO: 27858 - RNA, 19 nt, Homo sapiens
  misc_RNA (1)...(19): siRNA sense strand
uuuauucaagccaccauua

SEQ ID NO: 27859 - RNA, 19 nt, Homo sapiens
  misc_RNA (1)...(19): siRNA sense strand
ggucaccagauaaacaaau

SEQ ID NO: 27860 - RNA, 19 nt, Homo sapiens
  misc_RNA (1)...(19): siRNA sense strand
uugcagacccaucgccuuu

SEQ ID NO: 27861 - RNA, 19 nt, Homo sapiens
  misc_RNA (1)...(19): siRNA sense strand
uuauucaagccaccauuaa

SEQ ID NO: 27862 - RNA, 19 nt, Homo sapiens
  misc_RNA (1)...(19): siRNA sense strand
aaccaaggaggaacugauu

SEQ ID NO: 27863 - RNA, 19 nt, Homo sapiens
  misc_RNA (1)...(19): siRNA sense strand
ccaaggaggaacugauuuu

SEQ ID NO: 27864 - RNA, 19 nt, Homo sapiens
  misc_RNA (1)...(19): siRNA sense strand
aaauaugccagaggauuau

SEQ ID NO: 27865 - RNA, 19 nt, Homo sapiens
  misc_RNA (1)...(19): siRNA sense strand
uaaacaaauggcagugcuu

SEQ ID NO: 27866 - RNA, 19 nt, Homo sapiens
  misc_RNA (1)...(19): siRNA sense strand
gaaagcauuccgcuaaaag

SEQ ID NO: 27867 - RNA, 19 nt, Homo sapiens
  misc_RNA (1)...(19): siRNA sense strand
ggaaggacauggacaaggu

SEQ ID NO: 27868 - RNA, 19 nt, Homo sapiens
  misc_RNA (1)...(19): siRNA sense strand
ggacugggcagaucuucaa

SEQ ID NO: 27869 - RNA, 19 nt, Homo sapiens
  misc_RNA (1)...(19): siRNA sense strand
gggcagcuguggcuucuag

SEQ ID NO: 27870 - RNA, 19 nt, Homo sapiens
  misc_RNA (1)...(19): siRNA sense strand
uggacaaggucgagacauu

SEQ ID NO: 27871 - RNA, 19 nt, Homo sapiens
  misc_RNA (1)...(19): siRNA sense strand
ggacaaggucgagacauuc

SEQ ID NO: 27872 - RNA, 19 nt, Homo sapiens
  misc_RNA (1)...(19): siRNA sense strand
aagcagaccuacagcaagu

SEQ ID NO: 27873 - RNA, 19 nt, Homo sapiens
  misc_RNA (1)...(19): siRNA sense strand
gggcugcucuacugcuuca

SEQ ID NO: 27874 - RNA, 19 nt, Homo sapiens
  misc_RNA (1)...(19): siRNA sense strand
ucaagcagaccuacagcaa

SEQ ID NO: 27875 - RNA, 19 nt, Homo sapiens
  misc_RNA (1)...(19): siRNA sense strand
gaacuacgggcugcucuac

SEQ ID NO: 27876 - RNA, 19 nt, Homo sapiens
  misc_RNA (1)...(19): siRNA sense strand
gagggcagcuguggcuucu

SEQ ID NO: 27877 - RNA, 19 nt, Homo sapiens
  misc_RNA (1)...(19): siRNA sense strand
ucaggaaggacauggacaa

SEQ ID NO: 27878 - RNA, 19 nt, Homo sapiens
  misc_RNA (1)...(19): siRNA sense strand
acuacgggcugcucuacug

SEQ ID NO: 27879 - RNA, 19 nt, Homo sapiens
  misc_RNA (1)...(19): siRNA sense strand
ggaaggacauggacaaggu

SEQ ID NO: 27880 - RNA, 19 nt, Homo sapiens
  misc_RNA (1)...(19): siRNA sense strand
ggacugggcagaucuucaa

SEQ ID NO: 27881 - RNA, 19 nt, Homo sapiens
  misc_RNA (1)...(19): siRNA sense strand
gggcagcuguggcuucuag

SEQ ID NO: 27882 - RNA, 19 nt, Homo sapiens
  misc_RNA (1)...(19): siRNA sense strand
uggacaaggucgagacauu

SEQ ID NO: 27883 - RNA, 19 nt, Homo sapiens
  misc_RNA (1)...(19): siRNA sense strand
ggacaaggucgagacauuc

SEQ ID NO: 27884 - RNA, 19 nt, Homo sapiens
  misc_RNA (1)...(19): siRNA sense strand
aagcagaccuacagcaagu

SEQ ID NO: 27885 - RNA, 19 nt, Homo sapiens
  misc_RNA (1)...(19): siRNA sense strand
gggcugcucuacugcuuca

SEQ ID NO: 27886 - RNA, 19 nt, Homo sapiens
  misc_RNA (1)...(19): siRNA sense strand
ucaagcagaccuacagcaa

SEQ ID NO: 27887 - RNA, 19 nt, Homo sapiens
  misc_RNA (1)...(19): siRNA sense strand
gaacuacgggcugcucuac

SEQ ID NO: 27888 - RNA, 19 nt, Homo sapiens
  misc_RNA (1)...(19): siRNA sense strand
gagggcagcuguggcuucu

SEQ ID NO: 27889 - RNA, 19 nt, Homo sapiens
  misc_RNA (1)...(19): siRNA sense strand
ucaggaaggacauggacaa

SEQ ID NO: 27890 - RNA, 19 nt, Homo sapiens
  misc_RNA (1)...(19): siRNA sense strand
acuacgggcugcucuacug

SEQ ID NO: 27891 - RNA, 19 nt, Homo sapiens
  misc_RNA (1)...(19): siRNA sense strand
ggaaggacauggacaaggu

SEQ ID NO: 27892 - RNA, 19 nt, Homo sapiens
  misc_RNA (1)...(19): siRNA sense strand
ggacugggcagaucuucaa

SEQ ID NO: 27893 - RNA, 19 nt, Homo sapiens
  misc_RNA (1)...(19): siRNA sense strand
gggcagcuguggcuucuag

SEQ ID NO: 27894 - RNA, 19 nt, Homo sapiens
  misc_RNA (1)...(19): siRNA sense strand
uggacaaggucgagacauu

SEQ ID NO: 27895 - RNA, 19 nt, Homo sapiens
  misc_RNA (1)...(19): siRNA sense strand
ggacaaggucgagacauuc

SEQ ID NO: 27896 - RNA, 19 nt, Homo sapiens
  misc_RNA (1)...(19): siRNA sense strand
aagcagaccuacagcaagu

SEQ ID NO: 27897 - RNA, 19 nt, Homo sapiens
  misc_RNA (1)...(19): siRNA sense strand
gggcugcucuacugcuuca

SEQ ID NO: 27898 - RNA, 19 nt, Homo sapiens
  misc_RNA (1)...(19): siRNA sense strand
ucaagcagaccuacagcaa

SEQ ID NO: 27899 - RNA, 19 nt, Homo sapiens
  misc_RNA (1)...(19): siRNA sense strand
gaacuacgggcugcucuac

SEQ ID NO: 27900 - RNA, 19 nt, Homo sapiens
  misc_RNA (1)...(19): siRNA sense strand
gagggcagcuguggcuucu

SEQ ID NO: 27901 - RNA, 19 nt, Homo sapiens
  misc_RNA (1)...(19): siRNA sense strand
ucaggaaggacauggacaa

SEQ ID NO: 27902 - RNA, 19 nt, Homo sapiens
  misc_RNA (1)...(19): siRNA sense strand
acuacgggcugcucuacug

SEQ ID NO: 27903 - RNA, 19 nt, Homo sapiens
  misc_RNA (1)...(19): siRNA sense strand
ggaaggacauggacaaggu

SEQ ID NO: 27904 - RNA, 19 nt, Homo sapiens
  misc_RNA (1)...(19): siRNA sense strand
ggacugggcagaucuucaa

SEQ ID NO: 27905 - RNA, 19 nt, Homo sapiens
  misc_RNA (1)...(19): siRNA sense strand
gggcagcuguggcuucuag

SEQ ID NO: 27906 - RNA, 19 nt, Homo sapiens
  misc_RNA (1)...(19): siRNA sense strand
uggacaaggucgagacauu

SEQ ID NO: 27907 - RNA, 19 nt, Homo sapiens
  misc_RNA (1)...(19): siRNA sense strand
ggacaaggucgagacauuc

SEQ ID NO: 27908 - RNA, 19 nt, Homo sapiens
  misc_RNA (1)...(19): siRNA sense strand
aagcagaccuacagcaagu

SEQ ID NO: 27909 - RNA, 19 nt, Homo sapiens
  misc_RNA (1)...(19): siRNA sense strand
gggcugcucuacugcuuca

SEQ ID NO: 27910 - RNA, 19 nt, Homo sapiens
  misc_RNA (1)...(19): siRNA sense strand
ucaagcagaccuacagcaa

SEQ ID NO: 27911 - RNA, 19 nt, Homo sapiens
  misc_RNA (1)...(19): siRNA sense strand
gaacuacgggcugcucuac

SEQ ID NO: 27912 - RNA, 19 nt, Homo sapiens
  misc_RNA (1)...(19): siRNA sense strand
gagggcagcuguggcuucu

SEQ ID NO: 27913 - RNA, 19 nt, Homo sapiens
  misc_RNA (1)...(19): siRNA sense strand
ucaggaaggacauggacaa

SEQ ID NO: 27914 - RNA, 19 nt, Homo sapiens
  misc_RNA (1)...(19): siRNA sense strand
acuacgggcugcucuacug

SEQ ID NO: 27915 - RNA, 19 nt, Homo sapiens
  misc_RNA (1)...(19): siRNA sense strand
ggacugggcagaucuucaa

SEQ ID NO: 27916 - RNA, 19 nt, Homo sapiens
  misc_RNA (1)...(19): siRNA sense strand
aagcagaccuacagcaagu

SEQ ID NO: 27917 - RNA, 19 nt, Homo sapiens
  misc_RNA (1)...(19): siRNA sense strand
ucaagcagaccuacagcaa

SEQ ID NO: 27918 - RNA, 19 nt, Homo sapiens
  misc_RNA (1)...(19): siRNA sense strand
gaaccuacaucaucaguau

SEQ ID NO: 27919 - RNA, 19 nt, Homo sapiens
  misc_RNA (1)...(19): siRNA sense strand
gaagagaaacugaacaaga

SEQ ID NO: 27920 - RNA, 19 nt, Homo sapiens
  misc_RNA (1)...(19): siRNA sense strand
ugaagcagauugagauaaa

SEQ ID NO: 27921 - RNA, 19 nt, Homo sapiens
  misc_RNA (1)...(19): siRNA sense strand
gcucauguguucuauguga

SEQ ID NO: 27922 - RNA, 19 nt, Homo sapiens
  misc_RNA (1)...(19): siRNA sense strand
aagagaaacugaacaagaa

SEQ ID NO: 27923 - RNA, 19 nt, Homo sapiens
  misc_RNA (1)...(19): siRNA sense strand
gaauaucauugaacucuuc

SEQ ID NO: 27924 - RNA, 19 nt, Homo sapiens
  misc_RNA (1)...(19): siRNA sense strand
guaccuggcucauguguuc

SEQ ID NO: 27925 - RNA, 19 nt, Homo sapiens
  misc_RNA (1)...(19): siRNA sense strand
gaugauaaccagaauucua

SEQ ID NO: 27926 - RNA, 19 nt, Homo sapiens
  misc_RNA (1)...(19): siRNA sense strand
ugacaagucuuucccaauc

SEQ ID NO: 27927 - RNA, 19 nt, Homo sapiens
  misc_RNA (1)...(19): siRNA sense strand
gagcaaaacugggcuaauu

SEQ ID NO: 27928 - RNA, 19 nt, Homo sapiens
  misc_RNA (1)...(19): siRNA sense strand
cugaugaccuggagaucua

SEQ ID NO: 27929 - RNA, 19 nt, Homo sapiens
  misc_RNA (1)...(19): siRNA sense strand
ccaaacugauggugucaau

SEQ ID NO: 27930 - RNA, 19 nt, Homo sapiens
  misc_RNA (1)...(19): siRNA sense strand
uaauuacagugcagaacaa

SEQ ID NO: 27931 - RNA, 19 nt, Homo sapiens
  misc_RNA (1)...(19): siRNA sense strand
caucaucaguauccucuuc

SEQ ID NO: 27932 - RNA, 19 nt, Homo sapiens
  misc_RNA (1)...(19): siRNA sense strand
gaagcaccaucucuaacuc

SEQ ID NO: 27933 - RNA, 19 nt, Homo sapiens
  misc_RNA (1)...(19): siRNA sense strand
gcagaccucggccugauga

SEQ ID NO: 27934 - RNA, 19 nt, Homo sapiens
  misc_RNA (1)...(19): siRNA sense strand
aaacugauggugucaaugu

SEQ ID NO: 27935 - RNA, 19 nt, Homo sapiens
  misc_RNA (1)...(19): siRNA sense strand
agagaucccugcccacauc

SEQ ID NO: 27936 - RNA, 19 nt, Homo sapiens
  misc_RNA (1)...(19): siRNA sense strand
ggaagcaccaucucuaacu

SEQ ID NO: 27937 - RNA, 19 nt, Homo sapiens
  misc_RNA (1)...(19): siRNA sense strand
gaagcagauugagauaaag

SEQ ID NO: 27938 - RNA, 19 nt, Homo sapiens
  misc_RNA (1)...(19): siRNA sense strand
cagucugccuuucguugua

SEQ ID NO: 27939 - RNA, 19 nt, Homo sapiens
  misc_RNA (1)...(19): siRNA sense strand
ggccuugaauaucauugaa

SEQ ID NO: 27940 - RNA, 19 nt, Homo sapiens
  misc_RNA (1)...(19): siRNA sense strand
gaacucaagguugcccaaa

SEQ ID NO: 27941 - RNA, 19 nt, Homo sapiens
  misc_RNA (1)...(19): siRNA sense strand
uaggcaaacuccuugacaa

SEQ ID NO: 27942 - RNA, 19 nt, Homo sapiens
  misc_RNA (1)...(19): siRNA sense strand
guauugaagagcaugguaa

SEQ ID NO: 27943 - RNA, 19 nt, Homo sapiens
  misc_RNA (1)...(19): siRNA sense strand
gcgggaagcaccaucucua

SEQ ID NO: 27944 - RNA, 19 nt, Homo sapiens
  misc_RNA (1)...(19): siRNA sense strand
gaagguguggcugucagua

SEQ ID NO: 27945 - RNA, 19 nt, Homo sapiens
  misc_RNA (1)...(19): siRNA sense strand
uggcucauguguucuaugu

SEQ ID NO: 27946 - RNA, 19 nt, Homo sapiens
  misc_RNA (1)...(19): siRNA sense strand
ucccuggccuugaauauca

SEQ ID NO: 27947 - RNA, 19 nt, Homo sapiens
  misc_RNA (1)...(19): siRNA sense strand
gagaaaaccaucuucauca

SEQ ID NO: 27948 - RNA, 19 nt, Homo sapiens
  misc_RNA (1)...(19): siRNA sense strand
cugcgaaccuacaucauca

SEQ ID NO: 27949 - RNA, 19 nt, Homo sapiens
  misc_RNA (1)...(19): siRNA sense strand
gugaaaaugucugcuauga

SEQ ID NO: 27950 - RNA, 19 nt, Homo sapiens
  misc_RNA (1)...(19): siRNA sense strand
ucaguauccucuucaaguc

SEQ ID NO: 27951 - RNA, 19 nt, Homo sapiens
  misc_RNA (1)...(19): siRNA sense strand
gacaagucuuucccaaucu

SEQ ID NO: 27952 - RNA, 19 nt, Homo sapiens
  misc_RNA (1)...(19): siRNA sense strand
cagcagaccucggccugau

SEQ ID NO: 27953 - RNA, 19 nt, Homo sapiens
  misc_RNA (1)...(19): siRNA sense strand
agugguacaucuauggauu

SEQ ID NO: 27954 - RNA, 19 nt, Homo sapiens
  misc_RNA (1)...(19): siRNA sense strand
gaaagagcgacccuuacca

SEQ ID NO: 27955 - RNA, 19 nt, Homo sapiens
  misc_RNA (1)...(19): siRNA sense strand
ggaaagagcgacccuuacc

SEQ ID NO: 27956 - RNA, 19 nt, Homo sapiens
  misc_RNA (1)...(19): siRNA sense strand
gagauaaagaaguucaagu

SEQ ID NO: 27957 - RNA, 19 nt, Homo sapiens
  misc_RNA (1)...(19): siRNA sense strand
cugcagaucauauuugugu

SEQ ID NO: 27958 - RNA, 19 nt, Homo sapiens
  misc_RNA (1)...(19): siRNA sense strand
ucuuguaccuggcucaugu

SEQ ID NO: 27959 - RNA, 19 nt, Homo sapiens
  misc_RNA (1)...(19): siRNA sense strand
gguauugaagagcauggua

SEQ ID NO: 27960 - RNA, 19 nt, Homo sapiens
  misc_RNA (1)...(19): siRNA sense strand
cgggaagcaccaucucuaa

SEQ ID NO: 27961 - RNA, 19 nt, Homo sapiens
  misc_RNA (1)...(19): siRNA sense strand
gauccagugguacaucuau

SEQ ID NO: 27962 - RNA, 19 nt, Homo sapiens
  misc_RNA (1)...(19): siRNA sense strand
ccucuucaagucuaucuuu

SEQ ID NO: 27963 - RNA, 19 nt, Homo sapiens
  misc_RNA (1)...(19): siRNA sense strand
aguauccucuucaagucua

SEQ ID NO: 27964 - RNA, 19 nt, Homo sapiens
  misc_RNA (1)...(19): siRNA sense strand
ccgaugauaaccagaauuc

SEQ ID NO: 27965 - RNA, 19 nt, Homo sapiens
  misc_RNA (1)...(19): siRNA sense strand
ggagaaaaccaucuucauc

SEQ ID NO: 27966 - RNA, 19 nt, Homo sapiens
  misc_RNA (1)...(19): siRNA sense strand
gguccugcagaucauauuu

SEQ ID NO: 27967 - RNA, 19 nt, Homo sapiens
  misc_RNA (1)...(19): siRNA sense strand
caagguugcccaaacugau

SEQ ID NO: 27968 - RNA, 19 nt, Homo sapiens
  misc_RNA (1)...(19): siRNA sense strand
gagaaacugaacaagaaag

SEQ ID NO: 27969 - RNA, 19 nt, Homo sapiens
  misc_RNA (1)...(19): siRNA sense strand
aaaacuagcugcuggacau

SEQ ID NO: 27970 - RNA, 19 nt, Homo sapiens
  misc_RNA (1)...(19): siRNA sense strand
gcugcgaaccuacaucauc

SEQ ID NO: 27971 - RNA, 19 nt, Homo sapiens
  misc_RNA (1)...(19): siRNA sense strand
gcagauugagauaaagaag

SEQ ID NO: 27972 - RNA, 19 nt, Homo sapiens
  misc_RNA (1)...(19): siRNA sense strand
agaaacugaacaagaaaga

SEQ ID NO: 27973 - RNA, 19 nt, Homo sapiens
  misc_RNA (1)...(19): siRNA sense strand
cuaauuacagugcagaaca

SEQ ID NO: 27974 - RNA, 19 nt, Homo sapiens
  misc_RNA (1)...(19): siRNA sense strand
ucaagguugcccaaacuga

SEQ ID NO: 27975 - RNA, 19 nt, Homo sapiens
  misc_RNA (1)...(19): siRNA sense strand
aaagagcgacccuuaccau

SEQ ID NO: 27976 - RNA, 19 nt, Homo sapiens
  misc_RNA (1)...(19): siRNA sense strand
agagaaacugaacaagaaa

SEQ ID NO: 27977 - RNA, 19 nt, Homo sapiens
  misc_RNA (1)...(19): siRNA sense strand
acuagcugcuggacaugaa

SEQ ID NO: 27978 - RNA, 19 nt, Homo sapiens
  misc_RNA (1)...(19): siRNA sense strand
guguggcugucaguacuuu

SEQ ID NO: 27979 - RNA, 19 nt, Homo sapiens
  misc_RNA (1)...(19): siRNA sense strand
ggaagagaaacugaacaag

SEQ ID NO: 27980 - RNA, 19 nt, Homo sapiens
  misc_RNA (1)...(19): siRNA sense strand
gaaacugaacaagaaagag

SEQ ID NO: 27981 - RNA, 19 nt, Homo sapiens
  misc_RNA (1)...(19): siRNA sense strand
aagcagauugagauaaaga

SEQ ID NO: 27982 - RNA, 19 nt, Homo sapiens
  misc_RNA (1)...(19): siRNA sense strand
aaaccaucuucaucaucuu

SEQ ID NO: 27983 - RNA, 19 nt, Homo sapiens
  misc_RNA (1)...(19): siRNA sense strand
cgaaccuacaucaucagua

SEQ ID NO: 27984 - RNA, 19 nt, Homo sapiens
  misc_RNA (1)...(19): siRNA sense strand
aggaagagaaacugaacaa

SEQ ID NO: 27985 - RNA, 19 nt, Homo sapiens
  misc_RNA (1)...(19): siRNA sense strand
ccuugaauaucauugaacu

SEQ ID NO: 27986 - RNA, 19 nt, Homo sapiens
  misc_RNA (1)...(19): siRNA sense strand
ucaucaguauccucuucaa

SEQ ID NO: 27987 - RNA, 19 nt, Homo sapiens
  misc_RNA (1)...(19): siRNA sense strand
acucaagguugcccaaacu

SEQ ID NO: 27988 - RNA, 19 nt, Homo sapiens
  misc_RNA (1)...(19): siRNA sense strand
ggacaaagaugaaagcaaa

SEQ ID NO: 27989 - RNA, 19 nt, Homo sapiens
  misc_RNA (1)...(19): siRNA sense strand
caacaaggcuuucucaaau

SEQ ID NO: 27990 - RNA, 19 nt, Homo sapiens
  misc_RNA (1)...(19): siRNA sense strand
gcauaugacuuccgccuua

SEQ ID NO: 27991 - RNA, 19 nt, Homo sapiens
  misc_RNA (1)...(19): siRNA sense strand
gagcuuagguucagccuuu

SEQ ID NO: 27992 - RNA, 19 nt, Homo sapiens
  misc_RNA (1)...(19): siRNA sense strand
gaacagaugugagcgagaa

SEQ ID NO: 27993 - RNA, 19 nt, Homo sapiens
  misc_RNA (1)...(19): siRNA sense strand
gcacgaagguugcaacaag

SEQ ID NO: 27994 - RNA, 19 nt, Homo sapiens
  misc_RNA (1)...(19): siRNA sense strand
gcacuaagcguuacacaga

SEQ ID NO: 27995 - RNA, 19 nt, Homo sapiens
  misc_RNA (1)...(19): siRNA sense strand
gaauuacucuggucaguuc

SEQ ID NO: 27996 - RNA, 19 nt, Homo sapiens
  misc_RNA (1)...(19): siRNA sense strand
ggaaacaugugaagacagu

SEQ ID NO: 27997 - RNA, 19 nt, Homo sapiens
  misc_RNA (1)...(19): siRNA sense strand
gcaacaaggcuuucucaaa

SEQ ID NO: 27998 - RNA, 19 nt, Homo sapiens
  misc_RNA (1)...(19): siRNA sense strand
ggacacagcccuccacuca

SEQ ID NO: 27999 - RNA, 19 nt, Homo sapiens
  misc_RNA (1)...(19): siRNA sense strand
gaagaaacgcaaucacuau

SEQ ID NO: 28000 - RNA, 19 nt, Homo sapiens
  misc_RNA (1)...(19): siRNA sense strand
ccacaucccuacauuaauc

SEQ ID NO: 28001 - RNA, 19 nt, Homo sapiens
  misc_RNA (1)...(19): siRNA sense strand
gcgagaagccucacaaaug

SEQ ID NO: 28002 - RNA, 19 nt, Homo sapiens
  misc_RNA (1)...(19): siRNA sense strand
gcagaauacuaucaucaga

SEQ ID NO: 28003 - RNA, 19 nt, Homo sapiens
  misc_RNA (1)...(19): siRNA sense strand
uggaauaucuucaugcuau

SEQ ID NO: 28004 - RNA, 19 nt, Homo sapiens
  misc_RNA (1)...(19): siRNA sense strand
cacgaaagcugguucauuc

SEQ ID NO: 28005 - RNA, 19 nt, Homo sapiens
  misc_RNA (1)...(19): siRNA sense strand
acaagugaauggaauguuu

SEQ ID NO: 28006 - RNA, 19 nt, Homo sapiens
  misc_RNA (1)...(19): siRNA sense strand
caacagagcuuagguucag

SEQ ID NO: 28007 - RNA, 19 nt, Homo sapiens
  misc_RNA (1)...(19): siRNA sense strand
ucacgauucucaauaauuc

SEQ ID NO: 28008 - RNA, 19 nt, Homo sapiens
  misc_RNA (1)...(19): siRNA sense strand
gaaaccauaugugugcaaa

SEQ ID NO: 28009 - RNA, 19 nt, Homo sapiens
  misc_RNA (1)...(19): siRNA sense strand
gaccugcccuucauuagga

SEQ ID NO: 28010 - RNA, 19 nt, Homo sapiens
  misc_RNA (1)...(19): siRNA sense strand
caaauuccuugcaguuaug

SEQ ID NO: 28011 - RNA, 19 nt, Homo sapiens
  misc_RNA (1)...(19): siRNA sense strand
cgacagccaugaccuggaa

SEQ ID NO: 28012 - RNA, 19 nt, Homo sapiens
  misc_RNA (1)...(19): siRNA sense strand
ggaaguggcaccaguggaa

SEQ ID NO: 28013 - RNA, 19 nt, Homo sapiens
  misc_RNA (1)...(19): siRNA sense strand
gcugguucauucucuauuu

SEQ ID NO: 28014 - RNA, 19 nt, Homo sapiens
  misc_RNA (1)...(19): siRNA sense strand
gaaacgcaaucacuaugca

SEQ ID NO: 28015 - RNA, 19 nt, Homo sapiens
  misc_RNA (1)...(19): siRNA sense strand
gaaagcugguucauucucu

SEQ ID NO: 28016 - RNA, 19 nt, Homo sapiens
  misc_RNA (1)...(19): siRNA sense strand
guaucaagauggagaugaa

SEQ ID NO: 28017 - RNA, 19 nt, Homo sapiens
  misc_RNA (1)...(19): siRNA sense strand
aaaccgaccugcccauuca

SEQ ID NO: 28018 - RNA, 19 nt, Homo sapiens
  misc_RNA (1)...(19): siRNA sense strand
guugagaauuccauaguga

SEQ ID NO: 28019 - RNA, 19 nt, Homo sapiens
  misc_RNA (1)...(19): siRNA sense strand
ccucauugaucaagaaaga

SEQ ID NO: 28020 - RNA, 19 nt, Homo sapiens
  misc_RNA (1)...(19): siRNA sense strand
gcccaaguaucauucagaa

SEQ ID NO: 28021 - RNA, 19 nt, Homo sapiens
  misc_RNA (1)...(19): siRNA sense strand
gcccaucgcucuccaugau

SEQ ID NO: 28022 - RNA, 19 nt, Homo sapiens
  misc_RNA (1)...(19): siRNA sense strand
ccacagcccuugcuuugca

SEQ ID NO: 28023 - RNA, 19 nt, Homo sapiens
  misc_RNA (1)...(19): siRNA sense strand
cgagaagccucacaaaugc

SEQ ID NO: 28024 - RNA, 19 nt, Homo sapiens
  misc_RNA (1)...(19): siRNA sense strand
gaucaaacccgaugaagac

SEQ ID NO: 28025 - RNA, 19 nt, Homo sapiens
  misc_RNA (1)...(19): siRNA sense strand
ucaccacucuccgaucaua

SEQ ID NO: 28026 - RNA, 19 nt, Homo sapiens
  misc_RNA (1)...(19): siRNA sense strand
gcccugagcccaaguauca

SEQ ID NO: 28027 - RNA, 19 nt, Homo sapiens
  misc_RNA (1)...(19): siRNA sense strand
gcaaucagcccugccuuga

SEQ ID NO: 28028 - RNA, 19 nt, Homo sapiens
  misc_RNA (1)...(19): siRNA sense strand
aacaagagguccaagauca

SEQ ID NO: 28029 - RNA, 19 nt, Homo sapiens
  misc_RNA (1)...(19): siRNA sense strand
ccucacacaucaacaucua

SEQ ID NO: 28030 - RNA, 19 nt, Homo sapiens
  misc_RNA (1)...(19): siRNA sense strand
gaaacgccuuccaugaaca

SEQ ID NO: 28031 - RNA, 19 nt, Homo sapiens
  misc_RNA (1)...(19): siRNA sense strand
aaacguacacuguccauau

SEQ ID NO: 28032 - RNA, 19 nt, Homo sapiens
  misc_RNA (1)...(19): siRNA sense strand
gcagaugcuugggcagauu

SEQ ID NO: 28033 - RNA, 19 nt, Homo sapiens
  misc_RNA (1)...(19): siRNA sense strand
ggacgucucccaacuccuu

SEQ ID NO: 28034 - RNA, 19 nt, Homo sapiens
  misc_RNA (1)...(19): siRNA sense strand
gagcagaaacccuucaaag

SEQ ID NO: 28035 - RNA, 19 nt, Homo sapiens
  misc_RNA (1)...(19): siRNA sense strand
ggaauaucuucaugcuaug

SEQ ID NO: 28036 - RNA, 19 nt, Homo sapiens
  misc_RNA (1)...(19): siRNA sense strand
ugaaugguaucaagaugga

SEQ ID NO: 28037 - RNA, 19 nt, Homo sapiens
  misc_RNA (1)...(19): siRNA sense strand
aaacagaacgcauuccaau

SEQ ID NO: 28038 - RNA, 19 nt, Homo sapiens
  misc_RNA (1)...(19): siRNA sense strand
agaacaagcccacgaguga

SEQ ID NO: 28039 - RNA, 19 nt, Homo sapiens
  misc_RNA (1)...(19): siRNA sense strand
acacagcccuccacucauc

SEQ ID NO: 28040 - RNA, 19 nt, Homo sapiens
  misc_RNA (1)...(19): siRNA sense strand
cguagcagcucuucagcaa

SEQ ID NO: 28041 - RNA, 19 nt, Homo sapiens
  misc_RNA (1)...(19): siRNA sense strand
uagcagcucuucagcaagu

SEQ ID NO: 28042 - RNA, 19 nt, Homo sapiens
  misc_RNA (1)...(19): siRNA sense strand
cgauggagguaguauagga

SEQ ID NO: 28043 - RNA, 19 nt, Homo sapiens
  misc_RNA (1)...(19): siRNA sense strand
agaagaaacgcaaucacua

SEQ ID NO: 28044 - RNA, 19 nt, Homo sapiens
  misc_RNA (1)...(19): siRNA sense strand
uaugggaacugucucaaca

SEQ ID NO: 28045 - RNA, 19 nt, Homo sapiens
  misc_RNA (1)...(19): siRNA sense strand
cagcaacuauuccaacagu

SEQ ID NO: 28046 - RNA, 19 nt, Homo sapiens
  misc_RNA (1)...(19): siRNA sense strand
uaucaccacucuccgauca

SEQ ID NO: 28047 - RNA, 19 nt, Homo sapiens
  misc_RNA (1)...(19): siRNA sense strand
cuacauuaaucccuacaug

SEQ ID NO: 28048 - RNA, 19 nt, Homo sapiens
  misc_RNA (1)...(19): siRNA sense strand
ggacgguguuugccaugga

SEQ ID NO: 28049 - RNA, 19 nt, Homo sapiens
  misc_RNA (1)...(19): siRNA sense strand
ccaaugagaaaccauaugu

SEQ ID NO: 28050 - RNA, 19 nt, Homo sapiens
  misc_RNA (1)...(19): siRNA sense strand
aagaaugccuccaggugaa

SEQ ID NO: 28051 - RNA, 19 nt, Homo sapiens
  misc_RNA (1)...(19): siRNA sense strand
ccucaaagcgggaagaaug

SEQ ID NO: 28052 - RNA, 19 nt, Homo sapiens
  misc_RNA (1)...(19): siRNA sense strand
caucuccgauuccuccauu

SEQ ID NO: 28053 - RNA, 19 nt, Homo sapiens
  misc_RNA (1)...(19): siRNA sense strand
guggugcaguauuuaaauu

SEQ ID NO: 28054 - RNA, 19 nt, Homo sapiens
  misc_RNA (1)...(19): siRNA sense strand
gucucgugcuucagaauua

SEQ ID NO: 28055 - RNA, 19 nt, Homo sapiens
  misc_RNA (1)...(19): siRNA sense strand
gcagagaagccaaugacau

SEQ ID NO: 28056 - RNA, 19 nt, Homo sapiens
  misc_RNA (1)...(19): siRNA sense strand
cagcaacacuaccucaaag

SEQ ID NO: 28057 - RNA, 19 nt, Homo sapiens
  misc_RNA (1)...(19): siRNA sense strand
ucaaagcccaguauauguu

SEQ ID NO: 28058 - RNA, 19 nt, Homo sapiens
  misc_RNA (1)...(19): siRNA sense strand
gcccgucucucuccacaug

SEQ ID NO: 28059 - RNA, 19 nt, Homo sapiens
  misc_RNA (1)...(19): siRNA sense strand
uggcuccuauggucacuua

SEQ ID NO: 28060 - RNA, 19 nt, Homo sapiens
  misc_RNA (1)...(19): siRNA sense strand
gagaagaaacgcaaucacu

SEQ ID NO: 28061 - RNA, 19 nt, Homo sapiens
  misc_RNA (1)...(19): siRNA sense strand
guauuuaaauucccagaac

SEQ ID NO: 28062 - RNA, 19 nt, Homo sapiens
  misc_RNA (1)...(19): siRNA sense strand
gaaauggcacacaguccaa

SEQ ID NO: 28063 - RNA, 19 nt, Homo sapiens
  misc_RNA (1)...(19): siRNA sense strand
gaacagcccgaaggaacaa

SEQ ID NO: 28064 - RNA, 19 nt, Homo sapiens
  misc_RNA (1)...(19): siRNA sense strand
caugagggccguuaccauu

SEQ ID NO: 28065 - RNA, 19 nt, Homo sapiens
  misc_RNA (1)...(19): siRNA sense strand
ggucacgauucucaauaau

SEQ ID NO: 28066 - RNA, 19 nt, Homo sapiens
  misc_RNA (1)...(19): siRNA sense strand
ggugaaugguaucaagaug

SEQ ID NO: 28067 - RNA, 19 nt, Homo sapiens
  misc_RNA (1)...(19): siRNA sense strand
uauggucacuuaucugcaa

SEQ ID NO: 28068 - RNA, 19 nt, Homo sapiens
  misc_RNA (1)...(19): siRNA sense strand
caagagguccaagaucaaa

SEQ ID NO: 28069 - RNA, 19 nt, Homo sapiens
  misc_RNA (1)...(19): siRNA sense strand
gggccucauugaucaagaa

SEQ ID NO: 28070 - RNA, 19 nt, Homo sapiens
  misc_RNA (1)...(19): siRNA sense strand
gagaggaugagccugaaga

SEQ ID NO: 28071 - RNA, 19 nt, Homo sapiens
  misc_RNA (1)...(19): siRNA sense strand
gaagacacacgggcgagaa

SEQ ID NO: 28072 - RNA, 19 nt, Homo sapiens
  misc_RNA (1)...(19): siRNA sense strand
gagcagcuugugcaccaua

SEQ ID NO: 28073 - RNA, 19 nt, Homo sapiens
  misc_RNA (1)...(19): siRNA sense strand
ggagucagcccagcagaau

SEQ ID NO: 28074 - RNA, 19 nt, Homo sapiens
  misc_RNA (1)...(19): siRNA sense strand
cggacgacguggugcagua

SEQ ID NO: 28075 - RNA, 19 nt, Homo sapiens
  misc_RNA (1)...(19): siRNA sense strand
ugaacaugcucaacagaag

SEQ ID NO: 28076 - RNA, 19 nt, Homo sapiens
  misc_RNA (1)...(19): siRNA sense strand
cagagaagccaaugacauc

SEQ ID NO: 28077 - RNA, 19 nt, Homo sapiens
  misc_RNA (1)...(19): siRNA sense strand
cagcuugugcaccauauaa

SEQ ID NO: 28078 - RNA, 19 nt, Homo sapiens
  misc_RNA (1)...(19): siRNA sense strand
ccacaugcaucagcagauc

SEQ ID NO: 28079 - RNA, 19 nt, Homo sapiens
  misc_RNA (1)...(19): siRNA sense strand
gaccuucagaccaugauaa

SEQ ID NO: 28080 - RNA, 19 nt, Homo sapiens
  misc_RNA (1)...(19): siRNA sense strand
caagaucaaacccgaugaa

SEQ ID NO: 28081 - RNA, 19 nt, Homo sapiens
  misc_RNA (1)...(19): siRNA sense strand
ggguacagauugacuucga

SEQ ID NO: 28082 - RNA, 19 nt, Homo sapiens
  misc_RNA (1)...(19): siRNA sense strand
ggacagcucagugacacaa

SEQ ID NO: 28083 - RNA, 19 nt, Homo sapiens
  misc_RNA (1)...(19): siRNA sense strand
ccagccaugugccagcuuu

SEQ ID NO: 28084 - RNA, 19 nt, Homo sapiens
  misc_RNA (1)...(19): siRNA sense strand
gcagucucgugcuucagaa

SEQ ID NO: 28085 - RNA, 19 nt, Homo sapiens
  misc_RNA (1)...(19): siRNA sense strand
caaccacagcccuugcuuu

SEQ ID NO: 28086 - RNA, 19 nt, Homo sapiens
  misc_RNA (1)...(19): siRNA sense strand
gaggaaccuucaacaucga

SEQ ID NO: 28087 - RNA, 19 nt, Homo sapiens
  misc_RNA (1)...(19): siRNA sense strand
ggaacagcccgaaggaaca

SEQ ID NO: 28088 - RNA, 19 nt, Homo sapiens
  misc_RNA (1)...(19): siRNA sense strand
caagaucgcugccucucua

SEQ ID NO: 28089 - RNA, 19 nt, Homo sapiens
  misc_RNA (1)...(19): siRNA sense strand
gaagguggauuuaguuuug

SEQ ID NO: 28090 - RNA, 19 nt, Homo sapiens
  misc_RNA (1)...(19): siRNA sense strand
gaaaugugacccucagugu

SEQ ID NO: 28091 - RNA, 19 nt, Homo sapiens
  misc_RNA (1)...(19): siRNA sense strand
cgucugggcugcaucaaga

SEQ ID NO: 28092 - RNA, 19 nt, Homo sapiens
  misc_RNA (1)...(19): siRNA sense strand
gaaggacccugcggugauc

SEQ ID NO: 28093 - RNA, 19 nt, Homo sapiens
  misc_RNA (1)...(19): siRNA sense strand
ggaaggacccugcggugau

SEQ ID NO: 28094 - RNA, 19 nt, Homo sapiens
  misc_RNA (1)...(19): siRNA sense strand
caaagaaggaaccuacuca

SEQ ID NO: 28095 - RNA, 19 nt, Homo sapiens
  misc_RNA (1)...(19): siRNA sense strand
ccacugucccuucaaagaa

SEQ ID NO: 28096 - RNA, 19 nt, Homo sapiens
  misc_RNA (1)...(19): siRNA sense strand
gcuggccucuggaucaaga

SEQ ID NO: 28097 - RNA, 19 nt, Homo sapiens
  misc_RNA (1)...(19): siRNA sense strand
cuugacauguuaauuccua

SEQ ID NO: 28098 - RNA, 19 nt, Homo sapiens
  misc_RNA (1)...(19): siRNA sense strand
acacuucugugaugugcuu

SEQ ID NO: 28099 - RNA, 19 nt, Homo sapiens
  misc_RNA (1)...(19): siRNA sense strand
caagagcgaauucguugug

SEQ ID NO: 28100 - RNA, 19 nt, Homo sapiens
  misc_RNA (1)...(19): siRNA sense strand
uuugaacacuucugugaug

SEQ ID NO: 28101 - RNA, 19 nt, Homo sapiens
  misc_RNA (1)...(19): siRNA sense strand
gugcuugacauguuaauuc

SEQ ID NO: 28102 - RNA, 19 nt, Homo sapiens
  misc_RNA (1)...(19): siRNA sense strand
gaucgcugccucucuaaag

SEQ ID NO: 28103 - RNA, 19 nt, Homo sapiens
  misc_RNA (1)...(19): siRNA sense strand
gcuguaccuuugaacacuu

SEQ ID NO: 28104 - RNA, 19 nt, Homo sapiens
  misc_RNA (1)...(19): siRNA sense strand
ggaagcgucugggcugcau

SEQ ID NO: 28105 - RNA, 19 nt, Homo sapiens
  misc_RNA (1)...(19): siRNA sense strand
ugggauaacugugaugaag

SEQ ID NO: 28106 - RNA, 19 nt, Homo sapiens
  misc_RNA (1)...(19): siRNA sense strand
uggcagcuguaccuuugaa

SEQ ID NO: 28107 - RNA, 19 nt, Homo sapiens
  misc_RNA (1)...(19): siRNA sense strand
gggaacuaccgcauagaga

SEQ ID NO: 28108 - RNA, 19 nt, Homo sapiens
  misc_RNA (1)...(19): siRNA sense strand
gcccaagagcgaauucguu

SEQ ID NO: 28109 - RNA, 19 nt, Homo sapiens
  misc_RNA (1)...(19): siRNA sense strand
gccacugucccuucaaaga

SEQ ID NO: 28110 - RNA, 19 nt, Homo sapiens
  misc_RNA (1)...(19): siRNA sense strand
auuggcagcuguaccuuug

SEQ ID NO: 28111 - RNA, 19 nt, Homo sapiens
  misc_RNA (1)...(19): siRNA sense strand
gcagcuguaccuuugaaca

SEQ ID NO: 28112 - RNA, 19 nt, Homo sapiens
  misc_RNA (1)...(19): siRNA sense strand
ccugaguucuccucugaag

SEQ ID NO: 28113 - RNA, 19 nt, Homo sapiens
  misc_RNA (1)...(19): siRNA sense strand
ccuuugaacacuucuguga

SEQ ID NO: 28114 - RNA, 19 nt, Homo sapiens
  misc_RNA (1)...(19): siRNA sense strand
ugaguucuccucugaaggu

SEQ ID NO: 28115 - RNA, 19 nt, Homo sapiens
  misc_RNA (1)...(19): siRNA sense strand
ccuacucacugcccaagag

SEQ ID NO: 28116 - RNA, 19 nt, Homo sapiens
  misc_RNA (1)...(19): siRNA sense strand
caccgggaacuaccgcaua

SEQ ID NO: 28117 - RNA, 19 nt, Homo sapiens
  misc_RNA (1)...(19): siRNA sense strand
gaagagugccucgaguuua

SEQ ID NO: 28118 - RNA, 19 nt, Homo sapiens
  misc_RNA (1)...(19): siRNA sense strand
ggagaucuauucccacaug

SEQ ID NO: 28119 - RNA, 19 nt, Homo sapiens
  misc_RNA (1)...(19): siRNA sense strand
ucaagcagaugaagauuau

SEQ ID NO: 28120 - RNA, 19 nt, Homo sapiens
  misc_RNA (1)...(19): siRNA sense strand
gaucucaacuuccggaugu

SEQ ID NO: 28121 - RNA, 19 nt, Homo sapiens
  misc_RNA (1)...(19): siRNA sense strand
ggaagagugccucgaguuu

SEQ ID NO: 28122 - RNA, 19 nt, Homo sapiens
  misc_RNA (1)...(19): siRNA sense strand
gaacgucaaauuugucuuc

SEQ ID NO: 28123 - RNA, 19 nt, Homo sapiens
  misc_RNA (1)...(19): siRNA sense strand
gaaagaggacgcugagaag

SEQ ID NO: 28124 - RNA, 19 nt, Homo sapiens
  misc_RNA (1)...(19): siRNA sense strand
caagaccacuggcaucauc

SEQ ID NO: 28125 - RNA, 19 nt, Homo sapiens
  misc_RNA (1)...(19): siRNA sense strand
gcacauggcagacacuauc

SEQ ID NO: 28126 - RNA, 19 nt, Homo sapiens
  misc_RNA (1)...(19): siRNA sense strand
ucaaggagaaccucaaaga

SEQ ID NO: 28127 - RNA, 19 nt, Homo sapiens
  misc_RNA (1)...(19): siRNA sense strand
aagagugccucgaguuuau

SEQ ID NO: 28128 - RNA, 19 nt, Homo sapiens
  misc_RNA (1)...(19): siRNA sense strand
ugaaagaggacgcugagaa

SEQ ID NO: 28129 - RNA, 19 nt, Homo sapiens
  misc_RNA (1)...(19): siRNA sense strand
gaagagcaccaucgucaag

SEQ ID NO: 28130 - RNA, 19 nt, Homo sapiens
  misc_RNA (1)...(19): siRNA sense strand
cuucaaggaucucaacuuc

SEQ ID NO: 28131 - RNA, 19 nt, Homo sapiens
  misc_RNA (1)...(19): siRNA sense strand
ucaccgacaucaucaucaa

SEQ ID NO: 28132 - RNA, 19 nt, Homo sapiens
  misc_RNA (1)...(19): siRNA sense strand
gcacgaugcccaaggagau

SEQ ID NO: 28133 - RNA, 19 nt, Homo sapiens
  misc_RNA (1)...(19): siRNA sense strand
ccaucgugcucuuccuuaa

SEQ ID NO: 28134 - RNA, 19 nt, Homo sapiens
  misc_RNA (1)...(19): siRNA sense strand
gucaagcagaugaagauua

SEQ ID NO: 28135 - RNA, 19 nt, Homo sapiens
  misc_RNA (1)...(19): siRNA sense strand
gagaucuauucccacauga

SEQ ID NO: 28136 - RNA, 19 nt, Homo sapiens
  misc_RNA (1)...(19): siRNA sense strand
acacgcagaacgucaaauu

SEQ ID NO: 28137 - RNA, 19 nt, Homo sapiens
  misc_RNA (1)...(19): siRNA sense strand
ggcgugaccugcaucaucu

SEQ ID NO: 28138 - RNA, 19 nt, Homo sapiens
  misc_RNA (1)...(19): siRNA sense strand
cgcagaacgucaaauuugu

SEQ ID NO: 28139 - RNA, 19 nt, Homo sapiens
  misc_RNA (1)...(19): siRNA sense strand
agacgcaguucuccuucaa

SEQ ID NO: 28140 - RNA, 19 nt, Homo sapiens
  misc_RNA (1)...(19): siRNA sense strand
caucaaggagaaccucaaa

SEQ ID NO: 28141 - RNA, 19 nt, Homo sapiens
  misc_RNA (1)...(19): siRNA sense strand
acgcagaacgucaaauuug

SEQ ID NO: 28142 - RNA, 19 nt, Homo sapiens
  misc_RNA (1)...(19): siRNA sense strand
gcaccaucgucaagcagau

SEQ ID NO: 28143 - RNA, 19 nt, Homo sapiens
  misc_RNA (1)...(19): siRNA sense strand
cgacguccaucgugcucuu

SEQ ID NO: 28144 - RNA, 19 nt, Homo sapiens
  misc_RNA (1)...(19): siRNA sense strand
ggaagagcaccaucgucaa

SEQ ID NO: 28145 - RNA, 19 nt, Homo sapiens
  misc_RNA (1)...(19): siRNA sense strand
gcaucuguuucccggacua

SEQ ID NO: 28146 - RNA, 19 nt, Homo sapiens
  misc_RNA (1)...(19): siRNA sense strand
gaccuggagcgccugguaa

SEQ ID NO: 28147 - RNA, 19 nt, Homo sapiens
  misc_RNA (1)...(19): siRNA sense strand
gcagaacgucaaauuuguc

SEQ ID NO: 28148 - RNA, 19 nt, Homo sapiens
  misc_RNA (1)...(19): siRNA sense strand
ggacggguacucgcuggaa

SEQ ID NO: 28149 - RNA, 19 nt, Homo sapiens
  misc_RNA (1)...(19): siRNA sense strand
ggagaaccucaaagacugu

SEQ ID NO: 28150 - RNA, 19 nt, Homo sapiens
  misc_RNA (1)...(19): siRNA sense strand
ggaggacgacgaagugaac

SEQ ID NO: 28151 - RNA, 19 nt, Homo sapiens
  misc_RNA (1)...(19): siRNA sense strand
gcuaguggaggacgacgaa

SEQ ID NO: 28152 - RNA, 19 nt, Homo sapiens
  misc_RNA (1)...(19): siRNA sense strand
gggcgugaccugcaucauc

SEQ ID NO: 28153 - RNA, 19 nt, Homo sapiens
  misc_RNA (1)...(19): siRNA sense strand
agaggacgcugagaaggau

SEQ ID NO: 28154 - RNA, 19 nt, Homo sapiens
  misc_RNA (1)...(19): siRNA sense strand
ugaccacacucaacaucca

SEQ ID NO: 28155 - RNA, 19 nt, Homo sapiens
  misc_RNA (1)...(19): siRNA sense strand
gaguuuaucgccaucaucu

SEQ ID NO: 28156 - RNA, 19 nt, Homo sapiens
  misc_RNA (1)...(19): siRNA sense strand
cccggaagcugaugcacau

SEQ ID NO: 28157 - RNA, 19 nt, Homo sapiens
  misc_RNA (1)...(19): siRNA sense strand
ggccagugcugaggagaag

SEQ ID NO: 28158 - RNA, 19 nt, Homo sapiens
  misc_RNA (1)...(19): siRNA sense strand
agacuguggccucuucuga

SEQ ID NO: 28159 - RNA, 19 nt, Homo sapiens
  misc_RNA (1)...(19): siRNA sense strand
gccaugaccacacucaaca

SEQ ID NO: 28160 - RNA, 19 nt, Homo sapiens
  misc_RNA (1)...(19): siRNA sense strand
ccacacucaacauccagua

SEQ ID NO: 28161 - RNA, 19 nt, Homo sapiens
  misc_RNA (1)...(19): siRNA sense strand
ugaccugcaucaucuucau

SEQ ID NO: 28162 - RNA, 19 nt, Homo sapiens
  misc_RNA (1)...(19): siRNA sense strand
acgagagccugcaccuguu

SEQ ID NO: 28163 - RNA, 19 nt, Homo sapiens
  misc_RNA (1)...(19): siRNA sense strand
aagaggacgcugagaagga

SEQ ID NO: 28164 - RNA, 19 nt, Homo sapiens
  misc_RNA (1)...(19): siRNA sense strand
gcaccucagcaucuguuuc

SEQ ID NO: 28165 - RNA, 19 nt, Homo sapiens
  misc_RNA (1)...(19): siRNA sense strand
gcgcaccucagcaucuguu

SEQ ID NO: 28166 - RNA, 19 nt, Homo sapiens
  misc_RNA (1)...(19): siRNA sense strand
cacgcagaacgucaaauuu

SEQ ID NO: 28167 - RNA, 19 nt, Homo sapiens
  misc_RNA (1)...(19): siRNA sense strand
cgacacgcagaacgucaaa

SEQ ID NO: 28168 - RNA, 19 nt, Homo sapiens
  misc_RNA (1)...(19): siRNA sense strand
caaggagaaccucaaagac

SEQ ID NO: 28169 - RNA, 19 nt, Homo sapiens
  misc_RNA (1)...(19): siRNA sense strand
gaagagugccucgaguuua

SEQ ID NO: 28170 - RNA, 19 nt, Homo sapiens
  misc_RNA (1)...(19): siRNA sense strand
ggagaucuauucccacaug

SEQ ID NO: 28171 - RNA, 19 nt, Homo sapiens
  misc_RNA (1)...(19): siRNA sense strand
ucaagcagaugaagauuau

SEQ ID NO: 28172 - RNA, 19 nt, Homo sapiens
  misc_RNA (1)...(19): siRNA sense strand
gaucucaacuuccggaugu

SEQ ID NO: 28173 - RNA, 19 nt, Homo sapiens
  misc_RNA (1)...(19): siRNA sense strand
ggaagagugccucgaguuu

SEQ ID NO: 28174 - RNA, 19 nt, Homo sapiens
  misc_RNA (1)...(19): siRNA sense strand
gaacgucaaauuugucuuc

SEQ ID NO: 28175 - RNA, 19 nt, Homo sapiens
  misc_RNA (1)...(19): siRNA sense strand
gaaagaggacgcugagaag

SEQ ID NO: 28176 - RNA, 19 nt, Homo sapiens
  misc_RNA (1)...(19): siRNA sense strand
caagaccacuggcaucauc

SEQ ID NO: 28177 - RNA, 19 nt, Homo sapiens
  misc_RNA (1)...(19): siRNA sense strand
gcacauggcagacacuauc

SEQ ID NO: 28178 - RNA, 19 nt, Homo sapiens
  misc_RNA (1)...(19): siRNA sense strand
ucaaggagaaccucaaaga

SEQ ID NO: 28179 - RNA, 19 nt, Homo sapiens
  misc_RNA (1)...(19): siRNA sense strand
aagagugccucgaguuuau

SEQ ID NO: 28180 - RNA, 19 nt, Homo sapiens
  misc_RNA (1)...(19): siRNA sense strand
ugaaagaggacgcugagaa

SEQ ID NO: 28181 - RNA, 19 nt, Homo sapiens
  misc_RNA (1)...(19): siRNA sense strand
gaagagcaccaucgucaag

SEQ ID NO: 28182 - RNA, 19 nt, Homo sapiens
  misc_RNA (1)...(19): siRNA sense strand
cuucaaggaucucaacuuc

SEQ ID NO: 28183 - RNA, 19 nt, Homo sapiens
  misc_RNA (1)...(19): siRNA sense strand
ucaccgacaucaucaucaa

SEQ ID NO: 28184 - RNA, 19 nt, Homo sapiens
  misc_RNA (1)...(19): siRNA sense strand
gcacgaugcccaaggagau

SEQ ID NO: 28185 - RNA, 19 nt, Homo sapiens
  misc_RNA (1)...(19): siRNA sense strand
ccaucgugcucuuccuuaa

SEQ ID NO: 28186 - RNA, 19 nt, Homo sapiens
  misc_RNA (1)...(19): siRNA sense strand
gucaagcagaugaagauua

SEQ ID NO: 28187 - RNA, 19 nt, Homo sapiens
  misc_RNA (1)...(19): siRNA sense strand
gagaucuauucccacauga

SEQ ID NO: 28188 - RNA, 19 nt, Homo sapiens
  misc_RNA (1)...(19): siRNA sense strand
acacgcagaacgucaaauu

SEQ ID NO: 28189 - RNA, 19 nt, Homo sapiens
  misc_RNA (1)...(19): siRNA sense strand
ggcgugaccugcaucaucu

SEQ ID NO: 28190 - RNA, 19 nt, Homo sapiens
  misc_RNA (1)...(19): siRNA sense strand
cgcagaacgucaaauuugu

SEQ ID NO: 28191 - RNA, 19 nt, Homo sapiens
  misc_RNA (1)...(19): siRNA sense strand
agacgcaguucuccuucaa

SEQ ID NO: 28192 - RNA, 19 nt, Homo sapiens
  misc_RNA (1)...(19): siRNA sense strand
caucaaggagaaccucaaa

SEQ ID NO: 28193 - RNA, 19 nt, Homo sapiens
  misc_RNA (1)...(19): siRNA sense strand
acgcagaacgucaaauuug

SEQ ID NO: 28194 - RNA, 19 nt, Homo sapiens
  misc_RNA (1)...(19): siRNA sense strand
gcaccaucgucaagcagau

SEQ ID NO: 28195 - RNA, 19 nt, Homo sapiens
  misc_RNA (1)...(19): siRNA sense strand
cgacguccaucgugcucuu

SEQ ID NO: 28196 - RNA, 19 nt, Homo sapiens
  misc_RNA (1)...(19): siRNA sense strand
ggaagagcaccaucgucaa

SEQ ID NO: 28197 - RNA, 19 nt, Homo sapiens
  misc_RNA (1)...(19): siRNA sense strand
gcaucuguuucccggacua

SEQ ID NO: 28198 - RNA, 19 nt, Homo sapiens
  misc_RNA (1)...(19): siRNA sense strand
gaccuggagcgccugguaa

SEQ ID NO: 28199 - RNA, 19 nt, Homo sapiens
  misc_RNA (1)...(19): siRNA sense strand
gcagaacgucaaauuuguc

SEQ ID NO: 28200 - RNA, 19 nt, Homo sapiens
  misc_RNA (1)...(19): siRNA sense strand
ggacggguacucgcuggaa

SEQ ID NO: 28201 - RNA, 19 nt, Homo sapiens
  misc_RNA (1)...(19): siRNA sense strand
ggagaaccucaaagacugu

SEQ ID NO: 28202 - RNA, 19 nt, Homo sapiens
  misc_RNA (1)...(19): siRNA sense strand
ggaggacgacgaagugaac

SEQ ID NO: 28203 - RNA, 19 nt, Homo sapiens
  misc_RNA (1)...(19): siRNA sense strand
gcuaguggaggacgacgaa

SEQ ID NO: 28204 - RNA, 19 nt, Homo sapiens
  misc_RNA (1)...(19): siRNA sense strand
gggcgugaccugcaucauc

SEQ ID NO: 28205 - RNA, 19 nt, Homo sapiens
  misc_RNA (1)...(19): siRNA sense strand
agaggacgcugagaaggau

SEQ ID NO: 28206 - RNA, 19 nt, Homo sapiens
  misc_RNA (1)...(19): siRNA sense strand
ugaccacacucaacaucca

SEQ ID NO: 28207 - RNA, 19 nt, Homo sapiens
  misc_RNA (1)...(19): siRNA sense strand
gaguuuaucgccaucaucu

SEQ ID NO: 28208 - RNA, 19 nt, Homo sapiens
  misc_RNA (1)...(19): siRNA sense strand
cccggaagcugaugcacau

SEQ ID NO: 28209 - RNA, 19 nt, Homo sapiens
  misc_RNA (1)...(19): siRNA sense strand
ggccagugcugaggagaag

SEQ ID NO: 28210 - RNA, 19 nt, Homo sapiens
  misc_RNA (1)...(19): siRNA sense strand
agacuguggccucuucuga

SEQ ID NO: 28211 - RNA, 19 nt, Homo sapiens
  misc_RNA (1)...(19): siRNA sense strand
gccaugaccacacucaaca

SEQ ID NO: 28212 - RNA, 19 nt, Homo sapiens
  misc_RNA (1)...(19): siRNA sense strand
ccacacucaacauccagua

SEQ ID NO: 28213 - RNA, 19 nt, Homo sapiens
  misc_RNA (1)...(19): siRNA sense strand
ugaccugcaucaucuucau

SEQ ID NO: 28214 - RNA, 19 nt, Homo sapiens
  misc_RNA (1)...(19): siRNA sense strand
acgagagccugcaccuguu

SEQ ID NO: 28215 - RNA, 19 nt, Homo sapiens
  misc_RNA (1)...(19): siRNA sense strand
aagaggacgcugagaagga

SEQ ID NO: 28216 - RNA, 19 nt, Homo sapiens
  misc_RNA (1)...(19): siRNA sense strand
gcaccucagcaucuguuuc

SEQ ID NO: 28217 - RNA, 19 nt, Homo sapiens
  misc_RNA (1)...(19): siRNA sense strand
gcgcaccucagcaucuguu

SEQ ID NO: 28218 - RNA, 19 nt, Homo sapiens
  misc_RNA (1)...(19): siRNA sense strand
cacgcagaacgucaaauuu

SEQ ID NO: 28219 - RNA, 19 nt, Homo sapiens
  misc_RNA (1)...(19): siRNA sense strand
cgacacgcagaacgucaaa

SEQ ID NO: 28220 - RNA, 19 nt, Homo sapiens
  misc_RNA (1)...(19): siRNA sense strand
caaggagaaccucaaagac

SEQ ID NO: 28221 - RNA, 19 nt, Homo sapiens
  misc_RNA (1)...(19): siRNA sense strand
caagagaacucgcuguaua

SEQ ID NO: 28222 - RNA, 19 nt, Homo sapiens
  misc_RNA (1)...(19): siRNA sense strand
acacagaccuauaugauua

SEQ ID NO: 28223 - RNA, 19 nt, Homo sapiens
  misc_RNA (1)...(19): siRNA sense strand
gagguucgcuucccacuuu

SEQ ID NO: 28224 - RNA, 19 nt, Homo sapiens
  misc_RNA (1)...(19): siRNA sense strand
gaagugaacugugacaaga

SEQ ID NO: 28225 - RNA, 19 nt, Homo sapiens
  misc_RNA (1)...(19): siRNA sense strand
ucacucagcugaaccuaga

SEQ ID NO: 28226 - RNA, 19 nt, Homo sapiens
  misc_RNA (1)...(19): siRNA sense strand
ucaaggccaugaccucuaa

SEQ ID NO: 28227 - RNA, 19 nt, Homo sapiens
  misc_RNA (1)...(19): siRNA sense strand
ugaaugggcuggagaaucu

SEQ ID NO: 28228 - RNA, 19 nt, Homo sapiens
  misc_RNA (1)...(19): siRNA sense strand
caaggacuguggucaaguu

SEQ ID NO: 28229 - RNA, 19 nt, Homo sapiens
  misc_RNA (1)...(19): siRNA sense strand
acugugagauccucuauuu

SEQ ID NO: 28230 - RNA, 19 nt, Homo sapiens
  misc_RNA (1)...(19): siRNA sense strand
gcacagugagcauuaggua

SEQ ID NO: 28231 - RNA, 19 nt, Homo sapiens
  misc_RNA (1)...(19): siRNA sense strand
gaacucgcuguauacaaua

SEQ ID NO: 28232 - RNA, 19 nt, Homo sapiens
  misc_RNA (1)...(19): siRNA sense strand
caagagcucuaccugaaag

SEQ ID NO: 28233 - RNA, 19 nt, Homo sapiens
  misc_RNA (1)...(19): siRNA sense strand
agaacucgcuguauacaau

SEQ ID NO: 28234 - RNA, 19 nt, Homo sapiens
  misc_RNA (1)...(19): siRNA sense strand
gaaaggcaaugagcugaag

SEQ ID NO: 28235 - RNA, 19 nt, Homo sapiens
  misc_RNA (1)...(19): siRNA sense strand
caacacaagaauccacuaa

SEQ ID NO: 28236 - RNA, 19 nt, Homo sapiens
  misc_RNA (1)...(19): siRNA sense strand
uccaagagcucuaccugaa

SEQ ID NO: 28237 - RNA, 19 nt, Homo sapiens
  misc_RNA (1)...(19): siRNA sense strand
cuaaggagcagaccacauu

SEQ ID NO: 28238 - RNA, 19 nt, Homo sapiens
  misc_RNA (1)...(19): siRNA sense strand
ggucccaccuccugccuuu

SEQ ID NO: 28239 - RNA, 19 nt, Homo sapiens
  misc_RNA (1)...(19): siRNA sense strand
ugacaauucagacaaguuu

SEQ ID NO: 28240 - RNA, 19 nt, Homo sapiens
  misc_RNA (1)...(19): siRNA sense strand
cuccagaccugccgaaaga

SEQ ID NO: 28241 - RNA, 19 nt, Homo sapiens
  misc_RNA (1)...(19): siRNA sense strand
caaguuucccgucuacaaa

SEQ ID NO: 28242 - RNA, 19 nt, Homo sapiens
  misc_RNA (1)...(19): siRNA sense strand
gacacagaccuauaugauu

SEQ ID NO: 28243 - RNA, 19 nt, Homo sapiens
  misc_RNA (1)...(19): siRNA sense strand
gaaaaugucuacguaugga

SEQ ID NO: 28244 - RNA, 19 nt, Homo sapiens
  misc_RNA (1)...(19): siRNA sense strand
acacaagaauccacuaagg

SEQ ID NO: 28245 - RNA, 19 nt, Homo sapiens
  misc_RNA (1)...(19): siRNA sense strand
ugacacagaccuauaugau

SEQ ID NO: 28246 - RNA, 19 nt, Homo sapiens
  misc_RNA (1)...(19): siRNA sense strand
agaccuauaugauuacuac

SEQ ID NO: 28247 - RNA, 19 nt, Homo sapiens
  misc_RNA (1)...(19): siRNA sense strand
ccucuaacguggccagugu

SEQ ID NO: 28248 - RNA, 19 nt, Homo sapiens
  misc_RNA (1)...(19): siRNA sense strand
gcaggacaaugcugaaaau

SEQ ID NO: 28249 - RNA, 19 nt, Homo sapiens
  misc_RNA (1)...(19): siRNA sense strand
ucugugaggucuccaaagu

SEQ ID NO: 28250 - RNA, 19 nt, Homo sapiens
  misc_RNA (1)...(19): siRNA sense strand
cuacaaauacccaggaaag

SEQ ID NO: 28251 - RNA, 19 nt, Homo sapiens
  misc_RNA (1)...(19): siRNA sense strand
cagaccacauucccaccua

SEQ ID NO: 28252 - RNA, 19 nt, Homo sapiens
  misc_RNA (1)...(19): siRNA sense strand
ugagugagaaccuccugua

SEQ ID NO: 28253 - RNA, 19 nt, Homo sapiens
  misc_RNA (1)...(19): siRNA sense strand
gugagaaccuccuguacac

SEQ ID NO: 28254 - RNA, 19 nt, Homo sapiens
  misc_RNA (1)...(19): siRNA sense strand
ccaagagcucuaccugaaa

SEQ ID NO: 28255 - RNA, 19 nt, Homo sapiens
  misc_RNA (1)...(19): siRNA sense strand
gaacuugaucagccaccaa

SEQ ID NO: 28256 - RNA, 19 nt, Homo sapiens
  misc_RNA (1)...(19): siRNA sense strand
ccguaucacucuuagaauc

SEQ ID NO: 28257 - RNA, 19 nt, Homo sapiens
  misc_RNA (1)...(19): siRNA sense strand
caagccugaucacuccaaa

SEQ ID NO: 28258 - RNA, 19 nt, Homo sapiens
  misc_RNA (1)...(19): siRNA sense strand
aaccaucccugaacuugau

SEQ ID NO: 28259 - RNA, 19 nt, Homo sapiens
  misc_RNA (1)...(19): siRNA sense strand
cgacacccuucuccuccaa

SEQ ID NO: 28260 - RNA, 19 nt, Homo sapiens
  misc_RNA (1)...(19): siRNA sense strand
ccaaauuucacacuucaca

SEQ ID NO: 28261 - RNA, 19 nt, Homo sapiens
  misc_RNA (1)...(19): siRNA sense strand
cuaacaacaacuugacuga

SEQ ID NO: 28262 - RNA, 19 nt, Homo sapiens
  misc_RNA (1)...(19): siRNA sense strand
gagcuggguugggcaugug

SEQ ID NO: 28263 - RNA, 19 nt, Homo sapiens
  misc_RNA (1)...(19): siRNA sense strand
gagaacucgcuguauacaa

SEQ ID NO: 28264 - RNA, 19 nt, Homo sapiens
  misc_RNA (1)...(19): siRNA sense strand
ccagccaccuagaagugaa

SEQ ID NO: 28265 - RNA, 19 nt, Homo sapiens
  misc_RNA (1)...(19): siRNA sense strand
cacaagaauccacuaagga

SEQ ID NO: 28266 - RNA, 19 nt, Homo sapiens
  misc_RNA (1)...(19): siRNA sense strand
caacugugagauccucuau

SEQ ID NO: 28267 - RNA, 19 nt, Homo sapiens
  misc_RNA (1)...(19): siRNA sense strand
gcaacugugagauccucua

SEQ ID NO: 28268 - RNA, 19 nt, Homo sapiens
  misc_RNA (1)...(19): siRNA sense strand
ggucuauucuacucauggu

SEQ ID NO: 28269 - RNA, 19 nt, Homo sapiens
  misc_RNA (1)...(19): siRNA sense strand
gauaaggugcgugccacaa

SEQ ID NO: 28270 - RNA, 19 nt, Homo sapiens
  misc_RNA (1)...(19): siRNA sense strand
gccaaaugcccuccuccuu

SEQ ID NO: 28271 - RNA, 19 nt, Homo sapiens
  misc_RNA (1)...(19): siRNA sense strand
accuagaagugaacuguga

SEQ ID NO: 28272 - RNA, 19 nt, Homo sapiens
  misc_RNA (1)...(19): siRNA sense strand
uuucacacuucacauggaa

SEQ ID NO: 28273 - RNA, 19 nt, Homo sapiens
  misc_RNA (1)...(19): siRNA sense strand
gugaugaaggugacacaga

SEQ ID NO: 28274 - RNA, 19 nt, Homo sapiens
  misc_RNA (1)...(19): siRNA sense strand
aguuucccgucuacaaaua

SEQ ID NO: 28275 - RNA, 19 nt, Homo sapiens
  misc_RNA (1)...(19): siRNA sense strand
acaaguuucccgucuacaa

SEQ ID NO: 28276 - RNA, 19 nt, Homo sapiens
  misc_RNA (1)...(19): siRNA sense strand
gaacugugacaagaggaau

SEQ ID NO: 28277 - RNA, 19 nt, Homo sapiens
  misc_RNA (1)...(19): siRNA sense strand
ccaagagaacucgcuguau

SEQ ID NO: 28278 - RNA, 19 nt, Homo sapiens
  misc_RNA (1)...(19): siRNA sense strand
ugaaaggcaaugagcugaa

SEQ ID NO: 28279 - RNA, 19 nt, Homo sapiens
  misc_RNA (1)...(19): siRNA sense strand
aaauuucacacuucacaug

SEQ ID NO: 28280 - RNA, 19 nt, Homo sapiens
  misc_RNA (1)...(19): siRNA sense strand
aaaccaucccugaacuuga

SEQ ID NO: 28281 - RNA, 19 nt, Homo sapiens
  misc_RNA (1)...(19): siRNA sense strand
uccaagagaacucgcugua

SEQ ID NO: 28282 - RNA, 19 nt, Homo sapiens
  misc_RNA (1)...(19): siRNA sense strand
cugagcacagugagcauua

SEQ ID NO: 28283 - RNA, 19 nt, Homo sapiens
  misc_RNA (1)...(19): siRNA sense strand
aaacccguaucacucuuag

SEQ ID NO: 28284 - RNA, 19 nt, Homo sapiens
  misc_RNA (1)...(19): siRNA sense strand
uaugauuacuacccagaag

SEQ ID NO: 28285 - RNA, 19 nt, Homo sapiens
  misc_RNA (1)...(19): siRNA sense strand
uggccagugugcaguguga

SEQ ID NO: 28286 - RNA, 19 nt, Homo sapiens
  misc_RNA (1)...(19): siRNA sense strand
ggccagccaccuagaagug

SEQ ID NO: 28287 - RNA, 19 nt, Homo sapiens
  misc_RNA (1)...(19): siRNA sense strand
acucuuagaauccaccaaa

SEQ ID NO: 28288 - RNA, 19 nt, Homo sapiens
  misc_RNA (1)...(19): siRNA sense strand
ggacacugagggcgauaag

SEQ ID NO: 28289 - RNA, 19 nt, Homo sapiens
  misc_RNA (1)...(19): siRNA sense strand
ccuggacucuggccaaggu

SEQ ID NO: 28290 - RNA, 19 nt, Homo sapiens
  misc_RNA (1)...(19): siRNA sense strand
gcuccagaaaugacccuuu

SEQ ID NO: 28291 - RNA, 19 nt, Homo sapiens
  misc_RNA (1)...(19): siRNA sense strand
acacugagggcgauaaggu

SEQ ID NO: 28292 - RNA, 19 nt, Homo sapiens
  misc_RNA (1)...(19): siRNA sense strand
ccacacccaagcuggagaa

SEQ ID NO: 28293 - RNA, 19 nt, Homo sapiens
  misc_RNA (1)...(19): siRNA sense strand
gugacacagaccuauauga

SEQ ID NO: 28294 - RNA, 19 nt, Homo sapiens
  misc_RNA (1)...(19): siRNA sense strand
gaagcucagucuggcuaac

SEQ ID NO: 28295 - RNA, 19 nt, Homo sapiens
  misc_RNA (1)...(19): siRNA sense strand
ccaccuagaagugaacugu

SEQ ID NO: 28296 - RNA, 19 nt, Homo sapiens
  misc_RNA (1)...(19): siRNA sense strand
acacccuucuccuccaaga

SEQ ID NO: 28297 - RNA, 19 nt, Homo sapiens
  misc_RNA (1)...(19): siRNA sense strand
ggaaauacaucaccaaauc

SEQ ID NO: 28298 - RNA, 19 nt, Homo sapiens
  misc_RNA (1)...(19): siRNA sense strand
ccaaugggcucaucaacuu

SEQ ID NO: 28299 - RNA, 19 nt, Homo sapiens
  misc_RNA (1)...(19): siRNA sense strand
ggaagggucugcaucacaa

SEQ ID NO: 28300 - RNA, 19 nt, Homo sapiens
  misc_RNA (1)...(19): siRNA sense strand
ucaccaagcucacaccauu

SEQ ID NO: 28301 - RNA, 19 nt, Homo sapiens
  misc_RNA (1)...(19): siRNA sense strand
caaccaaagugaaggaguu

SEQ ID NO: 28302 - RNA, 19 nt, Homo sapiens
  misc_RNA (1)...(19): siRNA sense strand
gaugauacccugugacuuc

SEQ ID NO: 28303 - RNA, 19 nt, Homo sapiens
  misc_RNA (1)...(19): siRNA sense strand
ucacgacgcuucuaccaau

SEQ ID NO: 28304 - RNA, 19 nt, Homo sapiens
  misc_RNA (1)...(19): siRNA sense strand
ugaaggaguuuggaauuga

SEQ ID NO: 28305 - RNA, 19 nt, Homo sapiens
  misc_RNA (1)...(19): siRNA sense strand
ggaaaucgcccaaccaacu

SEQ ID NO: 28306 - RNA, 19 nt, Homo sapiens
  misc_RNA (1)...(19): siRNA sense strand
cauaaggucuuugaaggaa

SEQ ID NO: 28307 - RNA, 19 nt, Homo sapiens
  misc_RNA (1)...(19): siRNA sense strand
cugaagcccuuaagccaua

SEQ ID NO: 28308 - RNA, 19 nt, Homo sapiens
  misc_RNA (1)...(19): siRNA sense strand
ccaaccaacucuauugugu

SEQ ID NO: 28309 - RNA, 19 nt, Homo sapiens
  misc_RNA (1)...(19): siRNA sense strand
aaauagagccugagcuuga

SEQ ID NO: 28310 - RNA, 19 nt, Homo sapiens
  misc_RNA (1)...(19): siRNA sense strand
ucaacaagguucuggacaa

SEQ ID NO: 28311 - RNA, 19 nt, Homo sapiens
  misc_RNA (1)...(19): siRNA sense strand
gagaggcugcugccacaua

SEQ ID NO: 28312 - RNA, 19 nt, Homo sapiens
  misc_RNA (1)...(19): siRNA sense strand
aaacacacccauccuggua

SEQ ID NO: 28313 - RNA, 19 nt, Homo sapiens
  misc_RNA (1)...(19): siRNA sense strand
gagccuuggucgccaugua

SEQ ID NO: 28314 - RNA, 19 nt, Homo sapiens
  misc_RNA (1)...(19): siRNA sense strand
gugaaggaguuuggaauug

SEQ ID NO: 28315 - RNA, 19 nt, Homo sapiens
  misc_RNA (1)...(19): siRNA sense strand
ccaagaugauacccuguga

SEQ ID NO: 28316 - RNA, 19 nt, Homo sapiens
  misc_RNA (1)...(19): siRNA sense strand
caacaagguucuggacaag

SEQ ID NO: 28317 - RNA, 19 nt, Homo sapiens
  misc_RNA (1)...(19): siRNA sense strand
uccagaagcugcagcaaug

SEQ ID NO: 28318 - RNA, 19 nt, Homo sapiens
  misc_RNA (1)...(19): siRNA sense strand
ucacggacgucaucaacau

SEQ ID NO: 28319 - RNA, 19 nt, Homo sapiens
  misc_RNA (1)...(19): siRNA sense strand
gauguucaauggugagaag

SEQ ID NO: 28320 - RNA, 19 nt, Homo sapiens
  misc_RNA (1)...(19): siRNA sense strand
uaaggucuuugaaggaaau

SEQ ID NO: 28321 - RNA, 19 nt, Homo sapiens
  misc_RNA (1)...(19): siRNA sense strand
gaaaauagagccugagcuu

SEQ ID NO: 28322 - RNA, 19 nt, Homo sapiens
  misc_RNA (1)...(19): siRNA sense strand
gcacuuuguugcccugucu

SEQ ID NO: 28323 - RNA, 19 nt, Homo sapiens
  misc_RNA (1)...(19): siRNA sense strand
agaggcugcugccacauaa

SEQ ID NO: 28324 - RNA, 19 nt, Homo sapiens
  misc_RNA (1)...(19): siRNA sense strand
gaaauacaucaccaaaucu

SEQ ID NO: 28325 - RNA, 19 nt, Homo sapiens
  misc_RNA (1)...(19): siRNA sense strand
gggagcggauguucaaugg

SEQ ID NO: 28326 - RNA, 19 nt, Homo sapiens
  misc_RNA (1)...(19): siRNA sense strand
ccaauggccagcaugcuuu

SEQ ID NO: 28327 - RNA, 19 nt, Homo sapiens
  misc_RNA (1)...(19): siRNA sense strand
uaacacaaccaaagugaag

SEQ ID NO: 28328 - RNA, 19 nt, Homo sapiens
  misc_RNA (1)...(19): siRNA sense strand
caacaaggaccgcuucaac

SEQ ID NO: 28329 - RNA, 19 nt, Homo sapiens
  misc_RNA (1)...(19): siRNA sense strand
acaagguucuggacaagau

SEQ ID NO: 28330 - RNA, 19 nt, Homo sapiens
  misc_RNA (1)...(19): siRNA sense strand
ccaaggcaccaagaugaua

SEQ ID NO: 28331 - RNA, 19 nt, Homo sapiens
  misc_RNA (1)...(19): siRNA sense strand
caccaaggcaccaagauga

SEQ ID NO: 28332 - RNA, 19 nt, Homo sapiens
  misc_RNA (1)...(19): siRNA sense strand
gaaggaguuuggaauugac

SEQ ID NO: 28333 - RNA, 19 nt, Homo sapiens
  misc_RNA (1)...(19): siRNA sense strand
gaacucacauugccaaaac

SEQ ID NO: 28334 - RNA, 19 nt, Homo sapiens
  misc_RNA (1)...(19): siRNA sense strand
gugagaagaucaacuacac

SEQ ID NO: 28335 - RNA, 19 nt, Homo sapiens
  misc_RNA (1)...(19): siRNA sense strand
ccacauaaggucuuugaag

SEQ ID NO: 28336 - RNA, 19 nt, Homo sapiens
  misc_RNA (1)...(19): siRNA sense strand
cuggguaucugguacauca

SEQ ID NO: 28337 - RNA, 19 nt, Homo sapiens
  misc_RNA (1)...(19): siRNA sense strand
aaccaacucuauuguguuc

SEQ ID NO: 28338 - RNA, 19 nt, Homo sapiens
  misc_RNA (1)...(19): siRNA sense strand
gugcucaagugaccucuca

SEQ ID NO: 28339 - RNA, 19 nt, Homo sapiens
  misc_RNA (1)...(19): siRNA sense strand
gcucacaccauucaugcuu

SEQ ID NO: 28340 - RNA, 19 nt, Homo sapiens
  misc_RNA (1)...(19): siRNA sense strand
caggagaccaucacgaaug

SEQ ID NO: 28341 - RNA, 19 nt, Homo sapiens
  misc_RNA (1)...(19): siRNA sense strand
ggcaucaucugggacauca

SEQ ID NO: 28342 - RNA, 19 nt, Homo sapiens
  misc_RNA (1)...(19): siRNA sense strand
ugccagaggucaacaaggu

SEQ ID NO: 28343 - RNA, 19 nt, Homo sapiens
  misc_RNA (1)...(19): siRNA sense strand
gcucaucaacuucaucaag

SEQ ID NO: 28344 - RNA, 19 nt, Homo sapiens
  misc_RNA (1)...(19): siRNA sense strand
caaccaacucuauuguguu

SEQ ID NO: 28345 - RNA, 19 nt, Homo sapiens
  misc_RNA (1)...(19): siRNA sense strand
gaaggaaaucgcccaacca

SEQ ID NO: 28346 - RNA, 19 nt, Homo sapiens
  misc_RNA (1)...(19): siRNA sense strand
ggaguccaaugggaaauac

SEQ ID NO: 28347 - RNA, 19 nt, Homo sapiens
  misc_RNA (1)...(19): siRNA sense strand
gggaaauacaucaccaaau

SEQ ID NO: 28348 - RNA, 19 nt, Homo sapiens
  misc_RNA (1)...(19): siRNA sense strand
gaaaucgcccaaccaacuc

SEQ ID NO: 28349 - RNA, 19 nt, Homo sapiens
  misc_RNA (1)...(19): siRNA sense strand
ccucuucgaugccaacaag

SEQ ID NO: 28350 - RNA, 19 nt, Homo sapiens
  misc_RNA (1)...(19): siRNA sense strand
acacacccauccugguaga

SEQ ID NO: 28351 - RNA, 19 nt, Homo sapiens
  misc_RNA (1)...(19): siRNA sense strand
acgccaugcugcccuauga

SEQ ID NO: 28352 - RNA, 19 nt, Homo sapiens
  misc_RNA (1)...(19): siRNA sense strand
gauggcagugcucaaguga

SEQ ID NO: 28353 - RNA, 19 nt, Homo sapiens
  misc_RNA (1)...(19): siRNA sense strand
uguaugagcacaagaucuu

SEQ ID NO: 28354 - RNA, 19 nt, Homo sapiens
  misc_RNA (1)...(19): siRNA sense strand
gaccaucacggacgucauc

SEQ ID NO: 28355 - RNA, 19 nt, Homo sapiens
  misc_RNA (1)...(19): siRNA sense strand
ccaccaaggcaccaagaug

SEQ ID NO: 28356 - RNA, 19 nt, Homo sapiens
  misc_RNA (1)...(19): siRNA sense strand
gcacguggguuuugacaac

SEQ ID NO: 28357 - RNA, 19 nt, Homo sapiens
  misc_RNA (1)...(19): siRNA sense strand
uuguugcccugucuacuaa

SEQ ID NO: 28358 - RNA, 19 nt, Homo sapiens
  misc_RNA (1)...(19): siRNA sense strand
ucugguacaucaacugcuu

SEQ ID NO: 28359 - RNA, 19 nt, Homo sapiens
  misc_RNA (1)...(19): siRNA sense strand
caagcucacaccauucaug

SEQ ID NO: 28360 - RNA, 19 nt, Homo sapiens
  misc_RNA (1)...(19): siRNA sense strand
guucaauggugagaagauc

SEQ ID NO: 28361 - RNA, 19 nt, Homo sapiens
  misc_RNA (1)...(19): siRNA sense strand
ccagacagaggcccugaug

SEQ ID NO: 28362 - RNA, 19 nt, Homo sapiens
  misc_RNA (1)...(19): siRNA sense strand
cuacuaacacaaccaaagu

SEQ ID NO: 28363 - RNA, 19 nt, Homo sapiens
  misc_RNA (1)...(19): siRNA sense strand
ugauggcagugcucaagug

SEQ ID NO: 28364 - RNA, 19 nt, Homo sapiens
  misc_RNA (1)...(19): siRNA sense strand
agacagaggcccugaugag

SEQ ID NO: 28365 - RNA, 19 nt, Homo sapiens
  misc_RNA (1)...(19): siRNA sense strand
gcacaagaucuucguucag

SEQ ID NO: 28366 - RNA, 19 nt, Homo sapiens
  misc_RNA (1)...(19): siRNA sense strand
ggccaucggacucuccauu

SEQ ID NO: 28367 - RNA, 19 nt, Homo sapiens
  misc_RNA (1)...(19): siRNA sense strand
ucugggacaucaacagcuu

SEQ ID NO: 28368 - RNA, 19 nt, Homo sapiens
  misc_RNA (1)...(19): siRNA sense strand
ccgcuuugcugcguacuuc

SEQ ID NO: 28369 - RNA, 19 nt, Homo sapiens
  misc_RNA (1)...(19): siRNA sense strand
cgacgccccuggagaagaa

SEQ ID NO: 28370 - RNA, 19 nt, Homo sapiens
  misc_RNA (1)...(19): siRNA sense strand
gggcucaucaacuucauca

SEQ ID NO: 28371 - RNA, 19 nt, Homo sapiens
  misc_RNA (1)...(19): siRNA sense strand
gccaucggacucuccauug

SEQ ID NO: 28372 - RNA, 19 nt, Homo sapiens
  misc_RNA (1)...(19): siRNA sense strand
gcugccacauaaggucuuu

SEQ ID NO: 28373 - RNA, 19 nt, Homo sapiens
  misc_RNA (1)...(19): siRNA sense strand
agaagcugcagcaauggua

SEQ ID NO: 28374 - RNA, 19 nt, Homo sapiens
  misc_RNA (1)...(19): siRNA sense strand
ucaacugcuuuggguguga

SEQ ID NO: 28375 - RNA, 19 nt, Homo sapiens
  misc_RNA (1)...(19): siRNA sense strand
cccaggagaccaucacgaa

SEQ ID NO: 28376 - RNA, 19 nt, Homo sapiens
  misc_RNA (1)...(19): siRNA sense strand
guagacggcaaggauguga

SEQ ID NO: 28377 - RNA, 19 nt, Homo sapiens
  misc_RNA (1)...(19): siRNA sense strand
ggugagaagaucaacuaca

SEQ ID NO: 28378 - RNA, 19 nt, Homo sapiens
  misc_RNA (1)...(19): siRNA sense strand
aaagugaaggaguuuggaa

SEQ ID NO: 28379 - RNA, 19 nt, Homo sapiens
  misc_RNA (1)...(19): siRNA sense strand
aauagagccugagcuugau

SEQ ID NO: 28380 - RNA, 19 nt, Homo sapiens
  misc_RNA (1)...(19): siRNA sense strand
cugcggaaccggucaaaca

SEQ ID NO: 28381 - RNA, 19 nt, Homo sapiens
  misc_RNA (1)...(19): siRNA sense strand
aaggaaaucgcccaaccaa

SEQ ID NO: 28382 - RNA, 19 nt, Homo sapiens
  misc_RNA (1)...(19): siRNA sense strand
auaaggucuuugaaggaaa

SEQ ID NO: 28383 - RNA, 19 nt, Homo sapiens
  misc_RNA (1)...(19): siRNA sense strand
acauaaggucuuugaagga

SEQ ID NO: 28384 - RNA, 19 nt, Homo sapiens
  misc_RNA (1)...(19): siRNA sense strand
cgucaucaacauuggcauu

SEQ ID NO: 28385 - RNA, 19 nt, Homo sapiens
  misc_RNA (1)...(19): siRNA sense strand
ucaucaacuucaucaagca

SEQ ID NO: 28386 - RNA, 19 nt, Homo sapiens
  misc_RNA (1)...(19): siRNA sense strand
ucaauggugagaagaucaa

SEQ ID NO: 28387 - RNA, 19 nt, Homo sapiens
  misc_RNA (1)...(19): siRNA sense strand
ccuccuggccaacuucuug

SEQ ID NO: 28388 - RNA, 19 nt, Homo sapiens
  misc_RNA (1)...(19): siRNA sense strand
gcccuuaagccauacucuu

SEQ ID NO: 28389 - RNA, 19 nt, Homo sapiens
  misc_RNA (1)...(19): siRNA sense strand
gugcugaccuccaaauacc

SEQ ID NO: 28390 - RNA, 19 nt, Homo sapiens
  misc_RNA (1)...(19): siRNA sense strand
agaccuacuucccgcacuu

SEQ ID NO: 28391 - RNA, 19 nt, Homo sapiens
  misc_RNA (1)...(19): siRNA sense strand
gaccuccaaauaccguuaa

SEQ ID NO: 28392 - RNA, 19 nt, Homo sapiens
  misc_RNA (1)...(19): siRNA sense strand
guuaagggccacggcaaga

SEQ ID NO: 28393 - RNA, 19 nt, Homo sapiens
  misc_RNA (1)...(19): siRNA sense strand
ugaccuccaaauaccguua

SEQ ID NO: 28394 - RNA, 19 nt, Homo sapiens
  misc_RNA (1)...(19): siRNA sense strand
caacuucaagcuccuaagc

SEQ ID NO: 28395 - RNA, 19 nt, Homo sapiens
  misc_RNA (1)...(19): siRNA sense strand
gaacguggaugaaguuggu

SEQ ID NO: 28396 - RNA, 19 nt, Homo sapiens
  misc_RNA (1)...(19): siRNA sense strand
gcaacgugcuggucugugu

SEQ ID NO: 28397 - RNA, 19 nt, Homo sapiens
  misc_RNA (1)...(19): siRNA sense strand
ggagaagucugccguuacu

SEQ ID NO: 28398 - RNA, 19 nt, Homo sapiens
  misc_RNA (1)...(19): siRNA sense strand
gcacguggauccugagaac

SEQ ID NO: 28399 - RNA, 19 nt, Homo sapiens
  misc_RNA (1)...(19): siRNA sense strand
gaaggcucauggcaagaaa

SEQ ID NO: 28400 - RNA, 19 nt, Homo sapiens
  misc_RNA (1)...(19): siRNA sense strand
ggacccagagguucuuuga

SEQ ID NO: 28401 - RNA, 19 nt, Homo sapiens
  misc_RNA (1)...(19): siRNA sense strand
gcaaggugaacguggauga

SEQ ID NO: 28402 - RNA, 19 nt, Homo sapiens
  misc_RNA (1)...(19): siRNA sense strand
cuaaugcccuggcccacaa

SEQ ID NO: 28403 - RNA, 19 nt, Homo sapiens
  misc_RNA (1)...(19): siRNA sense strand
gagguucuuugaguccuuu

SEQ ID NO: 28404 - RNA, 19 nt, Homo sapiens
  misc_RNA (1)...(19): siRNA sense strand
ggugaacguggaugaaguu

SEQ ID NO: 28405 - RNA, 19 nt, Homo sapiens
  misc_RNA (1)...(19): siRNA sense strand
gggcaacccuaaggugaag

SEQ ID NO: 28406 - RNA, 19 nt, Homo sapiens
  misc_RNA (1)...(19): siRNA sense strand
acccagagguucuuugagu

SEQ ID NO: 28407 - RNA, 19 nt, Homo sapiens
  misc_RNA (1)...(19): siRNA sense strand
gaucuguccacuccugaug

SEQ ID NO: 28408 - RNA, 19 nt, Homo sapiens
  misc_RNA (1)...(19): siRNA sense strand
ugaaggcucauggcaagaa

SEQ ID NO: 28409 - RNA, 19 nt, Homo sapiens
  misc_RNA (1)...(19): siRNA sense strand
ucugugugcuggcccauca

SEQ ID NO: 28410 - RNA, 19 nt, Homo sapiens
  misc_RNA (1)...(19): siRNA sense strand
ugugcuggcccaucacuuu

SEQ ID NO: 28411 - RNA, 19 nt, Homo sapiens
  misc_RNA (1)...(19): siRNA sense strand
caaggugaacguggaugaa

SEQ ID NO: 28412 - RNA, 19 nt, Homo sapiens
  misc_RNA (1)...(19): siRNA sense strand
gcucggugccuuuagugau

SEQ ID NO: 28413 - RNA, 19 nt, Homo sapiens
  misc_RNA (1)...(19): siRNA sense strand
ggcccacaaguaucacuaa

SEQ ID NO: 28414 - RNA, 19 nt, Homo sapiens
  misc_RNA (1)...(19): siRNA sense strand
ggagaagacugcugucaau

SEQ ID NO: 28415 - RNA, 19 nt, Homo sapiens
  misc_RNA (1)...(19): siRNA sense strand
gcaaugugcuggugugugu

SEQ ID NO: 28416 - RNA, 19 nt, Homo sapiens
  misc_RNA (1)...(19): siRNA sense strand
gaacguggaugcaguuggu

SEQ ID NO: 28417 - RNA, 19 nt, Homo sapiens
  misc_RNA (1)...(19): siRNA sense strand
gaucuguccucuccugaug

SEQ ID NO: 28418 - RNA, 19 nt, Homo sapiens
  misc_RNA (1)...(19): siRNA sense strand
gcacguggauccugagaac

SEQ ID NO: 28419 - RNA, 19 nt, Homo sapiens
  misc_RNA (1)...(19): siRNA sense strand
cuaggugccuuuagugaug

SEQ ID NO: 28420 - RNA, 19 nt, Homo sapiens
  misc_RNA (1)...(19): siRNA sense strand
ggacccagagguucuuuga

SEQ ID NO: 28421 - RNA, 19 nt, Homo sapiens
  misc_RNA (1)...(19): siRNA sense strand
cuaaugcccuggcucacaa

SEQ ID NO: 28422 - RNA, 19 nt, Homo sapiens
  misc_RNA (1)...(19): siRNA sense strand
gagguucuuugaguccuuu

SEQ ID NO: 28423 - RNA, 19 nt, Homo sapiens
  misc_RNA (1)...(19): siRNA sense strand
ggugcuaggugccuuuagu

SEQ ID NO: 28424 - RNA, 19 nt, Homo sapiens
  misc_RNA (1)...(19): siRNA sense strand
ggaauucaccccacaaaug

SEQ ID NO: 28425 - RNA, 19 nt, Homo sapiens
  misc_RNA (1)...(19): siRNA sense strand
gaaggcucauggcaagaag

SEQ ID NO: 28426 - RNA, 19 nt, Homo sapiens
  misc_RNA (1)...(19): siRNA sense strand
ccgcaacuuuggcaaggaa

SEQ ID NO: 28427 - RNA, 19 nt, Homo sapiens
  misc_RNA (1)...(19): siRNA sense strand
acccagagguucuuugagu

SEQ ID NO: 28428 - RNA, 19 nt, Homo sapiens
  misc_RNA (1)...(19): siRNA sense strand
gggcaacccuaaggugaag

SEQ ID NO: 28429 - RNA, 19 nt, Homo sapiens
  misc_RNA (1)...(19): siRNA sense strand
gcaacuuuggcaaggaauu

SEQ ID NO: 28430 - RNA, 19 nt, Homo sapiens
  misc_RNA (1)...(19): siRNA sense strand
gagaagacugcugucaaug

SEQ ID NO: 28431 - RNA, 19 nt, Homo sapiens
  misc_RNA (1)...(19): siRNA sense strand
caacuuuggcaaggaauuc

SEQ ID NO: 28432 - RNA, 19 nt, Homo sapiens
  misc_RNA (1)...(19): siRNA sense strand
ugaaggcucauggcaagaa

SEQ ID NO: 28433 - RNA, 19 nt, Homo sapiens
  misc_RNA (1)...(19): siRNA sense strand
gcuaaugcccuggcucaca

SEQ ID NO: 28434 - RNA, 19 nt, Homo sapiens
  misc_RNA (1)...(19): siRNA sense strand
gaggagaagacugcuguca

SEQ ID NO: 28435 - RNA, 19 nt, Homo sapiens
  misc_RNA (1)...(19): siRNA sense strand
gcuaggugccuuuagugau

SEQ ID NO: 28436 - RNA, 19 nt, Homo sapiens
  misc_RNA (1)...(19): siRNA sense strand
gggcaaagugaacguggau

SEQ ID NO: 28437 - RNA, 19 nt, Homo sapiens
  misc_RNA (1)...(19): siRNA sense strand
ccagauagcugacuucuca

SEQ ID NO: 28438 - RNA, 19 nt, Homo sapiens
  misc_RNA (1)...(19): siRNA sense strand
aaacagaacucgagaagug

SEQ ID NO: 28439 - RNA, 19 nt, Homo sapiens
  misc_RNA (1)...(19): siRNA sense strand
gagaagaacuacaaucuag

SEQ ID NO: 28440 - RNA, 19 nt, Homo sapiens
  misc_RNA (1)...(19): siRNA sense strand
gauccugggugaauaaauu

SEQ ID NO: 28441 - RNA, 19 nt, Homo sapiens
  misc_RNA (1)...(19): siRNA sense strand
gaacaagugcacucgauuu

SEQ ID NO: 28442 - RNA, 19 nt, Homo sapiens
  misc_RNA (1)...(19): siRNA sense strand
gaaaucacgaccauucaua

SEQ ID NO: 28443 - RNA, 19 nt, Homo sapiens
  misc_RNA (1)...(19): siRNA sense strand
ggagaagaacuacaaucua

SEQ ID NO: 28444 - RNA, 19 nt, Homo sapiens
  misc_RNA (1)...(19): siRNA sense strand
caacauggcaggcaucuca

SEQ ID NO: 28445 - RNA, 19 nt, Homo sapiens
  misc_RNA (1)...(19): siRNA sense strand
aagaugcucuggagaauau

SEQ ID NO: 28446 - RNA, 19 nt, Homo sapiens
  misc_RNA (1)...(19): siRNA sense strand
ggaucaggaugcuguuuga

SEQ ID NO: 28447 - RNA, 19 nt, Homo sapiens
  misc_RNA (1)...(19): siRNA sense strand
gcaggcaucucagaccaaa

SEQ ID NO: 28448 - RNA, 19 nt, Homo sapiens
  misc_RNA (1)...(19): siRNA sense strand
gggaacauccuccagcuuu

SEQ ID NO: 28449 - RNA, 19 nt, Homo sapiens
  misc_RNA (1)...(19): siRNA sense strand
ucaaugaccuuuauaucca

SEQ ID NO: 28450 - RNA, 19 nt, Homo sapiens
  misc_RNA (1)...(19): siRNA sense strand
ggucaacacuuucgauaac

SEQ ID NO: 28451 - RNA, 19 nt, Homo sapiens
  misc_RNA (1)...(19): siRNA sense strand
uggagaagauauucaguga

SEQ ID NO: 28452 - RNA, 19 nt, Homo sapiens
  misc_RNA (1)...(19): siRNA sense strand
cauaaucucuuccguaagc

SEQ ID NO: 28453 - RNA, 19 nt, Homo sapiens
  misc_RNA (1)...(19): siRNA sense strand
caagaugucugggaugaag

SEQ ID NO: 28454 - RNA, 19 nt, Homo sapiens
  misc_RNA (1)...(19): siRNA sense strand
gaagggagagacccaugaa

SEQ ID NO: 28455 - RNA, 19 nt, Homo sapiens
  misc_RNA (1)...(19): siRNA sense strand
ucacgaccauucauaaucu

SEQ ID NO: 28456 - RNA, 19 nt, Homo sapiens
  misc_RNA (1)...(19): siRNA sense strand
guaguuaagguuuccauga

SEQ ID NO: 28457 - RNA, 19 nt, Homo sapiens
  misc_RNA (1)...(19): siRNA sense strand
caacugcaucuacuucaaa

SEQ ID NO: 28458 - RNA, 19 nt, Homo sapiens
  misc_RNA (1)...(19): siRNA sense strand
gagaauauagacccugcua

SEQ ID NO: 28459 - RNA, 19 nt, Homo sapiens
  misc_RNA (1)...(19): siRNA sense strand
uucauaaucucuuccguaa

SEQ ID NO: 28460 - RNA, 19 nt, Homo sapiens
  misc_RNA (1)...(19): siRNA sense strand
aauucaagcuggagaagaa

SEQ ID NO: 28461 - RNA, 19 nt, Homo sapiens
  misc_RNA (1)...(19): siRNA sense strand
cacaagaugucugggauga

SEQ ID NO: 28462 - RNA, 19 nt, Homo sapiens
  misc_RNA (1)...(19): siRNA sense strand
aaaggauccugggugaaua

SEQ ID NO: 28463 - RNA, 19 nt, Homo sapiens
  misc_RNA (1)...(19): siRNA sense strand
caaaggauccugggugaau

SEQ ID NO: 28464 - RNA, 19 nt, Homo sapiens
  misc_RNA (1)...(19): siRNA sense strand
gaacuuccucgcagcaaau

SEQ ID NO: 28465 - RNA, 19 nt, Homo sapiens
  misc_RNA (1)...(19): siRNA sense strand
ucaggaugcuguuugacaa

SEQ ID NO: 28466 - RNA, 19 nt, Homo sapiens
  misc_RNA (1)...(19): siRNA sense strand
agugggagcaguuaaauaa

SEQ ID NO: 28467 - RNA, 19 nt, Homo sapiens
  misc_RNA (1)...(19): siRNA sense strand
gagagguaguuaagguuuc

SEQ ID NO: 28468 - RNA, 19 nt, Homo sapiens
  misc_RNA (1)...(19): siRNA sense strand
agagagagguaguuaaggu

SEQ ID NO: 28469 - RNA, 19 nt, Homo sapiens
  misc_RNA (1)...(19): siRNA sense strand
gacccugccuucauaucaa

SEQ ID NO: 28470 - RNA, 19 nt, Homo sapiens
  misc_RNA (1)...(19): siRNA sense strand
gauccagcgucuuaacauc

SEQ ID NO: 28471 - RNA, 19 nt, Homo sapiens
  misc_RNA (1)...(19): siRNA sense strand
ccaagggccucauaaaaga

SEQ ID NO: 28472 - RNA, 19 nt, Homo sapiens
  misc_RNA (1)...(19): siRNA sense strand
gaccauucauaaucucuuc

SEQ ID NO: 28473 - RNA, 19 nt, Homo sapiens
  misc_RNA (1)...(19): siRNA sense strand
gggagagacccaugaacaa

SEQ ID NO: 28474 - RNA, 19 nt, Homo sapiens
  misc_RNA (1)...(19): siRNA sense strand
ccaacaaccacaucaugaa

SEQ ID NO: 28475 - RNA, 19 nt, Homo sapiens
  misc_RNA (1)...(19): siRNA sense strand
cucagacccugccuucaua

SEQ ID NO: 28476 - RNA, 19 nt, Homo sapiens
  misc_RNA (1)...(19): siRNA sense strand
uaugaaaucacgaccauuc

SEQ ID NO: 28477 - RNA, 19 nt, Homo sapiens
  misc_RNA (1)...(19): siRNA sense strand
ccaucgaccuguucaagca

SEQ ID NO: 28478 - RNA, 19 nt, Homo sapiens
  misc_RNA (1)...(19): siRNA sense strand
uaguuaagguuuccaugau

SEQ ID NO: 28479 - RNA, 19 nt, Homo sapiens
  misc_RNA (1)...(19): siRNA sense strand
ucaacugcaucuacuucaa

SEQ ID NO: 28480 - RNA, 19 nt, Homo sapiens
  misc_RNA (1)...(19): siRNA sense strand
ucaccaagggccucauaaa

SEQ ID NO: 28481 - RNA, 19 nt, Homo sapiens
  misc_RNA (1)...(19): siRNA sense strand
ggaacauccuccagcuuuu

SEQ ID NO: 28482 - RNA, 19 nt, Homo sapiens
  misc_RNA (1)...(19): siRNA sense strand
gagagagguaguuaagguu

SEQ ID NO: 28483 - RNA, 19 nt, Homo sapiens
  misc_RNA (1)...(19): siRNA sense strand
caacaaccacaucaugaag

SEQ ID NO: 28484 - RNA, 19 nt, Homo sapiens
  misc_RNA (1)...(19): siRNA sense strand
aaaucacgaccauucauaa

SEQ ID NO: 28485 - RNA, 19 nt, Homo sapiens
  misc_RNA (1)...(19): siRNA sense strand
ggagagacccaugaacaag

SEQ ID NO: 28486 - RNA, 19 nt, Homo sapiens
  misc_RNA (1)...(19): siRNA sense strand
caggucaacacuuucgaua

SEQ ID NO: 28487 - RNA, 19 nt, Homo sapiens
  misc_RNA (1)...(19): siRNA sense strand
caguggaaaugacacacaa

SEQ ID NO: 28488 - RNA, 19 nt, Homo sapiens
  misc_RNA (1)...(19): siRNA sense strand
gcucaccaagggccucaua

SEQ ID NO: 28489 - RNA, 19 nt, Homo sapiens
  misc_RNA (1)...(19): siRNA sense strand
cagaagcaguuuccaaucc

SEQ ID NO: 28490 - RNA, 19 nt, Homo sapiens
  misc_RNA (1)...(19): siRNA sense strand
cauagcacccguuggcauu

SEQ ID NO: 28491 - RNA, 19 nt, Homo sapiens
  misc_RNA (1)...(19): siRNA sense strand
cgauggguaugauuuccuu

SEQ ID NO: 28492 - RNA, 19 nt, Homo sapiens
  misc_RNA (1)...(19): siRNA sense strand
cuacccagaugaugauucu

SEQ ID NO: 28493 - RNA, 19 nt, Homo sapiens
  misc_RNA (1)...(19): siRNA sense strand
gagagacccaugaacaagu

SEQ ID NO: 28494 - RNA, 19 nt, Homo sapiens
  misc_RNA (1)...(19): siRNA sense strand
agagacccaugaacaagug

SEQ ID NO: 28495 - RNA, 19 nt, Homo sapiens
  misc_RNA (1)...(19): siRNA sense strand
ugagagagagguaguuaag

SEQ ID NO: 28496 - RNA, 19 nt, Homo sapiens
  misc_RNA (1)...(19): siRNA sense strand
uaaaagaugcucuggagaa

SEQ ID NO: 28497 - RNA, 19 nt, Homo sapiens
  misc_RNA (1)...(19): siRNA sense strand
gccagcagcaaguaugaaa

SEQ ID NO: 28498 - RNA, 19 nt, Homo sapiens
  misc_RNA (1)...(19): siRNA sense strand
ugaagacgacgacuacauc

SEQ ID NO: 28499 - RNA, 19 nt, Homo sapiens
  misc_RNA (1)...(19): siRNA sense strand
aaagaugcucuggagaaua

SEQ ID NO: 28500 - RNA, 19 nt, Homo sapiens
  misc_RNA (1)...(19): siRNA sense strand
uggaucagcuagagaaagg

SEQ ID NO: 28501 - RNA, 19 nt, Homo sapiens
  misc_RNA (1)...(19): siRNA sense strand
gggaucaggaugcuguuug

SEQ ID NO: 28502 - RNA, 19 nt, Homo sapiens
  misc_RNA (1)...(19): siRNA sense strand
gaaauucaagcuggagaag

SEQ ID NO: 28503 - RNA, 19 nt, Homo sapiens
  misc_RNA (1)...(19): siRNA sense strand
aaugagagagagguaguua

SEQ ID NO: 28504 - RNA, 19 nt, Homo sapiens
  misc_RNA (1)...(19): siRNA sense strand
ugacacacaaccacaacuu

SEQ ID NO: 28505 - RNA, 19 nt, Homo sapiens
  misc_RNA (1)...(19): siRNA sense strand
ggaucgccaucgaccuguu

SEQ ID NO: 28506 - RNA, 19 nt, Homo sapiens
  misc_RNA (1)...(19): siRNA sense strand
gcacccaagccaccacugu

SEQ ID NO: 28507 - RNA, 19 nt, Homo sapiens
  misc_RNA (1)...(19): siRNA sense strand
cuacugcgauggguaugau

SEQ ID NO: 28508 - RNA, 19 nt, Homo sapiens
  misc_RNA (1)...(19): siRNA sense strand
agagagguaguuaagguuu

SEQ ID NO: 28509 - RNA, 19 nt, Homo sapiens
  misc_RNA (1)...(19): siRNA sense strand
cagcagcaaguaugaaauc

SEQ ID NO: 28510 - RNA, 19 nt, Homo sapiens
  misc_RNA (1)...(19): siRNA sense strand
ucaacacuuucgauaacau

SEQ ID NO: 28511 - RNA, 19 nt, Homo sapiens
  misc_RNA (1)...(19): siRNA sense strand
cgaaauucaagcuggagaa

SEQ ID NO: 28512 - RNA, 19 nt, Homo sapiens
  misc_RNA (1)...(19): siRNA sense strand
gaaugagagagagguaguu

SEQ ID NO: 28513 - RNA, 19 nt, Homo sapiens
  misc_RNA (1)...(19): siRNA sense strand
ggguaugauuuccuuaggu

SEQ ID NO: 28514 - RNA, 19 nt, Homo sapiens
  misc_RNA (1)...(19): siRNA sense strand
ccucgaagcgcaacugaca

SEQ ID NO: 28515 - RNA, 19 nt, Homo sapiens
  misc_RNA (1)...(19): siRNA sense strand
ggagcuggacugcgacauc

SEQ ID NO: 28516 - RNA, 19 nt, Homo sapiens
  misc_RNA (1)...(19): siRNA sense strand
ucagugaagacgacgacua

SEQ ID NO: 28517 - RNA, 19 nt, Homo sapiens
  misc_RNA (1)...(19): siRNA sense strand
ugaagggagagacccauga

SEQ ID NO: 28518 - RNA, 19 nt, Homo sapiens
  misc_RNA (1)...(19): siRNA sense strand
gcacucgauuuugcauuuu

SEQ ID NO: 28519 - RNA, 19 nt, Homo sapiens
  misc_RNA (1)...(19): siRNA sense strand
ugaacaagugcacucgauu

SEQ ID NO: 28520 - RNA, 19 nt, Homo sapiens
  misc_RNA (1)...(19): siRNA sense strand
ccagcugccugcucuucau

SEQ ID NO: 28521 - RNA, 19 nt, Homo sapiens
  misc_RNA (1)...(19): siRNA sense strand
acaaacagaacucgagaag

SEQ ID NO: 28522 - RNA, 19 nt, Homo sapiens
  misc_RNA (1)...(19): siRNA sense strand
gacaaacagaacucgagaa

SEQ ID NO: 28523 - RNA, 19 nt, Homo sapiens
  misc_RNA (1)...(19): siRNA sense strand
ggaccuggagaagauauuc

SEQ ID NO: 28524 - RNA, 19 nt, Homo sapiens
  misc_RNA (1)...(19): siRNA sense strand
ggauccagcgucuuaacau

SEQ ID NO: 28525 - RNA, 19 nt, Homo sapiens
  misc_RNA (1)...(19): siRNA sense strand
cagugggagcaguuaaaua

SEQ ID NO: 28526 - RNA, 19 nt, Homo sapiens
  misc_RNA (1)...(19): siRNA sense strand
agccggauccagcgucuua

SEQ ID NO: 28527 - RNA, 19 nt, Homo sapiens
  misc_RNA (1)...(19): siRNA sense strand
aguaugaaaucacgaccau

SEQ ID NO: 28528 - RNA, 19 nt, Homo sapiens
  misc_RNA (1)...(19): siRNA sense strand
gcugaaugagagagaggua

SEQ ID NO: 28529 - RNA, 19 nt, Homo sapiens
  misc_RNA (1)...(19): siRNA sense strand
cacuuucgauaacaucuuc

SEQ ID NO: 28530 - RNA, 19 nt, Homo sapiens
  misc_RNA (1)...(19): siRNA sense strand
guuaaugccagcagcaagu

SEQ ID NO: 28531 - RNA, 19 nt, Homo sapiens
  misc_RNA (1)...(19): siRNA sense strand
ucgauaacaucuucauagc

SEQ ID NO: 28532 - RNA, 19 nt, Homo sapiens
  misc_RNA (1)...(19): siRNA sense strand
ccagaagcaguuuccaauc

SEQ ID NO: 28533 - RNA, 19 nt, Homo sapiens
  misc_RNA (1)...(19): siRNA sense strand
uggagaagaacuacaaucu

SEQ ID NO: 28534 - RNA, 19 nt, Homo sapiens
  misc_RNA (1)...(19): siRNA sense strand
aaccugagcaugccucuuc

SEQ ID NO: 28535 - RNA, 19 nt, Homo sapiens
  misc_RNA (1)...(19): siRNA sense strand
gacacacaaccacaacuuc

SEQ ID NO: 28536 - RNA, 19 nt, Homo sapiens
  misc_RNA (1)...(19): siRNA sense strand
ucaagcuggagaagaacua

SEQ ID NO: 28537 - RNA, 19 nt, Homo sapiens
  misc_RNA (1)...(19): siRNA sense strand
ugaaggaggucauugaaua

SEQ ID NO: 28538 - RNA, 19 nt, Homo sapiens
  misc_RNA (1)...(19): siRNA sense strand
guaaccagcuuccuacuuu

SEQ ID NO: 28539 - RNA, 19 nt, Homo sapiens
  misc_RNA (1)...(19): siRNA sense strand
ggcaggagguguuugauaa

SEQ ID NO: 28540 - RNA, 19 nt, Homo sapiens
  misc_RNA (1)...(19): siRNA sense strand
ggagguguuugauaauaaa

SEQ ID NO: 28541 - RNA, 19 nt, Homo sapiens
  misc_RNA (1)...(19): siRNA sense strand
gaaaggcuguggagcaaca

SEQ ID NO: 28542 - RNA, 19 nt, Homo sapiens
  misc_RNA (1)...(19): siRNA sense strand
gcacauucuuuaucaacaa

SEQ ID NO: 28543 - RNA, 19 nt, Homo sapiens
  misc_RNA (1)...(19): siRNA sense strand
uggagucaguggagaauua

SEQ ID NO: 28544 - RNA, 19 nt, Homo sapiens
  misc_RNA (1)...(19): siRNA sense strand
gcugagggcacauucuuua

SEQ ID NO: 28545 - RNA, 19 nt, Homo sapiens
  misc_RNA (1)...(19): siRNA sense strand
ggcauacacuggagaagaa

SEQ ID NO: 28546 - RNA, 19 nt, Homo sapiens
  misc_RNA (1)...(19): siRNA sense strand
caggagguguuugauaaua

SEQ ID NO: 28547 - RNA, 19 nt, Homo sapiens
  misc_RNA (1)...(19): siRNA sense strand
ggauacaucucgccauuac

SEQ ID NO: 28548 - RNA, 19 nt, Homo sapiens
  misc_RNA (1)...(19): siRNA sense strand
gagggcacauucuuuauca

SEQ ID NO: 28549 - RNA, 19 nt, Homo sapiens
  misc_RNA (1)...(19): siRNA sense strand
uaaaugaugaccaguguuu

SEQ ID NO: 28550 - RNA, 19 nt, Homo sapiens
  misc_RNA (1)...(19): siRNA sense strand
ggagaagaauguguugguu

SEQ ID NO: 28551 - RNA, 19 nt, Homo sapiens
  misc_RNA (1)...(19): siRNA sense strand
caugagcacauucuucuua

SEQ ID NO: 28552 - RNA, 19 nt, Homo sapiens
  misc_RNA (1)...(19): siRNA sense strand
ggacaucgucucuucuuau

SEQ ID NO: 28553 - RNA, 19 nt, Homo sapiens
  misc_RNA (1)...(19): siRNA sense strand
ucaagcagcuggaguccuu

SEQ ID NO: 28554 - RNA, 19 nt, Homo sapiens
  misc_RNA (1)...(19): siRNA sense strand
gaggagaugagguugauuu

SEQ ID NO: 28555 - RNA, 19 nt, Homo sapiens
  misc_RNA (1)...(19): siRNA sense strand
agacugagauugaggacuu

SEQ ID NO: 28556 - RNA, 19 nt, Homo sapiens
  misc_RNA (1)...(19): siRNA sense strand
gagaauauguggacaacac

SEQ ID NO: 28557 - RNA, 19 nt, Homo sapiens
  misc_RNA (1)...(19): siRNA sense strand
uuccagagcucaugagaaa

SEQ ID NO: 28558 - RNA, 19 nt, Homo sapiens
  misc_RNA (1)...(19): siRNA sense strand
cauaugagagcuucacuuu

SEQ ID NO: 28559 - RNA, 19 nt, Homo sapiens
  misc_RNA (1)...(19): siRNA sense strand
gaccagcgcuacguccuuu

SEQ ID NO: 28560 - RNA, 19 nt, Homo sapiens
  misc_RNA (1)...(19): siRNA sense strand
gagcaggaguuugaacaga

SEQ ID NO: 28561 - RNA, 19 nt, Homo sapiens
  misc_RNA (1)...(19): siRNA sense strand
caacaagacugagauugag

SEQ ID NO: 28562 - RNA, 19 nt, Homo sapiens
  misc_RNA (1)...(19): siRNA sense strand
cauaaaugaugaccagugu

SEQ ID NO: 28563 - RNA, 19 nt, Homo sapiens
  misc_RNA (1)...(19): siRNA sense strand
gacaucgucucuucuuaug

SEQ ID NO: 28564 - RNA, 19 nt, Homo sapiens
  misc_RNA (1)...(19): siRNA sense strand
gagaugagguugauuucac

SEQ ID NO: 28565 - RNA, 19 nt, Homo sapiens
  misc_RNA (1)...(19): siRNA sense strand
ccagagauccaggacuuua

SEQ ID NO: 28566 - RNA, 19 nt, Homo sapiens
  misc_RNA (1)...(19): siRNA sense strand
caucugaccugacauuugc

SEQ ID NO: 28567 - RNA, 19 nt, Homo sapiens
  misc_RNA (1)...(19): siRNA sense strand
agaagaauguguugguugu

SEQ ID NO: 28568 - RNA, 19 nt, Homo sapiens
  misc_RNA (1)...(19): siRNA sense strand
gauccuuccuucccauaug

SEQ ID NO: 28569 - RNA, 19 nt, Homo sapiens
  misc_RNA (1)...(19): siRNA sense strand
ggauguaaccagcuuccua

SEQ ID NO: 28570 - RNA, 19 nt, Homo sapiens
  misc_RNA (1)...(19): siRNA sense strand
gaugucauggcguacaaua

SEQ ID NO: 28571 - RNA, 19 nt, Homo sapiens
  misc_RNA (1)...(19): siRNA sense strand
ccugguaccugaaccguau

SEQ ID NO: 28572 - RNA, 19 nt, Homo sapiens
  misc_RNA (1)...(19): siRNA sense strand
guugacaucugaccugaca

SEQ ID NO: 28573 - RNA, 19 nt, Homo sapiens
  misc_RNA (1)...(19): siRNA sense strand
gaauuauacccugaccaua

SEQ ID NO: 28574 - RNA, 19 nt, Homo sapiens
  misc_RNA (1)...(19): siRNA sense strand
gauuucaccugcuggaagu

SEQ ID NO: 28575 - RNA, 19 nt, Homo sapiens
  misc_RNA (1)...(19): siRNA sense strand
uaugagagcuucacuuuuc

SEQ ID NO: 28576 - RNA, 19 nt, Homo sapiens
  misc_RNA (1)...(19): siRNA sense strand
ugucauggcguacaauaaa

SEQ ID NO: 28577 - RNA, 19 nt, Homo sapiens
  misc_RNA (1)...(19): siRNA sense strand
uuagccagcuuguuuggaa

SEQ ID NO: 28578 - RNA, 19 nt, Homo sapiens
  misc_RNA (1)...(19): siRNA sense strand
caauaauaccuaugaguuc

SEQ ID NO: 28579 - RNA, 19 nt, Homo sapiens
  misc_RNA (1)...(19): siRNA sense strand
aggagguguuugauaauaa

SEQ ID NO: 28580 - RNA, 19 nt, Homo sapiens
  misc_RNA (1)...(19): siRNA sense strand
uaaccagcuuccuacuuug

SEQ ID NO: 28581 - RNA, 19 nt, Homo sapiens
  misc_RNA (1)...(19): siRNA sense strand
agaaggcucuggugauugg

SEQ ID NO: 28582 - RNA, 19 nt, Homo sapiens
  misc_RNA (1)...(19): siRNA sense strand
gaaggaggucauugaauac

SEQ ID NO: 28583 - RNA, 19 nt, Homo sapiens
  misc_RNA (1)...(19): siRNA sense strand
ccucagaacuuccaaaccu

SEQ ID NO: 28584 - RNA, 19 nt, Homo sapiens
  misc_RNA (1)...(19): siRNA sense strand
ccgaaaggcuguggagcaa

SEQ ID NO: 28585 - RNA, 19 nt, Homo sapiens
  misc_RNA (1)...(19): siRNA sense strand
gaccugacauuugccuaug

SEQ ID NO: 28586 - RNA, 19 nt, Homo sapiens
  misc_RNA (1)...(19): siRNA sense strand
gguugucucuguagucaca

SEQ ID NO: 28587 - RNA, 19 nt, Homo sapiens
  misc_RNA (1)...(19): siRNA sense strand
ugacaucugaccugacauu

SEQ ID NO: 28588 - RNA, 19 nt, Homo sapiens
  misc_RNA (1)...(19): siRNA sense strand
ggcccugacuggaaggauu

SEQ ID NO: 28589 - RNA, 19 nt, Homo sapiens
  misc_RNA (1)...(19): siRNA sense strand
uggacaucgucucuucuua

SEQ ID NO: 28590 - RNA, 19 nt, Homo sapiens
  misc_RNA (1)...(19): siRNA sense strand
guaaagauucagccagaca

SEQ ID NO: 28591 - RNA, 19 nt, Homo sapiens
  misc_RNA (1)...(19): siRNA sense strand
ccgaacaacuuucaauucc

SEQ ID NO: 28592 - RNA, 19 nt, Homo sapiens
  misc_RNA (1)...(19): siRNA sense strand
gcaggagguguuugauaau

SEQ ID NO: 28593 - RNA, 19 nt, Homo sapiens
  misc_RNA (1)...(19): siRNA sense strand
uuggauacaucucgccauu

SEQ ID NO: 28594 - RNA, 19 nt, Homo sapiens
  misc_RNA (1)...(19): siRNA sense strand
ugagcccucuggcaccuuu

SEQ ID NO: 28595 - RNA, 19 nt, Homo sapiens
  misc_RNA (1)...(19): siRNA sense strand
gaaguccaacccagagauc

SEQ ID NO: 28596 - RNA, 19 nt, Homo sapiens
  misc_RNA (1)...(19): siRNA sense strand
ucugugagcaggaguuuga

SEQ ID NO: 28597 - RNA, 19 nt, Homo sapiens
  misc_RNA (1)...(19): siRNA sense strand
ccugacauuugccuaugaa

SEQ ID NO: 28598 - RNA, 19 nt, Homo sapiens
  misc_RNA (1)...(19): siRNA sense strand
gggagaauauguggacaac

SEQ ID NO: 28599 - RNA, 19 nt, Homo sapiens
  misc_RNA (1)...(19): siRNA sense strand
acccagagauccaggacuu

SEQ ID NO: 28600 - RNA, 19 nt, Homo sapiens
  misc_RNA (1)...(19): siRNA sense strand
gcccuggccucagaacuuc

SEQ ID NO: 28601 - RNA, 19 nt, Homo sapiens
  misc_RNA (1)...(19): siRNA sense strand
ucagccagacacaaucaua

SEQ ID NO: 28602 - RNA, 19 nt, Homo sapiens
  misc_RNA (1)...(19): siRNA sense strand
cgaacaacuuucaauucca

SEQ ID NO: 28603 - RNA, 19 nt, Homo sapiens
  misc_RNA (1)...(19): siRNA sense strand
gagauccaggacuuuauga

SEQ ID NO: 28604 - RNA, 19 nt, Homo sapiens
  misc_RNA (1)...(19): siRNA sense strand
ggagaugagguugauuuca

SEQ ID NO: 28605 - RNA, 19 nt, Homo sapiens
  misc_RNA (1)...(19): siRNA sense strand
uguguugguugucucugua

SEQ ID NO: 28606 - RNA, 19 nt, Homo sapiens
  misc_RNA (1)...(19): siRNA sense strand
ggaaguccaacccagagau

SEQ ID NO: 28607 - RNA, 19 nt, Homo sapiens
  misc_RNA (1)...(19): siRNA sense strand
gucauggcguacaauaaau

SEQ ID NO: 28608 - RNA, 19 nt, Homo sapiens
  misc_RNA (1)...(19): siRNA sense strand
ggcacauucuuuaucaaca

SEQ ID NO: 28609 - RNA, 19 nt, Homo sapiens
  misc_RNA (1)...(19): siRNA sense strand
guagucacaccuggaugua

SEQ ID NO: 28610 - RNA, 19 nt, Homo sapiens
  misc_RNA (1)...(19): siRNA sense strand
uggcaggagguguuugaua

SEQ ID NO: 28611 - RNA, 19 nt, Homo sapiens
  misc_RNA (1)...(19): siRNA sense strand
gcgcuaucgugaccugcuu

SEQ ID NO: 28612 - RNA, 19 nt, Homo sapiens
  misc_RNA (1)...(19): siRNA sense strand
acacuuccgcugugaguug

SEQ ID NO: 28613 - RNA, 19 nt, Homo sapiens
  misc_RNA (1)...(19): siRNA sense strand
ccugaaccguauauccuau

SEQ ID NO: 28614 - RNA, 19 nt, Homo sapiens
  misc_RNA (1)...(19): siRNA sense strand
cagcuggaguccuucuaca

SEQ ID NO: 28615 - RNA, 19 nt, Homo sapiens
  misc_RNA (1)...(19): siRNA sense strand
ugagcacauucuucuuaga

SEQ ID NO: 28616 - RNA, 19 nt, Homo sapiens
  misc_RNA (1)...(19): siRNA sense strand
ggagucaguggagaauuau

SEQ ID NO: 28617 - RNA, 19 nt, Homo sapiens
  misc_RNA (1)...(19): siRNA sense strand
ccuaugaacguuugucaca

SEQ ID NO: 28618 - RNA, 19 nt, Homo sapiens
  misc_RNA (1)...(19): siRNA sense strand
gcccugacuggaaggauuu

SEQ ID NO: 28619 - RNA, 19 nt, Homo sapiens
  misc_RNA (1)...(19): siRNA sense strand
gcuggaguccuucuacauc

SEQ ID NO: 28620 - RNA, 19 nt, Homo sapiens
  misc_RNA (1)...(19): siRNA sense strand
aguguuuacuccucucuga

SEQ ID NO: 28621 - RNA, 19 nt, Homo sapiens
  misc_RNA (1)...(19): siRNA sense strand
cagcuuguuuggaaaucug

SEQ ID NO: 28622 - RNA, 19 nt, Homo sapiens
  misc_RNA (1)...(19): siRNA sense strand
uaugaacguuugucacacu

SEQ ID NO: 28623 - RNA, 19 nt, Homo sapiens
  misc_RNA (1)...(19): siRNA sense strand
gacauuugccuaugaacgu

SEQ ID NO: 28624 - RNA, 19 nt, Homo sapiens
  misc_RNA (1)...(19): siRNA sense strand
uccaggacuuuaugaggaa

SEQ ID NO: 28625 - RNA, 19 nt, Homo sapiens
  misc_RNA (1)...(19): siRNA sense strand
gauuacugacuccuugcua

SEQ ID NO: 28626 - RNA, 19 nt, Homo sapiens
  misc_RNA (1)...(19): siRNA sense strand
ccagagcucaugagaaagg

SEQ ID NO: 28627 - RNA, 19 nt, Homo sapiens
  misc_RNA (1)...(19): siRNA sense strand
gacugagauugaggacuuu

SEQ ID NO: 28628 - RNA, 19 nt, Homo sapiens
  misc_RNA (1)...(19): siRNA sense strand
uaucaacaagacugagauu

SEQ ID NO: 28629 - RNA, 19 nt, Homo sapiens
  misc_RNA (1)...(19): siRNA sense strand
ccuauggcccugacuggaa

SEQ ID NO: 28630 - RNA, 19 nt, Homo sapiens
  misc_RNA (1)...(19): siRNA sense strand
uggaggagaugagguugau

SEQ ID NO: 28631 - RNA, 19 nt, Homo sapiens
  misc_RNA (1)...(19): siRNA sense strand
uagccagcuuguuuggaaa

SEQ ID NO: 28632 - RNA, 19 nt, Homo sapiens
  misc_RNA (1)...(19): siRNA sense strand
guucaugagcacauucuuc

SEQ ID NO: 28633 - RNA, 19 nt, Homo sapiens
  misc_RNA (1)...(19): siRNA sense strand
ucauggcguacaauaaauu

SEQ ID NO: 28634 - RNA, 19 nt, Homo sapiens
  misc_RNA (1)...(19): siRNA sense strand
agaauuauacccugaccau

SEQ ID NO: 28635 - RNA, 19 nt, Homo sapiens
  misc_RNA (1)...(19): siRNA sense strand
aaaugaugaccaguguuua

SEQ ID NO: 28636 - RNA, 19 nt, Homo sapiens
  misc_RNA (1)...(19): siRNA sense strand
ugaccugacauuugccuau

SEQ ID NO: 28637 - RNA, 19 nt, Homo sapiens
  misc_RNA (1)...(19): siRNA sense strand
gagaugaaguggaauuuaa

SEQ ID NO: 28638 - RNA, 19 nt, Homo sapiens
  misc_RNA (1)...(19): siRNA sense strand
uaaccucacuccaagauua

SEQ ID NO: 28639 - RNA, 19 nt, Homo sapiens
  misc_RNA (1)...(19): siRNA sense strand
gauugaauaugccagauua

SEQ ID NO: 28640 - RNA, 19 nt, Homo sapiens
  misc_RNA (1)...(19): siRNA sense strand
gacauuaucugccaguuaa

SEQ ID NO: 28641 - RNA, 19 nt, Homo sapiens
  misc_RNA (1)...(19): siRNA sense strand
gcaucuggcuucccuguaa

SEQ ID NO: 28642 - RNA, 19 nt, Homo sapiens
  misc_RNA (1)...(19): siRNA sense strand
ccagaucaauucauucauu

SEQ ID NO: 28643 - RNA, 19 nt, Homo sapiens
  misc_RNA (1)...(19): siRNA sense strand
gggaggagaugaaguggaa

SEQ ID NO: 28644 - RNA, 19 nt, Homo sapiens
  misc_RNA (1)...(19): siRNA sense strand
acauacagcuuccuuacua

SEQ ID NO: 28645 - RNA, 19 nt, Homo sapiens
  misc_RNA (1)...(19): siRNA sense strand
ccaaagaugucagagauau

SEQ ID NO: 28646 - RNA, 19 nt, Homo sapiens
  misc_RNA (1)...(19): siRNA sense strand
ggacaagauuggaggaaau

SEQ ID NO: 28647 - RNA, 19 nt, Homo sapiens
  misc_RNA (1)...(19): siRNA sense strand
gaacuuucaccaucaauga

SEQ ID NO: 28648 - RNA, 19 nt, Homo sapiens
  misc_RNA (1)...(19): siRNA sense strand
gcacaauaguugaaguaug

SEQ ID NO: 28649 - RNA, 19 nt, Homo sapiens
  misc_RNA (1)...(19): siRNA sense strand
ccaguuaguuuaucaagau

SEQ ID NO: 28650 - RNA, 19 nt, Homo sapiens
  misc_RNA (1)...(19): siRNA sense strand
ucaugaaccugcugaauuc

SEQ ID NO: 28651 - RNA, 19 nt, Homo sapiens
  misc_RNA (1)...(19): siRNA sense strand
gaggaaauacuauaaagug

SEQ ID NO: 28652 - RNA, 19 nt, Homo sapiens
  misc_RNA (1)...(19): siRNA sense strand
ggauauuauugcaaccaua

SEQ ID NO: 28653 - RNA, 19 nt, Homo sapiens
  misc_RNA (1)...(19): siRNA sense strand
cagaugagucuuauacuuu

SEQ ID NO: 28654 - RNA, 19 nt, Homo sapiens
  misc_RNA (1)...(19): siRNA sense strand
ggagaugaaguggaauuua

SEQ ID NO: 28655 - RNA, 19 nt, Homo sapiens
  misc_RNA (1)...(19): siRNA sense strand
uggagaagcuugucuaugg

SEQ ID NO: 28656 - RNA, 19 nt, Homo sapiens
  misc_RNA (1)...(19): siRNA sense strand
ucagaugagucuuauacuu

SEQ ID NO: 28657 - RNA, 19 nt, Homo sapiens
  misc_RNA (1)...(19): siRNA sense strand
gcaacuaaccucacuccaa

SEQ ID NO: 28658 - RNA, 19 nt, Homo sapiens
  misc_RNA (1)...(19): siRNA sense strand
cacaauaguugaaguaugg

SEQ ID NO: 28659 - RNA, 19 nt, Homo sapiens
  misc_RNA (1)...(19): siRNA sense strand
ugaccagucuuucccauau

SEQ ID NO: 28660 - RNA, 19 nt, Homo sapiens
  misc_RNA (1)...(19): siRNA sense strand
ggaagcguuucgacgauau

SEQ ID NO: 28661 - RNA, 19 nt, Homo sapiens
  misc_RNA (1)...(19): siRNA sense strand
uauaaacccuacucugaau

SEQ ID NO: 28662 - RNA, 19 nt, Homo sapiens
  misc_RNA (1)...(19): siRNA sense strand
gauuagcuauggacaagau

SEQ ID NO: 28663 - RNA, 19 nt, Homo sapiens
  misc_RNA (1)...(19): siRNA sense strand
ggaugacgccuaugacaga

SEQ ID NO: 28664 - RNA, 19 nt, Homo sapiens
  misc_RNA (1)...(19): siRNA sense strand
ccuauaaacccuacucuga

SEQ ID NO: 28665 - RNA, 19 nt, Homo sapiens
  misc_RNA (1)...(19): siRNA sense strand
gauggucgaacguggaaua

SEQ ID NO: 28666 - RNA, 19 nt, Homo sapiens
  misc_RNA (1)...(19): siRNA sense strand
guucuucacuggcacauag

SEQ ID NO: 28667 - RNA, 19 nt, Homo sapiens
  misc_RNA (1)...(19): siRNA sense strand
guacuuagauuugauuagc

SEQ ID NO: 28668 - RNA, 19 nt, Homo sapiens
  misc_RNA (1)...(19): siRNA sense strand
caaucacccuucagucaga

SEQ ID NO: 28669 - RNA, 19 nt, Homo sapiens
  misc_RNA (1)...(19): siRNA sense strand
gaggaagcguuucgacgau

SEQ ID NO: 28670 - RNA, 19 nt, Homo sapiens
  misc_RNA (1)...(19): siRNA sense strand
gacaagauuggaggaaaua

SEQ ID NO: 28671 - RNA, 19 nt, Homo sapiens
  misc_RNA (1)...(19): siRNA sense strand
gaagcuauucuuugucuca

SEQ ID NO: 28672 - RNA, 19 nt, Homo sapiens
  misc_RNA (1)...(19): siRNA sense strand
cauaucagagcaucacuuu

SEQ ID NO: 28673 - RNA, 19 nt, Homo sapiens
  misc_RNA (1)...(19): siRNA sense strand
agaaauuagugagguguuu

SEQ ID NO: 28674 - RNA, 19 nt, Homo sapiens
  misc_RNA (1)...(19): siRNA sense strand
gcuauucuuugucucaugu

SEQ ID NO: 28675 - RNA, 19 nt, Homo sapiens
  misc_RNA (1)...(19): siRNA sense strand
caaaugauguccguauggu

SEQ ID NO: 28676 - RNA, 19 nt, Homo sapiens
  misc_RNA (1)...(19): siRNA sense strand
gcacagauuuuaagaaacu

SEQ ID NO: 28677 - RNA, 19 nt, Homo sapiens
  misc_RNA (1)...(19): siRNA sense strand
cagcuuccuuacuacauuu

SEQ ID NO: 28678 - RNA, 19 nt, Homo sapiens
  misc_RNA (1)...(19): siRNA sense strand
gaguuaagcaauaaaggaa

SEQ ID NO: 28679 - RNA, 19 nt, Homo sapiens
  misc_RNA (1)...(19): siRNA sense strand
gggcacaauaguugaagua

SEQ ID NO: 28680 - RNA, 19 nt, Homo sapiens
  misc_RNA (1)...(19): siRNA sense strand
gaaccaguggcuguccuua

SEQ ID NO: 28681 - RNA, 19 nt, Homo sapiens
  misc_RNA (1)...(19): siRNA sense strand
gauauuguaaccaugagaa

SEQ ID NO: 28682 - RNA, 19 nt, Homo sapiens
  misc_RNA (1)...(19): siRNA sense strand
uggaauagcugcacaaccu

SEQ ID NO: 28683 - RNA, 19 nt, Homo sapiens
  misc_RNA (1)...(19): siRNA sense strand
gauuggaggaaauacuaua

SEQ ID NO: 28684 - RNA, 19 nt, Homo sapiens
  misc_RNA (1)...(19): siRNA sense strand
aaaacaaguuggacucuuu

SEQ ID NO: 28685 - RNA, 19 nt, Homo sapiens
  misc_RNA (1)...(19): siRNA sense strand
gaggagaugaaguggaauu

SEQ ID NO: 28686 - RNA, 19 nt, Homo sapiens
  misc_RNA (1)...(19): siRNA sense strand
agauauggaugacgccuau

SEQ ID NO: 28687 - RNA, 19 nt, Homo sapiens
  misc_RNA (1)...(19): siRNA sense strand
caagauuucaugaggcaaa

SEQ ID NO: 28688 - RNA, 19 nt, Homo sapiens
  misc_RNA (1)...(19): siRNA sense strand
agagaccuuuagccaguua

SEQ ID NO: 28689 - RNA, 19 nt, Homo sapiens
  misc_RNA (1)...(19): siRNA sense strand
ggucgaacguggaauagcu

SEQ ID NO: 28690 - RNA, 19 nt, Homo sapiens
  misc_RNA (1)...(19): siRNA sense strand
ggaggaaauacuauaaagu

SEQ ID NO: 28691 - RNA, 19 nt, Homo sapiens
  misc_RNA (1)...(19): siRNA sense strand
caacauacagcuuccuuac

SEQ ID NO: 28692 - RNA, 19 nt, Homo sapiens
  misc_RNA (1)...(19): siRNA sense strand
agacauuaucugccaguua

SEQ ID NO: 28693 - RNA, 19 nt, Homo sapiens
  misc_RNA (1)...(19): siRNA sense strand
guugaaguauggaaagaca

SEQ ID NO: 28694 - RNA, 19 nt, Homo sapiens
  misc_RNA (1)...(19): siRNA sense strand
ggaaagacagcgcauaucc

SEQ ID NO: 28695 - RNA, 19 nt, Homo sapiens
  misc_RNA (1)...(19): siRNA sense strand
gcauuacgagguuuagaga

SEQ ID NO: 28696 - RNA, 19 nt, Homo sapiens
  misc_RNA (1)...(19): siRNA sense strand
gcuccuugguacuuagauu

SEQ ID NO: 28697 - RNA, 19 nt, Homo sapiens
  misc_RNA (1)...(19): siRNA sense strand
caacuucuugucucaauca

SEQ ID NO: 28698 - RNA, 19 nt, Homo sapiens
  misc_RNA (1)...(19): siRNA sense strand
gaucaauucauucauuugg

SEQ ID NO: 28699 - RNA, 19 nt, Homo sapiens
  misc_RNA (1)...(19): siRNA sense strand
auugauacauccagacauu

SEQ ID NO: 28700 - RNA, 19 nt, Homo sapiens
  misc_RNA (1)...(19): siRNA sense strand
gccaguuaguuuaucaaga

SEQ ID NO: 28701 - RNA, 19 nt, Homo sapiens
  misc_RNA (1)...(19): siRNA sense strand
cagaaacagaaacaacuuu

SEQ ID NO: 28702 - RNA, 19 nt, Homo sapiens
  misc_RNA (1)...(19): siRNA sense strand
guuuccagaucaauucauu

SEQ ID NO: 28703 - RNA, 19 nt, Homo sapiens
  misc_RNA (1)...(19): siRNA sense strand
cuauaaacccuacucugaa

SEQ ID NO: 28704 - RNA, 19 nt, Homo sapiens
  misc_RNA (1)...(19): siRNA sense strand
gcaacuucuugucucaauc

SEQ ID NO: 28705 - RNA, 19 nt, Homo sapiens
  misc_RNA (1)...(19): siRNA sense strand
aaguggaaccucuugauuu

SEQ ID NO: 28706 - RNA, 19 nt, Homo sapiens
  misc_RNA (1)...(19): siRNA sense strand
aaaguggaaccucuugauu

SEQ ID NO: 28707 - RNA, 19 nt, Homo sapiens
  misc_RNA (1)...(19): siRNA sense strand
uggaggaaauacuauaaag

SEQ ID NO: 28708 - RNA, 19 nt, Homo sapiens
  misc_RNA (1)...(19): siRNA sense strand
acagcuuccuuacuacauu

SEQ ID NO: 28709 - RNA, 19 nt, Homo sapiens
  misc_RNA (1)...(19): siRNA sense strand
cugcugaauuccaggcuaa

SEQ ID NO: 28710 - RNA, 19 nt, Homo sapiens
  misc_RNA (1)...(19): siRNA sense strand
uuuccugaguuaagcaaua

SEQ ID NO: 28711 - RNA, 19 nt, Homo sapiens
  misc_RNA (1)...(19): siRNA sense strand
uauugauucuccaagguuu

SEQ ID NO: 28712 - RNA, 19 nt, Homo sapiens
  misc_RNA (1)...(19): siRNA sense strand
ggaacuuucaccaucaaug

SEQ ID NO: 28713 - RNA, 19 nt, Homo sapiens
  misc_RNA (1)...(19): siRNA sense strand
ggaugcaacuaaccucacu

SEQ ID NO: 28714 - RNA, 19 nt, Homo sapiens
  misc_RNA (1)...(19): siRNA sense strand
guacucagaaacagaaaca

SEQ ID NO: 28715 - RNA, 19 nt, Homo sapiens
  misc_RNA (1)...(19): siRNA sense strand
uggcuucccuguaauccuu

SEQ ID NO: 28716 - RNA, 19 nt, Homo sapiens
  misc_RNA (1)...(19): siRNA sense strand
guauggugauugaauaugc

SEQ ID NO: 28717 - RNA, 19 nt, Homo sapiens
  misc_RNA (1)...(19): siRNA sense strand
cauaguugaugaccagucu

SEQ ID NO: 28718 - RNA, 19 nt, Homo sapiens
  misc_RNA (1)...(19): siRNA sense strand
gaauauguggaugcaacua

SEQ ID NO: 28719 - RNA, 19 nt, Homo sapiens
  misc_RNA (1)...(19): siRNA sense strand
gggagaauauguggaugca

SEQ ID NO: 28720 - RNA, 19 nt, Homo sapiens
  misc_RNA (1)...(19): siRNA sense strand
ucagcaacuucuugucuca

SEQ ID NO: 28721 - RNA, 19 nt, Homo sapiens
  misc_RNA (1)...(19): siRNA sense strand
aagauuggaggaaauacua

SEQ ID NO: 28722 - RNA, 19 nt, Homo sapiens
  misc_RNA (1)...(19): siRNA sense strand
uggcacagauuuuaagaaa

SEQ ID NO: 28723 - RNA, 19 nt, Homo sapiens
  misc_RNA (1)...(19): siRNA sense strand
uaugccagauuacgaggaa

SEQ ID NO: 28724 - RNA, 19 nt, Homo sapiens
  misc_RNA (1)...(19): siRNA sense strand
gggagcauuacgagguuua

SEQ ID NO: 28725 - RNA, 19 nt, Homo sapiens
  misc_RNA (1)...(19): siRNA sense strand
uuccaaagaugucagagau

SEQ ID NO: 28726 - RNA, 19 nt, Homo sapiens
  misc_RNA (1)...(19): siRNA sense strand
uaaaguggaaccucuugau

SEQ ID NO: 28727 - RNA, 19 nt, Homo sapiens
  misc_RNA (1)...(19): siRNA sense strand
cauaaacaagggauccauu

SEQ ID NO: 28728 - RNA, 19 nt, Homo sapiens
  misc_RNA (1)...(19): siRNA sense strand
uccguauggugauugaaua

SEQ ID NO: 28729 - RNA, 19 nt, Homo sapiens
  misc_RNA (1)...(19): siRNA sense strand
ugauacauccagacauuau

SEQ ID NO: 28730 - RNA, 19 nt, Homo sapiens
  misc_RNA (1)...(19): siRNA sense strand
uagcugcacaaccucuuua

SEQ ID NO: 28731 - RNA, 19 nt, Homo sapiens
  misc_RNA (1)...(19): siRNA sense strand
guuuauacaccaaaugaug

SEQ ID NO: 28732 - RNA, 19 nt, Homo sapiens
  misc_RNA (1)...(19): siRNA sense strand
ugaguuaagcaauaaagga

SEQ ID NO: 28733 - RNA, 19 nt, Homo sapiens
  misc_RNA (1)...(19): siRNA sense strand
cugacuccauguuacagua

SEQ ID NO: 28734 - RNA, 19 nt, Homo sapiens
  misc_RNA (1)...(19): siRNA sense strand
ucgacgauaucauggcuau

SEQ ID NO: 28735 - RNA, 19 nt, Homo sapiens
  misc_RNA (1)...(19): siRNA sense strand
ucagaaacagaaacaacuu

SEQ ID NO: 28736 - RNA, 19 nt, Homo sapiens
  misc_RNA (1)...(19): siRNA sense strand
aggaagcguuucgacgaua

SEQ ID NO: 28737 - RNA, 19 nt, Homo sapiens
  misc_RNA (1)...(19): siRNA sense strand
aagagaagcuggcuguaua

SEQ ID NO: 28738 - RNA, 19 nt, Homo sapiens
  misc_RNA (1)...(19): siRNA sense strand
gaagcuggcuguauaggau

SEQ ID NO: 28739 - RNA, 19 nt, Homo sapiens
  misc_RNA (1)...(19): siRNA sense strand
gacauaaagucuaacaaug

SEQ ID NO: 28740 - RNA, 19 nt, Homo sapiens
  misc_RNA (1)...(19): siRNA sense strand
guuacacggucauuaauaa

SEQ ID NO: 28741 - RNA, 19 nt, Homo sapiens
  misc_RNA (1)...(19): siRNA sense strand
guguggagcuggagacaua

SEQ ID NO: 28742 - RNA, 19 nt, Homo sapiens
  misc_RNA (1)...(19): siRNA sense strand
guaugaggaucgccaagua

SEQ ID NO: 28743 - RNA, 19 nt, Homo sapiens
  misc_RNA (1)...(19): siRNA sense strand
gaugagaacuaccacaagu

SEQ ID NO: 28744 - RNA, 19 nt, Homo sapiens
  misc_RNA (1)...(19): siRNA sense strand
aguacaaccugaagaauuu

SEQ ID NO: 28745 - RNA, 19 nt, Homo sapiens
  misc_RNA (1)...(19): siRNA sense strand
ggucuaugguguccacuuu

SEQ ID NO: 28746 - RNA, 19 nt, Homo sapiens
  misc_RNA (1)...(19): siRNA sense strand
gauccucgcugcccagguu

SEQ ID NO: 28747 - RNA, 19 nt, Homo sapiens
  misc_RNA (1)...(19): siRNA sense strand
ccacggagcaccaauaaga

SEQ ID NO: 28748 - RNA, 19 nt, Homo sapiens
  misc_RNA (1)...(19): siRNA sense strand
cagcauagaugucuuugag

SEQ ID NO: 28749 - RNA, 19 nt, Homo sapiens
  misc_RNA (1)...(19): siRNA sense strand
ggaaugaguguucuucaga

SEQ ID NO: 28750 - RNA, 19 nt, Homo sapiens
  misc_RNA (1)...(19): siRNA sense strand
ggaauuauacacccuacaa

SEQ ID NO: 28751 - RNA, 19 nt, Homo sapiens
  misc_RNA (1)...(19): siRNA sense strand
ugaguuaccugaccuugga

SEQ ID NO: 28752 - RNA, 19 nt, Homo sapiens
  misc_RNA (1)...(19): siRNA sense strand
gaguggccauugcugauuu

SEQ ID NO: 28753 - RNA, 19 nt, Homo sapiens
  misc_RNA (1)...(19): siRNA sense strand
gaugcugacugcuuugaga

SEQ ID NO: 28754 - RNA, 19 nt, Homo sapiens
  misc_RNA (1)...(19): siRNA sense strand
caccauggcauuuauguuu

SEQ ID NO: 28755 - RNA, 19 nt, Homo sapiens
  misc_RNA (1)...(19): siRNA sense strand
gaacagaugcuuuuacaau

SEQ ID NO: 28756 - RNA, 19 nt, Homo sapiens
  misc_RNA (1)...(19): siRNA sense strand
gaacccagcagaaccuaau

SEQ ID NO: 28757 - RNA, 19 nt, Homo sapiens
  misc_RNA (1)...(19): siRNA sense strand
gauucuaccuucaguuucu

SEQ ID NO: 28758 - RNA, 19 nt, Homo sapiens
  misc_RNA (1)...(19): siRNA sense strand
gagaacagaugcuuuuaca

SEQ ID NO: 28759 - RNA, 19 nt, Homo sapiens
  misc_RNA (1)...(19): siRNA sense strand
gguuacacggucauuaaua

SEQ ID NO: 28760 - RNA, 19 nt, Homo sapiens
  misc_RNA (1)...(19): siRNA sense strand
ugaguggccugcauaccuu

SEQ ID NO: 28761 - RNA, 19 nt, Homo sapiens
  misc_RNA (1)...(19): siRNA sense strand
ccauggcauuuauguuuga

SEQ ID NO: 28762 - RNA, 19 nt, Homo sapiens
  misc_RNA (1)...(19): siRNA sense strand
acaaugggcuugcuaucca

SEQ ID NO: 28763 - RNA, 19 nt, Homo sapiens
  misc_RNA (1)...(19): siRNA sense strand
ccuucaggccuccuuauua

SEQ ID NO: 28764 - RNA, 19 nt, Homo sapiens
  misc_RNA (1)...(19): siRNA sense strand
gugguuacacggucauuaa

SEQ ID NO: 28765 - RNA, 19 nt, Homo sapiens
  misc_RNA (1)...(19): siRNA sense strand
ucuaugguguccacuuuga

SEQ ID NO: 28766 - RNA, 19 nt, Homo sapiens
  misc_RNA (1)...(19): siRNA sense strand
gauggggacuucuugauug

SEQ ID NO: 28767 - RNA, 19 nt, Homo sapiens
  misc_RNA (1)...(19): siRNA sense strand
caggaucggcuuucacuug

SEQ ID NO: 28768 - RNA, 19 nt, Homo sapiens
  misc_RNA (1)...(19): siRNA sense strand
ccagguguuuggaugagaa

SEQ ID NO: 28769 - RNA, 19 nt, Homo sapiens
  misc_RNA (1)...(19): siRNA sense strand
uaagagaagcuggcuguau

SEQ ID NO: 28770 - RNA, 19 nt, Homo sapiens
  misc_RNA (1)...(19): siRNA sense strand
guauaggauucuaccuuca

SEQ ID NO: 28771 - RNA, 19 nt, Homo sapiens
  misc_RNA (1)...(19): siRNA sense strand
ccaaaagcaucucagaaga

SEQ ID NO: 28772 - RNA, 19 nt, Homo sapiens
  misc_RNA (1)...(19): siRNA sense strand
ccagaaggacagaauaauc

SEQ ID NO: 28773 - RNA, 19 nt, Homo sapiens
  misc_RNA (1)...(19): siRNA sense strand
acaaguacaaccugaagaa

SEQ ID NO: 28774 - RNA, 19 nt, Homo sapiens
  misc_RNA (1)...(19): siRNA sense strand
gaguuaaaguacauuucug

SEQ ID NO: 28775 - RNA, 19 nt, Homo sapiens
  misc_RNA (1)...(19): siRNA sense strand
gggaaugaguguucuucag

SEQ ID NO: 28776 - RNA, 19 nt, Homo sapiens
  misc_RNA (1)...(19): siRNA sense strand
gcuggcaccugagaggauu

SEQ ID NO: 28777 - RNA, 19 nt, Homo sapiens
  misc_RNA (1)...(19): siRNA sense strand
uaaccagcuuagauggaaa

SEQ ID NO: 28778 - RNA, 19 nt, Homo sapiens
  misc_RNA (1)...(19): siRNA sense strand
cauccgaggucacuaugag

SEQ ID NO: 28779 - RNA, 19 nt, Homo sapiens
  misc_RNA (1)...(19): siRNA sense strand
cuucaggccuccuuauuac

SEQ ID NO: 28780 - RNA, 19 nt, Homo sapiens
  misc_RNA (1)...(19): siRNA sense strand
ggaguggccauugcugauu

SEQ ID NO: 28781 - RNA, 19 nt, Homo sapiens
  misc_RNA (1)...(19): siRNA sense strand
aaaagcaucucagaagaaa

SEQ ID NO: 28782 - RNA, 19 nt, Homo sapiens
  misc_RNA (1)...(19): siRNA sense strand
ugaguguucuucagaggau

SEQ ID NO: 28783 - RNA, 19 nt, Homo sapiens
  misc_RNA (1)...(19): siRNA sense strand
caugcagacccauccauuu

SEQ ID NO: 28784 - RNA, 19 nt, Homo sapiens
  misc_RNA (1)...(19): siRNA sense strand
guucagcauagaugucuuu

SEQ ID NO: 28785 - RNA, 19 nt, Homo sapiens
  misc_RNA (1)...(19): siRNA sense strand
gaccugaugcugacugcuu

SEQ ID NO: 28786 - RNA, 19 nt, Homo sapiens
  misc_RNA (1)...(19): siRNA sense strand
auuauacacccuacaagua

SEQ ID NO: 28787 - RNA, 19 nt, Homo sapiens
  misc_RNA (1)...(19): siRNA sense strand
uggaaaccauuugagauuc

SEQ ID NO: 28788 - RNA, 19 nt, Homo sapiens
  misc_RNA (1)...(19): siRNA sense strand
gcaccauggcauuuauguu

SEQ ID NO: 28789 - RNA, 19 nt, Homo sapiens
  misc_RNA (1)...(19): siRNA sense strand
ucacaagcccuuugaaucc

SEQ ID NO: 28790 - RNA, 19 nt, Homo sapiens
  misc_RNA (1)...(19): siRNA sense strand
aaguacaaccugaagaauu

SEQ ID NO: 28791 - RNA, 19 nt, Homo sapiens
  misc_RNA (1)...(19): siRNA sense strand
acauaaagucuaacaaugg

SEQ ID NO: 28792 - RNA, 19 nt, Homo sapiens
  misc_RNA (1)...(19): siRNA sense strand
gaaaccauuugagauucca

SEQ ID NO: 28793 - RNA, 19 nt, Homo sapiens
  misc_RNA (1)...(19): siRNA sense strand
caagcccuuugaauccauu

SEQ ID NO: 28794 - RNA, 19 nt, Homo sapiens
  misc_RNA (1)...(19): siRNA sense strand
uaccuucaguuucucacaa

SEQ ID NO: 28795 - RNA, 19 nt, Homo sapiens
  misc_RNA (1)...(19): siRNA sense strand
uggcauuuauguuugaauc

SEQ ID NO: 28796 - RNA, 19 nt, Homo sapiens
  misc_RNA (1)...(19): siRNA sense strand
uaccauaggaacugcauga

SEQ ID NO: 28797 - RNA, 19 nt, Homo sapiens
  misc_RNA (1)...(19): siRNA sense strand
gcagacccauccauuuuca

SEQ ID NO: 28798 - RNA, 19 nt, Homo sapiens
  misc_RNA (1)...(19): siRNA sense strand
ggaaccuucucauuuacac

SEQ ID NO: 28799 - RNA, 19 nt, Homo sapiens
  misc_RNA (1)...(19): siRNA sense strand
gggcuugcuauccacauuu

SEQ ID NO: 28800 - RNA, 19 nt, Homo sapiens
  misc_RNA (1)...(19): siRNA sense strand
guccacggagcaccaauaa

SEQ ID NO: 28801 - RNA, 19 nt, Homo sapiens
  misc_RNA (1)...(19): siRNA sense strand
gaauuauacacccuacaag

SEQ ID NO: 28802 - RNA, 19 nt, Homo sapiens
  misc_RNA (1)...(19): siRNA sense strand
caaaagcaucucagaagaa

SEQ ID NO: 28803 - RNA, 19 nt, Homo sapiens
  misc_RNA (1)...(19): siRNA sense strand
gauuugggaaugaguguuc

SEQ ID NO: 28804 - RNA, 19 nt, Homo sapiens
  misc_RNA (1)...(19): siRNA sense strand
ggaacccagcagaaccuaa

SEQ ID NO: 28805 - RNA, 19 nt, Homo sapiens
  misc_RNA (1)...(19): siRNA sense strand
gcugggagccacucaagag

SEQ ID NO: 28806 - RNA, 19 nt, Homo sapiens
  misc_RNA (1)...(19): siRNA sense strand
gguguuuggaugagaacua

SEQ ID NO: 28807 - RNA, 19 nt, Homo sapiens
  misc_RNA (1)...(19): siRNA sense strand
caucucagaagaaaguaga

SEQ ID NO: 28808 - RNA, 19 nt, Homo sapiens
  misc_RNA (1)...(19): siRNA sense strand
aagcaucucagaagaaagu

SEQ ID NO: 28809 - RNA, 19 nt, Homo sapiens
  misc_RNA (1)...(19): siRNA sense strand
uaucaacucaguggccuuu

SEQ ID NO: 28810 - RNA, 19 nt, Homo sapiens
  misc_RNA (1)...(19): siRNA sense strand
uuucaugguuaucaacuca

SEQ ID NO: 28811 - RNA, 19 nt, Homo sapiens
  misc_RNA (1)...(19): siRNA sense strand
ggugguuacacggucauua

SEQ ID NO: 28812 - RNA, 19 nt, Homo sapiens
  misc_RNA (1)...(19): siRNA sense strand
gagcuggagacauaaaguc

SEQ ID NO: 28813 - RNA, 19 nt, Homo sapiens
  misc_RNA (1)...(19): siRNA sense strand
aggauucuaccuucaguuu

SEQ ID NO: 28814 - RNA, 19 nt, Homo sapiens
  misc_RNA (1)...(19): siRNA sense strand
agucuacacagcacaauga

SEQ ID NO: 28815 - RNA, 19 nt, Homo sapiens
  misc_RNA (1)...(19): siRNA sense strand
ccaugcagacccauccauu

SEQ ID NO: 28816 - RNA, 19 nt, Homo sapiens
  misc_RNA (1)...(19): siRNA sense strand
caaguacaaccugaagaau

SEQ ID NO: 28817 - RNA, 19 nt, Homo sapiens
  misc_RNA (1)...(19): siRNA sense strand
acaccgaguuuggcaagau

SEQ ID NO: 28818 - RNA, 19 nt, Homo sapiens
  misc_RNA (1)...(19): siRNA sense strand
ugccagaaggacagaauaa

SEQ ID NO: 28819 - RNA, 19 nt, Homo sapiens
  misc_RNA (1)...(19): siRNA sense strand
gcugaguuaaaguacauuu

SEQ ID NO: 28820 - RNA, 19 nt, Homo sapiens
  misc_RNA (1)...(19): siRNA sense strand
aggaucggcuuucacuugu

SEQ ID NO: 28821 - RNA, 19 nt, Homo sapiens
  misc_RNA (1)...(19): siRNA sense strand
uaacaaugggcuugcuauc

SEQ ID NO: 28822 - RNA, 19 nt, Homo sapiens
  misc_RNA (1)...(19): siRNA sense strand
ggaugagaacuaccacaag

SEQ ID NO: 28823 - RNA, 19 nt, Homo sapiens
  misc_RNA (1)...(19): siRNA sense strand
uaagucuggcggucacaaa

SEQ ID NO: 28824 - RNA, 19 nt, Homo sapiens
  misc_RNA (1)...(19): siRNA sense strand
ggacucauccgaggucacu

SEQ ID NO: 28825 - RNA, 19 nt, Homo sapiens
  misc_RNA (1)...(19): siRNA sense strand
caccgaguuuggcaagaug

SEQ ID NO: 28826 - RNA, 19 nt, Homo sapiens
  misc_RNA (1)...(19): siRNA sense strand
uggccuggcacgggaauua

SEQ ID NO: 28827 - RNA, 19 nt, Homo sapiens
  misc_RNA (1)...(19): siRNA sense strand
cucaaggccuccagguguu

SEQ ID NO: 28828 - RNA, 19 nt, Homo sapiens
  misc_RNA (1)...(19): siRNA sense strand
ccucgugauuucuugauac

SEQ ID NO: 28829 - RNA, 19 nt, Homo sapiens
  misc_RNA (1)...(19): siRNA sense strand
gccuggcacgggaauuaua

SEQ ID NO: 28830 - RNA, 19 nt, Homo sapiens
  misc_RNA (1)...(19): siRNA sense strand
ggagcuggagacauaaagu

SEQ ID NO: 28831 - RNA, 19 nt, Homo sapiens
  misc_RNA (1)...(19): siRNA sense strand
cagaaggacagaauaaucc

SEQ ID NO: 28832 - RNA, 19 nt, Homo sapiens
  misc_RNA (1)...(19): siRNA sense strand
accauggcauuuauguuug

SEQ ID NO: 28833 - RNA, 19 nt, Homo sapiens
  misc_RNA (1)...(19): siRNA sense strand
uauacacccuacaaguaca

SEQ ID NO: 28834 - RNA, 19 nt, Homo sapiens
  misc_RNA (1)...(19): siRNA sense strand
ugguguccacuuugaguua

SEQ ID NO: 28835 - RNA, 19 nt, Homo sapiens
  misc_RNA (1)...(19): siRNA sense strand
acucacaacugggaugaag

SEQ ID NO: 28836 - RNA, 19 nt, Homo sapiens
  misc_RNA (1)...(19): siRNA sense strand
gaccaggggcuacaucuug

SEQ ID NO: 28837 - RNA, 19 nt, Homo sapiens
  misc_RNA (1)...(19): siRNA sense strand
gggaagagcuguuugauca

SEQ ID NO: 28838 - RNA, 19 nt, Homo sapiens
  misc_RNA (1)...(19): siRNA sense strand
ggaaggagaugaagaaugg

SEQ ID NO: 28839 - RNA, 19 nt, Homo sapiens
  misc_RNA (1)...(19): siRNA sense strand
gcaagugaaucaugagaaa

SEQ ID NO: 28840 - RNA, 19 nt, Homo sapiens
  misc_RNA (1)...(19): siRNA sense strand
gggaggauguguaucaaua

SEQ ID NO: 28841 - RNA, 19 nt, Homo sapiens
  misc_RNA (1)...(19): siRNA sense strand
gaaguuaccugugggauuc

SEQ ID NO: 28842 - RNA, 19 nt, Homo sapiens
  misc_RNA (1)...(19): siRNA sense strand
gcacaacaaugccgugguu

SEQ ID NO: 28843 - RNA, 19 nt, Homo sapiens
  misc_RNA (1)...(19): siRNA sense strand
ugaaggaacugucaccaaa

SEQ ID NO: 28844 - RNA, 19 nt, Homo sapiens
  misc_RNA (1)...(19): siRNA sense strand
uggagacgauggaucauua

SEQ ID NO: 28845 - RNA, 19 nt, Homo sapiens
  misc_RNA (1)...(19): siRNA sense strand
cgacggaucucuuuacaag

SEQ ID NO: 28846 - RNA, 19 nt, Homo sapiens
  misc_RNA (1)...(19): siRNA sense strand
gagcagauguggucaaacu

SEQ ID NO: 28847 - RNA, 19 nt, Homo sapiens
  misc_RNA (1)...(19): siRNA sense strand
gaucaaggacaagaaguua

SEQ ID NO: 28848 - RNA, 19 nt, Homo sapiens
  misc_RNA (1)...(19): siRNA sense strand
gagaagaugaucaguggua

SEQ ID NO: 28849 - RNA, 19 nt, Homo sapiens
  misc_RNA (1)...(19): siRNA sense strand
aaacaaagguaugagaaga

SEQ ID NO: 28850 - RNA, 19 nt, Homo sapiens
  misc_RNA (1)...(19): siRNA sense strand
gcacauugaucugguggaa

SEQ ID NO: 28851 - RNA, 19 nt, Homo sapiens
  misc_RNA (1)...(19): siRNA sense strand
aaaggaagaucaaggacaa

SEQ ID NO: 28852 - RNA, 19 nt, Homo sapiens
  misc_RNA (1)...(19): siRNA sense strand
gaacugaggcacauugauc

SEQ ID NO: 28853 - RNA, 19 nt, Homo sapiens
  misc_RNA (1)...(19): siRNA sense strand
gaagagcuguuugaucaca

SEQ ID NO: 28854 - RNA, 19 nt, Homo sapiens
  misc_RNA (1)...(19): siRNA sense strand
ggaaacaaagguaugagaa

SEQ ID NO: 28855 - RNA, 19 nt, Homo sapiens
  misc_RNA (1)...(19): siRNA sense strand
ggacaaagcgauuuaaagc

SEQ ID NO: 28856 - RNA, 19 nt, Homo sapiens
  misc_RNA (1)...(19): siRNA sense strand
ggaagcagacgcacaacaa

SEQ ID NO: 28857 - RNA, 19 nt, Homo sapiens
  misc_RNA (1)...(19): siRNA sense strand
gaagacauccggacagagu

SEQ ID NO: 28858 - RNA, 19 nt, Homo sapiens
  misc_RNA (1)...(19): siRNA sense strand
caucguagcuguggugaau

SEQ ID NO: 28859 - RNA, 19 nt, Homo sapiens
  misc_RNA (1)...(19): siRNA sense strand
ggacuggaccgucugaaug

SEQ ID NO: 28860 - RNA, 19 nt, Homo sapiens
  misc_RNA (1)...(19): siRNA sense strand
gaucuacgccauuccuauu

SEQ ID NO: 28861 - RNA, 19 nt, Homo sapiens
  misc_RNA (1)...(19): siRNA sense strand
gaugaucagugguauguac

SEQ ID NO: 28862 - RNA, 19 nt, Homo sapiens
  misc_RNA (1)...(19): siRNA sense strand
gacgauggaucauuagaag

SEQ ID NO: 28863 - RNA, 19 nt, Homo sapiens
  misc_RNA (1)...(19): siRNA sense strand
gcacagaggcaagcagcua

SEQ ID NO: 28864 - RNA, 19 nt, Homo sapiens
  misc_RNA (1)...(19): siRNA sense strand
cugcaucucugacuucuug

SEQ ID NO: 28865 - RNA, 19 nt, Homo sapiens
  misc_RNA (1)...(19): siRNA sense strand
gaguggagccguccgauga

SEQ ID NO: 28866 - RNA, 19 nt, Homo sapiens
  misc_RNA (1)...(19): siRNA sense strand
gaaacucucauagauauca

SEQ ID NO: 28867 - RNA, 19 nt, Homo sapiens
  misc_RNA (1)...(19): siRNA sense strand
caccaaugcuugcuacaug

SEQ ID NO: 28868 - RNA, 19 nt, Homo sapiens
  misc_RNA (1)...(19): siRNA sense strand
gaaaauccguagugggaaa

SEQ ID NO: 28869 - RNA, 19 nt, Homo sapiens
  misc_RNA (1)...(19): siRNA sense strand
uggcugcgguuguggauaa

SEQ ID NO: 28870 - RNA, 19 nt, Homo sapiens
  misc_RNA (1)...(19): siRNA sense strand
gggcuucacguucucauuu

SEQ ID NO: 28871 - RNA, 19 nt, Homo sapiens
  misc_RNA (1)...(19): siRNA sense strand
gagguuggacucauuguug

SEQ ID NO: 28872 - RNA, 19 nt, Homo sapiens
  misc_RNA (1)...(19): siRNA sense strand
gagcagcaccggcagauag

SEQ ID NO: 28873 - RNA, 19 nt, Homo sapiens
  misc_RNA (1)...(19): siRNA sense strand
gauaagauccgcgagaaca

SEQ ID NO: 28874 - RNA, 19 nt, Homo sapiens
  misc_RNA (1)...(19): siRNA sense strand
gaaaucguccgcaacaucu

SEQ ID NO: 28875 - RNA, 19 nt, Homo sapiens
  misc_RNA (1)...(19): siRNA sense strand
gaggagacccuggcucauu

SEQ ID NO: 28876 - RNA, 19 nt, Homo sapiens
  misc_RNA (1)...(19): siRNA sense strand
ggucaaacugcuuaacaaa

SEQ ID NO: 28877 - RNA, 19 nt, Homo sapiens
  misc_RNA (1)...(19): siRNA sense strand
ccaaguuucucucucagau

SEQ ID NO: 28878 - RNA, 19 nt, Homo sapiens
  misc_RNA (1)...(19): siRNA sense strand
guauguaccugggugaaau

SEQ ID NO: 28879 - RNA, 19 nt, Homo sapiens
  misc_RNA (1)...(19): siRNA sense strand
gaaacaaagguaugagaag

SEQ ID NO: 28880 - RNA, 19 nt, Homo sapiens
  misc_RNA (1)...(19): siRNA sense strand
gaccgagaauggugacuuc

SEQ ID NO: 28881 - RNA, 19 nt, Homo sapiens
  misc_RNA (1)...(19): siRNA sense strand
gauguggucaaacugcuua

SEQ ID NO: 28882 - RNA, 19 nt, Homo sapiens
  misc_RNA (1)...(19): siRNA sense strand
ccaugcggcucuccgauga

SEQ ID NO: 28883 - RNA, 19 nt, Homo sapiens
  misc_RNA (1)...(19): siRNA sense strand
caacaagaucuacgccauu

SEQ ID NO: 28884 - RNA, 19 nt, Homo sapiens
  misc_RNA (1)...(19): siRNA sense strand
ggagagcugguucgacuga

SEQ ID NO: 28885 - RNA, 19 nt, Homo sapiens
  misc_RNA (1)...(19): siRNA sense strand
uuaaucgacuucaccaaga

SEQ ID NO: 28886 - RNA, 19 nt, Homo sapiens
  misc_RNA (1)...(19): siRNA sense strand
gaaaugcacaacaagaucu

SEQ ID NO: 28887 - RNA, 19 nt, Homo sapiens
  misc_RNA (1)...(19): siRNA sense strand
ggaaaugcacaacaagauc

SEQ ID NO: 28888 - RNA, 19 nt, Homo sapiens
  misc_RNA (1)...(19): siRNA sense strand
aggagacccuggcucauuu

SEQ ID NO: 28889 - RNA, 19 nt, Homo sapiens
  misc_RNA (1)...(19): siRNA sense strand
gaagaucaaggacaagaag

SEQ ID NO: 28890 - RNA, 19 nt, Homo sapiens
  misc_RNA (1)...(19): siRNA sense strand
agaccaaguuucucucuca

SEQ ID NO: 28891 - RNA, 19 nt, Homo sapiens
  misc_RNA (1)...(19): siRNA sense strand
ccacaaugccaaagaaauc

SEQ ID NO: 28892 - RNA, 19 nt, Homo sapiens
  misc_RNA (1)...(19): siRNA sense strand
uaaggaaggccuccacaau

SEQ ID NO: 28893 - RNA, 19 nt, Homo sapiens
  misc_RNA (1)...(19): siRNA sense strand
uagaagacauccggacaga

SEQ ID NO: 28894 - RNA, 19 nt, Homo sapiens
  misc_RNA (1)...(19): siRNA sense strand
cagcagcuaggucugaaua

SEQ ID NO: 28895 - RNA, 19 nt, Homo sapiens
  misc_RNA (1)...(19): siRNA sense strand
gggugcaagugaaucauga

SEQ ID NO: 28896 - RNA, 19 nt, Homo sapiens
  misc_RNA (1)...(19): siRNA sense strand
uaaucgacuucaccaagaa

SEQ ID NO: 28897 - RNA, 19 nt, Homo sapiens
  misc_RNA (1)...(19): siRNA sense strand
acaaagguaugagaagaug

SEQ ID NO: 28898 - RNA, 19 nt, Homo sapiens
  misc_RNA (1)...(19): siRNA sense strand
ccuaaaugcugggaaacaa

SEQ ID NO: 28899 - RNA, 19 nt, Homo sapiens
  misc_RNA (1)...(19): siRNA sense strand
acaagacgcacccacagua

SEQ ID NO: 28900 - RNA, 19 nt, Homo sapiens
  misc_RNA (1)...(19): siRNA sense strand
ucaggaaggagaugaagaa

SEQ ID NO: 28901 - RNA, 19 nt, Homo sapiens
  misc_RNA (1)...(19): siRNA sense strand
ugaagaacguggagauggu

SEQ ID NO: 28902 - RNA, 19 nt, Homo sapiens
  misc_RNA (1)...(19): siRNA sense strand
acaaugccgugguuaagau

SEQ ID NO: 28903 - RNA, 19 nt, Homo sapiens
  misc_RNA (1)...(19): siRNA sense strand
ggaaguuuaacaccaguga

SEQ ID NO: 28904 - RNA, 19 nt, Homo sapiens
  misc_RNA (1)...(19): siRNA sense strand
ggaagaucaaggacaagaa

SEQ ID NO: 28905 - RNA, 19 nt, Homo sapiens
  misc_RNA (1)...(19): siRNA sense strand
gaagcagacgcacaacaau

SEQ ID NO: 28906 - RNA, 19 nt, Homo sapiens
  misc_RNA (1)...(19): siRNA sense strand
caucggcacuggcaccaau

SEQ ID NO: 28907 - RNA, 19 nt, Homo sapiens
  misc_RNA (1)...(19): siRNA sense strand
gauggucaguggcauguac

SEQ ID NO: 28908 - RNA, 19 nt, Homo sapiens
  misc_RNA (1)...(19): siRNA sense strand
gacaguauccucgucaaga

SEQ ID NO: 28909 - RNA, 19 nt, Homo sapiens
  misc_RNA (1)...(19): siRNA sense strand
aaagagaacgguggaaaug

SEQ ID NO: 28910 - RNA, 19 nt, Homo sapiens
  misc_RNA (1)...(19): siRNA sense strand
caacagccacagucaagau

SEQ ID NO: 28911 - RNA, 19 nt, Homo sapiens
  misc_RNA (1)...(19): siRNA sense strand
ucucugacuucuuggacua

SEQ ID NO: 28912 - RNA, 19 nt, Homo sapiens
  misc_RNA (1)...(19): siRNA sense strand
uuaagaugcugcccuccuu

SEQ ID NO: 28913 - RNA, 19 nt, Homo sapiens
  misc_RNA (1)...(19): siRNA sense strand
cagcacguuugcaccauug

SEQ ID NO: 28914 - RNA, 19 nt, Homo sapiens
  misc_RNA (1)...(19): siRNA sense strand
gaugauaucaggacacacu

SEQ ID NO: 28915 - RNA, 19 nt, Homo sapiens
  misc_RNA (1)...(19): siRNA sense strand
ggacgggacacucuacaag

SEQ ID NO: 28916 - RNA, 19 nt, Homo sapiens
  misc_RNA (1)...(19): siRNA sense strand
gaggaacugaggcacauug

SEQ ID NO: 28917 - RNA, 19 nt, Homo sapiens
  misc_RNA (1)...(19): siRNA sense strand
gaagaugaucagugguaug

SEQ ID NO: 28918 - RNA, 19 nt, Homo sapiens
  misc_RNA (1)...(19): siRNA sense strand
gggaaacaaagguaugaga

SEQ ID NO: 28919 - RNA, 19 nt, Homo sapiens
  misc_RNA (1)...(19): siRNA sense strand
caugaugaccugugcuuau

SEQ ID NO: 28920 - RNA, 19 nt, Homo sapiens
  misc_RNA (1)...(19): siRNA sense strand
agagaacgguggaaaugca

SEQ ID NO: 28921 - RNA, 19 nt, Homo sapiens
  misc_RNA (1)...(19): siRNA sense strand
ugaaccgccugcgugauaa

SEQ ID NO: 28922 - RNA, 19 nt, Homo sapiens
  misc_RNA (1)...(19): siRNA sense strand
ugggagauuucauggagaa

SEQ ID NO: 28923 - RNA, 19 nt, Homo sapiens
  misc_RNA (1)...(19): siRNA sense strand
ggugaaaucguccgcaaca

SEQ ID NO: 28924 - RNA, 19 nt, Homo sapiens
  misc_RNA (1)...(19): siRNA sense strand
caacgggugucuggaugau

SEQ ID NO: 28925 - RNA, 19 nt, Homo sapiens
  misc_RNA (1)...(19): siRNA sense strand
ucacauggaguccgagguu

SEQ ID NO: 28926 - RNA, 19 nt, Homo sapiens
  misc_RNA (1)...(19): siRNA sense strand
ucacguggacaaaggguuu

SEQ ID NO: 28927 - RNA, 19 nt, Homo sapiens
  misc_RNA (1)...(19): siRNA sense strand
caacaaugccgugguuaag

SEQ ID NO: 28928 - RNA, 19 nt, Homo sapiens
  misc_RNA (1)...(19): siRNA sense strand
ucguagcuguggugaauga

SEQ ID NO: 28929 - RNA, 19 nt, Homo sapiens
  misc_RNA (1)...(19): siRNA sense strand
cacauugucuccugcaucu

SEQ ID NO: 28930 - RNA, 19 nt, Homo sapiens
  misc_RNA (1)...(19): siRNA sense strand
cagccacagucaagauguu

SEQ ID NO: 28931 - RNA, 19 nt, Homo sapiens
  misc_RNA (1)...(19): siRNA sense strand
caagacgcacccacaguau

SEQ ID NO: 28932 - RNA, 19 nt, Homo sapiens
  misc_RNA (1)...(19): siRNA sense strand
ccagcacguuugcaccauu

SEQ ID NO: 28933 - RNA, 19 nt, Homo sapiens
  misc_RNA (1)...(19): siRNA sense strand
ccuccacaaugccaaagaa

SEQ ID NO: 28934 - RNA, 19 nt, Homo sapiens
  misc_RNA (1)...(19): siRNA sense strand
caugaugaccuguggcuau

SEQ ID NO: 28935 - RNA, 19 nt, Homo sapiens
  misc_RNA (1)...(19): siRNA sense strand
caagcuucauccacacuuc

SEQ ID NO: 28936 - RNA, 19 nt, Homo sapiens
  misc_RNA (1)...(19): siRNA sense strand
gaacugucaccaaaaugua

SEQ ID NO: 28937 - RNA, 19 nt, Homo sapiens
  misc_RNA (1)...(19): siRNA sense strand
gggaagagcuguuugauca

SEQ ID NO: 28938 - RNA, 19 nt, Homo sapiens
  misc_RNA (1)...(19): siRNA sense strand
ggaaggagaugaagaaugg

SEQ ID NO: 28939 - RNA, 19 nt, Homo sapiens
  misc_RNA (1)...(19): siRNA sense strand
gcaagugaaucaugagaaa

SEQ ID NO: 28940 - RNA, 19 nt, Homo sapiens
  misc_RNA (1)...(19): siRNA sense strand
gggaggauguguaucaaua

SEQ ID NO: 28941 - RNA, 19 nt, Homo sapiens
  misc_RNA (1)...(19): siRNA sense strand
gaaguuaccugugggauuc

SEQ ID NO: 28942 - RNA, 19 nt, Homo sapiens
  misc_RNA (1)...(19): siRNA sense strand
gcacaacaaugccgugguu

SEQ ID NO: 28943 - RNA, 19 nt, Homo sapiens
  misc_RNA (1)...(19): siRNA sense strand
ugaaggaacugucaccaaa

SEQ ID NO: 28944 - RNA, 19 nt, Homo sapiens
  misc_RNA (1)...(19): siRNA sense strand
uggagacgauggaucauua

SEQ ID NO: 28945 - RNA, 19 nt, Homo sapiens
  misc_RNA (1)...(19): siRNA sense strand
cgacggaucucuuuacaag

SEQ ID NO: 28946 - RNA, 19 nt, Homo sapiens
  misc_RNA (1)...(19): siRNA sense strand
gagcagauguggucaaacu

SEQ ID NO: 28947 - RNA, 19 nt, Homo sapiens
  misc_RNA (1)...(19): siRNA sense strand
gaucaaggacaagaaguua

SEQ ID NO: 28948 - RNA, 19 nt, Homo sapiens
  misc_RNA (1)...(19): siRNA sense strand
gagaagaugaucaguggua

SEQ ID NO: 28949 - RNA, 19 nt, Homo sapiens
  misc_RNA (1)...(19): siRNA sense strand
aaacaaagguaugagaaga

SEQ ID NO: 28950 - RNA, 19 nt, Homo sapiens
  misc_RNA (1)...(19): siRNA sense strand
gcacauugaucugguggaa

SEQ ID NO: 28951 - RNA, 19 nt, Homo sapiens
  misc_RNA (1)...(19): siRNA sense strand
aaaggaagaucaaggacaa

SEQ ID NO: 28952 - RNA, 19 nt, Homo sapiens
  misc_RNA (1)...(19): siRNA sense strand
gaacugaggcacauugauc

SEQ ID NO: 28953 - RNA, 19 nt, Homo sapiens
  misc_RNA (1)...(19): siRNA sense strand
gaagagcuguuugaucaca

SEQ ID NO: 28954 - RNA, 19 nt, Homo sapiens
  misc_RNA (1)...(19): siRNA sense strand
ggaaacaaagguaugagaa

SEQ ID NO: 28955 - RNA, 19 nt, Homo sapiens
  misc_RNA (1)...(19): siRNA sense strand
ggacaaagcgauuuaaagc

SEQ ID NO: 28956 - RNA, 19 nt, Homo sapiens
  misc_RNA (1)...(19): siRNA sense strand
ggaagcagacgcacaacaa

SEQ ID NO: 28957 - RNA, 19 nt, Homo sapiens
  misc_RNA (1)...(19): siRNA sense strand
gaagacauccggacagagu

SEQ ID NO: 28958 - RNA, 19 nt, Homo sapiens
  misc_RNA (1)...(19): siRNA sense strand
caucguagcuguggugaau

SEQ ID NO: 28959 - RNA, 19 nt, Homo sapiens
  misc_RNA (1)...(19): siRNA sense strand
ggacuggaccgucugaaug

SEQ ID NO: 28960 - RNA, 19 nt, Homo sapiens
  misc_RNA (1)...(19): siRNA sense strand
gaucuacgccauuccuauu

SEQ ID NO: 28961 - RNA, 19 nt, Homo sapiens
  misc_RNA (1)...(19): siRNA sense strand
gaugaucagugguauguac

SEQ ID NO: 28962 - RNA, 19 nt, Homo sapiens
  misc_RNA (1)...(19): siRNA sense strand
gacgauggaucauuagaag

SEQ ID NO: 28963 - RNA, 19 nt, Homo sapiens
  misc_RNA (1)...(19): siRNA sense strand
gcacagaggcaagcagcua

SEQ ID NO: 28964 - RNA, 19 nt, Homo sapiens
  misc_RNA (1)...(19): siRNA sense strand
cugcaucucugacuucuug

SEQ ID NO: 28965 - RNA, 19 nt, Homo sapiens
  misc_RNA (1)...(19): siRNA sense strand
gaguggagccguccgauga

SEQ ID NO: 28966 - RNA, 19 nt, Homo sapiens
  misc_RNA (1)...(19): siRNA sense strand
gaaacucucauagauauca

SEQ ID NO: 28967 - RNA, 19 nt, Homo sapiens
  misc_RNA (1)...(19): siRNA sense strand
caccaaugcuugcuacaug

SEQ ID NO: 28968 - RNA, 19 nt, Homo sapiens
  misc_RNA (1)...(19): siRNA sense strand
gaaaauccguagugggaaa

SEQ ID NO: 28969 - RNA, 19 nt, Homo sapiens
  misc_RNA (1)...(19): siRNA sense strand
uggcugcgguuguggauaa

SEQ ID NO: 28970 - RNA, 19 nt, Homo sapiens
  misc_RNA (1)...(19): siRNA sense strand
gggcuucacguucucauuu

SEQ ID NO: 28971 - RNA, 19 nt, Homo sapiens
  misc_RNA (1)...(19): siRNA sense strand
gagguuggacucauuguug

SEQ ID NO: 28972 - RNA, 19 nt, Homo sapiens
  misc_RNA (1)...(19): siRNA sense strand
gagcagcaccggcagauag

SEQ ID NO: 28973 - RNA, 19 nt, Homo sapiens
  misc_RNA (1)...(19): siRNA sense strand
gauaagauccgcgagaaca

SEQ ID NO: 28974 - RNA, 19 nt, Homo sapiens
  misc_RNA (1)...(19): siRNA sense strand
gaaaucguccgcaacaucu

SEQ ID NO: 28975 - RNA, 19 nt, Homo sapiens
  misc_RNA (1)...(19): siRNA sense strand
gaggagacccuggcucauu

SEQ ID NO: 28976 - RNA, 19 nt, Homo sapiens
  misc_RNA (1)...(19): siRNA sense strand
ggucaaacugcuuaacaaa

SEQ ID NO: 28977 - RNA, 19 nt, Homo sapiens
  misc_RNA (1)...(19): siRNA sense strand
ccaaguuucucucucagau

SEQ ID NO: 28978 - RNA, 19 nt, Homo sapiens
  misc_RNA (1)...(19): siRNA sense strand
guauguaccugggugaaau

SEQ ID NO: 28979 - RNA, 19 nt, Homo sapiens
  misc_RNA (1)...(19): siRNA sense strand
gaaacaaagguaugagaag

SEQ ID NO: 28980 - RNA, 19 nt, Homo sapiens
  misc_RNA (1)...(19): siRNA sense strand
gaccgagaauggugacuuc

SEQ ID NO: 28981 - RNA, 19 nt, Homo sapiens
  misc_RNA (1)...(19): siRNA sense strand
gauguggucaaacugcuua

SEQ ID NO: 28982 - RNA, 19 nt, Homo sapiens
  misc_RNA (1)...(19): siRNA sense strand
ccaugcggcucuccgauga

SEQ ID NO: 28983 - RNA, 19 nt, Homo sapiens
  misc_RNA (1)...(19): siRNA sense strand
caacaagaucuacgccauu

SEQ ID NO: 28984 - RNA, 19 nt, Homo sapiens
  misc_RNA (1)...(19): siRNA sense strand
ggagagcugguucgacuga

SEQ ID NO: 28985 - RNA, 19 nt, Homo sapiens
  misc_RNA (1)...(19): siRNA sense strand
uuaaucgacuucaccaaga

SEQ ID NO: 28986 - RNA, 19 nt, Homo sapiens
  misc_RNA (1)...(19): siRNA sense strand
gaaaugcacaacaagaucu

SEQ ID NO: 28987 - RNA, 19 nt, Homo sapiens
  misc_RNA (1)...(19): siRNA sense strand
ggaaaugcacaacaagauc

SEQ ID NO: 28988 - RNA, 19 nt, Homo sapiens
  misc_RNA (1)...(19): siRNA sense strand
aggagacccuggcucauuu

SEQ ID NO: 28989 - RNA, 19 nt, Homo sapiens
  misc_RNA (1)...(19): siRNA sense strand
gaagaucaaggacaagaag

SEQ ID NO: 28990 - RNA, 19 nt, Homo sapiens
  misc_RNA (1)...(19): siRNA sense strand
agaccaaguuucucucuca

SEQ ID NO: 28991 - RNA, 19 nt, Homo sapiens
  misc_RNA (1)...(19): siRNA sense strand
ccacaaugccaaagaaauc

SEQ ID NO: 28992 - RNA, 19 nt, Homo sapiens
  misc_RNA (1)...(19): siRNA sense strand
uaaggaaggccuccacaau

SEQ ID NO: 28993 - RNA, 19 nt, Homo sapiens
  misc_RNA (1)...(19): siRNA sense strand
uagaagacauccggacaga

SEQ ID NO: 28994 - RNA, 19 nt, Homo sapiens
  misc_RNA (1)...(19): siRNA sense strand
cagcagcuaggucugaaua

SEQ ID NO: 28995 - RNA, 19 nt, Homo sapiens
  misc_RNA (1)...(19): siRNA sense strand
gggugcaagugaaucauga

SEQ ID NO: 28996 - RNA, 19 nt, Homo sapiens
  misc_RNA (1)...(19): siRNA sense strand
uaaucgacuucaccaagaa

SEQ ID NO: 28997 - RNA, 19 nt, Homo sapiens
  misc_RNA (1)...(19): siRNA sense strand
acaaagguaugagaagaug

SEQ ID NO: 28998 - RNA, 19 nt, Homo sapiens
  misc_RNA (1)...(19): siRNA sense strand
ccuaaaugcugggaaacaa

SEQ ID NO: 28999 - RNA, 19 nt, Homo sapiens
  misc_RNA (1)...(19): siRNA sense strand
acaagacgcacccacagua

SEQ ID NO: 29000 - RNA, 19 nt, Homo sapiens
  misc_RNA (1)...(19): siRNA sense strand
ucaggaaggagaugaagaa

SEQ ID NO: 29001 - RNA, 19 nt, Homo sapiens
  misc_RNA (1)...(19): siRNA sense strand
ugaagaacguggagauggu

SEQ ID NO: 29002 - RNA, 19 nt, Homo sapiens
  misc_RNA (1)...(19): siRNA sense strand
acaaugccgugguuaagau

SEQ ID NO: 29003 - RNA, 19 nt, Homo sapiens
  misc_RNA (1)...(19): siRNA sense strand
ggaaguuuaacaccaguga

SEQ ID NO: 29004 - RNA, 19 nt, Homo sapiens
  misc_RNA (1)...(19): siRNA sense strand
ggaagaucaaggacaagaa

SEQ ID NO: 29005 - RNA, 19 nt, Homo sapiens
  misc_RNA (1)...(19): siRNA sense strand
gaagcagacgcacaacaau

SEQ ID NO: 29006 - RNA, 19 nt, Homo sapiens
  misc_RNA (1)...(19): siRNA sense strand
caucggcacuggcaccaau

SEQ ID NO: 29007 - RNA, 19 nt, Homo sapiens
  misc_RNA (1)...(19): siRNA sense strand
gauggucaguggcauguac

SEQ ID NO: 29008 - RNA, 19 nt, Homo sapiens
  misc_RNA (1)...(19): siRNA sense strand
gacaguauccucgucaaga

SEQ ID NO: 29009 - RNA, 19 nt, Homo sapiens
  misc_RNA (1)...(19): siRNA sense strand
aaagagaacgguggaaaug

SEQ ID NO: 29010 - RNA, 19 nt, Homo sapiens
  misc_RNA (1)...(19): siRNA sense strand
caacagccacagucaagau

SEQ ID NO: 29011 - RNA, 19 nt, Homo sapiens
  misc_RNA (1)...(19): siRNA sense strand
ucucugacuucuuggacua

SEQ ID NO: 29012 - RNA, 19 nt, Homo sapiens
  misc_RNA (1)...(19): siRNA sense strand
uuaagaugcugcccuccuu

SEQ ID NO: 29013 - RNA, 19 nt, Homo sapiens
  misc_RNA (1)...(19): siRNA sense strand
cagcacguuugcaccauug

SEQ ID NO: 29014 - RNA, 19 nt, Homo sapiens
  misc_RNA (1)...(19): siRNA sense strand
gaugauaucaggacacacu

SEQ ID NO: 29015 - RNA, 19 nt, Homo sapiens
  misc_RNA (1)...(19): siRNA sense strand
ggacgggacacucuacaag

SEQ ID NO: 29016 - RNA, 19 nt, Homo sapiens
  misc_RNA (1)...(19): siRNA sense strand
gaggaacugaggcacauug

SEQ ID NO: 29017 - RNA, 19 nt, Homo sapiens
  misc_RNA (1)...(19): siRNA sense strand
gaagaugaucagugguaug

SEQ ID NO: 29018 - RNA, 19 nt, Homo sapiens
  misc_RNA (1)...(19): siRNA sense strand
gggaaacaaagguaugaga

SEQ ID NO: 29019 - RNA, 19 nt, Homo sapiens
  misc_RNA (1)...(19): siRNA sense strand
caugaugaccugugcuuau

SEQ ID NO: 29020 - RNA, 19 nt, Homo sapiens
  misc_RNA (1)...(19): siRNA sense strand
agagaacgguggaaaugca

SEQ ID NO: 29021 - RNA, 19 nt, Homo sapiens
  misc_RNA (1)...(19): siRNA sense strand
ugaaccgccugcgugauaa

SEQ ID NO: 29022 - RNA, 19 nt, Homo sapiens
  misc_RNA (1)...(19): siRNA sense strand
ugggagauuucauggagaa

SEQ ID NO: 29023 - RNA, 19 nt, Homo sapiens
  misc_RNA (1)...(19): siRNA sense strand
ggugaaaucguccgcaaca

SEQ ID NO: 29024 - RNA, 19 nt, Homo sapiens
  misc_RNA (1)...(19): siRNA sense strand
caacgggugucuggaugau

SEQ ID NO: 29025 - RNA, 19 nt, Homo sapiens
  misc_RNA (1)...(19): siRNA sense strand
ucacauggaguccgagguu

SEQ ID NO: 29026 - RNA, 19 nt, Homo sapiens
  misc_RNA (1)...(19): siRNA sense strand
ucacguggacaaaggguuu

SEQ ID NO: 29027 - RNA, 19 nt, Homo sapiens
  misc_RNA (1)...(19): siRNA sense strand
caacaaugccgugguuaag

SEQ ID NO: 29028 - RNA, 19 nt, Homo sapiens
  misc_RNA (1)...(19): siRNA sense strand
ucguagcuguggugaauga

SEQ ID NO: 29029 - RNA, 19 nt, Homo sapiens
  misc_RNA (1)...(19): siRNA sense strand
cacauugucuccugcaucu

SEQ ID NO: 29030 - RNA, 19 nt, Homo sapiens
  misc_RNA (1)...(19): siRNA sense strand
cagccacagucaagauguu

SEQ ID NO: 29031 - RNA, 19 nt, Homo sapiens
  misc_RNA (1)...(19): siRNA sense strand
caagacgcacccacaguau

SEQ ID NO: 29032 - RNA, 19 nt, Homo sapiens
  misc_RNA (1)...(19): siRNA sense strand
ccagcacguuugcaccauu

SEQ ID NO: 29033 - RNA, 19 nt, Homo sapiens
  misc_RNA (1)...(19): siRNA sense strand
ccuccacaaugccaaagaa

SEQ ID NO: 29034 - RNA, 19 nt, Homo sapiens
  misc_RNA (1)...(19): siRNA sense strand
caugaugaccuguggcuau

SEQ ID NO: 29035 - RNA, 19 nt, Homo sapiens
  misc_RNA (1)...(19): siRNA sense strand
caagcuucauccacacuuc

SEQ ID NO: 29036 - RNA, 19 nt, Homo sapiens
  misc_RNA (1)...(19): siRNA sense strand
gaacugucaccaaaaugua

SEQ ID NO: 29037 - RNA, 19 nt, Homo sapiens
  misc_RNA (1)...(19): siRNA sense strand
gggaagagcuguuugauca

SEQ ID NO: 29038 - RNA, 19 nt, Homo sapiens
  misc_RNA (1)...(19): siRNA sense strand
ggaaggagaugaagaaugg

SEQ ID NO: 29039 - RNA, 19 nt, Homo sapiens
  misc_RNA (1)...(19): siRNA sense strand
gcaagugaaucaugagaaa

SEQ ID NO: 29040 - RNA, 19 nt, Homo sapiens
  misc_RNA (1)...(19): siRNA sense strand
gggaggauguguaucaaua

SEQ ID NO: 29041 - RNA, 19 nt, Homo sapiens
  misc_RNA (1)...(19): siRNA sense strand
gaaguuaccugugggauuc

SEQ ID NO: 29042 - RNA, 19 nt, Homo sapiens
  misc_RNA (1)...(19): siRNA sense strand
gcacaacaaugccgugguu

SEQ ID NO: 29043 - RNA, 19 nt, Homo sapiens
  misc_RNA (1)...(19): siRNA sense strand
ugaaggaacugucaccaaa

SEQ ID NO: 29044 - RNA, 19 nt, Homo sapiens
  misc_RNA (1)...(19): siRNA sense strand
uggagacgauggaucauua

SEQ ID NO: 29045 - RNA, 19 nt, Homo sapiens
  misc_RNA (1)...(19): siRNA sense strand
cgacggaucucuuuacaag

SEQ ID NO: 29046 - RNA, 19 nt, Homo sapiens
  misc_RNA (1)...(19): siRNA sense strand
gagcagauguggucaaacu

SEQ ID NO: 29047 - RNA, 19 nt, Homo sapiens
  misc_RNA (1)...(19): siRNA sense strand
gaucaaggacaagaaguua

SEQ ID NO: 29048 - RNA, 19 nt, Homo sapiens
  misc_RNA (1)...(19): siRNA sense strand
gagaagaugaucaguggua

SEQ ID NO: 29049 - RNA, 19 nt, Homo sapiens
  misc_RNA (1)...(19): siRNA sense strand
aaacaaagguaugagaaga

SEQ ID NO: 29050 - RNA, 19 nt, Homo sapiens
  misc_RNA (1)...(19): siRNA sense strand
gcacauugaucugguggaa

SEQ ID NO: 29051 - RNA, 19 nt, Homo sapiens
  misc_RNA (1)...(19): siRNA sense strand
aaaggaagaucaaggacaa

SEQ ID NO: 29052 - RNA, 19 nt, Homo sapiens
  misc_RNA (1)...(19): siRNA sense strand
gaacugaggcacauugauc

SEQ ID NO: 29053 - RNA, 19 nt, Homo sapiens
  misc_RNA (1)...(19): siRNA sense strand
gaagagcuguuugaucaca

SEQ ID NO: 29054 - RNA, 19 nt, Homo sapiens
  misc_RNA (1)...(19): siRNA sense strand
ggaaacaaagguaugagaa

SEQ ID NO: 29055 - RNA, 19 nt, Homo sapiens
  misc_RNA (1)...(19): siRNA sense strand
ggacaaagcgauuuaaagc

SEQ ID NO: 29056 - RNA, 19 nt, Homo sapiens
  misc_RNA (1)...(19): siRNA sense strand
ggaagcagacgcacaacaa

SEQ ID NO: 29057 - RNA, 19 nt, Homo sapiens
  misc_RNA (1)...(19): siRNA sense strand
gaagacauccggacagagu

SEQ ID NO: 29058 - RNA, 19 nt, Homo sapiens
  misc_RNA (1)...(19): siRNA sense strand
caucguagcuguggugaau

SEQ ID NO: 29059 - RNA, 19 nt, Homo sapiens
  misc_RNA (1)...(19): siRNA sense strand
ggacuggaccgucugaaug

SEQ ID NO: 29060 - RNA, 19 nt, Homo sapiens
  misc_RNA (1)...(19): siRNA sense strand
gaucuacgccauuccuauu

SEQ ID NO: 29061 - RNA, 19 nt, Homo sapiens
  misc_RNA (1)...(19): siRNA sense strand
gaugaucagugguauguac

SEQ ID NO: 29062 - RNA, 19 nt, Homo sapiens
  misc_RNA (1)...(19): siRNA sense strand
gacgauggaucauuagaag

SEQ ID NO: 29063 - RNA, 19 nt, Homo sapiens
  misc_RNA (1)...(19): siRNA sense strand
gcacagaggcaagcagcua

SEQ ID NO: 29064 - RNA, 19 nt, Homo sapiens
  misc_RNA (1)...(19): siRNA sense strand
cugcaucucugacuucuug

SEQ ID NO: 29065 - RNA, 19 nt, Homo sapiens
  misc_RNA (1)...(19): siRNA sense strand
gaguggagccguccgauga

SEQ ID NO: 29066 - RNA, 19 nt, Homo sapiens
  misc_RNA (1)...(19): siRNA sense strand
gaaacucucauagauauca

SEQ ID NO: 29067 - RNA, 19 nt, Homo sapiens
  misc_RNA (1)...(19): siRNA sense strand
caccaaugcuugcuacaug

SEQ ID NO: 29068 - RNA, 19 nt, Homo sapiens
  misc_RNA (1)...(19): siRNA sense strand
gaaaauccguagugggaaa

SEQ ID NO: 29069 - RNA, 19 nt, Homo sapiens
  misc_RNA (1)...(19): siRNA sense strand
uggcugcgguuguggauaa

SEQ ID NO: 29070 - RNA, 19 nt, Homo sapiens
  misc_RNA (1)...(19): siRNA sense strand
gggcuucacguucucauuu

SEQ ID NO: 29071 - RNA, 19 nt, Homo sapiens
  misc_RNA (1)...(19): siRNA sense strand
gagguuggacucauuguug

SEQ ID NO: 29072 - RNA, 19 nt, Homo sapiens
  misc_RNA (1)...(19): siRNA sense strand
gagcagcaccggcagauag

SEQ ID NO: 29073 - RNA, 19 nt, Homo sapiens
  misc_RNA (1)...(19): siRNA sense strand
gauaagauccgcgagaaca

SEQ ID NO: 29074 - RNA, 19 nt, Homo sapiens
  misc_RNA (1)...(19): siRNA sense strand
gaaaucguccgcaacaucu

SEQ ID NO: 29075 - RNA, 19 nt, Homo sapiens
  misc_RNA (1)...(19): siRNA sense strand
gaggagacccuggcucauu

SEQ ID NO: 29076 - RNA, 19 nt, Homo sapiens
  misc_RNA (1)...(19): siRNA sense strand
ggucaaacugcuuaacaaa

SEQ ID NO: 29077 - RNA, 19 nt, Homo sapiens
  misc_RNA (1)...(19): siRNA sense strand
ccaaguuucucucucagau

SEQ ID NO: 29078 - RNA, 19 nt, Homo sapiens
  misc_RNA (1)...(19): siRNA sense strand
guauguaccugggugaaau

SEQ ID NO: 29079 - RNA, 19 nt, Homo sapiens
  misc_RNA (1)...(19): siRNA sense strand
gaaacaaagguaugagaag

SEQ ID NO: 29080 - RNA, 19 nt, Homo sapiens
  misc_RNA (1)...(19): siRNA sense strand
gaccgagaauggugacuuc

SEQ ID NO: 29081 - RNA, 19 nt, Homo sapiens
  misc_RNA (1)...(19): siRNA sense strand
gauguggucaaacugcuua

SEQ ID NO: 29082 - RNA, 19 nt, Homo sapiens
  misc_RNA (1)...(19): siRNA sense strand
ccaugcggcucuccgauga

SEQ ID NO: 29083 - RNA, 19 nt, Homo sapiens
  misc_RNA (1)...(19): siRNA sense strand
caacaagaucuacgccauu

SEQ ID NO: 29084 - RNA, 19 nt, Homo sapiens
  misc_RNA (1)...(19): siRNA sense strand
ggagagcugguucgacuga

SEQ ID NO: 29085 - RNA, 19 nt, Homo sapiens
  misc_RNA (1)...(19): siRNA sense strand
uuaaucgacuucaccaaga

SEQ ID NO: 29086 - RNA, 19 nt, Homo sapiens
  misc_RNA (1)...(19): siRNA sense strand
gaaaugcacaacaagaucu

SEQ ID NO: 29087 - RNA, 19 nt, Homo sapiens
  misc_RNA (1)...(19): siRNA sense strand
ggaaaugcacaacaagauc

SEQ ID NO: 29088 - RNA, 19 nt, Homo sapiens
  misc_RNA (1)...(19): siRNA sense strand
aggagacccuggcucauuu

SEQ ID NO: 29089 - RNA, 19 nt, Homo sapiens
  misc_RNA (1)...(19): siRNA sense strand
gaagaucaaggacaagaag

SEQ ID NO: 29090 - RNA, 19 nt, Homo sapiens
  misc_RNA (1)...(19): siRNA sense strand
agaccaaguuucucucuca

SEQ ID NO: 29091 - RNA, 19 nt, Homo sapiens
  misc_RNA (1)...(19): siRNA sense strand
ccacaaugccaaagaaauc

SEQ ID NO: 29092 - RNA, 19 nt, Homo sapiens
  misc_RNA (1)...(19): siRNA sense strand
uaaggaaggccuccacaau

SEQ ID NO: 29093 - RNA, 19 nt, Homo sapiens
  misc_RNA (1)...(19): siRNA sense strand
uagaagacauccggacaga

SEQ ID NO: 29094 - RNA, 19 nt, Homo sapiens
  misc_RNA (1)...(19): siRNA sense strand
cagcagcuaggucugaaua

SEQ ID NO: 29095 - RNA, 19 nt, Homo sapiens
  misc_RNA (1)...(19): siRNA sense strand
gggugcaagugaaucauga

SEQ ID NO: 29096 - RNA, 19 nt, Homo sapiens
  misc_RNA (1)...(19): siRNA sense strand
uaaucgacuucaccaagaa

SEQ ID NO: 29097 - RNA, 19 nt, Homo sapiens
  misc_RNA (1)...(19): siRNA sense strand
acaaagguaugagaagaug

SEQ ID NO: 29098 - RNA, 19 nt, Homo sapiens
  misc_RNA (1)...(19): siRNA sense strand
ccuaaaugcugggaaacaa

SEQ ID NO: 29099 - RNA, 19 nt, Homo sapiens
  misc_RNA (1)...(19): siRNA sense strand
acaagacgcacccacagua

SEQ ID NO: 29100 - RNA, 19 nt, Homo sapiens
  misc_RNA (1)...(19): siRNA sense strand
ucaggaaggagaugaagaa

SEQ ID NO: 29101 - RNA, 19 nt, Homo sapiens
  misc_RNA (1)...(19): siRNA sense strand
ugaagaacguggagauggu

SEQ ID NO: 29102 - RNA, 19 nt, Homo sapiens
  misc_RNA (1)...(19): siRNA sense strand
acaaugccgugguuaagau

SEQ ID NO: 29103 - RNA, 19 nt, Homo sapiens
  misc_RNA (1)...(19): siRNA sense strand
ggaaguuuaacaccaguga

SEQ ID NO: 29104 - RNA, 19 nt, Homo sapiens
  misc_RNA (1)...(19): siRNA sense strand
ggaagaucaaggacaagaa

SEQ ID NO: 29105 - RNA, 19 nt, Homo sapiens
  misc_RNA (1)...(19): siRNA sense strand
gaagcagacgcacaacaau

SEQ ID NO: 29106 - RNA, 19 nt, Homo sapiens
  misc_RNA (1)...(19): siRNA sense strand
caucggcacuggcaccaau

SEQ ID NO: 29107 - RNA, 19 nt, Homo sapiens
  misc_RNA (1)...(19): siRNA sense strand
gauggucaguggcauguac

SEQ ID NO: 29108 - RNA, 19 nt, Homo sapiens
  misc_RNA (1)...(19): siRNA sense strand
gacaguauccucgucaaga

SEQ ID NO: 29109 - RNA, 19 nt, Homo sapiens
  misc_RNA (1)...(19): siRNA sense strand
aaagagaacgguggaaaug

SEQ ID NO: 29110 - RNA, 19 nt, Homo sapiens
  misc_RNA (1)...(19): siRNA sense strand
caacagccacagucaagau

SEQ ID NO: 29111 - RNA, 19 nt, Homo sapiens
  misc_RNA (1)...(19): siRNA sense strand
ucucugacuucuuggacua

SEQ ID NO: 29112 - RNA, 19 nt, Homo sapiens
  misc_RNA (1)...(19): siRNA sense strand
uuaagaugcugcccuccuu

SEQ ID NO: 29113 - RNA, 19 nt, Homo sapiens
  misc_RNA (1)...(19): siRNA sense strand
cagcacguuugcaccauug

SEQ ID NO: 29114 - RNA, 19 nt, Homo sapiens
  misc_RNA (1)...(19): siRNA sense strand
gaugauaucaggacacacu

SEQ ID NO: 29115 - RNA, 19 nt, Homo sapiens
  misc_RNA (1)...(19): siRNA sense strand
ggacgggacacucuacaag

SEQ ID NO: 29116 - RNA, 19 nt, Homo sapiens
  misc_RNA (1)...(19): siRNA sense strand
gaggaacugaggcacauug

SEQ ID NO: 29117 - RNA, 19 nt, Homo sapiens
  misc_RNA (1)...(19): siRNA sense strand
gaagaugaucagugguaug

SEQ ID NO: 29118 - RNA, 19 nt, Homo sapiens
  misc_RNA (1)...(19): siRNA sense strand
gggaaacaaagguaugaga

SEQ ID NO: 29119 - RNA, 19 nt, Homo sapiens
  misc_RNA (1)...(19): siRNA sense strand
caugaugaccugugcuuau

SEQ ID NO: 29120 - RNA, 19 nt, Homo sapiens
  misc_RNA (1)...(19): siRNA sense strand
agagaacgguggaaaugca

SEQ ID NO: 29121 - RNA, 19 nt, Homo sapiens
  misc_RNA (1)...(19): siRNA sense strand
ugaaccgccugcgugauaa

SEQ ID NO: 29122 - RNA, 19 nt, Homo sapiens
  misc_RNA (1)...(19): siRNA sense strand
ugggagauuucauggagaa

SEQ ID NO: 29123 - RNA, 19 nt, Homo sapiens
  misc_RNA (1)...(19): siRNA sense strand
ggugaaaucguccgcaaca

SEQ ID NO: 29124 - RNA, 19 nt, Homo sapiens
  misc_RNA (1)...(19): siRNA sense strand
caacgggugucuggaugau

SEQ ID NO: 29125 - RNA, 19 nt, Homo sapiens
  misc_RNA (1)...(19): siRNA sense strand
ucacauggaguccgagguu

SEQ ID NO: 29126 - RNA, 19 nt, Homo sapiens
  misc_RNA (1)...(19): siRNA sense strand
ucacguggacaaaggguuu

SEQ ID NO: 29127 - RNA, 19 nt, Homo sapiens
  misc_RNA (1)...(19): siRNA sense strand
caacaaugccgugguuaag

SEQ ID NO: 29128 - RNA, 19 nt, Homo sapiens
  misc_RNA (1)...(19): siRNA sense strand
ucguagcuguggugaauga

SEQ ID NO: 29129 - RNA, 19 nt, Homo sapiens
  misc_RNA (1)...(19): siRNA sense strand
cacauugucuccugcaucu

SEQ ID NO: 29130 - RNA, 19 nt, Homo sapiens
  misc_RNA (1)...(19): siRNA sense strand
cagccacagucaagauguu

SEQ ID NO: 29131 - RNA, 19 nt, Homo sapiens
  misc_RNA (1)...(19): siRNA sense strand
caagacgcacccacaguau

SEQ ID NO: 29132 - RNA, 19 nt, Homo sapiens
  misc_RNA (1)...(19): siRNA sense strand
ccagcacguuugcaccauu

SEQ ID NO: 29133 - RNA, 19 nt, Homo sapiens
  misc_RNA (1)...(19): siRNA sense strand
ccuccacaaugccaaagaa

SEQ ID NO: 29134 - RNA, 19 nt, Homo sapiens
  misc_RNA (1)...(19): siRNA sense strand
caugaugaccuguggcuau

SEQ ID NO: 29135 - RNA, 19 nt, Homo sapiens
  misc_RNA (1)...(19): siRNA sense strand
caagcuucauccacacuuc

SEQ ID NO: 29136 - RNA, 19 nt, Homo sapiens
  misc_RNA (1)...(19): siRNA sense strand
gaacugucaccaaaaugua

SEQ ID NO: 29137 - RNA, 19 nt, Homo sapiens
  misc_RNA (1)...(19): siRNA sense strand
gggaagagcuguuugauca

SEQ ID NO: 29138 - RNA, 19 nt, Homo sapiens
  misc_RNA (1)...(19): siRNA sense strand
ggaaggagaugaagaaugg

SEQ ID NO: 29139 - RNA, 19 nt, Homo sapiens
  misc_RNA (1)...(19): siRNA sense strand
gcaagugaaucaugagaaa

SEQ ID NO: 29140 - RNA, 19 nt, Homo sapiens
  misc_RNA (1)...(19): siRNA sense strand
gggaggauguguaucaaua

SEQ ID NO: 29141 - RNA, 19 nt, Homo sapiens
  misc_RNA (1)...(19): siRNA sense strand
gaaguuaccugugggauuc

SEQ ID NO: 29142 - RNA, 19 nt, Homo sapiens
  misc_RNA (1)...(19): siRNA sense strand
gcacaacaaugccgugguu

SEQ ID NO: 29143 - RNA, 19 nt, Homo sapiens
  misc_RNA (1)...(19): siRNA sense strand
ugaaggaacugucaccaaa

SEQ ID NO: 29144 - RNA, 19 nt, Homo sapiens
  misc_RNA (1)...(19): siRNA sense strand
uggagacgauggaucauua

SEQ ID NO: 29145 - RNA, 19 nt, Homo sapiens
  misc_RNA (1)...(19): siRNA sense strand
cgacggaucucuuuacaag

SEQ ID NO: 29146 - RNA, 19 nt, Homo sapiens
  misc_RNA (1)...(19): siRNA sense strand
gagcagauguggucaaacu

SEQ ID NO: 29147 - RNA, 19 nt, Homo sapiens
  misc_RNA (1)...(19): siRNA sense strand
gaucaaggacaagaaguua

SEQ ID NO: 29148 - RNA, 19 nt, Homo sapiens
  misc_RNA (1)...(19): siRNA sense strand
gagaagaugaucaguggua

SEQ ID NO: 29149 - RNA, 19 nt, Homo sapiens
  misc_RNA (1)...(19): siRNA sense strand
aaacaaagguaugagaaga

SEQ ID NO: 29150 - RNA, 19 nt, Homo sapiens
  misc_RNA (1)...(19): siRNA sense strand
gcacauugaucugguggaa

SEQ ID NO: 29151 - RNA, 19 nt, Homo sapiens
  misc_RNA (1)...(19): siRNA sense strand
aaaggaagaucaaggacaa

SEQ ID NO: 29152 - RNA, 19 nt, Homo sapiens
  misc_RNA (1)...(19): siRNA sense strand
gaacugaggcacauugauc

SEQ ID NO: 29153 - RNA, 19 nt, Homo sapiens
  misc_RNA (1)...(19): siRNA sense strand
gaagagcuguuugaucaca

SEQ ID NO: 29154 - RNA, 19 nt, Homo sapiens
  misc_RNA (1)...(19): siRNA sense strand
ggaaacaaagguaugagaa

SEQ ID NO: 29155 - RNA, 19 nt, Homo sapiens
  misc_RNA (1)...(19): siRNA sense strand
ggacaaagcgauuuaaagc

SEQ ID NO: 29156 - RNA, 19 nt, Homo sapiens
  misc_RNA (1)...(19): siRNA sense strand
ggaagcagacgcacaacaa

SEQ ID NO: 29157 - RNA, 19 nt, Homo sapiens
  misc_RNA (1)...(19): siRNA sense strand
gaagacauccggacagagu

SEQ ID NO: 29158 - RNA, 19 nt, Homo sapiens
  misc_RNA (1)...(19): siRNA sense strand
caucguagcuguggugaau

SEQ ID NO: 29159 - RNA, 19 nt, Homo sapiens
  misc_RNA (1)...(19): siRNA sense strand
ggacuggaccgucugaaug

SEQ ID NO: 29160 - RNA, 19 nt, Homo sapiens
  misc_RNA (1)...(19): siRNA sense strand
gaucuacgccauuccuauu

SEQ ID NO: 29161 - RNA, 19 nt, Homo sapiens
  misc_RNA (1)...(19): siRNA sense strand
gaugaucagugguauguac

SEQ ID NO: 29162 - RNA, 19 nt, Homo sapiens
  misc_RNA (1)...(19): siRNA sense strand
gacgauggaucauuagaag

SEQ ID NO: 29163 - RNA, 19 nt, Homo sapiens
  misc_RNA (1)...(19): siRNA sense strand
gcacagaggcaagcagcua

SEQ ID NO: 29164 - RNA, 19 nt, Homo sapiens
  misc_RNA (1)...(19): siRNA sense strand
cugcaucucugacuucuug

SEQ ID NO: 29165 - RNA, 19 nt, Homo sapiens
  misc_RNA (1)...(19): siRNA sense strand
gaguggagccguccgauga

SEQ ID NO: 29166 - RNA, 19 nt, Homo sapiens
  misc_RNA (1)...(19): siRNA sense strand
gaaacucucauagauauca

SEQ ID NO: 29167 - RNA, 19 nt, Homo sapiens
  misc_RNA (1)...(19): siRNA sense strand
caccaaugcuugcuacaug

SEQ ID NO: 29168 - RNA, 19 nt, Homo sapiens
  misc_RNA (1)...(19): siRNA sense strand
gaaaauccguagugggaaa

SEQ ID NO: 29169 - RNA, 19 nt, Homo sapiens
  misc_RNA (1)...(19): siRNA sense strand
uggcugcgguuguggauaa

SEQ ID NO: 29170 - RNA, 19 nt, Homo sapiens
  misc_RNA (1)...(19): siRNA sense strand
gggcuucacguucucauuu

SEQ ID NO: 29171 - RNA, 19 nt, Homo sapiens
  misc_RNA (1)...(19): siRNA sense strand
gagguuggacucauuguug

SEQ ID NO: 29172 - RNA, 19 nt, Homo sapiens
  misc_RNA (1)...(19): siRNA sense strand
gagcagcaccggcagauag

SEQ ID NO: 29173 - RNA, 19 nt, Homo sapiens
  misc_RNA (1)...(19): siRNA sense strand
gauaagauccgcgagaaca

SEQ ID NO: 29174 - RNA, 19 nt, Homo sapiens
  misc_RNA (1)...(19): siRNA sense strand
gaaaucguccgcaacaucu

SEQ ID NO: 29175 - RNA, 19 nt, Homo sapiens
  misc_RNA (1)...(19): siRNA sense strand
gaggagacccuggcucauu

SEQ ID NO: 29176 - RNA, 19 nt, Homo sapiens
  misc_RNA (1)...(19): siRNA sense strand
ggucaaacugcuuaacaaa

SEQ ID NO: 29177 - RNA, 19 nt, Homo sapiens
  misc_RNA (1)...(19): siRNA sense strand
ccaaguuucucucucagau

SEQ ID NO: 29178 - RNA, 19 nt, Homo sapiens
  misc_RNA (1)...(19): siRNA sense strand
guauguaccugggugaaau

SEQ ID NO: 29179 - RNA, 19 nt, Homo sapiens
  misc_RNA (1)...(19): siRNA sense strand
gaaacaaagguaugagaag

SEQ ID NO: 29180 - RNA, 19 nt, Homo sapiens
  misc_RNA (1)...(19): siRNA sense strand
gaccgagaauggugacuuc

SEQ ID NO: 29181 - RNA, 19 nt, Homo sapiens
  misc_RNA (1)...(19): siRNA sense strand
gauguggucaaacugcuua

SEQ ID NO: 29182 - RNA, 19 nt, Homo sapiens
  misc_RNA (1)...(19): siRNA sense strand
ccaugcggcucuccgauga

SEQ ID NO: 29183 - RNA, 19 nt, Homo sapiens
  misc_RNA (1)...(19): siRNA sense strand
caacaagaucuacgccauu

SEQ ID NO: 29184 - RNA, 19 nt, Homo sapiens
  misc_RNA (1)...(19): siRNA sense strand
ggagagcugguucgacuga

SEQ ID NO: 29185 - RNA, 19 nt, Homo sapiens
  misc_RNA (1)...(19): siRNA sense strand
uuaaucgacuucaccaaga

SEQ ID NO: 29186 - RNA, 19 nt, Homo sapiens
  misc_RNA (1)...(19): siRNA sense strand
gaaaugcacaacaagaucu

SEQ ID NO: 29187 - RNA, 19 nt, Homo sapiens
  misc_RNA (1)...(19): siRNA sense strand
ggaaaugcacaacaagauc

SEQ ID NO: 29188 - RNA, 19 nt, Homo sapiens
  misc_RNA (1)...(19): siRNA sense strand
aggagacccuggcucauuu

SEQ ID NO: 29189 - RNA, 19 nt, Homo sapiens
  misc_RNA (1)...(19): siRNA sense strand
gaagaucaaggacaagaag

SEQ ID NO: 29190 - RNA, 19 nt, Homo sapiens
  misc_RNA (1)...(19): siRNA sense strand
agaccaaguuucucucuca

SEQ ID NO: 29191 - RNA, 19 nt, Homo sapiens
  misc_RNA (1)...(19): siRNA sense strand
ccacaaugccaaagaaauc

SEQ ID NO: 29192 - RNA, 19 nt, Homo sapiens
  misc_RNA (1)...(19): siRNA sense strand
uaaggaaggccuccacaau

SEQ ID NO: 29193 - RNA, 19 nt, Homo sapiens
  misc_RNA (1)...(19): siRNA sense strand
uagaagacauccggacaga

SEQ ID NO: 29194 - RNA, 19 nt, Homo sapiens
  misc_RNA (1)...(19): siRNA sense strand
cagcagcuaggucugaaua

SEQ ID NO: 29195 - RNA, 19 nt, Homo sapiens
  misc_RNA (1)...(19): siRNA sense strand
gggugcaagugaaucauga

SEQ ID NO: 29196 - RNA, 19 nt, Homo sapiens
  misc_RNA (1)...(19): siRNA sense strand
uaaucgacuucaccaagaa

SEQ ID NO: 29197 - RNA, 19 nt, Homo sapiens
  misc_RNA (1)...(19): siRNA sense strand
acaaagguaugagaagaug

SEQ ID NO: 29198 - RNA, 19 nt, Homo sapiens
  misc_RNA (1)...(19): siRNA sense strand
ccuaaaugcugggaaacaa

SEQ ID NO: 29199 - RNA, 19 nt, Homo sapiens
  misc_RNA (1)...(19): siRNA sense strand
acaagacgcacccacagua

SEQ ID NO: 29200 - RNA, 19 nt, Homo sapiens
  misc_RNA (1)...(19): siRNA sense strand
ucaggaaggagaugaagaa

SEQ ID NO: 29201 - RNA, 19 nt, Homo sapiens
  misc_RNA (1)...(19): siRNA sense strand
ugaagaacguggagauggu

SEQ ID NO: 29202 - RNA, 19 nt, Homo sapiens
  misc_RNA (1)...(19): siRNA sense strand
acaaugccgugguuaagau

SEQ ID NO: 29203 - RNA, 19 nt, Homo sapiens
  misc_RNA (1)...(19): siRNA sense strand
ggaaguuuaacaccaguga

SEQ ID NO: 29204 - RNA, 19 nt, Homo sapiens
  misc_RNA (1)...(19): siRNA sense strand
ggaagaucaaggacaagaa

SEQ ID NO: 29205 - RNA, 19 nt, Homo sapiens
  misc_RNA (1)...(19): siRNA sense strand
gaagcagacgcacaacaau

SEQ ID NO: 29206 - RNA, 19 nt, Homo sapiens
  misc_RNA (1)...(19): siRNA sense strand
caucggcacuggcaccaau

SEQ ID NO: 29207 - RNA, 19 nt, Homo sapiens
  misc_RNA (1)...(19): siRNA sense strand
gauggucaguggcauguac

SEQ ID NO: 29208 - RNA, 19 nt, Homo sapiens
  misc_RNA (1)...(19): siRNA sense strand
gacaguauccucgucaaga

SEQ ID NO: 29209 - RNA, 19 nt, Homo sapiens
  misc_RNA (1)...(19): siRNA sense strand
aaagagaacgguggaaaug

SEQ ID NO: 29210 - RNA, 19 nt, Homo sapiens
  misc_RNA (1)...(19): siRNA sense strand
caacagccacagucaagau

SEQ ID NO: 29211 - RNA, 19 nt, Homo sapiens
  misc_RNA (1)...(19): siRNA sense strand
ucucugacuucuuggacua

SEQ ID NO: 29212 - RNA, 19 nt, Homo sapiens
  misc_RNA (1)...(19): siRNA sense strand
uuaagaugcugcccuccuu

SEQ ID NO: 29213 - RNA, 19 nt, Homo sapiens
  misc_RNA (1)...(19): siRNA sense strand
cagcacguuugcaccauug

SEQ ID NO: 29214 - RNA, 19 nt, Homo sapiens
  misc_RNA (1)...(19): siRNA sense strand
gaugauaucaggacacacu

SEQ ID NO: 29215 - RNA, 19 nt, Homo sapiens
  misc_RNA (1)...(19): siRNA sense strand
ggacgggacacucuacaag

SEQ ID NO: 29216 - RNA, 19 nt, Homo sapiens
  misc_RNA (1)...(19): siRNA sense strand
gaggaacugaggcacauug

SEQ ID NO: 29217 - RNA, 19 nt, Homo sapiens
  misc_RNA (1)...(19): siRNA sense strand
gaagaugaucagugguaug

SEQ ID NO: 29218 - RNA, 19 nt, Homo sapiens
  misc_RNA (1)...(19): siRNA sense strand
gggaaacaaagguaugaga

SEQ ID NO: 29219 - RNA, 19 nt, Homo sapiens
  misc_RNA (1)...(19): siRNA sense strand
caugaugaccugugcuuau

SEQ ID NO: 29220 - RNA, 19 nt, Homo sapiens
  misc_RNA (1)...(19): siRNA sense strand
agagaacgguggaaaugca

SEQ ID NO: 29221 - RNA, 19 nt, Homo sapiens
  misc_RNA (1)...(19): siRNA sense strand
ugaaccgccugcgugauaa

SEQ ID NO: 29222 - RNA, 19 nt, Homo sapiens
  misc_RNA (1)...(19): siRNA sense strand
ugggagauuucauggagaa

SEQ ID NO: 29223 - RNA, 19 nt, Homo sapiens
  misc_RNA (1)...(19): siRNA sense strand
ggugaaaucguccgcaaca

SEQ ID NO: 29224 - RNA, 19 nt, Homo sapiens
  misc_RNA (1)...(19): siRNA sense strand
caacgggugucuggaugau

SEQ ID NO: 29225 - RNA, 19 nt, Homo sapiens
  misc_RNA (1)...(19): siRNA sense strand
ucacauggaguccgagguu

SEQ ID NO: 29226 - RNA, 19 nt, Homo sapiens
  misc_RNA (1)...(19): siRNA sense strand
ucacguggacaaaggguuu

SEQ ID NO: 29227 - RNA, 19 nt, Homo sapiens
  misc_RNA (1)...(19): siRNA sense strand
caacaaugccgugguuaag

SEQ ID NO: 29228 - RNA, 19 nt, Homo sapiens
  misc_RNA (1)...(19): siRNA sense strand
ucguagcuguggugaauga

SEQ ID NO: 29229 - RNA, 19 nt, Homo sapiens
  misc_RNA (1)...(19): siRNA sense strand
cacauugucuccugcaucu

SEQ ID NO: 29230 - RNA, 19 nt, Homo sapiens
  misc_RNA (1)...(19): siRNA sense strand
cagccacagucaagauguu

SEQ ID NO: 29231 - RNA, 19 nt, Homo sapiens
  misc_RNA (1)...(19): siRNA sense strand
caagacgcacccacaguau

SEQ ID NO: 29232 - RNA, 19 nt, Homo sapiens
  misc_RNA (1)...(19): siRNA sense strand
ccagcacguuugcaccauu

SEQ ID NO: 29233 - RNA, 19 nt, Homo sapiens
  misc_RNA (1)...(19): siRNA sense strand
ccuccacaaugccaaagaa

SEQ ID NO: 29234 - RNA, 19 nt, Homo sapiens
  misc_RNA (1)...(19): siRNA sense strand
caugaugaccuguggcuau

SEQ ID NO: 29235 - RNA, 19 nt, Homo sapiens
  misc_RNA (1)...(19): siRNA sense strand
caagcuucauccacacuuc

SEQ ID NO: 29236 - RNA, 19 nt, Homo sapiens
  misc_RNA (1)...(19): siRNA sense strand
gaacugucaccaaaaugua

SEQ ID NO: 29237 - RNA, 19 nt, Homo sapiens
  misc_RNA (1)...(19): siRNA sense strand
gggaagagcuguuugauca

SEQ ID NO: 29238 - RNA, 19 nt, Homo sapiens
  misc_RNA (1)...(19): siRNA sense strand
ggaaggagaugaagaaugg

SEQ ID NO: 29239 - RNA, 19 nt, Homo sapiens
  misc_RNA (1)...(19): siRNA sense strand
gcaagugaaucaugagaaa

SEQ ID NO: 29240 - RNA, 19 nt, Homo sapiens
  misc_RNA (1)...(19): siRNA sense strand
gggaggauguguaucaaua

SEQ ID NO: 29241 - RNA, 19 nt, Homo sapiens
  misc_RNA (1)...(19): siRNA sense strand
gaaguuaccugugggauuc

SEQ ID NO: 29242 - RNA, 19 nt, Homo sapiens
  misc_RNA (1)...(19): siRNA sense strand
gcacaacaaugccgugguu

SEQ ID NO: 29243 - RNA, 19 nt, Homo sapiens
  misc_RNA (1)...(19): siRNA sense strand
ugaaggaacugucaccaaa

SEQ ID NO: 29244 - RNA, 19 nt, Homo sapiens
  misc_RNA (1)...(19): siRNA sense strand
uggagacgauggaucauua

SEQ ID NO: 29245 - RNA, 19 nt, Homo sapiens
  misc_RNA (1)...(19): siRNA sense strand
cgacggaucucuuuacaag

SEQ ID NO: 29246 - RNA, 19 nt, Homo sapiens
  misc_RNA (1)...(19): siRNA sense strand
gagcagauguggucaaacu

SEQ ID NO: 29247 - RNA, 19 nt, Homo sapiens
  misc_RNA (1)...(19): siRNA sense strand
gaucaaggacaagaaguua

SEQ ID NO: 29248 - RNA, 19 nt, Homo sapiens
  misc_RNA (1)...(19): siRNA sense strand
gagaagaugaucaguggua

SEQ ID NO: 29249 - RNA, 19 nt, Homo sapiens
  misc_RNA (1)...(19): siRNA sense strand
aaacaaagguaugagaaga

SEQ ID NO: 29250 - RNA, 19 nt, Homo sapiens
  misc_RNA (1)...(19): siRNA sense strand
gcacauugaucugguggaa

SEQ ID NO: 29251 - RNA, 19 nt, Homo sapiens
  misc_RNA (1)...(19): siRNA sense strand
aaaggaagaucaaggacaa

SEQ ID NO: 29252 - RNA, 19 nt, Homo sapiens
  misc_RNA (1)...(19): siRNA sense strand
gaacugaggcacauugauc

SEQ ID NO: 29253 - RNA, 19 nt, Homo sapiens
  misc_RNA (1)...(19): siRNA sense strand
gaagagcuguuugaucaca

SEQ ID NO: 29254 - RNA, 19 nt, Homo sapiens
  misc_RNA (1)...(19): siRNA sense strand
ggaaacaaagguaugagaa

SEQ ID NO: 29255 - RNA, 19 nt, Homo sapiens
  misc_RNA (1)...(19): siRNA sense strand
ggacaaagcgauuuaaagc

SEQ ID NO: 29256 - RNA, 19 nt, Homo sapiens
  misc_RNA (1)...(19): siRNA sense strand
ggaagcagacgcacaacaa

SEQ ID NO: 29257 - RNA, 19 nt, Homo sapiens
  misc_RNA (1)...(19): siRNA sense strand
gaagacauccggacagagu

SEQ ID NO: 29258 - RNA, 19 nt, Homo sapiens
  misc_RNA (1)...(19): siRNA sense strand
caucguagcuguggugaau

SEQ ID NO: 29259 - RNA, 19 nt, Homo sapiens
  misc_RNA (1)...(19): siRNA sense strand
ggacuggaccgucugaaug

SEQ ID NO: 29260 - RNA, 19 nt, Homo sapiens
  misc_RNA (1)...(19): siRNA sense strand
gaucuacgccauuccuauu

SEQ ID NO: 29261 - RNA, 19 nt, Homo sapiens
  misc_RNA (1)...(19): siRNA sense strand
gaugaucagugguauguac

SEQ ID NO: 29262 - RNA, 19 nt, Homo sapiens
  misc_RNA (1)...(19): siRNA sense strand
gacgauggaucauuagaag

SEQ ID NO: 29263 - RNA, 19 nt, Homo sapiens
  misc_RNA (1)...(19): siRNA sense strand
gcacagaggcaagcagcua

SEQ ID NO: 29264 - RNA, 19 nt, Homo sapiens
  misc_RNA (1)...(19): siRNA sense strand
cugcaucucugacuucuug

SEQ ID NO: 29265 - RNA, 19 nt, Homo sapiens
  misc_RNA (1)...(19): siRNA sense strand
gaguggagccguccgauga

SEQ ID NO: 29266 - RNA, 19 nt, Homo sapiens
  misc_RNA (1)...(19): siRNA sense strand
gaaacucucauagauauca

SEQ ID NO: 29267 - RNA, 19 nt, Homo sapiens
  misc_RNA (1)...(19): siRNA sense strand
caccaaugcuugcuacaug

SEQ ID NO: 29268 - RNA, 19 nt, Homo sapiens
  misc_RNA (1)...(19): siRNA sense strand
gaaaauccguagugggaaa

SEQ ID NO: 29269 - RNA, 19 nt, Homo sapiens
  misc_RNA (1)...(19): siRNA sense strand
uggcugcgguuguggauaa

SEQ ID NO: 29270 - RNA, 19 nt, Homo sapiens
  misc_RNA (1)...(19): siRNA sense strand
gggcuucacguucucauuu

SEQ ID NO: 29271 - RNA, 19 nt, Homo sapiens
  misc_RNA (1)...(19): siRNA sense strand
gagguuggacucauuguug

SEQ ID NO: 29272 - RNA, 19 nt, Homo sapiens
  misc_RNA (1)...(19): siRNA sense strand
gagcagcaccggcagauag

SEQ ID NO: 29273 - RNA, 19 nt, Homo sapiens
  misc_RNA (1)...(19): siRNA sense strand
gauaagauccgcgagaaca

SEQ ID NO: 29274 - RNA, 19 nt, Homo sapiens
  misc_RNA (1)...(19): siRNA sense strand
gaaaucguccgcaacaucu

SEQ ID NO: 29275 - RNA, 19 nt, Homo sapiens
  misc_RNA (1)...(19): siRNA sense strand
gaggagacccuggcucauu

SEQ ID NO: 29276 - RNA, 19 nt, Homo sapiens
  misc_RNA (1)...(19): siRNA sense strand
ggucaaacugcuuaacaaa

SEQ ID NO: 29277 - RNA, 19 nt, Homo sapiens
  misc_RNA (1)...(19): siRNA sense strand
ccaaguuucucucucagau

SEQ ID NO: 29278 - RNA, 19 nt, Homo sapiens
  misc_RNA (1)...(19): siRNA sense strand
guauguaccugggugaaau

SEQ ID NO: 29279 - RNA, 19 nt, Homo sapiens
  misc_RNA (1)...(19): siRNA sense strand
gaaacaaagguaugagaag

SEQ ID NO: 29280 - RNA, 19 nt, Homo sapiens
  misc_RNA (1)...(19): siRNA sense strand
gaccgagaauggugacuuc

SEQ ID NO: 29281 - RNA, 19 nt, Homo sapiens
  misc_RNA (1)...(19): siRNA sense strand
gauguggucaaacugcuua

SEQ ID NO: 29282 - RNA, 19 nt, Homo sapiens
  misc_RNA (1)...(19): siRNA sense strand
ccaugcggcucuccgauga

SEQ ID NO: 29283 - RNA, 19 nt, Homo sapiens
  misc_RNA (1)...(19): siRNA sense strand
caacaagaucuacgccauu

SEQ ID NO: 29284 - RNA, 19 nt, Homo sapiens
  misc_RNA (1)...(19): siRNA sense strand
ggagagcugguucgacuga

SEQ ID NO: 29285 - RNA, 19 nt, Homo sapiens
  misc_RNA (1)...(19): siRNA sense strand
uuaaucgacuucaccaaga

SEQ ID NO: 29286 - RNA, 19 nt, Homo sapiens
  misc_RNA (1)...(19): siRNA sense strand
gaaaugcacaacaagaucu

SEQ ID NO: 29287 - RNA, 19 nt, Homo sapiens
  misc_RNA (1)...(19): siRNA sense strand
ggaaaugcacaacaagauc

SEQ ID NO: 29288 - RNA, 19 nt, Homo sapiens
  misc_RNA (1)...(19): siRNA sense strand
aggagacccuggcucauuu

SEQ ID NO: 29289 - RNA, 19 nt, Homo sapiens
  misc_RNA (1)...(19): siRNA sense strand
gaagaucaaggacaagaag

SEQ ID NO: 29290 - RNA, 19 nt, Homo sapiens
  misc_RNA (1)...(19): siRNA sense strand
agaccaaguuucucucuca

SEQ ID NO: 29291 - RNA, 19 nt, Homo sapiens
  misc_RNA (1)...(19): siRNA sense strand
ccacaaugccaaagaaauc

SEQ ID NO: 29292 - RNA, 19 nt, Homo sapiens
  misc_RNA (1)...(19): siRNA sense strand
uaaggaaggccuccacaau

SEQ ID NO: 29293 - RNA, 19 nt, Homo sapiens
  misc_RNA (1)...(19): siRNA sense strand
uagaagacauccggacaga

SEQ ID NO: 29294 - RNA, 19 nt, Homo sapiens
  misc_RNA (1)...(19): siRNA sense strand
cagcagcuaggucugaaua

SEQ ID NO: 29295 - RNA, 19 nt, Homo sapiens
  misc_RNA (1)...(19): siRNA sense strand
gggugcaagugaaucauga

SEQ ID NO: 29296 - RNA, 19 nt, Homo sapiens
  misc_RNA (1)...(19): siRNA sense strand
uaaucgacuucaccaagaa

SEQ ID NO: 29297 - RNA, 19 nt, Homo sapiens
  misc_RNA (1)...(19): siRNA sense strand
acaaagguaugagaagaug

SEQ ID NO: 29298 - RNA, 19 nt, Homo sapiens
  misc_RNA (1)...(19): siRNA sense strand
ccuaaaugcugggaaacaa

SEQ ID NO: 29299 - RNA, 19 nt, Homo sapiens
  misc_RNA (1)...(19): siRNA sense strand
acaagacgcacccacagua

SEQ ID NO: 29300 - RNA, 19 nt, Homo sapiens
  misc_RNA (1)...(19): siRNA sense strand
ucaggaaggagaugaagaa

SEQ ID NO: 29301 - RNA, 19 nt, Homo sapiens
  misc_RNA (1)...(19): siRNA sense strand
ugaagaacguggagauggu

SEQ ID NO: 29302 - RNA, 19 nt, Homo sapiens
  misc_RNA (1)...(19): siRNA sense strand
acaaugccgugguuaagau

SEQ ID NO: 29303 - RNA, 19 nt, Homo sapiens
  misc_RNA (1)...(19): siRNA sense strand
ggaaguuuaacaccaguga

SEQ ID NO: 29304 - RNA, 19 nt, Homo sapiens
  misc_RNA (1)...(19): siRNA sense strand
ggaagaucaaggacaagaa

SEQ ID NO: 29305 - RNA, 19 nt, Homo sapiens
  misc_RNA (1)...(19): siRNA sense strand
gaagcagacgcacaacaau

SEQ ID NO: 29306 - RNA, 19 nt, Homo sapiens
  misc_RNA (1)...(19): siRNA sense strand
caucggcacuggcaccaau

SEQ ID NO: 29307 - RNA, 19 nt, Homo sapiens
  misc_RNA (1)...(19): siRNA sense strand
gauggucaguggcauguac

SEQ ID NO: 29308 - RNA, 19 nt, Homo sapiens
  misc_RNA (1)...(19): siRNA sense strand
gacaguauccucgucaaga

SEQ ID NO: 29309 - RNA, 19 nt, Homo sapiens
  misc_RNA (1)...(19): siRNA sense strand
aaagagaacgguggaaaug

SEQ ID NO: 29310 - RNA, 19 nt, Homo sapiens
  misc_RNA (1)...(19): siRNA sense strand
caacagccacagucaagau

SEQ ID NO: 29311 - RNA, 19 nt, Homo sapiens
  misc_RNA (1)...(19): siRNA sense strand
ucucugacuucuuggacua

SEQ ID NO: 29312 - RNA, 19 nt, Homo sapiens
  misc_RNA (1)...(19): siRNA sense strand
uuaagaugcugcccuccuu

SEQ ID NO: 29313 - RNA, 19 nt, Homo sapiens
  misc_RNA (1)...(19): siRNA sense strand
cagcacguuugcaccauug

SEQ ID NO: 29314 - RNA, 19 nt, Homo sapiens
  misc_RNA (1)...(19): siRNA sense strand
gaugauaucaggacacacu

SEQ ID NO: 29315 - RNA, 19 nt, Homo sapiens
  misc_RNA (1)...(19): siRNA sense strand
ggacgggacacucuacaag

SEQ ID NO: 29316 - RNA, 19 nt, Homo sapiens
  misc_RNA (1)...(19): siRNA sense strand
gaggaacugaggcacauug

SEQ ID NO: 29317 - RNA, 19 nt, Homo sapiens
  misc_RNA (1)...(19): siRNA sense strand
gaagaugaucagugguaug

SEQ ID NO: 29318 - RNA, 19 nt, Homo sapiens
  misc_RNA (1)...(19): siRNA sense strand
gggaaacaaagguaugaga

SEQ ID NO: 29319 - RNA, 19 nt, Homo sapiens
  misc_RNA (1)...(19): siRNA sense strand
caugaugaccugugcuuau

SEQ ID NO: 29320 - RNA, 19 nt, Homo sapiens
  misc_RNA (1)...(19): siRNA sense strand
agagaacgguggaaaugca

SEQ ID NO: 29321 - RNA, 19 nt, Homo sapiens
  misc_RNA (1)...(19): siRNA sense strand
ugaaccgccugcgugauaa

SEQ ID NO: 29322 - RNA, 19 nt, Homo sapiens
  misc_RNA (1)...(19): siRNA sense strand
ugggagauuucauggagaa

SEQ ID NO: 29323 - RNA, 19 nt, Homo sapiens
  misc_RNA (1)...(19): siRNA sense strand
ggugaaaucguccgcaaca

SEQ ID NO: 29324 - RNA, 19 nt, Homo sapiens
  misc_RNA (1)...(19): siRNA sense strand
caacgggugucuggaugau

SEQ ID NO: 29325 - RNA, 19 nt, Homo sapiens
  misc_RNA (1)...(19): siRNA sense strand
ucacauggaguccgagguu

SEQ ID NO: 29326 - RNA, 19 nt, Homo sapiens
  misc_RNA (1)...(19): siRNA sense strand
ucacguggacaaaggguuu

SEQ ID NO: 29327 - RNA, 19 nt, Homo sapiens
  misc_RNA (1)...(19): siRNA sense strand
caacaaugccgugguuaag

SEQ ID NO: 29328 - RNA, 19 nt, Homo sapiens
  misc_RNA (1)...(19): siRNA sense strand
ucguagcuguggugaauga

SEQ ID NO: 29329 - RNA, 19 nt, Homo sapiens
  misc_RNA (1)...(19): siRNA sense strand
cacauugucuccugcaucu

SEQ ID NO: 29330 - RNA, 19 nt, Homo sapiens
  misc_RNA (1)...(19): siRNA sense strand
cagccacagucaagauguu

SEQ ID NO: 29331 - RNA, 19 nt, Homo sapiens
  misc_RNA (1)...(19): siRNA sense strand
caagacgcacccacaguau

SEQ ID NO: 29332 - RNA, 19 nt, Homo sapiens
  misc_RNA (1)...(19): siRNA sense strand
ccagcacguuugcaccauu

SEQ ID NO: 29333 - RNA, 19 nt, Homo sapiens
  misc_RNA (1)...(19): siRNA sense strand
ccuccacaaugccaaagaa

SEQ ID NO: 29334 - RNA, 19 nt, Homo sapiens
  misc_RNA (1)...(19): siRNA sense strand
caugaugaccuguggcuau

SEQ ID NO: 29335 - RNA, 19 nt, Homo sapiens
  misc_RNA (1)...(19): siRNA sense strand
caagcuucauccacacuuc

SEQ ID NO: 29336 - RNA, 19 nt, Homo sapiens
  misc_RNA (1)...(19): siRNA sense strand
gaacugucaccaaaaugua

SEQ ID NO: 29337 - RNA, 19 nt, Homo sapiens
  misc_RNA (1)...(19): siRNA sense strand
gaaagaagcgcgugccuua

SEQ ID NO: 29338 - RNA, 19 nt, Homo sapiens
  misc_RNA (1)...(19): siRNA sense strand
gggaauacgccacgaauaa

SEQ ID NO: 29339 - RNA, 19 nt, Homo sapiens
  misc_RNA (1)...(19): siRNA sense strand
ccgacgagcucaacaagaa

SEQ ID NO: 29340 - RNA, 19 nt, Homo sapiens
  misc_RNA (1)...(19): siRNA sense strand
ggaauacgccacgaauaaa

SEQ ID NO: 29341 - RNA, 19 nt, Homo sapiens
  misc_RNA (1)...(19): siRNA sense strand
auaccaaggugcaauuaaa

SEQ ID NO: 29342 - RNA, 19 nt, Homo sapiens
  misc_RNA (1)...(19): siRNA sense strand
gcggacaaguacauggaua

SEQ ID NO: 29343 - RNA, 19 nt, Homo sapiens
  misc_RNA (1)...(19): siRNA sense strand
aagaagcgcgugccuuaua

SEQ ID NO: 29344 - RNA, 19 nt, Homo sapiens
  misc_RNA (1)...(19): siRNA sense strand
gaacaggaggguuaaagag

SEQ ID NO: 29345 - RNA, 19 nt, Homo sapiens
  misc_RNA (1)...(19): siRNA sense strand
gaauacgccacgaauaaau

SEQ ID NO: 29346 - RNA, 19 nt, Homo sapiens
  misc_RNA (1)...(19): siRNA sense strand
acaggaggguuaaagagaa

SEQ ID NO: 29347 - RNA, 19 nt, Homo sapiens
  misc_RNA (1)...(19): siRNA sense strand
caggaggguuaaagagaaa

SEQ ID NO: 29348 - RNA, 19 nt, Homo sapiens
  misc_RNA (1)...(19): siRNA sense strand
ggacaaacggaggcggaua

SEQ ID NO: 29349 - RNA, 19 nt, Homo sapiens
  misc_RNA (1)...(19): siRNA sense strand
ccacgacgaaucucucuga

SEQ ID NO: 29350 - RNA, 19 nt, Homo sapiens
  misc_RNA (1)...(19): siRNA sense strand
gacaaacggaggcggauau

SEQ ID NO: 29351 - RNA, 19 nt, Homo sapiens
  misc_RNA (1)...(19): siRNA sense strand
ggauaucagccacgacgaa

SEQ ID NO: 29352 - RNA, 19 nt, Homo sapiens
  misc_RNA (1)...(19): siRNA sense strand
gcuggaacggccaaaugua

SEQ ID NO: 29353 - RNA, 19 nt, Homo sapiens
  misc_RNA (1)...(19): siRNA sense strand
gaucgagcccaccgucaug

SEQ ID NO: 29354 - RNA, 19 nt, Homo sapiens
  misc_RNA (1)...(19): siRNA sense strand
aaagucaucaacaaacuga

SEQ ID NO: 29355 - RNA, 19 nt, Homo sapiens
  misc_RNA (1)...(19): siRNA sense strand
ccaccgucauguuucucua

SEQ ID NO: 29356 - RNA, 19 nt, Homo sapiens
  misc_RNA (1)...(19): siRNA sense strand
ucauguuucucuacgacaa

SEQ ID NO: 29357 - RNA, 19 nt, Homo sapiens
  misc_RNA (1)...(19): siRNA sense strand
ggccuuaccaccaccauca

SEQ ID NO: 29358 - RNA, 19 nt, Homo sapiens
  misc_RNA (1)...(19): siRNA sense strand
uuccagaacaggaggguua

SEQ ID NO: 29359 - RNA, 19 nt, Homo sapiens
  misc_RNA (1)...(19): siRNA sense strand
gcucaacaagaacauggaa

SEQ ID NO: 29360 - RNA, 19 nt, Homo sapiens
  misc_RNA (1)...(19): siRNA sense strand
gauaucagccacgacgaau

SEQ ID NO: 29361 - RNA, 19 nt, Homo sapiens
  misc_RNA (1)...(19): siRNA sense strand
cgagcccaccgucauguuu

SEQ ID NO: 29362 - RNA, 19 nt, Homo sapiens
  misc_RNA (1)...(19): siRNA sense strand
agaagcgcgugccuuauac

SEQ ID NO: 29363 - RNA, 19 nt, Homo sapiens
  misc_RNA (1)...(19): siRNA sense strand
aauacgccacgaauaaauu

SEQ ID NO: 29364 - RNA, 19 nt, Homo sapiens
  misc_RNA (1)...(19): siRNA sense strand
agaacaggaggguuaaaga

SEQ ID NO: 29365 - RNA, 19 nt, Homo sapiens
  misc_RNA (1)...(19): siRNA sense strand
ggaacggccaaauguacug

SEQ ID NO: 29366 - RNA, 19 nt, Homo sapiens
  misc_RNA (1)...(19): siRNA sense strand
aaacggaggcggauaucag

SEQ ID NO: 29367 - RNA, 19 nt, Homo sapiens
  misc_RNA (1)...(19): siRNA sense strand
cgggaauacgccacgaaua

SEQ ID NO: 29368 - RNA, 19 nt, Homo sapiens
  misc_RNA (1)...(19): siRNA sense strand
uauaccaaggugcaauuaa

SEQ ID NO: 29369 - RNA, 19 nt, Homo sapiens
  misc_RNA (1)...(19): siRNA sense strand
caaauguacugccccaaag

SEQ ID NO: 29370 - RNA, 19 nt, Homo sapiens
  misc_RNA (1)...(19): siRNA sense strand
gagcccaccgucauguuuc

SEQ ID NO: 29371 - RNA, 19 nt, Homo sapiens
  misc_RNA (1)...(19): siRNA sense strand
gagcggcaggucacaaucu

SEQ ID NO: 29372 - RNA, 19 nt, Homo sapiens
  misc_RNA (1)...(19): siRNA sense strand
uaucagccacgacgaaucu

SEQ ID NO: 29373 - RNA, 19 nt, Homo sapiens
  misc_RNA (1)...(19): siRNA sense strand
augccuggcuaccuggaua

SEQ ID NO: 29374 - RNA, 19 nt, Homo sapiens
  misc_RNA (1)...(19): siRNA sense strand
ucggaugccagcuccuaua

SEQ ID NO: 29375 - RNA, 19 nt, Homo sapiens
  misc_RNA (1)...(19): siRNA sense strand
ggaucgagcccaccgucau

SEQ ID NO: 29376 - RNA, 19 nt, Homo sapiens
  misc_RNA (1)...(19): siRNA sense strand
gaacuugaacgggaauacg

SEQ ID NO: 29377 - RNA, 19 nt, Homo sapiens
  misc_RNA (1)...(19): siRNA sense strand
agucaucaacaaacugaaa

SEQ ID NO: 29378 - RNA, 19 nt, Homo sapiens
  misc_RNA (1)...(19): siRNA sense strand
gagagugccuuacaccaaa

SEQ ID NO: 29379 - RNA, 19 nt, Homo sapiens
  misc_RNA (1)...(19): siRNA sense strand
gaaccuaucugagagacaa

SEQ ID NO: 29380 - RNA, 19 nt, Homo sapiens
  misc_RNA (1)...(19): siRNA sense strand
ggaagaagagagugccuua

SEQ ID NO: 29381 - RNA, 19 nt, Homo sapiens
  misc_RNA (1)...(19): siRNA sense strand
uuaaagaacuggagaacga

SEQ ID NO: 29382 - RNA, 19 nt, Homo sapiens
  misc_RNA (1)...(19): siRNA sense strand
acaccaaacugcagcuuaa

SEQ ID NO: 29383 - RNA, 19 nt, Homo sapiens
  misc_RNA (1)...(19): siRNA sense strand
gaacgaguaugccauuaac

SEQ ID NO: 29384 - RNA, 19 nt, Homo sapiens
  misc_RNA (1)...(19): siRNA sense strand
gagaacgaguaugccauua

SEQ ID NO: 29385 - RNA, 19 nt, Homo sapiens
  misc_RNA (1)...(19): siRNA sense strand
gaagagugaaggacaagaa

SEQ ID NO: 29386 - RNA, 19 nt, Homo sapiens
  misc_RNA (1)...(19): siRNA sense strand
agaaugcgcucaagucauc

SEQ ID NO: 29387 - RNA, 19 nt, Homo sapiens
  misc_RNA (1)...(19): siRNA sense strand
ggagaacgaguaugccauu

SEQ ID NO: 29388 - RNA, 19 nt, Homo sapiens
  misc_RNA (1)...(19): siRNA sense strand
agagacaagugaccauuug

SEQ ID NO: 29389 - RNA, 19 nt, Homo sapiens
  misc_RNA (1)...(19): siRNA sense strand
uaaaucagccggacaugug

SEQ ID NO: 29390 - RNA, 19 nt, Homo sapiens
  misc_RNA (1)...(19): siRNA sense strand
gagagacaagugaccauuu

SEQ ID NO: 29391 - RNA, 19 nt, Homo sapiens
  misc_RNA (1)...(19): siRNA sense strand
ggauguggcucuaaaucag

SEQ ID NO: 29392 - RNA, 19 nt, Homo sapiens
  misc_RNA (1)...(19): siRNA sense strand
gcagaaugcgcucaaguca

SEQ ID NO: 29393 - RNA, 19 nt, Homo sapiens
  misc_RNA (1)...(19): siRNA sense strand
gaagagggaggaagaagag

SEQ ID NO: 29394 - RNA, 19 nt, Homo sapiens
  misc_RNA (1)...(19): siRNA sense strand
gcuacgaaccuaucugaga

SEQ ID NO: 29395 - RNA, 19 nt, Homo sapiens
  misc_RNA (1)...(19): siRNA sense strand
ccaaacugcagcuuaaaga

SEQ ID NO: 29396 - RNA, 19 nt, Homo sapiens
  misc_RNA (1)...(19): siRNA sense strand
ucuccaagcucaaagauac

SEQ ID NO: 29397 - RNA, 19 nt, Homo sapiens
  misc_RNA (1)...(19): siRNA sense strand
ccacaggggucccacuuuu

SEQ ID NO: 29398 - RNA, 19 nt, Homo sapiens
  misc_RNA (1)...(19): siRNA sense strand
uacuacagcugccguaugu

SEQ ID NO: 29399 - RNA, 19 nt, Homo sapiens
  misc_RNA (1)...(19): siRNA sense strand
uuucagaaccgaagaguga

SEQ ID NO: 29400 - RNA, 19 nt, Homo sapiens
  misc_RNA (1)...(19): siRNA sense strand
caaacugcagcuuaaagaa

SEQ ID NO: 29401 - RNA, 19 nt, Homo sapiens
  misc_RNA (1)...(19): siRNA sense strand
cggcguaucucggcugcua

SEQ ID NO: 29402 - RNA, 19 nt, Homo sapiens
  misc_RNA (1)...(19): siRNA sense strand
cgaguaugccauuaacaaa

SEQ ID NO: 29403 - RNA, 19 nt, Homo sapiens
  misc_RNA (1)...(19): siRNA sense strand
gcuuucccguggagaagua

SEQ ID NO: 29404 - RNA, 19 nt, Homo sapiens
  misc_RNA (1)...(19): siRNA sense strand
gaguaugccauuaacaaau

SEQ ID NO: 29405 - RNA, 19 nt, Homo sapiens
  misc_RNA (1)...(19): siRNA sense strand
gggauguggcucuaaauca

SEQ ID NO: 29406 - RNA, 19 nt, Homo sapiens
  misc_RNA (1)...(19): siRNA sense strand
cgaagagggaggaagaaga

SEQ ID NO: 29407 - RNA, 19 nt, Homo sapiens
  misc_RNA (1)...(19): siRNA sense strand
gaaguacauggacguguca

SEQ ID NO: 29408 - RNA, 19 nt, Homo sapiens
  misc_RNA (1)...(19): siRNA sense strand
gggcuacggcuaccacuuc

SEQ ID NO: 29409 - RNA, 19 nt, Homo sapiens
  misc_RNA (1)...(19): siRNA sense strand
agaacgaguaugccauuaa

SEQ ID NO: 29410 - RNA, 19 nt, Homo sapiens
  misc_RNA (1)...(19): siRNA sense strand
ggaacagccagguguacug

SEQ ID NO: 29411 - RNA, 19 nt, Homo sapiens
  misc_RNA (1)...(19): siRNA sense strand
guaugccauuaacaaauuc

SEQ ID NO: 29412 - RNA, 19 nt, Homo sapiens
  misc_RNA (1)...(19): siRNA sense strand
guccucuucugccguugua

SEQ ID NO: 29413 - RNA, 19 nt, Homo sapiens
  misc_RNA (1)...(19): siRNA sense strand
aagaagagagugccuuaca

SEQ ID NO: 29414 - RNA, 19 nt, Homo sapiens
  misc_RNA (1)...(19): siRNA sense strand
gguggaacagccaggugua

SEQ ID NO: 29415 - RNA, 19 nt, Homo sapiens
  misc_RNA (1)...(19): siRNA sense strand
agagagugccuuacaccaa

SEQ ID NO: 29416 - RNA, 19 nt, Homo sapiens
  misc_RNA (1)...(19): siRNA sense strand
acgaguaugccauuaacaa

SEQ ID NO: 29417 - RNA, 19 nt, Homo sapiens
  misc_RNA (1)...(19): siRNA sense strand
gagggaggaagaagagagu

SEQ ID NO: 29418 - RNA, 19 nt, Homo sapiens
  misc_RNA (1)...(19): siRNA sense strand
aaacugcagcuuaaagaac

SEQ ID NO: 29419 - RNA, 19 nt, Homo sapiens
  misc_RNA (1)...(19): siRNA sense strand
uacaccaaacugcagcuua

SEQ ID NO: 29420 - RNA, 19 nt, Homo sapiens
  misc_RNA (1)...(19): siRNA sense strand
gaagaagagagugccuuac

SEQ ID NO: 29421 - RNA, 19 nt, Homo sapiens
  misc_RNA (1)...(19): siRNA sense strand
ugagagacaagugaccauu

SEQ ID NO: 29422 - RNA, 19 nt, Homo sapiens
  misc_RNA (1)...(19): siRNA sense strand
guaucucggcugcuacgaa

SEQ ID NO: 29423 - RNA, 19 nt, Homo sapiens
  misc_RNA (1)...(19): siRNA sense strand
gaacuggagaacgaguaug

SEQ ID NO: 29424 - RNA, 19 nt, Homo sapiens
  misc_RNA (1)...(19): siRNA sense strand
gggaagaucuccagaaacu

SEQ ID NO: 29425 - RNA, 19 nt, Homo sapiens
  misc_RNA (1)...(19): siRNA sense strand
gaagggaagaucuccagaa

SEQ ID NO: 29426 - RNA, 19 nt, Homo sapiens
  misc_RNA (1)...(19): siRNA sense strand
aagggaagaucuccagaaa

SEQ ID NO: 29427 - RNA, 19 nt, Homo sapiens
  misc_RNA (1)...(19): siRNA sense strand
cagcugcucuaccaaauag

SEQ ID NO: 29428 - RNA, 19 nt, Homo sapiens
  misc_RNA (1)...(19): siRNA sense strand
gcagcugcucuaccaaaua

SEQ ID NO: 29429 - RNA, 19 nt, Homo sapiens
  misc_RNA (1)...(19): siRNA sense strand
cgagaugucugcugcuagu

SEQ ID NO: 29430 - RNA, 19 nt, Homo sapiens
  misc_RNA (1)...(19): siRNA sense strand
cagaaacuccgagcgauuu

SEQ ID NO: 29431 - RNA, 19 nt, Homo sapiens
  misc_RNA (1)...(19): siRNA sense strand
gugcacagcgugacccuaa

SEQ ID NO: 29432 - RNA, 19 nt, Homo sapiens
  misc_RNA (1)...(19): siRNA sense strand
gaaacuccgagcgauuuaa

SEQ ID NO: 29433 - RNA, 19 nt, Homo sapiens
  misc_RNA (1)...(19): siRNA sense strand
cggacaggcugaugacuca

SEQ ID NO: 29434 - RNA, 19 nt, Homo sapiens
  misc_RNA (1)...(19): siRNA sense strand
gguguaaggacaaguugaa

SEQ ID NO: 29435 - RNA, 19 nt, Homo sapiens
  misc_RNA (1)...(19): siRNA sense strand
acagcgacuuccucacuuu

SEQ ID NO: 29436 - RNA, 19 nt, Homo sapiens
  misc_RNA (1)...(19): siRNA sense strand
ggcgagaugucugcugcua

SEQ ID NO: 29437 - RNA, 19 nt, Homo sapiens
  misc_RNA (1)...(19): siRNA sense strand
ccgcgcaccugcucuuugu

SEQ ID NO: 29438 - RNA, 19 nt, Homo sapiens
  misc_RNA (1)...(19): siRNA sense strand
ccagaaacuccgagcgauu

SEQ ID NO: 29439 - RNA, 19 nt, Homo sapiens
  misc_RNA (1)...(19): siRNA sense strand
aggacaaguugaacgcuuu

SEQ ID NO: 29440 - RNA, 19 nt, Homo sapiens
  misc_RNA (1)...(19): siRNA sense strand
ggagcggacaggcugauga

SEQ ID NO: 29441 - RNA, 19 nt, Homo sapiens
  misc_RNA (1)...(19): siRNA sense strand
ggacaaguugaacgcuuug

SEQ ID NO: 29442 - RNA, 19 nt, Homo sapiens
  misc_RNA (1)...(19): siRNA sense strand
ccaguggccaggagugaaa

SEQ ID NO: 29443 - RNA, 19 nt, Homo sapiens
  misc_RNA (1)...(19): siRNA sense strand
agaaacuccgagcgauuua

SEQ ID NO: 29444 - RNA, 19 nt, Homo sapiens
  misc_RNA (1)...(19): siRNA sense strand
gaagguaugaagggaagau

SEQ ID NO: 29445 - RNA, 19 nt, Homo sapiens
  misc_RNA (1)...(19): siRNA sense strand
uuacaaccccgacaucaua

SEQ ID NO: 29446 - RNA, 19 nt, Homo sapiens
  misc_RNA (1)...(19): siRNA sense strand
ucuccucgcugcugguaug

SEQ ID NO: 29447 - RNA, 19 nt, Homo sapiens
  misc_RNA (1)...(19): siRNA sense strand
cgaagauggccaccacuca

SEQ ID NO: 29448 - RNA, 19 nt, Homo sapiens
  misc_RNA (1)...(19): siRNA sense strand
aggagucucugcacuacga

SEQ ID NO: 29449 - RNA, 19 nt, Homo sapiens
  misc_RNA (1)...(19): siRNA sense strand
cgacaucauauuuaaggau

SEQ ID NO: 29450 - RNA, 19 nt, Homo sapiens
  misc_RNA (1)...(19): siRNA sense strand
gguacucgcagcugcucua

SEQ ID NO: 29451 - RNA, 19 nt, Homo sapiens
  misc_RNA (1)...(19): siRNA sense strand
acucgcagcugcucuacca

SEQ ID NO: 29452 - RNA, 19 nt, Homo sapiens
  misc_RNA (1)...(19): siRNA sense strand
uacagcgacuuccucacuu

SEQ ID NO: 29453 - RNA, 19 nt, Homo sapiens
  misc_RNA (1)...(19): siRNA sense strand
gggcaccauucucaucaac

SEQ ID NO: 29454 - RNA, 19 nt, Homo sapiens
  misc_RNA (1)...(19): siRNA sense strand
gagguguaaggacaaguug

SEQ ID NO: 29455 - RNA, 19 nt, Homo sapiens
  misc_RNA (1)...(19): siRNA sense strand
cuacagcgacuuccucacu

SEQ ID NO: 29456 - RNA, 19 nt, Homo sapiens
  misc_RNA (1)...(19): siRNA sense strand
ucgacuggguguacuacga

SEQ ID NO: 29457 - RNA, 19 nt, Homo sapiens
  misc_RNA (1)...(19): siRNA sense strand
ggacagaucaggaguuuga

SEQ ID NO: 29458 - RNA, 19 nt, Homo sapiens
  misc_RNA (1)...(19): siRNA sense strand
gaucaggaguuugaagaga

SEQ ID NO: 29459 - RNA, 19 nt, Homo sapiens
  misc_RNA (1)...(19): siRNA sense strand
ccaugacgaugcuggagaa

SEQ ID NO: 29460 - RNA, 19 nt, Homo sapiens
  misc_RNA (1)...(19): siRNA sense strand
cagcagaggacgacauuca

SEQ ID NO: 29461 - RNA, 19 nt, Homo sapiens
  misc_RNA (1)...(19): siRNA sense strand
gcagucagagaaugaggaa

SEQ ID NO: 29462 - RNA, 19 nt, Homo sapiens
  misc_RNA (1)...(19): siRNA sense strand
cuggacagaucaggaguuu

SEQ ID NO: 29463 - RNA, 19 nt, Homo sapiens
  misc_RNA (1)...(19): siRNA sense strand
ugacgaugcuggagaagcu

SEQ ID NO: 29464 - RNA, 19 nt, Homo sapiens
  misc_RNA (1)...(19): siRNA sense strand
cagagaaugaggaagaaga

SEQ ID NO: 29465 - RNA, 19 nt, Homo sapiens
  misc_RNA (1)...(19): siRNA sense strand
aauggcaacuuccuguaug

SEQ ID NO: 29466 - RNA, 19 nt, Homo sapiens
  misc_RNA (1)...(19): siRNA sense strand
cagaucaggaguuugaaga

SEQ ID NO: 29467 - RNA, 19 nt, Homo sapiens
  misc_RNA (1)...(19): siRNA sense strand
agucagagaaugaggaaga

SEQ ID NO: 29468 - RNA, 19 nt, Homo sapiens
  misc_RNA (1)...(19): siRNA sense strand
gcacagcagaggacgacau

SEQ ID NO: 29469 - RNA, 19 nt, Homo sapiens
  misc_RNA (1)...(19): siRNA sense strand
gucagagaaugaggaagaa

SEQ ID NO: 29470 - RNA, 19 nt, Homo sapiens
  misc_RNA (1)...(19): siRNA sense strand
ucaggaguuugaagagagu

SEQ ID NO: 29471 - RNA, 19 nt, Homo sapiens
  misc_RNA (1)...(19): siRNA sense strand
caacuuccuguauguccuu

SEQ ID NO: 29472 - RNA, 19 nt, Homo sapiens
  misc_RNA (1)...(19): siRNA sense strand
aaauggcaacuuccuguau

SEQ ID NO: 29473 - RNA, 19 nt, Homo sapiens
  misc_RNA (1)...(19): siRNA sense strand
gcgucuugguggccacuga

SEQ ID NO: 29474 - RNA, 19 nt, Homo sapiens
  misc_RNA (1)...(19): siRNA sense strand
cacagcagaggacgacauu

SEQ ID NO: 29475 - RNA, 19 nt, Homo sapiens
  misc_RNA (1)...(19): siRNA sense strand
cgaccugcuugcccucauc

SEQ ID NO: 29476 - RNA, 19 nt, Homo sapiens
  misc_RNA (1)...(19): siRNA sense strand
ggacagaucaggaguuuga

SEQ ID NO: 29477 - RNA, 19 nt, Homo sapiens
  misc_RNA (1)...(19): siRNA sense strand
gaucaggaguuugaagaga

SEQ ID NO: 29478 - RNA, 19 nt, Homo sapiens
  misc_RNA (1)...(19): siRNA sense strand
ccaugacgaugcuggagaa

SEQ ID NO: 29479 - RNA, 19 nt, Homo sapiens
  misc_RNA (1)...(19): siRNA sense strand
gcagucagagaaugaggaa

SEQ ID NO: 29480 - RNA, 19 nt, Homo sapiens
  misc_RNA (1)...(19): siRNA sense strand
cuggacagaucaggaguuu

SEQ ID NO: 29481 - RNA, 19 nt, Homo sapiens
  misc_RNA (1)...(19): siRNA sense strand
ugacgaugcuggagaagcu

SEQ ID NO: 29482 - RNA, 19 nt, Homo sapiens
  misc_RNA (1)...(19): siRNA sense strand
cagagaaugaggaagaaga

SEQ ID NO: 29483 - RNA, 19 nt, Homo sapiens
  misc_RNA (1)...(19): siRNA sense strand
aauggcaacuuccuguaug

SEQ ID NO: 29484 - RNA, 19 nt, Homo sapiens
  misc_RNA (1)...(19): siRNA sense strand
cagaucaggaguuugaaga

SEQ ID NO: 29485 - RNA, 19 nt, Homo sapiens
  misc_RNA (1)...(19): siRNA sense strand
agucagagaaugaggaaga

SEQ ID NO: 29486 - RNA, 19 nt, Homo sapiens
  misc_RNA (1)...(19): siRNA sense strand
gucagagaaugaggaagaa

SEQ ID NO: 29487 - RNA, 19 nt, Homo sapiens
  misc_RNA (1)...(19): siRNA sense strand
ucaggaguuugaagagagu

SEQ ID NO: 29488 - RNA, 19 nt, Homo sapiens
  misc_RNA (1)...(19): siRNA sense strand
caacuuccuguauguccuu

SEQ ID NO: 29489 - RNA, 19 nt, Homo sapiens
  misc_RNA (1)...(19): siRNA sense strand
aaauggcaacuuccuguau

SEQ ID NO: 29490 - RNA, 19 nt, Homo sapiens
  misc_RNA (1)...(19): siRNA sense strand
gcgucuugguggccacuga

SEQ ID NO: 29491 - RNA, 19 nt, Homo sapiens
  misc_RNA (1)...(19): siRNA sense strand
ggacagaucaggaguuuga

SEQ ID NO: 29492 - RNA, 19 nt, Homo sapiens
  misc_RNA (1)...(19): siRNA sense strand
gaucaggaguuugaagaga

SEQ ID NO: 29493 - RNA, 19 nt, Homo sapiens
  misc_RNA (1)...(19): siRNA sense strand
ccaugacgaugcuggagaa

SEQ ID NO: 29494 - RNA, 19 nt, Homo sapiens
  misc_RNA (1)...(19): siRNA sense strand
cagcagaggacgacauuca

SEQ ID NO: 29495 - RNA, 19 nt, Homo sapiens
  misc_RNA (1)...(19): siRNA sense strand
gcagucagagaaugaggaa

SEQ ID NO: 29496 - RNA, 19 nt, Homo sapiens
  misc_RNA (1)...(19): siRNA sense strand
cuggacagaucaggaguuu

SEQ ID NO: 29497 - RNA, 19 nt, Homo sapiens
  misc_RNA (1)...(19): siRNA sense strand
ugacgaugcuggagaagcu

SEQ ID NO: 29498 - RNA, 19 nt, Homo sapiens
  misc_RNA (1)...(19): siRNA sense strand
cagagaaugaggaagaaga

SEQ ID NO: 29499 - RNA, 19 nt, Homo sapiens
  misc_RNA (1)...(19): siRNA sense strand
aauggcaacuuccuguaug

SEQ ID NO: 29500 - RNA, 19 nt, Homo sapiens
  misc_RNA (1)...(19): siRNA sense strand
cagaucaggaguuugaaga

SEQ ID NO: 29501 - RNA, 19 nt, Homo sapiens
  misc_RNA (1)...(19): siRNA sense strand
agucagagaaugaggaaga

SEQ ID NO: 29502 - RNA, 19 nt, Homo sapiens
  misc_RNA (1)...(19): siRNA sense strand
gcacagcagaggacgacau

SEQ ID NO: 29503 - RNA, 19 nt, Homo sapiens
  misc_RNA (1)...(19): siRNA sense strand
gucagagaaugaggaagaa

SEQ ID NO: 29504 - RNA, 19 nt, Homo sapiens
  misc_RNA (1)...(19): siRNA sense strand
ucaggaguuugaagagagu

SEQ ID NO: 29505 - RNA, 19 nt, Homo sapiens
  misc_RNA (1)...(19): siRNA sense strand
caacuuccuguauguccuu

SEQ ID NO: 29506 - RNA, 19 nt, Homo sapiens
  misc_RNA (1)...(19): siRNA sense strand
aaauggcaacuuccuguau

SEQ ID NO: 29507 - RNA, 19 nt, Homo sapiens
  misc_RNA (1)...(19): siRNA sense strand
gcgucuugguggccacuga

SEQ ID NO: 29508 - RNA, 19 nt, Homo sapiens
  misc_RNA (1)...(19): siRNA sense strand
cacagcagaggacgacauu

SEQ ID NO: 29509 - RNA, 19 nt, Homo sapiens
  misc_RNA (1)...(19): siRNA sense strand
cgaccugcuugcccucauc

SEQ ID NO: 29510 - RNA, 19 nt, Homo sapiens
  misc_RNA (1)...(19): siRNA sense strand
ggacagaucaggaguuuga

SEQ ID NO: 29511 - RNA, 19 nt, Homo sapiens
  misc_RNA (1)...(19): siRNA sense strand
gaucaggaguuugaagaga

SEQ ID NO: 29512 - RNA, 19 nt, Homo sapiens
  misc_RNA (1)...(19): siRNA sense strand
ccaugacgaugcuggagaa

SEQ ID NO: 29513 - RNA, 19 nt, Homo sapiens
  misc_RNA (1)...(19): siRNA sense strand
cagcagaggacgacauuca

SEQ ID NO: 29514 - RNA, 19 nt, Homo sapiens
  misc_RNA (1)...(19): siRNA sense strand
gcagucagagaaugaggaa

SEQ ID NO: 29515 - RNA, 19 nt, Homo sapiens
  misc_RNA (1)...(19): siRNA sense strand
cuggacagaucaggaguuu

SEQ ID NO: 29516 - RNA, 19 nt, Homo sapiens
  misc_RNA (1)...(19): siRNA sense strand
ugacgaugcuggagaagcu

SEQ ID NO: 29517 - RNA, 19 nt, Homo sapiens
  misc_RNA (1)...(19): siRNA sense strand
cagagaaugaggaagaaga

SEQ ID NO: 29518 - RNA, 19 nt, Homo sapiens
  misc_RNA (1)...(19): siRNA sense strand
aauggcaacuuccuguaug

SEQ ID NO: 29519 - RNA, 19 nt, Homo sapiens
  misc_RNA (1)...(19): siRNA sense strand
cagaucaggaguuugaaga

SEQ ID NO: 29520 - RNA, 19 nt, Homo sapiens
  misc_RNA (1)...(19): siRNA sense strand
agucagagaaugaggaaga

SEQ ID NO: 29521 - RNA, 19 nt, Homo sapiens
  misc_RNA (1)...(19): siRNA sense strand
gcacagcagaggacgacau

SEQ ID NO: 29522 - RNA, 19 nt, Homo sapiens
  misc_RNA (1)...(19): siRNA sense strand
gucagagaaugaggaagaa

SEQ ID NO: 29523 - RNA, 19 nt, Homo sapiens
  misc_RNA (1)...(19): siRNA sense strand
ucaggaguuugaagagagu

SEQ ID NO: 29524 - RNA, 19 nt, Homo sapiens
  misc_RNA (1)...(19): siRNA sense strand
caacuuccuguauguccuu

SEQ ID NO: 29525 - RNA, 19 nt, Homo sapiens
  misc_RNA (1)...(19): siRNA sense strand
aaauggcaacuuccuguau

SEQ ID NO: 29526 - RNA, 19 nt, Homo sapiens
  misc_RNA (1)...(19): siRNA sense strand
gcgucuugguggccacuga

SEQ ID NO: 29527 - RNA, 19 nt, Homo sapiens
  misc_RNA (1)...(19): siRNA sense strand
cacagcagaggacgacauu

SEQ ID NO: 29528 - RNA, 19 nt, Homo sapiens
  misc_RNA (1)...(19): siRNA sense strand
cgaccugcuugcccucauc

SEQ ID NO: 29529 - RNA, 19 nt, Homo sapiens
  misc_RNA (1)...(19): siRNA sense strand
gaacauuucuucugggaua

SEQ ID NO: 29530 - RNA, 19 nt, Homo sapiens
  misc_RNA (1)...(19): siRNA sense strand
caagacugcugaugaguuu

SEQ ID NO: 29531 - RNA, 19 nt, Homo sapiens
  misc_RNA (1)...(19): siRNA sense strand
cgacugcaaugacaaagua

SEQ ID NO: 29532 - RNA, 19 nt, Homo sapiens
  misc_RNA (1)...(19): siRNA sense strand
ggaggagugugaagauuau

SEQ ID NO: 29533 - RNA, 19 nt, Homo sapiens
  misc_RNA (1)...(19): siRNA sense strand
ugacacagcuaauucugaa

SEQ ID NO: 29534 - RNA, 19 nt, Homo sapiens
  misc_RNA (1)...(19): siRNA sense strand
gcaaugacaaaguaucuaa

SEQ ID NO: 29535 - RNA, 19 nt, Homo sapiens
  misc_RNA (1)...(19): siRNA sense strand
ggucucauccugaacauuu

SEQ ID NO: 29536 - RNA, 19 nt, Homo sapiens
  misc_RNA (1)...(19): siRNA sense strand
gggaggagugugaagauua

SEQ ID NO: 29537 - RNA, 19 nt, Homo sapiens
  misc_RNA (1)...(19): siRNA sense strand
gaacgcaccggaugaaauc

SEQ ID NO: 29538 - RNA, 19 nt, Homo sapiens
  misc_RNA (1)...(19): siRNA sense strand
agaaaggucucauccugaa

SEQ ID NO: 29539 - RNA, 19 nt, Homo sapiens
  misc_RNA (1)...(19): siRNA sense strand
uaaccaagacugcugauga

SEQ ID NO: 29540 - RNA, 19 nt, Homo sapiens
  misc_RNA (1)...(19): siRNA sense strand
caagaggaauauaaagcaa

SEQ ID NO: 29541 - RNA, 19 nt, Homo sapiens
  misc_RNA (1)...(19): siRNA sense strand
ugaaacauauggaaucaag

SEQ ID NO: 29542 - RNA, 19 nt, Homo sapiens
  misc_RNA (1)...(19): siRNA sense strand
cagcuaauucugaaacaua

SEQ ID NO: 29543 - RNA, 19 nt, Homo sapiens
  misc_RNA (1)...(19): siRNA sense strand
aaacguggacucaauguug

SEQ ID NO: 29544 - RNA, 19 nt, Homo sapiens
  misc_RNA (1)...(19): siRNA sense strand
caagaugacacagcuaauu

SEQ ID NO: 29545 - RNA, 19 nt, Homo sapiens
  misc_RNA (1)...(19): siRNA sense strand
cuacgagcauauuaaagaa

SEQ ID NO: 29546 - RNA, 19 nt, Homo sapiens
  misc_RNA (1)...(19): siRNA sense strand
uaacaucaccuccguaguc

SEQ ID NO: 29547 - RNA, 19 nt, Homo sapiens
  misc_RNA (1)...(19): siRNA sense strand
cuacagcggugccuuccaa

SEQ ID NO: 29548 - RNA, 19 nt, Homo sapiens
  misc_RNA (1)...(19): siRNA sense strand
gcaagaggaauauaaagca

SEQ ID NO: 29549 - RNA, 19 nt, Homo sapiens
  misc_RNA (1)...(19): siRNA sense strand
uggcauaccugaagcucaa

SEQ ID NO: 29550 - RNA, 19 nt, Homo sapiens
  misc_RNA (1)...(19): siRNA sense strand
uuacugaacuacuggaaag

SEQ ID NO: 29551 - RNA, 19 nt, Homo sapiens
  misc_RNA (1)...(19): siRNA sense strand
caucuacgagcauauuaaa

SEQ ID NO: 29552 - RNA, 19 nt, Homo sapiens
  misc_RNA (1)...(19): siRNA sense strand
ucaauguuguccuuauuag

SEQ ID NO: 29553 - RNA, 19 nt, Homo sapiens
  misc_RNA (1)...(19): siRNA sense strand
ccucauccauuguaacauc

SEQ ID NO: 29554 - RNA, 19 nt, Homo sapiens
  misc_RNA (1)...(19): siRNA sense strand
caaaugugauaaccaagac

SEQ ID NO: 29555 - RNA, 19 nt, Homo sapiens
  misc_RNA (1)...(19): siRNA sense strand
gacaucuacgagcauauua

SEQ ID NO: 29556 - RNA, 19 nt, Homo sapiens
  misc_RNA (1)...(19): siRNA sense strand
ucuacgagcauauuaaaga

SEQ ID NO: 29557 - RNA, 19 nt, Homo sapiens
  misc_RNA (1)...(19): siRNA sense strand
uagaggccauugccacaga

SEQ ID NO: 29558 - RNA, 19 nt, Homo sapiens
  misc_RNA (1)...(19): siRNA sense strand
ccaagacugcugaugaguu

SEQ ID NO: 29559 - RNA, 19 nt, Homo sapiens
  misc_RNA (1)...(19): siRNA sense strand
caacaaugucggaaugcuu

SEQ ID NO: 29560 - RNA, 19 nt, Homo sapiens
  misc_RNA (1)...(19): siRNA sense strand
aaacuugcaggcuuagaaa

SEQ ID NO: 29561 - RNA, 19 nt, Homo sapiens
  misc_RNA (1)...(19): siRNA sense strand
agucaacaaugucggaaug

SEQ ID NO: 29562 - RNA, 19 nt, Homo sapiens
  misc_RNA (1)...(19): siRNA sense strand
gggacguccuggaacaguu

SEQ ID NO: 29563 - RNA, 19 nt, Homo sapiens
  misc_RNA (1)...(19): siRNA sense strand
caaaagaagucaucaucca

SEQ ID NO: 29564 - RNA, 19 nt, Homo sapiens
  misc_RNA (1)...(19): siRNA sense strand
uccagagccucauccauug

SEQ ID NO: 29565 - RNA, 19 nt, Homo sapiens
  misc_RNA (1)...(19): siRNA sense strand
gacucaauguuguccuuau

SEQ ID NO: 29566 - RNA, 19 nt, Homo sapiens
  misc_RNA (1)...(19): siRNA sense strand
gggauagcccuguuuccuu

SEQ ID NO: 29567 - RNA, 19 nt, Homo sapiens
  misc_RNA (1)...(19): siRNA sense strand
ggaaagcguacucguucga

SEQ ID NO: 29568 - RNA, 19 nt, Homo sapiens
  misc_RNA (1)...(19): siRNA sense strand
ugacaucuacgagcauauu

SEQ ID NO: 29569 - RNA, 19 nt, Homo sapiens
  misc_RNA (1)...(19): siRNA sense strand
acucaauguuguccuuauu

SEQ ID NO: 29570 - RNA, 19 nt, Homo sapiens
  misc_RNA (1)...(19): siRNA sense strand
guggcugccuugcccauga

SEQ ID NO: 29571 - RNA, 19 nt, Homo sapiens
  misc_RNA (1)...(19): siRNA sense strand
acaaaugugauaaccaaga

SEQ ID NO: 29572 - RNA, 19 nt, Homo sapiens
  misc_RNA (1)...(19): siRNA sense strand
gucauugaauuaugucaca

SEQ ID NO: 29573 - RNA, 19 nt, Homo sapiens
  misc_RNA (1)...(19): siRNA sense strand
cuugcaggcuuagaaauug

SEQ ID NO: 29574 - RNA, 19 nt, Homo sapiens
  misc_RNA (1)...(19): siRNA sense strand
ucugaaacauauggaauca

SEQ ID NO: 29575 - RNA, 19 nt, Homo sapiens
  misc_RNA (1)...(19): siRNA sense strand
aaaggcugcuccugacaca

SEQ ID NO: 29576 - RNA, 19 nt, Homo sapiens
  misc_RNA (1)...(19): siRNA sense strand
ggagugugaagauuauaca

SEQ ID NO: 29577 - RNA, 19 nt, Homo sapiens
  misc_RNA (1)...(19): siRNA sense strand
cagagccucauccauugua

SEQ ID NO: 29578 - RNA, 19 nt, Homo sapiens
  misc_RNA (1)...(19): siRNA sense strand
ggagcaggcgauggaauug

SEQ ID NO: 29579 - RNA, 19 nt, Homo sapiens
  misc_RNA (1)...(19): siRNA sense strand
gaagauuauacaagcagau

SEQ ID NO: 29580 - RNA, 19 nt, Homo sapiens
  misc_RNA (1)...(19): siRNA sense strand
acagagaucgagcggacua

SEQ ID NO: 29581 - RNA, 19 nt, Homo sapiens
  misc_RNA (1)...(19): siRNA sense strand
ggacagugggcagugauca

SEQ ID NO: 29582 - RNA, 19 nt, Homo sapiens
  misc_RNA (1)...(19): siRNA sense strand
cucaauguuguccuuauua

SEQ ID NO: 29583 - RNA, 19 nt, Homo sapiens
  misc_RNA (1)...(19): siRNA sense strand
ugaacgcaccggaugaaau

SEQ ID NO: 29584 - RNA, 19 nt, Homo sapiens
  misc_RNA (1)...(19): siRNA sense strand
gcgaagugcgugagauucu

SEQ ID NO: 29585 - RNA, 19 nt, Homo sapiens
  misc_RNA (1)...(19): siRNA sense strand
uaugcugucucgacugcaa

SEQ ID NO: 29586 - RNA, 19 nt, Homo sapiens
  misc_RNA (1)...(19): siRNA sense strand
aagaugacacagcuaauuc

SEQ ID NO: 29587 - RNA, 19 nt, Homo sapiens
  misc_RNA (1)...(19): siRNA sense strand
ucaccuccguagucaagau

SEQ ID NO: 29588 - RNA, 19 nt, Homo sapiens
  misc_RNA (1)...(19): siRNA sense strand
aaccaagacugcugaugag

SEQ ID NO: 29589 - RNA, 19 nt, Homo sapiens
  misc_RNA (1)...(19): siRNA sense strand
ccugcaagaggaauauaaa

SEQ ID NO: 29590 - RNA, 19 nt, Homo sapiens
  misc_RNA (1)...(19): siRNA sense strand
uggagcaggcgauggaauu

SEQ ID NO: 29591 - RNA, 19 nt, Homo sapiens
  misc_RNA (1)...(19): siRNA sense strand
auccagagccucauccauu

SEQ ID NO: 29592 - RNA, 19 nt, Homo sapiens
  misc_RNA (1)...(19): siRNA sense strand
gaugacacagcuaauucug

SEQ ID NO: 29593 - RNA, 19 nt, Homo sapiens
  misc_RNA (1)...(19): siRNA sense strand
caucaccuccguagucaag

SEQ ID NO: 29594 - RNA, 19 nt, Homo sapiens
  misc_RNA (1)...(19): siRNA sense strand
gcaaaacguggacucaaug

SEQ ID NO: 29595 - RNA, 19 nt, Homo sapiens
  misc_RNA (1)...(19): siRNA sense strand
ucaacaccaaggucaggua

SEQ ID NO: 29596 - RNA, 19 nt, Homo sapiens
  misc_RNA (1)...(19): siRNA sense strand
ggacuacagggaggagugu

SEQ ID NO: 29597 - RNA, 19 nt, Homo sapiens
  misc_RNA (1)...(19): siRNA sense strand
accugaagcucaacaccaa

SEQ ID NO: 29598 - RNA, 19 nt, Homo sapiens
  misc_RNA (1)...(19): siRNA sense strand
aaaggucucauccugaaca

SEQ ID NO: 29599 - RNA, 19 nt, Homo sapiens
  misc_RNA (1)...(19): siRNA sense strand
gaggagugugaagauuaua

SEQ ID NO: 29600 - RNA, 19 nt, Homo sapiens
  misc_RNA (1)...(19): siRNA sense strand
ggaaucaaggcagaaaggu

SEQ ID NO: 29601 - RNA, 19 nt, Homo sapiens
  misc_RNA (1)...(19): siRNA sense strand
agagccucauccauuguaa

SEQ ID NO: 29602 - RNA, 19 nt, Homo sapiens
  misc_RNA (1)...(19): siRNA sense strand
ggcuauagaucaaauuauc

SEQ ID NO: 29603 - RNA, 19 nt, Homo sapiens
  misc_RNA (1)...(19): siRNA sense strand
aaucuuggcucucaugcuu

SEQ ID NO: 29604 - RNA, 19 nt, Homo sapiens
  misc_RNA (1)...(19): siRNA sense strand
gacuggagcugauucacau

SEQ ID NO: 29605 - RNA, 19 nt, Homo sapiens
  misc_RNA (1)...(19): siRNA sense strand
gcuuuaaucuuggcucuca

SEQ ID NO: 29606 - RNA, 19 nt, Homo sapiens
  misc_RNA (1)...(19): siRNA sense strand
ggagcugauucacaugcaa

SEQ ID NO: 29607 - RNA, 19 nt, Homo sapiens
  misc_RNA (1)...(19): siRNA sense strand
ugauucacaugcaaagaga

SEQ ID NO: 29608 - RNA, 19 nt, Homo sapiens
  misc_RNA (1)...(19): siRNA sense strand
gagcugauucacaugcaaa

SEQ ID NO: 29609 - RNA, 19 nt, Homo sapiens
  misc_RNA (1)...(19): siRNA sense strand
gaaaauuccaugaaaagca

SEQ ID NO: 29610 - RNA, 19 nt, Homo sapiens
  misc_RNA (1)...(19): siRNA sense strand
ugacuggagcugauucaca

SEQ ID NO: 29611 - RNA, 19 nt, Homo sapiens
  misc_RNA (1)...(19): siRNA sense strand
agagagagccacugaauua

SEQ ID NO: 29612 - RNA, 19 nt, Homo sapiens
  misc_RNA (1)...(19): siRNA sense strand
gcaaguauuucucauugug

SEQ ID NO: 29613 - RNA, 19 nt, Homo sapiens
  misc_RNA (1)...(19): siRNA sense strand
caacaacuuuggugccauu

SEQ ID NO: 29614 - RNA, 19 nt, Homo sapiens
  misc_RNA (1)...(19): siRNA sense strand
gagagccacugaauuacuu

SEQ ID NO: 29615 - RNA, 19 nt, Homo sapiens
  misc_RNA (1)...(19): siRNA sense strand
ucugaaagcuacacccauu

SEQ ID NO: 29616 - RNA, 19 nt, Homo sapiens
  misc_RNA (1)...(19): siRNA sense strand
caagaggaaugcaguagag

SEQ ID NO: 29617 - RNA, 19 nt, Homo sapiens
  misc_RNA (1)...(19): siRNA sense strand
caacgcagcgccuggcaaa

SEQ ID NO: 29618 - RNA, 19 nt, Homo sapiens
  misc_RNA (1)...(19): siRNA sense strand
cugcaaguauuucucauug

SEQ ID NO: 29619 - RNA, 19 nt, Homo sapiens
  misc_RNA (1)...(19): siRNA sense strand
gcaagaggaaugcaguaga

SEQ ID NO: 29620 - RNA, 19 nt, Homo sapiens
  misc_RNA (1)...(19): siRNA sense strand
cuacacccauugaaaguca

SEQ ID NO: 29621 - RNA, 19 nt, Homo sapiens
  misc_RNA (1)...(19): siRNA sense strand
gaaagcuacacccauugaa

SEQ ID NO: 29622 - RNA, 19 nt, Homo sapiens
  misc_RNA (1)...(19): siRNA sense strand
ugaauuacuugccccuuua

SEQ ID NO: 29623 - RNA, 19 nt, Homo sapiens
  misc_RNA (1)...(19): siRNA sense strand
cgcagcgccuggcaaauuu

SEQ ID NO: 29624 - RNA, 19 nt, Homo sapiens
  misc_RNA (1)...(19): siRNA sense strand
aaagagagagccacugaau

SEQ ID NO: 29625 - RNA, 19 nt, Homo sapiens
  misc_RNA (1)...(19): siRNA sense strand
gaggaaugcaguagagguu

SEQ ID NO: 29626 - RNA, 19 nt, Homo sapiens
  misc_RNA (1)...(19): siRNA sense strand
caacuuuggugccauucuc

SEQ ID NO: 29627 - RNA, 19 nt, Homo sapiens
  misc_RNA (1)...(19): siRNA sense strand
ggaaugcaguagagguuuu

SEQ ID NO: 29628 - RNA, 19 nt, Homo sapiens
  misc_RNA (1)...(19): siRNA sense strand
gccauucucucaucuacca

SEQ ID NO: 29629 - RNA, 19 nt, Homo sapiens
  misc_RNA (1)...(19): siRNA sense strand
uuaaagagagagccacuga

SEQ ID NO: 29630 - RNA, 19 nt, Homo sapiens
  misc_RNA (1)...(19): siRNA sense strand
gcauugaaccaucugaaag

SEQ ID NO: 29631 - RNA, 19 nt, Homo sapiens
  misc_RNA (1)...(19): siRNA sense strand
ugaaagcuacacccauuga

SEQ ID NO: 29632 - RNA, 19 nt, Homo sapiens
  misc_RNA (1)...(19): siRNA sense strand
aaagcuacacccauugaaa

SEQ ID NO: 29633 - RNA, 19 nt, Homo sapiens
  misc_RNA (1)...(19): siRNA sense strand
caacgugggauccaauaca

SEQ ID NO: 29634 - RNA, 19 nt, Homo sapiens
  misc_RNA (1)...(19): siRNA sense strand
ugaaagucaucagguggaa

SEQ ID NO: 29635 - RNA, 19 nt, Homo sapiens
  misc_RNA (1)...(19): siRNA sense strand
uccugaagcugcaaguauu

SEQ ID NO: 29636 - RNA, 19 nt, Homo sapiens
  misc_RNA (1)...(19): siRNA sense strand
gaaagucaucagguggaaa

SEQ ID NO: 29637 - RNA, 19 nt, Homo sapiens
  misc_RNA (1)...(19): siRNA sense strand
ugugcucucuguugcauug

SEQ ID NO: 29638 - RNA, 19 nt, Homo sapiens
  misc_RNA (1)...(19): siRNA sense strand
augcaacacugccacaugu

SEQ ID NO: 29639 - RNA, 19 nt, Homo sapiens
  misc_RNA (1)...(19): siRNA sense strand
auacauauggcaagaggaa

SEQ ID NO: 29640 - RNA, 19 nt, Homo sapiens
  misc_RNA (1)...(19): siRNA sense strand
gcugcaaguauuucucauu

SEQ ID NO: 29641 - RNA, 19 nt, Homo sapiens
  misc_RNA (1)...(19): siRNA sense strand
cgugggauccaauacauau

SEQ ID NO: 29642 - RNA, 19 nt, Homo sapiens
  misc_RNA (1)...(19): siRNA sense strand
acgcagcgccuggcaaauu

SEQ ID NO: 29643 - RNA, 19 nt, Homo sapiens
  misc_RNA (1)...(19): siRNA sense strand
uaaagagagagccacugaa

SEQ ID NO: 29644 - RNA, 19 nt, Homo sapiens
  misc_RNA (1)...(19): siRNA sense strand
ccugaagcugcaaguauuu

SEQ ID NO: 29645 - RNA, 19 nt, Homo sapiens
  misc_RNA (1)...(19): siRNA sense strand
gaaaagcggaaaugcaaca

SEQ ID NO: 29646 - RNA, 19 nt, Homo sapiens
  misc_RNA (1)...(19): siRNA sense strand
aagagagagccacugaauu

SEQ ID NO: 29647 - RNA, 19 nt, Homo sapiens
  misc_RNA (1)...(19): siRNA sense strand
cuaccaacgugggauccaa

SEQ ID NO: 29648 - RNA, 19 nt, Homo sapiens
  misc_RNA (1)...(19): siRNA sense strand
uccaauacauauggcaaga

SEQ ID NO: 29649 - RNA, 19 nt, Homo sapiens
  misc_RNA (1)...(19): siRNA sense strand
gugccauucucucaucuac

SEQ ID NO: 29650 - RNA, 19 nt, Homo sapiens
  misc_RNA (1)...(19): siRNA sense strand
caguagagguuuuaaagag

SEQ ID NO: 29651 - RNA, 19 nt, Homo sapiens
  misc_RNA (1)...(19): siRNA sense strand
gaagauagccaaccaaugu

SEQ ID NO: 29652 - RNA, 19 nt, Homo sapiens
  misc_RNA (1)...(19): siRNA sense strand
gaggagagaucaccaugga

SEQ ID NO: 29653 - RNA, 19 nt, Homo sapiens
  misc_RNA (1)...(19): siRNA sense strand
ggaccgaggugacagugaa

SEQ ID NO: 29654 - RNA, 19 nt, Homo sapiens
  misc_RNA (1)...(19): siRNA sense strand
gcugacgugugcaguaaua

SEQ ID NO: 29655 - RNA, 19 nt, Homo sapiens
  misc_RNA (1)...(19): siRNA sense strand
gcaagaagauagccaacca

SEQ ID NO: 29656 - RNA, 19 nt, Homo sapiens
  misc_RNA (1)...(19): siRNA sense strand
gguagcagccgcagucaua

SEQ ID NO: 29657 - RNA, 19 nt, Homo sapiens
  misc_RNA (1)...(19): siRNA sense strand
caaccaaugugcuauucaa

SEQ ID NO: 29658 - RNA, 19 nt, Homo sapiens
  misc_RNA (1)...(19): siRNA sense strand
gagccaaggugacgcugaa

SEQ ID NO: 29659 - RNA, 19 nt, Homo sapiens
  misc_RNA (1)...(19): siRNA sense strand
ggaacaaccggaaggugua

SEQ ID NO: 29660 - RNA, 19 nt, Homo sapiens
  misc_RNA (1)...(19): siRNA sense strand
agcggaagaucaagaaaua

SEQ ID NO: 29661 - RNA, 19 nt, Homo sapiens
  misc_RNA (1)...(19): siRNA sense strand
gaugggcagucaacagcua

SEQ ID NO: 29662 - RNA, 19 nt, Homo sapiens
  misc_RNA (1)...(19): siRNA sense strand
caagaaauacagacuacaa

SEQ ID NO: 29663 - RNA, 19 nt, Homo sapiens
  misc_RNA (1)...(19): siRNA sense strand
gaucaagaaauacagacua

SEQ ID NO: 29664 - RNA, 19 nt, Homo sapiens
  misc_RNA (1)...(19): siRNA sense strand
gcucaagugucuaaaggau

SEQ ID NO: 29665 - RNA, 19 nt, Homo sapiens
  misc_RNA (1)...(19): siRNA sense strand
ggcuggagcuguuugagaa

SEQ ID NO: 29666 - RNA, 19 nt, Homo sapiens
  misc_RNA (1)...(19): siRNA sense strand
gaagaucaagaaauacaga

SEQ ID NO: 29667 - RNA, 19 nt, Homo sapiens
  misc_RNA (1)...(19): siRNA sense strand
gagcucaagugucuaaagg

SEQ ID NO: 29668 - RNA, 19 nt, Homo sapiens
  misc_RNA (1)...(19): siRNA sense strand
uguaugaacugagcaaugu

SEQ ID NO: 29669 - RNA, 19 nt, Homo sapiens
  misc_RNA (1)...(19): siRNA sense strand
ccaaugugcuauucaaacu

SEQ ID NO: 29670 - RNA, 19 nt, Homo sapiens
  misc_RNA (1)...(19): siRNA sense strand
ugagcaaugugcaagaaga

SEQ ID NO: 29671 - RNA, 19 nt, Homo sapiens
  misc_RNA (1)...(19): siRNA sense strand
ccagugggcaagaaccuua

SEQ ID NO: 29672 - RNA, 19 nt, Homo sapiens
  misc_RNA (1)...(19): siRNA sense strand
aaaccuuccucaccgugua

SEQ ID NO: 29673 - RNA, 19 nt, Homo sapiens
  misc_RNA (1)...(19): siRNA sense strand
caucaucacugugguagca

SEQ ID NO: 29674 - RNA, 19 nt, Homo sapiens
  misc_RNA (1)...(19): siRNA sense strand
cggcugacgugugcaguaa

SEQ ID NO: 29675 - RNA, 19 nt, Homo sapiens
  misc_RNA (1)...(19): siRNA sense strand
gcuccgugcuggugacaug

SEQ ID NO: 29676 - RNA, 19 nt, Homo sapiens
  misc_RNA (1)...(19): siRNA sense strand
gcaaugugcaagaagauag

SEQ ID NO: 29677 - RNA, 19 nt, Homo sapiens
  misc_RNA (1)...(19): siRNA sense strand
ggagcuucguguccuguau

SEQ ID NO: 29678 - RNA, 19 nt, Homo sapiens
  misc_RNA (1)...(19): siRNA sense strand
gaagccagaggucucagaa

SEQ ID NO: 29679 - RNA, 19 nt, Homo sapiens
  misc_RNA (1)...(19): siRNA sense strand
cccaagggcuggagcuguu

SEQ ID NO: 29680 - RNA, 19 nt, Homo sapiens
  misc_RNA (1)...(19): siRNA sense strand
gaaauacagacuacaacag

SEQ ID NO: 29681 - RNA, 19 nt, Homo sapiens
  misc_RNA (1)...(19): siRNA sense strand
gaacaaccggaagguguau

SEQ ID NO: 29682 - RNA, 19 nt, Homo sapiens
  misc_RNA (1)...(19): siRNA sense strand
gacugucacucgagaucuu

SEQ ID NO: 29683 - RNA, 19 nt, Homo sapiens
  misc_RNA (1)...(19): siRNA sense strand
uauucaaacugcccugaug

SEQ ID NO: 29684 - RNA, 19 nt, Homo sapiens
  misc_RNA (1)...(19): siRNA sense strand
ggacguggccagaaaauuc

SEQ ID NO: 29685 - RNA, 19 nt, Homo sapiens
  misc_RNA (1)...(19): siRNA sense strand
ccuaccagcuccagaccuu

SEQ ID NO: 29686 - RNA, 19 nt, Homo sapiens
  misc_RNA (1)...(19): siRNA sense strand
cugcaggccucagcacgua

SEQ ID NO: 29687 - RNA, 19 nt, Homo sapiens
  misc_RNA (1)...(19): siRNA sense strand
gccaaccaaugugcuauuc

SEQ ID NO: 29688 - RNA, 19 nt, Homo sapiens
  misc_RNA (1)...(19): siRNA sense strand
ccaugaaaccgaacacaca

SEQ ID NO: 29689 - RNA, 19 nt, Homo sapiens
  misc_RNA (1)...(19): siRNA sense strand
ccggccagcuuauacacaa

SEQ ID NO: 29690 - RNA, 19 nt, Homo sapiens
  misc_RNA (1)...(19): siRNA sense strand
gaaccagacccgggagcuu

SEQ ID NO: 29691 - RNA, 19 nt, Homo sapiens
  misc_RNA (1)...(19): siRNA sense strand
cggaagguguaugaacuga

SEQ ID NO: 29692 - RNA, 19 nt, Homo sapiens
  misc_RNA (1)...(19): siRNA sense strand
ccucagcacguaccucuau

SEQ ID NO: 29693 - RNA, 19 nt, Homo sapiens
  misc_RNA (1)...(19): siRNA sense strand
gggcuggagcuguuugaga

SEQ ID NO: 29694 - RNA, 19 nt, Homo sapiens
  misc_RNA (1)...(19): siRNA sense strand
gagcaaugugcaagaagau

SEQ ID NO: 29695 - RNA, 19 nt, Homo sapiens
  misc_RNA (1)...(19): siRNA sense strand
cagcggaagaucaagaaau

SEQ ID NO: 29696 - RNA, 19 nt, Homo sapiens
  misc_RNA (1)...(19): siRNA sense strand
caugaaaccgaacacacaa

SEQ ID NO: 29697 - RNA, 19 nt, Homo sapiens
  misc_RNA (1)...(19): siRNA sense strand
gugaccaucuacagcuuuc

SEQ ID NO: 29698 - RNA, 19 nt, Homo sapiens
  misc_RNA (1)...(19): siRNA sense strand
cggaagaucaagaaauaca

SEQ ID NO: 29699 - RNA, 19 nt, Homo sapiens
  misc_RNA (1)...(19): siRNA sense strand
ucagcacguaccucuauaa

SEQ ID NO: 29700 - RNA, 19 nt, Homo sapiens
  misc_RNA (1)...(19): siRNA sense strand
ccaaggugacgcugaaugg

SEQ ID NO: 29701 - RNA, 19 nt, Homo sapiens
  misc_RNA (1)...(19): siRNA sense strand
agaaauacagacuacaaca

SEQ ID NO: 29702 - RNA, 19 nt, Homo sapiens
  misc_RNA (1)...(19): siRNA sense strand
ugcagacagugaccaucua

SEQ ID NO: 29703 - RNA, 19 nt, Homo sapiens
  misc_RNA (1)...(19): siRNA sense strand
caagaagauagccaaccaa

SEQ ID NO: 29704 - RNA, 19 nt, Homo sapiens
  misc_RNA (1)...(19): siRNA sense strand
gagcuucguguccuguaug

SEQ ID NO: 29705 - RNA, 19 nt, Homo sapiens
  misc_RNA (1)...(19): siRNA sense strand
ugcccgagcucaagugucu

SEQ ID NO: 29706 - RNA, 19 nt, Homo sapiens
  misc_RNA (1)...(19): siRNA sense strand
guagcagccgcagucauaa

SEQ ID NO: 29707 - RNA, 19 nt, Homo sapiens
  misc_RNA (1)...(19): siRNA sense strand
gaaccagagccaggagaca

SEQ ID NO: 29708 - RNA, 19 nt, Homo sapiens
  misc_RNA (1)...(19): siRNA sense strand
acugagcaaugugcaagaa

SEQ ID NO: 29709 - RNA, 19 nt, Homo sapiens
  misc_RNA (1)...(19): siRNA sense strand
gagaccccguugccuaaaa

SEQ ID NO: 29710 - RNA, 19 nt, Homo sapiens
  misc_RNA (1)...(19): siRNA sense strand
gccagcuuauacacaagaa

SEQ ID NO: 29711 - RNA, 19 nt, Homo sapiens
  misc_RNA (1)...(19): siRNA sense strand
cagugaccaucuacagcuu

SEQ ID NO: 29712 - RNA, 19 nt, Homo sapiens
  misc_RNA (1)...(19): siRNA sense strand
gcagacagugaccaucuac

SEQ ID NO: 29713 - RNA, 19 nt, Homo sapiens
  misc_RNA (1)...(19): siRNA sense strand
gcggcugacgugugcagua

SEQ ID NO: 29714 - RNA, 19 nt, Homo sapiens
  misc_RNA (1)...(19): siRNA sense strand
aagaagauagccaaccaau

SEQ ID NO: 29715 - RNA, 19 nt, Homo sapiens
  misc_RNA (1)...(19): siRNA sense strand
ggaagaucaagaaauacag

SEQ ID NO: 29716 - RNA, 19 nt, Homo sapiens
  misc_RNA (1)...(19): siRNA sense strand
ccaaggaauuucagaaguu

SEQ ID NO: 29717 - RNA, 19 nt, Homo sapiens
  misc_RNA (1)...(19): siRNA sense strand
gcauuuaccucggaucaug

SEQ ID NO: 29718 - RNA, 19 nt, Homo sapiens
  misc_RNA (1)...(19): siRNA sense strand
caaggaauuucagaaguug

SEQ ID NO: 29719 - RNA, 19 nt, Homo sapiens
  misc_RNA (1)...(19): siRNA sense strand
gaacguucuucucaucauc

SEQ ID NO: 29720 - RNA, 19 nt, Homo sapiens
  misc_RNA (1)...(19): siRNA sense strand
guccaagccuuaaacauca

SEQ ID NO: 29721 - RNA, 19 nt, Homo sapiens
  misc_RNA (1)...(19): siRNA sense strand
gcacugagcaagccauaca

SEQ ID NO: 29722 - RNA, 19 nt, Homo sapiens
  misc_RNA (1)...(19): siRNA sense strand
ggugcacgcuggaaacuuc

SEQ ID NO: 29723 - RNA, 19 nt, Homo sapiens
  misc_RNA (1)...(19): siRNA sense strand
gggauaucuucuaaccaua

SEQ ID NO: 29724 - RNA, 19 nt, Homo sapiens
  misc_RNA (1)...(19): siRNA sense strand
caaggagaauggcuaugug

SEQ ID NO: 29725 - RNA, 19 nt, Homo sapiens
  misc_RNA (1)...(19): siRNA sense strand
gccauacaguuguuggaaa

SEQ ID NO: 29726 - RNA, 19 nt, Homo sapiens
  misc_RNA (1)...(19): siRNA sense strand
gccaacagcaccaucauug

SEQ ID NO: 29727 - RNA, 19 nt, Homo sapiens
  misc_RNA (1)...(19): siRNA sense strand
gcucugaacguucuucuca

SEQ ID NO: 29728 - RNA, 19 nt, Homo sapiens
  misc_RNA (1)...(19): siRNA sense strand
gcaccuugccugacaaaca

SEQ ID NO: 29729 - RNA, 19 nt, Homo sapiens
  misc_RNA (1)...(19): siRNA sense strand
aaacaucagugugccguau

SEQ ID NO: 29730 - RNA, 19 nt, Homo sapiens
  misc_RNA (1)...(19): siRNA sense strand
uaucauccuuccucugaga

SEQ ID NO: 29731 - RNA, 19 nt, Homo sapiens
  misc_RNA (1)...(19): siRNA sense strand
gagcaagccauacaguugu

SEQ ID NO: 29732 - RNA, 19 nt, Homo sapiens
  misc_RNA (1)...(19): siRNA sense strand
ugggauaucuucuaaccau

SEQ ID NO: 29733 - RNA, 19 nt, Homo sapiens
  misc_RNA (1)...(19): siRNA sense strand
gcaccaucauugcauuuac

SEQ ID NO: 29734 - RNA, 19 nt, Homo sapiens
  misc_RNA (1)...(19): siRNA sense strand
ugucauauuuggauacaca

SEQ ID NO: 29735 - RNA, 19 nt, Homo sapiens
  misc_RNA (1)...(19): siRNA sense strand
ugagcaagccauacaguug

SEQ ID NO: 29736 - RNA, 19 nt, Homo sapiens
  misc_RNA (1)...(19): siRNA sense strand
caacagcaccaucauugca

SEQ ID NO: 29737 - RNA, 19 nt, Homo sapiens
  misc_RNA (1)...(19): siRNA sense strand
gagcacugagcaagccaua

SEQ ID NO: 29738 - RNA, 19 nt, Homo sapiens
  misc_RNA (1)...(19): siRNA sense strand
caauuccuguggacuuuca

SEQ ID NO: 29739 - RNA, 19 nt, Homo sapiens
  misc_RNA (1)...(19): siRNA sense strand
ggagggugcacgcuggaaa

SEQ ID NO: 29740 - RNA, 19 nt, Homo sapiens
  misc_RNA (1)...(19): siRNA sense strand
uugccucugugucauauuu

SEQ ID NO: 29741 - RNA, 19 nt, Homo sapiens
  misc_RNA (1)...(19): siRNA sense strand
cuacuuugccucuguguca

SEQ ID NO: 29742 - RNA, 19 nt, Homo sapiens
  misc_RNA (1)...(19): siRNA sense strand
ucaaggagaauggcuaugu

SEQ ID NO: 29743 - RNA, 19 nt, Homo sapiens
  misc_RNA (1)...(19): siRNA sense strand
cguccaagccuuaaacauc

SEQ ID NO: 29744 - RNA, 19 nt, Homo sapiens
  misc_RNA (1)...(19): siRNA sense strand
ccacccgccuguacgacuu

SEQ ID NO: 29745 - RNA, 19 nt, Homo sapiens
  misc_RNA (1)...(19): siRNA sense strand
acccugggauaucuucuaa

SEQ ID NO: 29746 - RNA, 19 nt, Homo sapiens
  misc_RNA (1)...(19): siRNA sense strand
cccaguacuucaaggagaa

SEQ ID NO: 29747 - RNA, 19 nt, Homo sapiens
  misc_RNA (1)...(19): siRNA sense strand
ucagauaccccaaggaauu

SEQ ID NO: 29748 - RNA, 19 nt, Homo sapiens
  misc_RNA (1)...(19): siRNA sense strand
cuuaucauccuuccucuga

SEQ ID NO: 29749 - RNA, 19 nt, Homo sapiens
  misc_RNA (1)...(19): siRNA sense strand
uguacgacuucaacuccua

SEQ ID NO: 29750 - RNA, 19 nt, Homo sapiens
  misc_RNA (1)...(19): siRNA sense strand
cccaaggaauuucagaagu

SEQ ID NO: 29751 - RNA, 19 nt, Homo sapiens
  misc_RNA (1)...(19): siRNA sense strand
ccauacaguuguuggaaaa

SEQ ID NO: 29752 - RNA, 19 nt, Homo sapiens
  misc_RNA (1)...(19): siRNA sense strand
ggauaucuucuaaccauac

SEQ ID NO: 29753 - RNA, 19 nt, Homo sapiens
  misc_RNA (1)...(19): siRNA sense strand
cuggugagguccccaaaua

SEQ ID NO: 29754 - RNA, 19 nt, Homo sapiens
  misc_RNA (1)...(19): siRNA sense strand
acagcaccaucauugcauu

SEQ ID NO: 29755 - RNA, 19 nt, Homo sapiens
  misc_RNA (1)...(19): siRNA sense strand
caccuugccugacaaacag

SEQ ID NO: 29756 - RNA, 19 nt, Homo sapiens
  misc_RNA (1)...(19): siRNA sense strand
ucugaacguucuucucauc

SEQ ID NO: 29757 - RNA, 19 nt, Homo sapiens
  misc_RNA (1)...(19): siRNA sense strand
ugaacguucuucucaucau

SEQ ID NO: 29758 - RNA, 19 nt, Homo sapiens
  misc_RNA (1)...(19): siRNA sense strand
aaacgucagccaguccuuu

SEQ ID NO: 29759 - RNA, 19 nt, Homo sapiens
  misc_RNA (1)...(19): siRNA sense strand
ggccaacagcaccaucauu

SEQ ID NO: 29760 - RNA, 19 nt, Homo sapiens
  misc_RNA (1)...(19): siRNA sense strand
aggaauuucagaaguugua

SEQ ID NO: 29761 - RNA, 19 nt, Homo sapiens
  misc_RNA (1)...(19): siRNA sense strand
ggaaaauccgccagagcua

SEQ ID NO: 29762 - RNA, 19 nt, Homo sapiens
  misc_RNA (1)...(19): siRNA sense strand
cagcaccaucauugcauuu

SEQ ID NO: 29763 - RNA, 19 nt, Homo sapiens
  misc_RNA (1)...(19): siRNA sense strand
ucugugucauauuuggaua

SEQ ID NO: 29764 - RNA, 19 nt, Homo sapiens
  misc_RNA (1)...(19): siRNA sense strand
ugacaccacccgccuguac

SEQ ID NO: 29765 - RNA, 19 nt, Homo sapiens
  misc_RNA (1)...(19): siRNA sense strand
ugagugcuuuggacgaucu

SEQ ID NO: 29766 - RNA, 19 nt, Homo sapiens
  misc_RNA (1)...(19): siRNA sense strand
ggaauuucagaaguuguau

SEQ ID NO: 29767 - RNA, 19 nt, Homo sapiens
  misc_RNA (1)...(19): siRNA sense strand
ggugagguccccaaauauu

SEQ ID NO: 29768 - RNA, 19 nt, Homo sapiens
  misc_RNA (1)...(19): siRNA sense strand
ugaaaacacuaagacaugu

SEQ ID NO: 29769 - RNA, 19 nt, Homo sapiens
  misc_RNA (1)...(19): siRNA sense strand
ccaaggaauuucagaaguu

SEQ ID NO: 29770 - RNA, 19 nt, Homo sapiens
  misc_RNA (1)...(19): siRNA sense strand
gcauuuaccucggaucaug

SEQ ID NO: 29771 - RNA, 19 nt, Homo sapiens
  misc_RNA (1)...(19): siRNA sense strand
caaggaauuucagaaguug

SEQ ID NO: 29772 - RNA, 19 nt, Homo sapiens
  misc_RNA (1)...(19): siRNA sense strand
gaacguucuucucaucauc

SEQ ID NO: 29773 - RNA, 19 nt, Homo sapiens
  misc_RNA (1)...(19): siRNA sense strand
guccaagccuuaaacauca

SEQ ID NO: 29774 - RNA, 19 nt, Homo sapiens
  misc_RNA (1)...(19): siRNA sense strand
gcacugagcaagccauaca

SEQ ID NO: 29775 - RNA, 19 nt, Homo sapiens
  misc_RNA (1)...(19): siRNA sense strand
ggugcacgcuggaaacuuc

SEQ ID NO: 29776 - RNA, 19 nt, Homo sapiens
  misc_RNA (1)...(19): siRNA sense strand
gggauaucuucuaaccaua

SEQ ID NO: 29777 - RNA, 19 nt, Homo sapiens
  misc_RNA (1)...(19): siRNA sense strand
caaggagaauggcuaugug

SEQ ID NO: 29778 - RNA, 19 nt, Homo sapiens
  misc_RNA (1)...(19): siRNA sense strand
gccauacaguuguuggaaa

SEQ ID NO: 29779 - RNA, 19 nt, Homo sapiens
  misc_RNA (1)...(19): siRNA sense strand
gccaacagcaccaucauug

SEQ ID NO: 29780 - RNA, 19 nt, Homo sapiens
  misc_RNA (1)...(19): siRNA sense strand
gcucugaacguucuucuca

SEQ ID NO: 29781 - RNA, 19 nt, Homo sapiens
  misc_RNA (1)...(19): siRNA sense strand
gcaccuugccugacaaaca

SEQ ID NO: 29782 - RNA, 19 nt, Homo sapiens
  misc_RNA (1)...(19): siRNA sense strand
aaacaucagugugccguau

SEQ ID NO: 29783 - RNA, 19 nt, Homo sapiens
  misc_RNA (1)...(19): siRNA sense strand
uaucauccuuccucugaga

SEQ ID NO: 29784 - RNA, 19 nt, Homo sapiens
  misc_RNA (1)...(19): siRNA sense strand
gagcaagccauacaguugu

SEQ ID NO: 29785 - RNA, 19 nt, Homo sapiens
  misc_RNA (1)...(19): siRNA sense strand
ugggauaucuucuaaccau

SEQ ID NO: 29786 - RNA, 19 nt, Homo sapiens
  misc_RNA (1)...(19): siRNA sense strand
gcaccaucauugcauuuac

SEQ ID NO: 29787 - RNA, 19 nt, Homo sapiens
  misc_RNA (1)...(19): siRNA sense strand
ugucauauuuggauacaca

SEQ ID NO: 29788 - RNA, 19 nt, Homo sapiens
  misc_RNA (1)...(19): siRNA sense strand
ugagcaagccauacaguug

SEQ ID NO: 29789 - RNA, 19 nt, Homo sapiens
  misc_RNA (1)...(19): siRNA sense strand
caacagcaccaucauugca

SEQ ID NO: 29790 - RNA, 19 nt, Homo sapiens
  misc_RNA (1)...(19): siRNA sense strand
gagcacugagcaagccaua

SEQ ID NO: 29791 - RNA, 19 nt, Homo sapiens
  misc_RNA (1)...(19): siRNA sense strand
caauuccuguggacuuuca

SEQ ID NO: 29792 - RNA, 19 nt, Homo sapiens
  misc_RNA (1)...(19): siRNA sense strand
ggagggugcacgcuggaaa

SEQ ID NO: 29793 - RNA, 19 nt, Homo sapiens
  misc_RNA (1)...(19): siRNA sense strand
uugccucugugucauauuu

SEQ ID NO: 29794 - RNA, 19 nt, Homo sapiens
  misc_RNA (1)...(19): siRNA sense strand
cuacuuugccucuguguca

SEQ ID NO: 29795 - RNA, 19 nt, Homo sapiens
  misc_RNA (1)...(19): siRNA sense strand
ucaaggagaauggcuaugu

SEQ ID NO: 29796 - RNA, 19 nt, Homo sapiens
  misc_RNA (1)...(19): siRNA sense strand
cguccaagccuuaaacauc

SEQ ID NO: 29797 - RNA, 19 nt, Homo sapiens
  misc_RNA (1)...(19): siRNA sense strand
ccacccgccuguacgacuu

SEQ ID NO: 29798 - RNA, 19 nt, Homo sapiens
  misc_RNA (1)...(19): siRNA sense strand
acccugggauaucuucuaa

SEQ ID NO: 29799 - RNA, 19 nt, Homo sapiens
  misc_RNA (1)...(19): siRNA sense strand
cccaguacuucaaggagaa

SEQ ID NO: 29800 - RNA, 19 nt, Homo sapiens
  misc_RNA (1)...(19): siRNA sense strand
ucagauaccccaaggaauu

SEQ ID NO: 29801 - RNA, 19 nt, Homo sapiens
  misc_RNA (1)...(19): siRNA sense strand
cuuaucauccuuccucuga

SEQ ID NO: 29802 - RNA, 19 nt, Homo sapiens
  misc_RNA (1)...(19): siRNA sense strand
uguacgacuucaacuccua

SEQ ID NO: 29803 - RNA, 19 nt, Homo sapiens
  misc_RNA (1)...(19): siRNA sense strand
cccaaggaauuucagaagu

SEQ ID NO: 29804 - RNA, 19 nt, Homo sapiens
  misc_RNA (1)...(19): siRNA sense strand
ccauacaguuguuggaaaa

SEQ ID NO: 29805 - RNA, 19 nt, Homo sapiens
  misc_RNA (1)...(19): siRNA sense strand
ggauaucuucuaaccauac

SEQ ID NO: 29806 - RNA, 19 nt, Homo sapiens
  misc_RNA (1)...(19): siRNA sense strand
cuggugagguccccaaaua

SEQ ID NO: 29807 - RNA, 19 nt, Homo sapiens
  misc_RNA (1)...(19): siRNA sense strand
acagcaccaucauugcauu

SEQ ID NO: 29808 - RNA, 19 nt, Homo sapiens
  misc_RNA (1)...(19): siRNA sense strand
caccuugccugacaaacag

SEQ ID NO: 29809 - RNA, 19 nt, Homo sapiens
  misc_RNA (1)...(19): siRNA sense strand
ucugaacguucuucucauc

SEQ ID NO: 29810 - RNA, 19 nt, Homo sapiens
  misc_RNA (1)...(19): siRNA sense strand
ugaacguucuucucaucau

SEQ ID NO: 29811 - RNA, 19 nt, Homo sapiens
  misc_RNA (1)...(19): siRNA sense strand
aaacgucagccaguccuuu

SEQ ID NO: 29812 - RNA, 19 nt, Homo sapiens
  misc_RNA (1)...(19): siRNA sense strand
ggccaacagcaccaucauu

SEQ ID NO: 29813 - RNA, 19 nt, Homo sapiens
  misc_RNA (1)...(19): siRNA sense strand
aggaauuucagaaguugua

SEQ ID NO: 29814 - RNA, 19 nt, Homo sapiens
  misc_RNA (1)...(19): siRNA sense strand
ggaaaauccgccagagcua

SEQ ID NO: 29815 - RNA, 19 nt, Homo sapiens
  misc_RNA (1)...(19): siRNA sense strand
cagcaccaucauugcauuu

SEQ ID NO: 29816 - RNA, 19 nt, Homo sapiens
  misc_RNA (1)...(19): siRNA sense strand
ucugugucauauuuggaua

SEQ ID NO: 29817 - RNA, 19 nt, Homo sapiens
  misc_RNA (1)...(19): siRNA sense strand
ugacaccacccgccuguac

SEQ ID NO: 29818 - RNA, 19 nt, Homo sapiens
  misc_RNA (1)...(19): siRNA sense strand
ugagugcuuuggacgaucu

SEQ ID NO: 29819 - RNA, 19 nt, Homo sapiens
  misc_RNA (1)...(19): siRNA sense strand
ggaauuucagaaguuguau

SEQ ID NO: 29820 - RNA, 19 nt, Homo sapiens
  misc_RNA (1)...(19): siRNA sense strand
ggugagguccccaaauauu

SEQ ID NO: 29821 - RNA, 19 nt, Homo sapiens
  misc_RNA (1)...(19): siRNA sense strand
ugaaaacacuaagacaugu

SEQ ID NO: 29822 - RNA, 19 nt, Homo sapiens
  misc_RNA (1)...(19): siRNA sense strand
ggagauacaucgguaggua

SEQ ID NO: 29823 - RNA, 19 nt, Homo sapiens
  misc_RNA (1)...(19): siRNA sense strand
ccaagugccuguggacaua

SEQ ID NO: 29824 - RNA, 19 nt, Homo sapiens
  misc_RNA (1)...(19): siRNA sense strand
ggacauacgagauccaguu

SEQ ID NO: 29825 - RNA, 19 nt, Homo sapiens
  misc_RNA (1)...(19): siRNA sense strand
ggccugagcuacaacuuca

SEQ ID NO: 29826 - RNA, 19 nt, Homo sapiens
  misc_RNA (1)...(19): siRNA sense strand
ggaggucccugugccaaga

SEQ ID NO: 29827 - RNA, 19 nt, Homo sapiens
  misc_RNA (1)...(19): siRNA sense strand
gcaggaagccaucgaccuu

SEQ ID NO: 29828 - RNA, 19 nt, Homo sapiens
  misc_RNA (1)...(19): siRNA sense strand
ccacuucacugacuuugag

SEQ ID NO: 29829 - RNA, 19 nt, Homo sapiens
  misc_RNA (1)...(19): siRNA sense strand
ccacgacgguaccaacuuc

SEQ ID NO: 29830 - RNA, 19 nt, Homo sapiens
  misc_RNA (1)...(19): siRNA sense strand
ggacaagcagcagguguuu

SEQ ID NO: 29831 - RNA, 19 nt, Homo sapiens
  misc_RNA (1)...(19): siRNA sense strand
ucacugacuuugaggacaa

SEQ ID NO: 29832 - RNA, 19 nt, Homo sapiens
  misc_RNA (1)...(19): siRNA sense strand
acaagcagcagguguuuga

SEQ ID NO: 29833 - RNA, 19 nt, Homo sapiens
  misc_RNA (1)...(19): siRNA sense strand
gguacggacuggcgcaugu

SEQ ID NO: 29834 - RNA, 19 nt, Homo sapiens
  misc_RNA (1)...(19): siRNA sense strand
acaaugccuuccugagcua

SEQ ID NO: 29835 - RNA, 19 nt, Homo sapiens
  misc_RNA (1)...(19): siRNA sense strand
gaacacgugggcuccaagu

SEQ ID NO: 29836 - RNA, 19 nt, Homo sapiens
  misc_RNA (1)...(19): siRNA sense strand
gccagaccaccacgacuuu

SEQ ID NO: 29837 - RNA, 19 nt, Homo sapiens
  misc_RNA (1)...(19): siRNA sense strand
ugcaaggcuuccugaacua

SEQ ID NO: 29838 - RNA, 19 nt, Homo sapiens
  misc_RNA (1)...(19): siRNA sense strand
uggcgcauguuuccaagug

SEQ ID NO: 29839 - RNA, 19 nt, Homo sapiens
  misc_RNA (1)...(19): siRNA sense strand
gaacuucgagacguggaau

SEQ ID NO: 29840 - RNA, 19 nt, Homo sapiens
  misc_RNA (1)...(19): siRNA sense strand
ccuucaaccucuuuguguu

SEQ ID NO: 29841 - RNA, 19 nt, Homo sapiens
  misc_RNA (1)...(19): siRNA sense strand
aaggcuuccugaacuacua

SEQ ID NO: 29842 - RNA, 19 nt, Homo sapiens
  misc_RNA (1)...(19): siRNA sense strand
ggacggguacuuggaccuu

SEQ ID NO: 29843 - RNA, 19 nt, Homo sapiens
  misc_RNA (1)...(19): siRNA sense strand
gaccuucaaccucuuugug

SEQ ID NO: 29844 - RNA, 19 nt, Homo sapiens
  misc_RNA (1)...(19): siRNA sense strand
gcgugcggcuggacuacau

SEQ ID NO: 29845 - RNA, 19 nt, Homo sapiens
  misc_RNA (1)...(19): siRNA sense strand
gcagcucaaccucgccuau

SEQ ID NO: 29846 - RNA, 19 nt, Homo sapiens
  misc_RNA (1)...(19): siRNA sense strand
acaucucccuccacaggaa

SEQ ID NO: 29847 - RNA, 19 nt, Homo sapiens
  misc_RNA (1)...(19): siRNA sense strand
cagaccaccacgacuuuga

SEQ ID NO: 29848 - RNA, 19 nt, Homo sapiens
  misc_RNA (1)...(19): siRNA sense strand
caucgaccuucaaccucuu

SEQ ID NO: 29849 - RNA, 19 nt, Homo sapiens
  misc_RNA (1)...(19): siRNA sense strand
gacauacgagauccaguuc

SEQ ID NO: 29850 - RNA, 19 nt, Homo sapiens
  misc_RNA (1)...(19): siRNA sense strand
cgacgguaccaacuucuuc

SEQ ID NO: 29851 - RNA, 19 nt, Homo sapiens
  misc_RNA (1)...(19): siRNA sense strand
augcaaggcuuccugaacu

SEQ ID NO: 29852 - RNA, 19 nt, Homo sapiens
  misc_RNA (1)...(19): siRNA sense strand
ugcuggcgcugcuggauga

SEQ ID NO: 29853 - RNA, 19 nt, Homo sapiens
  misc_RNA (1)...(19): siRNA sense strand
gcagauccggcagcucuuc

SEQ ID NO: 29854 - RNA, 19 nt, Homo sapiens
  misc_RNA (1)...(19): siRNA sense strand
ccucgggccacuucacuga

SEQ ID NO: 29855 - RNA, 19 nt, Homo sapiens
  misc_RNA (1)...(19): siRNA sense strand
ccaccuggacggguacuug

SEQ ID NO: 29856 - RNA, 19 nt, Homo sapiens
  misc_RNA (1)...(19): siRNA sense strand
gcucaaccucgccuaugug

SEQ ID NO: 29857 - RNA, 19 nt, Homo sapiens
  misc_RNA (1)...(19): siRNA sense strand
gaaacuaccuguuacauua

SEQ ID NO: 29858 - RNA, 19 nt, Homo sapiens
  misc_RNA (1)...(19): siRNA sense strand
gaagugagauccaguauaa

SEQ ID NO: 29859 - RNA, 19 nt, Homo sapiens
  misc_RNA (1)...(19): siRNA sense strand
guaaagaacuaugguguua

SEQ ID NO: 29860 - RNA, 19 nt, Homo sapiens
  misc_RNA (1)...(19): siRNA sense strand
gaaggagucuuacaugugu

SEQ ID NO: 29861 - RNA, 19 nt, Homo sapiens
  misc_RNA (1)...(19): siRNA sense strand
ggaaucacauagcuccuua

SEQ ID NO: 29862 - RNA, 19 nt, Homo sapiens
  misc_RNA (1)...(19): siRNA sense strand
gaacuaugguguuaagaau

SEQ ID NO: 29863 - RNA, 19 nt, Homo sapiens
  misc_RNA (1)...(19): siRNA sense strand
ucacauagcuccuuaucug

SEQ ID NO: 29864 - RNA, 19 nt, Homo sapiens
  misc_RNA (1)...(19): siRNA sense strand
gguaaagaguccuugauug

SEQ ID NO: 29865 - RNA, 19 nt, Homo sapiens
  misc_RNA (1)...(19): siRNA sense strand
gaaaggaggagaagcaaau

SEQ ID NO: 29866 - RNA, 19 nt, Homo sapiens
  misc_RNA (1)...(19): siRNA sense strand
gaacauacagaagaacuuu

SEQ ID NO: 29867 - RNA, 19 nt, Homo sapiens
  misc_RNA (1)...(19): siRNA sense strand
uaacagaaguggugacuac

SEQ ID NO: 29868 - RNA, 19 nt, Homo sapiens
  misc_RNA (1)...(19): siRNA sense strand
caacagaagauuccaaaga

SEQ ID NO: 29869 - RNA, 19 nt, Homo sapiens
  misc_RNA (1)...(19): siRNA sense strand
gacaaaaccugaaucaaaa

SEQ ID NO: 29870 - RNA, 19 nt, Homo sapiens
  misc_RNA (1)...(19): siRNA sense strand
agagaguucuucaccuuua

SEQ ID NO: 29871 - RNA, 19 nt, Homo sapiens
  misc_RNA (1)...(19): siRNA sense strand
gaaauuguucugagaguga

SEQ ID NO: 29872 - RNA, 19 nt, Homo sapiens
  misc_RNA (1)...(19): siRNA sense strand
uaacaugaacccuaucgua

SEQ ID NO: 29873 - RNA, 19 nt, Homo sapiens
  misc_RNA (1)...(19): siRNA sense strand
caugaacccuaucguauau

SEQ ID NO: 29874 - RNA, 19 nt, Homo sapiens
  misc_RNA (1)...(19): siRNA sense strand
gcaucaauauuucucauca

SEQ ID NO: 29875 - RNA, 19 nt, Homo sapiens
  misc_RNA (1)...(19): siRNA sense strand
cagaaguggugacuacuga

SEQ ID NO: 29876 - RNA, 19 nt, Homo sapiens
  misc_RNA (1)...(19): siRNA sense strand
gagaguucuucaccuuuaa

SEQ ID NO: 29877 - RNA, 19 nt, Homo sapiens
  misc_RNA (1)...(19): siRNA sense strand
caagagcucauaaccguaa

SEQ ID NO: 29878 - RNA, 19 nt, Homo sapiens
  misc_RNA (1)...(19): siRNA sense strand
aacagaagauuccaaagaa

SEQ ID NO: 29879 - RNA, 19 nt, Homo sapiens
  misc_RNA (1)...(19): siRNA sense strand
gaaaugguuuugauacuga

SEQ ID NO: 29880 - RNA, 19 nt, Homo sapiens
  misc_RNA (1)...(19): siRNA sense strand
gaugauagcgguaaagagu

SEQ ID NO: 29881 - RNA, 19 nt, Homo sapiens
  misc_RNA (1)...(19): siRNA sense strand
ugacauauuucacccuuca

SEQ ID NO: 29882 - RNA, 19 nt, Homo sapiens
  misc_RNA (1)...(19): siRNA sense strand
aaagaguccuugauugguu

SEQ ID NO: 29883 - RNA, 19 nt, Homo sapiens
  misc_RNA (1)...(19): siRNA sense strand
ggaagugagauccaguaua

SEQ ID NO: 29884 - RNA, 19 nt, Homo sapiens
  misc_RNA (1)...(19): siRNA sense strand
gcucauaaccguaauaaaa

SEQ ID NO: 29885 - RNA, 19 nt, Homo sapiens
  misc_RNA (1)...(19): siRNA sense strand
cagaaggagucuuacaugu

SEQ ID NO: 29886 - RNA, 19 nt, Homo sapiens
  misc_RNA (1)...(19): siRNA sense strand
gaggagaagcaaaucauga

SEQ ID NO: 29887 - RNA, 19 nt, Homo sapiens
  misc_RNA (1)...(19): siRNA sense strand
gcagaaggagucuuacaug

SEQ ID NO: 29888 - RNA, 19 nt, Homo sapiens
  misc_RNA (1)...(19): siRNA sense strand
ccaguuagcgauuccagua

SEQ ID NO: 29889 - RNA, 19 nt, Homo sapiens
  misc_RNA (1)...(19): siRNA sense strand
guaaagaguccuugauugg

SEQ ID NO: 29890 - RNA, 19 nt, Homo sapiens
  misc_RNA (1)...(19): siRNA sense strand
guacuguguuucagcagaa

SEQ ID NO: 29891 - RNA, 19 nt, Homo sapiens
  misc_RNA (1)...(19): siRNA sense strand
gcagaaggaagaugauugu

SEQ ID NO: 29892 - RNA, 19 nt, Homo sapiens
  misc_RNA (1)...(19): siRNA sense strand
gaaggacaagagcucauaa

SEQ ID NO: 29893 - RNA, 19 nt, Homo sapiens
  misc_RNA (1)...(19): siRNA sense strand
gcagccaucugacuccaau

SEQ ID NO: 29894 - RNA, 19 nt, Homo sapiens
  misc_RNA (1)...(19): siRNA sense strand
ccuauaacaugaacccuau

SEQ ID NO: 29895 - RNA, 19 nt, Homo sapiens
  misc_RNA (1)...(19): siRNA sense strand
gagauucagugccaguuag

SEQ ID NO: 29896 - RNA, 19 nt, Homo sapiens
  misc_RNA (1)...(19): siRNA sense strand
ccguagagguaaagaacua

SEQ ID NO: 29897 - RNA, 19 nt, Homo sapiens
  misc_RNA (1)...(19): siRNA sense strand
ucguaucacuccagaaauu

SEQ ID NO: 29898 - RNA, 19 nt, Homo sapiens
  misc_RNA (1)...(19): siRNA sense strand
aaagaacuaugguguuaag

SEQ ID NO: 29899 - RNA, 19 nt, Homo sapiens
  misc_RNA (1)...(19): siRNA sense strand
agagagaguucuucaccuu

SEQ ID NO: 29900 - RNA, 19 nt, Homo sapiens
  misc_RNA (1)...(19): siRNA sense strand
ugaacccuaucguauauug

SEQ ID NO: 29901 - RNA, 19 nt, Homo sapiens
  misc_RNA (1)...(19): siRNA sense strand
aagaguccuugauugguua

SEQ ID NO: 29902 - RNA, 19 nt, Homo sapiens
  misc_RNA (1)...(19): siRNA sense strand
aaaaggagguggucuguga

SEQ ID NO: 29903 - RNA, 19 nt, Homo sapiens
  misc_RNA (1)...(19): siRNA sense strand
uaucacucaucacgucaua

SEQ ID NO: 29904 - RNA, 19 nt, Homo sapiens
  misc_RNA (1)...(19): siRNA sense strand
gcaggaagucgauuaugau

SEQ ID NO: 29905 - RNA, 19 nt, Homo sapiens
  misc_RNA (1)...(19): siRNA sense strand
cgaaacuaccuguuacauu

SEQ ID NO: 29906 - RNA, 19 nt, Homo sapiens
  misc_RNA (1)...(19): siRNA sense strand
uaaacuggauaucagaaag

SEQ ID NO: 29907 - RNA, 19 nt, Homo sapiens
  misc_RNA (1)...(19): siRNA sense strand
gagcucauaaccguaauaa

SEQ ID NO: 29908 - RNA, 19 nt, Homo sapiens
  misc_RNA (1)...(19): siRNA sense strand
uauccucacugaauucuca

SEQ ID NO: 29909 - RNA, 19 nt, Homo sapiens
  misc_RNA (1)...(19): siRNA sense strand
gagagaguucuucaccuuu

SEQ ID NO: 29910 - RNA, 19 nt, Homo sapiens
  misc_RNA (1)...(19): siRNA sense strand
acaugaacccuaucguaua

SEQ ID NO: 29911 - RNA, 19 nt, Homo sapiens
  misc_RNA (1)...(19): siRNA sense strand
gcuuuaaacucguaucacu

SEQ ID NO: 29912 - RNA, 19 nt, Homo sapiens
  misc_RNA (1)...(19): siRNA sense strand
ccaacuaauguuacaauug

SEQ ID NO: 29913 - RNA, 19 nt, Homo sapiens
  misc_RNA (1)...(19): siRNA sense strand
ugauaaaccacaugugcua

SEQ ID NO: 29914 - RNA, 19 nt, Homo sapiens
  misc_RNA (1)...(19): siRNA sense strand
agcaggaagucgauuauga

SEQ ID NO: 29915 - RNA, 19 nt, Homo sapiens
  misc_RNA (1)...(19): siRNA sense strand
agaaugaacggaagugaga

SEQ ID NO: 29916 - RNA, 19 nt, Homo sapiens
  misc_RNA (1)...(19): siRNA sense strand
gguaaagaacuaugguguu

SEQ ID NO: 29917 - RNA, 19 nt, Homo sapiens
  misc_RNA (1)...(19): siRNA sense strand
cgagauucagugccaguua

SEQ ID NO: 29918 - RNA, 19 nt, Homo sapiens
  misc_RNA (1)...(19): siRNA sense strand
agaagaauuugcuguaugc

SEQ ID NO: 29919 - RNA, 19 nt, Homo sapiens
  misc_RNA (1)...(19): siRNA sense strand
acuaugguguuaagaauuc

SEQ ID NO: 29920 - RNA, 19 nt, Homo sapiens
  misc_RNA (1)...(19): siRNA sense strand
agaaggaagaugauuguga

SEQ ID NO: 29921 - RNA, 19 nt, Homo sapiens
  misc_RNA (1)...(19): siRNA sense strand
caauagagagagagaguuc

SEQ ID NO: 29922 - RNA, 19 nt, Homo sapiens
  misc_RNA (1)...(19): siRNA sense strand
agacaaaaccugaaucaaa

SEQ ID NO: 29923 - RNA, 19 nt, Homo sapiens
  misc_RNA (1)...(19): siRNA sense strand
caauguguaugugagaaug

SEQ ID NO: 29924 - RNA, 19 nt, Homo sapiens
  misc_RNA (1)...(19): siRNA sense strand
gcaucgcuuuaaacucgua

SEQ ID NO: 29925 - RNA, 19 nt, Homo sapiens
  misc_RNA (1)...(19): siRNA sense strand
ucacgcagaaggaagauga

SEQ ID NO: 29926 - RNA, 19 nt, Homo sapiens
  misc_RNA (1)...(19): siRNA sense strand
gaaucugccuaugcaaagu

SEQ ID NO: 29927 - RNA, 19 nt, Homo sapiens
  misc_RNA (1)...(19): siRNA sense strand
ccaccuccuuugguuauga

SEQ ID NO: 29928 - RNA, 19 nt, Homo sapiens
  misc_RNA (1)...(19): siRNA sense strand
guucuucaccuuuaaguag

SEQ ID NO: 29929 - RNA, 19 nt, Homo sapiens
  misc_RNA (1)...(19): siRNA sense strand
ggaacauacagaagaacuu

SEQ ID NO: 29930 - RNA, 19 nt, Homo sapiens
  misc_RNA (1)...(19): siRNA sense strand
gugcuuagccugguauuca

SEQ ID NO: 29931 - RNA, 19 nt, Homo sapiens
  misc_RNA (1)...(19): siRNA sense strand
caccuaaacuggauaucag

SEQ ID NO: 29932 - RNA, 19 nt, Homo sapiens
  misc_RNA (1)...(19): siRNA sense strand
gguuauagaccaacagaag

SEQ ID NO: 29933 - RNA, 19 nt, Homo sapiens
  misc_RNA (1)...(19): siRNA sense strand
uaaaccacaugugcuagug

SEQ ID NO: 29934 - RNA, 19 nt, Homo sapiens
  misc_RNA (1)...(19): siRNA sense strand
cgaagacaauccaggaaaa

SEQ ID NO: 29935 - RNA, 19 nt, Homo sapiens
  misc_RNA (1)...(19): siRNA sense strand
gugcuacuuuagagacaaa

SEQ ID NO: 29936 - RNA, 19 nt, Homo sapiens
  misc_RNA (1)...(19): siRNA sense strand
ggaggagaagcaaaucaug

SEQ ID NO: 29937 - RNA, 19 nt, Homo sapiens
  misc_RNA (1)...(19): siRNA sense strand
ugaauucucaguacugugu

SEQ ID NO: 29938 - RNA, 19 nt, Homo sapiens
  misc_RNA (1)...(19): siRNA sense strand
uaaguaguaaccagucuga

SEQ ID NO: 29939 - RNA, 19 nt, Homo sapiens
  misc_RNA (1)...(19): siRNA sense strand
cuugaucucugugguaaga

SEQ ID NO: 29940 - RNA, 19 nt, Homo sapiens
  misc_RNA (1)...(19): siRNA sense strand
aaaagaaucugccuaugca

SEQ ID NO: 29941 - RNA, 19 nt, Homo sapiens
  misc_RNA (1)...(19): siRNA sense strand
gaucacuccagaaaugguu

SEQ ID NO: 29942 - RNA, 19 nt, Homo sapiens
  misc_RNA (1)...(19): siRNA sense strand
ugacuccaauagagagaga

SEQ ID NO: 29943 - RNA, 19 nt, Homo sapiens
  misc_RNA (1)...(19): siRNA sense strand
gaaguggugacuacugaag

SEQ ID NO: 29944 - RNA, 19 nt, Homo sapiens
  misc_RNA (1)...(19): siRNA sense strand
ucagaaaggaggagaagca

SEQ ID NO: 29945 - RNA, 19 nt, Homo sapiens
  misc_RNA (1)...(19): siRNA sense strand
caucugacuccaauagaga

SEQ ID NO: 29946 - RNA, 19 nt, Homo sapiens
  misc_RNA (1)...(19): siRNA sense strand
caacugaaaagucaaaaga

SEQ ID NO: 29947 - RNA, 19 nt, Homo sapiens
  misc_RNA (1)...(19): siRNA sense strand
agaacuaugguguuaagaa

SEQ ID NO: 29948 - RNA, 19 nt, Homo sapiens
  misc_RNA (1)...(19): siRNA sense strand
ccaccuaaacuggauauca

SEQ ID NO: 29949 - RNA, 19 nt, Homo sapiens
  misc_RNA (1)...(19): siRNA sense strand
guuauagaccaacagaaga

SEQ ID NO: 29950 - RNA, 19 nt, Homo sapiens
  misc_RNA (1)...(19): siRNA sense strand
agaaggacaagagcucaua

SEQ ID NO: 29951 - RNA, 19 nt, Homo sapiens
  misc_RNA (1)...(19): siRNA sense strand
aguuguugcugcuuuacua

SEQ ID NO: 29952 - RNA, 19 nt, Homo sapiens
  misc_RNA (1)...(19): siRNA sense strand
uaucguauauugggaguac

SEQ ID NO: 29953 - RNA, 19 nt, Homo sapiens
  misc_RNA (1)...(19): siRNA sense strand
agaaggagucuuacaugug

SEQ ID NO: 29954 - RNA, 19 nt, Homo sapiens
  misc_RNA (1)...(19): siRNA sense strand
ccuacaccaacuaauguua

SEQ ID NO: 29955 - RNA, 19 nt, Homo sapiens
  misc_RNA (1)...(19): siRNA sense strand
aguggaacauacagaagaa

SEQ ID NO: 29956 - RNA, 19 nt, Homo sapiens
  misc_RNA (1)...(19): siRNA sense strand
guccuugauugguuauaga

SEQ ID NO: 29957 - RNA, 19 nt, Homo sapiens
  misc_RNA (1)...(19): siRNA sense strand
gaaccauguugaacuguga

SEQ ID NO: 29958 - RNA, 19 nt, Homo sapiens
  misc_RNA (1)...(19): siRNA sense strand
gaacacaacgaaacaagug

SEQ ID NO: 29959 - RNA, 19 nt, Homo sapiens
  misc_RNA (1)...(19): siRNA sense strand
auacagggcucuacacaga

SEQ ID NO: 29960 - RNA, 19 nt, Homo sapiens
  misc_RNA (1)...(19): siRNA sense strand
ucaaagccauggccuacaa

SEQ ID NO: 29961 - RNA, 19 nt, Homo sapiens
  misc_RNA (1)...(19): siRNA sense strand
ccacagagagaauuuauca

SEQ ID NO: 29962 - RNA, 19 nt, Homo sapiens
  misc_RNA (1)...(19): siRNA sense strand
uauaugcucuguacaggaa

SEQ ID NO: 29963 - RNA, 19 nt, Homo sapiens
  misc_RNA (1)...(19): siRNA sense strand
gcagaugguuuauuaucag

SEQ ID NO: 29964 - RNA, 19 nt, Homo sapiens
  misc_RNA (1)...(19): siRNA sense strand
gaacugugaaugcaagaga

SEQ ID NO: 29965 - RNA, 19 nt, Homo sapiens
  misc_RNA (1)...(19): siRNA sense strand
ggcagaugguuuauuauca

SEQ ID NO: 29966 - RNA, 19 nt, Homo sapiens
  misc_RNA (1)...(19): siRNA sense strand
ggacugcucacguucauca

SEQ ID NO: 29967 - RNA, 19 nt, Homo sapiens
  misc_RNA (1)...(19): siRNA sense strand
gaaggaaccauguugaacu

SEQ ID NO: 29968 - RNA, 19 nt, Homo sapiens
  misc_RNA (1)...(19): siRNA sense strand
gaaccuccaccaugggaaa

SEQ ID NO: 29969 - RNA, 19 nt, Homo sapiens
  misc_RNA (1)...(19): siRNA sense strand
ggagacagaggaagaguag

SEQ ID NO: 29970 - RNA, 19 nt, Homo sapiens
  misc_RNA (1)...(19): siRNA sense strand
gaacagaaagaaaggaaaa

SEQ ID NO: 29971 - RNA, 19 nt, Homo sapiens
  misc_RNA (1)...(19): siRNA sense strand
gaggaagaguagaagaaca

SEQ ID NO: 29972 - RNA, 19 nt, Homo sapiens
  misc_RNA (1)...(19): siRNA sense strand
gagagcgucugcaaaauga

SEQ ID NO: 29973 - RNA, 19 nt, Homo sapiens
  misc_RNA (1)...(19): siRNA sense strand
gaagccacagagagaauuu

SEQ ID NO: 29974 - RNA, 19 nt, Homo sapiens
  misc_RNA (1)...(19): siRNA sense strand
ucaaauacagacagaaaug

SEQ ID NO: 29975 - RNA, 19 nt, Homo sapiens
  misc_RNA (1)...(19): siRNA sense strand
caaggaaggaaccauguug

SEQ ID NO: 29976 - RNA, 19 nt, Homo sapiens
  misc_RNA (1)...(19): siRNA sense strand
gaaaugcaaaguccaaugc

SEQ ID NO: 29977 - RNA, 19 nt, Homo sapiens
  misc_RNA (1)...(19): siRNA sense strand
gaaaggaaaaccacagaaa

SEQ ID NO: 29978 - RNA, 19 nt, Homo sapiens
  misc_RNA (1)...(19): siRNA sense strand
gagagaauuuaucauuucg

SEQ ID NO: 29979 - RNA, 19 nt, Homo sapiens
  misc_RNA (1)...(19): siRNA sense strand
agacagaggaagaguagaa

SEQ ID NO: 29980 - RNA, 19 nt, Homo sapiens
  misc_RNA (1)...(19): siRNA sense strand
gaaauggagaccagucagu

SEQ ID NO: 29981 - RNA, 19 nt, Homo sapiens
  misc_RNA (1)...(19): siRNA sense strand
gggcagaugguuuauuauc

SEQ ID NO: 29982 - RNA, 19 nt, Homo sapiens
  misc_RNA (1)...(19): siRNA sense strand
auucauaccugcugaugug

SEQ ID NO: 29983 - RNA, 19 nt, Homo sapiens
  misc_RNA (1)...(19): siRNA sense strand
gagagguuuccgcagaaua

SEQ ID NO: 29984 - RNA, 19 nt, Homo sapiens
  misc_RNA (1)...(19): siRNA sense strand
cagaggaagaguagaagaa

SEQ ID NO: 29985 - RNA, 19 nt, Homo sapiens
  misc_RNA (1)...(19): siRNA sense strand
cauaugcacaggugaaaug

SEQ ID NO: 29986 - RNA, 19 nt, Homo sapiens
  misc_RNA (1)...(19): siRNA sense strand
aaaugaagccacagagaga

SEQ ID NO: 29987 - RNA, 19 nt, Homo sapiens
  misc_RNA (1)...(19): siRNA sense strand
agagguuuccgcagaauaa

SEQ ID NO: 29988 - RNA, 19 nt, Homo sapiens
  misc_RNA (1)...(19): siRNA sense strand
cgaaggccguccugagagu

SEQ ID NO: 29989 - RNA, 19 nt, Homo sapiens
  misc_RNA (1)...(19): siRNA sense strand
ggagacguccauauuuaca

SEQ ID NO: 29990 - RNA, 19 nt, Homo sapiens
  misc_RNA (1)...(19): siRNA sense strand
gcucauaugcacaggugaa

SEQ ID NO: 29991 - RNA, 19 nt, Homo sapiens
  misc_RNA (1)...(19): siRNA sense strand
ggaacacaacgaaacaagu

SEQ ID NO: 29992 - RNA, 19 nt, Homo sapiens
  misc_RNA (1)...(19): siRNA sense strand
uggggcagaugguuuauua

SEQ ID NO: 29993 - RNA, 19 nt, Homo sapiens
  misc_RNA (1)...(19): siRNA sense strand
aagagagguuuccgcagaa

SEQ ID NO: 29994 - RNA, 19 nt, Homo sapiens
  misc_RNA (1)...(19): siRNA sense strand
gaaaaugaagccacagaga

SEQ ID NO: 29995 - RNA, 19 nt, Homo sapiens
  misc_RNA (1)...(19): siRNA sense strand
gaagaacagaaagaaagga

SEQ ID NO: 29996 - RNA, 19 nt, Homo sapiens
  misc_RNA (1)...(19): siRNA sense strand
aaaagcgggucacucuaua

SEQ ID NO: 29997 - RNA, 19 nt, Homo sapiens
  misc_RNA (1)...(19): siRNA sense strand
gaaacaagugacaccucaa

SEQ ID NO: 29998 - RNA, 19 nt, Homo sapiens
  misc_RNA (1)...(19): siRNA sense strand
ggauacagggcucuacaca

SEQ ID NO: 29999 - RNA, 19 nt, Homo sapiens
  misc_RNA (1)...(19): siRNA sense strand
ggaaggaaccauguugaac

SEQ ID NO: 30000 - RNA, 19 nt, Homo sapiens
  misc_RNA (1)...(19): siRNA sense strand
cagcggagacagaggaaga

SEQ ID NO: 30001 - RNA, 19 nt, Homo sapiens
  misc_RNA (1)...(19): siRNA sense strand
caaugucaaugcacaagcu

SEQ ID NO: 30002 - RNA, 19 nt, Homo sapiens
  misc_RNA (1)...(19): siRNA sense strand
gcugagagcgucugcaaaa

SEQ ID NO: 30003 - RNA, 19 nt, Homo sapiens
  misc_RNA (1)...(19): siRNA sense strand
gaaaaccacagaaaugcaa

SEQ ID NO: 30004 - RNA, 19 nt, Homo sapiens
  misc_RNA (1)...(19): siRNA sense strand
agugacaccucaaccugaa

SEQ ID NO: 30005 - RNA, 19 nt, Homo sapiens
  misc_RNA (1)...(19): siRNA sense strand
aaggaaccauguugaacug

SEQ ID NO: 30006 - RNA, 19 nt, Homo sapiens
  misc_RNA (1)...(19): siRNA sense strand
gagacguccauauuuacaa

SEQ ID NO: 30007 - RNA, 19 nt, Homo sapiens
  misc_RNA (1)...(19): siRNA sense strand
gaagaguagaagaacaauc

SEQ ID NO: 30008 - RNA, 19 nt, Homo sapiens
  misc_RNA (1)...(19): siRNA sense strand
gcgggucacucuauaugcu

SEQ ID NO: 30009 - RNA, 19 nt, Homo sapiens
  misc_RNA (1)...(19): siRNA sense strand
aagaguagaagaacaaucu

SEQ ID NO: 30010 - RNA, 19 nt, Homo sapiens
  misc_RNA (1)...(19): siRNA sense strand
cagaugguuuauuaucagu

SEQ ID NO: 30011 - RNA, 19 nt, Homo sapiens
  misc_RNA (1)...(19): siRNA sense strand
gaucccacacgccacauuc

SEQ ID NO: 30012 - RNA, 19 nt, Homo sapiens
  misc_RNA (1)...(19): siRNA sense strand
ccacucggaacacaacgaa

SEQ ID NO: 30013 - RNA, 19 nt, Homo sapiens
  misc_RNA (1)...(19): siRNA sense strand
ccauauuuacaacagagua

SEQ ID NO: 30014 - RNA, 19 nt, Homo sapiens
  misc_RNA (1)...(19): siRNA sense strand
caaauacagacagaaaugg

SEQ ID NO: 30015 - RNA, 19 nt, Homo sapiens
  misc_RNA (1)...(19): siRNA sense strand
cugaagaacagaaagaaag

SEQ ID NO: 30016 - RNA, 19 nt, Homo sapiens
  misc_RNA (1)...(19): siRNA sense strand
ccacacgccacauucaaag

SEQ ID NO: 30017 - RNA, 19 nt, Homo sapiens
  misc_RNA (1)...(19): siRNA sense strand
acagaaaugcaaaguccaa

SEQ ID NO: 30018 - RNA, 19 nt, Homo sapiens
  misc_RNA (1)...(19): siRNA sense strand
ggaccaagcgagccuucca

SEQ ID NO: 30019 - RNA, 19 nt, Homo sapiens
  misc_RNA (1)...(19): siRNA sense strand
aauggagaccagucaguuu

SEQ ID NO: 30020 - RNA, 19 nt, Homo sapiens
  misc_RNA (1)...(19): siRNA sense strand
ccugaagaacagaaagaaa

SEQ ID NO: 30021 - RNA, 19 nt, Homo sapiens
  misc_RNA (1)...(19): siRNA sense strand
ggaagaguagaagaacaau

SEQ ID NO: 30022 - RNA, 19 nt, Homo sapiens
  misc_RNA (1)...(19): siRNA sense strand
agacguccauauuuacaac

SEQ ID NO: 30023 - RNA, 19 nt, Homo sapiens
  misc_RNA (1)...(19): siRNA sense strand
ggagaccagucaguuucca

SEQ ID NO: 30024 - RNA, 19 nt, Homo sapiens
  misc_RNA (1)...(19): siRNA sense strand
aaauggagaccagucaguu

SEQ ID NO: 30025 - RNA, 19 nt, Homo sapiens
  misc_RNA (1)...(19): siRNA sense strand
agccauggccuacaaggaa

SEQ ID NO: 30026 - RNA, 19 nt, Homo sapiens
  misc_RNA (1)...(19): siRNA sense strand
aagaacagaaagaaaggaa

SEQ ID NO: 30027 - RNA, 19 nt, Homo sapiens
  misc_RNA (1)...(19): siRNA sense strand
ugacaccucaaccugaaga

SEQ ID NO: 30028 - RNA, 19 nt, Homo sapiens
  misc_RNA (1)...(19): siRNA sense strand
aggaagaguagaagaacaa

SEQ ID NO: 30029 - RNA, 19 nt, Homo sapiens
  misc_RNA (1)...(19): siRNA sense strand
guccugagagugagacuuc

SEQ ID NO: 30030 - RNA, 19 nt, Homo sapiens
  misc_RNA (1)...(19): siRNA sense strand
caccucaaccugaagaaca

SEQ ID NO: 30031 - RNA, 19 nt, Homo sapiens
  misc_RNA (1)...(19): siRNA sense strand
gagguuuccgcagaauaaa

SEQ ID NO: 30032 - RNA, 19 nt, Homo sapiens
  misc_RNA (1)...(19): siRNA sense strand
ggauucauaccugcugaug

SEQ ID NO: 30033 - RNA, 19 nt, Homo sapiens
  misc_RNA (1)...(19): siRNA sense strand
gaacugaacuggaacaaca

SEQ ID NO: 30034 - RNA, 19 nt, Homo sapiens
  misc_RNA (1)...(19): siRNA sense strand
gaacucggauaaugauaaa

SEQ ID NO: 30035 - RNA, 19 nt, Homo sapiens
  misc_RNA (1)...(19): siRNA sense strand
gaaccuaacacuucacaaa

SEQ ID NO: 30036 - RNA, 19 nt, Homo sapiens
  misc_RNA (1)...(19): siRNA sense strand
uagaggaucuuguuacuga

SEQ ID NO: 30037 - RNA, 19 nt, Homo sapiens
  misc_RNA (1)...(19): siRNA sense strand
caccacagcugauuucuuc

SEQ ID NO: 30038 - RNA, 19 nt, Homo sapiens
  misc_RNA (1)...(19): siRNA sense strand
gagaauccuuuccuguuug

SEQ ID NO: 30039 - RNA, 19 nt, Homo sapiens
  misc_RNA (1)...(19): siRNA sense strand
gaaccuagaggaucuuguu

SEQ ID NO: 30040 - RNA, 19 nt, Homo sapiens
  misc_RNA (1)...(19): siRNA sense strand
cagcuggacugaacaauca

SEQ ID NO: 30041 - RNA, 19 nt, Homo sapiens
  misc_RNA (1)...(19): siRNA sense strand
ucccagagguucaguguuu

SEQ ID NO: 30042 - RNA, 19 nt, Homo sapiens
  misc_RNA (1)...(19): siRNA sense strand
agagaauccuuuccuguuu

SEQ ID NO: 30043 - RNA, 19 nt, Homo sapiens
  misc_RNA (1)...(19): siRNA sense strand
ccagagaaccuaacacuuc

SEQ ID NO: 30044 - RNA, 19 nt, Homo sapiens
  misc_RNA (1)...(19): siRNA sense strand
caaccucacucugcauuau

SEQ ID NO: 30045 - RNA, 19 nt, Homo sapiens
  misc_RNA (1)...(19): siRNA sense strand
gaccacagcuggacugaac

SEQ ID NO: 30046 - RNA, 19 nt, Homo sapiens
  misc_RNA (1)...(19): siRNA sense strand
uacaagaacucggauaaug

SEQ ID NO: 30047 - RNA, 19 nt, Homo sapiens
  misc_RNA (1)...(19): siRNA sense strand
gccacuaucuauucucuga

SEQ ID NO: 30048 - RNA, 19 nt, Homo sapiens
  misc_RNA (1)...(19): siRNA sense strand
gaagacaccacagcugauu

SEQ ID NO: 30049 - RNA, 19 nt, Homo sapiens
  misc_RNA (1)...(19): siRNA sense strand
gaacuggaacaacagauuc

SEQ ID NO: 30050 - RNA, 19 nt, Homo sapiens
  misc_RNA (1)...(19): siRNA sense strand
cagagaaccuaacacuuca

SEQ ID NO: 30051 - RNA, 19 nt, Homo sapiens
  misc_RNA (1)...(19): siRNA sense strand
gguacaagaacucggauaa

SEQ ID NO: 30052 - RNA, 19 nt, Homo sapiens
  misc_RNA (1)...(19): siRNA sense strand
ugaagaaccuagaggaucu

SEQ ID NO: 30053 - RNA, 19 nt, Homo sapiens
  misc_RNA (1)...(19): siRNA sense strand
gggcugaacacgacaauuc

SEQ ID NO: 30054 - RNA, 19 nt, Homo sapiens
  misc_RNA (1)...(19): siRNA sense strand
gaacaacagauucuugaac

SEQ ID NO: 30055 - RNA, 19 nt, Homo sapiens
  misc_RNA (1)...(19): siRNA sense strand
gcucagcauuggagugaau

SEQ ID NO: 30056 - RNA, 19 nt, Homo sapiens
  misc_RNA (1)...(19): siRNA sense strand
ucaguggauuauagacaua

SEQ ID NO: 30057 - RNA, 19 nt, Homo sapiens
  misc_RNA (1)...(19): siRNA sense strand
gaagccaucauuaccauuc

SEQ ID NO: 30058 - RNA, 19 nt, Homo sapiens
  misc_RNA (1)...(19): siRNA sense strand
acaagaacucggauaauga

SEQ ID NO: 30059 - RNA, 19 nt, Homo sapiens
  misc_RNA (1)...(19): siRNA sense strand
ggagacaggccacacagau

SEQ ID NO: 30060 - RNA, 19 nt, Homo sapiens
  misc_RNA (1)...(19): siRNA sense strand
ugaccacuaugcccacuga

SEQ ID NO: 30061 - RNA, 19 nt, Homo sapiens
  misc_RNA (1)...(19): siRNA sense strand
gagauccaccucuaccaaa

SEQ ID NO: 30062 - RNA, 19 nt, Homo sapiens
  misc_RNA (1)...(19): siRNA sense strand
caagaacucggauaaugau

SEQ ID NO: 30063 - RNA, 19 nt, Homo sapiens
  misc_RNA (1)...(19): siRNA sense strand
ccaccucuaccaaacauuu

SEQ ID NO: 30064 - RNA, 19 nt, Homo sapiens
  misc_RNA (1)...(19): siRNA sense strand
ggagauccaccucuaccaa

SEQ ID NO: 30065 - RNA, 19 nt, Homo sapiens
  misc_RNA (1)...(19): siRNA sense strand
aaaaggagauccaccucua

SEQ ID NO: 30066 - RNA, 19 nt, Homo sapiens
  misc_RNA (1)...(19): siRNA sense strand
ggaacaacagauucuugaa

SEQ ID NO: 30067 - RNA, 19 nt, Homo sapiens
  misc_RNA (1)...(19): siRNA sense strand
gaauucccacccugaagaa

SEQ ID NO: 30068 - RNA, 19 nt, Homo sapiens
  misc_RNA (1)...(19): siRNA sense strand
ucacaucccucuuauuccu

SEQ ID NO: 30069 - RNA, 19 nt, Homo sapiens
  misc_RNA (1)...(19): siRNA sense strand
gagugaaucccagcuagaa

SEQ ID NO: 30070 - RNA, 19 nt, Homo sapiens
  misc_RNA (1)...(19): siRNA sense strand
agaacucggauaaugauaa

SEQ ID NO: 30071 - RNA, 19 nt, Homo sapiens
  misc_RNA (1)...(19): siRNA sense strand
cgaauucccacccugaaga

SEQ ID NO: 30072 - RNA, 19 nt, Homo sapiens
  misc_RNA (1)...(19): siRNA sense strand
gaauggagccacccaaucc

SEQ ID NO: 30073 - RNA, 19 nt, Homo sapiens
  misc_RNA (1)...(19): siRNA sense strand
ccauucacaucccucuuau

SEQ ID NO: 30074 - RNA, 19 nt, Homo sapiens
  misc_RNA (1)...(19): siRNA sense strand
gugcagccacuaucuauuc

SEQ ID NO: 30075 - RNA, 19 nt, Homo sapiens
  misc_RNA (1)...(19): siRNA sense strand
ucacucugcauuauuggua

SEQ ID NO: 30076 - RNA, 19 nt, Homo sapiens
  misc_RNA (1)...(19): siRNA sense strand
gacucugccucgucaguga

SEQ ID NO: 30077 - RNA, 19 nt, Homo sapiens
  misc_RNA (1)...(19): siRNA sense strand
gagacaggccacacagaug

SEQ ID NO: 30078 - RNA, 19 nt, Homo sapiens
  misc_RNA (1)...(19): siRNA sense strand
guacaagaacucggauaau

SEQ ID NO: 30079 - RNA, 19 nt, Homo sapiens
  misc_RNA (1)...(19): siRNA sense strand
gagcaauacuucaaaagag

SEQ ID NO: 30080 - RNA, 19 nt, Homo sapiens
  misc_RNA (1)...(19): siRNA sense strand
gcagccagacuacagugaa

SEQ ID NO: 30081 - RNA, 19 nt, Homo sapiens
  misc_RNA (1)...(19): siRNA sense strand
aagagaauccuuuccuguu

SEQ ID NO: 30082 - RNA, 19 nt, Homo sapiens
  misc_RNA (1)...(19): siRNA sense strand
ccacacagaugcuaaaacu

SEQ ID NO: 30083 - RNA, 19 nt, Homo sapiens
  misc_RNA (1)...(19): siRNA sense strand
ccuaacacuucacaaacug

SEQ ID NO: 30084 - RNA, 19 nt, Homo sapiens
  misc_RNA (1)...(19): siRNA sense strand
ugaacuggaacaacagauu

SEQ ID NO: 30085 - RNA, 19 nt, Homo sapiens
  misc_RNA (1)...(19): siRNA sense strand
ugaauaccacgggaacuuu

SEQ ID NO: 30086 - RNA, 19 nt, Homo sapiens
  misc_RNA (1)...(19): siRNA sense strand
gauuaucagccuucucugu

SEQ ID NO: 30087 - RNA, 19 nt, Homo sapiens
  misc_RNA (1)...(19): siRNA sense strand
uacaugaauugcacuugga

SEQ ID NO: 30088 - RNA, 19 nt, Homo sapiens
  misc_RNA (1)...(19): siRNA sense strand
ccuagaggaucuuguuacu

SEQ ID NO: 30089 - RNA, 19 nt, Homo sapiens
  misc_RNA (1)...(19): siRNA sense strand
agcuagaacugaacuggaa

SEQ ID NO: 30090 - RNA, 19 nt, Homo sapiens
  misc_RNA (1)...(19): siRNA sense strand
aaucccagcuagaacugaa

SEQ ID NO: 30091 - RNA, 19 nt, Homo sapiens
  misc_RNA (1)...(19): siRNA sense strand
augauaaaguccagaagug

SEQ ID NO: 30092 - RNA, 19 nt, Homo sapiens
  misc_RNA (1)...(19): siRNA sense strand
ccaaccucacucugcauua

SEQ ID NO: 30093 - RNA, 19 nt, Homo sapiens
  misc_RNA (1)...(19): siRNA sense strand
aggaucuuguuacugaaua

SEQ ID NO: 30094 - RNA, 19 nt, Homo sapiens
  misc_RNA (1)...(19): siRNA sense strand
uggaacaacagauucuuga

SEQ ID NO: 30095 - RNA, 19 nt, Homo sapiens
  misc_RNA (1)...(19): siRNA sense strand
cagccacuaucuauucucu

SEQ ID NO: 30096 - RNA, 19 nt, Homo sapiens
  misc_RNA (1)...(19): siRNA sense strand
gaggaucuuguuacugaau

SEQ ID NO: 30097 - RNA, 19 nt, Homo sapiens
  misc_RNA (1)...(19): siRNA sense strand
gcauuggaagccgugguua

SEQ ID NO: 30098 - RNA, 19 nt, Homo sapiens
  misc_RNA (1)...(19): siRNA sense strand
ggagcaauacuucaaaaga

SEQ ID NO: 30099 - RNA, 19 nt, Homo sapiens
  misc_RNA (1)...(19): siRNA sense strand
auucacaucccucuuauuc

SEQ ID NO: 30100 - RNA, 19 nt, Homo sapiens
  misc_RNA (1)...(19): siRNA sense strand
gagaaccuaacacuucaca

SEQ ID NO: 30101 - RNA, 19 nt, Homo sapiens
  misc_RNA (1)...(19): siRNA sense strand
accauucacaucccucuua

SEQ ID NO: 30102 - RNA, 19 nt, Homo sapiens
  misc_RNA (1)...(19): siRNA sense strand
ccacagcuggacugaacaa

SEQ ID NO: 30103 - RNA, 19 nt, Homo sapiens
  misc_RNA (1)...(19): siRNA sense strand
agacaccacagcugauuuc

SEQ ID NO: 30104 - RNA, 19 nt, Homo sapiens
  misc_RNA (1)...(19): siRNA sense strand
gagguucaguguuuugugu

SEQ ID NO: 30105 - RNA, 19 nt, Homo sapiens
  misc_RNA (1)...(19): siRNA sense strand
ggaucuuguuacugaauac

SEQ ID NO: 30106 - RNA, 19 nt, Homo sapiens
  misc_RNA (1)...(19): siRNA sense strand
caucauuaccauucacauc

SEQ ID NO: 30107 - RNA, 19 nt, Homo sapiens
  misc_RNA (1)...(19): siRNA sense strand
ggggagcaauacuucaaaa

SEQ ID NO: 30108 - RNA, 19 nt, Homo sapiens
  misc_RNA (1)...(19): siRNA sense strand
uaguguggaugggcagaaa

SEQ ID NO: 30109 - RNA, 19 nt, Homo sapiens
  misc_RNA (1)...(19): siRNA sense strand
cacuaucuauucucugaag

SEQ ID NO: 30110 - RNA, 19 nt, Homo sapiens
  misc_RNA (1)...(19): siRNA sense strand
ggccuggaguggugugucu

SEQ ID NO: 30111 - RNA, 19 nt, Homo sapiens
  misc_RNA (1)...(19): siRNA sense strand
gaauaccacgggaacuuuu

SEQ ID NO: 30112 - RNA, 19 nt, Homo sapiens
  misc_RNA (1)...(19): siRNA sense strand
cguguucggagccgcuuua

SEQ ID NO: 30113 - RNA, 19 nt, Homo sapiens
  misc_RNA (1)...(19): siRNA sense strand
cugcauuauugguacaaga

SEQ ID NO: 30114 - RNA, 19 nt, Homo sapiens
  misc_RNA (1)...(19): siRNA sense strand
uuaucagccuucucugugu

SEQ ID NO: 30115 - RNA, 19 nt, Homo sapiens
  misc_RNA (1)...(19): siRNA sense strand
guucggagccgcuuuaacc

SEQ ID NO: 30116 - RNA, 19 nt, Homo sapiens
  misc_RNA (1)...(19): siRNA sense strand
gauucuugaaccacuguuu

SEQ ID NO: 30117 - RNA, 19 nt, Homo sapiens
  misc_RNA (1)...(19): siRNA sense strand
gauccaccucuaccaaaca

SEQ ID NO: 30118 - RNA, 19 nt, Homo sapiens
  misc_RNA (1)...(19): siRNA sense strand
ugaauggagccacccaauc

SEQ ID NO: 30119 - RNA, 19 nt, Homo sapiens
  misc_RNA (1)...(19): siRNA sense strand
gauuucuuccugaccacua

SEQ ID NO: 30120 - RNA, 19 nt, Homo sapiens
  misc_RNA (1)...(19): siRNA sense strand
ucaccaagauuaagaaaga

SEQ ID NO: 30121 - RNA, 19 nt, Homo sapiens
  misc_RNA (1)...(19): siRNA sense strand
gguauaagccuuuccaaga

SEQ ID NO: 30122 - RNA, 19 nt, Homo sapiens
  misc_RNA (1)...(19): siRNA sense strand
ucacaaggcugccaaagag

SEQ ID NO: 30123 - RNA, 19 nt, Homo sapiens
  misc_RNA (1)...(19): siRNA sense strand
uaacgugaccuaccuagaa

SEQ ID NO: 30124 - RNA, 19 nt, Homo sapiens
  misc_RNA (1)...(19): siRNA sense strand
ggaaguagaacccgagaug

SEQ ID NO: 30125 - RNA, 19 nt, Homo sapiens
  misc_RNA (1)...(19): siRNA sense strand
aaagggagcuucugugcau

SEQ ID NO: 30126 - RNA, 19 nt, Homo sapiens
  misc_RNA (1)...(19): siRNA sense strand
ccagagaaauguggguuug

SEQ ID NO: 30127 - RNA, 19 nt, Homo sapiens
  misc_RNA (1)...(19): siRNA sense strand
ccaaguggcacaacuccua

SEQ ID NO: 30128 - RNA, 19 nt, Homo sapiens
  misc_RNA (1)...(19): siRNA sense strand
ccuaugcagucaacauuug

SEQ ID NO: 30129 - RNA, 19 nt, Homo sapiens
  misc_RNA (1)...(19): siRNA sense strand
guauaagccuuuccaagac

SEQ ID NO: 30130 - RNA, 19 nt, Homo sapiens
  misc_RNA (1)...(19): siRNA sense strand
gcaguggcauugucuacuc

SEQ ID NO: 30131 - RNA, 19 nt, Homo sapiens
  misc_RNA (1)...(19): siRNA sense strand
ggucagugcggauaacuau

SEQ ID NO: 30132 - RNA, 19 nt, Homo sapiens
  misc_RNA (1)...(19): siRNA sense strand
acacguguaucccugagaa

SEQ ID NO: 30133 - RNA, 19 nt, Homo sapiens
  misc_RNA (1)...(19): siRNA sense strand
gaagaguaaauccucauca

SEQ ID NO: 30134 - RNA, 19 nt, Homo sapiens
  misc_RNA (1)...(19): siRNA sense strand
gucaacauuuggagugaaa

SEQ ID NO: 30135 - RNA, 19 nt, Homo sapiens
  misc_RNA (1)...(19): siRNA sense strand
guauaaucaucucaccuau

SEQ ID NO: 30136 - RNA, 19 nt, Homo sapiens
  misc_RNA (1)...(19): siRNA sense strand
gaaucuauaacgugaccua

SEQ ID NO: 30137 - RNA, 19 nt, Homo sapiens
  misc_RNA (1)...(19): siRNA sense strand
cgucagcguuuccugcauu

SEQ ID NO: 30138 - RNA, 19 nt, Homo sapiens
  misc_RNA (1)...(19): siRNA sense strand
gucagcaucaccaagauua

SEQ ID NO: 30139 - RNA, 19 nt, Homo sapiens
  misc_RNA (1)...(19): siRNA sense strand
ggcaagcucugggaacaug

SEQ ID NO: 30140 - RNA, 19 nt, Homo sapiens
  misc_RNA (1)...(19): siRNA sense strand
gggcuccuguucccuguga

SEQ ID NO: 30141 - RNA, 19 nt, Homo sapiens
  misc_RNA (1)...(19): siRNA sense strand
ccaccugcgucuccgacua

SEQ ID NO: 30142 - RNA, 19 nt, Homo sapiens
  misc_RNA (1)...(19): siRNA sense strand
agaauugucuuaccaagcu

SEQ ID NO: 30143 - RNA, 19 nt, Homo sapiens
  misc_RNA (1)...(19): siRNA sense strand
ggaggaggagguagaggaa

SEQ ID NO: 30144 - RNA, 19 nt, Homo sapiens
  misc_RNA (1)...(19): siRNA sense strand
auaaucaucucaccuaugc

SEQ ID NO: 30145 - RNA, 19 nt, Homo sapiens
  misc_RNA (1)...(19): siRNA sense strand
aaagaauggugggaucaga

SEQ ID NO: 30146 - RNA, 19 nt, Homo sapiens
  misc_RNA (1)...(19): siRNA sense strand
uguauaaucaucucaccua

SEQ ID NO: 30147 - RNA, 19 nt, Homo sapiens
  misc_RNA (1)...(19): siRNA sense strand
ggccugggcucagugcuau

SEQ ID NO: 30148 - RNA, 19 nt, Homo sapiens
  misc_RNA (1)...(19): siRNA sense strand
uacaugagcaucucuacuu

SEQ ID NO: 30149 - RNA, 19 nt, Homo sapiens
  misc_RNA (1)...(19): siRNA sense strand
gaaguacgagugcucacau

SEQ ID NO: 30150 - RNA, 19 nt, Homo sapiens
  misc_RNA (1)...(19): siRNA sense strand
gagcagcagggaugacuuc

SEQ ID NO: 30151 - RNA, 19 nt, Homo sapiens
  misc_RNA (1)...(19): siRNA sense strand
ccugacaauuaccuguaua

SEQ ID NO: 30152 - RNA, 19 nt, Homo sapiens
  misc_RNA (1)...(19): siRNA sense strand
acaugagcaucucuacuug

SEQ ID NO: 30153 - RNA, 19 nt, Homo sapiens
  misc_RNA (1)...(19): siRNA sense strand
gcccagcgagcaugugaaa

SEQ ID NO: 30154 - RNA, 19 nt, Homo sapiens
  misc_RNA (1)...(19): siRNA sense strand
aagaguaaauccucaucau

SEQ ID NO: 30155 - RNA, 19 nt, Homo sapiens
  misc_RNA (1)...(19): siRNA sense strand
ugacaguucacaccaaugu

SEQ ID NO: 30156 - RNA, 19 nt, Homo sapiens
  misc_RNA (1)...(19): siRNA sense strand
gcagauccuccgccgaaau

SEQ ID NO: 30157 - RNA, 19 nt, Homo sapiens
  misc_RNA (1)...(19): siRNA sense strand
cauacaugagggucucuua

SEQ ID NO: 30158 - RNA, 19 nt, Homo sapiens
  misc_RNA (1)...(19): siRNA sense strand
caucucaccuaugcaguca

SEQ ID NO: 30159 - RNA, 19 nt, Homo sapiens
  misc_RNA (1)...(19): siRNA sense strand
aggagaggcugguuacaag

SEQ ID NO: 30160 - RNA, 19 nt, Homo sapiens
  misc_RNA (1)...(19): siRNA sense strand
aggaggagguagaggaaga

SEQ ID NO: 30161 - RNA, 19 nt, Homo sapiens
  misc_RNA (1)...(19): siRNA sense strand
gauguguggaguuguuuga

SEQ ID NO: 30162 - RNA, 19 nt, Homo sapiens
  misc_RNA (1)...(19): siRNA sense strand
ggugcgauguguggaguug

SEQ ID NO: 30163 - RNA, 19 nt, Homo sapiens
  misc_RNA (1)...(19): siRNA sense strand
ccagacaaccugacuugca

SEQ ID NO: 30164 - RNA, 19 nt, Homo sapiens
  misc_RNA (1)...(19): siRNA sense strand
ugaagucugggauuuccua

SEQ ID NO: 30165 - RNA, 19 nt, Homo sapiens
  misc_RNA (1)...(19): siRNA sense strand
guaaauccucaucauccuu

SEQ ID NO: 30166 - RNA, 19 nt, Homo sapiens
  misc_RNA (1)...(19): siRNA sense strand
caggagaggcugguuacaa

SEQ ID NO: 30167 - RNA, 19 nt, Homo sapiens
  misc_RNA (1)...(19): siRNA sense strand
ccugacaguucacaccaau

SEQ ID NO: 30168 - RNA, 19 nt, Homo sapiens
  misc_RNA (1)...(19): siRNA sense strand
cagauccuccgccgaaaug

SEQ ID NO: 30169 - RNA, 19 nt, Homo sapiens
  misc_RNA (1)...(19): siRNA sense strand
gcgaguggaagaugaaugg

SEQ ID NO: 30170 - RNA, 19 nt, Homo sapiens
  misc_RNA (1)...(19): siRNA sense strand
ggaaguacgagugcucaca

SEQ ID NO: 30171 - RNA, 19 nt, Homo sapiens
  misc_RNA (1)...(19): siRNA sense strand
ugcccacacuggaagaauu

SEQ ID NO: 30172 - RNA, 19 nt, Homo sapiens
  misc_RNA (1)...(19): siRNA sense strand
gcaucaccaagauuaagaa

SEQ ID NO: 30173 - RNA, 19 nt, Homo sapiens
  misc_RNA (1)...(19): siRNA sense strand
uaugucagcaucaccaaga

SEQ ID NO: 30174 - RNA, 19 nt, Homo sapiens
  misc_RNA (1)...(19): siRNA sense strand
caccaagauuaagaaagaa

SEQ ID NO: 30175 - RNA, 19 nt, Homo sapiens
  misc_RNA (1)...(19): siRNA sense strand
gcagccagcacccugaagu

SEQ ID NO: 30176 - RNA, 19 nt, Homo sapiens
  misc_RNA (1)...(19): siRNA sense strand
ccgaagcccacacguguau

SEQ ID NO: 30177 - RNA, 19 nt, Homo sapiens
  misc_RNA (1)...(19): siRNA sense strand
ucucugagccaaccacugu

SEQ ID NO: 30178 - RNA, 19 nt, Homo sapiens
  misc_RNA (1)...(19): siRNA sense strand
guggcaagcucugggaaca

SEQ ID NO: 30179 - RNA, 19 nt, Homo sapiens
  misc_RNA (1)...(19): siRNA sense strand
guccagacaaccugacuug

SEQ ID NO: 30180 - RNA, 19 nt, Homo sapiens
  misc_RNA (1)...(19): siRNA sense strand
gccaggaaccagccaagug

SEQ ID NO: 30181 - RNA, 19 nt, Homo sapiens
  misc_RNA (1)...(19): siRNA sense strand
caccuaugcagucaacauu

SEQ ID NO: 30182 - RNA, 19 nt, Homo sapiens
  misc_RNA (1)...(19): siRNA sense strand
aaccugacuugcacagaga

SEQ ID NO: 30183 - RNA, 19 nt, Homo sapiens
  misc_RNA (1)...(19): siRNA sense strand
ggaggagguagaggaagaa

SEQ ID NO: 30184 - RNA, 19 nt, Homo sapiens
  misc_RNA (1)...(19): siRNA sense strand
gcccacacuggaagaauug

SEQ ID NO: 30185 - RNA, 19 nt, Homo sapiens
  misc_RNA (1)...(19): siRNA sense strand
agaauggugggaucagauu

SEQ ID NO: 30186 - RNA, 19 nt, Homo sapiens
  misc_RNA (1)...(19): siRNA sense strand
ccaagauuaagaaagaaug

SEQ ID NO: 30187 - RNA, 19 nt, Homo sapiens
  misc_RNA (1)...(19): siRNA sense strand
cagucaacauuuggaguga

SEQ ID NO: 30188 - RNA, 19 nt, Homo sapiens
  misc_RNA (1)...(19): siRNA sense strand
acccugaagucugggauuu

SEQ ID NO: 30189 - RNA, 19 nt, Homo sapiens
  misc_RNA (1)...(19): siRNA sense strand
gaaagaauggugggaucag

SEQ ID NO: 30190 - RNA, 19 nt, Homo sapiens
  misc_RNA (1)...(19): siRNA sense strand
gcaccaaguggcacaacuc

SEQ ID NO: 30191 - RNA, 19 nt, Homo sapiens
  misc_RNA (1)...(19): siRNA sense strand
caucaccaagauuaagaaa

SEQ ID NO: 30192 - RNA, 19 nt, Homo sapiens
  misc_RNA (1)...(19): siRNA sense strand
gagaagaguaaauccucau

SEQ ID NO: 30193 - RNA, 19 nt, Homo sapiens
  misc_RNA (1)...(19): siRNA sense strand
guagaggacaugccaaagc

SEQ ID NO: 30194 - RNA, 19 nt, Homo sapiens
  misc_RNA (1)...(19): siRNA sense strand
gggaaaagguagaggacau

SEQ ID NO: 30195 - RNA, 19 nt, Homo sapiens
  misc_RNA (1)...(19): siRNA sense strand
aacccgagaugcccugugu

SEQ ID NO: 30196 - RNA, 19 nt, Homo sapiens
  misc_RNA (1)...(19): siRNA sense strand
caaggcugccaaagagaug

SEQ ID NO: 30197 - RNA, 19 nt, Homo sapiens
  misc_RNA (1)...(19): siRNA sense strand
guuacaaggccuucucaag

SEQ ID NO: 30198 - RNA, 19 nt, Homo sapiens
  misc_RNA (1)...(19): siRNA sense strand
acaccuggaggaaguagaa

SEQ ID NO: 30199 - RNA, 19 nt, Homo sapiens
  misc_RNA (1)...(19): siRNA sense strand
uauaaucaucucaccuaug

SEQ ID NO: 30200 - RNA, 19 nt, Homo sapiens
  misc_RNA (1)...(19): siRNA sense strand
caagugcagggcccaagga

SEQ ID NO: 30201 - RNA, 19 nt, Homo sapiens
  misc_RNA (1)...(19): siRNA sense strand
ucagugcggauaacuauac

SEQ ID NO: 30202 - RNA, 19 nt, Homo sapiens
  misc_RNA (1)...(19): siRNA sense strand
caagauuaagaaagaaugg

SEQ ID NO: 30203 - RNA, 19 nt, Homo sapiens
  misc_RNA (1)...(19): siRNA sense strand
gcucugggaacaugaaggu

SEQ ID NO: 30204 - RNA, 19 nt, Homo sapiens
  misc_RNA (1)...(19): siRNA sense strand
ugcgauguguggaguuguu

SEQ ID NO: 30205 - RNA, 19 nt, Homo sapiens
  misc_RNA (1)...(19): siRNA sense strand
gaacgaggcuucuucuaca

SEQ ID NO: 30206 - RNA, 19 nt, Homo sapiens
  misc_RNA (1)...(19): siRNA sense strand
gguggaagcucucuaccua

SEQ ID NO: 30207 - RNA, 19 nt, Homo sapiens
  misc_RNA (1)...(19): siRNA sense strand
gaagcucucuaccuagugu

SEQ ID NO: 30208 - RNA, 19 nt, Homo sapiens
  misc_RNA (1)...(19): siRNA sense strand
gcagaagcguggcauugug

SEQ ID NO: 30209 - RNA, 19 nt, Homo sapiens
  misc_RNA (1)...(19): siRNA sense strand
ucuaccagcuggagaacua

SEQ ID NO: 30210 - RNA, 19 nt, Homo sapiens
  misc_RNA (1)...(19): siRNA sense strand
ggagaacuacugcaacuag

SEQ ID NO: 30211 - RNA, 19 nt, Homo sapiens
  misc_RNA (1)...(19): siRNA sense strand
ggaacgaggcuucuucuac

SEQ ID NO: 30212 - RNA, 19 nt, Homo sapiens
  misc_RNA (1)...(19): siRNA sense strand
ugacccagccgcagccuuu

SEQ ID NO: 30213 - RNA, 19 nt, Homo sapiens
  misc_RNA (1)...(19): siRNA sense strand
uggaagcucucuaccuagu

SEQ ID NO: 30214 - RNA, 19 nt, Homo sapiens
  misc_RNA (1)...(19): siRNA sense strand
gaagcguggcauuguggaa

SEQ ID NO: 30215 - RNA, 19 nt, Homo sapiens
  misc_RNA (1)...(19): siRNA sense strand
guggaacaaugcuguacca

SEQ ID NO: 30216 - RNA, 19 nt, Homo sapiens
  misc_RNA (1)...(19): siRNA sense strand
gggaacgaggcuucuucua

SEQ ID NO: 30217 - RNA, 19 nt, Homo sapiens
  misc_RNA (1)...(19): siRNA sense strand
ggaagacguuugaggauua

SEQ ID NO: 30218 - RNA, 19 nt, Homo sapiens
  misc_RNA (1)...(19): siRNA sense strand
ggagagaccuuggaaauug

SEQ ID NO: 30219 - RNA, 19 nt, Homo sapiens
  misc_RNA (1)...(19): siRNA sense strand
gaacaaggcucccgagagu

SEQ ID NO: 30220 - RNA, 19 nt, Homo sapiens
  misc_RNA (1)...(19): siRNA sense strand
gaucacgacuguucuuuaa

SEQ ID NO: 30221 - RNA, 19 nt, Homo sapiens
  misc_RNA (1)...(19): siRNA sense strand
ggacggaacccaccuauuu

SEQ ID NO: 30222 - RNA, 19 nt, Homo sapiens
  misc_RNA (1)...(19): siRNA sense strand
gaacgauguuggacucaua

SEQ ID NO: 30223 - RNA, 19 nt, Homo sapiens
  misc_RNA (1)...(19): siRNA sense strand
gaauugcucugucaucgaa

SEQ ID NO: 30224 - RNA, 19 nt, Homo sapiens
  misc_RNA (1)...(19): siRNA sense strand
gaaacgacauugcccugaa

SEQ ID NO: 30225 - RNA, 19 nt, Homo sapiens
  misc_RNA (1)...(19): siRNA sense strand
gaaggacacuugcagauac

SEQ ID NO: 30226 - RNA, 19 nt, Homo sapiens
  misc_RNA (1)...(19): siRNA sense strand
ggccagaggcugagaauaa

SEQ ID NO: 30227 - RNA, 19 nt, Homo sapiens
  misc_RNA (1)...(19): siRNA sense strand
aaacgaggcccgaagauuu

SEQ ID NO: 30228 - RNA, 19 nt, Homo sapiens
  misc_RNA (1)...(19): siRNA sense strand
gaagaacaaugagcucugu

SEQ ID NO: 30229 - RNA, 19 nt, Homo sapiens
  misc_RNA (1)...(19): siRNA sense strand
ugcaugagcuggagaauug

SEQ ID NO: 30230 - RNA, 19 nt, Homo sapiens
  misc_RNA (1)...(19): siRNA sense strand
acaaugagcucuguuacuu

SEQ ID NO: 30231 - RNA, 19 nt, Homo sapiens
  misc_RNA (1)...(19): siRNA sense strand
gaaauuucaggguaucuaa

SEQ ID NO: 30232 - RNA, 19 nt, Homo sapiens
  misc_RNA (1)...(19): siRNA sense strand
ggacggugguagacauuga

SEQ ID NO: 30233 - RNA, 19 nt, Homo sapiens
  misc_RNA (1)...(19): siRNA sense strand
gugaggagcuggagaugga

SEQ ID NO: 30234 - RNA, 19 nt, Homo sapiens
  misc_RNA (1)...(19): siRNA sense strand
aaacucuucuuccacuaua

SEQ ID NO: 30235 - RNA, 19 nt, Homo sapiens
  misc_RNA (1)...(19): siRNA sense strand
gaagaaauuucaggguauc

SEQ ID NO: 30236 - RNA, 19 nt, Homo sapiens
  misc_RNA (1)...(19): siRNA sense strand
gauccaaucucagugucua

SEQ ID NO: 30237 - RNA, 19 nt, Homo sapiens
  misc_RNA (1)...(19): siRNA sense strand
gaaguuacgucugauucga

SEQ ID NO: 30238 - RNA, 19 nt, Homo sapiens
  misc_RNA (1)...(19): siRNA sense strand
cuacgugacagacuauuua

SEQ ID NO: 30239 - RNA, 19 nt, Homo sapiens
  misc_RNA (1)...(19): siRNA sense strand
ccaagagugacaucauuua

SEQ ID NO: 30240 - RNA, 19 nt, Homo sapiens
  misc_RNA (1)...(19): siRNA sense strand
ggccaagagugacaucauu

SEQ ID NO: 30241 - RNA, 19 nt, Homo sapiens
  misc_RNA (1)...(19): siRNA sense strand
gaggagagaccuuggaaau

SEQ ID NO: 30242 - RNA, 19 nt, Homo sapiens
  misc_RNA (1)...(19): siRNA sense strand
cagauacucuugauguuca

SEQ ID NO: 30243 - RNA, 19 nt, Homo sapiens
  misc_RNA (1)...(19): siRNA sense strand
gacccaguaugccaucuuu

SEQ ID NO: 30244 - RNA, 19 nt, Homo sapiens
  misc_RNA (1)...(19): siRNA sense strand
caugaaaucuuugagaaca

SEQ ID NO: 30245 - RNA, 19 nt, Homo sapiens
  misc_RNA (1)...(19): siRNA sense strand
ggaucacgacuguucuuua

SEQ ID NO: 30246 - RNA, 19 nt, Homo sapiens
  misc_RNA (1)...(19): siRNA sense strand
uaacucaucaucccagauu

SEQ ID NO: 30247 - RNA, 19 nt, Homo sapiens
  misc_RNA (1)...(19): siRNA sense strand
ccagagacaucuaugaaac

SEQ ID NO: 30248 - RNA, 19 nt, Homo sapiens
  misc_RNA (1)...(19): siRNA sense strand
gaccagagacaucuaugaa

SEQ ID NO: 30249 - RNA, 19 nt, Homo sapiens
  misc_RNA (1)...(19): siRNA sense strand
gcaucgagaagaacaauga

SEQ ID NO: 30250 - RNA, 19 nt, Homo sapiens
  misc_RNA (1)...(19): siRNA sense strand
ugucagaaauccacaagau

SEQ ID NO: 30251 - RNA, 19 nt, Homo sapiens
  misc_RNA (1)...(19): siRNA sense strand
ucaaggaacucggccucua

SEQ ID NO: 30252 - RNA, 19 nt, Homo sapiens
  misc_RNA (1)...(19): siRNA sense strand
cgaaggacacuugcagaua

SEQ ID NO: 30253 - RNA, 19 nt, Homo sapiens
  misc_RNA (1)...(19): siRNA sense strand
gaaugcugcuccuguccaa

SEQ ID NO: 30254 - RNA, 19 nt, Homo sapiens
  misc_RNA (1)...(19): siRNA sense strand
gaaacucuucuuccacuau

SEQ ID NO: 30255 - RNA, 19 nt, Homo sapiens
  misc_RNA (1)...(19): siRNA sense strand
caagauggaagaaguuuca

SEQ ID NO: 30256 - RNA, 19 nt, Homo sapiens
  misc_RNA (1)...(19): siRNA sense strand
caaccuuccuggagauugu

SEQ ID NO: 30257 - RNA, 19 nt, Homo sapiens
  misc_RNA (1)...(19): siRNA sense strand
gcauggauauccggaacaa

SEQ ID NO: 30258 - RNA, 19 nt, Homo sapiens
  misc_RNA (1)...(19): siRNA sense strand
gaugaacgccggaccuaug

SEQ ID NO: 30259 - RNA, 19 nt, Homo sapiens
  misc_RNA (1)...(19): siRNA sense strand
gcaggucccuuggcgaugu

SEQ ID NO: 30260 - RNA, 19 nt, Homo sapiens
  misc_RNA (1)...(19): siRNA sense strand
accaaggccugucuaauga

SEQ ID NO: 30261 - RNA, 19 nt, Homo sapiens
  misc_RNA (1)...(19): siRNA sense strand
cauagucacugccagaaag

SEQ ID NO: 30262 - RNA, 19 nt, Homo sapiens
  misc_RNA (1)...(19): siRNA sense strand
acggagaccugaagagcua

SEQ ID NO: 30263 - RNA, 19 nt, Homo sapiens
  misc_RNA (1)...(19): siRNA sense strand
gcacaggccuuuugagaag

SEQ ID NO: 30264 - RNA, 19 nt, Homo sapiens
  misc_RNA (1)...(19): siRNA sense strand
uggauuccguggaggauaa

SEQ ID NO: 30265 - RNA, 19 nt, Homo sapiens
  misc_RNA (1)...(19): siRNA sense strand
ugucauggauggaggguau

SEQ ID NO: 30266 - RNA, 19 nt, Homo sapiens
  misc_RNA (1)...(19): siRNA sense strand
ucagauggcggcagagauu

SEQ ID NO: 30267 - RNA, 19 nt, Homo sapiens
  misc_RNA (1)...(19): siRNA sense strand
cgcaugaaaucuuugagaa

SEQ ID NO: 30268 - RNA, 19 nt, Homo sapiens
  misc_RNA (1)...(19): siRNA sense strand
caaggcugaugacauuguu

SEQ ID NO: 30269 - RNA, 19 nt, Homo sapiens
  misc_RNA (1)...(19): siRNA sense strand
gcacaaccagagugaguau

SEQ ID NO: 30270 - RNA, 19 nt, Homo sapiens
  misc_RNA (1)...(19): siRNA sense strand
gaagaaguuucaggaacca

SEQ ID NO: 30271 - RNA, 19 nt, Homo sapiens
  misc_RNA (1)...(19): siRNA sense strand
uaccaaggccugucuaaug

SEQ ID NO: 30272 - RNA, 19 nt, Homo sapiens
  misc_RNA (1)...(19): siRNA sense strand
gccagaggcugagaauaau

SEQ ID NO: 30273 - RNA, 19 nt, Homo sapiens
  misc_RNA (1)...(19): siRNA sense strand
cgagaugguucaccucaag

SEQ ID NO: 30274 - RNA, 19 nt, Homo sapiens
  misc_RNA (1)...(19): siRNA sense strand
ucucuucaguguugugauu

SEQ ID NO: 30275 - RNA, 19 nt, Homo sapiens
  misc_RNA (1)...(19): siRNA sense strand
gcuggauuauugccucaaa

SEQ ID NO: 30276 - RNA, 19 nt, Homo sapiens
  misc_RNA (1)...(19): siRNA sense strand
caagagugacaucauuuau

SEQ ID NO: 30277 - RNA, 19 nt, Homo sapiens
  misc_RNA (1)...(19): siRNA sense strand
gggaacuacuccuucuaug

SEQ ID NO: 30278 - RNA, 19 nt, Homo sapiens
  misc_RNA (1)...(19): siRNA sense strand
ucacgacuguucuuuaacu

SEQ ID NO: 30279 - RNA, 19 nt, Homo sapiens
  misc_RNA (1)...(19): siRNA sense strand
guugaaauuugucauggau

SEQ ID NO: 30280 - RNA, 19 nt, Homo sapiens
  misc_RNA (1)...(19): siRNA sense strand
uugagaagguggugaacaa

SEQ ID NO: 30281 - RNA, 19 nt, Homo sapiens
  misc_RNA (1)...(19): siRNA sense strand
gcagauacucuugauguuc

SEQ ID NO: 30282 - RNA, 19 nt, Homo sapiens
  misc_RNA (1)...(19): siRNA sense strand
gagagaccuuggaaauugg

SEQ ID NO: 30283 - RNA, 19 nt, Homo sapiens
  misc_RNA (1)...(19): siRNA sense strand
gaugaauuccagcaacuug

SEQ ID NO: 30284 - RNA, 19 nt, Homo sapiens
  misc_RNA (1)...(19): siRNA sense strand
ucuaugaaacggauuacua

SEQ ID NO: 30285 - RNA, 19 nt, Homo sapiens
  misc_RNA (1)...(19): siRNA sense strand
gcuuuacgcuucuucaaac

SEQ ID NO: 30286 - RNA, 19 nt, Homo sapiens
  misc_RNA (1)...(19): siRNA sense strand
agaagguggugaacaagga

SEQ ID NO: 30287 - RNA, 19 nt, Homo sapiens
  misc_RNA (1)...(19): siRNA sense strand
caaccucggccucauugaa

SEQ ID NO: 30288 - RNA, 19 nt, Homo sapiens
  misc_RNA (1)...(19): siRNA sense strand
gccaagagugacaucauuu

SEQ ID NO: 30289 - RNA, 19 nt, Homo sapiens
  misc_RNA (1)...(19): siRNA sense strand
ugugacgcaugaaaucuuu

SEQ ID NO: 30290 - RNA, 19 nt, Homo sapiens
  misc_RNA (1)...(19): siRNA sense strand
ggaucaacccgacaacugu

SEQ ID NO: 30291 - RNA, 19 nt, Homo sapiens
  misc_RNA (1)...(19): siRNA sense strand
ccaaagacagacucucaga

SEQ ID NO: 30292 - RNA, 19 nt, Homo sapiens
  misc_RNA (1)...(19): siRNA sense strand
ggaaugaccagagacaucu

SEQ ID NO: 30293 - RNA, 19 nt, Homo sapiens
  misc_RNA (1)...(19): siRNA sense strand
gaagagcuaccuccguucu

SEQ ID NO: 30294 - RNA, 19 nt, Homo sapiens
  misc_RNA (1)...(19): siRNA sense strand
agaaagaggcagccagaug

SEQ ID NO: 30295 - RNA, 19 nt, Homo sapiens
  misc_RNA (1)...(19): siRNA sense strand
gaagacguuugaggauuac

SEQ ID NO: 30296 - RNA, 19 nt, Homo sapiens
  misc_RNA (1)...(19): siRNA sense strand
ucuacaaccugaugaacau

SEQ ID NO: 30297 - RNA, 19 nt, Homo sapiens
  misc_RNA (1)...(19): siRNA sense strand
acaaggcucccgagaguga

SEQ ID NO: 30298 - RNA, 19 nt, Homo sapiens
  misc_RNA (1)...(19): siRNA sense strand
aaagacagacucucagauc

SEQ ID NO: 30299 - RNA, 19 nt, Homo sapiens
  misc_RNA (1)...(19): siRNA sense strand
ccacaagauggaagaaguu

SEQ ID NO: 30300 - RNA, 19 nt, Homo sapiens
  misc_RNA (1)...(19): siRNA sense strand
ggugucacuuuccuucuuc

SEQ ID NO: 30301 - RNA, 19 nt, Homo sapiens
  misc_RNA (1)...(19): siRNA sense strand
acgaggaacacaucccuua

SEQ ID NO: 30302 - RNA, 19 nt, Homo sapiens
  misc_RNA (1)...(19): siRNA sense strand
gguccucgcuggguuucaa

SEQ ID NO: 30303 - RNA, 19 nt, Homo sapiens
  misc_RNA (1)...(19): siRNA sense strand
uucaagagaugauucagau

SEQ ID NO: 30304 - RNA, 19 nt, Homo sapiens
  misc_RNA (1)...(19): siRNA sense strand
gaagacggucaacgaguca

SEQ ID NO: 30305 - RNA, 19 nt, Homo sapiens
  misc_RNA (1)...(19): siRNA sense strand
guugugauuggaaguauuu

SEQ ID NO: 30306 - RNA, 19 nt, Homo sapiens
  misc_RNA (1)...(19): siRNA sense strand
gaacuacagcgugcgaauc

SEQ ID NO: 30307 - RNA, 19 nt, Homo sapiens
  misc_RNA (1)...(19): siRNA sense strand
gguucaugcuguucuacaa

SEQ ID NO: 30308 - RNA, 19 nt, Homo sapiens
  misc_RNA (1)...(19): siRNA sense strand
cgaggaguguggagacauc

SEQ ID NO: 30309 - RNA, 19 nt, Homo sapiens
  misc_RNA (1)...(19): siRNA sense strand
gaggaacacaucccuuaca

SEQ ID NO: 30310 - RNA, 19 nt, Homo sapiens
  misc_RNA (1)...(19): siRNA sense strand
uaucuauuccugagaaaga

SEQ ID NO: 30311 - RNA, 19 nt, Homo sapiens
  misc_RNA (1)...(19): siRNA sense strand
gucuuucucuucaguguug

SEQ ID NO: 30312 - RNA, 19 nt, Homo sapiens
  misc_RNA (1)...(19): siRNA sense strand
caacgggcaguuugucgaa

SEQ ID NO: 30313 - RNA, 19 nt, Homo sapiens
  misc_RNA (1)...(19): siRNA sense strand
cggccucauugaagaaauu

SEQ ID NO: 30314 - RNA, 19 nt, Homo sapiens
  misc_RNA (1)...(19): siRNA sense strand
caugaacggaggcaagaaa

SEQ ID NO: 30315 - RNA, 19 nt, Homo sapiens
  misc_RNA (1)...(19): siRNA sense strand
cuucaaacccugaguaucu

SEQ ID NO: 30316 - RNA, 19 nt, Homo sapiens
  misc_RNA (1)...(19): siRNA sense strand
gagcuacgaggaacacauc

SEQ ID NO: 30317 - RNA, 19 nt, Homo sapiens
  misc_RNA (1)...(19): siRNA sense strand
ccacgcagcuuuacaagga

SEQ ID NO: 30318 - RNA, 19 nt, Homo sapiens
  misc_RNA (1)...(19): siRNA sense strand
ggagcuggcugucauguug

SEQ ID NO: 30319 - RNA, 19 nt, Homo sapiens
  misc_RNA (1)...(19): siRNA sense strand
gcugucauguugaacuuga

SEQ ID NO: 30320 - RNA, 19 nt, Homo sapiens
  misc_RNA (1)...(19): siRNA sense strand
gaugaagucuaccaaagcu

SEQ ID NO: 30321 - RNA, 19 nt, Homo sapiens
  misc_RNA (1)...(19): siRNA sense strand
ccaaagcucacgcguggaa

SEQ ID NO: 30322 - RNA, 19 nt, Homo sapiens
  misc_RNA (1)...(19): siRNA sense strand
aucaagaucugguuccaaa

SEQ ID NO: 30323 - RNA, 19 nt, Homo sapiens
  misc_RNA (1)...(19): siRNA sense strand
ugcuagagcuggagaagga

SEQ ID NO: 30324 - RNA, 19 nt, Homo sapiens
  misc_RNA (1)...(19): siRNA sense strand
gagagacacaucaagaucu

SEQ ID NO: 30325 - RNA, 19 nt, Homo sapiens
  misc_RNA (1)...(19): siRNA sense strand
uggaugaagucuaccaaag

SEQ ID NO: 30326 - RNA, 19 nt, Homo sapiens
  misc_RNA (1)...(19): siRNA sense strand
ggguggagcuggcugucau

SEQ ID NO: 30327 - RNA, 19 nt, Homo sapiens
  misc_RNA (1)...(19): siRNA sense strand
agagacacaucaagaucug

SEQ ID NO: 30328 - RNA, 19 nt, Homo sapiens
  misc_RNA (1)...(19): siRNA sense strand
cgagagacacaucaagauc

SEQ ID NO: 30329 - RNA, 19 nt, Homo sapiens
  misc_RNA (1)...(19): siRNA sense strand
gaguuccuauucaacaagu

SEQ ID NO: 30330 - RNA, 19 nt, Homo sapiens
  misc_RNA (1)...(19): siRNA sense strand
ucccauggaugaagucuac

SEQ ID NO: 30331 - RNA, 19 nt, Homo sapiens
  misc_RNA (1)...(19): siRNA sense strand
gaacggcgaggagcaguac

SEQ ID NO: 30332 - RNA, 19 nt, Homo sapiens
  misc_RNA (1)...(19): siRNA sense strand
ggaugaagucuaccaaagc

SEQ ID NO: 30333 - RNA, 19 nt, Homo sapiens
  misc_RNA (1)...(19): siRNA sense strand
cagcugccuuucccaugga

SEQ ID NO: 30334 - RNA, 19 nt, Homo sapiens
  misc_RNA (1)...(19): siRNA sense strand
gagcuggcugucauguuga

SEQ ID NO: 30335 - RNA, 19 nt, Homo sapiens
  misc_RNA (1)...(19): siRNA sense strand
aaaaggaggaggacaagaa

SEQ ID NO: 30336 - RNA, 19 nt, Homo sapiens
  misc_RNA (1)...(19): siRNA sense strand
uggcugucauguugaacuu

SEQ ID NO: 30337 - RNA, 19 nt, Homo sapiens
  misc_RNA (1)...(19): siRNA sense strand
ggaagaagaugaugaagag

SEQ ID NO: 30338 - RNA, 19 nt, Homo sapiens
  misc_RNA (1)...(19): siRNA sense strand
gaagaagaacgcccagaua

SEQ ID NO: 30339 - RNA, 19 nt, Homo sapiens
  misc_RNA (1)...(19): siRNA sense strand
ggacaagcguuacugugaa

SEQ ID NO: 30340 - RNA, 19 nt, Homo sapiens
  misc_RNA (1)...(19): siRNA sense strand
gaaggccucuguccagcua

SEQ ID NO: 30341 - RNA, 19 nt, Homo sapiens
  misc_RNA (1)...(19): siRNA sense strand
ccuaugagcuccacaacaa

SEQ ID NO: 30342 - RNA, 19 nt, Homo sapiens
  misc_RNA (1)...(19): siRNA sense strand
caacauuccucagaagcua

SEQ ID NO: 30343 - RNA, 19 nt, Homo sapiens
  misc_RNA (1)...(19): siRNA sense strand
gaagaacgcccagauagga

SEQ ID NO: 30344 - RNA, 19 nt, Homo sapiens
  misc_RNA (1)...(19): siRNA sense strand
cagaagcuaucccuaaaug

SEQ ID NO: 30345 - RNA, 19 nt, Homo sapiens
  misc_RNA (1)...(19): siRNA sense strand
uggcggcuauuauuucuua

SEQ ID NO: 30346 - RNA, 19 nt, Homo sapiens
  misc_RNA (1)...(19): siRNA sense strand
gaugagacccgaaauguag

SEQ ID NO: 30347 - RNA, 19 nt, Homo sapiens
  misc_RNA (1)...(19): siRNA sense strand
gcacaacauuccucagaag

SEQ ID NO: 30348 - RNA, 19 nt, Homo sapiens
  misc_RNA (1)...(19): siRNA sense strand
ucucaacacuacagaauau

SEQ ID NO: 30349 - RNA, 19 nt, Homo sapiens
  misc_RNA (1)...(19): siRNA sense strand
gcacuggaacguccuagaa

SEQ ID NO: 30350 - RNA, 19 nt, Homo sapiens
  misc_RNA (1)...(19): siRNA sense strand
gcccguagguagcugcuuu

SEQ ID NO: 30351 - RNA, 19 nt, Homo sapiens
  misc_RNA (1)...(19): siRNA sense strand
ccaaccagguggcugugua

SEQ ID NO: 30352 - RNA, 19 nt, Homo sapiens
  misc_RNA (1)...(19): siRNA sense strand
gagaagacgcccguaggua

SEQ ID NO: 30353 - RNA, 19 nt, Homo sapiens
  misc_RNA (1)...(19): siRNA sense strand
gggacaagcguuacuguga

SEQ ID NO: 30354 - RNA, 19 nt, Homo sapiens
  misc_RNA (1)...(19): siRNA sense strand
gaagagcuguguccuaccu

SEQ ID NO: 30355 - RNA, 19 nt, Homo sapiens
  misc_RNA (1)...(19): siRNA sense strand
ggagagggccauuccaauc

SEQ ID NO: 30356 - RNA, 19 nt, Homo sapiens
  misc_RNA (1)...(19): siRNA sense strand
gagcagauggcgucguauu

SEQ ID NO: 30357 - RNA, 19 nt, Homo sapiens
  misc_RNA (1)...(19): siRNA sense strand
guaaucagaagaaggagaa

SEQ ID NO: 30358 - RNA, 19 nt, Homo sapiens
  misc_RNA (1)...(19): siRNA sense strand
aauguaggcucccaaacuu

SEQ ID NO: 30359 - RNA, 19 nt, Homo sapiens
  misc_RNA (1)...(19): siRNA sense strand
gaucucaacacuacagaau

SEQ ID NO: 30360 - RNA, 19 nt, Homo sapiens
  misc_RNA (1)...(19): siRNA sense strand
gagagacucaucuguaauc

SEQ ID NO: 30361 - RNA, 19 nt, Homo sapiens
  misc_RNA (1)...(19): siRNA sense strand
cgaccgggauggcuacaau

SEQ ID NO: 30362 - RNA, 19 nt, Homo sapiens
  misc_RNA (1)...(19): siRNA sense strand
ccucagaagcuaucccuaa

SEQ ID NO: 30363 - RNA, 19 nt, Homo sapiens
  misc_RNA (1)...(19): siRNA sense strand
ggcacaacauuccucagaa

SEQ ID NO: 30364 - RNA, 19 nt, Homo sapiens
  misc_RNA (1)...(19): siRNA sense strand
ccaggguggugcuguguga

SEQ ID NO: 30365 - RNA, 19 nt, Homo sapiens
  misc_RNA (1)...(19): siRNA sense strand
uguaggcucccaaacuuua

SEQ ID NO: 30366 - RNA, 19 nt, Homo sapiens
  misc_RNA (1)...(19): siRNA sense strand
caaaguggagcacaccuau

SEQ ID NO: 30367 - RNA, 19 nt, Homo sapiens
  misc_RNA (1)...(19): siRNA sense strand
gggcacaacauuccucaga

SEQ ID NO: 30368 - RNA, 19 nt, Homo sapiens
  misc_RNA (1)...(19): siRNA sense strand
gaggagagggccauuccaa

SEQ ID NO: 30369 - RNA, 19 nt, Homo sapiens
  misc_RNA (1)...(19): siRNA sense strand
gagccgcauuuacguggaa

SEQ ID NO: 30370 - RNA, 19 nt, Homo sapiens
  misc_RNA (1)...(19): siRNA sense strand
gggaagaugacguaugugu

SEQ ID NO: 30371 - RNA, 19 nt, Homo sapiens
  misc_RNA (1)...(19): siRNA sense strand
cucagaagcuaucccuaaa

SEQ ID NO: 30372 - RNA, 19 nt, Homo sapiens
  misc_RNA (1)...(19): siRNA sense strand
gagcucagccaguggugaa

SEQ ID NO: 30373 - RNA, 19 nt, Homo sapiens
  misc_RNA (1)...(19): siRNA sense strand
gacaagcguuacugugaag

SEQ ID NO: 30374 - RNA, 19 nt, Homo sapiens
  misc_RNA (1)...(19): siRNA sense strand
gcuccuggcggcuauuauu

SEQ ID NO: 30375 - RNA, 19 nt, Homo sapiens
  misc_RNA (1)...(19): siRNA sense strand
ggugguggcagcagaagaa

SEQ ID NO: 30376 - RNA, 19 nt, Homo sapiens
  misc_RNA (1)...(19): siRNA sense strand
cgaaauguaggcucccaaa

SEQ ID NO: 30377 - RNA, 19 nt, Homo sapiens
  misc_RNA (1)...(19): siRNA sense strand
cgggauggcuacaaugaca

SEQ ID NO: 30378 - RNA, 19 nt, Homo sapiens
  misc_RNA (1)...(19): siRNA sense strand
gugcucagccucaaugugu

SEQ ID NO: 30379 - RNA, 19 nt, Homo sapiens
  misc_RNA (1)...(19): siRNA sense strand
cccgugagcugcuucaaca

SEQ ID NO: 30380 - RNA, 19 nt, Homo sapiens
  misc_RNA (1)...(19): siRNA sense strand
gagcaagaacagccagaau

SEQ ID NO: 30381 - RNA, 19 nt, Homo sapiens
  misc_RNA (1)...(19): siRNA sense strand
gauaggaaucgcgauguug

SEQ ID NO: 30382 - RNA, 19 nt, Homo sapiens
  misc_RNA (1)...(19): siRNA sense strand
ugaugagacccgaaaugua

SEQ ID NO: 30383 - RNA, 19 nt, Homo sapiens
  misc_RNA (1)...(19): siRNA sense strand
agauaggaaucgcgauguu

SEQ ID NO: 30384 - RNA, 19 nt, Homo sapiens
  misc_RNA (1)...(19): siRNA sense strand
gagagggccauuccaaucu

SEQ ID NO: 30385 - RNA, 19 nt, Homo sapiens
  misc_RNA (1)...(19): siRNA sense strand
ccaaaguggagcacaccua

SEQ ID NO: 30386 - RNA, 19 nt, Homo sapiens
  misc_RNA (1)...(19): siRNA sense strand
gaacagccagaauccaaac

SEQ ID NO: 30387 - RNA, 19 nt, Homo sapiens
  misc_RNA (1)...(19): siRNA sense strand
agacugaggaggcugagaa

SEQ ID NO: 30388 - RNA, 19 nt, Homo sapiens
  misc_RNA (1)...(19): siRNA sense strand
ccuccgaccugcucuacau

SEQ ID NO: 30389 - RNA, 19 nt, Homo sapiens
  misc_RNA (1)...(19): siRNA sense strand
gcaagaacagccagaaucc

SEQ ID NO: 30390 - RNA, 19 nt, Homo sapiens
  misc_RNA (1)...(19): siRNA sense strand
aagaagaacgcccagauag

SEQ ID NO: 30391 - RNA, 19 nt, Homo sapiens
  misc_RNA (1)...(19): siRNA sense strand
ccguagacaucgaugacaa

SEQ ID NO: 30392 - RNA, 19 nt, Homo sapiens
  misc_RNA (1)...(19): siRNA sense strand
gcagauggcgucguauuuu

SEQ ID NO: 30393 - RNA, 19 nt, Homo sapiens
  misc_RNA (1)...(19): siRNA sense strand
cagaagaaggagaaugaga

SEQ ID NO: 30394 - RNA, 19 nt, Homo sapiens
  misc_RNA (1)...(19): siRNA sense strand
gugaugagacccgaaaugu

SEQ ID NO: 30395 - RNA, 19 nt, Homo sapiens
  misc_RNA (1)...(19): siRNA sense strand
aaguggagcacaccuauga

SEQ ID NO: 30396 - RNA, 19 nt, Homo sapiens
  misc_RNA (1)...(19): siRNA sense strand
ugaagaagaacgcccagau

SEQ ID NO: 30397 - RNA, 19 nt, Homo sapiens
  misc_RNA (1)...(19): siRNA sense strand
aagaacagccagaauccaa

SEQ ID NO: 30398 - RNA, 19 nt, Homo sapiens
  misc_RNA (1)...(19): siRNA sense strand
gccagaauccaaacagcaa

SEQ ID NO: 30399 - RNA, 19 nt, Homo sapiens
  misc_RNA (1)...(19): siRNA sense strand
ucuuugaccuccgugauga

SEQ ID NO: 30400 - RNA, 19 nt, Homo sapiens
  misc_RNA (1)...(19): siRNA sense strand
uggaagaagaugaugaaga

SEQ ID NO: 30401 - RNA, 19 nt, Homo sapiens
  misc_RNA (1)...(19): siRNA sense strand
ggagcaagaacagccagaa

SEQ ID NO: 30402 - RNA, 19 nt, Homo sapiens
  misc_RNA (1)...(19): siRNA sense strand
gcaaccccaugaagaagaa

SEQ ID NO: 30403 - RNA, 19 nt, Homo sapiens
  misc_RNA (1)...(19): siRNA sense strand
gcggauauuuucucgaguu

SEQ ID NO: 30404 - RNA, 19 nt, Homo sapiens
  misc_RNA (1)...(19): siRNA sense strand
caggauccaguucucguaa

SEQ ID NO: 30405 - RNA, 19 nt, Homo sapiens
  misc_RNA (1)...(19): siRNA sense strand
agagggagcagaacagcuu

SEQ ID NO: 30406 - RNA, 19 nt, Homo sapiens
  misc_RNA (1)...(19): siRNA sense strand
cagcuggagcgacgucauu

SEQ ID NO: 30407 - RNA, 19 nt, Homo sapiens
  misc_RNA (1)...(19): siRNA sense strand
ccagcaacccagaguacuu

SEQ ID NO: 30408 - RNA, 19 nt, Homo sapiens
  misc_RNA (1)...(19): siRNA sense strand
ggaagaggcuggggagucu

SEQ ID NO: 30409 - RNA, 19 nt, Homo sapiens
  misc_RNA (1)...(19): siRNA sense strand
caccauggccuuccuucga

SEQ ID NO: 30410 - RNA, 19 nt, Homo sapiens
  misc_RNA (1)...(19): siRNA sense strand
gaacacccugagccgcauu

SEQ ID NO: 30411 - RNA, 19 nt, Homo sapiens
  misc_RNA (1)...(19): siRNA sense strand
agugugaccugcaggagau

SEQ ID NO: 30412 - RNA, 19 nt, Homo sapiens
  misc_RNA (1)...(19): siRNA sense strand
gggagucuguguccuucca

SEQ ID NO: 30413 - RNA, 19 nt, Homo sapiens
  misc_RNA (1)...(19): siRNA sense strand
cagcuacuggugcaagauu

SEQ ID NO: 30414 - RNA, 19 nt, Homo sapiens
  misc_RNA (1)...(19): siRNA sense strand
ccugggagcgguggaaauu

SEQ ID NO: 30415 - RNA, 19 nt, Homo sapiens
  misc_RNA (1)...(19): siRNA sense strand
caacacuacagaauauguc

SEQ ID NO: 30416 - RNA, 19 nt, Homo sapiens
  misc_RNA (1)...(19): siRNA sense strand
ucagcuccguggucacuca

SEQ ID NO: 30417 - RNA, 19 nt, Homo sapiens
  misc_RNA (1)...(19): siRNA sense strand
ccuggaagaagaugaugaa

SEQ ID NO: 30418 - RNA, 19 nt, Homo sapiens
  misc_RNA (1)...(19): siRNA sense strand
uaugagcuccacaacaaug

SEQ ID NO: 30419 - RNA, 19 nt, Homo sapiens
  misc_RNA (1)...(19): siRNA sense strand
gcagauacggagcaagaac

SEQ ID NO: 30420 - RNA, 19 nt, Homo sapiens
  misc_RNA (1)...(19): siRNA sense strand
cugcagauacggagcaaga

SEQ ID NO: 30421 - RNA, 19 nt, Homo sapiens
  misc_RNA (1)...(19): siRNA sense strand
gaggugccguagacaucga

SEQ ID NO: 30422 - RNA, 19 nt, Homo sapiens
  misc_RNA (1)...(19): siRNA sense strand
aaauguaggcucccaaacu

SEQ ID NO: 30423 - RNA, 19 nt, Homo sapiens
  misc_RNA (1)...(19): siRNA sense strand
ggauccaguucucguaagc

SEQ ID NO: 30424 - RNA, 19 nt, Homo sapiens
  misc_RNA (1)...(19): siRNA sense strand
ucaggauccaguucucgua

SEQ ID NO: 30425 - RNA, 19 nt, Homo sapiens
  misc_RNA (1)...(19): siRNA sense strand
gaaauguaggcucccaaac

SEQ ID NO: 30426 - RNA, 19 nt, Homo sapiens
  misc_RNA (1)...(19): siRNA sense strand
gggcuccuggcggcuauua

SEQ ID NO: 30427 - RNA, 19 nt, Homo sapiens
  misc_RNA (1)...(19): siRNA sense strand
cggcuauuauuucuuaggu

SEQ ID NO: 30428 - RNA, 19 nt, Homo sapiens
  misc_RNA (1)...(19): siRNA sense strand
gaacgcccagauaggaauc

SEQ ID NO: 30429 - RNA, 19 nt, Homo sapiens
  misc_RNA (1)...(19): siRNA sense strand
cagauggcgucguauuuug

SEQ ID NO: 30430 - RNA, 19 nt, Homo sapiens
  misc_RNA (1)...(19): siRNA sense strand
ugggagcgguggaaauuuu

SEQ ID NO: 30431 - RNA, 19 nt, Homo sapiens
  misc_RNA (1)...(19): siRNA sense strand
ucaacacuacagaauaugu

SEQ ID NO: 30432 - RNA, 19 nt, Homo sapiens
  misc_RNA (1)...(19): siRNA sense strand
gcaaugucgagggcuuuga

SEQ ID NO: 30433 - RNA, 19 nt, Homo sapiens
  misc_RNA (1)...(19): siRNA sense strand
gcccugggacugugaaugg

SEQ ID NO: 30434 - RNA, 19 nt, Homo sapiens
  misc_RNA (1)...(19): siRNA sense strand
ggugagagggagcagaaca

SEQ ID NO: 30435 - RNA, 19 nt, Homo sapiens
  misc_RNA (1)...(19): siRNA sense strand
gguggcagcagaagaaggu

SEQ ID NO: 30436 - RNA, 19 nt, Homo sapiens
  misc_RNA (1)...(19): siRNA sense strand
gccccucgcugcucuuuga

SEQ ID NO: 30437 - RNA, 19 nt, Homo sapiens
  misc_RNA (1)...(19): siRNA sense strand
caagauggcuacccagaua

SEQ ID NO: 30438 - RNA, 19 nt, Homo sapiens
  misc_RNA (1)...(19): siRNA sense strand
gcacauuucuagaggaaua

SEQ ID NO: 30439 - RNA, 19 nt, Homo sapiens
  misc_RNA (1)...(19): siRNA sense strand
caacugaagucaccuuuga

SEQ ID NO: 30440 - RNA, 19 nt, Homo sapiens
  misc_RNA (1)...(19): siRNA sense strand
ggauaugccuccagguuaa

SEQ ID NO: 30441 - RNA, 19 nt, Homo sapiens
  misc_RNA (1)...(19): siRNA sense strand
caagacagcucauauugau

SEQ ID NO: 30442 - RNA, 19 nt, Homo sapiens
  misc_RNA (1)...(19): siRNA sense strand
gaaagggauuguucgugua

SEQ ID NO: 30443 - RNA, 19 nt, Homo sapiens
  misc_RNA (1)...(19): siRNA sense strand
gaaaguagaauccaaagga

SEQ ID NO: 30444 - RNA, 19 nt, Homo sapiens
  misc_RNA (1)...(19): siRNA sense strand
ggaauaaugugaagccaau

SEQ ID NO: 30445 - RNA, 19 nt, Homo sapiens
  misc_RNA (1)...(19): siRNA sense strand
caaggcagauggaauaaug

SEQ ID NO: 30446 - RNA, 19 nt, Homo sapiens
  misc_RNA (1)...(19): siRNA sense strand
ucagaaggauauugcuuua

SEQ ID NO: 30447 - RNA, 19 nt, Homo sapiens
  misc_RNA (1)...(19): siRNA sense strand
acagauagaugauaacaga

SEQ ID NO: 30448 - RNA, 19 nt, Homo sapiens
  misc_RNA (1)...(19): siRNA sense strand
gcacgcggaucgaguuuga

SEQ ID NO: 30449 - RNA, 19 nt, Homo sapiens
  misc_RNA (1)...(19): siRNA sense strand
gauauucaauugcuggaaa

SEQ ID NO: 30450 - RNA, 19 nt, Homo sapiens
  misc_RNA (1)...(19): siRNA sense strand
ugauagagauggagaaguu

SEQ ID NO: 30451 - RNA, 19 nt, Homo sapiens
  misc_RNA (1)...(19): siRNA sense strand
gagaggccaugagaaauuu

SEQ ID NO: 30452 - RNA, 19 nt, Homo sapiens
  misc_RNA (1)...(19): siRNA sense strand
gggaaaugguugcuuuauu

SEQ ID NO: 30453 - RNA, 19 nt, Homo sapiens
  misc_RNA (1)...(19): siRNA sense strand
gaaauaacagugacaaaca

SEQ ID NO: 30454 - RNA, 19 nt, Homo sapiens
  misc_RNA (1)...(19): siRNA sense strand
agaaggaaaucaagacaaa

SEQ ID NO: 30455 - RNA, 19 nt, Homo sapiens
  misc_RNA (1)...(19): siRNA sense strand
gaaagaaacgggaaauuac

SEQ ID NO: 30456 - RNA, 19 nt, Homo sapiens
  misc_RNA (1)...(19): siRNA sense strand
ggucuggccucuucauuug

SEQ ID NO: 30457 - RNA, 19 nt, Homo sapiens
  misc_RNA (1)...(19): siRNA sense strand
agaaagaaacgggaaauua

SEQ ID NO: 30458 - RNA, 19 nt, Homo sapiens
  misc_RNA (1)...(19): siRNA sense strand
caacaagcaaucaagauaa

SEQ ID NO: 30459 - RNA, 19 nt, Homo sapiens
  misc_RNA (1)...(19): siRNA sense strand
gaauugaccuccgccagaa

SEQ ID NO: 30460 - RNA, 19 nt, Homo sapiens
  misc_RNA (1)...(19): siRNA sense strand
gaaaauaccagacucuuaa

SEQ ID NO: 30461 - RNA, 19 nt, Homo sapiens
  misc_RNA (1)...(19): siRNA sense strand
gaaggauauugcuuuagaa

SEQ ID NO: 30462 - RNA, 19 nt, Homo sapiens
  misc_RNA (1)...(19): siRNA sense strand
gcacauauucgauggagaa

SEQ ID NO: 30463 - RNA, 19 nt, Homo sapiens
  misc_RNA (1)...(19): siRNA sense strand
gaguaugaauucaggguaa

SEQ ID NO: 30464 - RNA, 19 nt, Homo sapiens
  misc_RNA (1)...(19): siRNA sense strand
gagaaacaguugaguugug

SEQ ID NO: 30465 - RNA, 19 nt, Homo sapiens
  misc_RNA (1)...(19): siRNA sense strand
uaacagcaaccuuaaacua

SEQ ID NO: 30466 - RNA, 19 nt, Homo sapiens
  misc_RNA (1)...(19): siRNA sense strand
gcccaaauauacucaagaa

SEQ ID NO: 30467 - RNA, 19 nt, Homo sapiens
  misc_RNA (1)...(19): siRNA sense strand
aagagaggcuuacuucuga

SEQ ID NO: 30468 - RNA, 19 nt, Homo sapiens
  misc_RNA (1)...(19): siRNA sense strand
gaaagucucguuccuguuc

SEQ ID NO: 30469 - RNA, 19 nt, Homo sapiens
  misc_RNA (1)...(19): siRNA sense strand
gaacagcacauuucuagag

SEQ ID NO: 30470 - RNA, 19 nt, Homo sapiens
  misc_RNA (1)...(19): siRNA sense strand
ucucacaacucaagaaaga

SEQ ID NO: 30471 - RNA, 19 nt, Homo sapiens
  misc_RNA (1)...(19): siRNA sense strand
cagcaaggcagauggaaua

SEQ ID NO: 30472 - RNA, 19 nt, Homo sapiens
  misc_RNA (1)...(19): siRNA sense strand
gacaugugcucaccgauau

SEQ ID NO: 30473 - RNA, 19 nt, Homo sapiens
  misc_RNA (1)...(19): siRNA sense strand
gaaauuagcaaugggaaau

SEQ ID NO: 30474 - RNA, 19 nt, Homo sapiens
  misc_RNA (1)...(19): siRNA sense strand
agaaggauauugcuuuaga

SEQ ID NO: 30475 - RNA, 19 nt, Homo sapiens
  misc_RNA (1)...(19): siRNA sense strand
cacaguaacuccuaacaga

SEQ ID NO: 30476 - RNA, 19 nt, Homo sapiens
  misc_RNA (1)...(19): siRNA sense strand
gaagugggaaguuuaauag

SEQ ID NO: 30477 - RNA, 19 nt, Homo sapiens
  misc_RNA (1)...(19): siRNA sense strand
gaagaugggccuuaugaag

SEQ ID NO: 30478 - RNA, 19 nt, Homo sapiens
  misc_RNA (1)...(19): siRNA sense strand
guauguaacagcaaccuua

SEQ ID NO: 30479 - RNA, 19 nt, Homo sapiens
  misc_RNA (1)...(19): siRNA sense strand
gaaccaaagauucuauguu

SEQ ID NO: 30480 - RNA, 19 nt, Homo sapiens
  misc_RNA (1)...(19): siRNA sense strand
aaggauggguggcaagaua

SEQ ID NO: 30481 - RNA, 19 nt, Homo sapiens
  misc_RNA (1)...(19): siRNA sense strand
gggauaugccuccagguua

SEQ ID NO: 30482 - RNA, 19 nt, Homo sapiens
  misc_RNA (1)...(19): siRNA sense strand
gaugcuugcuuuauuagug

SEQ ID NO: 30483 - RNA, 19 nt, Homo sapiens
  misc_RNA (1)...(19): siRNA sense strand
cuugaugcuugcuuuauua

SEQ ID NO: 30484 - RNA, 19 nt, Homo sapiens
  misc_RNA (1)...(19): siRNA sense strand
ccaugaggcuaaacugauu

SEQ ID NO: 30485 - RNA, 19 nt, Homo sapiens
  misc_RNA (1)...(19): siRNA sense strand
gguguuauguccugaguca

SEQ ID NO: 30486 - RNA, 19 nt, Homo sapiens
  misc_RNA (1)...(19): siRNA sense strand
gauaaacucccugaaccua

SEQ ID NO: 30487 - RNA, 19 nt, Homo sapiens
  misc_RNA (1)...(19): siRNA sense strand
gcaaauggaauaaauacca

SEQ ID NO: 30488 - RNA, 19 nt, Homo sapiens
  misc_RNA (1)...(19): siRNA sense strand
uaucauggaucugcaaaug

SEQ ID NO: 30489 - RNA, 19 nt, Homo sapiens
  misc_RNA (1)...(19): siRNA sense strand
gguauuguuucuaaagaug

SEQ ID NO: 30490 - RNA, 19 nt, Homo sapiens
  misc_RNA (1)...(19): siRNA sense strand
gaugaagugggaaguuuaa

SEQ ID NO: 30491 - RNA, 19 nt, Homo sapiens
  misc_RNA (1)...(19): siRNA sense strand
gagacgacaauguauguaa

SEQ ID NO: 30492 - RNA, 19 nt, Homo sapiens
  misc_RNA (1)...(19): siRNA sense strand
cgaaauuccuacccugaug

SEQ ID NO: 30493 - RNA, 19 nt, Homo sapiens
  misc_RNA (1)...(19): siRNA sense strand
gaagccaauucgucuuaau

SEQ ID NO: 30494 - RNA, 19 nt, Homo sapiens
  misc_RNA (1)...(19): siRNA sense strand
gcaggaaucccgagacauc

SEQ ID NO: 30495 - RNA, 19 nt, Homo sapiens
  misc_RNA (1)...(19): siRNA sense strand
cagcaaggcgucucuuauu

SEQ ID NO: 30496 - RNA, 19 nt, Homo sapiens
  misc_RNA (1)...(19): siRNA sense strand
ugaagugggaaguuuaaua

SEQ ID NO: 30497 - RNA, 19 nt, Homo sapiens
  misc_RNA (1)...(19): siRNA sense strand
ccagacacuuuaaccuauu

SEQ ID NO: 30498 - RNA, 19 nt, Homo sapiens
  misc_RNA (1)...(19): siRNA sense strand
gaagaggcagaaacagaaa

SEQ ID NO: 30499 - RNA, 19 nt, Homo sapiens
  misc_RNA (1)...(19): siRNA sense strand
guucugagcccaaauauac

SEQ ID NO: 30500 - RNA, 19 nt, Homo sapiens
  misc_RNA (1)...(19): siRNA sense strand
gcagauggaauaaugugaa

SEQ ID NO: 30501 - RNA, 19 nt, Homo sapiens
  misc_RNA (1)...(19): siRNA sense strand
acaacaagcaaucaagaua

SEQ ID NO: 30502 - RNA, 19 nt, Homo sapiens
  misc_RNA (1)...(19): siRNA sense strand
gaggugcaguguaugucua

SEQ ID NO: 30503 - RNA, 19 nt, Homo sapiens
  misc_RNA (1)...(19): siRNA sense strand
ggaucuugaugcuugcuuu

SEQ ID NO: 30504 - RNA, 19 nt, Homo sapiens
  misc_RNA (1)...(19): siRNA sense strand
ggaguaccuugguggauca

SEQ ID NO: 30505 - RNA, 19 nt, Homo sapiens
  misc_RNA (1)...(19): siRNA sense strand
caacguuuccagacacuuu

SEQ ID NO: 30506 - RNA, 19 nt, Homo sapiens
  misc_RNA (1)...(19): siRNA sense strand
ggaucgaguuugauaacga

SEQ ID NO: 30507 - RNA, 19 nt, Homo sapiens
  misc_RNA (1)...(19): siRNA sense strand
gauaaacugcgucccauuc

SEQ ID NO: 30508 - RNA, 19 nt, Homo sapiens
  misc_RNA (1)...(19): siRNA sense strand
acauggaccuugaucgaaa

SEQ ID NO: 30509 - RNA, 19 nt, Homo sapiens
  misc_RNA (1)...(19): siRNA sense strand
ugacaugugcucaccgaua

SEQ ID NO: 30510 - RNA, 19 nt, Homo sapiens
  misc_RNA (1)...(19): siRNA sense strand
cagcacauuucuagaggaa

SEQ ID NO: 30511 - RNA, 19 nt, Homo sapiens
  misc_RNA (1)...(19): siRNA sense strand
acagcaaccuugaacauuc

SEQ ID NO: 30512 - RNA, 19 nt, Homo sapiens
  misc_RNA (1)...(19): siRNA sense strand
gcacagcaaccuugaacau

SEQ ID NO: 30513 - RNA, 19 nt, Homo sapiens
  misc_RNA (1)...(19): siRNA sense strand
auagagaacugagggcuuu

SEQ ID NO: 30514 - RNA, 19 nt, Homo sapiens
  misc_RNA (1)...(19): siRNA sense strand
gggcuauccucaagaguuc

SEQ ID NO: 30515 - RNA, 19 nt, Homo sapiens
  misc_RNA (1)...(19): siRNA sense strand
ucauggaucugcaaaugga

SEQ ID NO: 30516 - RNA, 19 nt, Homo sapiens
  misc_RNA (1)...(19): siRNA sense strand
gugaagccaauucgucuua

SEQ ID NO: 30517 - RNA, 19 nt, Homo sapiens
  misc_RNA (1)...(19): siRNA sense strand
cauauucgauggagaaggu

SEQ ID NO: 30518 - RNA, 19 nt, Homo sapiens
  misc_RNA (1)...(19): siRNA sense strand
gaucuugaugcuugcuuua

SEQ ID NO: 30519 - RNA, 19 nt, Homo sapiens
  misc_RNA (1)...(19): siRNA sense strand
aaugggaaaugguugcuuu

SEQ ID NO: 30520 - RNA, 19 nt, Homo sapiens
  misc_RNA (1)...(19): siRNA sense strand
aagaugaagugggaaguuu

SEQ ID NO: 30521 - RNA, 19 nt, Homo sapiens
  misc_RNA (1)...(19): siRNA sense strand
cagcaaccuuaaacuagaa

SEQ ID NO: 30522 - RNA, 19 nt, Homo sapiens
  misc_RNA (1)...(19): siRNA sense strand
ugagaggccaugagaaauu

SEQ ID NO: 30523 - RNA, 19 nt, Homo sapiens
  misc_RNA (1)...(19): siRNA sense strand
ugacuguguuucccucaaa

SEQ ID NO: 30524 - RNA, 19 nt, Homo sapiens
  misc_RNA (1)...(19): siRNA sense strand
ggcagcauguuaauacgaa

SEQ ID NO: 30525 - RNA, 19 nt, Homo sapiens
  misc_RNA (1)...(19): siRNA sense strand
gaagaugaagugggaaguu

SEQ ID NO: 30526 - RNA, 19 nt, Homo sapiens
  misc_RNA (1)...(19): siRNA sense strand
gaaacaacaagcaaucaag

SEQ ID NO: 30527 - RNA, 19 nt, Homo sapiens
  misc_RNA (1)...(19): siRNA sense strand
ccaagacagcucauauuga

SEQ ID NO: 30528 - RNA, 19 nt, Homo sapiens
  misc_RNA (1)...(19): siRNA sense strand
ggaauaaauaccaaaccaa

SEQ ID NO: 30529 - RNA, 19 nt, Homo sapiens
  misc_RNA (1)...(19): siRNA sense strand
ggcaagauauaguuauugg

SEQ ID NO: 30530 - RNA, 19 nt, Homo sapiens
  misc_RNA (1)...(19): siRNA sense strand
guggcaagauauaguuauu

SEQ ID NO: 30531 - RNA, 19 nt, Homo sapiens
  misc_RNA (1)...(19): siRNA sense strand
guggagagacugagcauga

SEQ ID NO: 30532 - RNA, 19 nt, Homo sapiens
  misc_RNA (1)...(19): siRNA sense strand
cuaaacugauugcaacguu

SEQ ID NO: 30533 - RNA, 19 nt, Homo sapiens
  misc_RNA (1)...(19): siRNA sense strand
gauaaagagaggcuuacuu

SEQ ID NO: 30534 - RNA, 19 nt, Homo sapiens
  misc_RNA (1)...(19): siRNA sense strand
ucacaaggcugagauccau

SEQ ID NO: 30535 - RNA, 19 nt, Homo sapiens
  misc_RNA (1)...(19): siRNA sense strand
ggaaucccgagacaucuuu

SEQ ID NO: 30536 - RNA, 19 nt, Homo sapiens
  misc_RNA (1)...(19): siRNA sense strand
ucacaacucaagaaagaaa

SEQ ID NO: 30537 - RNA, 19 nt, Homo sapiens
  misc_RNA (1)...(19): siRNA sense strand
gacaacaacuccaucaucu

SEQ ID NO: 30538 - RNA, 19 nt, Homo sapiens
  misc_RNA (1)...(19): siRNA sense strand
gcaaggagagggacucaga

SEQ ID NO: 30539 - RNA, 19 nt, Homo sapiens
  misc_RNA (1)...(19): siRNA sense strand
ggacaacaacuccaucauc

SEQ ID NO: 30540 - RNA, 19 nt, Homo sapiens
  misc_RNA (1)...(19): siRNA sense strand
ccacaagccucgcugaaac

SEQ ID NO: 30541 - RNA, 19 nt, Homo sapiens
  misc_RNA (1)...(19): siRNA sense strand
ccaaguuugcugagaguua

SEQ ID NO: 30542 - RNA, 19 nt, Homo sapiens
  misc_RNA (1)...(19): siRNA sense strand
ggugaagaccuacgagaaa

SEQ ID NO: 30543 - RNA, 19 nt, Homo sapiens
  misc_RNA (1)...(19): siRNA sense strand
gaugacggcuuccauuucg

SEQ ID NO: 30544 - RNA, 19 nt, Homo sapiens
  misc_RNA (1)...(19): siRNA sense strand
gcccagaggugacugugau

SEQ ID NO: 30545 - RNA, 19 nt, Homo sapiens
  misc_RNA (1)...(19): siRNA sense strand
ggccacagcugcucaugag

SEQ ID NO: 30546 - RNA, 19 nt, Homo sapiens
  misc_RNA (1)...(19): siRNA sense strand
ugaacacgcacccugauaa

SEQ ID NO: 30547 - RNA, 19 nt, Homo sapiens
  misc_RNA (1)...(19): siRNA sense strand
gaacacgcacccugauaag

SEQ ID NO: 30548 - RNA, 19 nt, Homo sapiens
  misc_RNA (1)...(19): siRNA sense strand
gcaaugugguccaucucau

SEQ ID NO: 30549 - RNA, 19 nt, Homo sapiens
  misc_RNA (1)...(19): siRNA sense strand
ccaucgaccuguacuaucu

SEQ ID NO: 30550 - RNA, 19 nt, Homo sapiens
  misc_RNA (1)...(19): siRNA sense strand
caaguuugcugagaguuag

SEQ ID NO: 30551 - RNA, 19 nt, Homo sapiens
  misc_RNA (1)...(19): siRNA sense strand
ucacgcggcugcugguguu

SEQ ID NO: 30552 - RNA, 19 nt, Homo sapiens
  misc_RNA (1)...(19): siRNA sense strand
caacauccagcccaucuuc

SEQ ID NO: 30553 - RNA, 19 nt, Homo sapiens
  misc_RNA (1)...(19): siRNA sense strand
ggaccgcuaccucaucuau

SEQ ID NO: 30554 - RNA, 19 nt, Homo sapiens
  misc_RNA (1)...(19): siRNA sense strand
caggagcagucguuuguca

SEQ ID NO: 30555 - RNA, 19 nt, Homo sapiens
  misc_RNA (1)...(19): siRNA sense strand
caagaggagcaacgaauuc

SEQ ID NO: 30556 - RNA, 19 nt, Homo sapiens
  misc_RNA (1)...(19): siRNA sense strand
gagcaacgaauucgacuac

SEQ ID NO: 30557 - RNA, 19 nt, Homo sapiens
  misc_RNA (1)...(19): siRNA sense strand
gugacaccaucaacuguga

SEQ ID NO: 30558 - RNA, 19 nt, Homo sapiens
  misc_RNA (1)...(19): siRNA sense strand
gaaacucaccgagaucauc

SEQ ID NO: 30559 - RNA, 19 nt, Homo sapiens
  misc_RNA (1)...(19): siRNA sense strand
ucugaggacuccagcaaug

SEQ ID NO: 30560 - RNA, 19 nt, Homo sapiens
  misc_RNA (1)...(19): siRNA sense strand
gaguacaggcgcuuugaga

SEQ ID NO: 30561 - RNA, 19 nt, Homo sapiens
  misc_RNA (1)...(19): siRNA sense strand
gccugcagcugucgaacaa

SEQ ID NO: 30562 - RNA, 19 nt, Homo sapiens
  misc_RNA (1)...(19): siRNA sense strand
gauaauccccuuuucaaga

SEQ ID NO: 30563 - RNA, 19 nt, Homo sapiens
  misc_RNA (1)...(19): siRNA sense strand
ccaguaggauggugaagac

SEQ ID NO: 30564 - RNA, 19 nt, Homo sapiens
  misc_RNA (1)...(19): siRNA sense strand
gagaaacucaccgagauca

SEQ ID NO: 30565 - RNA, 19 nt, Homo sapiens
  misc_RNA (1)...(19): siRNA sense strand
ccuacuccaugcuugauga

SEQ ID NO: 30566 - RNA, 19 nt, Homo sapiens
  misc_RNA (1)...(19): siRNA sense strand
guacaggcgcuuugagaag

SEQ ID NO: 30567 - RNA, 19 nt, Homo sapiens
  misc_RNA (1)...(19): siRNA sense strand
ggaaggacaacaacuccau

SEQ ID NO: 30568 - RNA, 19 nt, Homo sapiens
  misc_RNA (1)...(19): siRNA sense strand
acgagaaacucaccgagau

SEQ ID NO: 30569 - RNA, 19 nt, Homo sapiens
  misc_RNA (1)...(19): siRNA sense strand
ccucaggaaugucaagaag

SEQ ID NO: 30570 - RNA, 19 nt, Homo sapiens
  misc_RNA (1)...(19): siRNA sense strand
ugauggaccucuccuacuc

SEQ ID NO: 30571 - RNA, 19 nt, Homo sapiens
  misc_RNA (1)...(19): siRNA sense strand
gugaacacgcacccugaua

SEQ ID NO: 30572 - RNA, 19 nt, Homo sapiens
  misc_RNA (1)...(19): siRNA sense strand
ucaggaaugucaagaagcu

SEQ ID NO: 30573 - RNA, 19 nt, Homo sapiens
  misc_RNA (1)...(19): siRNA sense strand
acaagaggagcaacgaauu

SEQ ID NO: 30574 - RNA, 19 nt, Homo sapiens
  misc_RNA (1)...(19): siRNA sense strand
uugaugaccucaggaaugu

SEQ ID NO: 30575 - RNA, 19 nt, Homo sapiens
  misc_RNA (1)...(19): siRNA sense strand
gaagcugccggaaggacaa

SEQ ID NO: 30576 - RNA, 19 nt, Homo sapiens
  misc_RNA (1)...(19): siRNA sense strand
ccagcaaugugguccaucu

SEQ ID NO: 30577 - RNA, 19 nt, Homo sapiens
  misc_RNA (1)...(19): siRNA sense strand
ugcugaagcugaccaacaa

SEQ ID NO: 30578 - RNA, 19 nt, Homo sapiens
  misc_RNA (1)...(19): siRNA sense strand
guacaagaggagcaacgaa

SEQ ID NO: 30579 - RNA, 19 nt, Homo sapiens
  misc_RNA (1)...(19): siRNA sense strand
gggcuucacggacauagug

SEQ ID NO: 30580 - RNA, 19 nt, Homo sapiens
  misc_RNA (1)...(19): siRNA sense strand
gugaagaccuacgagaaac

SEQ ID NO: 30581 - RNA, 19 nt, Homo sapiens
  misc_RNA (1)...(19): siRNA sense strand
ccaccacgacggucaugaa

SEQ ID NO: 30582 - RNA, 19 nt, Homo sapiens
  misc_RNA (1)...(19): siRNA sense strand
ggagcaacgaauucgacua

SEQ ID NO: 30583 - RNA, 19 nt, Homo sapiens
  misc_RNA (1)...(19): siRNA sense strand
gcgcacaagcuggcugaaa

SEQ ID NO: 30584 - RNA, 19 nt, Homo sapiens
  misc_RNA (1)...(19): siRNA sense strand
cgaccuguacuaucugaug

SEQ ID NO: 30585 - RNA, 19 nt, Homo sapiens
  misc_RNA (1)...(19): siRNA sense strand
agaaggagaagcucaaguc

SEQ ID NO: 30586 - RNA, 19 nt, Homo sapiens
  misc_RNA (1)...(19): siRNA sense strand
ggagcagucguuugucauc

SEQ ID NO: 30587 - RNA, 19 nt, Homo sapiens
  misc_RNA (1)...(19): siRNA sense strand
ugguccaucucauuaagaa

SEQ ID NO: 30588 - RNA, 19 nt, Homo sapiens
  misc_RNA (1)...(19): siRNA sense strand
ucucaggagugcacgaagu

SEQ ID NO: 30589 - RNA, 19 nt, Homo sapiens
  misc_RNA (1)...(19): siRNA sense strand
cccaguggaacaaugauaa

SEQ ID NO: 30590 - RNA, 19 nt, Homo sapiens
  misc_RNA (1)...(19): siRNA sense strand
ucaccuggaggacaacuug

SEQ ID NO: 30591 - RNA, 19 nt, Homo sapiens
  misc_RNA (1)...(19): siRNA sense strand
ggucaugaaccccaaguuu

SEQ ID NO: 30592 - RNA, 19 nt, Homo sapiens
  misc_RNA (1)...(19): siRNA sense strand
ggaugagagccgagagugu

SEQ ID NO: 30593 - RNA, 19 nt, Homo sapiens
  misc_RNA (1)...(19): siRNA sense strand
cugaugacggcuuccauuu

SEQ ID NO: 30594 - RNA, 19 nt, Homo sapiens
  misc_RNA (1)...(19): siRNA sense strand
gggaguacaggcgcuuuga

SEQ ID NO: 30595 - RNA, 19 nt, Homo sapiens
  misc_RNA (1)...(19): siRNA sense strand
gugcugaagcugaccaaca

SEQ ID NO: 30596 - RNA, 19 nt, Homo sapiens
  misc_RNA (1)...(19): siRNA sense strand
ucaaugucccgaucaccuu

SEQ ID NO: 30597 - RNA, 19 nt, Homo sapiens
  misc_RNA (1)...(19): siRNA sense strand
gaagaccuacgagaaacuc

SEQ ID NO: 30598 - RNA, 19 nt, Homo sapiens
  misc_RNA (1)...(19): siRNA sense strand
cgcacaagcuggcugaaaa

SEQ ID NO: 30599 - RNA, 19 nt, Homo sapiens
  misc_RNA (1)...(19): siRNA sense strand
ucgggaagcagcugauuuc

SEQ ID NO: 30600 - RNA, 19 nt, Homo sapiens
  misc_RNA (1)...(19): siRNA sense strand
gagaaggagaagcucaagu

SEQ ID NO: 30601 - RNA, 19 nt, Homo sapiens
  misc_RNA (1)...(19): siRNA sense strand
accgcuaccucaucuaugu

SEQ ID NO: 30602 - RNA, 19 nt, Homo sapiens
  misc_RNA (1)...(19): siRNA sense strand
uacaagaggagcaacgaau

SEQ ID NO: 30603 - RNA, 19 nt, Homo sapiens
  misc_RNA (1)...(19): siRNA sense strand
ucgcugaaacccaggaaga

SEQ ID NO: 30604 - RNA, 19 nt, Homo sapiens
  misc_RNA (1)...(19): siRNA sense strand
ccaguggaacaaugauaau

SEQ ID NO: 30605 - RNA, 19 nt, Homo sapiens
  misc_RNA (1)...(19): siRNA sense strand
ugaugacggcuuccauuuc

SEQ ID NO: 30606 - RNA, 19 nt, Homo sapiens
  misc_RNA (1)...(19): siRNA sense strand
gagaaguccuuuaccauaa

SEQ ID NO: 30607 - RNA, 19 nt, Homo sapiens
  misc_RNA (1)...(19): siRNA sense strand
gaaaguccauccuguaugu

SEQ ID NO: 30608 - RNA, 19 nt, Homo sapiens
  misc_RNA (1)...(19): siRNA sense strand
gaaaauccguucuaaagua

SEQ ID NO: 30609 - RNA, 19 nt, Homo sapiens
  misc_RNA (1)...(19): siRNA sense strand
ccagaugccugcaccuuua

SEQ ID NO: 30610 - RNA, 19 nt, Homo sapiens
  misc_RNA (1)...(19): siRNA sense strand
gcagugaauuguaccuaua

SEQ ID NO: 30611 - RNA, 19 nt, Homo sapiens
  misc_RNA (1)...(19): siRNA sense strand
gaaaaccccugcuaugaua

SEQ ID NO: 30612 - RNA, 19 nt, Homo sapiens
  misc_RNA (1)...(19): siRNA sense strand
ggagaaguccuuuaccaua

SEQ ID NO: 30613 - RNA, 19 nt, Homo sapiens
  misc_RNA (1)...(19): siRNA sense strand
gaaagaauguguggagugu

SEQ ID NO: 30614 - RNA, 19 nt, Homo sapiens
  misc_RNA (1)...(19): siRNA sense strand
ccaccugccucaacaauga

SEQ ID NO: 30615 - RNA, 19 nt, Homo sapiens
  misc_RNA (1)...(19): siRNA sense strand
gcaaggaugcagugaauug

SEQ ID NO: 30616 - RNA, 19 nt, Homo sapiens
  misc_RNA (1)...(19): siRNA sense strand
gcugugaccugaaggagaa

SEQ ID NO: 30617 - RNA, 19 nt, Homo sapiens
  misc_RNA (1)...(19): siRNA sense strand
gagaaucugcugaaggaua

SEQ ID NO: 30618 - RNA, 19 nt, Homo sapiens
  misc_RNA (1)...(19): siRNA sense strand
agaaucugcugaaggauaa

SEQ ID NO: 30619 - RNA, 19 nt, Homo sapiens
  misc_RNA (1)...(19): siRNA sense strand
ccaacaacccacuguauaa

SEQ ID NO: 30620 - RNA, 19 nt, Homo sapiens
  misc_RNA (1)...(19): siRNA sense strand
aagaauguguggaguguaa

SEQ ID NO: 30621 - RNA, 19 nt, Homo sapiens
  misc_RNA (1)...(19): siRNA sense strand
gaagaacgcgccagagcaa

SEQ ID NO: 30622 - RNA, 19 nt, Homo sapiens
  misc_RNA (1)...(19): siRNA sense strand
gcugaugacugagaagcua

SEQ ID NO: 30623 - RNA, 19 nt, Homo sapiens
  misc_RNA (1)...(19): siRNA sense strand
ugaccucccugaagaguug

SEQ ID NO: 30624 - RNA, 19 nt, Homo sapiens
  misc_RNA (1)...(19): siRNA sense strand
aagauuggcuggaggaaug

SEQ ID NO: 30625 - RNA, 19 nt, Homo sapiens
  misc_RNA (1)...(19): siRNA sense strand
caacaacccacuguauaaa

SEQ ID NO: 30626 - RNA, 19 nt, Homo sapiens
  misc_RNA (1)...(19): siRNA sense strand
gccaacaacccacuguaua

SEQ ID NO: 30627 - RNA, 19 nt, Homo sapiens
  misc_RNA (1)...(19): siRNA sense strand
ggucaucccuggccucaag

SEQ ID NO: 30628 - RNA, 19 nt, Homo sapiens
  misc_RNA (1)...(19): siRNA sense strand
gacaagggcucuggagaca

SEQ ID NO: 30629 - RNA, 19 nt, Homo sapiens
  misc_RNA (1)...(19): siRNA sense strand
ggaaacuccucaucaccau

SEQ ID NO: 30630 - RNA, 19 nt, Homo sapiens
  misc_RNA (1)...(19): siRNA sense strand
acggugagcuucagcauug

SEQ ID NO: 30631 - RNA, 19 nt, Homo sapiens
  misc_RNA (1)...(19): siRNA sense strand
gcucauuguugaugcuuau

SEQ ID NO: 30632 - RNA, 19 nt, Homo sapiens
  misc_RNA (1)...(19): siRNA sense strand
gcaaguacugcgaguguga

SEQ ID NO: 30633 - RNA, 19 nt, Homo sapiens
  misc_RNA (1)...(19): siRNA sense strand
uaaggacacuggcaaggau

SEQ ID NO: 30634 - RNA, 19 nt, Homo sapiens
  misc_RNA (1)...(19): siRNA sense strand
gagaagcuaucccagaaaa

SEQ ID NO: 30635 - RNA, 19 nt, Homo sapiens
  misc_RNA (1)...(19): siRNA sense strand
ggcccaagcugaaccuaau

SEQ ID NO: 30636 - RNA, 19 nt, Homo sapiens
  misc_RNA (1)...(19): siRNA sense strand
gaacuauagugagcucauc

SEQ ID NO: 30637 - RNA, 19 nt, Homo sapiens
  misc_RNA (1)...(19): siRNA sense strand
gagugaggcccgaguacua

SEQ ID NO: 30638 - RNA, 19 nt, Homo sapiens
  misc_RNA (1)...(19): siRNA sense strand
cugagaagcuaucccagaa

SEQ ID NO: 30639 - RNA, 19 nt, Homo sapiens
  misc_RNA (1)...(19): siRNA sense strand
gaaugaugcaucccacuug

SEQ ID NO: 30640 - RNA, 19 nt, Homo sapiens
  misc_RNA (1)...(19): siRNA sense strand
guggacaucuacuacuuga

SEQ ID NO: 30641 - RNA, 19 nt, Homo sapiens
  misc_RNA (1)...(19): siRNA sense strand
acaacccacuguauaaaga

SEQ ID NO: 30642 - RNA, 19 nt, Homo sapiens
  misc_RNA (1)...(19): siRNA sense strand
gaaggagaaucugcugaag

SEQ ID NO: 30643 - RNA, 19 nt, Homo sapiens
  misc_RNA (1)...(19): siRNA sense strand
aggagaaucugcugaagga

SEQ ID NO: 30644 - RNA, 19 nt, Homo sapiens
  misc_RNA (1)...(19): siRNA sense strand
ccaggucacucaagucagu

SEQ ID NO: 30645 - RNA, 19 nt, Homo sapiens
  misc_RNA (1)...(19): siRNA sense strand
gcagugacuuuggcaagau

SEQ ID NO: 30646 - RNA, 19 nt, Homo sapiens
  misc_RNA (1)...(19): siRNA sense strand
gaauuucuccauccaagug

SEQ ID NO: 30647 - RNA, 19 nt, Homo sapiens
  misc_RNA (1)...(19): siRNA sense strand
ggaaugaugcaucccacuu

SEQ ID NO: 30648 - RNA, 19 nt, Homo sapiens
  misc_RNA (1)...(19): siRNA sense strand
caagacucauauagcauug

SEQ ID NO: 30649 - RNA, 19 nt, Homo sapiens
  misc_RNA (1)...(19): siRNA sense strand
ccaagacucauauagcauu

SEQ ID NO: 30650 - RNA, 19 nt, Homo sapiens
  misc_RNA (1)...(19): siRNA sense strand
acaagccugugucaccaua

SEQ ID NO: 30651 - RNA, 19 nt, Homo sapiens
  misc_RNA (1)...(19): siRNA sense strand
uggcaaggaugcagugaau

SEQ ID NO: 30652 - RNA, 19 nt, Homo sapiens
  misc_RNA (1)...(19): siRNA sense strand
uuacugccgugacgagauu

SEQ ID NO: 30653 - RNA, 19 nt, Homo sapiens
  misc_RNA (1)...(19): siRNA sense strand
gacgggcagugucauguug

SEQ ID NO: 30654 - RNA, 19 nt, Homo sapiens
  misc_RNA (1)...(19): siRNA sense strand
ucaaugaggaagugaagaa

SEQ ID NO: 30655 - RNA, 19 nt, Homo sapiens
  misc_RNA (1)...(19): siRNA sense strand
ggaaaguccauccuguaug

SEQ ID NO: 30656 - RNA, 19 nt, Homo sapiens
  misc_RNA (1)...(19): siRNA sense strand
ccuauaagaaugaggauga

SEQ ID NO: 30657 - RNA, 19 nt, Homo sapiens
  misc_RNA (1)...(19): siRNA sense strand
guaugggacucaagauugg

SEQ ID NO: 30658 - RNA, 19 nt, Homo sapiens
  misc_RNA (1)...(19): siRNA sense strand
gcaauguccuccagcucau

SEQ ID NO: 30659 - RNA, 19 nt, Homo sapiens
  misc_RNA (1)...(19): siRNA sense strand
ccacugaugccaagacuca

SEQ ID NO: 30660 - RNA, 19 nt, Homo sapiens
  misc_RNA (1)...(19): siRNA sense strand
uagucaaucucuaucagaa

SEQ ID NO: 30661 - RNA, 19 nt, Homo sapiens
  misc_RNA (1)...(19): siRNA sense strand
gaagaagcagaguguguca

SEQ ID NO: 30662 - RNA, 19 nt, Homo sapiens
  misc_RNA (1)...(19): siRNA sense strand
cgucuaccuucaccaauau

SEQ ID NO: 30663 - RNA, 19 nt, Homo sapiens
  misc_RNA (1)...(19): siRNA sense strand
ccaguacuaugaagauucu

SEQ ID NO: 30664 - RNA, 19 nt, Homo sapiens
  misc_RNA (1)...(19): siRNA sense strand
ggccagaugauucgaagaa

SEQ ID NO: 30665 - RNA, 19 nt, Homo sapiens
  misc_RNA (1)...(19): siRNA sense strand
uaugaagauucuaguggaa

SEQ ID NO: 30666 - RNA, 19 nt, Homo sapiens
  misc_RNA (1)...(19): siRNA sense strand
ucagauuccaguacuauga

SEQ ID NO: 30667 - RNA, 19 nt, Homo sapiens
  misc_RNA (1)...(19): siRNA sense strand
gagauugagucagugaaag

SEQ ID NO: 30668 - RNA, 19 nt, Homo sapiens
  misc_RNA (1)...(19): siRNA sense strand
gcaagaucacgggcaagua

SEQ ID NO: 30669 - RNA, 19 nt, Homo sapiens
  misc_RNA (1)...(19): siRNA sense strand
agccaucgcugcaacaaug

SEQ ID NO: 30670 - RNA, 19 nt, Homo sapiens
  misc_RNA (1)...(19): siRNA sense strand
ggauuacccuguggacauc

SEQ ID NO: 30671 - RNA, 19 nt, Homo sapiens
  misc_RNA (1)...(19): siRNA sense strand
ugcggcagguggaggauua

SEQ ID NO: 30672 - RNA, 19 nt, Homo sapiens
  misc_RNA (1)...(19): siRNA sense strand
ccaguaaccugcggauugg

SEQ ID NO: 30673 - RNA, 19 nt, Homo sapiens
  misc_RNA (1)...(19): siRNA sense strand
ucgcuaaauuugaggaaga

SEQ ID NO: 30674 - RNA, 19 nt, Homo sapiens
  misc_RNA (1)...(19): siRNA sense strand
gguagaagagccagagugu

SEQ ID NO: 30675 - RNA, 19 nt, Homo sapiens
  misc_RNA (1)...(19): siRNA sense strand
caauggcaaugggaccuuu

SEQ ID NO: 30676 - RNA, 19 nt, Homo sapiens
  misc_RNA (1)...(19): siRNA sense strand
aauuugaucuuugcaguga

SEQ ID NO: 30677 - RNA, 19 nt, Homo sapiens
  misc_RNA (1)...(19): siRNA sense strand
ugauggaccugucuuacuc

SEQ ID NO: 30678 - RNA, 19 nt, Homo sapiens
  misc_RNA (1)...(19): siRNA sense strand
acgucuaccuucaccaaua

SEQ ID NO: 30679 - RNA, 19 nt, Homo sapiens
  misc_RNA (1)...(19): siRNA sense strand
gaauguggcagcugugucu

SEQ ID NO: 30680 - RNA, 19 nt, Homo sapiens
  misc_RNA (1)...(19): siRNA sense strand
uaaaguagagcuggaagug

SEQ ID NO: 30681 - RNA, 19 nt, Homo sapiens
  misc_RNA (1)...(19): siRNA sense strand
aaacacgugcugacgcuaa

SEQ ID NO: 30682 - RNA, 19 nt, Homo sapiens
  misc_RNA (1)...(19): siRNA sense strand
ugaaggagaaucugcugaa

SEQ ID NO: 30683 - RNA, 19 nt, Homo sapiens
  misc_RNA (1)...(19): siRNA sense strand
gcucccaggucacucaagu

SEQ ID NO: 30684 - RNA, 19 nt, Homo sapiens
  misc_RNA (1)...(19): siRNA sense strand
cgagauugagucagugaaa

SEQ ID NO: 30685 - RNA, 19 nt, Homo sapiens
  misc_RNA (1)...(19): siRNA sense strand
ugccaagacucauauagca

SEQ ID NO: 30686 - RNA, 19 nt, Homo sapiens
  misc_RNA (1)...(19): siRNA sense strand
caagaucacgggcaaguac

SEQ ID NO: 30687 - RNA, 19 nt, Homo sapiens
  misc_RNA (1)...(19): siRNA sense strand
caaugggaccuuugagugu

SEQ ID NO: 30688 - RNA, 19 nt, Homo sapiens
  misc_RNA (1)...(19): siRNA sense strand
ggagggcccaacaucugua

SEQ ID NO: 30689 - RNA, 19 nt, Homo sapiens
  misc_RNA (1)...(19): siRNA sense strand
ugaagauucuaguggaaag

SEQ ID NO: 30690 - RNA, 19 nt, Homo sapiens
  misc_RNA (1)...(19): siRNA sense strand
agaaugaggaugacugugu

SEQ ID NO: 30691 - RNA, 19 nt, Homo sapiens
  misc_RNA (1)...(19): siRNA sense strand
gaauguguggaguguaaga

SEQ ID NO: 30692 - RNA, 19 nt, Homo sapiens
  misc_RNA (1)...(19): siRNA sense strand
gcucagaggaggacuaucg

SEQ ID NO: 30693 - RNA, 19 nt, Homo sapiens
  misc_RNA (1)...(19): siRNA sense strand
caaucucuaucagaacuau

SEQ ID NO: 30694 - RNA, 19 nt, Homo sapiens
  misc_RNA (1)...(19): siRNA sense strand
gcagugucauguugguagu

SEQ ID NO: 30695 - RNA, 19 nt, Homo sapiens
  misc_RNA (1)...(19): siRNA sense strand
caggugacccgcuucaaug

SEQ ID NO: 30696 - RNA, 19 nt, Homo sapiens
  misc_RNA (1)...(19): siRNA sense strand
agacucauauagcauugga

SEQ ID NO: 30697 - RNA, 19 nt, Homo sapiens
  misc_RNA (1)...(19): siRNA sense strand
gggcaaguacugcgagugu

SEQ ID NO: 30698 - RNA, 19 nt, Homo sapiens
  misc_RNA (1)...(19): siRNA sense strand
caccuuugauugugacugu

SEQ ID NO: 30699 - RNA, 19 nt, Homo sapiens
  misc_RNA (1)...(19): siRNA sense strand
gggaaaauccguucuaaag

SEQ ID NO: 30700 - RNA, 19 nt, Homo sapiens
  misc_RNA (1)...(19): siRNA sense strand
cauccuguaugugguagaa

SEQ ID NO: 30701 - RNA, 19 nt, Homo sapiens
  misc_RNA (1)...(19): siRNA sense strand
gugccucuguggucaaugu

SEQ ID NO: 30702 - RNA, 19 nt, Homo sapiens
  misc_RNA (1)...(19): siRNA sense strand
guagucaaucucuaucaga

SEQ ID NO: 30703 - RNA, 19 nt, Homo sapiens
  misc_RNA (1)...(19): siRNA sense strand
cagugaauuguaccuauaa

SEQ ID NO: 30704 - RNA, 19 nt, Homo sapiens
  misc_RNA (1)...(19): siRNA sense strand
gaccgggagcccuacauga

SEQ ID NO: 30705 - RNA, 19 nt, Homo sapiens
  misc_RNA (1)...(19): siRNA sense strand
uguaugggacucaagauug

SEQ ID NO: 30706 - RNA, 19 nt, Homo sapiens
  misc_RNA (1)...(19): siRNA sense strand
ggaaaucacugacaaaaua

SEQ ID NO: 30707 - RNA, 19 nt, Homo sapiens
  misc_RNA (1)...(19): siRNA sense strand
gaacaucacauuuaccuuu

SEQ ID NO: 30708 - RNA, 19 nt, Homo sapiens
  misc_RNA (1)...(19): siRNA sense strand
cgacaaggcugcaguccua

SEQ ID NO: 30709 - RNA, 19 nt, Homo sapiens
  misc_RNA (1)...(19): siRNA sense strand
gaacagaacagauuuccuu

SEQ ID NO: 30710 - RNA, 19 nt, Homo sapiens
  misc_RNA (1)...(19): siRNA sense strand
ugacaaagaucucaauuac

SEQ ID NO: 30711 - RNA, 19 nt, Homo sapiens
  misc_RNA (1)...(19): siRNA sense strand
gggauuugguuaaugguua

SEQ ID NO: 30712 - RNA, 19 nt, Homo sapiens
  misc_RNA (1)...(19): siRNA sense strand
acaaagaucucaauuacug

SEQ ID NO: 30713 - RNA, 19 nt, Homo sapiens
  misc_RNA (1)...(19): siRNA sense strand
ccaguuagaugcaaaugaa

SEQ ID NO: 30714 - RNA, 19 nt, Homo sapiens
  misc_RNA (1)...(19): siRNA sense strand
caaaugggaugaugacugu

SEQ ID NO: 30715 - RNA, 19 nt, Homo sapiens
  misc_RNA (1)...(19): siRNA sense strand
ggacccaacugugaaauug

SEQ ID NO: 30716 - RNA, 19 nt, Homo sapiens
  misc_RNA (1)...(19): siRNA sense strand
caacaaaacuugcauggaa

SEQ ID NO: 30717 - RNA, 19 nt, Homo sapiens
  misc_RNA (1)...(19): siRNA sense strand
ggaacauacugccaugaaa

SEQ ID NO: 30718 - RNA, 19 nt, Homo sapiens
  misc_RNA (1)...(19): siRNA sense strand
gaacugcucacaccugaaa

SEQ ID NO: 30719 - RNA, 19 nt, Homo sapiens
  misc_RNA (1)...(19): siRNA sense strand
ggaaagugcccagagcuua

SEQ ID NO: 30720 - RNA, 19 nt, Homo sapiens
  misc_RNA (1)...(19): siRNA sense strand
uaacauagcccgaaacagu

SEQ ID NO: 30721 - RNA, 19 nt, Homo sapiens
  misc_RNA (1)...(19): siRNA sense strand
gaauguaacagagcuauuu

SEQ ID NO: 30722 - RNA, 19 nt, Homo sapiens
  misc_RNA (1)...(19): siRNA sense strand
gaaagugcccagagcuuaa

SEQ ID NO: 30723 - RNA, 19 nt, Homo sapiens
  misc_RNA (1)...(19): siRNA sense strand
gaugacuguucuccuaaua

SEQ ID NO: 30724 - RNA, 19 nt, Homo sapiens
  misc_RNA (1)...(19): siRNA sense strand
ggcaaggccuguacuguga

SEQ ID NO: 30725 - RNA, 19 nt, Homo sapiens
  misc_RNA (1)...(19): siRNA sense strand
gacacacaauucugaagua

SEQ ID NO: 30726 - RNA, 19 nt, Homo sapiens
  misc_RNA (1)...(19): siRNA sense strand
gaagaauguuuccgcugaa

SEQ ID NO: 30727 - RNA, 19 nt, Homo sapiens
  misc_RNA (1)...(19): siRNA sense strand
ucaaugacuucuacuguga

SEQ ID NO: 30728 - RNA, 19 nt, Homo sapiens
  misc_RNA (1)...(19): siRNA sense strand
ggaccugguuaacggauuu

SEQ ID NO: 30729 - RNA, 19 nt, Homo sapiens
  misc_RNA (1)...(19): siRNA sense strand
gagcaacccuuguagaaac

SEQ ID NO: 30730 - RNA, 19 nt, Homo sapiens
  misc_RNA (1)...(19): siRNA sense strand
ggacaaacaccagcagaaa

SEQ ID NO: 30731 - RNA, 19 nt, Homo sapiens
  misc_RNA (1)...(19): siRNA sense strand
gcaccucugacuccuauua

SEQ ID NO: 30732 - RNA, 19 nt, Homo sapiens
  misc_RNA (1)...(19): siRNA sense strand
ggccaaaccuuguguaaac

SEQ ID NO: 30733 - RNA, 19 nt, Homo sapiens
  misc_RNA (1)...(19): siRNA sense strand
gagagcaacccuuguagaa

SEQ ID NO: 30734 - RNA, 19 nt, Homo sapiens
  misc_RNA (1)...(19): siRNA sense strand
gagcacauuugcagugaau

SEQ ID NO: 30735 - RNA, 19 nt, Homo sapiens
  misc_RNA (1)...(19): siRNA sense strand
gaauggaguacaucguaua

SEQ ID NO: 30736 - RNA, 19 nt, Homo sapiens
  misc_RNA (1)...(19): siRNA sense strand
ucaaggaaaucacugacaa

SEQ ID NO: 30737 - RNA, 19 nt, Homo sapiens
  misc_RNA (1)...(19): siRNA sense strand
gaagauauacgggaugaug

SEQ ID NO: 30738 - RNA, 19 nt, Homo sapiens
  misc_RNA (1)...(19): siRNA sense strand
ugaaauacauguggccauu

SEQ ID NO: 30739 - RNA, 19 nt, Homo sapiens
  misc_RNA (1)...(19): siRNA sense strand
ggcagacgcugaagcagaa

SEQ ID NO: 30740 - RNA, 19 nt, Homo sapiens
  misc_RNA (1)...(19): siRNA sense strand
gggagcagcugaaccagau

SEQ ID NO: 30741 - RNA, 19 nt, Homo sapiens
  misc_RNA (1)...(19): siRNA sense strand
caaccugacaguauuauug

SEQ ID NO: 30742 - RNA, 19 nt, Homo sapiens
  misc_RNA (1)...(19): siRNA sense strand
ggaacccgaucaaggaaau

SEQ ID NO: 30743 - RNA, 19 nt, Homo sapiens
  misc_RNA (1)...(19): siRNA sense strand
gaauguuuccgcugaauau

SEQ ID NO: 30744 - RNA, 19 nt, Homo sapiens
  misc_RNA (1)...(19): siRNA sense strand
agagagacaucgaugaaug

SEQ ID NO: 30745 - RNA, 19 nt, Homo sapiens
  misc_RNA (1)...(19): siRNA sense strand
gcagaauaaacaucaauga

SEQ ID NO: 30746 - RNA, 19 nt, Homo sapiens
  misc_RNA (1)...(19): siRNA sense strand
gcacauuugcagugaauug

SEQ ID NO: 30747 - RNA, 19 nt, Homo sapiens
  misc_RNA (1)...(19): siRNA sense strand
caaggccuguacugugaua

SEQ ID NO: 30748 - RNA, 19 nt, Homo sapiens
  misc_RNA (1)...(19): siRNA sense strand
gugacaaagaucucaauua

SEQ ID NO: 30749 - RNA, 19 nt, Homo sapiens
  misc_RNA (1)...(19): siRNA sense strand
gaugaugacuguaauaccu

SEQ ID NO: 30750 - RNA, 19 nt, Homo sapiens
  misc_RNA (1)...(19): siRNA sense strand
ggacaacagagacuuggaa

SEQ ID NO: 30751 - RNA, 19 nt, Homo sapiens
  misc_RNA (1)...(19): siRNA sense strand
cauuucugcugaagauaua

SEQ ID NO: 30752 - RNA, 19 nt, Homo sapiens
  misc_RNA (1)...(19): siRNA sense strand
gcugagcucugucuuaacu

SEQ ID NO: 30753 - RNA, 19 nt, Homo sapiens
  misc_RNA (1)...(19): siRNA sense strand
guuaaugguuaucgcugua

SEQ ID NO: 30754 - RNA, 19 nt, Homo sapiens
  misc_RNA (1)...(19): siRNA sense strand
gaacaagaacuccaaaaug

SEQ ID NO: 30755 - RNA, 19 nt, Homo sapiens
  misc_RNA (1)...(19): siRNA sense strand
gaccuugccugcuccacaa

SEQ ID NO: 30756 - RNA, 19 nt, Homo sapiens
  misc_RNA (1)...(19): siRNA sense strand
ugacuucuuuggacacuau

SEQ ID NO: 30757 - RNA, 19 nt, Homo sapiens
  misc_RNA (1)...(19): siRNA sense strand
aaacaaacaggacaacaga

SEQ ID NO: 30758 - RNA, 19 nt, Homo sapiens
  misc_RNA (1)...(19): siRNA sense strand
cacaugcucuacaaacauu

SEQ ID NO: 30759 - RNA, 19 nt, Homo sapiens
  misc_RNA (1)...(19): siRNA sense strand
ugaccagaauggcaacaaa

SEQ ID NO: 30760 - RNA, 19 nt, Homo sapiens
  misc_RNA (1)...(19): siRNA sense strand
ggauuugguuaaugguuau

SEQ ID NO: 30761 - RNA, 19 nt, Homo sapiens
  misc_RNA (1)...(19): siRNA sense strand
ggacaaacaaacaggacaa

SEQ ID NO: 30762 - RNA, 19 nt, Homo sapiens
  misc_RNA (1)...(19): siRNA sense strand
gaacaaugaaauacaugug

SEQ ID NO: 30763 - RNA, 19 nt, Homo sapiens
  misc_RNA (1)...(19): siRNA sense strand
gcaugggucuugcaaacuc

SEQ ID NO: 30764 - RNA, 19 nt, Homo sapiens
  misc_RNA (1)...(19): siRNA sense strand
gccaaauccuguaagaauc

SEQ ID NO: 30765 - RNA, 19 nt, Homo sapiens
  misc_RNA (1)...(19): siRNA sense strand
cgaauggaguacaucguau

SEQ ID NO: 30766 - RNA, 19 nt, Homo sapiens
  misc_RNA (1)...(19): siRNA sense strand
uaaggacacacaauucuga

SEQ ID NO: 30767 - RNA, 19 nt, Homo sapiens
  misc_RNA (1)...(19): siRNA sense strand
uugcugagcucugucuuaa

SEQ ID NO: 30768 - RNA, 19 nt, Homo sapiens
  misc_RNA (1)...(19): siRNA sense strand
gaagaacagaacagauuuc

SEQ ID NO: 30769 - RNA, 19 nt, Homo sapiens
  misc_RNA (1)...(19): siRNA sense strand
ggccauuucugcugaagau

SEQ ID NO: 30770 - RNA, 19 nt, Homo sapiens
  misc_RNA (1)...(19): siRNA sense strand
ggugucaacuccuacaagu

SEQ ID NO: 30771 - RNA, 19 nt, Homo sapiens
  misc_RNA (1)...(19): siRNA sense strand
gugcaccucugacuccuau

SEQ ID NO: 30772 - RNA, 19 nt, Homo sapiens
  misc_RNA (1)...(19): siRNA sense strand
cacccaaacuggacaaaca

SEQ ID NO: 30773 - RNA, 19 nt, Homo sapiens
  misc_RNA (1)...(19): siRNA sense strand
caggauaacugugcgaaca

SEQ ID NO: 30774 - RNA, 19 nt, Homo sapiens
  misc_RNA (1)...(19): siRNA sense strand
ggaugggucagaauuguga

SEQ ID NO: 30775 - RNA, 19 nt, Homo sapiens
  misc_RNA (1)...(19): siRNA sense strand
ggacacacaauucugaagu

SEQ ID NO: 30776 - RNA, 19 nt, Homo sapiens
  misc_RNA (1)...(19): siRNA sense strand
ugaagaacagaacagauuu

SEQ ID NO: 30777 - RNA, 19 nt, Homo sapiens
  misc_RNA (1)...(19): siRNA sense strand
gugcgaacaucacauuuac

SEQ ID NO: 30778 - RNA, 19 nt, Homo sapiens
  misc_RNA (1)...(19): siRNA sense strand
gaaugccagucuucaccuu

SEQ ID NO: 30779 - RNA, 19 nt, Homo sapiens
  misc_RNA (1)...(19): siRNA sense strand
gcagcccucaucccuguua

SEQ ID NO: 30780 - RNA, 19 nt, Homo sapiens
  misc_RNA (1)...(19): siRNA sense strand
gaacauacugccaugaaaa

SEQ ID NO: 30781 - RNA, 19 nt, Homo sapiens
  misc_RNA (1)...(19): siRNA sense strand
ugacuacuacuauggcuuu

SEQ ID NO: 30782 - RNA, 19 nt, Homo sapiens
  misc_RNA (1)...(19): siRNA sense strand
ggacggaucgccugcucaa

SEQ ID NO: 30783 - RNA, 19 nt, Homo sapiens
  misc_RNA (1)...(19): siRNA sense strand
ugagagagacaucgaugaa

SEQ ID NO: 30784 - RNA, 19 nt, Homo sapiens
  misc_RNA (1)...(19): siRNA sense strand
agacaaagugcaccucuga

SEQ ID NO: 30785 - RNA, 19 nt, Homo sapiens
  misc_RNA (1)...(19): siRNA sense strand
gggaacauacugccaugaa

SEQ ID NO: 30786 - RNA, 19 nt, Homo sapiens
  misc_RNA (1)...(19): siRNA sense strand
gaaggggugcgguauauuu

SEQ ID NO: 30787 - RNA, 19 nt, Homo sapiens
  misc_RNA (1)...(19): siRNA sense strand
gcuuaaaccgaauggagua

SEQ ID NO: 30788 - RNA, 19 nt, Homo sapiens
  misc_RNA (1)...(19): siRNA sense strand
ggacaacaccaccaacaac

SEQ ID NO: 30789 - RNA, 19 nt, Homo sapiens
  misc_RNA (1)...(19): siRNA sense strand
caaggaaaucacugacaaa

SEQ ID NO: 30790 - RNA, 19 nt, Homo sapiens
  misc_RNA (1)...(19): siRNA sense strand
acaagugcaucuguaguga

SEQ ID NO: 30791 - RNA, 19 nt, Homo sapiens
  misc_RNA (1)...(19): siRNA sense strand
guucaaccugacaguauua

SEQ ID NO: 30792 - RNA, 19 nt, Homo sapiens
  misc_RNA (1)...(19): siRNA sense strand
cugaagaacagaacagauu

SEQ ID NO: 30793 - RNA, 19 nt, Homo sapiens
  misc_RNA (1)...(19): siRNA sense strand
gcugauugcugccguugca

SEQ ID NO: 30794 - RNA, 19 nt, Homo sapiens
  misc_RNA (1)...(19): siRNA sense strand
ggauaacugugcgaacauc

SEQ ID NO: 30795 - RNA, 19 nt, Homo sapiens
  misc_RNA (1)...(19): siRNA sense strand
gugcucagaauaccaauga

SEQ ID NO: 30796 - RNA, 19 nt, Homo sapiens
  misc_RNA (1)...(19): siRNA sense strand
gcucuacaaacauugauga

SEQ ID NO: 30797 - RNA, 19 nt, Homo sapiens
  misc_RNA (1)...(19): siRNA sense strand
ccgaauggaguacaucgua

SEQ ID NO: 30798 - RNA, 19 nt, Homo sapiens
  misc_RNA (1)...(19): siRNA sense strand
gcuacaaccgugccaguga

SEQ ID NO: 30799 - RNA, 19 nt, Homo sapiens
  misc_RNA (1)...(19): siRNA sense strand
gcaacaccuucaaccucaa

SEQ ID NO: 30800 - RNA, 19 nt, Homo sapiens
  misc_RNA (1)...(19): siRNA sense strand
ccccagagaugacuucuuu

SEQ ID NO: 30801 - RNA, 19 nt, Homo sapiens
  misc_RNA (1)...(19): siRNA sense strand
caaacuggacaaacaaaca

SEQ ID NO: 30802 - RNA, 19 nt, Homo sapiens
  misc_RNA (1)...(19): siRNA sense strand
ggagcacauuugcagugaa

SEQ ID NO: 30803 - RNA, 19 nt, Homo sapiens
  misc_RNA (1)...(19): siRNA sense strand
ggucaacggcgaguccuuu

SEQ ID NO: 30804 - RNA, 19 nt, Homo sapiens
  misc_RNA (1)...(19): siRNA sense strand
guaaacgccaaauccugua

SEQ ID NO: 30805 - RNA, 19 nt, Homo sapiens
  misc_RNA (1)...(19): siRNA sense strand
gaggccaaaccuuguguaa

SEQ ID NO: 30806 - RNA, 19 nt, Homo sapiens
  misc_RNA (1)...(19): siRNA sense strand
gcgccuaucuuucuccuuu

SEQ ID NO: 30807 - RNA, 19 nt, Homo sapiens
  misc_RNA (1)...(19): siRNA sense strand
ccagaaaucguagacauua

SEQ ID NO: 30808 - RNA, 19 nt, Homo sapiens
  misc_RNA (1)...(19): siRNA sense strand
cagaugacauuucacaaga

SEQ ID NO: 30809 - RNA, 19 nt, Homo sapiens
  misc_RNA (1)...(19): siRNA sense strand
ccucaucucuucagacuau

SEQ ID NO: 30810 - RNA, 19 nt, Homo sapiens
  misc_RNA (1)...(19): siRNA sense strand
ucaauagccucaucucuuc

SEQ ID NO: 30811 - RNA, 19 nt, Homo sapiens
  misc_RNA (1)...(19): siRNA sense strand
agacagaggugcugcugaa

SEQ ID NO: 30812 - RNA, 19 nt, Homo sapiens
  misc_RNA (1)...(19): siRNA sense strand
gcacccaaguccugcugua

SEQ ID NO: 30813 - RNA, 19 nt, Homo sapiens
  misc_RNA (1)...(19): siRNA sense strand
ucaacuaucuggaggacaa

SEQ ID NO: 30814 - RNA, 19 nt, Homo sapiens
  misc_RNA (1)...(19): siRNA sense strand
gugauuucauugucaagua

SEQ ID NO: 30815 - RNA, 19 nt, Homo sapiens
  misc_RNA (1)...(19): siRNA sense strand
uguacgagcucuucaccua

SEQ ID NO: 30816 - RNA, 19 nt, Homo sapiens
  misc_RNA (1)...(19): siRNA sense strand
gagagcugcugaagacugu

SEQ ID NO: 30817 - RNA, 19 nt, Homo sapiens
  misc_RNA (1)...(19): siRNA sense strand
caucuucucucgccaguca

SEQ ID NO: 30818 - RNA, 19 nt, Homo sapiens
  misc_RNA (1)...(19): siRNA sense strand
gcagacacuuagcuuggaa

SEQ ID NO: 30819 - RNA, 19 nt, Homo sapiens
  misc_RNA (1)...(19): siRNA sense strand
gaugacauuucacaagauc

SEQ ID NO: 30820 - RNA, 19 nt, Homo sapiens
  misc_RNA (1)...(19): siRNA sense strand
gguuugggcuggagaagug

SEQ ID NO: 30821 - RNA, 19 nt, Homo sapiens
  misc_RNA (1)...(19): siRNA sense strand
ggagagacaccucaaguac

SEQ ID NO: 30822 - RNA, 19 nt, Homo sapiens
  misc_RNA (1)...(19): siRNA sense strand
ggacagacaaccagauuuu

SEQ ID NO: 30823 - RNA, 19 nt, Homo sapiens
  misc_RNA (1)...(19): siRNA sense strand
agagacaccucaaguacau

SEQ ID NO: 30824 - RNA, 19 nt, Homo sapiens
  misc_RNA (1)...(19): siRNA sense strand
gagcuggcccugcugauuc

SEQ ID NO: 30825 - RNA, 19 nt, Homo sapiens
  misc_RNA (1)...(19): siRNA sense strand
gcuaagaaacuccaauuuu

SEQ ID NO: 30826 - RNA, 19 nt, Homo sapiens
  misc_RNA (1)...(19): siRNA sense strand
ggaauggugcccagcucua

SEQ ID NO: 30827 - RNA, 19 nt, Homo sapiens
  misc_RNA (1)...(19): siRNA sense strand
cgggagagcugcugaagac

SEQ ID NO: 30828 - RNA, 19 nt, Homo sapiens
  misc_RNA (1)...(19): siRNA sense strand
agaacugcauggagucauu

SEQ ID NO: 30829 - RNA, 19 nt, Homo sapiens
  misc_RNA (1)...(19): siRNA sense strand
cguccuggcuccuauguuc

SEQ ID NO: 30830 - RNA, 19 nt, Homo sapiens
  misc_RNA (1)...(19): siRNA sense strand
ggccuacgcccucaacuau

SEQ ID NO: 30831 - RNA, 19 nt, Homo sapiens
  misc_RNA (1)...(19): siRNA sense strand
ggacuuugccaucaacaag

SEQ ID NO: 30832 - RNA, 19 nt, Homo sapiens
  misc_RNA (1)...(19): siRNA sense strand
gugaugggcuguggaaugg

SEQ ID NO: 30833 - RNA, 19 nt, Homo sapiens
  misc_RNA (1)...(19): siRNA sense strand
gcaagggcauggaguaccu

SEQ ID NO: 30834 - RNA, 19 nt, Homo sapiens
  misc_RNA (1)...(19): siRNA sense strand
ugaagacugucagcuacaa

SEQ ID NO: 30835 - RNA, 19 nt, Homo sapiens
  misc_RNA (1)...(19): siRNA sense strand
gagagacaccucaaguaca

SEQ ID NO: 30836 - RNA, 19 nt, Homo sapiens
  misc_RNA (1)...(19): siRNA sense strand
cagaggugcugcugaaggu

SEQ ID NO: 30837 - RNA, 19 nt, Homo sapiens
  misc_RNA (1)...(19): siRNA sense strand
gguccuucaccaagauuua

SEQ ID NO: 30838 - RNA, 19 nt, Homo sapiens
  misc_RNA (1)...(19): siRNA sense strand
aacagugcauggccuauga

SEQ ID NO: 30839 - RNA, 19 nt, Homo sapiens
  misc_RNA (1)...(19): siRNA sense strand
ggucacagcccacccacau

SEQ ID NO: 30840 - RNA, 19 nt, Homo sapiens
  misc_RNA (1)...(19): siRNA sense strand
gaauggugcccagcucuau

SEQ ID NO: 30841 - RNA, 19 nt, Homo sapiens
  misc_RNA (1)...(19): siRNA sense strand
ccuggauccugcuaagaaa

SEQ ID NO: 30842 - RNA, 19 nt, Homo sapiens
  misc_RNA (1)...(19): siRNA sense strand
cauggguccuucaccaaga

SEQ ID NO: 30843 - RNA, 19 nt, Homo sapiens
  misc_RNA (1)...(19): siRNA sense strand
cagaaaucguagacauuag

SEQ ID NO: 30844 - RNA, 19 nt, Homo sapiens
  misc_RNA (1)...(19): siRNA sense strand
gagcgaggcacacgucaag

SEQ ID NO: 30845 - RNA, 19 nt, Homo sapiens
  misc_RNA (1)...(19): siRNA sense strand
gcucguggacggcuacuuc

SEQ ID NO: 30846 - RNA, 19 nt, Homo sapiens
  misc_RNA (1)...(19): siRNA sense strand
ucacagcccacccacauca

SEQ ID NO: 30847 - RNA, 19 nt, Homo sapiens
  misc_RNA (1)...(19): siRNA sense strand
caggacagacaaccagauu

SEQ ID NO: 30848 - RNA, 19 nt, Homo sapiens
  misc_RNA (1)...(19): siRNA sense strand
gagguucacgagcucauga

SEQ ID NO: 30849 - RNA, 19 nt, Homo sapiens
  misc_RNA (1)...(19): siRNA sense strand
gcccaucagugcccuggau

SEQ ID NO: 30850 - RNA, 19 nt, Homo sapiens
  misc_RNA (1)...(19): siRNA sense strand
gaaaucguagacauuagca

SEQ ID NO: 30851 - RNA, 19 nt, Homo sapiens
  misc_RNA (1)...(19): siRNA sense strand
cacaggaccggccaucauu

SEQ ID NO: 30852 - RNA, 19 nt, Homo sapiens
  misc_RNA (1)...(19): siRNA sense strand
ccuacgcccucaacuaucu

SEQ ID NO: 30853 - RNA, 19 nt, Homo sapiens
  misc_RNA (1)...(19): siRNA sense strand
guguaccacucccucuuug

SEQ ID NO: 30854 - RNA, 19 nt, Homo sapiens
  misc_RNA (1)...(19): siRNA sense strand
gaacugcauggagucauuc

SEQ ID NO: 30855 - RNA, 19 nt, Homo sapiens
  misc_RNA (1)...(19): siRNA sense strand
ccacaggaccggccaucau

SEQ ID NO: 30856 - RNA, 19 nt, Homo sapiens
  misc_RNA (1)...(19): siRNA sense strand
gcucauggccaaguacauc

SEQ ID NO: 30857 - RNA, 19 nt, Homo sapiens
  misc_RNA (1)...(19): siRNA sense strand
caacagugcauggccuaug

SEQ ID NO: 30858 - RNA, 19 nt, Homo sapiens
  misc_RNA (1)...(19): siRNA sense strand
ucagaugacauuucacaag

SEQ ID NO: 30859 - RNA, 19 nt, Homo sapiens
  misc_RNA (1)...(19): siRNA sense strand
ccacaucauccuugguuca

SEQ ID NO: 30860 - RNA, 19 nt, Homo sapiens
  misc_RNA (1)...(19): siRNA sense strand
ggacucccagcacuucuuc

SEQ ID NO: 30861 - RNA, 19 nt, Homo sapiens
  misc_RNA (1)...(19): siRNA sense strand
ggauuuggccagugcuauc

SEQ ID NO: 30862 - RNA, 19 nt, Homo sapiens
  misc_RNA (1)...(19): siRNA sense strand
gaaucccucucggacaaca

SEQ ID NO: 30863 - RNA, 19 nt, Homo sapiens
  misc_RNA (1)...(19): siRNA sense strand
ccagccgccuccuucucua

SEQ ID NO: 30864 - RNA, 19 nt, Homo sapiens
  misc_RNA (1)...(19): siRNA sense strand
cgaggcugcuggaggaagu

SEQ ID NO: 30865 - RNA, 19 nt, Homo sapiens
  misc_RNA (1)...(19): siRNA sense strand
gggaggcgcagacacuuag

SEQ ID NO: 30866 - RNA, 19 nt, Homo sapiens
  misc_RNA (1)...(19): siRNA sense strand
gcgaggcacacgucaagau

SEQ ID NO: 30867 - RNA, 19 nt, Homo sapiens
  misc_RNA (1)...(19): siRNA sense strand
guaucguggugucagcuau

SEQ ID NO: 30868 - RNA, 19 nt, Homo sapiens
  misc_RNA (1)...(19): siRNA sense strand
guggagcugugccgcuaug

SEQ ID NO: 30869 - RNA, 19 nt, Homo sapiens
  misc_RNA (1)...(19): siRNA sense strand
cccuugguccugauuauaa

SEQ ID NO: 30870 - RNA, 19 nt, Homo sapiens
  misc_RNA (1)...(19): siRNA sense strand
gcugggcaagggcaacuuu

SEQ ID NO: 30871 - RNA, 19 nt, Homo sapiens
  misc_RNA (1)...(19): siRNA sense strand
aggagagacaccucaagua

SEQ ID NO: 30872 - RNA, 19 nt, Homo sapiens
  misc_RNA (1)...(19): siRNA sense strand
cucaauagccucaucucuu

SEQ ID NO: 30873 - RNA, 19 nt, Homo sapiens
  misc_RNA (1)...(19): siRNA sense strand
cccaauaccagcugaguca

SEQ ID NO: 30874 - RNA, 19 nt, Homo sapiens
  misc_RNA (1)...(19): siRNA sense strand
gcucacguccuggcuccua

SEQ ID NO: 30875 - RNA, 19 nt, Homo sapiens
  misc_RNA (1)...(19): siRNA sense strand
cgggaggcgcagacacuua

SEQ ID NO: 30876 - RNA, 19 nt, Homo sapiens
  misc_RNA (1)...(19): siRNA sense strand
gaagcugcagguggucaaa

SEQ ID NO: 30877 - RNA, 19 nt, Homo sapiens
  misc_RNA (1)...(19): siRNA sense strand
cauggugcaggaauuugua

SEQ ID NO: 30878 - RNA, 19 nt, Homo sapiens
  misc_RNA (1)...(19): siRNA sense strand
ugccugcccugcugagguu

SEQ ID NO: 30879 - RNA, 19 nt, Homo sapiens
  misc_RNA (1)...(19): siRNA sense strand
ccacggacucccagcacuu

SEQ ID NO: 30880 - RNA, 19 nt, Homo sapiens
  misc_RNA (1)...(19): siRNA sense strand
gcuuuuacuuccccaauug

SEQ ID NO: 30881 - RNA, 19 nt, Homo sapiens
  misc_RNA (1)...(19): siRNA sense strand
gccgaguuccugcggauga

SEQ ID NO: 30882 - RNA, 19 nt, Homo sapiens
  misc_RNA (1)...(19): siRNA sense strand
cgugaugggcuguggaaug

SEQ ID NO: 30883 - RNA, 19 nt, Homo sapiens
  misc_RNA (1)...(19): siRNA sense strand
ugaccucaauagccucauc

SEQ ID NO: 30884 - RNA, 19 nt, Homo sapiens
  misc_RNA (1)...(19): siRNA sense strand
ggaagcugcagguggucaa

SEQ ID NO: 30885 - RNA, 19 nt, Homo sapiens
  misc_RNA (1)...(19): siRNA sense strand
acucuggacuuugccauca

SEQ ID NO: 30886 - RNA, 19 nt, Homo sapiens
  misc_RNA (1)...(19): siRNA sense strand
ggacuuucagcgggagauu

SEQ ID NO: 30887 - RNA, 19 nt, Homo sapiens
  misc_RNA (1)...(19): siRNA sense strand
cacaagaucccugcugaca

SEQ ID NO: 30888 - RNA, 19 nt, Homo sapiens
  misc_RNA (1)...(19): siRNA sense strand
agaugacauuucacaagau

SEQ ID NO: 30889 - RNA, 19 nt, Homo sapiens
  misc_RNA (1)...(19): siRNA sense strand
guacaggauucgcuuuuac

SEQ ID NO: 30890 - RNA, 19 nt, Homo sapiens
  misc_RNA (1)...(19): siRNA sense strand
caagaacugcauggaguca

SEQ ID NO: 30891 - RNA, 19 nt, Homo sapiens
  misc_RNA (1)...(19): siRNA sense strand
caaggagcagggugagugu

SEQ ID NO: 30892 - RNA, 19 nt, Homo sapiens
  misc_RNA (1)...(19): siRNA sense strand
gcugcugccgcuugacaaa

SEQ ID NO: 30893 - RNA, 19 nt, Homo sapiens
  misc_RNA (1)...(19): siRNA sense strand
cugcuaagaaacuccaauu

SEQ ID NO: 30894 - RNA, 19 nt, Homo sapiens
  misc_RNA (1)...(19): siRNA sense strand
agacauguaucugcgaaaa

SEQ ID NO: 30895 - RNA, 19 nt, Homo sapiens
  misc_RNA (1)...(19): siRNA sense strand
gaacaucaccggucacuuu

SEQ ID NO: 30896 - RNA, 19 nt, Homo sapiens
  misc_RNA (1)...(19): siRNA sense strand
caaagaagauggaauuaug

SEQ ID NO: 30897 - RNA, 19 nt, Homo sapiens
  misc_RNA (1)...(19): siRNA sense strand
gaagaaauguuguucgaau

SEQ ID NO: 30898 - RNA, 19 nt, Homo sapiens
  misc_RNA (1)...(19): siRNA sense strand
guacaaagaagauggaauu

SEQ ID NO: 30899 - RNA, 19 nt, Homo sapiens
  misc_RNA (1)...(19): siRNA sense strand
gaaccuuucugcuucauuc

SEQ ID NO: 30900 - RNA, 19 nt, Homo sapiens
  misc_RNA (1)...(19): siRNA sense strand
ugagaaagccaguggauuu

SEQ ID NO: 30901 - RNA, 19 nt, Homo sapiens
  misc_RNA (1)...(19): siRNA sense strand
guugaaagcugcgaaguug

SEQ ID NO: 30902 - RNA, 19 nt, Homo sapiens
  misc_RNA (1)...(19): siRNA sense strand
ggacagacacggcugaaga

SEQ ID NO: 30903 - RNA, 19 nt, Homo sapiens
  misc_RNA (1)...(19): siRNA sense strand
ucaacugacugacauaaga

SEQ ID NO: 30904 - RNA, 19 nt, Homo sapiens
  misc_RNA (1)...(19): siRNA sense strand
ccaccaugcucugcucuua

SEQ ID NO: 30905 - RNA, 19 nt, Homo sapiens
  misc_RNA (1)...(19): siRNA sense strand
caaagaacagcuugugaaa

SEQ ID NO: 30906 - RNA, 19 nt, Homo sapiens
  misc_RNA (1)...(19): siRNA sense strand
gcugcgaaguugacaauga

SEQ ID NO: 30907 - RNA, 19 nt, Homo sapiens
  misc_RNA (1)...(19): siRNA sense strand
gaagauggaauuauggaau

SEQ ID NO: 30908 - RNA, 19 nt, Homo sapiens
  misc_RNA (1)...(19): siRNA sense strand
guuaaagucuacuggaaga

SEQ ID NO: 30909 - RNA, 19 nt, Homo sapiens
  misc_RNA (1)...(19): siRNA sense strand
caggucauguucuuucuaa

SEQ ID NO: 30910 - RNA, 19 nt, Homo sapiens
  misc_RNA (1)...(19): siRNA sense strand
ccaagacucuguacaaagg

SEQ ID NO: 30911 - RNA, 19 nt, Homo sapiens
  misc_RNA (1)...(19): siRNA sense strand
cgaagcaggucauguucuu

SEQ ID NO: 30912 - RNA, 19 nt, Homo sapiens
  misc_RNA (1)...(19): siRNA sense strand
ucaaauacauccuguuggu

SEQ ID NO: 30913 - RNA, 19 nt, Homo sapiens
  misc_RNA (1)...(19): siRNA sense strand
gcaaacacuuccguucuuc

SEQ ID NO: 30914 - RNA, 19 nt, Homo sapiens
  misc_RNA (1)...(19): siRNA sense strand
ggacaucccugugcaucau

SEQ ID NO: 30915 - RNA, 19 nt, Homo sapiens
  misc_RNA (1)...(19): siRNA sense strand
agucggagcucccuucuau

SEQ ID NO: 30916 - RNA, 19 nt, Homo sapiens
  misc_RNA (1)...(19): siRNA sense strand
gugacuauguuguggaauu

SEQ ID NO: 30917 - RNA, 19 nt, Homo sapiens
  misc_RNA (1)...(19): siRNA sense strand
caacagaacaaccggauca

SEQ ID NO: 30918 - RNA, 19 nt, Homo sapiens
  misc_RNA (1)...(19): siRNA sense strand
gugaagaaauguuguucga

SEQ ID NO: 30919 - RNA, 19 nt, Homo sapiens
  misc_RNA (1)...(19): siRNA sense strand
uuucuaaggugcuagcuaa

SEQ ID NO: 30920 - RNA, 19 nt, Homo sapiens
  misc_RNA (1)...(19): siRNA sense strand
gcaaguauaaggugacugu

SEQ ID NO: 30921 - RNA, 19 nt, Homo sapiens
  misc_RNA (1)...(19): siRNA sense strand
cuggacagcuggagguuaa

SEQ ID NO: 30922 - RNA, 19 nt, Homo sapiens
  misc_RNA (1)...(19): siRNA sense strand
caaagaagaagcggagaaa

SEQ ID NO: 30923 - RNA, 19 nt, Homo sapiens
  misc_RNA (1)...(19): siRNA sense strand
ccaagaagagcuacgaaug

SEQ ID NO: 30924 - RNA, 19 nt, Homo sapiens
  misc_RNA (1)...(19): siRNA sense strand
gggcgaagcaggucauguu

SEQ ID NO: 30925 - RNA, 19 nt, Homo sapiens
  misc_RNA (1)...(19): siRNA sense strand
ggaagagccacaagccuau

SEQ ID NO: 30926 - RNA, 19 nt, Homo sapiens
  misc_RNA (1)...(19): siRNA sense strand
acacuuccguucuuccaaa

SEQ ID NO: 30927 - RNA, 19 nt, Homo sapiens
  misc_RNA (1)...(19): siRNA sense strand
gauaucaugugcggugguu

SEQ ID NO: 30928 - RNA, 19 nt, Homo sapiens
  misc_RNA (1)...(19): siRNA sense strand
cacaagcaauguucuaagu

SEQ ID NO: 30929 - RNA, 19 nt, Homo sapiens
  misc_RNA (1)...(19): siRNA sense strand
guuaagugguccucgaaau

SEQ ID NO: 30930 - RNA, 19 nt, Homo sapiens
  misc_RNA (1)...(19): siRNA sense strand
uaaggugacuguccaacca

SEQ ID NO: 30931 - RNA, 19 nt, Homo sapiens
  misc_RNA (1)...(19): siRNA sense strand
gagaaagccaguggauuug

SEQ ID NO: 30932 - RNA, 19 nt, Homo sapiens
  misc_RNA (1)...(19): siRNA sense strand
gagaccaucuacucuuuac

SEQ ID NO: 30933 - RNA, 19 nt, Homo sapiens
  misc_RNA (1)...(19): siRNA sense strand
ccaacagcauuauuucaca

SEQ ID NO: 30934 - RNA, 19 nt, Homo sapiens
  misc_RNA (1)...(19): siRNA sense strand
cagaacagccuacccaaca

SEQ ID NO: 30935 - RNA, 19 nt, Homo sapiens
  misc_RNA (1)...(19): siRNA sense strand
aaacacaacucccuuuuca

SEQ ID NO: 30936 - RNA, 19 nt, Homo sapiens
  misc_RNA (1)...(19): siRNA sense strand
ucgaguggcugcugugaau

SEQ ID NO: 30937 - RNA, 19 nt, Homo sapiens
  misc_RNA (1)...(19): siRNA sense strand
cuauugagccugugaucua

SEQ ID NO: 30938 - RNA, 19 nt, Homo sapiens
  misc_RNA (1)...(19): siRNA sense strand
caacaacaaagaacagcuu

SEQ ID NO: 30939 - RNA, 19 nt, Homo sapiens
  misc_RNA (1)...(19): siRNA sense strand
cugagaccaucuacucuuu

SEQ ID NO: 30940 - RNA, 19 nt, Homo sapiens
  misc_RNA (1)...(19): siRNA sense strand
cuacccaacagcauuauuu

SEQ ID NO: 30941 - RNA, 19 nt, Homo sapiens
  misc_RNA (1)...(19): siRNA sense strand
cagaagaucccacugucaa

SEQ ID NO: 30942 - RNA, 19 nt, Homo sapiens
  misc_RNA (1)...(19): siRNA sense strand
gaccgucacuauaguuugg

SEQ ID NO: 30943 - RNA, 19 nt, Homo sapiens
  misc_RNA (1)...(19): siRNA sense strand
ugacuauguuguggaauug

SEQ ID NO: 30944 - RNA, 19 nt, Homo sapiens
  misc_RNA (1)...(19): siRNA sense strand
gccagacugugacuauguu

SEQ ID NO: 30945 - RNA, 19 nt, Homo sapiens
  misc_RNA (1)...(19): siRNA sense strand
aagaagaagcggagaaaga

SEQ ID NO: 30946 - RNA, 19 nt, Homo sapiens
  misc_RNA (1)...(19): siRNA sense strand
gaaaagaguuacgauuuac

SEQ ID NO: 30947 - RNA, 19 nt, Homo sapiens
  misc_RNA (1)...(19): siRNA sense strand
aacaaugguucccugguuu

SEQ ID NO: 30948 - RNA, 19 nt, Homo sapiens
  misc_RNA (1)...(19): siRNA sense strand
gaagaugacgccacucacu

SEQ ID NO: 30949 - RNA, 19 nt, Homo sapiens
  misc_RNA (1)...(19): siRNA sense strand
gaguuacgauuuacagaac

SEQ ID NO: 30950 - RNA, 19 nt, Homo sapiens
  misc_RNA (1)...(19): siRNA sense strand
aaagucuacuggaagaaga

SEQ ID NO: 30951 - RNA, 19 nt, Homo sapiens
  misc_RNA (1)...(19): siRNA sense strand
gcaugacccacgaaaauua

SEQ ID NO: 30952 - RNA, 19 nt, Homo sapiens
  misc_RNA (1)...(19): siRNA sense strand
aagaaauguuguucgaaug

SEQ ID NO: 30953 - RNA, 19 nt, Homo sapiens
  misc_RNA (1)...(19): siRNA sense strand
uagaaaagguggaauucaa

SEQ ID NO: 30954 - RNA, 19 nt, Homo sapiens
  misc_RNA (1)...(19): siRNA sense strand
cagaaaagaguuacgauuu

SEQ ID NO: 30955 - RNA, 19 nt, Homo sapiens
  misc_RNA (1)...(19): siRNA sense strand
ccucaaauacauccuguug

SEQ ID NO: 30956 - RNA, 19 nt, Homo sapiens
  misc_RNA (1)...(19): siRNA sense strand
gaacagcuugugaaaacua

SEQ ID NO: 30957 - RNA, 19 nt, Homo sapiens
  misc_RNA (1)...(19): siRNA sense strand
uuaagugguccucgaaauu

SEQ ID NO: 30958 - RNA, 19 nt, Homo sapiens
  misc_RNA (1)...(19): siRNA sense strand
gccagaaucacaagcaaug

SEQ ID NO: 30959 - RNA, 19 nt, Homo sapiens
  misc_RNA (1)...(19): siRNA sense strand
gaaacuccagccagacugu

SEQ ID NO: 30960 - RNA, 19 nt, Homo sapiens
  misc_RNA (1)...(19): siRNA sense strand
gcgaagaugacgccacuca

SEQ ID NO: 30961 - RNA, 19 nt, Homo sapiens
  misc_RNA (1)...(19): siRNA sense strand
uaagugguccucgaaauuc

SEQ ID NO: 30962 - RNA, 19 nt, Homo sapiens
  misc_RNA (1)...(19): siRNA sense strand
gcucuggggugaagaaaug

SEQ ID NO: 30963 - RNA, 19 nt, Homo sapiens
  misc_RNA (1)...(19): siRNA sense strand
gaagagccacaagccuauu

SEQ ID NO: 30964 - RNA, 19 nt, Homo sapiens
  misc_RNA (1)...(19): siRNA sense strand
aaguuaaagucuacuggaa

SEQ ID NO: 30965 - RNA, 19 nt, Homo sapiens
  misc_RNA (1)...(19): siRNA sense strand
cgacacaugcaaccaacaa

SEQ ID NO: 30966 - RNA, 19 nt, Homo sapiens
  misc_RNA (1)...(19): siRNA sense strand
ggaaacaccagugccaaag

SEQ ID NO: 30967 - RNA, 19 nt, Homo sapiens
  misc_RNA (1)...(19): siRNA sense strand
aagauggaauuauggaauc

SEQ ID NO: 30968 - RNA, 19 nt, Homo sapiens
  misc_RNA (1)...(19): siRNA sense strand
gaucuaugugguacaaaga

SEQ ID NO: 30969 - RNA, 19 nt, Homo sapiens
  misc_RNA (1)...(19): siRNA sense strand
caagaagagcuacgaaugc

SEQ ID NO: 30970 - RNA, 19 nt, Homo sapiens
  misc_RNA (1)...(19): siRNA sense strand
caaccaacaacaaagaaca

SEQ ID NO: 30971 - RNA, 19 nt, Homo sapiens
  misc_RNA (1)...(19): siRNA sense strand
ugagaccaucuacucuuua

SEQ ID NO: 30972 - RNA, 19 nt, Homo sapiens
  misc_RNA (1)...(19): siRNA sense strand
gcugaggucacuacggaaa

SEQ ID NO: 30973 - RNA, 19 nt, Homo sapiens
  misc_RNA (1)...(19): siRNA sense strand
gaagcaggucauguucuuu

SEQ ID NO: 30974 - RNA, 19 nt, Homo sapiens
  misc_RNA (1)...(19): siRNA sense strand
caacuccaccgucaacagu

SEQ ID NO: 30975 - RNA, 19 nt, Homo sapiens
  misc_RNA (1)...(19): siRNA sense strand
ccaaggccaaucucuauca

SEQ ID NO: 30976 - RNA, 19 nt, Homo sapiens
  misc_RNA (1)...(19): siRNA sense strand
gcaggucauguucuuucua

SEQ ID NO: 30977 - RNA, 19 nt, Homo sapiens
  misc_RNA (1)...(19): siRNA sense strand
acaucccugugcaucauua

SEQ ID NO: 30978 - RNA, 19 nt, Homo sapiens
  misc_RNA (1)...(19): siRNA sense strand
cagaaucacaagcaauguu

SEQ ID NO: 30979 - RNA, 19 nt, Homo sapiens
  misc_RNA (1)...(19): siRNA sense strand
acccaagacucuguacaaa

SEQ ID NO: 30980 - RNA, 19 nt, Homo sapiens
  misc_RNA (1)...(19): siRNA sense strand
gaauccauccuagcgaaga

SEQ ID NO: 30981 - RNA, 19 nt, Homo sapiens
  misc_RNA (1)...(19): siRNA sense strand
aaacaccagugccaaagcu

SEQ ID NO: 30982 - RNA, 19 nt, Homo sapiens
  misc_RNA (1)...(19): siRNA sense strand
gguccucgaaauucaauau

SEQ ID NO: 30983 - RNA, 19 nt, Homo sapiens
  misc_RNA (1)...(19): siRNA sense strand
ggugacuguccaaccaaua

SEQ ID NO: 30984 - RNA, 19 nt, Homo sapiens
  misc_RNA (1)...(19): siRNA sense strand
gagaaacuccagccagacu

SEQ ID NO: 30985 - RNA, 19 nt, Homo sapiens
  misc_RNA (1)...(19): siRNA sense strand
aagaagcggagaaagacua

SEQ ID NO: 30986 - RNA, 19 nt, Homo sapiens
  misc_RNA (1)...(19): siRNA sense strand
agcaaacacuuccguucuu

SEQ ID NO: 30987 - RNA, 19 nt, Homo sapiens
  misc_RNA (1)...(19): siRNA sense strand
cagccgaugguaccaguuu

SEQ ID NO: 30988 - RNA, 19 nt, Homo sapiens
  misc_RNA (1)...(19): siRNA sense strand
gaccacagacgagcgaguu

SEQ ID NO: 30989 - RNA, 19 nt, Homo sapiens
  misc_RNA (1)...(19): siRNA sense strand
guucaacugacugacauaa

SEQ ID NO: 30990 - RNA, 19 nt, Homo sapiens
  misc_RNA (1)...(19): siRNA sense strand
ccagccagacugugacuau

SEQ ID NO: 30991 - RNA, 19 nt, Homo sapiens
  misc_RNA (1)...(19): siRNA sense strand
ugaucuaugugguacaaag

SEQ ID NO: 30992 - RNA, 19 nt, Homo sapiens
  misc_RNA (1)...(19): siRNA sense strand
caucgucauccacaucauu

SEQ ID NO: 30993 - RNA, 19 nt, Homo sapiens
  misc_RNA (1)...(19): siRNA sense strand
gucauguucuuucuaaggu

SEQ ID NO: 30994 - RNA, 19 nt, Homo sapiens
  misc_RNA (1)...(19): siRNA sense strand
acaaagaagaagcggagaa

SEQ ID NO: 30995 - RNA, 19 nt, Homo sapiens
  misc_RNA (1)...(19): siRNA sense strand
cgagauagcugagcaggaa

SEQ ID NO: 30996 - RNA, 19 nt, Homo sapiens
  misc_RNA (1)...(19): siRNA sense strand
uagcauagcccauuauaga

SEQ ID NO: 30997 - RNA, 19 nt, Homo sapiens
  misc_RNA (1)...(19): siRNA sense strand
uaacuuagccucugacagu

SEQ ID NO: 30998 - RNA, 19 nt, Homo sapiens
  misc_RNA (1)...(19): siRNA sense strand
ucgaagaggauaugaauaa

SEQ ID NO: 30999 - RNA, 19 nt, Homo sapiens
  misc_RNA (1)...(19): siRNA sense strand
gagcaaguaugaguacaug

SEQ ID NO: 31000 - RNA, 19 nt, Homo sapiens
  misc_RNA (1)...(19): siRNA sense strand
gaaacgcugugcaucaucu

SEQ ID NO: 31001 - RNA, 19 nt, Homo sapiens
  misc_RNA (1)...(19): siRNA sense strand
caucauuccuuauuucauc

SEQ ID NO: 31002 - RNA, 19 nt, Homo sapiens
  misc_RNA (1)...(19): siRNA sense strand
gaucgaagaggauaugaau

SEQ ID NO: 31003 - RNA, 19 nt, Homo sapiens
  misc_RNA (1)...(19): siRNA sense strand
ucaagacccuggcgcaguu

SEQ ID NO: 31004 - RNA, 19 nt, Homo sapiens
  misc_RNA (1)...(19): siRNA sense strand
gcaagcuacugaccgaugu

SEQ ID NO: 31005 - RNA, 19 nt, Homo sapiens
  misc_RNA (1)...(19): siRNA sense strand
uaucagaacugccaauugc

SEQ ID NO: 31006 - RNA, 19 nt, Homo sapiens
  misc_RNA (1)...(19): siRNA sense strand
ccgaggagaucaaguuuua

SEQ ID NO: 31007 - RNA, 19 nt, Homo sapiens
  misc_RNA (1)...(19): siRNA sense strand
gagucgcacuucuccagua

SEQ ID NO: 31008 - RNA, 19 nt, Homo sapiens
  misc_RNA (1)...(19): siRNA sense strand
ggccagacccucaaagcua

SEQ ID NO: 31009 - RNA, 19 nt, Homo sapiens
  misc_RNA (1)...(19): siRNA sense strand
gcuacugaccgauguuuaa

SEQ ID NO: 31010 - RNA, 19 nt, Homo sapiens
  misc_RNA (1)...(19): siRNA sense strand
gcccguaccugucauugug

SEQ ID NO: 31011 - RNA, 19 nt, Homo sapiens
  misc_RNA (1)...(19): siRNA sense strand
ccacggucaucuacaauuc

SEQ ID NO: 31012 - RNA, 19 nt, Homo sapiens
  misc_RNA (1)...(19): siRNA sense strand
gcaaguaugaguacaugga

SEQ ID NO: 31013 - RNA, 19 nt, Homo sapiens
  misc_RNA (1)...(19): siRNA sense strand
ggugacauguacccuguga

SEQ ID NO: 31014 - RNA, 19 nt, Homo sapiens
  misc_RNA (1)...(19): siRNA sense strand
ugccaucgcuggugugcua

SEQ ID NO: 31015 - RNA, 19 nt, Homo sapiens
  misc_RNA (1)...(19): siRNA sense strand
aauaagagcaagcuacuga

SEQ ID NO: 31016 - RNA, 19 nt, Homo sapiens
  misc_RNA (1)...(19): siRNA sense strand
gcgaggaggccauggagaa

SEQ ID NO: 31017 - RNA, 19 nt, Homo sapiens
  misc_RNA (1)...(19): siRNA sense strand
ccaauugcaccacagcuaa

SEQ ID NO: 31018 - RNA, 19 nt, Homo sapiens
  misc_RNA (1)...(19): siRNA sense strand
cgaagaggauaugaauaau

SEQ ID NO: 31019 - RNA, 19 nt, Homo sapiens
  misc_RNA (1)...(19): siRNA sense strand
caucuacaauuccaacauc

SEQ ID NO: 31020 - RNA, 19 nt, Homo sapiens
  misc_RNA (1)...(19): siRNA sense strand
ggacgagggcuucaucaag

SEQ ID NO: 31021 - RNA, 19 nt, Homo sapiens
  misc_RNA (1)...(19): siRNA sense strand
ggccaucauuccuuauuuc

SEQ ID NO: 31022 - RNA, 19 nt, Homo sapiens
  misc_RNA (1)...(19): siRNA sense strand
cauguacccugugacaauu

SEQ ID NO: 31023 - RNA, 19 nt, Homo sapiens
  misc_RNA (1)...(19): siRNA sense strand
gaggaacgaguacuucuuc

SEQ ID NO: 31024 - RNA, 19 nt, Homo sapiens
  misc_RNA (1)...(19): siRNA sense strand
gaucaaguuuuacgaguug

SEQ ID NO: 31025 - RNA, 19 nt, Homo sapiens
  misc_RNA (1)...(19): siRNA sense strand
acaccacggucaucuacaa

SEQ ID NO: 31026 - RNA, 19 nt, Homo sapiens
  misc_RNA (1)...(19): siRNA sense strand
gaucgugggcuccuugugu

SEQ ID NO: 31027 - RNA, 19 nt, Homo sapiens
  misc_RNA (1)...(19): siRNA sense strand
uagcugagcaggaaggaaa

SEQ ID NO: 31028 - RNA, 19 nt, Homo sapiens
  misc_RNA (1)...(19): siRNA sense strand
gaacuucauagacauugug

SEQ ID NO: 31029 - RNA, 19 nt, Homo sapiens
  misc_RNA (1)...(19): siRNA sense strand
cgcaguuccucuacuauga

SEQ ID NO: 31030 - RNA, 19 nt, Homo sapiens
  misc_RNA (1)...(19): siRNA sense strand
aaccaaaacugcguuaaua

SEQ ID NO: 31031 - RNA, 19 nt, Homo sapiens
  misc_RNA (1)...(19): siRNA sense strand
gcuggugugcuaacaauug

SEQ ID NO: 31032 - RNA, 19 nt, Homo sapiens
  misc_RNA (1)...(19): siRNA sense strand
gcauagcccauuauagaca

SEQ ID NO: 31033 - RNA, 19 nt, Homo sapiens
  misc_RNA (1)...(19): siRNA sense strand
aauaauagcauagcccauu

SEQ ID NO: 31034 - RNA, 19 nt, Homo sapiens
  misc_RNA (1)...(19): siRNA sense strand
cauuauagacaggucaaua

SEQ ID NO: 31035 - RNA, 19 nt, Homo sapiens
  misc_RNA (1)...(19): siRNA sense strand
ucaaagcuaguaugagaga

SEQ ID NO: 31036 - RNA, 19 nt, Homo sapiens
  misc_RNA (1)...(19): siRNA sense strand
ggagaucgaagaggauaug

SEQ ID NO: 31037 - RNA, 19 nt, Homo sapiens
  misc_RNA (1)...(19): siRNA sense strand
caugaccacuguaggauac

SEQ ID NO: 31038 - RNA, 19 nt, Homo sapiens
  misc_RNA (1)...(19): siRNA sense strand
uaggauacggugacaugua

SEQ ID NO: 31039 - RNA, 19 nt, Homo sapiens
  misc_RNA (1)...(19): siRNA sense strand
uggccaucauuccuuauuu

SEQ ID NO: 31040 - RNA, 19 nt, Homo sapiens
  misc_RNA (1)...(19): siRNA sense strand
gaggauaugaauaauagca

SEQ ID NO: 31041 - RNA, 19 nt, Homo sapiens
  misc_RNA (1)...(19): siRNA sense strand
caacaccacggucaucuac

SEQ ID NO: 31042 - RNA, 19 nt, Homo sapiens
  misc_RNA (1)...(19): siRNA sense strand
gcaagaucgugggcuccuu

SEQ ID NO: 31043 - RNA, 19 nt, Homo sapiens
  misc_RNA (1)...(19): siRNA sense strand
gccaauugcaccacagcua

SEQ ID NO: 31044 - RNA, 19 nt, Homo sapiens
  misc_RNA (1)...(19): siRNA sense strand
cgccgcaguuccucuacua

SEQ ID NO: 31045 - RNA, 19 nt, Homo sapiens
  misc_RNA (1)...(19): siRNA sense strand
gcaggaaggaaaccagaag

SEQ ID NO: 31046 - RNA, 19 nt, Homo sapiens
  misc_RNA (1)...(19): siRNA sense strand
agacaggucaauaucagaa

SEQ ID NO: 31047 - RNA, 19 nt, Homo sapiens
  misc_RNA (1)...(19): siRNA sense strand
aauagcauagcccauuaua

SEQ ID NO: 31048 - RNA, 19 nt, Homo sapiens
  misc_RNA (1)...(19): siRNA sense strand
gaaacgcaugcgcuacuuc

SEQ ID NO: 31049 - RNA, 19 nt, Homo sapiens
  misc_RNA (1)...(19): siRNA sense strand
ggaacgaguacuucuucga

SEQ ID NO: 31050 - RNA, 19 nt, Homo sapiens
  misc_RNA (1)...(19): siRNA sense strand
guacauggagaucgaagag

SEQ ID NO: 31051 - RNA, 19 nt, Homo sapiens
  misc_RNA (1)...(19): siRNA sense strand
ugacauguacccugugaca

SEQ ID NO: 31052 - RNA, 19 nt, Homo sapiens
  misc_RNA (1)...(19): siRNA sense strand
ccaugaccacuguaggaua

SEQ ID NO: 31053 - RNA, 19 nt, Homo sapiens
  misc_RNA (1)...(19): siRNA sense strand
gcugggcaacccuaagaaa

SEQ ID NO: 31054 - RNA, 19 nt, Homo sapiens
  misc_RNA (1)...(19): siRNA sense strand
ggaggacgagggcuucauc

SEQ ID NO: 31055 - RNA, 19 nt, Homo sapiens
  misc_RNA (1)...(19): siRNA sense strand
caaaacugcguuaauaaga

SEQ ID NO: 31056 - RNA, 19 nt, Homo sapiens
  misc_RNA (1)...(19): siRNA sense strand
guggaaacgcugugcauca

SEQ ID NO: 31057 - RNA, 19 nt, Homo sapiens
  misc_RNA (1)...(19): siRNA sense strand
cuacaauuccaacaucuuc

SEQ ID NO: 31058 - RNA, 19 nt, Homo sapiens
  misc_RNA (1)...(19): siRNA sense strand
uguggcugcucuucgagua

SEQ ID NO: 31059 - RNA, 19 nt, Homo sapiens
  misc_RNA (1)...(19): siRNA sense strand
aggaggccauggagaaguu

SEQ ID NO: 31060 - RNA, 19 nt, Homo sapiens
  misc_RNA (1)...(19): siRNA sense strand
ucgacgccauccucuacua

SEQ ID NO: 31061 - RNA, 19 nt, Homo sapiens
  misc_RNA (1)...(19): siRNA sense strand
ugaaggaugacaaggacuu

SEQ ID NO: 31062 - RNA, 19 nt, Homo sapiens
  misc_RNA (1)...(19): siRNA sense strand
gcgagcgcguggugaucaa

SEQ ID NO: 31063 - RNA, 19 nt, Homo sapiens
  misc_RNA (1)...(19): siRNA sense strand
ucgcuggugugcuaacaau

SEQ ID NO: 31064 - RNA, 19 nt, Homo sapiens
  misc_RNA (1)...(19): siRNA sense strand
gcuagggcugcucaucuuu

SEQ ID NO: 31065 - RNA, 19 nt, Homo sapiens
  misc_RNA (1)...(19): siRNA sense strand
uggaaacgcugugcaucau

SEQ ID NO: 31066 - RNA, 19 nt, Homo sapiens
  misc_RNA (1)...(19): siRNA sense strand
agaaacgcaugcgcuacuu

SEQ ID NO: 31067 - RNA, 19 nt, Homo sapiens
  misc_RNA (1)...(19): siRNA sense strand
uauagacaggucaauauca

SEQ ID NO: 31068 - RNA, 19 nt, Homo sapiens
  misc_RNA (1)...(19): siRNA sense strand
acauguacccugugacaau

SEQ ID NO: 31069 - RNA, 19 nt, Homo sapiens
  misc_RNA (1)...(19): siRNA sense strand
uguguccaauuucaacuau

SEQ ID NO: 31070 - RNA, 19 nt, Homo sapiens
  misc_RNA (1)...(19): siRNA sense strand
caucuccaucgucaucuuu

SEQ ID NO: 31071 - RNA, 19 nt, Homo sapiens
  misc_RNA (1)...(19): siRNA sense strand
acgccauccucuacuacua

SEQ ID NO: 31072 - RNA, 19 nt, Homo sapiens
  misc_RNA (1)...(19): siRNA sense strand
aggauacggugacauguac

SEQ ID NO: 31073 - RNA, 19 nt, Homo sapiens
  misc_RNA (1)...(19): siRNA sense strand
gacauuguggccaucauuc

SEQ ID NO: 31074 - RNA, 19 nt, Homo sapiens
  misc_RNA (1)...(19): siRNA sense strand
ggaaacgcugugcaucauc

SEQ ID NO: 31075 - RNA, 19 nt, Homo sapiens
  misc_RNA (1)...(19): siRNA sense strand
auagacaggucaauaucag

SEQ ID NO: 31076 - RNA, 19 nt, Homo sapiens
  misc_RNA (1)...(19): siRNA sense strand
gaccucagucgccgcaguu

SEQ ID NO: 31077 - RNA, 19 nt, Homo sapiens
  misc_RNA (1)...(19): siRNA sense strand
uuguggccaucauuccuua

SEQ ID NO: 31078 - RNA, 19 nt, Homo sapiens
  misc_RNA (1)...(19): siRNA sense strand
uguaggauacggugacaug

SEQ ID NO: 31079 - RNA, 19 nt, Homo sapiens
  misc_RNA (1)...(19): siRNA sense strand
auuccaacaucuucacaga

SEQ ID NO: 31080 - RNA, 19 nt, Homo sapiens
  misc_RNA (1)...(19): siRNA sense strand
gacaauuggaggcaagauc

SEQ ID NO: 31081 - RNA, 19 nt, Homo sapiens
  misc_RNA (1)...(19): siRNA sense strand
agacauuguggccaucauu

SEQ ID NO: 31082 - RNA, 19 nt, Homo sapiens
  misc_RNA (1)...(19): siRNA sense strand
cuagugcaguguacuuugc

SEQ ID NO: 31083 - RNA, 19 nt, Homo sapiens
  misc_RNA (1)...(19): siRNA sense strand
guccaugaccacuguagga

SEQ ID NO: 31084 - RNA, 19 nt, Homo sapiens
  misc_RNA (1)...(19): siRNA sense strand
caagaagucugugguggua

SEQ ID NO: 31085 - RNA, 19 nt, Homo sapiens
  misc_RNA (1)...(19): siRNA sense strand
gagagaagaugcucacagu

SEQ ID NO: 31086 - RNA, 19 nt, Homo sapiens
  misc_RNA (1)...(19): siRNA sense strand
gcaacacccugcccaccua

SEQ ID NO: 31087 - RNA, 19 nt, Homo sapiens
  misc_RNA (1)...(19): siRNA sense strand
gggaagcccucacuguuca

SEQ ID NO: 31088 - RNA, 19 nt, Homo sapiens
  misc_RNA (1)...(19): siRNA sense strand
gcggaagccuuacgaugug

SEQ ID NO: 31089 - RNA, 19 nt, Homo sapiens
  misc_RNA (1)...(19): siRNA sense strand
agaagucuguggugguaaa

SEQ ID NO: 31090 - RNA, 19 nt, Homo sapiens
  misc_RNA (1)...(19): siRNA sense strand
gcccaacacugcuggaagu

SEQ ID NO: 31091 - RNA, 19 nt, Homo sapiens
  misc_RNA (1)...(19): siRNA sense strand
caccaucgggccaccauua

SEQ ID NO: 31092 - RNA, 19 nt, Homo sapiens
  misc_RNA (1)...(19): siRNA sense strand
guucaucuccgucucagaa

SEQ ID NO: 31093 - RNA, 19 nt, Homo sapiens
  misc_RNA (1)...(19): siRNA sense strand
gagccacacucugcuguca

SEQ ID NO: 31094 - RNA, 19 nt, Homo sapiens
  misc_RNA (1)...(19): siRNA sense strand
gaaccgaguagaagacaag

SEQ ID NO: 31095 - RNA, 19 nt, Homo sapiens
  misc_RNA (1)...(19): siRNA sense strand
caucuucuccucguacuuu

SEQ ID NO: 31096 - RNA, 19 nt, Homo sapiens
  misc_RNA (1)...(19): siRNA sense strand
gaagugagcaugccccauu

SEQ ID NO: 31097 - RNA, 19 nt, Homo sapiens
  misc_RNA (1)...(19): siRNA sense strand
gggacgucauugagcagua

SEQ ID NO: 31098 - RNA, 19 nt, Homo sapiens
  misc_RNA (1)...(19): siRNA sense strand
aguucaagcuggacaaaga

SEQ ID NO: 31099 - RNA, 19 nt, Homo sapiens
  misc_RNA (1)...(19): siRNA sense strand
caagaagaaauuccagcaa

SEQ ID NO: 31100 - RNA, 19 nt, Homo sapiens
  misc_RNA (1)...(19): siRNA sense strand
gcaaggaucgcggcagcaa

SEQ ID NO: 31101 - RNA, 19 nt, Homo sapiens
  misc_RNA (1)...(19): siRNA sense strand
gaagcccauuuccaucauc

SEQ ID NO: 31102 - RNA, 19 nt, Homo sapiens
  misc_RNA (1)...(19): siRNA sense strand
ggacgucauugagcaguac

SEQ ID NO: 31103 - RNA, 19 nt, Homo sapiens
  misc_RNA (1)...(19): siRNA sense strand
cgacggcuaugacaguucu

SEQ ID NO: 31104 - RNA, 19 nt, Homo sapiens
  misc_RNA (1)...(19): siRNA sense strand
gcugauaaccacccuguac

SEQ ID NO: 31105 - RNA, 19 nt, Homo sapiens
  misc_RNA (1)...(19): siRNA sense strand
agucuguggugguaaagaa

SEQ ID NO: 31106 - RNA, 19 nt, Homo sapiens
  misc_RNA (1)...(19): siRNA sense strand
ucucacagcugcgggaaca

SEQ ID NO: 31107 - RNA, 19 nt, Homo sapiens
  misc_RNA (1)...(19): siRNA sense strand
gauaaccacccuguacauc

SEQ ID NO: 31108 - RNA, 19 nt, Homo sapiens
  misc_RNA (1)...(19): siRNA sense strand
agcaagcgcggaagccuua

SEQ ID NO: 31109 - RNA, 19 nt, Homo sapiens
  misc_RNA (1)...(19): siRNA sense strand
gugcuaugcugccgagaac

SEQ ID NO: 31110 - RNA, 19 nt, Homo sapiens
  misc_RNA (1)...(19): siRNA sense strand
ugacacccaucacccacau

SEQ ID NO: 31111 - RNA, 19 nt, Homo sapiens
  misc_RNA (1)...(19): siRNA sense strand
gcguggaguucggcagcua

SEQ ID NO: 31112 - RNA, 19 nt, Homo sapiens
  misc_RNA (1)...(19): siRNA sense strand
cgucgacccugagcucuuc

SEQ ID NO: 31113 - RNA, 19 nt, Homo sapiens
  misc_RNA (1)...(19): siRNA sense strand
gcacuucaaccggcagauc

SEQ ID NO: 31114 - RNA, 19 nt, Homo sapiens
  misc_RNA (1)...(19): siRNA sense strand
guccuggucugccucaucu

SEQ ID NO: 31115 - RNA, 19 nt, Homo sapiens
  misc_RNA (1)...(19): siRNA sense strand
caagcuggacaaagacaau

SEQ ID NO: 31116 - RNA, 19 nt, Homo sapiens
  misc_RNA (1)...(19): siRNA sense strand
uuguguaccuggcugagaa

SEQ ID NO: 31117 - RNA, 19 nt, Homo sapiens
  misc_RNA (1)...(19): siRNA sense strand
cgacgcaugcaguacuuug

SEQ ID NO: 31118 - RNA, 19 nt, Homo sapiens
  misc_RNA (1)...(19): siRNA sense strand
cccugaaggugcagcagaa

SEQ ID NO: 31119 - RNA, 19 nt, Homo sapiens
  misc_RNA (1)...(19): siRNA sense strand
ccaaacccaagaagucugu

SEQ ID NO: 31120 - RNA, 19 nt, Homo sapiens
  misc_RNA (1)...(19): siRNA sense strand
agaaggacgcggugaacga

SEQ ID NO: 31121 - RNA, 19 nt, Homo sapiens
  misc_RNA (1)...(19): siRNA sense strand
cgcggaagccuuacgaugu

SEQ ID NO: 31122 - RNA, 19 nt, Homo sapiens
  misc_RNA (1)...(19): siRNA sense strand
uaaggaagagcccaacacu

SEQ ID NO: 31123 - RNA, 19 nt, Homo sapiens
  misc_RNA (1)...(19): siRNA sense strand
ggugcuaugcugccgagaa

SEQ ID NO: 31124 - RNA, 19 nt, Homo sapiens
  misc_RNA (1)...(19): siRNA sense strand
caagaagucugugguggua

SEQ ID NO: 31125 - RNA, 19 nt, Homo sapiens
  misc_RNA (1)...(19): siRNA sense strand
gagagaagaugcucacagu

SEQ ID NO: 31126 - RNA, 19 nt, Homo sapiens
  misc_RNA (1)...(19): siRNA sense strand
gcaacacccugcccaccua

SEQ ID NO: 31127 - RNA, 19 nt, Homo sapiens
  misc_RNA (1)...(19): siRNA sense strand
gggaagcccucacuguuca

SEQ ID NO: 31128 - RNA, 19 nt, Homo sapiens
  misc_RNA (1)...(19): siRNA sense strand
gcggaagccuuacgaugug

SEQ ID NO: 31129 - RNA, 19 nt, Homo sapiens
  misc_RNA (1)...(19): siRNA sense strand
agaagucuguggugguaaa

SEQ ID NO: 31130 - RNA, 19 nt, Homo sapiens
  misc_RNA (1)...(19): siRNA sense strand
gcccaacacugcuggaagu

SEQ ID NO: 31131 - RNA, 19 nt, Homo sapiens
  misc_RNA (1)...(19): siRNA sense strand
caccaucgggccaccauua

SEQ ID NO: 31132 - RNA, 19 nt, Homo sapiens
  misc_RNA (1)...(19): siRNA sense strand
guucaucuccgucucagaa

SEQ ID NO: 31133 - RNA, 19 nt, Homo sapiens
  misc_RNA (1)...(19): siRNA sense strand
gagccacacucugcuguca

SEQ ID NO: 31134 - RNA, 19 nt, Homo sapiens
  misc_RNA (1)...(19): siRNA sense strand
gaaccgaguagaagacaag

SEQ ID NO: 31135 - RNA, 19 nt, Homo sapiens
  misc_RNA (1)...(19): siRNA sense strand
caucuucuccucguacuuu

SEQ ID NO: 31136 - RNA, 19 nt, Homo sapiens
  misc_RNA (1)...(19): siRNA sense strand
gaagugagcaugccccauu

SEQ ID NO: 31137 - RNA, 19 nt, Homo sapiens
  misc_RNA (1)...(19): siRNA sense strand
gggacgucauugagcagua

SEQ ID NO: 31138 - RNA, 19 nt, Homo sapiens
  misc_RNA (1)...(19): siRNA sense strand
aguucaagcuggacaaaga

SEQ ID NO: 31139 - RNA, 19 nt, Homo sapiens
  misc_RNA (1)...(19): siRNA sense strand
caagaagaaauuccagcaa

SEQ ID NO: 31140 - RNA, 19 nt, Homo sapiens
  misc_RNA (1)...(19): siRNA sense strand
gcaaggaucgcggcagcaa

SEQ ID NO: 31141 - RNA, 19 nt, Homo sapiens
  misc_RNA (1)...(19): siRNA sense strand
gaagcccauuuccaucauc

SEQ ID NO: 31142 - RNA, 19 nt, Homo sapiens
  misc_RNA (1)...(19): siRNA sense strand
ggacgucauugagcaguac

SEQ ID NO: 31143 - RNA, 19 nt, Homo sapiens
  misc_RNA (1)...(19): siRNA sense strand
cgacggcuaugacaguucu

SEQ ID NO: 31144 - RNA, 19 nt, Homo sapiens
  misc_RNA (1)...(19): siRNA sense strand
gcugauaaccacccuguac

SEQ ID NO: 31145 - RNA, 19 nt, Homo sapiens
  misc_RNA (1)...(19): siRNA sense strand
agucuguggugguaaagaa

SEQ ID NO: 31146 - RNA, 19 nt, Homo sapiens
  misc_RNA (1)...(19): siRNA sense strand
ucucacagcugcgggaaca

SEQ ID NO: 31147 - RNA, 19 nt, Homo sapiens
  misc_RNA (1)...(19): siRNA sense strand
gauaaccacccuguacauc

SEQ ID NO: 31148 - RNA, 19 nt, Homo sapiens
  misc_RNA (1)...(19): siRNA sense strand
agcaagcgcggaagccuua

SEQ ID NO: 31149 - RNA, 19 nt, Homo sapiens
  misc_RNA (1)...(19): siRNA sense strand
gugcuaugcugccgagaac

SEQ ID NO: 31150 - RNA, 19 nt, Homo sapiens
  misc_RNA (1)...(19): siRNA sense strand
ugacacccaucacccacau

SEQ ID NO: 31151 - RNA, 19 nt, Homo sapiens
  misc_RNA (1)...(19): siRNA sense strand
gcguggaguucggcagcua

SEQ ID NO: 31152 - RNA, 19 nt, Homo sapiens
  misc_RNA (1)...(19): siRNA sense strand
cgucgacccugagcucuuc

SEQ ID NO: 31153 - RNA, 19 nt, Homo sapiens
  misc_RNA (1)...(19): siRNA sense strand
gcacuucaaccggcagauc

SEQ ID NO: 31154 - RNA, 19 nt, Homo sapiens
  misc_RNA (1)...(19): siRNA sense strand
guccuggucugccucaucu

SEQ ID NO: 31155 - RNA, 19 nt, Homo sapiens
  misc_RNA (1)...(19): siRNA sense strand
caagcuggacaaagacaau

SEQ ID NO: 31156 - RNA, 19 nt, Homo sapiens
  misc_RNA (1)...(19): siRNA sense strand
uuguguaccuggcugagaa

SEQ ID NO: 31157 - RNA, 19 nt, Homo sapiens
  misc_RNA (1)...(19): siRNA sense strand
cgacgcaugcaguacuuug

SEQ ID NO: 31158 - RNA, 19 nt, Homo sapiens
  misc_RNA (1)...(19): siRNA sense strand
cccugaaggugcagcagaa

SEQ ID NO: 31159 - RNA, 19 nt, Homo sapiens
  misc_RNA (1)...(19): siRNA sense strand
ccaaacccaagaagucugu

SEQ ID NO: 31160 - RNA, 19 nt, Homo sapiens
  misc_RNA (1)...(19): siRNA sense strand
agaaggacgcggugaacga

SEQ ID NO: 31161 - RNA, 19 nt, Homo sapiens
  misc_RNA (1)...(19): siRNA sense strand
cgcggaagccuuacgaugu

SEQ ID NO: 31162 - RNA, 19 nt, Homo sapiens
  misc_RNA (1)...(19): siRNA sense strand
uaaggaagagcccaacacu

SEQ ID NO: 31163 - RNA, 19 nt, Homo sapiens
  misc_RNA (1)...(19): siRNA sense strand
ggugcuaugcugccgagaa

SEQ ID NO: 31164 - RNA, 19 nt, Homo sapiens
  misc_RNA (1)...(19): siRNA sense strand
caagaagucugugguggua

SEQ ID NO: 31165 - RNA, 19 nt, Homo sapiens
  misc_RNA (1)...(19): siRNA sense strand
gagagaagaugcucacagu

SEQ ID NO: 31166 - RNA, 19 nt, Homo sapiens
  misc_RNA (1)...(19): siRNA sense strand
gcaacacccugcccaccua

SEQ ID NO: 31167 - RNA, 19 nt, Homo sapiens
  misc_RNA (1)...(19): siRNA sense strand
gggaagcccucacuguuca

SEQ ID NO: 31168 - RNA, 19 nt, Homo sapiens
  misc_RNA (1)...(19): siRNA sense strand
gcggaagccuuacgaugug

SEQ ID NO: 31169 - RNA, 19 nt, Homo sapiens
  misc_RNA (1)...(19): siRNA sense strand
agaagucuguggugguaaa

SEQ ID NO: 31170 - RNA, 19 nt, Homo sapiens
  misc_RNA (1)...(19): siRNA sense strand
gcccaacacugcuggaagu

SEQ ID NO: 31171 - RNA, 19 nt, Homo sapiens
  misc_RNA (1)...(19): siRNA sense strand
caccaucgggccaccauua

SEQ ID NO: 31172 - RNA, 19 nt, Homo sapiens
  misc_RNA (1)...(19): siRNA sense strand
guucaucuccgucucagaa

SEQ ID NO: 31173 - RNA, 19 nt, Homo sapiens
  misc_RNA (1)...(19): siRNA sense strand
gagccacacucugcuguca

SEQ ID NO: 31174 - RNA, 19 nt, Homo sapiens
  misc_RNA (1)...(19): siRNA sense strand
gaaccgaguagaagacaag

SEQ ID NO: 31175 - RNA, 19 nt, Homo sapiens
  misc_RNA (1)...(19): siRNA sense strand
caucuucuccucguacuuu

SEQ ID NO: 31176 - RNA, 19 nt, Homo sapiens
  misc_RNA (1)...(19): siRNA sense strand
gaagugagcaugccccauu

SEQ ID NO: 31177 - RNA, 19 nt, Homo sapiens
  misc_RNA (1)...(19): siRNA sense strand
gggacgucauugagcagua

SEQ ID NO: 31178 - RNA, 19 nt, Homo sapiens
  misc_RNA (1)...(19): siRNA sense strand
aguucaagcuggacaaaga

SEQ ID NO: 31179 - RNA, 19 nt, Homo sapiens
  misc_RNA (1)...(19): siRNA sense strand
caagaagaaauuccagcaa

SEQ ID NO: 31180 - RNA, 19 nt, Homo sapiens
  misc_RNA (1)...(19): siRNA sense strand
gcaaggaucgcggcagcaa

SEQ ID NO: 31181 - RNA, 19 nt, Homo sapiens
  misc_RNA (1)...(19): siRNA sense strand
gaagcccauuuccaucauc

SEQ ID NO: 31182 - RNA, 19 nt, Homo sapiens
  misc_RNA (1)...(19): siRNA sense strand
ggacgucauugagcaguac

SEQ ID NO: 31183 - RNA, 19 nt, Homo sapiens
  misc_RNA (1)...(19): siRNA sense strand
cgacggcuaugacaguucu

SEQ ID NO: 31184 - RNA, 19 nt, Homo sapiens
  misc_RNA (1)...(19): siRNA sense strand
gcugauaaccacccuguac

SEQ ID NO: 31185 - RNA, 19 nt, Homo sapiens
  misc_RNA (1)...(19): siRNA sense strand
agucuguggugguaaagaa

SEQ ID NO: 31186 - RNA, 19 nt, Homo sapiens
  misc_RNA (1)...(19): siRNA sense strand
ucucacagcugcgggaaca

SEQ ID NO: 31187 - RNA, 19 nt, Homo sapiens
  misc_RNA (1)...(19): siRNA sense strand
gauaaccacccuguacauc

SEQ ID NO: 31188 - RNA, 19 nt, Homo sapiens
  misc_RNA (1)...(19): siRNA sense strand
agcaagcgcggaagccuua

SEQ ID NO: 31189 - RNA, 19 nt, Homo sapiens
  misc_RNA (1)...(19): siRNA sense strand
gugcuaugcugccgagaac

SEQ ID NO: 31190 - RNA, 19 nt, Homo sapiens
  misc_RNA (1)...(19): siRNA sense strand
ugacacccaucacccacau

SEQ ID NO: 31191 - RNA, 19 nt, Homo sapiens
  misc_RNA (1)...(19): siRNA sense strand
gcguggaguucggcagcua

SEQ ID NO: 31192 - RNA, 19 nt, Homo sapiens
  misc_RNA (1)...(19): siRNA sense strand
cgucgacccugagcucuuc

SEQ ID NO: 31193 - RNA, 19 nt, Homo sapiens
  misc_RNA (1)...(19): siRNA sense strand
gcacuucaaccggcagauc

SEQ ID NO: 31194 - RNA, 19 nt, Homo sapiens
  misc_RNA (1)...(19): siRNA sense strand
guccuggucugccucaucu

SEQ ID NO: 31195 - RNA, 19 nt, Homo sapiens
  misc_RNA (1)...(19): siRNA sense strand
caagcuggacaaagacaau

SEQ ID NO: 31196 - RNA, 19 nt, Homo sapiens
  misc_RNA (1)...(19): siRNA sense strand
uuguguaccuggcugagaa

SEQ ID NO: 31197 - RNA, 19 nt, Homo sapiens
  misc_RNA (1)...(19): siRNA sense strand
cgacgcaugcaguacuuug

SEQ ID NO: 31198 - RNA, 19 nt, Homo sapiens
  misc_RNA (1)...(19): siRNA sense strand
cccugaaggugcagcagaa

SEQ ID NO: 31199 - RNA, 19 nt, Homo sapiens
  misc_RNA (1)...(19): siRNA sense strand
ccaaacccaagaagucugu

SEQ ID NO: 31200 - RNA, 19 nt, Homo sapiens
  misc_RNA (1)...(19): siRNA sense strand
agaaggacgcggugaacga

SEQ ID NO: 31201 - RNA, 19 nt, Homo sapiens
  misc_RNA (1)...(19): siRNA sense strand
cgcggaagccuuacgaugu

SEQ ID NO: 31202 - RNA, 19 nt, Homo sapiens
  misc_RNA (1)...(19): siRNA sense strand
uaaggaagagcccaacacu

SEQ ID NO: 31203 - RNA, 19 nt, Homo sapiens
  misc_RNA (1)...(19): siRNA sense strand
ggugcuaugcugccgagaa

SEQ ID NO: 31204 - RNA, 19 nt, Homo sapiens
  misc_RNA (1)...(19): siRNA sense strand
gcacucgaacgacccauuc

SEQ ID NO: 31205 - RNA, 19 nt, Homo sapiens
  misc_RNA (1)...(19): siRNA sense strand
gcggugacgcccuuucuga

SEQ ID NO: 31206 - RNA, 19 nt, Homo sapiens
  misc_RNA (1)...(19): siRNA sense strand
ucagcaggguggcaacaug

SEQ ID NO: 31207 - RNA, 19 nt, Homo sapiens
  misc_RNA (1)...(19): siRNA sense strand
uagaacaacccaacacaca

SEQ ID NO: 31208 - RNA, 19 nt, Homo sapiens
  misc_RNA (1)...(19): siRNA sense strand
agaaggacaaggccuaugu

SEQ ID NO: 31209 - RNA, 19 nt, Homo sapiens
  misc_RNA (1)...(19): siRNA sense strand
ccucuacguccucauggua

SEQ ID NO: 31210 - RNA, 19 nt, Homo sapiens
  misc_RNA (1)...(19): siRNA sense strand
ugaaaaccaucuggccaua

SEQ ID NO: 31211 - RNA, 19 nt, Homo sapiens
  misc_RNA (1)...(19): siRNA sense strand
aaaaccaucuggccauaga

SEQ ID NO: 31212 - RNA, 19 nt, Homo sapiens
  misc_RNA (1)...(19): siRNA sense strand
gucgugcuaugucguugaa

SEQ ID NO: 31213 - RNA, 19 nt, Homo sapiens
  misc_RNA (1)...(19): siRNA sense strand
cauagaacaacccaacaca

SEQ ID NO: 31214 - RNA, 19 nt, Homo sapiens
  misc_RNA (1)...(19): siRNA sense strand
gggauucuucggcuucuuc

SEQ ID NO: 31215 - RNA, 19 nt, Homo sapiens
  misc_RNA (1)...(19): siRNA sense strand
cuacauccgcuccaagaag

SEQ ID NO: 31216 - RNA, 19 nt, Homo sapiens
  misc_RNA (1)...(19): siRNA sense strand
ugacgcccuuucugaccaa

SEQ ID NO: 31217 - RNA, 19 nt, Homo sapiens
  misc_RNA (1)...(19): siRNA sense strand
cuacaggucgugcuauguc

SEQ ID NO: 31218 - RNA, 19 nt, Homo sapiens
  misc_RNA (1)...(19): siRNA sense strand
gaucaucuaccaugucauu

SEQ ID NO: 31219 - RNA, 19 nt, Homo sapiens
  misc_RNA (1)...(19): siRNA sense strand
gaucaacgccaucaugcuu

SEQ ID NO: 31220 - RNA, 19 nt, Homo sapiens
  misc_RNA (1)...(19): siRNA sense strand
ccacacacauugcucaucu

SEQ ID NO: 31221 - RNA, 19 nt, Homo sapiens
  misc_RNA (1)...(19): siRNA sense strand
ccuccuaccuggccgauga

SEQ ID NO: 31222 - RNA, 19 nt, Homo sapiens
  misc_RNA (1)...(19): siRNA sense strand
ucaaguggccacacacauu

SEQ ID NO: 31223 - RNA, 19 nt, Homo sapiens
  misc_RNA (1)...(19): siRNA sense strand
caaguggccacacacauug

SEQ ID NO: 31224 - RNA, 19 nt, Homo sapiens
  misc_RNA (1)...(19): siRNA sense strand
caucuaccaugucauugau

SEQ ID NO: 31225 - RNA, 19 nt, Homo sapiens
  misc_RNA (1)...(19): siRNA sense strand
gaccucaaguggccacaca

SEQ ID NO: 31226 - RNA, 19 nt, Homo sapiens
  misc_RNA (1)...(19): siRNA sense strand
ggaccacagccuacuggaa

SEQ ID NO: 31227 - RNA, 19 nt, Homo sapiens
  misc_RNA (1)...(19): siRNA sense strand
ccaagaaaggcaacugcaa

SEQ ID NO: 31228 - RNA, 19 nt, Homo sapiens
  misc_RNA (1)...(19): siRNA sense strand
acacauugcucaucuucac

SEQ ID NO: 31229 - RNA, 19 nt, Homo sapiens
  misc_RNA (1)...(19): siRNA sense strand
gcacugcugagcccugugu

SEQ ID NO: 31230 - RNA, 19 nt, Homo sapiens
  misc_RNA (1)...(19): siRNA sense strand
uugcucaucuucaccaugu

SEQ ID NO: 31231 - RNA, 19 nt, Homo sapiens
  misc_RNA (1)...(19): siRNA sense strand
cugaucaucuaccauguca

SEQ ID NO: 31232 - RNA, 19 nt, Homo sapiens
  misc_RNA (1)...(19): siRNA sense strand
ucaccagcauccacuccuu

SEQ ID NO: 31233 - RNA, 19 nt, Homo sapiens
  misc_RNA (1)...(19): siRNA sense strand
gacguuacucuguggacua

SEQ ID NO: 31234 - RNA, 19 nt, Homo sapiens
  misc_RNA (1)...(19): siRNA sense strand
gagguccaagugacuauug

SEQ ID NO: 31235 - RNA, 19 nt, Homo sapiens
  misc_RNA (1)...(19): siRNA sense strand
uggcaacaccgucaaagug

SEQ ID NO: 31236 - RNA, 19 nt, Homo sapiens
  misc_RNA (1)...(19): siRNA sense strand
cagcaagcaugcggugauc

SEQ ID NO: 31237 - RNA, 19 nt, Homo sapiens
  misc_RNA (1)...(19): siRNA sense strand
ucaucuaccaugucauuga

SEQ ID NO: 31238 - RNA, 19 nt, Homo sapiens
  misc_RNA (1)...(19): siRNA sense strand
ggaggacggacguuacucu

SEQ ID NO: 31239 - RNA, 19 nt, Homo sapiens
  misc_RNA (1)...(19): siRNA sense strand
gaccuccgcaagagcauga

SEQ ID NO: 31240 - RNA, 19 nt, Homo sapiens
  misc_RNA (1)...(19): siRNA sense strand
cuaccuggccgaugagauc

SEQ ID NO: 31241 - RNA, 19 nt, Homo sapiens
  misc_RNA (1)...(19): siRNA sense strand
gcgcuuugugcccauugua

SEQ ID NO: 31242 - RNA, 19 nt, Homo sapiens
  misc_RNA (1)...(19): siRNA sense strand
ccaccaggaccucgagauc

SEQ ID NO: 31243 - RNA, 19 nt, Homo sapiens
  misc_RNA (1)...(19): siRNA sense strand
gcagaaagcucagccagaa

SEQ ID NO: 31244 - RNA, 19 nt, Homo sapiens
  misc_RNA (1)...(19): siRNA sense strand
ggagaaagccuuccaguuc

SEQ ID NO: 31245 - RNA, 19 nt, Homo sapiens
  misc_RNA (1)...(19): siRNA sense strand
cagcagaucuucuuucgaa

SEQ ID NO: 31246 - RNA, 19 nt, Homo sapiens
  misc_RNA (1)...(19): siRNA sense strand
ggacgucaaugcuuacuau

SEQ ID NO: 31247 - RNA, 19 nt, Homo sapiens
  misc_RNA (1)...(19): siRNA sense strand
ccaaagagaccaauaauuc

SEQ ID NO: 31248 - RNA, 19 nt, Homo sapiens
  misc_RNA (1)...(19): siRNA sense strand
guaaauggacuuccuuaaa

SEQ ID NO: 31249 - RNA, 19 nt, Homo sapiens
  misc_RNA (1)...(19): siRNA sense strand
cgacaagaauacaacgaua

SEQ ID NO: 31250 - RNA, 19 nt, Homo sapiens
  misc_RNA (1)...(19): siRNA sense strand
gaagugcugccaugaaauu

SEQ ID NO: 31251 - RNA, 19 nt, Homo sapiens
  misc_RNA (1)...(19): siRNA sense strand
gcgcaucucugguaaaugg

SEQ ID NO: 31252 - RNA, 19 nt, Homo sapiens
  misc_RNA (1)...(19): siRNA sense strand
uaaauggacuuccuuaaac

SEQ ID NO: 31253 - RNA, 19 nt, Homo sapiens
  misc_RNA (1)...(19): siRNA sense strand
ucagaaaccuucccuggau

SEQ ID NO: 31254 - RNA, 19 nt, Homo sapiens
  misc_RNA (1)...(19): siRNA sense strand
gcccagaucuuucgggaau

SEQ ID NO: 31255 - RNA, 19 nt, Homo sapiens
  misc_RNA (1)...(19): siRNA sense strand
ccgaagugcugccaugaaa

SEQ ID NO: 31256 - RNA, 19 nt, Homo sapiens
  misc_RNA (1)...(19): siRNA sense strand
gaacauggcccaggacaag

SEQ ID NO: 31257 - RNA, 19 nt, Homo sapiens
  misc_RNA (1)...(19): siRNA sense strand
caagcaaggugcaagaaca

SEQ ID NO: 31258 - RNA, 19 nt, Homo sapiens
  misc_RNA (1)...(19): siRNA sense strand
gcagaaccuccuucaauga

SEQ ID NO: 31259 - RNA, 19 nt, Homo sapiens
  misc_RNA (1)...(19): siRNA sense strand
gggaauaccugacuuaccu

SEQ ID NO: 31260 - RNA, 19 nt, Homo sapiens
  misc_RNA (1)...(19): siRNA sense strand
ggauacacuugccauugaa

SEQ ID NO: 31261 - RNA, 19 nt, Homo sapiens
  misc_RNA (1)...(19): siRNA sense strand
ccauuucccuuucuucaga

SEQ ID NO: 31262 - RNA, 19 nt, Homo sapiens
  misc_RNA (1)...(19): siRNA sense strand
gugcugccaugaaauuauu

SEQ ID NO: 31263 - RNA, 19 nt, Homo sapiens
  misc_RNA (1)...(19): siRNA sense strand
caagagagcacuccagaag

SEQ ID NO: 31264 - RNA, 19 nt, Homo sapiens
  misc_RNA (1)...(19): siRNA sense strand
gcaccgacuucuucagcuu

SEQ ID NO: 31265 - RNA, 19 nt, Homo sapiens
  misc_RNA (1)...(19): siRNA sense strand
ccucaucacucgccucaga

SEQ ID NO: 31266 - RNA, 19 nt, Homo sapiens
  misc_RNA (1)...(19): siRNA sense strand
gcagagccacaugaucuua

SEQ ID NO: 31267 - RNA, 19 nt, Homo sapiens
  misc_RNA (1)...(19): siRNA sense strand
uggauacacuugccauuga

SEQ ID NO: 31268 - RNA, 19 nt, Homo sapiens
  misc_RNA (1)...(19): siRNA sense strand
caagcaagaucaagaacag

SEQ ID NO: 31269 - RNA, 19 nt, Homo sapiens
  misc_RNA (1)...(19): siRNA sense strand
agagaaugcugcagacguu

SEQ ID NO: 31270 - RNA, 19 nt, Homo sapiens
  misc_RNA (1)...(19): siRNA sense strand
uggaggagaugcugcuaaa

SEQ ID NO: 31271 - RNA, 19 nt, Homo sapiens
  misc_RNA (1)...(19): siRNA sense strand
ccaucgcgcugcaggcaua

SEQ ID NO: 31272 - RNA, 19 nt, Homo sapiens
  misc_RNA (1)...(19): siRNA sense strand
ugagacaucuguguguuug

SEQ ID NO: 31273 - RNA, 19 nt, Homo sapiens
  misc_RNA (1)...(19): siRNA sense strand
ugaaucagcugggaaccuu

SEQ ID NO: 31274 - RNA, 19 nt, Homo sapiens
  misc_RNA (1)...(19): siRNA sense strand
uagcagaaccuccuucaau

SEQ ID NO: 31275 - RNA, 19 nt, Homo sapiens
  misc_RNA (1)...(19): siRNA sense strand
uucaggagcuugccacaaa

SEQ ID NO: 31276 - RNA, 19 nt, Homo sapiens
  misc_RNA (1)...(19): siRNA sense strand
cuugggacgucaaugcuua

SEQ ID NO: 31277 - RNA, 19 nt, Homo sapiens
  misc_RNA (1)...(19): siRNA sense strand
gauagaccagccagaguuu

SEQ ID NO: 31278 - RNA, 19 nt, Homo sapiens
  misc_RNA (1)...(19): siRNA sense strand
agaacacucuuccuuguca

SEQ ID NO: 31279 - RNA, 19 nt, Homo sapiens
  misc_RNA (1)...(19): siRNA sense strand
ugacguggaauauuugaaa

SEQ ID NO: 31280 - RNA, 19 nt, Homo sapiens
  misc_RNA (1)...(19): siRNA sense strand
gaacacucuuccuugucaa

SEQ ID NO: 31281 - RNA, 19 nt, Homo sapiens
  misc_RNA (1)...(19): siRNA sense strand
gggccaaagagaccaauaa

SEQ ID NO: 31282 - RNA, 19 nt, Homo sapiens
  misc_RNA (1)...(19): siRNA sense strand
ugacagcuauccugauuuu

SEQ ID NO: 31283 - RNA, 19 nt, Homo sapiens
  misc_RNA (1)...(19): siRNA sense strand
ggaccaaagugaggaagag

SEQ ID NO: 31284 - RNA, 19 nt, Homo sapiens
  misc_RNA (1)...(19): siRNA sense strand
gacaagaauacaacgauau

SEQ ID NO: 31285 - RNA, 19 nt, Homo sapiens
  misc_RNA (1)...(19): siRNA sense strand
gguaaauggacuuccuuaa

SEQ ID NO: 31286 - RNA, 19 nt, Homo sapiens
  misc_RNA (1)...(19): siRNA sense strand
gagcuggcccgacaagaau

SEQ ID NO: 31287 - RNA, 19 nt, Homo sapiens
  misc_RNA (1)...(19): siRNA sense strand
caaagagaccaauaauucu

SEQ ID NO: 31288 - RNA, 19 nt, Homo sapiens
  misc_RNA (1)...(19): siRNA sense strand
cuucacggcuguuccaguu

SEQ ID NO: 31289 - RNA, 19 nt, Homo sapiens
  misc_RNA (1)...(19): siRNA sense strand
gccaaagagaccaauaauu

SEQ ID NO: 31290 - RNA, 19 nt, Homo sapiens
  misc_RNA (1)...(19): siRNA sense strand
auacaacgauauacagcuu

SEQ ID NO: 31291 - RNA, 19 nt, Homo sapiens
  misc_RNA (1)...(19): siRNA sense strand
ugaaugaggagacccagaa

SEQ ID NO: 31292 - RNA, 19 nt, Homo sapiens
  misc_RNA (1)...(19): siRNA sense strand
agagagcacuccagaagag

SEQ ID NO: 31293 - RNA, 19 nt, Homo sapiens
  misc_RNA (1)...(19): siRNA sense strand
uacaacuccugcauggaua

SEQ ID NO: 31294 - RNA, 19 nt, Homo sapiens
  misc_RNA (1)...(19): siRNA sense strand
caucuucuaccagcucuua

SEQ ID NO: 31295 - RNA, 19 nt, Homo sapiens
  misc_RNA (1)...(19): siRNA sense strand
ccagagccgugaacuuugg

SEQ ID NO: 31296 - RNA, 19 nt, Homo sapiens
  misc_RNA (1)...(19): siRNA sense strand
ucacggcuguuccaguuuc

SEQ ID NO: 31297 - RNA, 19 nt, Homo sapiens
  misc_RNA (1)...(19): siRNA sense strand
cgucaaugcuuacuauucg

SEQ ID NO: 31298 - RNA, 19 nt, Homo sapiens
  misc_RNA (1)...(19): siRNA sense strand
caaccaugcccuccaggaa

SEQ ID NO: 31299 - RNA, 19 nt, Homo sapiens
  misc_RNA (1)...(19): siRNA sense strand
gcuggcgcaucucugguaa

SEQ ID NO: 31300 - RNA, 19 nt, Homo sapiens
  misc_RNA (1)...(19): siRNA sense strand
gcuggcggcuuuguuuguu

SEQ ID NO: 31301 - RNA, 19 nt, Homo sapiens
  misc_RNA (1)...(19): siRNA sense strand
ucgaccagcucaaggaaau

SEQ ID NO: 31302 - RNA, 19 nt, Homo sapiens
  misc_RNA (1)...(19): siRNA sense strand
gagcuugccacaaagaaca

SEQ ID NO: 31303 - RNA, 19 nt, Homo sapiens
  misc_RNA (1)...(19): siRNA sense strand
agcagaaccuccuucaaug

SEQ ID NO: 31304 - RNA, 19 nt, Homo sapiens
  misc_RNA (1)...(19): siRNA sense strand
ucccagagccgugaacuuu

SEQ ID NO: 31305 - RNA, 19 nt, Homo sapiens
  misc_RNA (1)...(19): siRNA sense strand
cuacaacuccugcauggau

SEQ ID NO: 31306 - RNA, 19 nt, Homo sapiens
  misc_RNA (1)...(19): siRNA sense strand
gcgccauuaugcugccuuu

SEQ ID NO: 31307 - RNA, 19 nt, Homo sapiens
  misc_RNA (1)...(19): siRNA sense strand
auaccugacuuaccugaau

SEQ ID NO: 31308 - RNA, 19 nt, Homo sapiens
  misc_RNA (1)...(19): siRNA sense strand
guauggccauuucccuuuc

SEQ ID NO: 31309 - RNA, 19 nt, Homo sapiens
  misc_RNA (1)...(19): siRNA sense strand
agacaucuguguguuugga

SEQ ID NO: 31310 - RNA, 19 nt, Homo sapiens
  misc_RNA (1)...(19): siRNA sense strand
aaccuucccuggaugaaug

SEQ ID NO: 31311 - RNA, 19 nt, Homo sapiens
  misc_RNA (1)...(19): siRNA sense strand
caagaucaagaacagaaga

SEQ ID NO: 31312 - RNA, 19 nt, Homo sapiens
  misc_RNA (1)...(19): siRNA sense strand
acgcugagacuucugauga

SEQ ID NO: 31313 - RNA, 19 nt, Homo sapiens
  misc_RNA (1)...(19): siRNA sense strand
cauccugccucuccacaca

SEQ ID NO: 31314 - RNA, 19 nt, Homo sapiens
  misc_RNA (1)...(19): siRNA sense strand
gagucaguauggccauuuc

SEQ ID NO: 31315 - RNA, 19 nt, Homo sapiens
  misc_RNA (1)...(19): siRNA sense strand
gaagcuaugcccaggugau

SEQ ID NO: 31316 - RNA, 19 nt, Homo sapiens
  misc_RNA (1)...(19): siRNA sense strand
gaggagaugcugcuaaagc

SEQ ID NO: 31317 - RNA, 19 nt, Homo sapiens
  misc_RNA (1)...(19): siRNA sense strand
caccagucauccagauaga

SEQ ID NO: 31318 - RNA, 19 nt, Homo sapiens
  misc_RNA (1)...(19): siRNA sense strand
acacaccagucauccagau

SEQ ID NO: 31319 - RNA, 19 nt, Homo sapiens
  misc_RNA (1)...(19): siRNA sense strand
ccuccgagcuagaauuguc

SEQ ID NO: 31320 - RNA, 19 nt, Homo sapiens
  misc_RNA (1)...(19): siRNA sense strand
ggagacaggcacguucuuc

SEQ ID NO: 31321 - RNA, 19 nt, Homo sapiens
  misc_RNA (1)...(19): siRNA sense strand
gaaacugcgggaacugaca

SEQ ID NO: 31322 - RNA, 19 nt, Homo sapiens
  misc_RNA (1)...(19): siRNA sense strand
ggccaaagagaccaauaau

SEQ ID NO: 31323 - RNA, 19 nt, Homo sapiens
  misc_RNA (1)...(19): siRNA sense strand
uggcgcaucucugguaaau

SEQ ID NO: 31324 - RNA, 19 nt, Homo sapiens
  misc_RNA (1)...(19): siRNA sense strand
gcugagacuucugaugagu

SEQ ID NO: 31325 - RNA, 19 nt, Homo sapiens
  misc_RNA (1)...(19): siRNA sense strand
gugagacaucuguguguuu

SEQ ID NO: 31326 - RNA, 19 nt, Homo sapiens
  misc_RNA (1)...(19): siRNA sense strand
aaauggacuuccuuaaacu

SEQ ID NO: 31327 - RNA, 19 nt, Homo sapiens
  misc_RNA (1)...(19): siRNA sense strand
ccagaucuuucgggaauac

SEQ ID NO: 31328 - RNA, 19 nt, Homo sapiens
  misc_RNA (1)...(19): siRNA sense strand
uuaugcugccuuuccauua

SEQ ID NO: 31329 - RNA, 19 nt, Homo sapiens
  misc_RNA (1)...(19): siRNA sense strand
cuagaauuguccagagcuu

SEQ ID NO: 31330 - RNA, 19 nt, Homo sapiens
  misc_RNA (1)...(19): siRNA sense strand
ccucaagcaagaucaagaa

SEQ ID NO: 31331 - RNA, 19 nt, Homo sapiens
  misc_RNA (1)...(19): siRNA sense strand
ugacucccucacauucuua

SEQ ID NO: 31332 - RNA, 19 nt, Homo sapiens
  misc_RNA (1)...(19): siRNA sense strand
cgagcuuccugcagucugu

SEQ ID NO: 31333 - RNA, 19 nt, Homo sapiens
  misc_RNA (1)...(19): siRNA sense strand
uagaccagccagaguuuga

SEQ ID NO: 31334 - RNA, 19 nt, Homo sapiens
  misc_RNA (1)...(19): siRNA sense strand
agagcuggcccgacaagaa

SEQ ID NO: 31335 - RNA, 19 nt, Homo sapiens
  misc_RNA (1)...(19): siRNA sense strand
gggcaagcucuuccagaug

SEQ ID NO: 31336 - RNA, 19 nt, Homo sapiens
  misc_RNA (1)...(19): siRNA sense strand
agauagaccagccagaguu

SEQ ID NO: 31337 - RNA, 19 nt, Homo sapiens
  misc_RNA (1)...(19): siRNA sense strand
cagaaacugcgggaacuga

SEQ ID NO: 31338 - RNA, 19 nt, Homo sapiens
  misc_RNA (1)...(19): siRNA sense strand
gccagaaacugcgggaacu

SEQ ID NO: 31339 - RNA, 19 nt, Homo sapiens
  misc_RNA (1)...(19): siRNA sense strand
ucccucacauucuuagaga

SEQ ID NO: 31340 - RNA, 19 nt, Homo sapiens
  misc_RNA (1)...(19): siRNA sense strand
ccaagagagcacuccagaa

SEQ ID NO: 31341 - RNA, 19 nt, Homo sapiens
  misc_RNA (1)...(19): siRNA sense strand
cccacgagcuguugcacau

SEQ ID NO: 31342 - RNA, 19 nt, Homo sapiens
  misc_RNA (1)...(19): siRNA sense strand
gaaaccuucccuggaugaa

SEQ ID NO: 31343 - RNA, 19 nt, Homo sapiens
  misc_RNA (1)...(19): siRNA sense strand
gcaaagauguggccaagca

SEQ ID NO: 31344 - RNA, 19 nt, Homo sapiens
  misc_RNA (1)...(19): siRNA sense strand
gcaggaagcacugagauuc

SEQ ID NO: 31345 - RNA, 19 nt, Homo sapiens
  misc_RNA (1)...(19): siRNA sense strand
cuacagacuuugagaaggu

SEQ ID NO: 31346 - RNA, 19 nt, Homo sapiens
  misc_RNA (1)...(19): siRNA sense strand
aaggaggacucggagauaa

SEQ ID NO: 31347 - RNA, 19 nt, Homo sapiens
  misc_RNA (1)...(19): siRNA sense strand
gaucugacccaguucaagu

SEQ ID NO: 31348 - RNA, 19 nt, Homo sapiens
  misc_RNA (1)...(19): siRNA sense strand
uaaggaggacucggagaua

SEQ ID NO: 31349 - RNA, 19 nt, Homo sapiens
  misc_RNA (1)...(19): siRNA sense strand
caucggagcaggugaagau

SEQ ID NO: 31350 - RNA, 19 nt, Homo sapiens
  misc_RNA (1)...(19): siRNA sense strand
cuacggagacgugguguuu

SEQ ID NO: 31351 - RNA, 19 nt, Homo sapiens
  misc_RNA (1)...(19): siRNA sense strand
gaagaugcugcagcggaua

SEQ ID NO: 31352 - RNA, 19 nt, Homo sapiens
  misc_RNA (1)...(19): siRNA sense strand
gggcccugauggcaaauug

SEQ ID NO: 31353 - RNA, 19 nt, Homo sapiens
  misc_RNA (1)...(19): siRNA sense strand
acucggagauaagguguuu

SEQ ID NO: 31354 - RNA, 19 nt, Homo sapiens
  misc_RNA (1)...(19): siRNA sense strand
gaaaggggcugugcuuguc

SEQ ID NO: 31355 - RNA, 19 nt, Homo sapiens
  misc_RNA (1)...(19): siRNA sense strand
ccugggcccugauggcaaa

SEQ ID NO: 31356 - RNA, 19 nt, Homo sapiens
  misc_RNA (1)...(19): siRNA sense strand
ucagccugguggacaagua

SEQ ID NO: 31357 - RNA, 19 nt, Homo sapiens
  misc_RNA (1)...(19): siRNA sense strand
gcggauagacgcacacaac

SEQ ID NO: 31358 - RNA, 19 nt, Homo sapiens
  misc_RNA (1)...(19): siRNA sense strand
ggagacgugguguuuguca

SEQ ID NO: 31359 - RNA, 19 nt, Homo sapiens
  misc_RNA (1)...(19): siRNA sense strand
ugacccaguucaaguggau

SEQ ID NO: 31360 - RNA, 19 nt, Homo sapiens
  misc_RNA (1)...(19): siRNA sense strand
agguugaucugacccaguu

SEQ ID NO: 31361 - RNA, 19 nt, Homo sapiens
  misc_RNA (1)...(19): siRNA sense strand
acggagacgugguguuugu

SEQ ID NO: 31362 - RNA, 19 nt, Homo sapiens
  misc_RNA (1)...(19): siRNA sense strand
gcuggagacaccuucaaug

SEQ ID NO: 31363 - RNA, 19 nt, Homo sapiens
  misc_RNA (1)...(19): siRNA sense strand
caaugccuccgucaucuuc

SEQ ID NO: 31364 - RNA, 19 nt, Homo sapiens
  misc_RNA (1)...(19): siRNA sense strand
ucaucagccugguggacaa

SEQ ID NO: 31365 - RNA, 19 nt, Homo sapiens
  misc_RNA (1)...(19): siRNA sense strand
gagcuggagacaccuucaa

SEQ ID NO: 31366 - RNA, 19 nt, Homo sapiens
  misc_RNA (1)...(19): siRNA sense strand
ggaaaggggcugugcuugu

SEQ ID NO: 31367 - RNA, 19 nt, Homo sapiens
  misc_RNA (1)...(19): siRNA sense strand
cuaaggaggacucggagau

SEQ ID NO: 31368 - RNA, 19 nt, Homo sapiens
  misc_RNA (1)...(19): siRNA sense strand
gcaaagauguggccaagca

SEQ ID NO: 31369 - RNA, 19 nt, Homo sapiens
  misc_RNA (1)...(19): siRNA sense strand
gcaggaagcacugagauuc

SEQ ID NO: 31370 - RNA, 19 nt, Homo sapiens
  misc_RNA (1)...(19): siRNA sense strand
cuacagacuuugagaaggu

SEQ ID NO: 31371 - RNA, 19 nt, Homo sapiens
  misc_RNA (1)...(19): siRNA sense strand
aaggaggacucggagauaa

SEQ ID NO: 31372 - RNA, 19 nt, Homo sapiens
  misc_RNA (1)...(19): siRNA sense strand
gaucugacccaguucaagu

SEQ ID NO: 31373 - RNA, 19 nt, Homo sapiens
  misc_RNA (1)...(19): siRNA sense strand
uaaggaggacucggagaua

SEQ ID NO: 31374 - RNA, 19 nt, Homo sapiens
  misc_RNA (1)...(19): siRNA sense strand
caucggagcaggugaagau

SEQ ID NO: 31375 - RNA, 19 nt, Homo sapiens
  misc_RNA (1)...(19): siRNA sense strand
cuacggagacgugguguuu

SEQ ID NO: 31376 - RNA, 19 nt, Homo sapiens
  misc_RNA (1)...(19): siRNA sense strand
gaagaugcugcagcggaua

SEQ ID NO: 31377 - RNA, 19 nt, Homo sapiens
  misc_RNA (1)...(19): siRNA sense strand
gggcccugauggcaaauug

SEQ ID NO: 31378 - RNA, 19 nt, Homo sapiens
  misc_RNA (1)...(19): siRNA sense strand
acucggagauaagguguuu

SEQ ID NO: 31379 - RNA, 19 nt, Homo sapiens
  misc_RNA (1)...(19): siRNA sense strand
gaaaggggcugugcuuguc

SEQ ID NO: 31380 - RNA, 19 nt, Homo sapiens
  misc_RNA (1)...(19): siRNA sense strand
ccugggcccugauggcaaa

SEQ ID NO: 31381 - RNA, 19 nt, Homo sapiens
  misc_RNA (1)...(19): siRNA sense strand
ucagccugguggacaagua

SEQ ID NO: 31382 - RNA, 19 nt, Homo sapiens
  misc_RNA (1)...(19): siRNA sense strand
gcggauagacgcacacaac

SEQ ID NO: 31383 - RNA, 19 nt, Homo sapiens
  misc_RNA (1)...(19): siRNA sense strand
ggagacgugguguuuguca

SEQ ID NO: 31384 - RNA, 19 nt, Homo sapiens
  misc_RNA (1)...(19): siRNA sense strand
ugacccaguucaaguggau

SEQ ID NO: 31385 - RNA, 19 nt, Homo sapiens
  misc_RNA (1)...(19): siRNA sense strand
agguugaucugacccaguu

SEQ ID NO: 31386 - RNA, 19 nt, Homo sapiens
  misc_RNA (1)...(19): siRNA sense strand
acggagacgugguguuugu

SEQ ID NO: 31387 - RNA, 19 nt, Homo sapiens
  misc_RNA (1)...(19): siRNA sense strand
gcuggagacaccuucaaug

SEQ ID NO: 31388 - RNA, 19 nt, Homo sapiens
  misc_RNA (1)...(19): siRNA sense strand
caaugccuccgucaucuuc

SEQ ID NO: 31389 - RNA, 19 nt, Homo sapiens
  misc_RNA (1)...(19): siRNA sense strand
ucaucagccugguggacaa

SEQ ID NO: 31390 - RNA, 19 nt, Homo sapiens
  misc_RNA (1)...(19): siRNA sense strand
gagcuggagacaccuucaa

SEQ ID NO: 31391 - RNA, 19 nt, Homo sapiens
  misc_RNA (1)...(19): siRNA sense strand
ggaaaggggcugugcuugu

SEQ ID NO: 31392 - RNA, 19 nt, Homo sapiens
  misc_RNA (1)...(19): siRNA sense strand
cuaaggaggacucggagau

SEQ ID NO: 31393 - RNA, 19 nt, Homo sapiens
  misc_RNA (1)...(19): siRNA sense strand
caacacaacuuccuuauga

SEQ ID NO: 31394 - RNA, 19 nt, Homo sapiens
  misc_RNA (1)...(19): siRNA sense strand
gagaauaggcucauacaua

SEQ ID NO: 31395 - RNA, 19 nt, Homo sapiens
  misc_RNA (1)...(19): siRNA sense strand
aaagcaagcuaucuucuua

SEQ ID NO: 31396 - RNA, 19 nt, Homo sapiens
  misc_RNA (1)...(19): siRNA sense strand
ggagauaaauggaaacaau

SEQ ID NO: 31397 - RNA, 19 nt, Homo sapiens
  misc_RNA (1)...(19): siRNA sense strand
gcaggaagaucaugcagaa

SEQ ID NO: 31398 - RNA, 19 nt, Homo sapiens
  misc_RNA (1)...(19): siRNA sense strand
ccagagacaucaagaauga

SEQ ID NO: 31399 - RNA, 19 nt, Homo sapiens
  misc_RNA (1)...(19): siRNA sense strand
gaaauauccuccuuacuca

SEQ ID NO: 31400 - RNA, 19 nt, Homo sapiens
  misc_RNA (1)...(19): siRNA sense strand
aaacacggcuuaagcaauu

SEQ ID NO: 31401 - RNA, 19 nt, Homo sapiens
  misc_RNA (1)...(19): siRNA sense strand
gagaugcucugcuucugua

SEQ ID NO: 31402 - RNA, 19 nt, Homo sapiens
  misc_RNA (1)...(19): siRNA sense strand
gaacagaaccuucacugau

SEQ ID NO: 31403 - RNA, 19 nt, Homo sapiens
  misc_RNA (1)...(19): siRNA sense strand
guucagaguucuauagauu

SEQ ID NO: 31404 - RNA, 19 nt, Homo sapiens
  misc_RNA (1)...(19): siRNA sense strand
gggaagcccucaugucuga

SEQ ID NO: 31405 - RNA, 19 nt, Homo sapiens
  misc_RNA (1)...(19): siRNA sense strand
gcaauuccauuuauguguu

SEQ ID NO: 31406 - RNA, 19 nt, Homo sapiens
  misc_RNA (1)...(19): siRNA sense strand
aaccagaaauccugacuua

SEQ ID NO: 31407 - RNA, 19 nt, Homo sapiens
  misc_RNA (1)...(19): siRNA sense strand
ucagagagcaccaaucaua

SEQ ID NO: 31408 - RNA, 19 nt, Homo sapiens
  misc_RNA (1)...(19): siRNA sense strand
cgaguuggcccuagacuua

SEQ ID NO: 31409 - RNA, 19 nt, Homo sapiens
  misc_RNA (1)...(19): siRNA sense strand
ggcaugaugugcauuauug

SEQ ID NO: 31410 - RNA, 19 nt, Homo sapiens
  misc_RNA (1)...(19): siRNA sense strand
acagugacgugcacaauaa

SEQ ID NO: 31411 - RNA, 19 nt, Homo sapiens
  misc_RNA (1)...(19): siRNA sense strand
gcucauacauagaaagaga

SEQ ID NO: 31412 - RNA, 19 nt, Homo sapiens
  misc_RNA (1)...(19): siRNA sense strand
aacagaaccuucacugaua

SEQ ID NO: 31413 - RNA, 19 nt, Homo sapiens
  misc_RNA (1)...(19): siRNA sense strand
ccucaugucugaacucaaa

SEQ ID NO: 31414 - RNA, 19 nt, Homo sapiens
  misc_RNA (1)...(19): siRNA sense strand
ggcaacugcuuauggcuua

SEQ ID NO: 31415 - RNA, 19 nt, Homo sapiens
  misc_RNA (1)...(19): siRNA sense strand
acccagaagugaccaauua

SEQ ID NO: 31416 - RNA, 19 nt, Homo sapiens
  misc_RNA (1)...(19): siRNA sense strand
agaauaggcucauacauag

SEQ ID NO: 31417 - RNA, 19 nt, Homo sapiens
  misc_RNA (1)...(19): siRNA sense strand
gguaaucacaugaauauug

SEQ ID NO: 31418 - RNA, 19 nt, Homo sapiens
  misc_RNA (1)...(19): siRNA sense strand
gcaagacuucugccuauuu

SEQ ID NO: 31419 - RNA, 19 nt, Homo sapiens
  misc_RNA (1)...(19): siRNA sense strand
gaagguuguugaggagaua

SEQ ID NO: 31420 - RNA, 19 nt, Homo sapiens
  misc_RNA (1)...(19): siRNA sense strand
gauggcaccugaaagcauu

SEQ ID NO: 31421 - RNA, 19 nt, Homo sapiens
  misc_RNA (1)...(19): siRNA sense strand
gagcuguucucuuuaggaa

SEQ ID NO: 31422 - RNA, 19 nt, Homo sapiens
  misc_RNA (1)...(19): siRNA sense strand
aaucguagcuggcaugaug

SEQ ID NO: 31423 - RNA, 19 nt, Homo sapiens
  misc_RNA (1)...(19): siRNA sense strand
aaggagaucugugagaaua

SEQ ID NO: 31424 - RNA, 19 nt, Homo sapiens
  misc_RNA (1)...(19): siRNA sense strand
ggucggaucacaaagauuu

SEQ ID NO: 31425 - RNA, 19 nt, Homo sapiens
  misc_RNA (1)...(19): siRNA sense strand
agacuaaacuacaggagaa

SEQ ID NO: 31426 - RNA, 19 nt, Homo sapiens
  misc_RNA (1)...(19): siRNA sense strand
ggaaguaguagauaaagga

SEQ ID NO: 31427 - RNA, 19 nt, Homo sapiens
  misc_RNA (1)...(19): siRNA sense strand
aagcugcacuuuauaagaa

SEQ ID NO: 31428 - RNA, 19 nt, Homo sapiens
  misc_RNA (1)...(19): siRNA sense strand
ggccaugacugucgcugua

SEQ ID NO: 31429 - RNA, 19 nt, Homo sapiens
  misc_RNA (1)...(19): siRNA sense strand
ugacgucaaugcugccaua

SEQ ID NO: 31430 - RNA, 19 nt, Homo sapiens
  misc_RNA (1)...(19): siRNA sense strand
gagagcaccaaucauauuu

SEQ ID NO: 31431 - RNA, 19 nt, Homo sapiens
  misc_RNA (1)...(19): siRNA sense strand
ccaaucauauuuacuccaa

SEQ ID NO: 31432 - RNA, 19 nt, Homo sapiens
  misc_RNA (1)...(19): siRNA sense strand
gaagaaaacgugauucauu

SEQ ID NO: 31433 - RNA, 19 nt, Homo sapiens
  misc_RNA (1)...(19): siRNA sense strand
uuugggagcuguucucuuu

SEQ ID NO: 31434 - RNA, 19 nt, Homo sapiens
  misc_RNA (1)...(19): siRNA sense strand
acacgcaccugcugaaaug

SEQ ID NO: 31435 - RNA, 19 nt, Homo sapiens
  misc_RNA (1)...(19): siRNA sense strand
caagcaaauuguucagcua

SEQ ID NO: 31436 - RNA, 19 nt, Homo sapiens
  misc_RNA (1)...(19): siRNA sense strand
gagaauaagcagaaugaau

SEQ ID NO: 31437 - RNA, 19 nt, Homo sapiens
  misc_RNA (1)...(19): siRNA sense strand
uaaaggaaacgcucgacua

SEQ ID NO: 31438 - RNA, 19 nt, Homo sapiens
  misc_RNA (1)...(19): siRNA sense strand
gaagcugcacuuuauaaga

SEQ ID NO: 31439 - RNA, 19 nt, Homo sapiens
  misc_RNA (1)...(19): siRNA sense strand
cgaaugagaauaagcagaa

SEQ ID NO: 31440 - RNA, 19 nt, Homo sapiens
  misc_RNA (1)...(19): siRNA sense strand
gagcaccaaucauauuuac

SEQ ID NO: 31441 - RNA, 19 nt, Homo sapiens
  misc_RNA (1)...(19): siRNA sense strand
cuaauuaugugguuaaagg

SEQ ID NO: 31442 - RNA, 19 nt, Homo sapiens
  misc_RNA (1)...(19): siRNA sense strand
guucaaagcaggaagauca

SEQ ID NO: 31443 - RNA, 19 nt, Homo sapiens
  misc_RNA (1)...(19): siRNA sense strand
acagaaccuucacugauaa

SEQ ID NO: 31444 - RNA, 19 nt, Homo sapiens
  misc_RNA (1)...(19): siRNA sense strand
caccagcaguggaucuaua

SEQ ID NO: 31445 - RNA, 19 nt, Homo sapiens
  misc_RNA (1)...(19): siRNA sense strand
uaaaagaugugucuaguuc

SEQ ID NO: 31446 - RNA, 19 nt, Homo sapiens
  misc_RNA (1)...(19): siRNA sense strand
caucggcucugucugcauu

SEQ ID NO: 31447 - RNA, 19 nt, Homo sapiens
  misc_RNA (1)...(19): siRNA sense strand
agaauaagcagaaugaaug

SEQ ID NO: 31448 - RNA, 19 nt, Homo sapiens
  misc_RNA (1)...(19): siRNA sense strand
caacaaagagcaaauccau

SEQ ID NO: 31449 - RNA, 19 nt, Homo sapiens
  misc_RNA (1)...(19): siRNA sense strand
gauucuaaguucuacaaga

SEQ ID NO: 31450 - RNA, 19 nt, Homo sapiens
  misc_RNA (1)...(19): siRNA sense strand
gcagcgauaguacuaauga

SEQ ID NO: 31451 - RNA, 19 nt, Homo sapiens
  misc_RNA (1)...(19): siRNA sense strand
gacugucgcuguaaagaug

SEQ ID NO: 31452 - RNA, 19 nt, Homo sapiens
  misc_RNA (1)...(19): siRNA sense strand
ccagaaauauccuccuuac

SEQ ID NO: 31453 - RNA, 19 nt, Homo sapiens
  misc_RNA (1)...(19): siRNA sense strand
gaccaacauucaagcaaau

SEQ ID NO: 31454 - RNA, 19 nt, Homo sapiens
  misc_RNA (1)...(19): siRNA sense strand
gaucacaaaugggaguuuc

SEQ ID NO: 31455 - RNA, 19 nt, Homo sapiens
  misc_RNA (1)...(19): siRNA sense strand
cauggaggaugacgaguug

SEQ ID NO: 31456 - RNA, 19 nt, Homo sapiens
  misc_RNA (1)...(19): siRNA sense strand
ggacaugaaaccuggaguu

SEQ ID NO: 31457 - RNA, 19 nt, Homo sapiens
  misc_RNA (1)...(19): siRNA sense strand
cagaagcugcacuuuauaa

SEQ ID NO: 31458 - RNA, 19 nt, Homo sapiens
  misc_RNA (1)...(19): siRNA sense strand
gcaaauacacgugcaccaa

SEQ ID NO: 31459 - RNA, 19 nt, Homo sapiens
  misc_RNA (1)...(19): siRNA sense strand
gacagaagcccgugguaga

SEQ ID NO: 31460 - RNA, 19 nt, Homo sapiens
  misc_RNA (1)...(19): siRNA sense strand
agaccaacauucaagcaaa

SEQ ID NO: 31461 - RNA, 19 nt, Homo sapiens
  misc_RNA (1)...(19): siRNA sense strand
cagaaauccugacuuacga

SEQ ID NO: 31462 - RNA, 19 nt, Homo sapiens
  misc_RNA (1)...(19): siRNA sense strand
ggaagauuaucccaagucu

SEQ ID NO: 31463 - RNA, 19 nt, Homo sapiens
  misc_RNA (1)...(19): siRNA sense strand
gaaccuucacugauaaaug

SEQ ID NO: 31464 - RNA, 19 nt, Homo sapiens
  misc_RNA (1)...(19): siRNA sense strand
cagcaaaugucacaacaac

SEQ ID NO: 31465 - RNA, 19 nt, Homo sapiens
  misc_RNA (1)...(19): siRNA sense strand
cagcgagaguuaaugauuc

SEQ ID NO: 31466 - RNA, 19 nt, Homo sapiens
  misc_RNA (1)...(19): siRNA sense strand
gcacugauccgggcuuugu

SEQ ID NO: 31467 - RNA, 19 nt, Homo sapiens
  misc_RNA (1)...(19): siRNA sense strand
ggaagguuguugaggagau

SEQ ID NO: 31468 - RNA, 19 nt, Homo sapiens
  misc_RNA (1)...(19): siRNA sense strand
ugaauggcaugcuccaaug

SEQ ID NO: 31469 - RNA, 19 nt, Homo sapiens
  misc_RNA (1)...(19): siRNA sense strand
aagauuaucccaagucuga

SEQ ID NO: 31470 - RNA, 19 nt, Homo sapiens
  misc_RNA (1)...(19): siRNA sense strand
gagauuaggcuguuaugca

SEQ ID NO: 31471 - RNA, 19 nt, Homo sapiens
  misc_RNA (1)...(19): siRNA sense strand
caacaaccuuggaaguagu

SEQ ID NO: 31472 - RNA, 19 nt, Homo sapiens
  misc_RNA (1)...(19): siRNA sense strand
gaacacgcaccugcugaaa

SEQ ID NO: 31473 - RNA, 19 nt, Homo sapiens
  misc_RNA (1)...(19): siRNA sense strand
gcuuaagcaauuccauuua

SEQ ID NO: 31474 - RNA, 19 nt, Homo sapiens
  misc_RNA (1)...(19): siRNA sense strand
ucuacaagaugaucaagga

SEQ ID NO: 31475 - RNA, 19 nt, Homo sapiens
  misc_RNA (1)...(19): siRNA sense strand
cgacgagauuaggcuguua

SEQ ID NO: 31476 - RNA, 19 nt, Homo sapiens
  misc_RNA (1)...(19): siRNA sense strand
caugauaaacacuacagua

SEQ ID NO: 31477 - RNA, 19 nt, Homo sapiens
  misc_RNA (1)...(19): siRNA sense strand
ucaaagcugugccuguugu

SEQ ID NO: 31478 - RNA, 19 nt, Homo sapiens
  misc_RNA (1)...(19): siRNA sense strand
ccauuuauguguuuguuag

SEQ ID NO: 31479 - RNA, 19 nt, Homo sapiens
  misc_RNA (1)...(19): siRNA sense strand
caacaaacacggcuuaagc

SEQ ID NO: 31480 - RNA, 19 nt, Homo sapiens
  misc_RNA (1)...(19): siRNA sense strand
gcaccaaucauauuuacuc

SEQ ID NO: 31481 - RNA, 19 nt, Homo sapiens
  misc_RNA (1)...(19): siRNA sense strand
uauacacguuugaaaguga

SEQ ID NO: 31482 - RNA, 19 nt, Homo sapiens
  misc_RNA (1)...(19): siRNA sense strand
uuacauagacccaacacaa

SEQ ID NO: 31483 - RNA, 19 nt, Homo sapiens
  misc_RNA (1)...(19): siRNA sense strand
gaaacccauguaugaagua

SEQ ID NO: 31484 - RNA, 19 nt, Homo sapiens
  misc_RNA (1)...(19): siRNA sense strand
gaaggaggcacuuacacau

SEQ ID NO: 31485 - RNA, 19 nt, Homo sapiens
  misc_RNA (1)...(19): siRNA sense strand
guucauguguuaugccaau

SEQ ID NO: 31486 - RNA, 19 nt, Homo sapiens
  misc_RNA (1)...(19): siRNA sense strand
cuaaacuacaggagaaaua

SEQ ID NO: 31487 - RNA, 19 nt, Homo sapiens
  misc_RNA (1)...(19): siRNA sense strand
caacguugacuaucaguuc

SEQ ID NO: 31488 - RNA, 19 nt, Homo sapiens
  misc_RNA (1)...(19): siRNA sense strand
gaugaaacgaaugagaaua

SEQ ID NO: 31489 - RNA, 19 nt, Homo sapiens
  misc_RNA (1)...(19): siRNA sense strand
gagaagcagauuucagaga

SEQ ID NO: 31490 - RNA, 19 nt, Homo sapiens
  misc_RNA (1)...(19): siRNA sense strand
ucuaaguucuacaagauga

SEQ ID NO: 31491 - RNA, 19 nt, Homo sapiens
  misc_RNA (1)...(19): siRNA sense strand
agaaauauccuccuuacuc

SEQ ID NO: 31492 - RNA, 19 nt, Homo sapiens
  misc_RNA (1)...(19): siRNA sense strand
ccagagcccacaauagauu

SEQ ID NO: 31493 - RNA, 19 nt, Homo sapiens
  misc_RNA (1)...(19): siRNA sense strand
ggagguggcucucuaggua

SEQ ID NO: 31494 - RNA, 19 nt, Homo sapiens
  misc_RNA (1)...(19): siRNA sense strand
gaggaaaguuuauuuguga

SEQ ID NO: 31495 - RNA, 19 nt, Homo sapiens
  misc_RNA (1)...(19): siRNA sense strand
gcgauuacagcaaauauua

SEQ ID NO: 31496 - RNA, 19 nt, Homo sapiens
  misc_RNA (1)...(19): siRNA sense strand
ggaggaaaguuuauuugug

SEQ ID NO: 31497 - RNA, 19 nt, Homo sapiens
  misc_RNA (1)...(19): siRNA sense strand
ucaccaggcuccucaauga

SEQ ID NO: 31498 - RNA, 19 nt, Homo sapiens
  misc_RNA (1)...(19): siRNA sense strand
ggaagugccuuuggcuuug

SEQ ID NO: 31499 - RNA, 19 nt, Homo sapiens
  misc_RNA (1)...(19): siRNA sense strand
ggaaauugaagaacuaaug

SEQ ID NO: 31500 - RNA, 19 nt, Homo sapiens
  misc_RNA (1)...(19): siRNA sense strand
gaagaccucaggaauaaga

SEQ ID NO: 31501 - RNA, 19 nt, Homo sapiens
  misc_RNA (1)...(19): siRNA sense strand
guaaggagauuagcaccaa

SEQ ID NO: 31502 - RNA, 19 nt, Homo sapiens
  misc_RNA (1)...(19): siRNA sense strand
uagaagaggcuaauacuga

SEQ ID NO: 31503 - RNA, 19 nt, Homo sapiens
  misc_RNA (1)...(19): siRNA sense strand
ucaggaaauugaagaacua

SEQ ID NO: 31504 - RNA, 19 nt, Homo sapiens
  misc_RNA (1)...(19): siRNA sense strand
uugaagaccucaggaauaa

SEQ ID NO: 31505 - RNA, 19 nt, Homo sapiens
  misc_RNA (1)...(19): siRNA sense strand
gagcuggccuacaugaaga

SEQ ID NO: 31506 - RNA, 19 nt, Homo sapiens
  misc_RNA (1)...(19): siRNA sense strand
caacugauuccucuaaaga

SEQ ID NO: 31507 - RNA, 19 nt, Homo sapiens
  misc_RNA (1)...(19): siRNA sense strand
ggaccgaccuggagaugca

SEQ ID NO: 31508 - RNA, 19 nt, Homo sapiens
  misc_RNA (1)...(19): siRNA sense strand
acagagcgauuacagcaaa

SEQ ID NO: 31509 - RNA, 19 nt, Homo sapiens
  misc_RNA (1)...(19): siRNA sense strand
gccuggagcuggagauuga

SEQ ID NO: 31510 - RNA, 19 nt, Homo sapiens
  misc_RNA (1)...(19): siRNA sense strand
gaugaaguaugagaaugaa

SEQ ID NO: 31511 - RNA, 19 nt, Homo sapiens
  misc_RNA (1)...(19): siRNA sense strand
ggaugaaguaugagaauga

SEQ ID NO: 31512 - RNA, 19 nt, Homo sapiens
  misc_RNA (1)...(19): siRNA sense strand
gggaagugccuuuggcuuu

SEQ ID NO: 31513 - RNA, 19 nt, Homo sapiens
  misc_RNA (1)...(19): siRNA sense strand
cagcuccucuugcagauug

SEQ ID NO: 31514 - RNA, 19 nt, Homo sapiens
  misc_RNA (1)...(19): siRNA sense strand
gagguggucucaucucaag

SEQ ID NO: 31515 - RNA, 19 nt, Homo sapiens
  misc_RNA (1)...(19): siRNA sense strand
gaagaagaaccacgaggau

SEQ ID NO: 31516 - RNA, 19 nt, Homo sapiens
  misc_RNA (1)...(19): siRNA sense strand
caucucaaguucaggaaau

SEQ ID NO: 31517 - RNA, 19 nt, Homo sapiens
  misc_RNA (1)...(19): siRNA sense strand
gguauucucucgggcaaug

SEQ ID NO: 31518 - RNA, 19 nt, Homo sapiens
  misc_RNA (1)...(19): siRNA sense strand
ggcccaaggugaugguuug

SEQ ID NO: 31519 - RNA, 19 nt, Homo sapiens
  misc_RNA (1)...(19): siRNA sense strand
gaaaugcccagcuccucuu

SEQ ID NO: 31520 - RNA, 19 nt, Homo sapiens
  misc_RNA (1)...(19): siRNA sense strand
gcaaauauuauccacugau

SEQ ID NO: 31521 - RNA, 19 nt, Homo sapiens
  misc_RNA (1)...(19): siRNA sense strand
cagcuucaguccagcaaga

SEQ ID NO: 31522 - RNA, 19 nt, Homo sapiens
  misc_RNA (1)...(19): siRNA sense strand
agaagaaccacgaggauga

SEQ ID NO: 31523 - RNA, 19 nt, Homo sapiens
  misc_RNA (1)...(19): siRNA sense strand
gaucauuucagccagcauu

SEQ ID NO: 31524 - RNA, 19 nt, Homo sapiens
  misc_RNA (1)...(19): siRNA sense strand
gaaccuggagaucgagcua

SEQ ID NO: 31525 - RNA, 19 nt, Homo sapiens
  misc_RNA (1)...(19): siRNA sense strand
uggccuacaugaagaagaa

SEQ ID NO: 31526 - RNA, 19 nt, Homo sapiens
  misc_RNA (1)...(19): siRNA sense strand
ccaggcuccucaaugauau

SEQ ID NO: 31527 - RNA, 19 nt, Homo sapiens
  misc_RNA (1)...(19): siRNA sense strand
ggucucaucucaaguucag

SEQ ID NO: 31528 - RNA, 19 nt, Homo sapiens
  misc_RNA (1)...(19): siRNA sense strand
ggugaugguuuggaggaaa

SEQ ID NO: 31529 - RNA, 19 nt, Homo sapiens
  misc_RNA (1)...(19): siRNA sense strand
ccacgaggaugagcuccaa

SEQ ID NO: 31530 - RNA, 19 nt, Homo sapiens
  misc_RNA (1)...(19): siRNA sense strand
gcuaauacugagcuagaaa

SEQ ID NO: 31531 - RNA, 19 nt, Homo sapiens
  misc_RNA (1)...(19): siRNA sense strand
caaaucacaagcacaguca

SEQ ID NO: 31532 - RNA, 19 nt, Homo sapiens
  misc_RNA (1)...(19): siRNA sense strand
ggagcuggccuacaugaag

SEQ ID NO: 31533 - RNA, 19 nt, Homo sapiens
  misc_RNA (1)...(19): siRNA sense strand
acgaggagcuggccuacau

SEQ ID NO: 31534 - RNA, 19 nt, Homo sapiens
  misc_RNA (1)...(19): siRNA sense strand
gauggaggccuucuuucug

SEQ ID NO: 31535 - RNA, 19 nt, Homo sapiens
  misc_RNA (1)...(19): siRNA sense strand
gauugaagaccucaggaau

SEQ ID NO: 31536 - RNA, 19 nt, Homo sapiens
  misc_RNA (1)...(19): siRNA sense strand
gaggagcuggccuacauga

SEQ ID NO: 31537 - RNA, 19 nt, Homo sapiens
  misc_RNA (1)...(19): siRNA sense strand
cccaggagguggcucucua

SEQ ID NO: 31538 - RNA, 19 nt, Homo sapiens
  misc_RNA (1)...(19): siRNA sense strand
gaagugccuuuggcuuugg

SEQ ID NO: 31539 - RNA, 19 nt, Homo sapiens
  misc_RNA (1)...(19): siRNA sense strand
gagcgauuacagcaaauau

SEQ ID NO: 31540 - RNA, 19 nt, Homo sapiens
  misc_RNA (1)...(19): siRNA sense strand
ccucaggaauaagaucauu

SEQ ID NO: 31541 - RNA, 19 nt, Homo sapiens
  misc_RNA (1)...(19): siRNA sense strand
gguggucucaucucaaguu

SEQ ID NO: 31542 - RNA, 19 nt, Homo sapiens
  misc_RNA (1)...(19): siRNA sense strand
ugcaggagauggugaaugg

SEQ ID NO: 31543 - RNA, 19 nt, Homo sapiens
  misc_RNA (1)...(19): siRNA sense strand
ugacagacuccaaaucaca

SEQ ID NO: 31544 - RNA, 19 nt, Homo sapiens
  misc_RNA (1)...(19): siRNA sense strand
gaggacugggugcugguua

SEQ ID NO: 31545 - RNA, 19 nt, Homo sapiens
  misc_RNA (1)...(19): siRNA sense strand
gucaacugauuccucuaaa

SEQ ID NO: 31546 - RNA, 19 nt, Homo sapiens
  misc_RNA (1)...(19): siRNA sense strand
aaccaucgcugagcagaau

SEQ ID NO: 31547 - RNA, 19 nt, Homo sapiens
  misc_RNA (1)...(19): siRNA sense strand
ggacugcagaugcuucaca

SEQ ID NO: 31548 - RNA, 19 nt, Homo sapiens
  misc_RNA (1)...(19): siRNA sense strand
ucaacugauuccucuaaag

SEQ ID NO: 31549 - RNA, 19 nt, Homo sapiens
  misc_RNA (1)...(19): siRNA sense strand
ggguggagguagcuuugga

SEQ ID NO: 31550 - RNA, 19 nt, Homo sapiens
  misc_RNA (1)...(19): siRNA sense strand
ugcagcagcucaucagcaa

SEQ ID NO: 31551 - RNA, 19 nt, Homo sapiens
  misc_RNA (1)...(19): siRNA sense strand
cgaggucagcguagaaaug

SEQ ID NO: 31552 - RNA, 19 nt, Homo sapiens
  misc_RNA (1)...(19): siRNA sense strand
cguagaggccgacaucaau

SEQ ID NO: 31553 - RNA, 19 nt, Homo sapiens
  misc_RNA (1)...(19): siRNA sense strand
aaugauggaggccuucuuu

SEQ ID NO: 31554 - RNA, 19 nt, Homo sapiens
  misc_RNA (1)...(19): siRNA sense strand
ggaaaguuuauuugugaca

SEQ ID NO: 31555 - RNA, 19 nt, Homo sapiens
  misc_RNA (1)...(19): siRNA sense strand
guagaggccgacaucaaug

SEQ ID NO: 31556 - RNA, 19 nt, Homo sapiens
  misc_RNA (1)...(19): siRNA sense strand
ucaggaauaagaucauuuc

SEQ ID NO: 31557 - RNA, 19 nt, Homo sapiens
  misc_RNA (1)...(19): siRNA sense strand
gauaaggugcgagcucuag

SEQ ID NO: 31558 - RNA, 19 nt, Homo sapiens
  misc_RNA (1)...(19): siRNA sense strand
gacagacuccaaaucacaa

SEQ ID NO: 31559 - RNA, 19 nt, Homo sapiens
  misc_RNA (1)...(19): siRNA sense strand
gcguagaggccgacaucaa

SEQ ID NO: 31560 - RNA, 19 nt, Homo sapiens
  misc_RNA (1)...(19): siRNA sense strand
gaaguaugagaaugaacug

SEQ ID NO: 31561 - RNA, 19 nt, Homo sapiens
  misc_RNA (1)...(19): siRNA sense strand
auugaagaccucaggaaua

SEQ ID NO: 31562 - RNA, 19 nt, Homo sapiens
  misc_RNA (1)...(19): siRNA sense strand
agacaguugugcaggagau

SEQ ID NO: 31563 - RNA, 19 nt, Homo sapiens
  misc_RNA (1)...(19): siRNA sense strand
ugugacagacuccaaauca

SEQ ID NO: 31564 - RNA, 19 nt, Homo sapiens
  misc_RNA (1)...(19): siRNA sense strand
caugucugcuuccaguguu

SEQ ID NO: 31565 - RNA, 19 nt, Homo sapiens
  misc_RNA (1)...(19): siRNA sense strand
agucccagcucgccaugaa

SEQ ID NO: 31566 - RNA, 19 nt, Homo sapiens
  misc_RNA (1)...(19): siRNA sense strand
ggauaaggugcgagcucua

SEQ ID NO: 31567 - RNA, 19 nt, Homo sapiens
  misc_RNA (1)...(19): siRNA sense strand
gcaugucugcuuccagugu

SEQ ID NO: 31568 - RNA, 19 nt, Homo sapiens
  misc_RNA (1)...(19): siRNA sense strand
ggcuaauacugagcuagaa

SEQ ID NO: 31569 - RNA, 19 nt, Homo sapiens
  misc_RNA (1)...(19): siRNA sense strand
uaaggugcgagcucuagaa

SEQ ID NO: 31570 - RNA, 19 nt, Homo sapiens
  misc_RNA (1)...(19): siRNA sense strand
gaagaaccacgaggaugag

SEQ ID NO: 31571 - RNA, 19 nt, Homo sapiens
  misc_RNA (1)...(19): siRNA sense strand
gaggucagcguagaaaugg

SEQ ID NO: 31572 - RNA, 19 nt, Homo sapiens
  misc_RNA (1)...(19): siRNA sense strand
auuauccacugauugaaga

SEQ ID NO: 31573 - RNA, 19 nt, Homo sapiens
  misc_RNA (1)...(19): siRNA sense strand
caacaccaugucacucuca

SEQ ID NO: 31574 - RNA, 19 nt, Homo sapiens
  misc_RNA (1)...(19): siRNA sense strand
agucaacugauuccucuaa

SEQ ID NO: 31575 - RNA, 19 nt, Homo sapiens
  misc_RNA (1)...(19): siRNA sense strand
gaccucaggaauaagauca

SEQ ID NO: 31576 - RNA, 19 nt, Homo sapiens
  misc_RNA (1)...(19): siRNA sense strand
accaggcuccucaaugaua

SEQ ID NO: 31577 - RNA, 19 nt, Homo sapiens
  misc_RNA (1)...(19): siRNA sense strand
uuagcuuccuaccuggaua

SEQ ID NO: 31578 - RNA, 19 nt, Homo sapiens
  misc_RNA (1)...(19): siRNA sense strand
ggacugggugcugguuaug

SEQ ID NO: 31579 - RNA, 19 nt, Homo sapiens
  misc_RNA (1)...(19): siRNA sense strand
gugaugguuuggaggaaag

SEQ ID NO: 31580 - RNA, 19 nt, Homo sapiens
  misc_RNA (1)...(19): siRNA sense strand
ggaacugggacugcagaug

SEQ ID NO: 31581 - RNA, 19 nt, Homo sapiens
  misc_RNA (1)...(19): siRNA sense strand
caggaugaaguaugagaau

SEQ ID NO: 31582 - RNA, 19 nt, Homo sapiens
  misc_RNA (1)...(19): siRNA sense strand
ugaaguaugagaaugaacu

SEQ ID NO: 31583 - RNA, 19 nt, Homo sapiens
  misc_RNA (1)...(19): siRNA sense strand
gcagaucgagagccugaac

SEQ ID NO: 31584 - RNA, 19 nt, Homo sapiens
  misc_RNA (1)...(19): siRNA sense strand
agcuggagauugagaccua

SEQ ID NO: 31585 - RNA, 19 nt, Homo sapiens
  misc_RNA (1)...(19): siRNA sense strand
gcaccaaggucauggaugu

SEQ ID NO: 31586 - RNA, 19 nt, Homo sapiens
  misc_RNA (1)...(19): siRNA sense strand
ggagaugaaugcccugaga

SEQ ID NO: 31587 - RNA, 19 nt, Homo sapiens
  misc_RNA (1)...(19): siRNA sense strand
gaccugagccgcauucuga

SEQ ID NO: 31588 - RNA, 19 nt, Homo sapiens
  misc_RNA (1)...(19): siRNA sense strand
gagcugaccuggagaugca

SEQ ID NO: 31589 - RNA, 19 nt, Homo sapiens
  misc_RNA (1)...(19): siRNA sense strand
gagcuggccuaccugaaga

SEQ ID NO: 31590 - RNA, 19 nt, Homo sapiens
  misc_RNA (1)...(19): siRNA sense strand
cgagaugcgugaccaguau

SEQ ID NO: 31591 - RNA, 19 nt, Homo sapiens
  misc_RNA (1)...(19): siRNA sense strand
gcaaggaugccgaggaaug

SEQ ID NO: 31592 - RNA, 19 nt, Homo sapiens
  misc_RNA (1)...(19): siRNA sense strand
cugcugagaucaaagacua

SEQ ID NO: 31593 - RNA, 19 nt, Homo sapiens
  misc_RNA (1)...(19): siRNA sense strand
gaguugaaccugcgcauga

SEQ ID NO: 31594 - RNA, 19 nt, Homo sapiens
  misc_RNA (1)...(19): siRNA sense strand
uggccuaccugaagaagaa

SEQ ID NO: 31595 - RNA, 19 nt, Homo sapiens
  misc_RNA (1)...(19): siRNA sense strand
ugcagaaccuggagauuga

SEQ ID NO: 31596 - RNA, 19 nt, Homo sapiens
  misc_RNA (1)...(19): siRNA sense strand
ccgcaaggaugccgaggaa

SEQ ID NO: 31597 - RNA, 19 nt, Homo sapiens
  misc_RNA (1)...(19): siRNA sense strand
ccaauguccuucugcagau

SEQ ID NO: 31598 - RNA, 19 nt, Homo sapiens
  misc_RNA (1)...(19): siRNA sense strand
gcaccaaguaugagacaga

SEQ ID NO: 31599 - RNA, 19 nt, Homo sapiens
  misc_RNA (1)...(19): siRNA sense strand
gaaccaggaguacaagauc

SEQ ID NO: 31600 - RNA, 19 nt, Homo sapiens
  misc_RNA (1)...(19): siRNA sense strand
ggguggagaugucaaugug

SEQ ID NO: 31601 - RNA, 19 nt, Homo sapiens
  misc_RNA (1)...(19): siRNA sense strand
gugagaaggugaccaugca

SEQ ID NO: 31602 - RNA, 19 nt, Homo sapiens
  misc_RNA (1)...(19): siRNA sense strand
ggucauggaugugcacgau

SEQ ID NO: 31603 - RNA, 19 nt, Homo sapiens
  misc_RNA (1)...(19): siRNA sense strand
gcagggugcuggacgaacu

SEQ ID NO: 31604 - RNA, 19 nt, Homo sapiens
  misc_RNA (1)...(19): siRNA sense strand
uggcuugggugguggcuuu

SEQ ID NO: 31605 - RNA, 19 nt, Homo sapiens
  misc_RNA (1)...(19): siRNA sense strand
ccaaguaugagacagaguu

SEQ ID NO: 31606 - RNA, 19 nt, Homo sapiens
  misc_RNA (1)...(19): siRNA sense strand
cagcuuugguaguggcuuu

SEQ ID NO: 31607 - RNA, 19 nt, Homo sapiens
  misc_RNA (1)...(19): siRNA sense strand
gaagauggcagagaagaac

SEQ ID NO: 31608 - RNA, 19 nt, Homo sapiens
  misc_RNA (1)...(19): siRNA sense strand
gagaagauggcagagaaga

SEQ ID NO: 31609 - RNA, 19 nt, Homo sapiens
  misc_RNA (1)...(19): siRNA sense strand
augagaagauggcagagaa

SEQ ID NO: 31610 - RNA, 19 nt, Homo sapiens
  misc_RNA (1)...(19): siRNA sense strand
gaaagcaucccuggagaac

SEQ ID NO: 31611 - RNA, 19 nt, Homo sapiens
  misc_RNA (1)...(19): siRNA sense strand
ggagcuggccuaccugaag

SEQ ID NO: 31612 - RNA, 19 nt, Homo sapiens
  misc_RNA (1)...(19): siRNA sense strand
gcagugagaaggugaccau

SEQ ID NO: 31613 - RNA, 19 nt, Homo sapiens
  misc_RNA (1)...(19): siRNA sense strand
ccagguggguggagauguc

SEQ ID NO: 31614 - RNA, 19 nt, Homo sapiens
  misc_RNA (1)...(19): siRNA sense strand
uacagucccuacuucaaga

SEQ ID NO: 31615 - RNA, 19 nt, Homo sapiens
  misc_RNA (1)...(19): siRNA sense strand
gaagugaagauccgugacu

SEQ ID NO: 31616 - RNA, 19 nt, Homo sapiens
  misc_RNA (1)...(19): siRNA sense strand
ccaugcagaaccucaauga

SEQ ID NO: 31617 - RNA, 19 nt, Homo sapiens
  misc_RNA (1)...(19): siRNA sense strand
uggcuuuggugguggcuuu

SEQ ID NO: 31618 - RNA, 19 nt, Homo sapiens
  misc_RNA (1)...(19): siRNA sense strand
agcaggagaucgccaccua

SEQ ID NO: 31619 - RNA, 19 nt, Homo sapiens
  misc_RNA (1)...(19): siRNA sense strand
aagcaucccuggagaacag

SEQ ID NO: 31620 - RNA, 19 nt, Homo sapiens
  misc_RNA (1)...(19): siRNA sense strand
gccgaggaaugguucuuca

SEQ ID NO: 31621 - RNA, 19 nt, Homo sapiens
  misc_RNA (1)...(19): siRNA sense strand
caauguccuucugcagauu

SEQ ID NO: 31622 - RNA, 19 nt, Homo sapiens
  misc_RNA (1)...(19): siRNA sense strand
gaccugaggaacaagauuc

SEQ ID NO: 31623 - RNA, 19 nt, Homo sapiens
  misc_RNA (1)...(19): siRNA sense strand
ugaagauccgugacuggua

SEQ ID NO: 31624 - RNA, 19 nt, Homo sapiens
  misc_RNA (1)...(19): siRNA sense strand
gaaccacgaggaggagaug

SEQ ID NO: 31625 - RNA, 19 nt, Homo sapiens
  misc_RNA (1)...(19): siRNA sense strand
gcccagauccaggagauga

SEQ ID NO: 31626 - RNA, 19 nt, Homo sapiens
  misc_RNA (1)...(19): siRNA sense strand
ggaccugaggaacaagauu

SEQ ID NO: 31627 - RNA, 19 nt, Homo sapiens
  misc_RNA (1)...(19): siRNA sense strand
gaucgcagucauccagaga

SEQ ID NO: 31628 - RNA, 19 nt, Homo sapiens
  misc_RNA (1)...(19): siRNA sense strand
ugaaagcaucccuggagaa

SEQ ID NO: 31629 - RNA, 19 nt, Homo sapiens
  misc_RNA (1)...(19): siRNA sense strand
uguggaagccgacaucaau

SEQ ID NO: 31630 - RNA, 19 nt, Homo sapiens
  misc_RNA (1)...(19): siRNA sense strand
ugaccaguaugagaagaug

SEQ ID NO: 31631 - RNA, 19 nt, Homo sapiens
  misc_RNA (1)...(19): siRNA sense strand
ccaaaggucgcuacugcau

SEQ ID NO: 31632 - RNA, 19 nt, Homo sapiens
  misc_RNA (1)...(19): siRNA sense strand
ccauugaggaccugaggaa

SEQ ID NO: 31633 - RNA, 19 nt, Homo sapiens
  misc_RNA (1)...(19): siRNA sense strand
gaccuggagaugcagauug

SEQ ID NO: 31634 - RNA, 19 nt, Homo sapiens
  misc_RNA (1)...(19): siRNA sense strand
uugaggaccugaggaacaa

SEQ ID NO: 31635 - RNA, 19 nt, Homo sapiens
  misc_RNA (1)...(19): siRNA sense strand
caaguaugagacagaguug

SEQ ID NO: 31636 - RNA, 19 nt, Homo sapiens
  misc_RNA (1)...(19): siRNA sense strand
cagcagcagcagcagcuuu

SEQ ID NO: 31637 - RNA, 19 nt, Homo sapiens
  misc_RNA (1)...(19): siRNA sense strand
acgccgaccuggaagugaa

SEQ ID NO: 31638 - RNA, 19 nt, Homo sapiens
  misc_RNA (1)...(19): siRNA sense strand
cuacagucccuacuucaag

SEQ ID NO: 31639 - RNA, 19 nt, Homo sapiens
  misc_RNA (1)...(19): siRNA sense strand
accuggagaugcagauuga

SEQ ID NO: 31640 - RNA, 19 nt, Homo sapiens
  misc_RNA (1)...(19): siRNA sense strand
caaugccaauguccuucug

SEQ ID NO: 31641 - RNA, 19 nt, Homo sapiens
  misc_RNA (1)...(19): siRNA sense strand
caaggaugccgaggaaugg

SEQ ID NO: 31642 - RNA, 19 nt, Homo sapiens
  misc_RNA (1)...(19): siRNA sense strand
agaaggugaccaugcagaa

SEQ ID NO: 31643 - RNA, 19 nt, Homo sapiens
  misc_RNA (1)...(19): siRNA sense strand
caacgccgaccuggaagug

SEQ ID NO: 31644 - RNA, 19 nt, Homo sapiens
  misc_RNA (1)...(19): siRNA sense strand
ccagauccaggagaugauu

SEQ ID NO: 31645 - RNA, 19 nt, Homo sapiens
  misc_RNA (1)...(19): siRNA sense strand
cagcucagcaugaaagcau

SEQ ID NO: 31646 - RNA, 19 nt, Homo sapiens
  misc_RNA (1)...(19): siRNA sense strand
cagagaagaaccgcaagga

SEQ ID NO: 31647 - RNA, 19 nt, Homo sapiens
  misc_RNA (1)...(19): siRNA sense strand
agaagauggcagagaagaa

SEQ ID NO: 31648 - RNA, 19 nt, Homo sapiens
  misc_RNA (1)...(19): siRNA sense strand
aguaugagacagaguugaa

SEQ ID NO: 31649 - RNA, 19 nt, Homo sapiens
  misc_RNA (1)...(19): siRNA sense strand
gaggaccugaggaacaaga

SEQ ID NO: 31650 - RNA, 19 nt, Homo sapiens
  misc_RNA (1)...(19): siRNA sense strand
gcggccugcugagaucaaa

SEQ ID NO: 31651 - RNA, 19 nt, Homo sapiens
  misc_RNA (1)...(19): siRNA sense strand
aggaggagcuggccuaccu

SEQ ID NO: 31652 - RNA, 19 nt, Homo sapiens
  misc_RNA (1)...(19): siRNA sense strand
gcaccaaguuugagacaga

SEQ ID NO: 31653 - RNA, 19 nt, Homo sapiens
  misc_RNA (1)...(19): siRNA sense strand
acacugagcuggaggugaa

SEQ ID NO: 31654 - RNA, 19 nt, Homo sapiens
  misc_RNA (1)...(19): siRNA sense strand
gcaaggaugccgaggauug

SEQ ID NO: 31655 - RNA, 19 nt, Homo sapiens
  misc_RNA (1)...(19): siRNA sense strand
gagcuggccuaccugaaga

SEQ ID NO: 31656 - RNA, 19 nt, Homo sapiens
  misc_RNA (1)...(19): siRNA sense strand
cgagaugcgugaccaguau

SEQ ID NO: 31657 - RNA, 19 nt, Homo sapiens
  misc_RNA (1)...(19): siRNA sense strand
gcagaaccaggaauacaaa

SEQ ID NO: 31658 - RNA, 19 nt, Homo sapiens
  misc_RNA (1)...(19): siRNA sense strand
uugaggagcugcagaacaa

SEQ ID NO: 31659 - RNA, 19 nt, Homo sapiens
  misc_RNA (1)...(19): siRNA sense strand
uggccuaccugaagaagaa

SEQ ID NO: 31660 - RNA, 19 nt, Homo sapiens
  misc_RNA (1)...(19): siRNA sense strand
gagccgaccuggagaugca

SEQ ID NO: 31661 - RNA, 19 nt, Homo sapiens
  misc_RNA (1)...(19): siRNA sense strand
caacauccugcuacagauu

SEQ ID NO: 31662 - RNA, 19 nt, Homo sapiens
  misc_RNA (1)...(19): siRNA sense strand
gccaacauccugcuacaga

SEQ ID NO: 31663 - RNA, 19 nt, Homo sapiens
  misc_RNA (1)...(19): siRNA sense strand
ccagguggguggugagauc

SEQ ID NO: 31664 - RNA, 19 nt, Homo sapiens
  misc_RNA (1)...(19): siRNA sense strand
gaagauggcagagaagaac

SEQ ID NO: 31665 - RNA, 19 nt, Homo sapiens
  misc_RNA (1)...(19): siRNA sense strand
gagaagauggcagagaaga

SEQ ID NO: 31666 - RNA, 19 nt, Homo sapiens
  misc_RNA (1)...(19): siRNA sense strand
caauugaggagcugcagaa

SEQ ID NO: 31667 - RNA, 19 nt, Homo sapiens
  misc_RNA (1)...(19): siRNA sense strand
ugagaucaauguggagaug

SEQ ID NO: 31668 - RNA, 19 nt, Homo sapiens
  misc_RNA (1)...(19): siRNA sense strand
augagaagauggcagagaa

SEQ ID NO: 31669 - RNA, 19 nt, Homo sapiens
  misc_RNA (1)...(19): siRNA sense strand
gcaagacagaggaacugaa

SEQ ID NO: 31670 - RNA, 19 nt, Homo sapiens
  misc_RNA (1)...(19): siRNA sense strand
ccgcaaggaugccgaggau

SEQ ID NO: 31671 - RNA, 19 nt, Homo sapiens
  misc_RNA (1)...(19): siRNA sense strand
gcgugcagcugucccagau

SEQ ID NO: 31672 - RNA, 19 nt, Homo sapiens
  misc_RNA (1)...(19): siRNA sense strand
ccaacauccugcuacagau

SEQ ID NO: 31673 - RNA, 19 nt, Homo sapiens
  misc_RNA (1)...(19): siRNA sense strand
agcaggagauugccaccua

SEQ ID NO: 31674 - RNA, 19 nt, Homo sapiens
  misc_RNA (1)...(19): siRNA sense strand
ggagcuggccuaccugaag

SEQ ID NO: 31675 - RNA, 19 nt, Homo sapiens
  misc_RNA (1)...(19): siRNA sense strand
ugacucaguacaagaaaga

SEQ ID NO: 31676 - RNA, 19 nt, Homo sapiens
  misc_RNA (1)...(19): siRNA sense strand
ccaugcagaaccucaauga

SEQ ID NO: 31677 - RNA, 19 nt, Homo sapiens
  misc_RNA (1)...(19): siRNA sense strand
uggaggaggccaacacuga

SEQ ID NO: 31678 - RNA, 19 nt, Homo sapiens
  misc_RNA (1)...(19): siRNA sense strand
ugaagauccgugacuggua

SEQ ID NO: 31679 - RNA, 19 nt, Homo sapiens
  misc_RNA (1)...(19): siRNA sense strand
gaaccacgaggaggagaug

SEQ ID NO: 31680 - RNA, 19 nt, Homo sapiens
  misc_RNA (1)...(19): siRNA sense strand
gaggagcugcagaacaaga

SEQ ID NO: 31681 - RNA, 19 nt, Homo sapiens
  misc_RNA (1)...(19): siRNA sense strand
caagacagaggaacugaac

SEQ ID NO: 31682 - RNA, 19 nt, Homo sapiens
  misc_RNA (1)...(19): siRNA sense strand
caugcaggccuuggagaua

SEQ ID NO: 31683 - RNA, 19 nt, Homo sapiens
  misc_RNA (1)...(19): siRNA sense strand
ugaccaguaugagaagaug

SEQ ID NO: 31684 - RNA, 19 nt, Homo sapiens
  misc_RNA (1)...(19): siRNA sense strand
cgucaggugcguaccauug

SEQ ID NO: 31685 - RNA, 19 nt, Homo sapiens
  misc_RNA (1)...(19): siRNA sense strand
gaccuggagaugcagauug

SEQ ID NO: 31686 - RNA, 19 nt, Homo sapiens
  misc_RNA (1)...(19): siRNA sense strand
gcagaacaagauccucaca

SEQ ID NO: 31687 - RNA, 19 nt, Homo sapiens
  misc_RNA (1)...(19): siRNA sense strand
gcaccaugcaggccuugga

SEQ ID NO: 31688 - RNA, 19 nt, Homo sapiens
  misc_RNA (1)...(19): siRNA sense strand
cagaguggcaagagugaga

SEQ ID NO: 31689 - RNA, 19 nt, Homo sapiens
  misc_RNA (1)...(19): siRNA sense strand
gugacuacagccaguacua

SEQ ID NO: 31690 - RNA, 19 nt, Homo sapiens
  misc_RNA (1)...(19): siRNA sense strand
gaaccaggaauacaaaauc

SEQ ID NO: 31691 - RNA, 19 nt, Homo sapiens
  misc_RNA (1)...(19): siRNA sense strand
ccaccuccauccgccaguu

SEQ ID NO: 31692 - RNA, 19 nt, Homo sapiens
  misc_RNA (1)...(19): siRNA sense strand
cagcagaaccaggaauaca

SEQ ID NO: 31693 - RNA, 19 nt, Homo sapiens
  misc_RNA (1)...(19): siRNA sense strand
gccgaggauugguucuuca

SEQ ID NO: 31694 - RNA, 19 nt, Homo sapiens
  misc_RNA (1)...(19): siRNA sense strand
accuggagaugcagauuga

SEQ ID NO: 31695 - RNA, 19 nt, Homo sapiens
  misc_RNA (1)...(19): siRNA sense strand
agaaggccaccaugcagaa

SEQ ID NO: 31696 - RNA, 19 nt, Homo sapiens
  misc_RNA (1)...(19): siRNA sense strand
aggauugguucuucagcaa

SEQ ID NO: 31697 - RNA, 19 nt, Homo sapiens
  misc_RNA (1)...(19): siRNA sense strand
agaucaauguggagaugga

SEQ ID NO: 31698 - RNA, 19 nt, Homo sapiens
  misc_RNA (1)...(19): siRNA sense strand
gugagaaggccaccaugca

SEQ ID NO: 31699 - RNA, 19 nt, Homo sapiens
  misc_RNA (1)...(19): siRNA sense strand
ucaggugcguaccauugug

SEQ ID NO: 31700 - RNA, 19 nt, Homo sapiens
  misc_RNA (1)...(19): siRNA sense strand
gcaaccuggcggagacaga

SEQ ID NO: 31701 - RNA, 19 nt, Homo sapiens
  misc_RNA (1)...(19): siRNA sense strand
cagcucagcaugaaagcau

SEQ ID NO: 31702 - RNA, 19 nt, Homo sapiens
  misc_RNA (1)...(19): siRNA sense strand
cagagaagaaccgcaagga

SEQ ID NO: 31703 - RNA, 19 nt, Homo sapiens
  misc_RNA (1)...(19): siRNA sense strand
agaagauggcagagaagaa

SEQ ID NO: 31704 - RNA, 19 nt, Homo sapiens
  misc_RNA (1)...(19): siRNA sense strand
gguggguggugagaucaau

SEQ ID NO: 31705 - RNA, 19 nt, Homo sapiens
  misc_RNA (1)...(19): siRNA sense strand
cguggacaaugccaacauc

SEQ ID NO: 31706 - RNA, 19 nt, Homo sapiens
  misc_RNA (1)...(19): siRNA sense strand
aggaggagcuggccuaccu

SEQ ID NO: 31707 - RNA, 19 nt, Homo sapiens
  misc_RNA (1)...(19): siRNA sense strand
gagaggagcuagacaagua

SEQ ID NO: 31708 - RNA, 19 nt, Homo sapiens
  misc_RNA (1)...(19): siRNA sense strand
gcucagaucuucgcaaaua

SEQ ID NO: 31709 - RNA, 19 nt, Homo sapiens
  misc_RNA (1)...(19): siRNA sense strand
gauaguggauggcaaagug

SEQ ID NO: 31710 - RNA, 19 nt, Homo sapiens
  misc_RNA (1)...(19): siRNA sense strand
gaagauggcgaggacuuua

SEQ ID NO: 31711 - RNA, 19 nt, Homo sapiens
  misc_RNA (1)...(19): siRNA sense strand
guacuggucucagcagauu

SEQ ID NO: 31712 - RNA, 19 nt, Homo sapiens
  misc_RNA (1)...(19): siRNA sense strand
gaagaaccacgaagaggaa

SEQ ID NO: 31713 - RNA, 19 nt, Homo sapiens
  misc_RNA (1)...(19): siRNA sense strand
gggcucagaucuucgcaaa

SEQ ID NO: 31714 - RNA, 19 nt, Homo sapiens
  misc_RNA (1)...(19): siRNA sense strand
caaauacuguggacaaugc

SEQ ID NO: 31715 - RNA, 19 nt, Homo sapiens
  misc_RNA (1)...(19): siRNA sense strand
gaaccacgaagaggaagua

SEQ ID NO: 31716 - RNA, 19 nt, Homo sapiens
  misc_RNA (1)...(19): siRNA sense strand
gaagaagaaccacgaagag

SEQ ID NO: 31717 - RNA, 19 nt, Homo sapiens
  misc_RNA (1)...(19): siRNA sense strand
gcaucguucugcagauuga

SEQ ID NO: 31718 - RNA, 19 nt, Homo sapiens
  misc_RNA (1)...(19): siRNA sense strand
gggagcacuuggagaagaa

SEQ ID NO: 31719 - RNA, 19 nt, Homo sapiens
  misc_RNA (1)...(19): siRNA sense strand
gacugcagcuggagacaga

SEQ ID NO: 31720 - RNA, 19 nt, Homo sapiens
  misc_RNA (1)...(19): siRNA sense strand
ggaagauggcgaggacuuu

SEQ ID NO: 31721 - RNA, 19 nt, Homo sapiens
  misc_RNA (1)...(19): siRNA sense strand
ugaagaagaaccacgaaga

SEQ ID NO: 31722 - RNA, 19 nt, Homo sapiens
  misc_RNA (1)...(19): siRNA sense strand
gcaacuccaugcaaaccau

SEQ ID NO: 31723 - RNA, 19 nt, Homo sapiens
  misc_RNA (1)...(19): siRNA sense strand
ugagaccaaugacaccaaa

SEQ ID NO: 31724 - RNA, 19 nt, Homo sapiens
  misc_RNA (1)...(19): siRNA sense strand
gagaaggagaccaugcaaa

SEQ ID NO: 31725 - RNA, 19 nt, Homo sapiens
  misc_RNA (1)...(19): siRNA sense strand
aggcugagaucgccaccua

SEQ ID NO: 31726 - RNA, 19 nt, Homo sapiens
  misc_RNA (1)...(19): siRNA sense strand
gcaaauacuguggacaaug

SEQ ID NO: 31727 - RNA, 19 nt, Homo sapiens
  misc_RNA (1)...(19): siRNA sense strand
gucagagacuggagccauu

SEQ ID NO: 31728 - RNA, 19 nt, Homo sapiens
  misc_RNA (1)...(19): siRNA sense strand
gaagaaccgagaggagcua

SEQ ID NO: 31729 - RNA, 19 nt, Homo sapiens
  misc_RNA (1)...(19): siRNA sense strand
ggauccugcugcaccuuga

SEQ ID NO: 31730 - RNA, 19 nt, Homo sapiens
  misc_RNA (1)...(19): siRNA sense strand
gaccaaugacaccaaaguu

SEQ ID NO: 31731 - RNA, 19 nt, Homo sapiens
  misc_RNA (1)...(19): siRNA sense strand
ccgcaucguucugcagauu

SEQ ID NO: 31732 - RNA, 19 nt, Homo sapiens
  misc_RNA (1)...(19): siRNA sense strand
ccacgaagaggaaguaaaa

SEQ ID NO: 31733 - RNA, 19 nt, Homo sapiens
  misc_RNA (1)...(19): siRNA sense strand
cacacagucugcugagguu

SEQ ID NO: 31734 - RNA, 19 nt, Homo sapiens
  misc_RNA (1)...(19): siRNA sense strand
ucagagacuggagccauua

SEQ ID NO: 31735 - RNA, 19 nt, Homo sapiens
  misc_RNA (1)...(19): siRNA sense strand
agaaggagaccaugcaaag

SEQ ID NO: 31736 - RNA, 19 nt, Homo sapiens
  misc_RNA (1)...(19): siRNA sense strand
gacguacaguccaguccuu

SEQ ID NO: 31737 - RNA, 19 nt, Homo sapiens
  misc_RNA (1)...(19): siRNA sense strand
gaaugggaggcauccagaa

SEQ ID NO: 31738 - RNA, 19 nt, Homo sapiens
  misc_RNA (1)...(19): siRNA sense strand
gcuacgcccuacagaugga

SEQ ID NO: 31739 - RNA, 19 nt, Homo sapiens
  misc_RNA (1)...(19): siRNA sense strand
ggaccucgccaagaucaug

SEQ ID NO: 31740 - RNA, 19 nt, Homo sapiens
  misc_RNA (1)...(19): siRNA sense strand
gccauuacuucaagaucau

SEQ ID NO: 31741 - RNA, 19 nt, Homo sapiens
  misc_RNA (1)...(19): siRNA sense strand
gagacuggagccauuacuu

SEQ ID NO: 31742 - RNA, 19 nt, Homo sapiens
  misc_RNA (1)...(19): siRNA sense strand
gccagucuguggagaacga

SEQ ID NO: 31743 - RNA, 19 nt, Homo sapiens
  misc_RNA (1)...(19): siRNA sense strand
gccaggcccaggaguauga

SEQ ID NO: 31744 - RNA, 19 nt, Homo sapiens
  misc_RNA (1)...(19): siRNA sense strand
gaaaucugaaggccagcuu

SEQ ID NO: 31745 - RNA, 19 nt, Homo sapiens
  misc_RNA (1)...(19): siRNA sense strand
acgaccgccuggccucuua

SEQ ID NO: 31746 - RNA, 19 nt, Homo sapiens
  misc_RNA (1)...(19): siRNA sense strand
cgggagcacuuggagaaga

SEQ ID NO: 31747 - RNA, 19 nt, Homo sapiens
  misc_RNA (1)...(19): siRNA sense strand
ccgcuacgcccuacagaug

SEQ ID NO: 31748 - RNA, 19 nt, Homo sapiens
  misc_RNA (1)...(19): siRNA sense strand
cucaggaccucgccaagau

SEQ ID NO: 31749 - RNA, 19 nt, Homo sapiens
  misc_RNA (1)...(19): siRNA sense strand
agccauuacuucaagauca

SEQ ID NO: 31750 - RNA, 19 nt, Homo sapiens
  misc_RNA (1)...(19): siRNA sense strand
agcagcaacuccaugcaaa

SEQ ID NO: 31751 - RNA, 19 nt, Homo sapiens
  misc_RNA (1)...(19): siRNA sense strand
ccaagaucauggcagacau

SEQ ID NO: 31752 - RNA, 19 nt, Homo sapiens
  misc_RNA (1)...(19): siRNA sense strand
ucuugcugcugaugacuuu

SEQ ID NO: 31753 - RNA, 19 nt, Homo sapiens
  misc_RNA (1)...(19): siRNA sense strand
ucgcaaauacuguggacaa

SEQ ID NO: 31754 - RNA, 19 nt, Homo sapiens
  misc_RNA (1)...(19): siRNA sense strand
gacuggagccauuacuuca

SEQ ID NO: 31755 - RNA, 19 nt, Homo sapiens
  misc_RNA (1)...(19): siRNA sense strand
cagcagcaacuccaugcaa

SEQ ID NO: 31756 - RNA, 19 nt, Homo sapiens
  misc_RNA (1)...(19): siRNA sense strand
ggaaguaaaaggccuacaa

SEQ ID NO: 31757 - RNA, 19 nt, Homo sapiens
  misc_RNA (1)...(19): siRNA sense strand
agacuggagccauuacuuc

SEQ ID NO: 31758 - RNA, 19 nt, Homo sapiens
  misc_RNA (1)...(19): siRNA sense strand
gaaccgagaggagcuagac

SEQ ID NO: 31759 - RNA, 19 nt, Homo sapiens
  misc_RNA (1)...(19): siRNA sense strand
gguugaccguggagguaga

SEQ ID NO: 31760 - RNA, 19 nt, Homo sapiens
  misc_RNA (1)...(19): siRNA sense strand
gcauccagaacgagaagga

SEQ ID NO: 31761 - RNA, 19 nt, Homo sapiens
  misc_RNA (1)...(19): siRNA sense strand
ggcaaaguggugucugaga

SEQ ID NO: 31762 - RNA, 19 nt, Homo sapiens
  misc_RNA (1)...(19): siRNA sense strand
gcuccaccuucuccaccaa

SEQ ID NO: 31763 - RNA, 19 nt, Homo sapiens
  misc_RNA (1)...(19): siRNA sense strand
caagaucauggcagacauc

SEQ ID NO: 31764 - RNA, 19 nt, Homo sapiens
  misc_RNA (1)...(19): siRNA sense strand
aagauggcgaggacuuuaa

SEQ ID NO: 31765 - RNA, 19 nt, Homo sapiens
  misc_RNA (1)...(19): siRNA sense strand
cgcaaauacuguggacaau

SEQ ID NO: 31766 - RNA, 19 nt, Homo sapiens
  misc_RNA (1)...(19): siRNA sense strand
uaugaggcccugcugaaca

SEQ ID NO: 31767 - RNA, 19 nt, Homo sapiens
  misc_RNA (1)...(19): siRNA sense strand
ugaaggccagcuuggagaa

SEQ ID NO: 31768 - RNA, 19 nt, Homo sapiens
  misc_RNA (1)...(19): siRNA sense strand
gaaagaacaucacagaauu

SEQ ID NO: 31769 - RNA, 19 nt, Homo sapiens
  misc_RNA (1)...(19): siRNA sense strand
ggacaaugccuacaugaua

SEQ ID NO: 31770 - RNA, 19 nt, Homo sapiens
  misc_RNA (1)...(19): siRNA sense strand
ugaaagagaucaagauaga

SEQ ID NO: 31771 - RNA, 19 nt, Homo sapiens
  misc_RNA (1)...(19): siRNA sense strand
gacaaugccuacaugauaa

SEQ ID NO: 31772 - RNA, 19 nt, Homo sapiens
  misc_RNA (1)...(19): siRNA sense strand
gaacaucacagaauucaga

SEQ ID NO: 31773 - RNA, 19 nt, Homo sapiens
  misc_RNA (1)...(19): siRNA sense strand
gaagaaguaugaggaugaa

SEQ ID NO: 31774 - RNA, 19 nt, Homo sapiens
  misc_RNA (1)...(19): siRNA sense strand
ggagacagccugaaagaga

SEQ ID NO: 31775 - RNA, 19 nt, Homo sapiens
  misc_RNA (1)...(19): siRNA sense strand
gcagaaagaacaucacaga

SEQ ID NO: 31776 - RNA, 19 nt, Homo sapiens
  misc_RNA (1)...(19): siRNA sense strand
caaauuugccuccuucauu

SEQ ID NO: 31777 - RNA, 19 nt, Homo sapiens
  misc_RNA (1)...(19): siRNA sense strand
ggacuuggauagcaucauc

SEQ ID NO: 31778 - RNA, 19 nt, Homo sapiens
  misc_RNA (1)...(19): siRNA sense strand
gcagcaccauuucaucaaa

SEQ ID NO: 31779 - RNA, 19 nt, Homo sapiens
  misc_RNA (1)...(19): siRNA sense strand
ugucagaucucuugcaaau

SEQ ID NO: 31780 - RNA, 19 nt, Homo sapiens
  misc_RNA (1)...(19): siRNA sense strand
caucaaauguggcauccaa

SEQ ID NO: 31781 - RNA, 19 nt, Homo sapiens
  misc_RNA (1)...(19): siRNA sense strand
gaaccaggaaauugaguuu

SEQ ID NO: 31782 - RNA, 19 nt, Homo sapiens
  misc_RNA (1)...(19): siRNA sense strand
aaauuugccuccuucauug

SEQ ID NO: 31783 - RNA, 19 nt, Homo sapiens
  misc_RNA (1)...(19): siRNA sense strand
ccagagauccagaauguga

SEQ ID NO: 31784 - RNA, 19 nt, Homo sapiens
  misc_RNA (1)...(19): siRNA sense strand
ggauacagcucuggaagca

SEQ ID NO: 31785 - RNA, 19 nt, Homo sapiens
  misc_RNA (1)...(19): siRNA sense strand
guaugaggaugaaaucaau

SEQ ID NO: 31786 - RNA, 19 nt, Homo sapiens
  misc_RNA (1)...(19): siRNA sense strand
gaccuucucuuuuagauaa

SEQ ID NO: 31787 - RNA, 19 nt, Homo sapiens
  misc_RNA (1)...(19): siRNA sense strand
gaagaagcaguguaagaau

SEQ ID NO: 31788 - RNA, 19 nt, Homo sapiens
  misc_RNA (1)...(19): siRNA sense strand
ugaauaacaugcaggaucu

SEQ ID NO: 31789 - RNA, 19 nt, Homo sapiens
  misc_RNA (1)...(19): siRNA sense strand
uugcaaaucucgaggaaga

SEQ ID NO: 31790 - RNA, 19 nt, Homo sapiens
  misc_RNA (1)...(19): siRNA sense strand
accaagagcaucuccauua

SEQ ID NO: 31791 - RNA, 19 nt, Homo sapiens
  misc_RNA (1)...(19): siRNA sense strand
gagacagccugaaagagau

SEQ ID NO: 31792 - RNA, 19 nt, Homo sapiens
  misc_RNA (1)...(19): siRNA sense strand
ccaagagcaucuccauuag

SEQ ID NO: 31793 - RNA, 19 nt, Homo sapiens
  misc_RNA (1)...(19): siRNA sense strand
uggaggaggugguggcuuu

SEQ ID NO: 31794 - RNA, 19 nt, Homo sapiens
  misc_RNA (1)...(19): siRNA sense strand
ggaggccgcuuuggagguu

SEQ ID NO: 31795 - RNA, 19 nt, Homo sapiens
  misc_RNA (1)...(19): siRNA sense strand
ugaagaagcaguguaagaa

SEQ ID NO: 31796 - RNA, 19 nt, Homo sapiens
  misc_RNA (1)...(19): siRNA sense strand
ggagaucgcacaugugaag

SEQ ID NO: 31797 - RNA, 19 nt, Homo sapiens
  misc_RNA (1)...(19): siRNA sense strand
gaaaguugacccagagauc

SEQ ID NO: 31798 - RNA, 19 nt, Homo sapiens
  misc_RNA (1)...(19): siRNA sense strand
gaucaaaacucucaacaac

SEQ ID NO: 31799 - RNA, 19 nt, Homo sapiens
  misc_RNA (1)...(19): siRNA sense strand
ggagguagaggguccaguu

SEQ ID NO: 31800 - RNA, 19 nt, Homo sapiens
  misc_RNA (1)...(19): siRNA sense strand
gaagcuggcccuagaugug

SEQ ID NO: 31801 - RNA, 19 nt, Homo sapiens
  misc_RNA (1)...(19): siRNA sense strand
agaaagaacaucacagaau

SEQ ID NO: 31802 - RNA, 19 nt, Homo sapiens
  misc_RNA (1)...(19): siRNA sense strand
ucgacagccucaagagaua

SEQ ID NO: 31803 - RNA, 19 nt, Homo sapiens
  misc_RNA (1)...(19): siRNA sense strand
gagcugcuacaacaaauga

SEQ ID NO: 31804 - RNA, 19 nt, Homo sapiens
  misc_RNA (1)...(19): siRNA sense strand
gaccucagcagcaauguga

SEQ ID NO: 31805 - RNA, 19 nt, Homo sapiens
  misc_RNA (1)...(19): siRNA sense strand
aagagcaucuccauuagug

SEQ ID NO: 31806 - RNA, 19 nt, Homo sapiens
  misc_RNA (1)...(19): siRNA sense strand
gugacaagcagcaccauuu

SEQ ID NO: 31807 - RNA, 19 nt, Homo sapiens
  misc_RNA (1)...(19): siRNA sense strand
ccaggaacaaguugaauga

SEQ ID NO: 31808 - RNA, 19 nt, Homo sapiens
  misc_RNA (1)...(19): siRNA sense strand
aagaagcaguguaagaaug

SEQ ID NO: 31809 - RNA, 19 nt, Homo sapiens
  misc_RNA (1)...(19): siRNA sense strand
aaugggagcugcuacaaca

SEQ ID NO: 31810 - RNA, 19 nt, Homo sapiens
  misc_RNA (1)...(19): siRNA sense strand
ucaaaacucucaacaacaa

SEQ ID NO: 31811 - RNA, 19 nt, Homo sapiens
  misc_RNA (1)...(19): siRNA sense strand
gaaguaugaggaugaaauc

SEQ ID NO: 31812 - RNA, 19 nt, Homo sapiens
  misc_RNA (1)...(19): siRNA sense strand
gcaaugugacugugucugu

SEQ ID NO: 31813 - RNA, 19 nt, Homo sapiens
  misc_RNA (1)...(19): siRNA sense strand
ugauaaagguggaguugca

SEQ ID NO: 31814 - RNA, 19 nt, Homo sapiens
  misc_RNA (1)...(19): siRNA sense strand
acccagagauccagaaugu

SEQ ID NO: 31815 - RNA, 19 nt, Homo sapiens
  misc_RNA (1)...(19): siRNA sense strand
ggagaucaacuuccagcuu

SEQ ID NO: 31816 - RNA, 19 nt, Homo sapiens
  misc_RNA (1)...(19): siRNA sense strand
aaagagaucaagauagaga

SEQ ID NO: 31817 - RNA, 19 nt, Homo sapiens
  misc_RNA (1)...(19): siRNA sense strand
gguggaagccggagaucaa

SEQ ID NO: 31818 - RNA, 19 nt, Homo sapiens
  misc_RNA (1)...(19): siRNA sense strand
ccugaaagagaucaagaua

SEQ ID NO: 31819 - RNA, 19 nt, Homo sapiens
  misc_RNA (1)...(19): siRNA sense strand
gcagcagaaccagguguua

SEQ ID NO: 31820 - RNA, 19 nt, Homo sapiens
  misc_RNA (1)...(19): siRNA sense strand
gugaagaagcaguguaaga

SEQ ID NO: 31821 - RNA, 19 nt, Homo sapiens
  misc_RNA (1)...(19): siRNA sense strand
guugucagaucucuugcaa

SEQ ID NO: 31822 - RNA, 19 nt, Homo sapiens
  misc_RNA (1)...(19): siRNA sense strand
agaagaaguaugaggauga

SEQ ID NO: 31823 - RNA, 19 nt, Homo sapiens
  misc_RNA (1)...(19): siRNA sense strand
ucugaaaguucucuaugau

SEQ ID NO: 31824 - RNA, 19 nt, Homo sapiens
  misc_RNA (1)...(19): siRNA sense strand
ggaagccggagaucaacuu

SEQ ID NO: 31825 - RNA, 19 nt, Homo sapiens
  misc_RNA (1)...(19): siRNA sense strand
ggagaccucagcagcaaug

SEQ ID NO: 31826 - RNA, 19 nt, Homo sapiens
  misc_RNA (1)...(19): siRNA sense strand
gaucgccaccuaccgcaaa

SEQ ID NO: 31827 - RNA, 19 nt, Homo sapiens
  misc_RNA (1)...(19): siRNA sense strand
gggagcugcuacaacaaau

SEQ ID NO: 31828 - RNA, 19 nt, Homo sapiens
  misc_RNA (1)...(19): siRNA sense strand
gaucgcacaugugaagaag

SEQ ID NO: 31829 - RNA, 19 nt, Homo sapiens
  misc_RNA (1)...(19): siRNA sense strand
ggaggaggagguucuaucu

SEQ ID NO: 31830 - RNA, 19 nt, Homo sapiens
  misc_RNA (1)...(19): siRNA sense strand
uaacaugcaggaucuugug

SEQ ID NO: 31831 - RNA, 19 nt, Homo sapiens
  misc_RNA (1)...(19): siRNA sense strand
acaacaaauuugccuccuu

SEQ ID NO: 31832 - RNA, 19 nt, Homo sapiens
  misc_RNA (1)...(19): siRNA sense strand
gcucuggaagcagcaguua

SEQ ID NO: 31833 - RNA, 19 nt, Homo sapiens
  misc_RNA (1)...(19): siRNA sense strand
gaagcaguguaagaaugug

SEQ ID NO: 31834 - RNA, 19 nt, Homo sapiens
  misc_RNA (1)...(19): siRNA sense strand
ggaccaagagcaucuccau

SEQ ID NO: 31835 - RNA, 19 nt, Homo sapiens
  misc_RNA (1)...(19): siRNA sense strand
caaaugggagcugcuacaa

SEQ ID NO: 31836 - RNA, 19 nt, Homo sapiens
  misc_RNA (1)...(19): siRNA sense strand
aggaggagguucuaucucu

SEQ ID NO: 31837 - RNA, 19 nt, Homo sapiens
  misc_RNA (1)...(19): siRNA sense strand
ggaggauacagcucuggaa

SEQ ID NO: 31838 - RNA, 19 nt, Homo sapiens
  misc_RNA (1)...(19): siRNA sense strand
gaucuuguggaggauuaua

SEQ ID NO: 31839 - RNA, 19 nt, Homo sapiens
  misc_RNA (1)...(19): siRNA sense strand
cagaaagaacaucacagaa

SEQ ID NO: 31840 - RNA, 19 nt, Homo sapiens
  misc_RNA (1)...(19): siRNA sense strand
gccgcaaccuggacuugga

SEQ ID NO: 31841 - RNA, 19 nt, Homo sapiens
  misc_RNA (1)...(19): siRNA sense strand
gguucuagcucuguaaagg

SEQ ID NO: 31842 - RNA, 19 nt, Homo sapiens
  misc_RNA (1)...(19): siRNA sense strand
gaucuggugguggcucuaa

SEQ ID NO: 31843 - RNA, 19 nt, Homo sapiens
  misc_RNA (1)...(19): siRNA sense strand
ggcgaggagugcaggaugu

SEQ ID NO: 31844 - RNA, 19 nt, Homo sapiens
  misc_RNA (1)...(19): siRNA sense strand
ucgcacaugugaagaagca

SEQ ID NO: 31845 - RNA, 19 nt, Homo sapiens
  misc_RNA (1)...(19): siRNA sense strand
gaccaagagcaucuccauu

SEQ ID NO: 31846 - RNA, 19 nt, Homo sapiens
  misc_RNA (1)...(19): siRNA sense strand
agaaguaugaggaugaaau

SEQ ID NO: 31847 - RNA, 19 nt, Homo sapiens
  misc_RNA (1)...(19): siRNA sense strand
guggaggauuauaagaaga

SEQ ID NO: 31848 - RNA, 19 nt, Homo sapiens
  misc_RNA (1)...(19): siRNA sense strand
aggaucuuguggaggauua

SEQ ID NO: 31849 - RNA, 19 nt, Homo sapiens
  misc_RNA (1)...(19): siRNA sense strand
caaccuggagcccaucuuc

SEQ ID NO: 31850 - RNA, 19 nt, Homo sapiens
  misc_RNA (1)...(19): siRNA sense strand
ccaagagcgugagcagauc

SEQ ID NO: 31851 - RNA, 19 nt, Homo sapiens
  misc_RNA (1)...(19): siRNA sense strand
ugacaagcagcaccauuuc

SEQ ID NO: 31852 - RNA, 19 nt, Homo sapiens
  misc_RNA (1)...(19): siRNA sense strand
uaagaagaaguaugaggau

SEQ ID NO: 31853 - RNA, 19 nt, Homo sapiens
  misc_RNA (1)...(19): siRNA sense strand
gaccaaaugggagcugcua

SEQ ID NO: 31854 - RNA, 19 nt, Homo sapiens
  misc_RNA (1)...(19): siRNA sense strand
ugggcucacugcagaaaga

SEQ ID NO: 31855 - RNA, 19 nt, Homo sapiens
  misc_RNA (1)...(19): siRNA sense strand
aaggguagcucaggugaag

SEQ ID NO: 31856 - RNA, 19 nt, Homo sapiens
  misc_RNA (1)...(19): siRNA sense strand
gacaagcagcaccauuuca

SEQ ID NO: 31857 - RNA, 19 nt, Homo sapiens
  misc_RNA (1)...(19): siRNA sense strand
ggagggaccaagagcaucu

SEQ ID NO: 31858 - RNA, 19 nt, Homo sapiens
  misc_RNA (1)...(19): siRNA sense strand
caagagcaucuccauuagu

SEQ ID NO: 31859 - RNA, 19 nt, Homo sapiens
  misc_RNA (1)...(19): siRNA sense strand
uguggaggauuauaagaag

SEQ ID NO: 31860 - RNA, 19 nt, Homo sapiens
  misc_RNA (1)...(19): siRNA sense strand
aaagaacaucacagaauuc

SEQ ID NO: 31861 - RNA, 19 nt, Homo sapiens
  misc_RNA (1)...(19): siRNA sense strand
ccaaaugggagcugcuaca

SEQ ID NO: 31862 - RNA, 19 nt, Homo sapiens
  misc_RNA (1)...(19): siRNA sense strand
ccacgaagucucugucaac

SEQ ID NO: 31863 - RNA, 19 nt, Homo sapiens
  misc_RNA (1)...(19): siRNA sense strand
cguggacaaugccuacaug

SEQ ID NO: 31864 - RNA, 19 nt, Homo sapiens
  misc_RNA (1)...(19): siRNA sense strand
gcuuugggccuggaggaua

SEQ ID NO: 31865 - RNA, 19 nt, Homo sapiens
  misc_RNA (1)...(19): siRNA sense strand
cagaggaggugguuuugga

SEQ ID NO: 31866 - RNA, 19 nt, Homo sapiens
  misc_RNA (1)...(19): siRNA sense strand
ccagcgugaccuucucuuu

SEQ ID NO: 31867 - RNA, 19 nt, Homo sapiens
  misc_RNA (1)...(19): siRNA sense strand
uaagggaggguccaucucu

SEQ ID NO: 31868 - RNA, 19 nt, Homo sapiens
  misc_RNA (1)...(19): siRNA sense strand
ucaagacccucaacaauaa

SEQ ID NO: 31869 - RNA, 19 nt, Homo sapiens
  misc_RNA (1)...(19): siRNA sense strand
gaacaaguaugaggaugaa

SEQ ID NO: 31870 - RNA, 19 nt, Homo sapiens
  misc_RNA (1)...(19): siRNA sense strand
gaagaaggauguagaugcu

SEQ ID NO: 31871 - RNA, 19 nt, Homo sapiens
  misc_RNA (1)...(19): siRNA sense strand
gaucaagacccucaacaau

SEQ ID NO: 31872 - RNA, 19 nt, Homo sapiens
  misc_RNA (1)...(19): siRNA sense strand
gguaucagaccaaguauga

SEQ ID NO: 31873 - RNA, 19 nt, Homo sapiens
  misc_RNA (1)...(19): siRNA sense strand
gcacugauggaugagauua

SEQ ID NO: 31874 - RNA, 19 nt, Homo sapiens
  misc_RNA (1)...(19): siRNA sense strand
caagguugaugcacugaug

SEQ ID NO: 31875 - RNA, 19 nt, Homo sapiens
  misc_RNA (1)...(19): siRNA sense strand
acaauaaguuugccuccuu

SEQ ID NO: 31876 - RNA, 19 nt, Homo sapiens
  misc_RNA (1)...(19): siRNA sense strand
ggaccuggauagcaucauc

SEQ ID NO: 31877 - RNA, 19 nt, Homo sapiens
  misc_RNA (1)...(19): siRNA sense strand
caucaucgcugaggucaag

SEQ ID NO: 31878 - RNA, 19 nt, Homo sapiens
  misc_RNA (1)...(19): siRNA sense strand
uggcggagcuggcuuugga

SEQ ID NO: 31879 - RNA, 19 nt, Homo sapiens
  misc_RNA (1)...(19): siRNA sense strand
guaccacugcugagaauga

SEQ ID NO: 31880 - RNA, 19 nt, Homo sapiens
  misc_RNA (1)...(19): siRNA sense strand
ggauauccaucagcacuag

SEQ ID NO: 31881 - RNA, 19 nt, Homo sapiens
  misc_RNA (1)...(19): siRNA sense strand
uugaugcacugauggauga

SEQ ID NO: 31882 - RNA, 19 nt, Homo sapiens
  misc_RNA (1)...(19): siRNA sense strand
ggaggcggcuauggcuuug

SEQ ID NO: 31883 - RNA, 19 nt, Homo sapiens
  misc_RNA (1)...(19): siRNA sense strand
gaaaucaacaagcguacca

SEQ ID NO: 31884 - RNA, 19 nt, Homo sapiens
  misc_RNA (1)...(19): siRNA sense strand
guaugaggaugaaaucaac

SEQ ID NO: 31885 - RNA, 19 nt, Homo sapiens
  misc_RNA (1)...(19): siRNA sense strand
ccaagacugugaggcagaa

SEQ ID NO: 31886 - RNA, 19 nt, Homo sapiens
  misc_RNA (1)...(19): siRNA sense strand
gcuccagcgucaaauuugu

SEQ ID NO: 31887 - RNA, 19 nt, Homo sapiens
  misc_RNA (1)...(19): siRNA sense strand
aucaagacccucaacaaua

SEQ ID NO: 31888 - RNA, 19 nt, Homo sapiens
  misc_RNA (1)...(19): siRNA sense strand
caagaaacagugcgccaau

SEQ ID NO: 31889 - RNA, 19 nt, Homo sapiens
  misc_RNA (1)...(19): siRNA sense strand
gccgaguccugguaucaga

SEQ ID NO: 31890 - RNA, 19 nt, Homo sapiens
  misc_RNA (1)...(19): siRNA sense strand
gcguaccacugcugagaau

SEQ ID NO: 31891 - RNA, 19 nt, Homo sapiens
  misc_RNA (1)...(19): siRNA sense strand
gaugcugccuacaugaaca

SEQ ID NO: 31892 - RNA, 19 nt, Homo sapiens
  misc_RNA (1)...(19): siRNA sense strand
cagcuccagcgucaaauuu

SEQ ID NO: 31893 - RNA, 19 nt, Homo sapiens
  misc_RNA (1)...(19): siRNA sense strand
ggcgaggaaugcagacuca

SEQ ID NO: 31894 - RNA, 19 nt, Homo sapiens
  misc_RNA (1)...(19): siRNA sense strand
caugagaucacagagauga

SEQ ID NO: 31895 - RNA, 19 nt, Homo sapiens
  misc_RNA (1)...(19): siRNA sense strand
uccaagaggucacugucaa

SEQ ID NO: 31896 - RNA, 19 nt, Homo sapiens
  misc_RNA (1)...(19): siRNA sense strand
gcagcuccagcgucaaauu

SEQ ID NO: 31897 - RNA, 19 nt, Homo sapiens
  misc_RNA (1)...(19): siRNA sense strand
ggagcuggcccucaaggau

SEQ ID NO: 31898 - RNA, 19 nt, Homo sapiens
  misc_RNA (1)...(19): siRNA sense strand
gaggagcgcgagcagauca

SEQ ID NO: 31899 - RNA, 19 nt, Homo sapiens
  misc_RNA (1)...(19): siRNA sense strand
gcaguguuuccucuggaua

SEQ ID NO: 31900 - RNA, 19 nt, Homo sapiens
  misc_RNA (1)...(19): siRNA sense strand
cagacucaguggagaagga

SEQ ID NO: 31901 - RNA, 19 nt, Homo sapiens
  misc_RNA (1)...(19): siRNA sense strand
uaaguuugccuccuucauc

SEQ ID NO: 31902 - RNA, 19 nt, Homo sapiens
  misc_RNA (1)...(19): siRNA sense strand
caagaacaaguaugaggau

SEQ ID NO: 31903 - RNA, 19 nt, Homo sapiens
  misc_RNA (1)...(19): siRNA sense strand
uagcagcuccagcgucaaa

SEQ ID NO: 31904 - RNA, 19 nt, Homo sapiens
  misc_RNA (1)...(19): siRNA sense strand
gaaacagugcgccaaucug

SEQ ID NO: 31905 - RNA, 19 nt, Homo sapiens
  misc_RNA (1)...(19): siRNA sense strand
agaaugaguuugugaugcu

SEQ ID NO: 31906 - RNA, 19 nt, Homo sapiens
  misc_RNA (1)...(19): siRNA sense strand
ggcccuggcuuuccugucu

SEQ ID NO: 31907 - RNA, 19 nt, Homo sapiens
  misc_RNA (1)...(19): siRNA sense strand
gacccucaacaauaaguuu

SEQ ID NO: 31908 - RNA, 19 nt, Homo sapiens
  misc_RNA (1)...(19): siRNA sense strand
gaaggaguuggaccaguca

SEQ ID NO: 31909 - RNA, 19 nt, Homo sapiens
  misc_RNA (1)...(19): siRNA sense strand
ccaagaggauauccaucag

SEQ ID NO: 31910 - RNA, 19 nt, Homo sapiens
  misc_RNA (1)...(19): siRNA sense strand
gaagccgaguccugguauc

SEQ ID NO: 31911 - RNA, 19 nt, Homo sapiens
  misc_RNA (1)...(19): siRNA sense strand
cagaagccgaguccuggua

SEQ ID NO: 31912 - RNA, 19 nt, Homo sapiens
  misc_RNA (1)...(19): siRNA sense strand
caaguaugaggaugaaauc

SEQ ID NO: 31913 - RNA, 19 nt, Homo sapiens
  misc_RNA (1)...(19): siRNA sense strand
acaaguaugaggaugaaau

SEQ ID NO: 31914 - RNA, 19 nt, Homo sapiens
  misc_RNA (1)...(19): siRNA sense strand
agaacaaguaugaggauga

SEQ ID NO: 31915 - RNA, 19 nt, Homo sapiens
  misc_RNA (1)...(19): siRNA sense strand
ccaagcaugagaucacaga

SEQ ID NO: 31916 - RNA, 19 nt, Homo sapiens
  misc_RNA (1)...(19): siRNA sense strand
gguaguggauuugguuucg

SEQ ID NO: 31917 - RNA, 19 nt, Homo sapiens
  misc_RNA (1)...(19): siRNA sense strand
ccacugcugagaaugaguu

SEQ ID NO: 31918 - RNA, 19 nt, Homo sapiens
  misc_RNA (1)...(19): siRNA sense strand
caacaccaagcaugagauc

SEQ ID NO: 31919 - RNA, 19 nt, Homo sapiens
  misc_RNA (1)...(19): siRNA sense strand
augcggagcugucccagau

SEQ ID NO: 31920 - RNA, 19 nt, Homo sapiens
  misc_RNA (1)...(19): siRNA sense strand
gcugagaaugaguuuguga

SEQ ID NO: 31921 - RNA, 19 nt, Homo sapiens
  misc_RNA (1)...(19): siRNA sense strand
gcgaugaccuccgcaacac

SEQ ID NO: 31922 - RNA, 19 nt, Homo sapiens
  misc_RNA (1)...(19): siRNA sense strand
agcaugagaucacagagau

SEQ ID NO: 31923 - RNA, 19 nt, Homo sapiens
  misc_RNA (1)...(19): siRNA sense strand
ggagcuggaggccaagguu

SEQ ID NO: 31924 - RNA, 19 nt, Homo sapiens
  misc_RNA (1)...(19): siRNA sense strand
ggagguagcaguggaagcu

SEQ ID NO: 31925 - RNA, 19 nt, Homo sapiens
  misc_RNA (1)...(19): siRNA sense strand
ucaaggaugccaggaacaa

SEQ ID NO: 31926 - RNA, 19 nt, Homo sapiens
  misc_RNA (1)...(19): siRNA sense strand
ugagaaugaguuugugaug

SEQ ID NO: 31927 - RNA, 19 nt, Homo sapiens
  misc_RNA (1)...(19): siRNA sense strand
ggucaaggcccaguaugag

SEQ ID NO: 31928 - RNA, 19 nt, Homo sapiens
  misc_RNA (1)...(19): siRNA sense strand
gcugaagaaggauguagau

SEQ ID NO: 31929 - RNA, 19 nt, Homo sapiens
  misc_RNA (1)...(19): siRNA sense strand
uagaugcugccuacaugaa

SEQ ID NO: 31930 - RNA, 19 nt, Homo sapiens
  misc_RNA (1)...(19): siRNA sense strand
ggcucuggcuucagugcaa

SEQ ID NO: 31931 - RNA, 19 nt, Homo sapiens
  misc_RNA (1)...(19): siRNA sense strand
uggaggaggcccugcagaa

SEQ ID NO: 31932 - RNA, 19 nt, Homo sapiens
  misc_RNA (1)...(19): siRNA sense strand
acagagaugaaccggauga

SEQ ID NO: 31933 - RNA, 19 nt, Homo sapiens
  misc_RNA (1)...(19): siRNA sense strand
gcaacaccaagcaugagau

SEQ ID NO: 31934 - RNA, 19 nt, Homo sapiens
  misc_RNA (1)...(19): siRNA sense strand
uggaggcggcuauggcuuu

SEQ ID NO: 31935 - RNA, 19 nt, Homo sapiens
  misc_RNA (1)...(19): siRNA sense strand
uccaagaggauauccauca

SEQ ID NO: 31936 - RNA, 19 nt, Homo sapiens
  misc_RNA (1)...(19): siRNA sense strand
caccaagcaugagaucaca

SEQ ID NO: 31937 - RNA, 19 nt, Homo sapiens
  misc_RNA (1)...(19): siRNA sense strand
ggcccaguaugaggagauu

SEQ ID NO: 31938 - RNA, 19 nt, Homo sapiens
  misc_RNA (1)...(19): siRNA sense strand
ugauggaugagauuaacuu

SEQ ID NO: 31939 - RNA, 19 nt, Homo sapiens
  misc_RNA (1)...(19): siRNA sense strand
ccucagugguccucuccau

SEQ ID NO: 31940 - RNA, 19 nt, Homo sapiens
  misc_RNA (1)...(19): siRNA sense strand
aagaaacagugcgccaauc

SEQ ID NO: 31941 - RNA, 19 nt, Homo sapiens
  misc_RNA (1)...(19): siRNA sense strand
gcugagagccgagauugac

SEQ ID NO: 31942 - RNA, 19 nt, Homo sapiens
  misc_RNA (1)...(19): siRNA sense strand
gaaaggacaucgagaauca

SEQ ID NO: 31943 - RNA, 19 nt, Homo sapiens
  misc_RNA (1)...(19): siRNA sense strand
gcaaagaucucaccaagac

SEQ ID NO: 31944 - RNA, 19 nt, Homo sapiens
  misc_RNA (1)...(19): siRNA sense strand
ggaggaggcuauaguaguu

SEQ ID NO: 31945 - RNA, 19 nt, Homo sapiens
  misc_RNA (1)...(19): siRNA sense strand
acaacgaccuggagaauaa

SEQ ID NO: 31946 - RNA, 19 nt, Homo sapiens
  misc_RNA (1)...(19): siRNA sense strand
gagaagagcuuggaagaca

SEQ ID NO: 31947 - RNA, 19 nt, Homo sapiens
  misc_RNA (1)...(19): siRNA sense strand
gaagggaccugcugcuauc

SEQ ID NO: 31948 - RNA, 19 nt, Homo sapiens
  misc_RNA (1)...(19): siRNA sense strand
gaaagcagcucuggagaag

SEQ ID NO: 31949 - RNA, 19 nt, Homo sapiens
  misc_RNA (1)...(19): siRNA sense strand
ggauaaaguuugagaugga

SEQ ID NO: 31950 - RNA, 19 nt, Homo sapiens
  misc_RNA (1)...(19): siRNA sense strand
ggacaucgagaaucaauau

SEQ ID NO: 31951 - RNA, 19 nt, Homo sapiens
  misc_RNA (1)...(19): siRNA sense strand
uaacccagaucgagcauga

SEQ ID NO: 31952 - RNA, 19 nt, Homo sapiens
  misc_RNA (1)...(19): siRNA sense strand
gggaagcucucgugucugu

SEQ ID NO: 31953 - RNA, 19 nt, Homo sapiens
  misc_RNA (1)...(19): siRNA sense strand
ugacaacacucgcaugaca

SEQ ID NO: 31954 - RNA, 19 nt, Homo sapiens
  misc_RNA (1)...(19): siRNA sense strand
agaaggaaaucgagaccua

SEQ ID NO: 31955 - RNA, 19 nt, Homo sapiens
  misc_RNA (1)...(19): siRNA sense strand
cgauucagcucuucuagug

SEQ ID NO: 31956 - RNA, 19 nt, Homo sapiens
  misc_RNA (1)...(19): siRNA sense strand
gcaugacacuggaugacuu

SEQ ID NO: 31957 - RNA, 19 nt, Homo sapiens
  misc_RNA (1)...(19): siRNA sense strand
cuggaugacuucaggauaa

SEQ ID NO: 31958 - RNA, 19 nt, Homo sapiens
  misc_RNA (1)...(19): siRNA sense strand
gaacaguggagaugucaau

SEQ ID NO: 31959 - RNA, 19 nt, Homo sapiens
  misc_RNA (1)...(19): siRNA sense strand
gcagaacaguggagauguc

SEQ ID NO: 31960 - RNA, 19 nt, Homo sapiens
  misc_RNA (1)...(19): siRNA sense strand
ucaccaagacccucaauga

SEQ ID NO: 31961 - RNA, 19 nt, Homo sapiens
  misc_RNA (1)...(19): siRNA sense strand
ggaaguggagguggucaua

SEQ ID NO: 31962 - RNA, 19 nt, Homo sapiens
  misc_RNA (1)...(19): siRNA sense strand
gagcaugagguauccagua

SEQ ID NO: 31963 - RNA, 19 nt, Homo sapiens
  misc_RNA (1)...(19): siRNA sense strand
aaacucuccuggacauuga

SEQ ID NO: 31964 - RNA, 19 nt, Homo sapiens
  misc_RNA (1)...(19): siRNA sense strand
ccaagacccucaaugacau

SEQ ID NO: 31965 - RNA, 19 nt, Homo sapiens
  misc_RNA (1)...(19): siRNA sense strand
ucaagaagaaucauaagga

SEQ ID NO: 31966 - RNA, 19 nt, Homo sapiens
  misc_RNA (1)...(19): siRNA sense strand
gaacuacuccccuuauuau

SEQ ID NO: 31967 - RNA, 19 nt, Homo sapiens
  misc_RNA (1)...(19): siRNA sense strand
ggaaguggaggcaguuaug

SEQ ID NO: 31968 - RNA, 19 nt, Homo sapiens
  misc_RNA (1)...(19): siRNA sense strand
gcucauugcuaagaacaga

SEQ ID NO: 31969 - RNA, 19 nt, Homo sapiens
  misc_RNA (1)...(19): siRNA sense strand
ugauggcccucaagaagaa

SEQ ID NO: 31970 - RNA, 19 nt, Homo sapiens
  misc_RNA (1)...(19): siRNA sense strand
ccagaucgagcaugaggua

SEQ ID NO: 31971 - RNA, 19 nt, Homo sapiens
  misc_RNA (1)...(19): siRNA sense strand
cuacggaggcggugaagaa

SEQ ID NO: 31972 - RNA, 19 nt, Homo sapiens
  misc_RNA (1)...(19): siRNA sense strand
caugagguauccaguagug

SEQ ID NO: 31973 - RNA, 19 nt, Homo sapiens
  misc_RNA (1)...(19): siRNA sense strand
gaagagcaccaugcaggaa

SEQ ID NO: 31974 - RNA, 19 nt, Homo sapiens
  misc_RNA (1)...(19): siRNA sense strand
auucucggcuggccucuua

SEQ ID NO: 31975 - RNA, 19 nt, Homo sapiens
  misc_RNA (1)...(19): siRNA sense strand
gugguauucugacugcuaa

SEQ ID NO: 31976 - RNA, 19 nt, Homo sapiens
  misc_RNA (1)...(19): siRNA sense strand
ggaaguggagguggccaua

SEQ ID NO: 31977 - RNA, 19 nt, Homo sapiens
  misc_RNA (1)...(19): siRNA sense strand
caacaacgaccuggagaau

SEQ ID NO: 31978 - RNA, 19 nt, Homo sapiens
  misc_RNA (1)...(19): siRNA sense strand
gagaucgagugccagaauc

SEQ ID NO: 31979 - RNA, 19 nt, Homo sapiens
  misc_RNA (1)...(19): siRNA sense strand
caguggagaugucaaugug

SEQ ID NO: 31980 - RNA, 19 nt, Homo sapiens
  misc_RNA (1)...(19): siRNA sense strand
ggaaguggaggcagcuaug

SEQ ID NO: 31981 - RNA, 19 nt, Homo sapiens
  misc_RNA (1)...(19): siRNA sense strand
ucacugacguccggcaaga

SEQ ID NO: 31982 - RNA, 19 nt, Homo sapiens
  misc_RNA (1)...(19): siRNA sense strand
ggcaggugcuggacaaucu

SEQ ID NO: 31983 - RNA, 19 nt, Homo sapiens
  misc_RNA (1)...(19): siRNA sense strand
gaaaaucaucccauuccua

SEQ ID NO: 31984 - RNA, 19 nt, Homo sapiens
  misc_RNA (1)...(19): siRNA sense strand
cagcuacgguggaggaagu

SEQ ID NO: 31985 - RNA, 19 nt, Homo sapiens
  misc_RNA (1)...(19): siRNA sense strand
gagcugauggcccucaaga

SEQ ID NO: 31986 - RNA, 19 nt, Homo sapiens
  misc_RNA (1)...(19): siRNA sense strand
gacagugggcaacaacaaa

SEQ ID NO: 31987 - RNA, 19 nt, Homo sapiens
  misc_RNA (1)...(19): siRNA sense strand
agucucagcucagcaagaa

SEQ ID NO: 31988 - RNA, 19 nt, Homo sapiens
  misc_RNA (1)...(19): siRNA sense strand
acagaaaggacaucgagaa

SEQ ID NO: 31989 - RNA, 19 nt, Homo sapiens
  misc_RNA (1)...(19): siRNA sense strand
gcugauggcccucaagaag

SEQ ID NO: 31990 - RNA, 19 nt, Homo sapiens
  misc_RNA (1)...(19): siRNA sense strand
uccaggagcagaucaguaa

SEQ ID NO: 31991 - RNA, 19 nt, Homo sapiens
  misc_RNA (1)...(19): siRNA sense strand
uggacaaucugaccaugga

SEQ ID NO: 31992 - RNA, 19 nt, Homo sapiens
  misc_RNA (1)...(19): siRNA sense strand
caggauaaaguuugagaug

SEQ ID NO: 31993 - RNA, 19 nt, Homo sapiens
  misc_RNA (1)...(19): siRNA sense strand
agacucagauaacccagau

SEQ ID NO: 31994 - RNA, 19 nt, Homo sapiens
  misc_RNA (1)...(19): siRNA sense strand
caucgagaaucaauaugag

SEQ ID NO: 31995 - RNA, 19 nt, Homo sapiens
  misc_RNA (1)...(19): siRNA sense strand
ggugauggugguauucuga

SEQ ID NO: 31996 - RNA, 19 nt, Homo sapiens
  misc_RNA (1)...(19): siRNA sense strand
gaagaagcgaguggaagug

SEQ ID NO: 31997 - RNA, 19 nt, Homo sapiens
  misc_RNA (1)...(19): siRNA sense strand
agaugucaauguggagaua

SEQ ID NO: 31998 - RNA, 19 nt, Homo sapiens
  misc_RNA (1)...(19): siRNA sense strand
gggcagaacaguggagaug

SEQ ID NO: 31999 - RNA, 19 nt, Homo sapiens
  misc_RNA (1)...(19): siRNA sense strand
cugcugcuauccagaagaa

SEQ ID NO: 32000 - RNA, 19 nt, Homo sapiens
  misc_RNA (1)...(19): siRNA sense strand
gcuggccucuuacuuggau

SEQ ID NO: 32001 - RNA, 19 nt, Homo sapiens
  misc_RNA (1)...(19): siRNA sense strand
gggaggccaggaagacuuu

SEQ ID NO: 32002 - RNA, 19 nt, Homo sapiens
  misc_RNA (1)...(19): siRNA sense strand
agaaagcagcucuggagaa

SEQ ID NO: 32003 - RNA, 19 nt, Homo sapiens
  misc_RNA (1)...(19): siRNA sense strand
cagaaaggacaucgagaau

SEQ ID NO: 32004 - RNA, 19 nt, Homo sapiens
  misc_RNA (1)...(19): siRNA sense strand
uggaggcaguuauggaaga

SEQ ID NO: 32005 - RNA, 19 nt, Homo sapiens
  misc_RNA (1)...(19): siRNA sense strand
ugaagaagcgaguggaagu

SEQ ID NO: 32006 - RNA, 19 nt, Homo sapiens
  misc_RNA (1)...(19): siRNA sense strand
ggugguauucugacugcua

SEQ ID NO: 32007 - RNA, 19 nt, Homo sapiens
  misc_RNA (1)...(19): siRNA sense strand
ggccauagcggaggaagug

SEQ ID NO: 32008 - RNA, 19 nt, Homo sapiens
  misc_RNA (1)...(19): siRNA sense strand
gaggaaguggaggcaguua

SEQ ID NO: 32009 - RNA, 19 nt, Homo sapiens
  misc_RNA (1)...(19): siRNA sense strand
guauucugacugcuaauga

SEQ ID NO: 32010 - RNA, 19 nt, Homo sapiens
  misc_RNA (1)...(19): siRNA sense strand
agaugcggcuggagaagga

SEQ ID NO: 32011 - RNA, 19 nt, Homo sapiens
  misc_RNA (1)...(19): siRNA sense strand
accuggagaugcaguauga

SEQ ID NO: 32012 - RNA, 19 nt, Homo sapiens
  misc_RNA (1)...(19): siRNA sense strand
uggaugacuucaggauaaa

SEQ ID NO: 32013 - RNA, 19 nt, Homo sapiens
  misc_RNA (1)...(19): siRNA sense strand
gaccugcugcuauccagaa

SEQ ID NO: 32014 - RNA, 19 nt, Homo sapiens
  misc_RNA (1)...(19): siRNA sense strand
uagaggaggccaacaacga

SEQ ID NO: 32015 - RNA, 19 nt, Homo sapiens
  misc_RNA (1)...(19): siRNA sense strand
agaagggaccugcugcuau

SEQ ID NO: 32016 - RNA, 19 nt, Homo sapiens
  misc_RNA (1)...(19): siRNA sense strand
ccaggaagacuuugaaucc

SEQ ID NO: 32017 - RNA, 19 nt, Homo sapiens
  misc_RNA (1)...(19): siRNA sense strand
uaacuuggaggcccagauc

SEQ ID NO: 32018 - RNA, 19 nt, Homo sapiens
  misc_RNA (1)...(19): siRNA sense strand
acaucgagaaucaauauga

SEQ ID NO: 32019 - RNA, 19 nt, Homo sapiens
  misc_RNA (1)...(19): siRNA sense strand
gggaggcgguggcaguuuu

SEQ ID NO: 32020 - RNA, 19 nt, Homo sapiens
  misc_RNA (1)...(19): siRNA sense strand
gaagaacuacuccccuuau

SEQ ID NO: 32021 - RNA, 19 nt, Homo sapiens
  misc_RNA (1)...(19): siRNA sense strand
agucugaccuggagaugca

SEQ ID NO: 32022 - RNA, 19 nt, Homo sapiens
  misc_RNA (1)...(19): siRNA sense strand
uaguuuaggcgguggcuuu

SEQ ID NO: 32023 - RNA, 19 nt, Homo sapiens
  misc_RNA (1)...(19): siRNA sense strand
ugacagugggcaacaacaa

SEQ ID NO: 32024 - RNA, 19 nt, Homo sapiens
  misc_RNA (1)...(19): siRNA sense strand
ggucauaguggaggaagug

SEQ ID NO: 32025 - RNA, 19 nt, Homo sapiens
  misc_RNA (1)...(19): siRNA sense strand
guggccagcugcagaugau

SEQ ID NO: 32026 - RNA, 19 nt, Homo sapiens
  misc_RNA (1)...(19): siRNA sense strand
gcagcucauugcuaagaac

SEQ ID NO: 32027 - RNA, 19 nt, Homo sapiens
  misc_RNA (1)...(19): siRNA sense strand
ccaacaacgaccuggagaa

SEQ ID NO: 32028 - RNA, 19 nt, Homo sapiens
  misc_RNA (1)...(19): siRNA sense strand
ggaaguggagguggcuaug

SEQ ID NO: 32029 - RNA, 19 nt, Homo sapiens
  misc_RNA (1)...(19): siRNA sense strand
ggaggcaguuauggaagag

SEQ ID NO: 32030 - RNA, 19 nt, Homo sapiens
  misc_RNA (1)...(19): siRNA sense strand
ggaggaaguggaggcaguu

SEQ ID NO: 32031 - RNA, 19 nt, Homo sapiens
  misc_RNA (1)...(19): siRNA sense strand
gcaccaugcaggaacucaa

SEQ ID NO: 32032 - RNA, 19 nt, Homo sapiens
  misc_RNA (1)...(19): siRNA sense strand
gaucgagcaugagguaucc

SEQ ID NO: 32033 - RNA, 19 nt, Homo sapiens
  misc_RNA (1)...(19): siRNA sense strand
auaaggaggagaugaguca

SEQ ID NO: 32034 - RNA, 19 nt, Homo sapiens
  misc_RNA (1)...(19): siRNA sense strand
gcauaaggucuuccuacag

SEQ ID NO: 32035 - RNA, 19 nt, Homo sapiens
  misc_RNA (1)...(19): siRNA sense strand
gcccucaagaagaaucaua

SEQ ID NO: 32036 - RNA, 19 nt, Homo sapiens
  misc_RNA (1)...(19): siRNA sense strand
ggagaugcaguaugagacu

SEQ ID NO: 32037 - RNA, 19 nt, Homo sapiens
  misc_RNA (1)...(19): siRNA sense strand
uggagaagagcuuggaaga

SEQ ID NO: 32038 - RNA, 19 nt, Homo sapiens
  misc_RNA (1)...(19): siRNA sense strand
ggugaagaagcgaguggaa

SEQ ID NO: 32039 - RNA, 19 nt, Homo sapiens
  misc_RNA (1)...(19): siRNA sense strand
gaaguggagguggucauag

SEQ ID NO: 32040 - RNA, 19 nt, Homo sapiens
  misc_RNA (1)...(19): siRNA sense strand
gaaguggaggcaguuaugg

SEQ ID NO: 32041 - RNA, 19 nt, Homo sapiens
  misc_RNA (1)...(19): siRNA sense strand
gcuuggaagacacgaagaa

SEQ ID NO: 32042 - RNA, 19 nt, Homo sapiens
  misc_RNA (1)...(19): siRNA sense strand
gaaaugagaccaccaauau

SEQ ID NO: 32043 - RNA, 19 nt, Homo sapiens
  misc_RNA (1)...(19): siRNA sense strand
caagagacauauccacaaa

SEQ ID NO: 32044 - RNA, 19 nt, Homo sapiens
  misc_RNA (1)...(19): siRNA sense strand
gaacggcaaccucuacuuu

SEQ ID NO: 32045 - RNA, 19 nt, Homo sapiens
  misc_RNA (1)...(19): siRNA sense strand
ggaaaugagaccaccaaua

SEQ ID NO: 32046 - RNA, 19 nt, Homo sapiens
  misc_RNA (1)...(19): siRNA sense strand
gaggaugguucguucauug

SEQ ID NO: 32047 - RNA, 19 nt, Homo sapiens
  misc_RNA (1)...(19): siRNA sense strand
gaagaacccuguggaugug

SEQ ID NO: 32048 - RNA, 19 nt, Homo sapiens
  misc_RNA (1)...(19): siRNA sense strand
uggaggagcuggccaaaga

SEQ ID NO: 32049 - RNA, 19 nt, Homo sapiens
  misc_RNA (1)...(19): siRNA sense strand
gcagcacaaucgagaagaa

SEQ ID NO: 32050 - RNA, 19 nt, Homo sapiens
  misc_RNA (1)...(19): siRNA sense strand
cacuacaccuuuaggguua

SEQ ID NO: 32051 - RNA, 19 nt, Homo sapiens
  misc_RNA (1)...(19): siRNA sense strand
gauacaaugugacguacug

SEQ ID NO: 32052 - RNA, 19 nt, Homo sapiens
  misc_RNA (1)...(19): siRNA sense strand
gaccagaaguaccggauuc

SEQ ID NO: 32053 - RNA, 19 nt, Homo sapiens
  misc_RNA (1)...(19): siRNA sense strand
agagacauauccacaaaga

SEQ ID NO: 32054 - RNA, 19 nt, Homo sapiens
  misc_RNA (1)...(19): siRNA sense strand
gagauccacuuguuuaagg

SEQ ID NO: 32055 - RNA, 19 nt, Homo sapiens
  misc_RNA (1)...(19): siRNA sense strand
gcaaauacucagugaagga

SEQ ID NO: 32056 - RNA, 19 nt, Homo sapiens
  misc_RNA (1)...(19): siRNA sense strand
caucauggcuaaccugaag

SEQ ID NO: 32057 - RNA, 19 nt, Homo sapiens
  misc_RNA (1)...(19): siRNA sense strand
ggacgaggaugggacaaca

SEQ ID NO: 32058 - RNA, 19 nt, Homo sapiens
  misc_RNA (1)...(19): siRNA sense strand
cagcguggauguucaguuc

SEQ ID NO: 32059 - RNA, 19 nt, Homo sapiens
  misc_RNA (1)...(19): siRNA sense strand
gcaagagacauauccacaa

SEQ ID NO: 32060 - RNA, 19 nt, Homo sapiens
  misc_RNA (1)...(19): siRNA sense strand
ggaccaucauucagaagga

SEQ ID NO: 32061 - RNA, 19 nt, Homo sapiens
  misc_RNA (1)...(19): siRNA sense strand
ccaggaccaucauucagaa

SEQ ID NO: 32062 - RNA, 19 nt, Homo sapiens
  misc_RNA (1)...(19): siRNA sense strand
acacaauggugacccaaug

SEQ ID NO: 32063 - RNA, 19 nt, Homo sapiens
  misc_RNA (1)...(19): siRNA sense strand
guucaaagccuugggagaa

SEQ ID NO: 32064 - RNA, 19 nt, Homo sapiens
  misc_RNA (1)...(19): siRNA sense strand
gcaccaggaccaucauuca

SEQ ID NO: 32065 - RNA, 19 nt, Homo sapiens
  misc_RNA (1)...(19): siRNA sense strand
aauacucagugaaggauaa

SEQ ID NO: 32066 - RNA, 19 nt, Homo sapiens
  misc_RNA (1)...(19): siRNA sense strand
gcaacuguccuucaaccuu

SEQ ID NO: 32067 - RNA, 19 nt, Homo sapiens
  misc_RNA (1)...(19): siRNA sense strand
gcggauacaaugugacgua

SEQ ID NO: 32068 - RNA, 19 nt, Homo sapiens
  misc_RNA (1)...(19): siRNA sense strand
gggcaacaacagcaacuuu

SEQ ID NO: 32069 - RNA, 19 nt, Homo sapiens
  misc_RNA (1)...(19): siRNA sense strand
gaaauccucaacucaagug

SEQ ID NO: 32070 - RNA, 19 nt, Homo sapiens
  misc_RNA (1)...(19): siRNA sense strand
uauguccacuacaccuuua

SEQ ID NO: 32071 - RNA, 19 nt, Homo sapiens
  misc_RNA (1)...(19): siRNA sense strand
gagggaugguguccacuuc

SEQ ID NO: 32072 - RNA, 19 nt, Homo sapiens
  misc_RNA (1)...(19): siRNA sense strand
acgacagccuggccgauua

SEQ ID NO: 32073 - RNA, 19 nt, Homo sapiens
  misc_RNA (1)...(19): siRNA sense strand
uacgagauccacuuguuua

SEQ ID NO: 32074 - RNA, 19 nt, Homo sapiens
  misc_RNA (1)...(19): siRNA sense strand
ggaggaugauggcgaguac

SEQ ID NO: 32075 - RNA, 19 nt, Homo sapiens
  misc_RNA (1)...(19): siRNA sense strand
gggaugguguccacuucaa

SEQ ID NO: 32076 - RNA, 19 nt, Homo sapiens
  misc_RNA (1)...(19): siRNA sense strand
aagcacagcaagagacaua

SEQ ID NO: 32077 - RNA, 19 nt, Homo sapiens
  misc_RNA (1)...(19): siRNA sense strand
ggcaaucccugagcuggaa

SEQ ID NO: 32078 - RNA, 19 nt, Homo sapiens
  misc_RNA (1)...(19): siRNA sense strand
gggcaucuaccgcugcuuu

SEQ ID NO: 32079 - RNA, 19 nt, Homo sapiens
  misc_RNA (1)...(19): siRNA sense strand
agaagaacccuguggaugu

SEQ ID NO: 32080 - RNA, 19 nt, Homo sapiens
  misc_RNA (1)...(19): siRNA sense strand
caaagagggcccuggugaa

SEQ ID NO: 32081 - RNA, 19 nt, Homo sapiens
  misc_RNA (1)...(19): siRNA sense strand
ccaccuucgugcccuauga

SEQ ID NO: 32082 - RNA, 19 nt, Homo sapiens
  misc_RNA (1)...(19): siRNA sense strand
gauccugacugcggacaau

SEQ ID NO: 32083 - RNA, 19 nt, Homo sapiens
  misc_RNA (1)...(19): siRNA sense strand
gagcuggaaggcauugaaa

SEQ ID NO: 32084 - RNA, 19 nt, Homo sapiens
  misc_RNA (1)...(19): siRNA sense strand
ugaaggacaccaugugaug

SEQ ID NO: 32085 - RNA, 19 nt, Homo sapiens
  misc_RNA (1)...(19): siRNA sense strand
gcaacgugcagcccaguga

SEQ ID NO: 32086 - RNA, 19 nt, Homo sapiens
  misc_RNA (1)...(19): siRNA sense strand
gaccaucauucagaaggaa

SEQ ID NO: 32087 - RNA, 19 nt, Homo sapiens
  misc_RNA (1)...(19): siRNA sense strand
gaaagugggcgaggaggau

SEQ ID NO: 32088 - RNA, 19 nt, Homo sapiens
  misc_RNA (1)...(19): siRNA sense strand
uuccauaucuuguucaaag

SEQ ID NO: 32089 - RNA, 19 nt, Homo sapiens
  misc_RNA (1)...(19): siRNA sense strand
gcguggauguucaguucaa

SEQ ID NO: 32090 - RNA, 19 nt, Homo sapiens
  misc_RNA (1)...(19): siRNA sense strand
gcagcccagugacacaaug

SEQ ID NO: 32091 - RNA, 19 nt, Homo sapiens
  misc_RNA (1)...(19): siRNA sense strand
cgaggaugguucguucauu

SEQ ID NO: 32092 - RNA, 19 nt, Homo sapiens
  misc_RNA (1)...(19): siRNA sense strand
caagugccgugcuggucaa

SEQ ID NO: 32093 - RNA, 19 nt, Homo sapiens
  misc_RNA (1)...(19): siRNA sense strand
ccaccaacagcaugauuga

SEQ ID NO: 32094 - RNA, 19 nt, Homo sapiens
  misc_RNA (1)...(19): siRNA sense strand
acuacgagauccacuuguu

SEQ ID NO: 32095 - RNA, 19 nt, Homo sapiens
  misc_RNA (1)...(19): siRNA sense strand
gugcaucgccgagggcuuu

SEQ ID NO: 32096 - RNA, 19 nt, Homo sapiens
  misc_RNA (1)...(19): siRNA sense strand
ccaguacaguggcaagaag

SEQ ID NO: 32097 - RNA, 19 nt, Homo sapiens
  misc_RNA (1)...(19): siRNA sense strand
cacaguaugucagcuacaa

SEQ ID NO: 32098 - RNA, 19 nt, Homo sapiens
  misc_RNA (1)...(19): siRNA sense strand
ucaaagccuugggagaaga

SEQ ID NO: 32099 - RNA, 19 nt, Homo sapiens
  misc_RNA (1)...(19): siRNA sense strand
ugacaucagccucaagugu

SEQ ID NO: 32100 - RNA, 19 nt, Homo sapiens
  misc_RNA (1)...(19): siRNA sense strand
ggcaacaacagcaacuuug

SEQ ID NO: 32101 - RNA, 19 nt, Homo sapiens
  misc_RNA (1)...(19): siRNA sense strand
gcacagcaagagacauauc

SEQ ID NO: 32102 - RNA, 19 nt, Homo sapiens
  misc_RNA (1)...(19): siRNA sense strand
gcuggaaggcauugaaauc

SEQ ID NO: 32103 - RNA, 19 nt, Homo sapiens
  misc_RNA (1)...(19): siRNA sense strand
ugacaaguacuucauagag

SEQ ID NO: 32104 - RNA, 19 nt, Homo sapiens
  misc_RNA (1)...(19): siRNA sense strand
acaucagccucaaguguga

SEQ ID NO: 32105 - RNA, 19 nt, Homo sapiens
  misc_RNA (1)...(19): siRNA sense strand
ggccaaaggagacagugaa

SEQ ID NO: 32106 - RNA, 19 nt, Homo sapiens
  misc_RNA (1)...(19): siRNA sense strand
cuacgagauccacuuguuu

SEQ ID NO: 32107 - RNA, 19 nt, Homo sapiens
  misc_RNA (1)...(19): siRNA sense strand
ccaaggagggccagugcaa

SEQ ID NO: 32108 - RNA, 19 nt, Homo sapiens
  misc_RNA (1)...(19): siRNA sense strand
ggccuugucugggaucuca

SEQ ID NO: 32109 - RNA, 19 nt, Homo sapiens
  misc_RNA (1)...(19): siRNA sense strand
ggaagcacagcaagagaca

SEQ ID NO: 32110 - RNA, 19 nt, Homo sapiens
  misc_RNA (1)...(19): siRNA sense strand
ggacagugacaaguacuuc

SEQ ID NO: 32111 - RNA, 19 nt, Homo sapiens
  misc_RNA (1)...(19): siRNA sense strand
uaccagaaccacaacaaga

SEQ ID NO: 32112 - RNA, 19 nt, Homo sapiens
  misc_RNA (1)...(19): siRNA sense strand
cuccggaucuacuggauga

SEQ ID NO: 32113 - RNA, 19 nt, Homo sapiens
  misc_RNA (1)...(19): siRNA sense strand
cgacaaccacucagacuac

SEQ ID NO: 32114 - RNA, 19 nt, Homo sapiens
  misc_RNA (1)...(19): siRNA sense strand
cccgaccgaugaaagauga

SEQ ID NO: 32115 - RNA, 19 nt, Homo sapiens
  misc_RNA (1)...(19): siRNA sense strand
caacuucagguuccauauc

SEQ ID NO: 32116 - RNA, 19 nt, Homo sapiens
  misc_RNA (1)...(19): siRNA sense strand
cacacaaccugaccgaucu

SEQ ID NO: 32117 - RNA, 19 nt, Homo sapiens
  misc_RNA (1)...(19): siRNA sense strand
caauggugacccaauguga

SEQ ID NO: 32118 - RNA, 19 nt, Homo sapiens
  misc_RNA (1)...(19): siRNA sense strand
cggcaugcguacuauguca

SEQ ID NO: 32119 - RNA, 19 nt, Homo sapiens
  misc_RNA (1)...(19): siRNA sense strand
ggaugaacagcaagaucuu

SEQ ID NO: 32120 - RNA, 19 nt, Homo sapiens
  misc_RNA (1)...(19): siRNA sense strand
cagguuccauaucuuguuc

SEQ ID NO: 32121 - RNA, 19 nt, Homo sapiens
  misc_RNA (1)...(19): siRNA sense strand
gugccgugcuggucaagug

SEQ ID NO: 32122 - RNA, 19 nt, Homo sapiens
  misc_RNA (1)...(19): siRNA sense strand
ccagggaaccagaccucua

SEQ ID NO: 32123 - RNA, 19 nt, Homo sapiens
  misc_RNA (1)...(19): siRNA sense strand
gaauuugaggacaaggaaa

SEQ ID NO: 32124 - RNA, 19 nt, Homo sapiens
  misc_RNA (1)...(19): siRNA sense strand
gacaaccacucagacuaca

SEQ ID NO: 32125 - RNA, 19 nt, Homo sapiens
  misc_RNA (1)...(19): siRNA sense strand
caaccacucagacuacauc

SEQ ID NO: 32126 - RNA, 19 nt, Homo sapiens
  misc_RNA (1)...(19): siRNA sense strand
ggcggcaaauacucaguga

SEQ ID NO: 32127 - RNA, 19 nt, Homo sapiens
  misc_RNA (1)...(19): siRNA sense strand
guucaucggcuuugugagu

SEQ ID NO: 32128 - RNA, 19 nt, Homo sapiens
  misc_RNA (1)...(19): siRNA sense strand
aaauggcugugaagaccaa

SEQ ID NO: 32129 - RNA, 19 nt, Homo sapiens
  misc_RNA (1)...(19): siRNA sense strand
gcuacgugcucuccuacca

SEQ ID NO: 32130 - RNA, 19 nt, Homo sapiens
  misc_RNA (1)...(19): siRNA sense strand
uaugaaggacaccauguga

SEQ ID NO: 32131 - RNA, 19 nt, Homo sapiens
  misc_RNA (1)...(19): siRNA sense strand
gaggaagcacagcaagaga

SEQ ID NO: 32132 - RNA, 19 nt, Homo sapiens
  misc_RNA (1)...(19): siRNA sense strand
gaguagggcacagcucuug

SEQ ID NO: 32133 - RNA, 19 nt, Homo sapiens
  misc_RNA (1)...(19): siRNA sense strand
ggaugguguccacuucaaa

SEQ ID NO: 32134 - RNA, 19 nt, Homo sapiens
  misc_RNA (1)...(19): siRNA sense strand
ccacuucaaacccaaggaa

SEQ ID NO: 32135 - RNA, 19 nt, Homo sapiens
  misc_RNA (1)...(19): siRNA sense strand
gacgacagccuggccgauu

SEQ ID NO: 32136 - RNA, 19 nt, Homo sapiens
  misc_RNA (1)...(19): siRNA sense strand
caaauacucagugaaggau

SEQ ID NO: 32137 - RNA, 19 nt, Homo sapiens
  misc_RNA (1)...(19): siRNA sense strand
gauguuccggcaccaaaug

SEQ ID NO: 32138 - RNA, 19 nt, Homo sapiens
  misc_RNA (1)...(19): siRNA sense strand
gagggccagugcaacuuca

SEQ ID NO: 32139 - RNA, 19 nt, Homo sapiens
  misc_RNA (1)...(19): siRNA sense strand
acauugaauuugaggacaa

SEQ ID NO: 32140 - RNA, 19 nt, Homo sapiens
  misc_RNA (1)...(19): siRNA sense strand
gcacaaucgagaagaaagg

SEQ ID NO: 32141 - RNA, 19 nt, Homo sapiens
  misc_RNA (1)...(19): siRNA sense strand
cugccuaccuucugugcaa

SEQ ID NO: 32142 - RNA, 19 nt, Homo sapiens
  misc_RNA (1)...(19): siRNA sense strand
gaaaugagaccaccaauau

SEQ ID NO: 32143 - RNA, 19 nt, Homo sapiens
  misc_RNA (1)...(19): siRNA sense strand
caagagacauauccacaaa

SEQ ID NO: 32144 - RNA, 19 nt, Homo sapiens
  misc_RNA (1)...(19): siRNA sense strand
gaacggcaaccucuacuuu

SEQ ID NO: 32145 - RNA, 19 nt, Homo sapiens
  misc_RNA (1)...(19): siRNA sense strand
ggaaaugagaccaccaaua

SEQ ID NO: 32146 - RNA, 19 nt, Homo sapiens
  misc_RNA (1)...(19): siRNA sense strand
gaggaugguucguucauug

SEQ ID NO: 32147 - RNA, 19 nt, Homo sapiens
  misc_RNA (1)...(19): siRNA sense strand
gaagaacccuguggaugug

SEQ ID NO: 32148 - RNA, 19 nt, Homo sapiens
  misc_RNA (1)...(19): siRNA sense strand
uggaggagcuggccaaaga

SEQ ID NO: 32149 - RNA, 19 nt, Homo sapiens
  misc_RNA (1)...(19): siRNA sense strand
gcagcacaaucgagaagaa

SEQ ID NO: 32150 - RNA, 19 nt, Homo sapiens
  misc_RNA (1)...(19): siRNA sense strand
cacuacaccuuuaggguua

SEQ ID NO: 32151 - RNA, 19 nt, Homo sapiens
  misc_RNA (1)...(19): siRNA sense strand
gauacaaugugacguacug

SEQ ID NO: 32152 - RNA, 19 nt, Homo sapiens
  misc_RNA (1)...(19): siRNA sense strand
gaccagaaguaccggauuc

SEQ ID NO: 32153 - RNA, 19 nt, Homo sapiens
  misc_RNA (1)...(19): siRNA sense strand
agagacauauccacaaaga

SEQ ID NO: 32154 - RNA, 19 nt, Homo sapiens
  misc_RNA (1)...(19): siRNA sense strand
gagauccacuuguuuaagg

SEQ ID NO: 32155 - RNA, 19 nt, Homo sapiens
  misc_RNA (1)...(19): siRNA sense strand
gcaaauacucagugaagga

SEQ ID NO: 32156 - RNA, 19 nt, Homo sapiens
  misc_RNA (1)...(19): siRNA sense strand
caucauggcuaaccugaag

SEQ ID NO: 32157 - RNA, 19 nt, Homo sapiens
  misc_RNA (1)...(19): siRNA sense strand
ggacgaggaugggacaaca

SEQ ID NO: 32158 - RNA, 19 nt, Homo sapiens
  misc_RNA (1)...(19): siRNA sense strand
cagcguggauguucaguuc

SEQ ID NO: 32159 - RNA, 19 nt, Homo sapiens
  misc_RNA (1)...(19): siRNA sense strand
gcaagagacauauccacaa

SEQ ID NO: 32160 - RNA, 19 nt, Homo sapiens
  misc_RNA (1)...(19): siRNA sense strand
ggaccaucauucagaagga

SEQ ID NO: 32161 - RNA, 19 nt, Homo sapiens
  misc_RNA (1)...(19): siRNA sense strand
ccaggaccaucauucagaa

SEQ ID NO: 32162 - RNA, 19 nt, Homo sapiens
  misc_RNA (1)...(19): siRNA sense strand
acacaauggugacccaaug

SEQ ID NO: 32163 - RNA, 19 nt, Homo sapiens
  misc_RNA (1)...(19): siRNA sense strand
guucaaagccuugggagaa

SEQ ID NO: 32164 - RNA, 19 nt, Homo sapiens
  misc_RNA (1)...(19): siRNA sense strand
gcaccaggaccaucauuca

SEQ ID NO: 32165 - RNA, 19 nt, Homo sapiens
  misc_RNA (1)...(19): siRNA sense strand
aauacucagugaaggauaa

SEQ ID NO: 32166 - RNA, 19 nt, Homo sapiens
  misc_RNA (1)...(19): siRNA sense strand
gcaacuguccuucaaccuu

SEQ ID NO: 32167 - RNA, 19 nt, Homo sapiens
  misc_RNA (1)...(19): siRNA sense strand
gcggauacaaugugacgua

SEQ ID NO: 32168 - RNA, 19 nt, Homo sapiens
  misc_RNA (1)...(19): siRNA sense strand
gggcaacaacagcaacuuu

SEQ ID NO: 32169 - RNA, 19 nt, Homo sapiens
  misc_RNA (1)...(19): siRNA sense strand
gaaauccucaacucaagug

SEQ ID NO: 32170 - RNA, 19 nt, Homo sapiens
  misc_RNA (1)...(19): siRNA sense strand
uauguccacuacaccuuua

SEQ ID NO: 32171 - RNA, 19 nt, Homo sapiens
  misc_RNA (1)...(19): siRNA sense strand
gagggaugguguccacuuc

SEQ ID NO: 32172 - RNA, 19 nt, Homo sapiens
  misc_RNA (1)...(19): siRNA sense strand
acgacagccuggccgauua

SEQ ID NO: 32173 - RNA, 19 nt, Homo sapiens
  misc_RNA (1)...(19): siRNA sense strand
uacgagauccacuuguuua

SEQ ID NO: 32174 - RNA, 19 nt, Homo sapiens
  misc_RNA (1)...(19): siRNA sense strand
ggaggaugauggcgaguac

SEQ ID NO: 32175 - RNA, 19 nt, Homo sapiens
  misc_RNA (1)...(19): siRNA sense strand
gggaugguguccacuucaa

SEQ ID NO: 32176 - RNA, 19 nt, Homo sapiens
  misc_RNA (1)...(19): siRNA sense strand
aagcacagcaagagacaua

SEQ ID NO: 32177 - RNA, 19 nt, Homo sapiens
  misc_RNA (1)...(19): siRNA sense strand
ggcaaucccugagcuggaa

SEQ ID NO: 32178 - RNA, 19 nt, Homo sapiens
  misc_RNA (1)...(19): siRNA sense strand
gggcaucuaccgcugcuuu

SEQ ID NO: 32179 - RNA, 19 nt, Homo sapiens
  misc_RNA (1)...(19): siRNA sense strand
agaagaacccuguggaugu

SEQ ID NO: 32180 - RNA, 19 nt, Homo sapiens
  misc_RNA (1)...(19): siRNA sense strand
caaagagggcccuggugaa

SEQ ID NO: 32181 - RNA, 19 nt, Homo sapiens
  misc_RNA (1)...(19): siRNA sense strand
ccaccuucgugcccuauga

SEQ ID NO: 32182 - RNA, 19 nt, Homo sapiens
  misc_RNA (1)...(19): siRNA sense strand
gauccugacugcggacaau

SEQ ID NO: 32183 - RNA, 19 nt, Homo sapiens
  misc_RNA (1)...(19): siRNA sense strand
gagcuggaaggcauugaaa

SEQ ID NO: 32184 - RNA, 19 nt, Homo sapiens
  misc_RNA (1)...(19): siRNA sense strand
ugaaggacaccaugugaug

SEQ ID NO: 32185 - RNA, 19 nt, Homo sapiens
  misc_RNA (1)...(19): siRNA sense strand
gcaacgugcagcccaguga

SEQ ID NO: 32186 - RNA, 19 nt, Homo sapiens
  misc_RNA (1)...(19): siRNA sense strand
gaccaucauucagaaggaa

SEQ ID NO: 32187 - RNA, 19 nt, Homo sapiens
  misc_RNA (1)...(19): siRNA sense strand
gaaagugggcgaggaggau

SEQ ID NO: 32188 - RNA, 19 nt, Homo sapiens
  misc_RNA (1)...(19): siRNA sense strand
uuccauaucuuguucaaag

SEQ ID NO: 32189 - RNA, 19 nt, Homo sapiens
  misc_RNA (1)...(19): siRNA sense strand
gcguggauguucaguucaa

SEQ ID NO: 32190 - RNA, 19 nt, Homo sapiens
  misc_RNA (1)...(19): siRNA sense strand
gcagcccagugacacaaug

SEQ ID NO: 32191 - RNA, 19 nt, Homo sapiens
  misc_RNA (1)...(19): siRNA sense strand
cgaggaugguucguucauu

SEQ ID NO: 32192 - RNA, 19 nt, Homo sapiens
  misc_RNA (1)...(19): siRNA sense strand
caagugccgugcuggucaa

SEQ ID NO: 32193 - RNA, 19 nt, Homo sapiens
  misc_RNA (1)...(19): siRNA sense strand
ccaccaacagcaugauuga

SEQ ID NO: 32194 - RNA, 19 nt, Homo sapiens
  misc_RNA (1)...(19): siRNA sense strand
acuacgagauccacuuguu

SEQ ID NO: 32195 - RNA, 19 nt, Homo sapiens
  misc_RNA (1)...(19): siRNA sense strand
gugcaucgccgagggcuuu

SEQ ID NO: 32196 - RNA, 19 nt, Homo sapiens
  misc_RNA (1)...(19): siRNA sense strand
ccaguacaguggcaagaag

SEQ ID NO: 32197 - RNA, 19 nt, Homo sapiens
  misc_RNA (1)...(19): siRNA sense strand
cacaguaugucagcuacaa

SEQ ID NO: 32198 - RNA, 19 nt, Homo sapiens
  misc_RNA (1)...(19): siRNA sense strand
ucaaagccuugggagaaga

SEQ ID NO: 32199 - RNA, 19 nt, Homo sapiens
  misc_RNA (1)...(19): siRNA sense strand
ugacaucagccucaagugu

SEQ ID NO: 32200 - RNA, 19 nt, Homo sapiens
  misc_RNA (1)...(19): siRNA sense strand
ggcaacaacagcaacuuug

SEQ ID NO: 32201 - RNA, 19 nt, Homo sapiens
  misc_RNA (1)...(19): siRNA sense strand
gcacagcaagagacauauc

SEQ ID NO: 32202 - RNA, 19 nt, Homo sapiens
  misc_RNA (1)...(19): siRNA sense strand
gcuggaaggcauugaaauc

SEQ ID NO: 32203 - RNA, 19 nt, Homo sapiens
  misc_RNA (1)...(19): siRNA sense strand
ugacaaguacuucauagag

SEQ ID NO: 32204 - RNA, 19 nt, Homo sapiens
  misc_RNA (1)...(19): siRNA sense strand
acaucagccucaaguguga

SEQ ID NO: 32205 - RNA, 19 nt, Homo sapiens
  misc_RNA (1)...(19): siRNA sense strand
ggccaaaggagacagugaa

SEQ ID NO: 32206 - RNA, 19 nt, Homo sapiens
  misc_RNA (1)...(19): siRNA sense strand
cuacgagauccacuuguuu

SEQ ID NO: 32207 - RNA, 19 nt, Homo sapiens
  misc_RNA (1)...(19): siRNA sense strand
ccaaggagggccagugcaa

SEQ ID NO: 32208 - RNA, 19 nt, Homo sapiens
  misc_RNA (1)...(19): siRNA sense strand
ggccuugucugggaucuca

SEQ ID NO: 32209 - RNA, 19 nt, Homo sapiens
  misc_RNA (1)...(19): siRNA sense strand
ggaagcacagcaagagaca

SEQ ID NO: 32210 - RNA, 19 nt, Homo sapiens
  misc_RNA (1)...(19): siRNA sense strand
ggacagugacaaguacuuc

SEQ ID NO: 32211 - RNA, 19 nt, Homo sapiens
  misc_RNA (1)...(19): siRNA sense strand
uaccagaaccacaacaaga

SEQ ID NO: 32212 - RNA, 19 nt, Homo sapiens
  misc_RNA (1)...(19): siRNA sense strand
cuccggaucuacuggauga

SEQ ID NO: 32213 - RNA, 19 nt, Homo sapiens
  misc_RNA (1)...(19): siRNA sense strand
cgacaaccacucagacuac

SEQ ID NO: 32214 - RNA, 19 nt, Homo sapiens
  misc_RNA (1)...(19): siRNA sense strand
cccgaccgaugaaagauga

SEQ ID NO: 32215 - RNA, 19 nt, Homo sapiens
  misc_RNA (1)...(19): siRNA sense strand
caacuucagguuccauauc

SEQ ID NO: 32216 - RNA, 19 nt, Homo sapiens
  misc_RNA (1)...(19): siRNA sense strand
cacacaaccugaccgaucu

SEQ ID NO: 32217 - RNA, 19 nt, Homo sapiens
  misc_RNA (1)...(19): siRNA sense strand
caauggugacccaauguga

SEQ ID NO: 32218 - RNA, 19 nt, Homo sapiens
  misc_RNA (1)...(19): siRNA sense strand
cggcaugcguacuauguca

SEQ ID NO: 32219 - RNA, 19 nt, Homo sapiens
  misc_RNA (1)...(19): siRNA sense strand
ggaugaacagcaagaucuu

SEQ ID NO: 32220 - RNA, 19 nt, Homo sapiens
  misc_RNA (1)...(19): siRNA sense strand
cagguuccauaucuuguuc

SEQ ID NO: 32221 - RNA, 19 nt, Homo sapiens
  misc_RNA (1)...(19): siRNA sense strand
gugccgugcuggucaagug

SEQ ID NO: 32222 - RNA, 19 nt, Homo sapiens
  misc_RNA (1)...(19): siRNA sense strand
ccagggaaccagaccucua

SEQ ID NO: 32223 - RNA, 19 nt, Homo sapiens
  misc_RNA (1)...(19): siRNA sense strand
gaauuugaggacaaggaaa

SEQ ID NO: 32224 - RNA, 19 nt, Homo sapiens
  misc_RNA (1)...(19): siRNA sense strand
gacaaccacucagacuaca

SEQ ID NO: 32225 - RNA, 19 nt, Homo sapiens
  misc_RNA (1)...(19): siRNA sense strand
caaccacucagacuacauc

SEQ ID NO: 32226 - RNA, 19 nt, Homo sapiens
  misc_RNA (1)...(19): siRNA sense strand
ggcggcaaauacucaguga

SEQ ID NO: 32227 - RNA, 19 nt, Homo sapiens
  misc_RNA (1)...(19): siRNA sense strand
guucaucggcuuugugagu

SEQ ID NO: 32228 - RNA, 19 nt, Homo sapiens
  misc_RNA (1)...(19): siRNA sense strand
aaauggcugugaagaccaa

SEQ ID NO: 32229 - RNA, 19 nt, Homo sapiens
  misc_RNA (1)...(19): siRNA sense strand
gcuacgugcucuccuacca

SEQ ID NO: 32230 - RNA, 19 nt, Homo sapiens
  misc_RNA (1)...(19): siRNA sense strand
uaugaaggacaccauguga

SEQ ID NO: 32231 - RNA, 19 nt, Homo sapiens
  misc_RNA (1)...(19): siRNA sense strand
gaggaagcacagcaagaga

SEQ ID NO: 32232 - RNA, 19 nt, Homo sapiens
  misc_RNA (1)...(19): siRNA sense strand
gaguagggcacagcucuug

SEQ ID NO: 32233 - RNA, 19 nt, Homo sapiens
  misc_RNA (1)...(19): siRNA sense strand
ggaugguguccacuucaaa

SEQ ID NO: 32234 - RNA, 19 nt, Homo sapiens
  misc_RNA (1)...(19): siRNA sense strand
ccacuucaaacccaaggaa

SEQ ID NO: 32235 - RNA, 19 nt, Homo sapiens
  misc_RNA (1)...(19): siRNA sense strand
gacgacagccuggccgauu

SEQ ID NO: 32236 - RNA, 19 nt, Homo sapiens
  misc_RNA (1)...(19): siRNA sense strand
caaauacucagugaaggau

SEQ ID NO: 32237 - RNA, 19 nt, Homo sapiens
  misc_RNA (1)...(19): siRNA sense strand
gauguuccggcaccaaaug

SEQ ID NO: 32238 - RNA, 19 nt, Homo sapiens
  misc_RNA (1)...(19): siRNA sense strand
gagggccagugcaacuuca

SEQ ID NO: 32239 - RNA, 19 nt, Homo sapiens
  misc_RNA (1)...(19): siRNA sense strand
acauugaauuugaggacaa

SEQ ID NO: 32240 - RNA, 19 nt, Homo sapiens
  misc_RNA (1)...(19): siRNA sense strand
gcacaaucgagaagaaagg

SEQ ID NO: 32241 - RNA, 19 nt, Homo sapiens
  misc_RNA (1)...(19): siRNA sense strand
cugccuaccuucugugcaa

SEQ ID NO: 32242 - RNA, 19 nt, Homo sapiens
  misc_RNA (1)...(19): siRNA sense strand
gagaaugccugaacuguaa

SEQ ID NO: 32243 - RNA, 19 nt, Homo sapiens
  misc_RNA (1)...(19): siRNA sense strand
ccaaagaucuugcacauga

SEQ ID NO: 32244 - RNA, 19 nt, Homo sapiens
  misc_RNA (1)...(19): siRNA sense strand
gaagaaaucugaguuugaa

SEQ ID NO: 32245 - RNA, 19 nt, Homo sapiens
  misc_RNA (1)...(19): siRNA sense strand
gaaaucaacuccaucauag

SEQ ID NO: 32246 - RNA, 19 nt, Homo sapiens
  misc_RNA (1)...(19): siRNA sense strand
ggagguagcugaacaagga

SEQ ID NO: 32247 - RNA, 19 nt, Homo sapiens
  misc_RNA (1)...(19): siRNA sense strand
gaaagcagaugacaaaaua

SEQ ID NO: 32248 - RNA, 19 nt, Homo sapiens
  misc_RNA (1)...(19): siRNA sense strand
ggaggacaguugacauuua

SEQ ID NO: 32249 - RNA, 19 nt, Homo sapiens
  misc_RNA (1)...(19): siRNA sense strand
ugacagugcuugcgaauuu

SEQ ID NO: 32250 - RNA, 19 nt, Homo sapiens
  misc_RNA (1)...(19): siRNA sense strand
cgacacagcuaaagaugua

SEQ ID NO: 32251 - RNA, 19 nt, Homo sapiens
  misc_RNA (1)...(19): siRNA sense strand
gaagaaugcuauuaugaug

SEQ ID NO: 32252 - RNA, 19 nt, Homo sapiens
  misc_RNA (1)...(19): siRNA sense strand
ggaaacaacuuuggucuug

SEQ ID NO: 32253 - RNA, 19 nt, Homo sapiens
  misc_RNA (1)...(19): siRNA sense strand
gagaauguuuacacaguua

SEQ ID NO: 32254 - RNA, 19 nt, Homo sapiens
  misc_RNA (1)...(19): siRNA sense strand
gcaaugacauacucgauga

SEQ ID NO: 32255 - RNA, 19 nt, Homo sapiens
  misc_RNA (1)...(19): siRNA sense strand
gaaguuagcaaaugaugua

SEQ ID NO: 32256 - RNA, 19 nt, Homo sapiens
  misc_RNA (1)...(19): siRNA sense strand
gaaaggaauuuaugacagu

SEQ ID NO: 32257 - RNA, 19 nt, Homo sapiens
  misc_RNA (1)...(19): siRNA sense strand
aaagaaggcugaugcugua

SEQ ID NO: 32258 - RNA, 19 nt, Homo sapiens
  misc_RNA (1)...(19): siRNA sense strand
gcaagaggauaauuggaaa

SEQ ID NO: 32259 - RNA, 19 nt, Homo sapiens
  misc_RNA (1)...(19): siRNA sense strand
uuacagagcuccaccagaa

SEQ ID NO: 32260 - RNA, 19 nt, Homo sapiens
  misc_RNA (1)...(19): siRNA sense strand
cugaggagcuuaaugauaa

SEQ ID NO: 32261 - RNA, 19 nt, Homo sapiens
  misc_RNA (1)...(19): siRNA sense strand
gaacuacccucgcugcaau

SEQ ID NO: 32262 - RNA, 19 nt, Homo sapiens
  misc_RNA (1)...(19): siRNA sense strand
ccaagaaguuagcaaauga

SEQ ID NO: 32263 - RNA, 19 nt, Homo sapiens
  misc_RNA (1)...(19): siRNA sense strand
gcaagccacuggagguuaa

SEQ ID NO: 32264 - RNA, 19 nt, Homo sapiens
  misc_RNA (1)...(19): siRNA sense strand
gaauauacguggaaaguac

SEQ ID NO: 32265 - RNA, 19 nt, Homo sapiens
  misc_RNA (1)...(19): siRNA sense strand
ucagaaauauuccuccuuu

SEQ ID NO: 32266 - RNA, 19 nt, Homo sapiens
  misc_RNA (1)...(19): siRNA sense strand
gaaaucaaccugucauuca

SEQ ID NO: 32267 - RNA, 19 nt, Homo sapiens
  misc_RNA (1)...(19): siRNA sense strand
gaaauguacugcaaauugg

SEQ ID NO: 32268 - RNA, 19 nt, Homo sapiens
  misc_RNA (1)...(19): siRNA sense strand
caaaggcugucuucagaaa

SEQ ID NO: 32269 - RNA, 19 nt, Homo sapiens
  misc_RNA (1)...(19): siRNA sense strand
caaacuaaauugccaccua

SEQ ID NO: 32270 - RNA, 19 nt, Homo sapiens
  misc_RNA (1)...(19): siRNA sense strand
gguaaugacuugagcauca

SEQ ID NO: 32271 - RNA, 19 nt, Homo sapiens
  misc_RNA (1)...(19): siRNA sense strand
cauaugaccuugaagaaga

SEQ ID NO: 32272 - RNA, 19 nt, Homo sapiens
  misc_RNA (1)...(19): siRNA sense strand
caaaugcuauugauggaaa

SEQ ID NO: 32273 - RNA, 19 nt, Homo sapiens
  misc_RNA (1)...(19): siRNA sense strand
gcaccuggauccugucauu

SEQ ID NO: 32274 - RNA, 19 nt, Homo sapiens
  misc_RNA (1)...(19): siRNA sense strand
ggaaauugcugaagaugag

SEQ ID NO: 32275 - RNA, 19 nt, Homo sapiens
  misc_RNA (1)...(19): siRNA sense strand
gagauugaccagaugauua

SEQ ID NO: 32276 - RNA, 19 nt, Homo sapiens
  misc_RNA (1)...(19): siRNA sense strand
gaaagagauugaccagaug

SEQ ID NO: 32277 - RNA, 19 nt, Homo sapiens
  misc_RNA (1)...(19): siRNA sense strand
ucaaacagaugucagaguu

SEQ ID NO: 32278 - RNA, 19 nt, Homo sapiens
  misc_RNA (1)...(19): siRNA sense strand
gaaauggauugcccuacuu

SEQ ID NO: 32279 - RNA, 19 nt, Homo sapiens
  misc_RNA (1)...(19): siRNA sense strand
gaaacuccgugaagaugaa

SEQ ID NO: 32280 - RNA, 19 nt, Homo sapiens
  misc_RNA (1)...(19): siRNA sense strand
gaaggugacugcaaaggau

SEQ ID NO: 32281 - RNA, 19 nt, Homo sapiens
  misc_RNA (1)...(19): siRNA sense strand
ggaggugacugcauucgaa

SEQ ID NO: 32282 - RNA, 19 nt, Homo sapiens
  misc_RNA (1)...(19): siRNA sense strand
ugagaaaguugccaaagaa

SEQ ID NO: 32283 - RNA, 19 nt, Homo sapiens
  misc_RNA (1)...(19): siRNA sense strand
gaagacauccaaacuaaau

SEQ ID NO: 32284 - RNA, 19 nt, Homo sapiens
  misc_RNA (1)...(19): siRNA sense strand
gcuccugucugauauguaa

SEQ ID NO: 32285 - RNA, 19 nt, Homo sapiens
  misc_RNA (1)...(19): siRNA sense strand
caagaacuccguacaauau

SEQ ID NO: 32286 - RNA, 19 nt, Homo sapiens
  misc_RNA (1)...(19): siRNA sense strand
caacuuuggucuugacuug

SEQ ID NO: 32287 - RNA, 19 nt, Homo sapiens
  misc_RNA (1)...(19): siRNA sense strand
gagagaagccacagauaaa

SEQ ID NO: 32288 - RNA, 19 nt, Homo sapiens
  misc_RNA (1)...(19): siRNA sense strand
gcacugggccaccgucaua

SEQ ID NO: 32289 - RNA, 19 nt, Homo sapiens
  misc_RNA (1)...(19): siRNA sense strand
uaucagcuauuccaaauga

SEQ ID NO: 32290 - RNA, 19 nt, Homo sapiens
  misc_RNA (1)...(19): siRNA sense strand
gaacuuugaaugacacuuu

SEQ ID NO: 32291 - RNA, 19 nt, Homo sapiens
  misc_RNA (1)...(19): siRNA sense strand
uaucaaagcuacuuaugga

SEQ ID NO: 32292 - RNA, 19 nt, Homo sapiens
  misc_RNA (1)...(19): siRNA sense strand
gaagagaguccuccuacaa

SEQ ID NO: 32293 - RNA, 19 nt, Homo sapiens
  misc_RNA (1)...(19): siRNA sense strand
cagaaggacuugacgacua

SEQ ID NO: 32294 - RNA, 19 nt, Homo sapiens
  misc_RNA (1)...(19): siRNA sense strand
gaaagcaaggccagaagua

SEQ ID NO: 32295 - RNA, 19 nt, Homo sapiens
  misc_RNA (1)...(19): siRNA sense strand
cgagugcucuucugaugua

SEQ ID NO: 32296 - RNA, 19 nt, Homo sapiens
  misc_RNA (1)...(19): siRNA sense strand
ggagaaacauacuuugaca

SEQ ID NO: 32297 - RNA, 19 nt, Homo sapiens
  misc_RNA (1)...(19): siRNA sense strand
caaaguaucugugucuuca

SEQ ID NO: 32298 - RNA, 19 nt, Homo sapiens
  misc_RNA (1)...(19): siRNA sense strand
ggaaacaagccaauucuau

SEQ ID NO: 32299 - RNA, 19 nt, Homo sapiens
  misc_RNA (1)...(19): siRNA sense strand
gcaaauugguagaacaugu

SEQ ID NO: 32300 - RNA, 19 nt, Homo sapiens
  misc_RNA (1)...(19): siRNA sense strand
gccaaaggcugucuucaga

SEQ ID NO: 32301 - RNA, 19 nt, Homo sapiens
  misc_RNA (1)...(19): siRNA sense strand
gaugaccucucccaagaaa

SEQ ID NO: 32302 - RNA, 19 nt, Homo sapiens
  misc_RNA (1)...(19): siRNA sense strand
gccuaacgcuuuacaauau

SEQ ID NO: 32303 - RNA, 19 nt, Homo sapiens
  misc_RNA (1)...(19): siRNA sense strand
cugagaaacuugaguauga

SEQ ID NO: 32304 - RNA, 19 nt, Homo sapiens
  misc_RNA (1)...(19): siRNA sense strand
gaaacuuccagaacaauuu

SEQ ID NO: 32305 - RNA, 19 nt, Homo sapiens
  misc_RNA (1)...(19): siRNA sense strand
ggacgugggugacucugaa

SEQ ID NO: 32306 - RNA, 19 nt, Homo sapiens
  misc_RNA (1)...(19): siRNA sense strand
ccaauugguuccuuaaaug

SEQ ID NO: 32307 - RNA, 19 nt, Homo sapiens
  misc_RNA (1)...(19): siRNA sense strand
auaaaugucuuccugguuu

SEQ ID NO: 32308 - RNA, 19 nt, Homo sapiens
  misc_RNA (1)...(19): siRNA sense strand
cagaugaccucaagcaguu

SEQ ID NO: 32309 - RNA, 19 nt, Homo sapiens
  misc_RNA (1)...(19): siRNA sense strand
gauguucccuggagaaugu

SEQ ID NO: 32310 - RNA, 19 nt, Homo sapiens
  misc_RNA (1)...(19): siRNA sense strand
ggucaaggauauuucaguu

SEQ ID NO: 32311 - RNA, 19 nt, Homo sapiens
  misc_RNA (1)...(19): siRNA sense strand
ccagugaccuauagcauug

SEQ ID NO: 32312 - RNA, 19 nt, Homo sapiens
  misc_RNA (1)...(19): siRNA sense strand
acaggaagcuugcugagaa

SEQ ID NO: 32313 - RNA, 19 nt, Homo sapiens
  misc_RNA (1)...(19): siRNA sense strand
agaaagagauugaccagau

SEQ ID NO: 32314 - RNA, 19 nt, Homo sapiens
  misc_RNA (1)...(19): siRNA sense strand
ggacguggaacaacaauga

SEQ ID NO: 32315 - RNA, 19 nt, Homo sapiens
  misc_RNA (1)...(19): siRNA sense strand
ucacacagguggcccauau

SEQ ID NO: 32316 - RNA, 19 nt, Homo sapiens
  misc_RNA (1)...(19): siRNA sense strand
gaagaaucauuuaccauac

SEQ ID NO: 32317 - RNA, 19 nt, Homo sapiens
  misc_RNA (1)...(19): siRNA sense strand
ggaagaagauacagaacgu

SEQ ID NO: 32318 - RNA, 19 nt, Homo sapiens
  misc_RNA (1)...(19): siRNA sense strand
ugucgaaucugcaaucaaa

SEQ ID NO: 32319 - RNA, 19 nt, Homo sapiens
  misc_RNA (1)...(19): siRNA sense strand
uuacauggcucgcaucaau

SEQ ID NO: 32320 - RNA, 19 nt, Homo sapiens
  misc_RNA (1)...(19): siRNA sense strand
ggagaauguuuacacaguu

SEQ ID NO: 32321 - RNA, 19 nt, Homo sapiens
  misc_RNA (1)...(19): siRNA sense strand
ggaaaguuaucagcuauuc

SEQ ID NO: 32322 - RNA, 19 nt, Homo sapiens
  misc_RNA (1)...(19): siRNA sense strand
gacaaggcaugaaauugaa

SEQ ID NO: 32323 - RNA, 19 nt, Homo sapiens
  misc_RNA (1)...(19): siRNA sense strand
guucucaucuggguaauaa

SEQ ID NO: 32324 - RNA, 19 nt, Homo sapiens
  misc_RNA (1)...(19): siRNA sense strand
gaucagugcuguccaggau

SEQ ID NO: 32325 - RNA, 19 nt, Homo sapiens
  misc_RNA (1)...(19): siRNA sense strand
caaagcaguugguggauuc

SEQ ID NO: 32326 - RNA, 19 nt, Homo sapiens
  misc_RNA (1)...(19): siRNA sense strand
gaacauacaaaccagaaau

SEQ ID NO: 32327 - RNA, 19 nt, Homo sapiens
  misc_RNA (1)...(19): siRNA sense strand
uuaaagauccuuccaagaa

SEQ ID NO: 32328 - RNA, 19 nt, Homo sapiens
  misc_RNA (1)...(19): siRNA sense strand
ugaaaucaacuccaucaua

SEQ ID NO: 32329 - RNA, 19 nt, Homo sapiens
  misc_RNA (1)...(19): siRNA sense strand
gaagagaguggacaauguu

SEQ ID NO: 32330 - RNA, 19 nt, Homo sapiens
  misc_RNA (1)...(19): siRNA sense strand
gcucugugcugauggauau

SEQ ID NO: 32331 - RNA, 19 nt, Homo sapiens
  misc_RNA (1)...(19): siRNA sense strand
ggagaaugccugaacugua

SEQ ID NO: 32332 - RNA, 19 nt, Homo sapiens
  misc_RNA (1)...(19): siRNA sense strand
cgaguuaacggcacuauuu

SEQ ID NO: 32333 - RNA, 19 nt, Homo sapiens
  misc_RNA (1)...(19): siRNA sense strand
ggaaauuucaugcgacaaa

SEQ ID NO: 32334 - RNA, 19 nt, Homo sapiens
  misc_RNA (1)...(19): siRNA sense strand
cagauucacugcugucuau

SEQ ID NO: 32335 - RNA, 19 nt, Homo sapiens
  misc_RNA (1)...(19): siRNA sense strand
gaacagccuaucgaaguua

SEQ ID NO: 32336 - RNA, 19 nt, Homo sapiens
  misc_RNA (1)...(19): siRNA sense strand
gaaacaacuuuggucuuga

SEQ ID NO: 32337 - RNA, 19 nt, Homo sapiens
  misc_RNA (1)...(19): siRNA sense strand
ggaagugccaaauuuauug

SEQ ID NO: 32338 - RNA, 19 nt, Homo sapiens
  misc_RNA (1)...(19): siRNA sense strand
gaccagggcuaccaaagug

SEQ ID NO: 32339 - RNA, 19 nt, Homo sapiens
  misc_RNA (1)...(19): siRNA sense strand
gaugugcucuuggauacua

SEQ ID NO: 32340 - RNA, 19 nt, Homo sapiens
  misc_RNA (1)...(19): siRNA sense strand
gaacaaggacguggaacaa

SEQ ID NO: 32341 - RNA, 19 nt, Homo sapiens
  misc_RNA (1)...(19): siRNA sense strand
gaaacaagccaauucuauc

SEQ ID NO: 32342 - RNA, 19 nt, Homo sapiens
  misc_RNA (1)...(19): siRNA sense strand
gcaauacacuccuuaauuu

SEQ ID NO: 32343 - RNA, 19 nt, Homo sapiens
  misc_RNA (1)...(19): siRNA sense strand
gcagauaacucggugaaua

SEQ ID NO: 32344 - RNA, 19 nt, Homo sapiens
  misc_RNA (1)...(19): siRNA sense strand
aaagagaacugacugauuu

SEQ ID NO: 32345 - RNA, 19 nt, Homo sapiens
  misc_RNA (1)...(19): siRNA sense strand
gcacaaacauuaaacaaca

SEQ ID NO: 32346 - RNA, 19 nt, Homo sapiens
  misc_RNA (1)...(19): siRNA sense strand
gggaagcacuuauguguuu

SEQ ID NO: 32347 - RNA, 19 nt, Homo sapiens
  misc_RNA (1)...(19): siRNA sense strand
gaaaugcaaugaugggaaa

SEQ ID NO: 32348 - RNA, 19 nt, Homo sapiens
  misc_RNA (1)...(19): siRNA sense strand
uaaauucccugcagaguga

SEQ ID NO: 32349 - RNA, 19 nt, Homo sapiens
  misc_RNA (1)...(19): siRNA sense strand
aaaauuagcugccaguuua

SEQ ID NO: 32350 - RNA, 19 nt, Homo sapiens
  misc_RNA (1)...(19): siRNA sense strand
uaagagaacuuuccagauc

SEQ ID NO: 32351 - RNA, 19 nt, Homo sapiens
  misc_RNA (1)...(19): siRNA sense strand
aaacaucucugacaacaug

SEQ ID NO: 32352 - RNA, 19 nt, Homo sapiens
  misc_RNA (1)...(19): siRNA sense strand
gaacuaagugacaaaguaa

SEQ ID NO: 32353 - RNA, 19 nt, Homo sapiens
  misc_RNA (1)...(19): siRNA sense strand
caaagcagcuggaagagau

SEQ ID NO: 32354 - RNA, 19 nt, Homo sapiens
  misc_RNA (1)...(19): siRNA sense strand
gaauugagcaccagcgaua

SEQ ID NO: 32355 - RNA, 19 nt, Homo sapiens
  misc_RNA (1)...(19): siRNA sense strand
gaagaugguuacauugaau

SEQ ID NO: 32356 - RNA, 19 nt, Homo sapiens
  misc_RNA (1)...(19): siRNA sense strand
ggaagaugguuacauugaa

SEQ ID NO: 32357 - RNA, 19 nt, Homo sapiens
  misc_RNA (1)...(19): siRNA sense strand
caaagagcauggucagaaa

SEQ ID NO: 32358 - RNA, 19 nt, Homo sapiens
  misc_RNA (1)...(19): siRNA sense strand
caacggacauucaaaucaa

SEQ ID NO: 32359 - RNA, 19 nt, Homo sapiens
  misc_RNA (1)...(19): siRNA sense strand
gaaggaagagucagacaaa

SEQ ID NO: 32360 - RNA, 19 nt, Homo sapiens
  misc_RNA (1)...(19): siRNA sense strand
ugaauuagaugaccucaau

SEQ ID NO: 32361 - RNA, 19 nt, Homo sapiens
  misc_RNA (1)...(19): siRNA sense strand
gaacuggaugugaagauua

SEQ ID NO: 32362 - RNA, 19 nt, Homo sapiens
  misc_RNA (1)...(19): siRNA sense strand
gaaagagaacugacugauu

SEQ ID NO: 32363 - RNA, 19 nt, Homo sapiens
  misc_RNA (1)...(19): siRNA sense strand
cagcaaacccugaauauug

SEQ ID NO: 32364 - RNA, 19 nt, Homo sapiens
  misc_RNA (1)...(19): siRNA sense strand
gaucauaaaggcuuguaua

SEQ ID NO: 32365 - RNA, 19 nt, Homo sapiens
  misc_RNA (1)...(19): siRNA sense strand
caacgucggucacaccaaa

SEQ ID NO: 32366 - RNA, 19 nt, Homo sapiens
  misc_RNA (1)...(19): siRNA sense strand
caauugaguuucacugauu

SEQ ID NO: 32367 - RNA, 19 nt, Homo sapiens
  misc_RNA (1)...(19): siRNA sense strand
gagaauauguuugugaugu

SEQ ID NO: 32368 - RNA, 19 nt, Homo sapiens
  misc_RNA (1)...(19): siRNA sense strand
ggaaacaucucugacaaca

SEQ ID NO: 32369 - RNA, 19 nt, Homo sapiens
  misc_RNA (1)...(19): siRNA sense strand
uggaagagaucaagagaaa

SEQ ID NO: 32370 - RNA, 19 nt, Homo sapiens
  misc_RNA (1)...(19): siRNA sense strand
ggagguagcugccaaccau

SEQ ID NO: 32371 - RNA, 19 nt, Homo sapiens
  misc_RNA (1)...(19): siRNA sense strand
gcacuaagaacuccuuuau

SEQ ID NO: 32372 - RNA, 19 nt, Homo sapiens
  misc_RNA (1)...(19): siRNA sense strand
gcagaagaaugugaugauu

SEQ ID NO: 32373 - RNA, 19 nt, Homo sapiens
  misc_RNA (1)...(19): siRNA sense strand
gucguuagauugaaugaua

SEQ ID NO: 32374 - RNA, 19 nt, Homo sapiens
  misc_RNA (1)...(19): siRNA sense strand
agaacuaagugacaaagua

SEQ ID NO: 32375 - RNA, 19 nt, Homo sapiens
  misc_RNA (1)...(19): siRNA sense strand
gcaaagagcauggucagaa

SEQ ID NO: 32376 - RNA, 19 nt, Homo sapiens
  misc_RNA (1)...(19): siRNA sense strand
ugacauggaugguagaaau

SEQ ID NO: 32377 - RNA, 19 nt, Homo sapiens
  misc_RNA (1)...(19): siRNA sense strand
ugauguaccuuggaaauaa

SEQ ID NO: 32378 - RNA, 19 nt, Homo sapiens
  misc_RNA (1)...(19): siRNA sense strand
guccagagguuaucacuga

SEQ ID NO: 32379 - RNA, 19 nt, Homo sapiens
  misc_RNA (1)...(19): siRNA sense strand
gauuugggcuuaccaccua

SEQ ID NO: 32380 - RNA, 19 nt, Homo sapiens
  misc_RNA (1)...(19): siRNA sense strand
gcauauguguuaacuguca

SEQ ID NO: 32381 - RNA, 19 nt, Homo sapiens
  misc_RNA (1)...(19): siRNA sense strand
agacguauauggaugguuu

SEQ ID NO: 32382 - RNA, 19 nt, Homo sapiens
  misc_RNA (1)...(19): siRNA sense strand
ggauaaauguggacguuca

SEQ ID NO: 32383 - RNA, 19 nt, Homo sapiens
  misc_RNA (1)...(19): siRNA sense strand
gaggugauauugaugcuau

SEQ ID NO: 32384 - RNA, 19 nt, Homo sapiens
  misc_RNA (1)...(19): siRNA sense strand
ccaaggaccugaggaauca

SEQ ID NO: 32385 - RNA, 19 nt, Homo sapiens
  misc_RNA (1)...(19): siRNA sense strand
caucagacauggacaagga

SEQ ID NO: 32386 - RNA, 19 nt, Homo sapiens
  misc_RNA (1)...(19): siRNA sense strand
ggacagaauacgagaacua

SEQ ID NO: 32387 - RNA, 19 nt, Homo sapiens
  misc_RNA (1)...(19): siRNA sense strand
caacuaccguucugccauu

SEQ ID NO: 32388 - RNA, 19 nt, Homo sapiens
  misc_RNA (1)...(19): siRNA sense strand
gcauuuauuucucugaaga

SEQ ID NO: 32389 - RNA, 19 nt, Homo sapiens
  misc_RNA (1)...(19): siRNA sense strand
ggaggacaauugaguuuca

SEQ ID NO: 32390 - RNA, 19 nt, Homo sapiens
  misc_RNA (1)...(19): siRNA sense strand
aggaagaucugccaagaaa

SEQ ID NO: 32391 - RNA, 19 nt, Homo sapiens
  misc_RNA (1)...(19): siRNA sense strand
caaaagaacuggaugugaa

SEQ ID NO: 32392 - RNA, 19 nt, Homo sapiens
  misc_RNA (1)...(19): siRNA sense strand
cuacacagcuggacagauc

SEQ ID NO: 32393 - RNA, 19 nt, Homo sapiens
  misc_RNA (1)...(19): siRNA sense strand
agacagauguggaaagaau

SEQ ID NO: 32394 - RNA, 19 nt, Homo sapiens
  misc_RNA (1)...(19): siRNA sense strand
gauagaggcuugcuguucu

SEQ ID NO: 32395 - RNA, 19 nt, Homo sapiens
  misc_RNA (1)...(19): siRNA sense strand
ucaacccaguggcauauua

SEQ ID NO: 32396 - RNA, 19 nt, Homo sapiens
  misc_RNA (1)...(19): siRNA sense strand
gcagagaccauucgauuca

SEQ ID NO: 32397 - RNA, 19 nt, Homo sapiens
  misc_RNA (1)...(19): siRNA sense strand
gugaauaaguuaaccaaca

SEQ ID NO: 32398 - RNA, 19 nt, Homo sapiens
  misc_RNA (1)...(19): siRNA sense strand
ggaagcacuuauguguuua

SEQ ID NO: 32399 - RNA, 19 nt, Homo sapiens
  misc_RNA (1)...(19): siRNA sense strand
gagggaaguuugccuggaa

SEQ ID NO: 32400 - RNA, 19 nt, Homo sapiens
  misc_RNA (1)...(19): siRNA sense strand
uggaagauuugaaaggaua

SEQ ID NO: 32401 - RNA, 19 nt, Homo sapiens
  misc_RNA (1)...(19): siRNA sense strand
gaugguagaaauagcaaua

SEQ ID NO: 32402 - RNA, 19 nt, Homo sapiens
  misc_RNA (1)...(19): siRNA sense strand
uagaaggccuggaaagaga

SEQ ID NO: 32403 - RNA, 19 nt, Homo sapiens
  misc_RNA (1)...(19): siRNA sense strand
cgucuuggcucacucugua

SEQ ID NO: 32404 - RNA, 19 nt, Homo sapiens
  misc_RNA (1)...(19): siRNA sense strand
uaaagguucuaccagguuu

SEQ ID NO: 32405 - RNA, 19 nt, Homo sapiens
  misc_RNA (1)...(19): siRNA sense strand
gauagcggcagcccaauuu

SEQ ID NO: 32406 - RNA, 19 nt, Homo sapiens
  misc_RNA (1)...(19): siRNA sense strand
gaaguggagccuuguagaa

SEQ ID NO: 32407 - RNA, 19 nt, Homo sapiens
  misc_RNA (1)...(19): siRNA sense strand
gauguaccuuggaaauaaa

SEQ ID NO: 32408 - RNA, 19 nt, Homo sapiens
  misc_RNA (1)...(19): siRNA sense strand
uacaagagcuggcaaagca

SEQ ID NO: 32409 - RNA, 19 nt, Homo sapiens
  misc_RNA (1)...(19): siRNA sense strand
cagaaaagcacaaacauua

SEQ ID NO: 32410 - RNA, 19 nt, Homo sapiens
  misc_RNA (1)...(19): siRNA sense strand
ggaaagcaccucagagaag

SEQ ID NO: 32411 - RNA, 19 nt, Homo sapiens
  misc_RNA (1)...(19): siRNA sense strand
guccugaaguccuagauuu

SEQ ID NO: 32412 - RNA, 19 nt, Homo sapiens
  misc_RNA (1)...(19): siRNA sense strand
guauauggaugguuuacug

SEQ ID NO: 32413 - RNA, 19 nt, Homo sapiens
  misc_RNA (1)...(19): siRNA sense strand
ccagagaugcugccaguaa

SEQ ID NO: 32414 - RNA, 19 nt, Homo sapiens
  misc_RNA (1)...(19): siRNA sense strand
ccagacagauguggaaaga

SEQ ID NO: 32415 - RNA, 19 nt, Homo sapiens
  misc_RNA (1)...(19): siRNA sense strand
gaagcaagacaagaacuaa

SEQ ID NO: 32416 - RNA, 19 nt, Homo sapiens
  misc_RNA (1)...(19): siRNA sense strand
acuaagaacuccuuuaugg

SEQ ID NO: 32417 - RNA, 19 nt, Homo sapiens
  misc_RNA (1)...(19): siRNA sense strand
cagaauacgagaacuaauu

SEQ ID NO: 32418 - RNA, 19 nt, Homo sapiens
  misc_RNA (1)...(19): siRNA sense strand
acagagaggugauauugau

SEQ ID NO: 32419 - RNA, 19 nt, Homo sapiens
  misc_RNA (1)...(19): siRNA sense strand
gagacaagugaaagaaaua

SEQ ID NO: 32420 - RNA, 19 nt, Homo sapiens
  misc_RNA (1)...(19): siRNA sense strand
ggaauauucaugucaauca

SEQ ID NO: 32421 - RNA, 19 nt, Homo sapiens
  misc_RNA (1)...(19): siRNA sense strand
gaggaucccuguguggaaa

SEQ ID NO: 32422 - RNA, 19 nt, Homo sapiens
  misc_RNA (1)...(19): siRNA sense strand
guucugagcuuguacaacu

SEQ ID NO: 32423 - RNA, 19 nt, Homo sapiens
  misc_RNA (1)...(19): siRNA sense strand
guacugagaauauguuugu

SEQ ID NO: 32424 - RNA, 19 nt, Homo sapiens
  misc_RNA (1)...(19): siRNA sense strand
auacaucucuguccuuguu

SEQ ID NO: 32425 - RNA, 19 nt, Homo sapiens
  misc_RNA (1)...(19): siRNA sense strand
gacaagaacuaagugacaa

SEQ ID NO: 32426 - RNA, 19 nt, Homo sapiens
  misc_RNA (1)...(19): siRNA sense strand
aagcguauguggauaaaug

SEQ ID NO: 32427 - RNA, 19 nt, Homo sapiens
  misc_RNA (1)...(19): siRNA sense strand
gcaaggagaaaugcaauga

SEQ ID NO: 32428 - RNA, 19 nt, Homo sapiens
  misc_RNA (1)...(19): siRNA sense strand
gauaaggaccuggcagaaa

SEQ ID NO: 32429 - RNA, 19 nt, Homo sapiens
  misc_RNA (1)...(19): siRNA sense strand
gcccauguccucacacuaa

SEQ ID NO: 32430 - RNA, 19 nt, Homo sapiens
  misc_RNA (1)...(19): siRNA sense strand
ucuggaagaugguuacauu

SEQ ID NO: 32431 - RNA, 19 nt, Homo sapiens
  misc_RNA (1)...(19): siRNA sense strand
ccaguggugucguuagauu

SEQ ID NO: 32432 - RNA, 19 nt, Homo sapiens
  misc_RNA (1)...(19): siRNA sense strand
cagauaacucggugaauaa

SEQ ID NO: 32433 - RNA, 19 nt, Homo sapiens
  misc_RNA (1)...(19): siRNA sense strand
ggacacagaacgaagacuu

SEQ ID NO: 32434 - RNA, 19 nt, Homo sapiens
  misc_RNA (1)...(19): siRNA sense strand
caaagcagucucuguguga

SEQ ID NO: 32435 - RNA, 19 nt, Homo sapiens
  misc_RNA (1)...(19): siRNA sense strand
gcaggucacucuggaagau

SEQ ID NO: 32436 - RNA, 19 nt, Homo sapiens
  misc_RNA (1)...(19): siRNA sense strand
gagguucaaugguaaaucu

SEQ ID NO: 32437 - RNA, 19 nt, Homo sapiens
  misc_RNA (1)...(19): siRNA sense strand
aaaggaagaucugccaaga

SEQ ID NO: 32438 - RNA, 19 nt, Homo sapiens
  misc_RNA (1)...(19): siRNA sense strand
caggauggcucaggcauau

SEQ ID NO: 32439 - RNA, 19 nt, Homo sapiens
  misc_RNA (1)...(19): siRNA sense strand
ucacugggauccuaauaca

SEQ ID NO: 32440 - RNA, 19 nt, Homo sapiens
  misc_RNA (1)...(19): siRNA sense strand
gcaacggacauucaaauca

SEQ ID NO: 32441 - RNA, 19 nt, Homo sapiens
  misc_RNA (1)...(19): siRNA sense strand
gaauuaaggacaccuaugg

SEQ ID NO: 32442 - RNA, 19 nt, Homo sapiens
  misc_RNA (1)...(19): siRNA sense strand
gcaauacacuccuuaauuu

SEQ ID NO: 32443 - RNA, 19 nt, Homo sapiens
  misc_RNA (1)...(19): siRNA sense strand
gcagauaacucggugaaua

SEQ ID NO: 32444 - RNA, 19 nt, Homo sapiens
  misc_RNA (1)...(19): siRNA sense strand
aaagagaacugacugauuu

SEQ ID NO: 32445 - RNA, 19 nt, Homo sapiens
  misc_RNA (1)...(19): siRNA sense strand
gcacaaacauuaaacaaca

SEQ ID NO: 32446 - RNA, 19 nt, Homo sapiens
  misc_RNA (1)...(19): siRNA sense strand
gggaagcacuuauguguuu

SEQ ID NO: 32447 - RNA, 19 nt, Homo sapiens
  misc_RNA (1)...(19): siRNA sense strand
gaaaugcaaugaugggaaa

SEQ ID NO: 32448 - RNA, 19 nt, Homo sapiens
  misc_RNA (1)...(19): siRNA sense strand
uaaauucccugcagaguga

SEQ ID NO: 32449 - RNA, 19 nt, Homo sapiens
  misc_RNA (1)...(19): siRNA sense strand
aaaauuagcugccaguuua

SEQ ID NO: 32450 - RNA, 19 nt, Homo sapiens
  misc_RNA (1)...(19): siRNA sense strand
uaagagaacuuuccagauc

SEQ ID NO: 32451 - RNA, 19 nt, Homo sapiens
  misc_RNA (1)...(19): siRNA sense strand
aaacaucucugacaacaug

SEQ ID NO: 32452 - RNA, 19 nt, Homo sapiens
  misc_RNA (1)...(19): siRNA sense strand
gaacuaagugacaaaguaa

SEQ ID NO: 32453 - RNA, 19 nt, Homo sapiens
  misc_RNA (1)...(19): siRNA sense strand
caaagcagcuggaagagau

SEQ ID NO: 32454 - RNA, 19 nt, Homo sapiens
  misc_RNA (1)...(19): siRNA sense strand
gaauugagcaccagcgaua

SEQ ID NO: 32455 - RNA, 19 nt, Homo sapiens
  misc_RNA (1)...(19): siRNA sense strand
gaagaugguuacauugaau

SEQ ID NO: 32456 - RNA, 19 nt, Homo sapiens
  misc_RNA (1)...(19): siRNA sense strand
ggaagaugguuacauugaa

SEQ ID NO: 32457 - RNA, 19 nt, Homo sapiens
  misc_RNA (1)...(19): siRNA sense strand
caaagagcauggucagaaa

SEQ ID NO: 32458 - RNA, 19 nt, Homo sapiens
  misc_RNA (1)...(19): siRNA sense strand
caacggacauucaaaucaa

SEQ ID NO: 32459 - RNA, 19 nt, Homo sapiens
  misc_RNA (1)...(19): siRNA sense strand
gaaggaagagucagacaaa

SEQ ID NO: 32460 - RNA, 19 nt, Homo sapiens
  misc_RNA (1)...(19): siRNA sense strand
ugaauuagaugaccucaau

SEQ ID NO: 32461 - RNA, 19 nt, Homo sapiens
  misc_RNA (1)...(19): siRNA sense strand
gaacuggaugugaagauua

SEQ ID NO: 32462 - RNA, 19 nt, Homo sapiens
  misc_RNA (1)...(19): siRNA sense strand
gaaagagaacugacugauu

SEQ ID NO: 32463 - RNA, 19 nt, Homo sapiens
  misc_RNA (1)...(19): siRNA sense strand
cagcaaacccugaauauug

SEQ ID NO: 32464 - RNA, 19 nt, Homo sapiens
  misc_RNA (1)...(19): siRNA sense strand
uggaagagaucaagagaaa

SEQ ID NO: 32465 - RNA, 19 nt, Homo sapiens
  misc_RNA (1)...(19): siRNA sense strand
caacgucggucacaccaaa

SEQ ID NO: 32466 - RNA, 19 nt, Homo sapiens
  misc_RNA (1)...(19): siRNA sense strand
gaucauaaaggcuuguaua

SEQ ID NO: 32467 - RNA, 19 nt, Homo sapiens
  misc_RNA (1)...(19): siRNA sense strand
caauugaguuucacugauu

SEQ ID NO: 32468 - RNA, 19 nt, Homo sapiens
  misc_RNA (1)...(19): siRNA sense strand
gagaauauguuugugaugu

SEQ ID NO: 32469 - RNA, 19 nt, Homo sapiens
  misc_RNA (1)...(19): siRNA sense strand
ggaaacaucucugacaaca

SEQ ID NO: 32470 - RNA, 19 nt, Homo sapiens
  misc_RNA (1)...(19): siRNA sense strand
ggagguagcugccaaccau

SEQ ID NO: 32471 - RNA, 19 nt, Homo sapiens
  misc_RNA (1)...(19): siRNA sense strand
gcacuaagaacuccuuuau

SEQ ID NO: 32472 - RNA, 19 nt, Homo sapiens
  misc_RNA (1)...(19): siRNA sense strand
gcagaagaaugugaugauu

SEQ ID NO: 32473 - RNA, 19 nt, Homo sapiens
  misc_RNA (1)...(19): siRNA sense strand
gucguuagauugaaugaua

SEQ ID NO: 32474 - RNA, 19 nt, Homo sapiens
  misc_RNA (1)...(19): siRNA sense strand
agaacuaagugacaaagua

SEQ ID NO: 32475 - RNA, 19 nt, Homo sapiens
  misc_RNA (1)...(19): siRNA sense strand
gcaaagagcauggucagaa

SEQ ID NO: 32476 - RNA, 19 nt, Homo sapiens
  misc_RNA (1)...(19): siRNA sense strand
ugacauggaugguagaaau

SEQ ID NO: 32477 - RNA, 19 nt, Homo sapiens
  misc_RNA (1)...(19): siRNA sense strand
ugauguaccuuggaaauaa

SEQ ID NO: 32478 - RNA, 19 nt, Homo sapiens
  misc_RNA (1)...(19): siRNA sense strand
guccagagguuaucacuga

SEQ ID NO: 32479 - RNA, 19 nt, Homo sapiens
  misc_RNA (1)...(19): siRNA sense strand
gauuugggcuuaccaccua

SEQ ID NO: 32480 - RNA, 19 nt, Homo sapiens
  misc_RNA (1)...(19): siRNA sense strand
gcauauguguuaacuguca

SEQ ID NO: 32481 - RNA, 19 nt, Homo sapiens
  misc_RNA (1)...(19): siRNA sense strand
agacguauauggaugguuu

SEQ ID NO: 32482 - RNA, 19 nt, Homo sapiens
  misc_RNA (1)...(19): siRNA sense strand
ggauaaauguggacguuca

SEQ ID NO: 32483 - RNA, 19 nt, Homo sapiens
  misc_RNA (1)...(19): siRNA sense strand
gaggugauauugaugcuau

SEQ ID NO: 32484 - RNA, 19 nt, Homo sapiens
  misc_RNA (1)...(19): siRNA sense strand
ccaaggaccugaggaauca

SEQ ID NO: 32485 - RNA, 19 nt, Homo sapiens
  misc_RNA (1)...(19): siRNA sense strand
caucagacauggacaagga

SEQ ID NO: 32486 - RNA, 19 nt, Homo sapiens
  misc_RNA (1)...(19): siRNA sense strand
ggacagaauacgagaacua

SEQ ID NO: 32487 - RNA, 19 nt, Homo sapiens
  misc_RNA (1)...(19): siRNA sense strand
caacuaccguucugccauu

SEQ ID NO: 32488 - RNA, 19 nt, Homo sapiens
  misc_RNA (1)...(19): siRNA sense strand
gcauuuauuucucugaaga

SEQ ID NO: 32489 - RNA, 19 nt, Homo sapiens
  misc_RNA (1)...(19): siRNA sense strand
ggaggacaauugaguuuca

SEQ ID NO: 32490 - RNA, 19 nt, Homo sapiens
  misc_RNA (1)...(19): siRNA sense strand
aggaagaucugccaagaaa

SEQ ID NO: 32491 - RNA, 19 nt, Homo sapiens
  misc_RNA (1)...(19): siRNA sense strand
caaaagaacuggaugugaa

SEQ ID NO: 32492 - RNA, 19 nt, Homo sapiens
  misc_RNA (1)...(19): siRNA sense strand
cuacacagcuggacagauc

SEQ ID NO: 32493 - RNA, 19 nt, Homo sapiens
  misc_RNA (1)...(19): siRNA sense strand
agacagauguggaaagaau

SEQ ID NO: 32494 - RNA, 19 nt, Homo sapiens
  misc_RNA (1)...(19): siRNA sense strand
gauagaggcuugcuguucu

SEQ ID NO: 32495 - RNA, 19 nt, Homo sapiens
  misc_RNA (1)...(19): siRNA sense strand
ucaacccaguggcauauua

SEQ ID NO: 32496 - RNA, 19 nt, Homo sapiens
  misc_RNA (1)...(19): siRNA sense strand
gcagagaccauucgauuca

SEQ ID NO: 32497 - RNA, 19 nt, Homo sapiens
  misc_RNA (1)...(19): siRNA sense strand
gugaauaaguuaaccaaca

SEQ ID NO: 32498 - RNA, 19 nt, Homo sapiens
  misc_RNA (1)...(19): siRNA sense strand
ggaagcacuuauguguuua

SEQ ID NO: 32499 - RNA, 19 nt, Homo sapiens
  misc_RNA (1)...(19): siRNA sense strand
gagggaaguuugccuggaa

SEQ ID NO: 32500 - RNA, 19 nt, Homo sapiens
  misc_RNA (1)...(19): siRNA sense strand
uggaagauuugaaaggaua

SEQ ID NO: 32501 - RNA, 19 nt, Homo sapiens
  misc_RNA (1)...(19): siRNA sense strand
gaugguagaaauagcaaua

SEQ ID NO: 32502 - RNA, 19 nt, Homo sapiens
  misc_RNA (1)...(19): siRNA sense strand
uagaaggccuggaaagaga

SEQ ID NO: 32503 - RNA, 19 nt, Homo sapiens
  misc_RNA (1)...(19): siRNA sense strand
cgucuuggcucacucugua

SEQ ID NO: 32504 - RNA, 19 nt, Homo sapiens
  misc_RNA (1)...(19): siRNA sense strand
uaaagguucuaccagguuu

SEQ ID NO: 32505 - RNA, 19 nt, Homo sapiens
  misc_RNA (1)...(19): siRNA sense strand
gauagcggcagcccaauuu

SEQ ID NO: 32506 - RNA, 19 nt, Homo sapiens
  misc_RNA (1)...(19): siRNA sense strand
gaaguggagccuuguagaa

SEQ ID NO: 32507 - RNA, 19 nt, Homo sapiens
  misc_RNA (1)...(19): siRNA sense strand
gauguaccuuggaaauaaa

SEQ ID NO: 32508 - RNA, 19 nt, Homo sapiens
  misc_RNA (1)...(19): siRNA sense strand
uacaagagcuggcaaagca

SEQ ID NO: 32509 - RNA, 19 nt, Homo sapiens
  misc_RNA (1)...(19): siRNA sense strand
cagaaaagcacaaacauua

SEQ ID NO: 32510 - RNA, 19 nt, Homo sapiens
  misc_RNA (1)...(19): siRNA sense strand
ggaaagcaccucagagaag

SEQ ID NO: 32511 - RNA, 19 nt, Homo sapiens
  misc_RNA (1)...(19): siRNA sense strand
guccugaaguccuagauuu

SEQ ID NO: 32512 - RNA, 19 nt, Homo sapiens
  misc_RNA (1)...(19): siRNA sense strand
guauauggaugguuuacug

SEQ ID NO: 32513 - RNA, 19 nt, Homo sapiens
  misc_RNA (1)...(19): siRNA sense strand
ccagagaugcugccaguaa

SEQ ID NO: 32514 - RNA, 19 nt, Homo sapiens
  misc_RNA (1)...(19): siRNA sense strand
ccagacagauguggaaaga

SEQ ID NO: 32515 - RNA, 19 nt, Homo sapiens
  misc_RNA (1)...(19): siRNA sense strand
gaagcaagacaagaacuaa

SEQ ID NO: 32516 - RNA, 19 nt, Homo sapiens
  misc_RNA (1)...(19): siRNA sense strand
acuaagaacuccuuuaugg

SEQ ID NO: 32517 - RNA, 19 nt, Homo sapiens
  misc_RNA (1)...(19): siRNA sense strand
cagaauacgagaacuaauu

SEQ ID NO: 32518 - RNA, 19 nt, Homo sapiens
  misc_RNA (1)...(19): siRNA sense strand
acagagaggugauauugau

SEQ ID NO: 32519 - RNA, 19 nt, Homo sapiens
  misc_RNA (1)...(19): siRNA sense strand
gagacaagugaaagaaaua

SEQ ID NO: 32520 - RNA, 19 nt, Homo sapiens
  misc_RNA (1)...(19): siRNA sense strand
ggaauauucaugucaauca

SEQ ID NO: 32521 - RNA, 19 nt, Homo sapiens
  misc_RNA (1)...(19): siRNA sense strand
gaggaucccuguguggaaa

SEQ ID NO: 32522 - RNA, 19 nt, Homo sapiens
  misc_RNA (1)...(19): siRNA sense strand
guucugagcuuguacaacu

SEQ ID NO: 32523 - RNA, 19 nt, Homo sapiens
  misc_RNA (1)...(19): siRNA sense strand
guacugagaauauguuugu

SEQ ID NO: 32524 - RNA, 19 nt, Homo sapiens
  misc_RNA (1)...(19): siRNA sense strand
auacaucucuguccuuguu

SEQ ID NO: 32525 - RNA, 19 nt, Homo sapiens
  misc_RNA (1)...(19): siRNA sense strand
gacaagaacuaagugacaa

SEQ ID NO: 32526 - RNA, 19 nt, Homo sapiens
  misc_RNA (1)...(19): siRNA sense strand
aagcguauguggauaaaug

SEQ ID NO: 32527 - RNA, 19 nt, Homo sapiens
  misc_RNA (1)...(19): siRNA sense strand
gcaaggagaaaugcaauga

SEQ ID NO: 32528 - RNA, 19 nt, Homo sapiens
  misc_RNA (1)...(19): siRNA sense strand
gauaaggaccuggcagaaa

SEQ ID NO: 32529 - RNA, 19 nt, Homo sapiens
  misc_RNA (1)...(19): siRNA sense strand
ucuggaagaugguuacauu

SEQ ID NO: 32530 - RNA, 19 nt, Homo sapiens
  misc_RNA (1)...(19): siRNA sense strand
ccaguggugucguuagauu

SEQ ID NO: 32531 - RNA, 19 nt, Homo sapiens
  misc_RNA (1)...(19): siRNA sense strand
gcccauguccucacacuaa

SEQ ID NO: 32532 - RNA, 19 nt, Homo sapiens
  misc_RNA (1)...(19): siRNA sense strand
cagauaacucggugaauaa

SEQ ID NO: 32533 - RNA, 19 nt, Homo sapiens
  misc_RNA (1)...(19): siRNA sense strand
ggacacagaacgaagacuu

SEQ ID NO: 32534 - RNA, 19 nt, Homo sapiens
  misc_RNA (1)...(19): siRNA sense strand
caaagcagucucuguguga

SEQ ID NO: 32535 - RNA, 19 nt, Homo sapiens
  misc_RNA (1)...(19): siRNA sense strand
gcaggucacucuggaagau

SEQ ID NO: 32536 - RNA, 19 nt, Homo sapiens
  misc_RNA (1)...(19): siRNA sense strand
gagguucaaugguaaaucu

SEQ ID NO: 32537 - RNA, 19 nt, Homo sapiens
  misc_RNA (1)...(19): siRNA sense strand
caggauggcucaggcauau

SEQ ID NO: 32538 - RNA, 19 nt, Homo sapiens
  misc_RNA (1)...(19): siRNA sense strand
ucacugggauccuaauaca

SEQ ID NO: 32539 - RNA, 19 nt, Homo sapiens
  misc_RNA (1)...(19): siRNA sense strand
gcaacggacauucaaauca

SEQ ID NO: 32540 - RNA, 19 nt, Homo sapiens
  misc_RNA (1)...(19): siRNA sense strand
gaauuaaggacaccuaugg

SEQ ID NO: 32541 - RNA, 19 nt, Homo sapiens
  misc_RNA (1)...(19): siRNA sense strand
aaaggaagaucugccaaga

SEQ ID NO: 32542 - RNA, 19 nt, Homo sapiens
  misc_RNA (1)...(19): siRNA sense strand
ggugucagcugcacuauuu

SEQ ID NO: 32543 - RNA, 19 nt, Homo sapiens
  misc_RNA (1)...(19): siRNA sense strand
caacuuaaccuuauggauu

SEQ ID NO: 32544 - RNA, 19 nt, Homo sapiens
  misc_RNA (1)...(19): siRNA sense strand
gguaagaccuggcgagugu

SEQ ID NO: 32545 - RNA, 19 nt, Homo sapiens
  misc_RNA (1)...(19): siRNA sense strand
ggacaggguugcugagguu

SEQ ID NO: 32546 - RNA, 19 nt, Homo sapiens
  misc_RNA (1)...(19): siRNA sense strand
ggagggacaugccguguga

SEQ ID NO: 32547 - RNA, 19 nt, Homo sapiens
  misc_RNA (1)...(19): siRNA sense strand
ggagagcgcugugaccuau

SEQ ID NO: 32548 - RNA, 19 nt, Homo sapiens
  misc_RNA (1)...(19): siRNA sense strand
ugaaagacauggaguugga

SEQ ID NO: 32549 - RNA, 19 nt, Homo sapiens
  misc_RNA (1)...(19): siRNA sense strand
gauccuagaugcaaagagu

SEQ ID NO: 32550 - RNA, 19 nt, Homo sapiens
  misc_RNA (1)...(19): siRNA sense strand
caagagggauuugagagaa

SEQ ID NO: 32551 - RNA, 19 nt, Homo sapiens
  misc_RNA (1)...(19): siRNA sense strand
ucagagacaugucacuuug

SEQ ID NO: 32552 - RNA, 19 nt, Homo sapiens
  misc_RNA (1)...(19): siRNA sense strand
gcagauccgugaccacauc

SEQ ID NO: 32553 - RNA, 19 nt, Homo sapiens
  misc_RNA (1)...(19): siRNA sense strand
ggaagagggagcaguuuga

SEQ ID NO: 32554 - RNA, 19 nt, Homo sapiens
  misc_RNA (1)...(19): siRNA sense strand
ggaggugugugugacaauu

SEQ ID NO: 32555 - RNA, 19 nt, Homo sapiens
  misc_RNA (1)...(19): siRNA sense strand
gaugaaaugcugcaagugu

SEQ ID NO: 32556 - RNA, 19 nt, Homo sapiens
  misc_RNA (1)...(19): siRNA sense strand
ugaccaagccugagaccua

SEQ ID NO: 32557 - RNA, 19 nt, Homo sapiens
  misc_RNA (1)...(19): siRNA sense strand
gagcagauccgagcaguuc

SEQ ID NO: 32558 - RNA, 19 nt, Homo sapiens
  misc_RNA (1)...(19): siRNA sense strand
agaguaagauugagcagau

SEQ ID NO: 32559 - RNA, 19 nt, Homo sapiens
  misc_RNA (1)...(19): siRNA sense strand
ggacugaccaagccugaga

SEQ ID NO: 32560 - RNA, 19 nt, Homo sapiens
  misc_RNA (1)...(19): siRNA sense strand
ccaagcagcugggugacuu

SEQ ID NO: 32561 - RNA, 19 nt, Homo sapiens
  misc_RNA (1)...(19): siRNA sense strand
ugacaagcaugaccaagca

SEQ ID NO: 32562 - RNA, 19 nt, Homo sapiens
  misc_RNA (1)...(19): siRNA sense strand
gagagugggcgcugccuuu

SEQ ID NO: 32563 - RNA, 19 nt, Homo sapiens
  misc_RNA (1)...(19): siRNA sense strand
cagaugaaaugcugcaagu

SEQ ID NO: 32564 - RNA, 19 nt, Homo sapiens
  misc_RNA (1)...(19): siRNA sense strand
gcgaguggcagaugaaaug

SEQ ID NO: 32565 - RNA, 19 nt, Homo sapiens
  misc_RNA (1)...(19): siRNA sense strand
ggagaucacaaacuugaga

SEQ ID NO: 32566 - RNA, 19 nt, Homo sapiens
  misc_RNA (1)...(19): siRNA sense strand
gaagagggagcaguuugaa

SEQ ID NO: 32567 - RNA, 19 nt, Homo sapiens
  misc_RNA (1)...(19): siRNA sense strand
gaugaaagacauggaguug

SEQ ID NO: 32568 - RNA, 19 nt, Homo sapiens
  misc_RNA (1)...(19): siRNA sense strand
ggaccaggcagaugauuag

SEQ ID NO: 32569 - RNA, 19 nt, Homo sapiens
  misc_RNA (1)...(19): siRNA sense strand
uagagaauguggcuucauc

SEQ ID NO: 32570 - RNA, 19 nt, Homo sapiens
  misc_RNA (1)...(19): siRNA sense strand
agagggauuugagagaaua

SEQ ID NO: 32571 - RNA, 19 nt, Homo sapiens
  misc_RNA (1)...(19): siRNA sense strand
gagauuccagcuucaagaa

SEQ ID NO: 32572 - RNA, 19 nt, Homo sapiens
  misc_RNA (1)...(19): siRNA sense strand
cagaaaagcuggugacaag

SEQ ID NO: 32573 - RNA, 19 nt, Homo sapiens
  misc_RNA (1)...(19): siRNA sense strand
ggagauuccagcuucaaga

SEQ ID NO: 32574 - RNA, 19 nt, Homo sapiens
  misc_RNA (1)...(19): siRNA sense strand
cagcgaggcuacugcaauc

SEQ ID NO: 32575 - RNA, 19 nt, Homo sapiens
  misc_RNA (1)...(19): siRNA sense strand
uaacagaccccgacacuga

SEQ ID NO: 32576 - RNA, 19 nt, Homo sapiens
  misc_RNA (1)...(19): siRNA sense strand
gagaugauggacaggauga

SEQ ID NO: 32577 - RNA, 19 nt, Homo sapiens
  misc_RNA (1)...(19): siRNA sense strand
ggacaggagauuccagcuu

SEQ ID NO: 32578 - RNA, 19 nt, Homo sapiens
  misc_RNA (1)...(19): siRNA sense strand
ggcuggagaugucuucguu

SEQ ID NO: 32579 - RNA, 19 nt, Homo sapiens
  misc_RNA (1)...(19): siRNA sense strand
ggauuuagugucugggauu

SEQ ID NO: 32580 - RNA, 19 nt, Homo sapiens
  misc_RNA (1)...(19): siRNA sense strand
gggagaccauggagaugau

SEQ ID NO: 32581 - RNA, 19 nt, Homo sapiens
  misc_RNA (1)...(19): siRNA sense strand
agacucagcuacuguucug

SEQ ID NO: 32582 - RNA, 19 nt, Homo sapiens
  misc_RNA (1)...(19): siRNA sense strand
uccgacagcucgcgccuuu

SEQ ID NO: 32583 - RNA, 19 nt, Homo sapiens
  misc_RNA (1)...(19): siRNA sense strand
gcccaugaaugccaaaggu

SEQ ID NO: 32584 - RNA, 19 nt, Homo sapiens
  misc_RNA (1)...(19): siRNA sense strand
ggaugaaagacauggaguu

SEQ ID NO: 32585 - RNA, 19 nt, Homo sapiens
  misc_RNA (1)...(19): siRNA sense strand
ccaagagggauuugagaga

SEQ ID NO: 32586 - RNA, 19 nt, Homo sapiens
  misc_RNA (1)...(19): siRNA sense strand
gauuagggcagccgaggaa

SEQ ID NO: 32587 - RNA, 19 nt, Homo sapiens
  misc_RNA (1)...(19): siRNA sense strand
cagcggaccaggcagauga

SEQ ID NO: 32588 - RNA, 19 nt, Homo sapiens
  misc_RNA (1)...(19): siRNA sense strand
gaugcaaagaguaagauug

SEQ ID NO: 32589 - RNA, 19 nt, Homo sapiens
  misc_RNA (1)...(19): siRNA sense strand
gaugauggacaggaugaaa

SEQ ID NO: 32590 - RNA, 19 nt, Homo sapiens
  misc_RNA (1)...(19): siRNA sense strand
gguccaacuuaaccuuaug

SEQ ID NO: 32591 - RNA, 19 nt, Homo sapiens
  misc_RNA (1)...(19): siRNA sense strand
ugcagaagaugaaugagau

SEQ ID NO: 32592 - RNA, 19 nt, Homo sapiens
  misc_RNA (1)...(19): siRNA sense strand
ucccaaaugugaccagugu

SEQ ID NO: 32593 - RNA, 19 nt, Homo sapiens
  misc_RNA (1)...(19): siRNA sense strand
cauucuuccucuuguguuu

SEQ ID NO: 32594 - RNA, 19 nt, Homo sapiens
  misc_RNA (1)...(19): siRNA sense strand
aagaagucaugauggaguu

SEQ ID NO: 32595 - RNA, 19 nt, Homo sapiens
  misc_RNA (1)...(19): siRNA sense strand
gauggaggaagaugucaga

SEQ ID NO: 32596 - RNA, 19 nt, Homo sapiens
  misc_RNA (1)...(19): siRNA sense strand
cgacugcaaugggcacuca

SEQ ID NO: 32597 - RNA, 19 nt, Homo sapiens
  misc_RNA (1)...(19): siRNA sense strand
gcagguccacgaugucugu

SEQ ID NO: 32598 - RNA, 19 nt, Homo sapiens
  misc_RNA (1)...(19): siRNA sense strand
gcugugcacccuucuacaa

SEQ ID NO: 32599 - RNA, 19 nt, Homo sapiens
  misc_RNA (1)...(19): siRNA sense strand
gcccggauccagaguguga

SEQ ID NO: 32600 - RNA, 19 nt, Homo sapiens
  misc_RNA (1)...(19): siRNA sense strand
acaaaaguaugcugaguug

SEQ ID NO: 32601 - RNA, 19 nt, Homo sapiens
  misc_RNA (1)...(19): siRNA sense strand
ccuaaugcacgccuaaaug

SEQ ID NO: 32602 - RNA, 19 nt, Homo sapiens
  misc_RNA (1)...(19): siRNA sense strand
ggacaggaugaaagacaug

SEQ ID NO: 32603 - RNA, 19 nt, Homo sapiens
  misc_RNA (1)...(19): siRNA sense strand
aaaguaugcugaguugaag

SEQ ID NO: 32604 - RNA, 19 nt, Homo sapiens
  misc_RNA (1)...(19): siRNA sense strand
gggauuccagcaacucaaa

SEQ ID NO: 32605 - RNA, 19 nt, Homo sapiens
  misc_RNA (1)...(19): siRNA sense strand
gauuuagugucugggauuc

SEQ ID NO: 32606 - RNA, 19 nt, Homo sapiens
  misc_RNA (1)...(19): siRNA sense strand
uggagagucuugacagaag

SEQ ID NO: 32607 - RNA, 19 nt, Homo sapiens
  misc_RNA (1)...(19): siRNA sense strand
ugaaaugcugcaaguguga

SEQ ID NO: 32608 - RNA, 19 nt, Homo sapiens
  misc_RNA (1)...(19): siRNA sense strand
caaaggugcgacugcaaug

SEQ ID NO: 32609 - RNA, 19 nt, Homo sapiens
  misc_RNA (1)...(19): siRNA sense strand
ccaaaggugcgacugcaau

SEQ ID NO: 32610 - RNA, 19 nt, Homo sapiens
  misc_RNA (1)...(19): siRNA sense strand
ccuuauggauuuagugucu

SEQ ID NO: 32611 - RNA, 19 nt, Homo sapiens
  misc_RNA (1)...(19): siRNA sense strand
gaccauucuuccucuugug

SEQ ID NO: 32612 - RNA, 19 nt, Homo sapiens
  misc_RNA (1)...(19): siRNA sense strand
gugcacccuucuacaacaa

SEQ ID NO: 32613 - RNA, 19 nt, Homo sapiens
  misc_RNA (1)...(19): siRNA sense strand
ccaggacgcccaugaaugc

SEQ ID NO: 32614 - RNA, 19 nt, Homo sapiens
  misc_RNA (1)...(19): siRNA sense strand
gaggaagagggagcaguuu

SEQ ID NO: 32615 - RNA, 19 nt, Homo sapiens
  misc_RNA (1)...(19): siRNA sense strand
augcaaagaguaagauuga

SEQ ID NO: 32616 - RNA, 19 nt, Homo sapiens
  misc_RNA (1)...(19): siRNA sense strand
gagaccauucuuccucuug

SEQ ID NO: 32617 - RNA, 19 nt, Homo sapiens
  misc_RNA (1)...(19): siRNA sense strand
ggccugcuauccaccuguu

SEQ ID NO: 32618 - RNA, 19 nt, Homo sapiens
  misc_RNA (1)...(19): siRNA sense strand
gggagagcgcugugaccua

SEQ ID NO: 32619 - RNA, 19 nt, Homo sapiens
  misc_RNA (1)...(19): siRNA sense strand
gauccagagugugaagaca

SEQ ID NO: 32620 - RNA, 19 nt, Homo sapiens
  misc_RNA (1)...(19): siRNA sense strand
cggaccaggcagaugauua

SEQ ID NO: 32621 - RNA, 19 nt, Homo sapiens
  misc_RNA (1)...(19): siRNA sense strand
uucaagaagucaugaugga

SEQ ID NO: 32622 - RNA, 19 nt, Homo sapiens
  misc_RNA (1)...(19): siRNA sense strand
ugacacccaccuucaacaa

SEQ ID NO: 32623 - RNA, 19 nt, Homo sapiens
  misc_RNA (1)...(19): siRNA sense strand
gaccugacacccaccuuca

SEQ ID NO: 32624 - RNA, 19 nt, Homo sapiens
  misc_RNA (1)...(19): siRNA sense strand
ccuggagagucuugacaga

SEQ ID NO: 32625 - RNA, 19 nt, Homo sapiens
  misc_RNA (1)...(19): siRNA sense strand
cauauggagguguguguga

SEQ ID NO: 32626 - RNA, 19 nt, Homo sapiens
  misc_RNA (1)...(19): siRNA sense strand
acacugaugcagccacuau

SEQ ID NO: 32627 - RNA, 19 nt, Homo sapiens
  misc_RNA (1)...(19): siRNA sense strand
gaggugugugugacaauug

SEQ ID NO: 32628 - RNA, 19 nt, Homo sapiens
  misc_RNA (1)...(19): siRNA sense strand
cuaaugcacgccuaaaugg

SEQ ID NO: 32629 - RNA, 19 nt, Homo sapiens
  misc_RNA (1)...(19): siRNA sense strand
aagagggauuugagagaau

SEQ ID NO: 32630 - RNA, 19 nt, Homo sapiens
  misc_RNA (1)...(19): siRNA sense strand
ccagguggaagaugugguu

SEQ ID NO: 32631 - RNA, 19 nt, Homo sapiens
  misc_RNA (1)...(19): siRNA sense strand
uauggcgaguggcagauga

SEQ ID NO: 32632 - RNA, 19 nt, Homo sapiens
  misc_RNA (1)...(19): siRNA sense strand
cguugucccuuccgagaga

SEQ ID NO: 32633 - RNA, 19 nt, Homo sapiens
  misc_RNA (1)...(19): siRNA sense strand
agaccauucuuccucuugu

SEQ ID NO: 32634 - RNA, 19 nt, Homo sapiens
  misc_RNA (1)...(19): siRNA sense strand
gauccgugaccacaucaau

SEQ ID NO: 32635 - RNA, 19 nt, Homo sapiens
  misc_RNA (1)...(19): siRNA sense strand
gccaggacgcccaugaaug

SEQ ID NO: 32636 - RNA, 19 nt, Homo sapiens
  misc_RNA (1)...(19): siRNA sense strand
ggcagugugugugcaagga

SEQ ID NO: 32637 - RNA, 19 nt, Homo sapiens
  misc_RNA (1)...(19): siRNA sense strand
ugauggacaggaugaaaga

SEQ ID NO: 32638 - RNA, 19 nt, Homo sapiens
  misc_RNA (1)...(19): siRNA sense strand
agaggaagagggagcaguu

SEQ ID NO: 32639 - RNA, 19 nt, Homo sapiens
  misc_RNA (1)...(19): siRNA sense strand
gaguaagauugagcagauc

SEQ ID NO: 32640 - RNA, 19 nt, Homo sapiens
  misc_RNA (1)...(19): siRNA sense strand
gcccugcgcuuugguagac

SEQ ID NO: 32641 - RNA, 19 nt, Homo sapiens
  misc_RNA (1)...(19): siRNA sense strand
ggcagccucacaacuacua

SEQ ID NO: 32642 - RNA, 19 nt, Homo sapiens
  misc_RNA (1)...(19): siRNA sense strand
gaggaaggcugguacaugu

SEQ ID NO: 32643 - RNA, 19 nt, Homo sapiens
  misc_RNA (1)...(19): siRNA sense strand
ggaaggaccgcuuuauuga

SEQ ID NO: 32644 - RNA, 19 nt, Homo sapiens
  misc_RNA (1)...(19): siRNA sense strand
guagacugcuggaucgaua

SEQ ID NO: 32645 - RNA, 19 nt, Homo sapiens
  misc_RNA (1)...(19): siRNA sense strand
gcucugggcucguguccaa

SEQ ID NO: 32646 - RNA, 19 nt, Homo sapiens
  misc_RNA (1)...(19): siRNA sense strand
ggaaguauacugucuuuac

SEQ ID NO: 32647 - RNA, 19 nt, Homo sapiens
  misc_RNA (1)...(19): siRNA sense strand
gaaagaggagcagcgcaua

SEQ ID NO: 32648 - RNA, 19 nt, Homo sapiens
  misc_RNA (1)...(19): siRNA sense strand
gauacagcaucucaacaug

SEQ ID NO: 32649 - RNA, 19 nt, Homo sapiens
  misc_RNA (1)...(19): siRNA sense strand
guggaaguauacugucuuu

SEQ ID NO: 32650 - RNA, 19 nt, Homo sapiens
  misc_RNA (1)...(19): siRNA sense strand
gaaguauacugucuuuacg

SEQ ID NO: 32651 - RNA, 19 nt, Homo sapiens
  misc_RNA (1)...(19): siRNA sense strand
gaggaccacguguucauuu

SEQ ID NO: 32652 - RNA, 19 nt, Homo sapiens
  misc_RNA (1)...(19): siRNA sense strand
ugucuacacuugcucuauu

SEQ ID NO: 32653 - RNA, 19 nt, Homo sapiens
  misc_RNA (1)...(19): siRNA sense strand
aaggaccgcuuuauugaug

SEQ ID NO: 32654 - RNA, 19 nt, Homo sapiens
  misc_RNA (1)...(19): siRNA sense strand
ggcuggaucucaacauguu

SEQ ID NO: 32655 - RNA, 19 nt, Homo sapiens
  misc_RNA (1)...(19): siRNA sense strand
ggauacagcaucucaacau

SEQ ID NO: 32656 - RNA, 19 nt, Homo sapiens
  misc_RNA (1)...(19): siRNA sense strand
uggaaggaccgcuuuauug

SEQ ID NO: 32657 - RNA, 19 nt, Homo sapiens
  misc_RNA (1)...(19): siRNA sense strand
gaaggaccgcuuuauugau

SEQ ID NO: 32658 - RNA, 19 nt, Homo sapiens
  misc_RNA (1)...(19): siRNA sense strand
ggagaugcacgcugccuau

SEQ ID NO: 32659 - RNA, 19 nt, Homo sapiens
  misc_RNA (1)...(19): siRNA sense strand
ugcagaaccuggucaacaa

SEQ ID NO: 32660 - RNA, 19 nt, Homo sapiens
  misc_RNA (1)...(19): siRNA sense strand
ccucggcugucuacacuug

SEQ ID NO: 32661 - RNA, 19 nt, Homo sapiens
  misc_RNA (1)...(19): siRNA sense strand
gaggacuucuucaccaucu

SEQ ID NO: 32662 - RNA, 19 nt, Homo sapiens
  misc_RNA (1)...(19): siRNA sense strand
acacccagcuucaacuaca

SEQ ID NO: 32663 - RNA, 19 nt, Homo sapiens
  misc_RNA (1)...(19): siRNA sense strand
gucuacacuugcucuauuu

SEQ ID NO: 32664 - RNA, 19 nt, Homo sapiens
  misc_RNA (1)...(19): siRNA sense strand
aaagaggagcagcgcauaa

SEQ ID NO: 32665 - RNA, 19 nt, Homo sapiens
  misc_RNA (1)...(19): siRNA sense strand
ccacacccagcuucaacua

SEQ ID NO: 32666 - RNA, 19 nt, Homo sapiens
  misc_RNA (1)...(19): siRNA sense strand
cagauguggugaacuggau

SEQ ID NO: 32667 - RNA, 19 nt, Homo sapiens
  misc_RNA (1)...(19): siRNA sense strand
ucaacauggucuucagcaa

SEQ ID NO: 32668 - RNA, 19 nt, Homo sapiens
  misc_RNA (1)...(19): siRNA sense strand
ccaucuggcuggaucucaa

SEQ ID NO: 32669 - RNA, 19 nt, Homo sapiens
  misc_RNA (1)...(19): siRNA sense strand
gcagaaccuggucaacaau

SEQ ID NO: 32670 - RNA, 19 nt, Homo sapiens
  misc_RNA (1)...(19): siRNA sense strand
ccuucuggcuccucaaugu

SEQ ID NO: 32671 - RNA, 19 nt, Homo sapiens
  misc_RNA (1)...(19): siRNA sense strand
gauccgcgucccuggcuuu

SEQ ID NO: 32672 - RNA, 19 nt, Homo sapiens
  misc_RNA (1)...(19): siRNA sense strand
cagaggacuucuucaccau

SEQ ID NO: 32673 - RNA, 19 nt, Homo sapiens
  misc_RNA (1)...(19): siRNA sense strand
gccagcaggaggaguacua

SEQ ID NO: 32674 - RNA, 19 nt, Homo sapiens
  misc_RNA (1)...(19): siRNA sense strand
gugcagaaccuggucaaca

SEQ ID NO: 32675 - RNA, 19 nt, Homo sapiens
  misc_RNA (1)...(19): siRNA sense strand
gaccacguguucauuucca

SEQ ID NO: 32676 - RNA, 19 nt, Homo sapiens
  misc_RNA (1)...(19): siRNA sense strand
uggaugugcuaccgcaaga

SEQ ID NO: 32677 - RNA, 19 nt, Homo sapiens
  misc_RNA (1)...(19): siRNA sense strand
gauaacaccaggguugucu

SEQ ID NO: 32678 - RNA, 19 nt, Homo sapiens
  misc_RNA (1)...(19): siRNA sense strand
uacagcaucucaacauggu

SEQ ID NO: 32679 - RNA, 19 nt, Homo sapiens
  misc_RNA (1)...(19): siRNA sense strand
gcuccucaaugugcucuuc

SEQ ID NO: 32680 - RNA, 19 nt, Homo sapiens
  misc_RNA (1)...(19): siRNA sense strand
caucauguccagcaucaag

SEQ ID NO: 32681 - RNA, 19 nt, Homo sapiens
  misc_RNA (1)...(19): siRNA sense strand
aagccaagcuggacaaacc

SEQ ID NO: 32682 - RNA, 19 nt, Homo sapiens
  misc_RNA (1)...(19): siRNA sense strand
ugaggaaggcugguacaug

SEQ ID NO: 32683 - RNA, 19 nt, Homo sapiens
  misc_RNA (1)...(19): siRNA sense strand
cccaucauguccagcauca

SEQ ID NO: 32684 - RNA, 19 nt, Homo sapiens
  misc_RNA (1)...(19): siRNA sense strand
gucccuggcuuuggcaaga

SEQ ID NO: 32685 - RNA, 19 nt, Homo sapiens
  misc_RNA (1)...(19): siRNA sense strand
guacauguggcugcaguca

SEQ ID NO: 32686 - RNA, 19 nt, Homo sapiens
  misc_RNA (1)...(19): siRNA sense strand
gaugugcuaccgcaagaca

SEQ ID NO: 32687 - RNA, 19 nt, Homo sapiens
  misc_RNA (1)...(19): siRNA sense strand
cuggaaggaccgcuuuauu

SEQ ID NO: 32688 - RNA, 19 nt, Homo sapiens
  misc_RNA (1)...(19): siRNA sense strand
ucaagcccaugcuggucuu

SEQ ID NO: 32689 - RNA, 19 nt, Homo sapiens
  misc_RNA (1)...(19): siRNA sense strand
gaggagcagcgcauaacca

SEQ ID NO: 32690 - RNA, 19 nt, Homo sapiens
  misc_RNA (1)...(19): siRNA sense strand
cugugggugugcucuauga

SEQ ID NO: 32691 - RNA, 19 nt, Homo sapiens
  misc_RNA (1)...(19): siRNA sense strand
ggacaaaucugacgaggaa

SEQ ID NO: 32692 - RNA, 19 nt, Homo sapiens
  misc_RNA (1)...(19): siRNA sense strand
ggacagauaucaucaacga

SEQ ID NO: 32693 - RNA, 19 nt, Homo sapiens
  misc_RNA (1)...(19): siRNA sense strand
gaaguuggcugcguuaaug

SEQ ID NO: 32694 - RNA, 19 nt, Homo sapiens
  misc_RNA (1)...(19): siRNA sense strand
ggaaaugcaucuccuacaa

SEQ ID NO: 32695 - RNA, 19 nt, Homo sapiens
  misc_RNA (1)...(19): siRNA sense strand
ggagugaacuggugugaga

SEQ ID NO: 32696 - RNA, 19 nt, Homo sapiens
  misc_RNA (1)...(19): siRNA sense strand
gaagauggcucggaugagu

SEQ ID NO: 32697 - RNA, 19 nt, Homo sapiens
  misc_RNA (1)...(19): siRNA sense strand
gcaaggacaugagcgauga

SEQ ID NO: 32698 - RNA, 19 nt, Homo sapiens
  misc_RNA (1)...(19): siRNA sense strand
ggacaaagucugcaacaug

SEQ ID NO: 32699 - RNA, 19 nt, Homo sapiens
  misc_RNA (1)...(19): siRNA sense strand
cagcgaagaugcgaagaua

SEQ ID NO: 32700 - RNA, 19 nt, Homo sapiens
  misc_RNA (1)...(19): siRNA sense strand
ggacaugagcgaugaaguu

SEQ ID NO: 32701 - RNA, 19 nt, Homo sapiens
  misc_RNA (1)...(19): siRNA sense strand
cgacagaugugaaagaaac

SEQ ID NO: 32702 - RNA, 19 nt, Homo sapiens
  misc_RNA (1)...(19): siRNA sense strand
ccaacaaguucaaguguca

SEQ ID NO: 32703 - RNA, 19 nt, Homo sapiens
  misc_RNA (1)...(19): siRNA sense strand
ugaaugguguggacaucua

SEQ ID NO: 32704 - RNA, 19 nt, Homo sapiens
  misc_RNA (1)...(19): siRNA sense strand
aaacuucacuccaucucaa

SEQ ID NO: 32705 - RNA, 19 nt, Homo sapiens
  misc_RNA (1)...(19): siRNA sense strand
gaggugcgauggccaagug

SEQ ID NO: 32706 - RNA, 19 nt, Homo sapiens
  misc_RNA (1)...(19): siRNA sense strand
gcagaggaaaugagaagaa

SEQ ID NO: 32707 - RNA, 19 nt, Homo sapiens
  misc_RNA (1)...(19): siRNA sense strand
gaauuccagugcucugaug

SEQ ID NO: 32708 - RNA, 19 nt, Homo sapiens
  misc_RNA (1)...(19): siRNA sense strand
ccaagggcgugaagaggaa

SEQ ID NO: 32709 - RNA, 19 nt, Homo sapiens
  misc_RNA (1)...(19): siRNA sense strand
aggaugagguccacauuug

SEQ ID NO: 32710 - RNA, 19 nt, Homo sapiens
  misc_RNA (1)...(19): siRNA sense strand
ggagguggccagcaauaga

SEQ ID NO: 32711 - RNA, 19 nt, Homo sapiens
  misc_RNA (1)...(19): siRNA sense strand
gcaucacccuggacaaagu

SEQ ID NO: 32712 - RNA, 19 nt, Homo sapiens
  misc_RNA (1)...(19): siRNA sense strand
gaggaugagguccacauuu

SEQ ID NO: 32713 - RNA, 19 nt, Homo sapiens
  misc_RNA (1)...(19): siRNA sense strand
ccaauggcaucacccuaga

SEQ ID NO: 32714 - RNA, 19 nt, Homo sapiens
  misc_RNA (1)...(19): siRNA sense strand
acacggagguggccagcaa

SEQ ID NO: 32715 - RNA, 19 nt, Homo sapiens
  misc_RNA (1)...(19): siRNA sense strand
gcgaagauggcucggauga

SEQ ID NO: 32716 - RNA, 19 nt, Homo sapiens
  misc_RNA (1)...(19): siRNA sense strand
ggaccacccugagcaaugg

SEQ ID NO: 32717 - RNA, 19 nt, Homo sapiens
  misc_RNA (1)...(19): siRNA sense strand
ucuacucgcuggugacuga

SEQ ID NO: 32718 - RNA, 19 nt, Homo sapiens
  misc_RNA (1)...(19): siRNA sense strand
gcgagggacccaacaaguu

SEQ ID NO: 32719 - RNA, 19 nt, Homo sapiens
  misc_RNA (1)...(19): siRNA sense strand
ugagggcucuguccauugu

SEQ ID NO: 32720 - RNA, 19 nt, Homo sapiens
  misc_RNA (1)...(19): siRNA sense strand
ggcgacagaugugaaagaa

SEQ ID NO: 32721 - RNA, 19 nt, Homo sapiens
  misc_RNA (1)...(19): siRNA sense strand
gaaaugcaucuccuacaag

SEQ ID NO: 32722 - RNA, 19 nt, Homo sapiens
  misc_RNA (1)...(19): siRNA sense strand
caucaacagcaucaacuuu

SEQ ID NO: 32723 - RNA, 19 nt, Homo sapiens
  misc_RNA (1)...(19): siRNA sense strand
gaacaucaacagcaucaac

SEQ ID NO: 32724 - RNA, 19 nt, Homo sapiens
  misc_RNA (1)...(19): siRNA sense strand
gcgaagaugcgaagauauc

SEQ ID NO: 32725 - RNA, 19 nt, Homo sapiens
  misc_RNA (1)...(19): siRNA sense strand
gaugaaguuggcugcguua

SEQ ID NO: 32726 - RNA, 19 nt, Homo sapiens
  misc_RNA (1)...(19): siRNA sense strand
gugcaucucucggcaguuc

SEQ ID NO: 32727 - RNA, 19 nt, Homo sapiens
  misc_RNA (1)...(19): siRNA sense strand
gcaguucgucugugacuca

SEQ ID NO: 32728 - RNA, 19 nt, Homo sapiens
  misc_RNA (1)...(19): siRNA sense strand
uuaagaacaucaacagcau

SEQ ID NO: 32729 - RNA, 19 nt, Homo sapiens
  misc_RNA (1)...(19): siRNA sense strand
gagguggccagcaauagaa

SEQ ID NO: 32730 - RNA, 19 nt, Homo sapiens
  misc_RNA (1)...(19): siRNA sense strand
aaaugcaucuccuacaagu

SEQ ID NO: 32731 - RNA, 19 nt, Homo sapiens
  misc_RNA (1)...(19): siRNA sense strand
ccagugcucugauggaaac

SEQ ID NO: 32732 - RNA, 19 nt, Homo sapiens
  misc_RNA (1)...(19): siRNA sense strand
caggauggcucugaugagu

SEQ ID NO: 32733 - RNA, 19 nt, Homo sapiens
  misc_RNA (1)...(19): siRNA sense strand
cgugagggcucuguccauu

SEQ ID NO: 32734 - RNA, 19 nt, Homo sapiens
  misc_RNA (1)...(19): siRNA sense strand
gacaugagcgaugaaguug

SEQ ID NO: 32735 - RNA, 19 nt, Homo sapiens
  misc_RNA (1)...(19): siRNA sense strand
gaugcgaagauaucgauga

SEQ ID NO: 32736 - RNA, 19 nt, Homo sapiens
  misc_RNA (1)...(19): siRNA sense strand
gcuggugacugaaaacauu

SEQ ID NO: 32737 - RNA, 19 nt, Homo sapiens
  misc_RNA (1)...(19): siRNA sense strand
cagaggaaaugagaagaag

SEQ ID NO: 32738 - RNA, 19 nt, Homo sapiens
  misc_RNA (1)...(19): siRNA sense strand
guaaggacacagcacacaa

SEQ ID NO: 32739 - RNA, 19 nt, Homo sapiens
  misc_RNA (1)...(19): siRNA sense strand
ccucacagguuccgauguc

SEQ ID NO: 32740 - RNA, 19 nt, Homo sapiens
  misc_RNA (1)...(19): siRNA sense strand
cgagggacccaacaaguuc

SEQ ID NO: 32741 - RNA, 19 nt, Homo sapiens
  misc_RNA (1)...(19): siRNA sense strand
uaucaucaacgaagccauu

SEQ ID NO: 32742 - RNA, 19 nt, Homo sapiens
  misc_RNA (1)...(19): siRNA sense strand
uggguugacuccaaacuuc

SEQ ID NO: 32743 - RNA, 19 nt, Homo sapiens
  misc_RNA (1)...(19): siRNA sense strand
gcagugugaccgggaauau

SEQ ID NO: 32744 - RNA, 19 nt, Homo sapiens
  misc_RNA (1)...(19): siRNA sense strand
gaccugucccagagaauga

SEQ ID NO: 32745 - RNA, 19 nt, Homo sapiens
  misc_RNA (1)...(19): siRNA sense strand
cacccuagaucuccucagu

SEQ ID NO: 32746 - RNA, 19 nt, Homo sapiens
  misc_RNA (1)...(19): siRNA sense strand
gaugugaaagaaacgaguu

SEQ ID NO: 32747 - RNA, 19 nt, Homo sapiens
  misc_RNA (1)...(19): siRNA sense strand
gaagaugcgaagauaucga

SEQ ID NO: 32748 - RNA, 19 nt, Homo sapiens
  misc_RNA (1)...(19): siRNA sense strand
guggagauagugacaaugu

SEQ ID NO: 32749 - RNA, 19 nt, Homo sapiens
  misc_RNA (1)...(19): siRNA sense strand
gcaaggcugugggcuccau

SEQ ID NO: 32750 - RNA, 19 nt, Homo sapiens
  misc_RNA (1)...(19): siRNA sense strand
gcuacaagugccaguguga

SEQ ID NO: 32751 - RNA, 19 nt, Homo sapiens
  misc_RNA (1)...(19): siRNA sense strand
gggaauaugacugcaagga

SEQ ID NO: 32752 - RNA, 19 nt, Homo sapiens
  misc_RNA (1)...(19): siRNA sense strand
gcagugggcgacagaugug

SEQ ID NO: 32753 - RNA, 19 nt, Homo sapiens
  misc_RNA (1)...(19): siRNA sense strand
guucccacgucugcaauga

SEQ ID NO: 32754 - RNA, 19 nt, Homo sapiens
  misc_RNA (1)...(19): siRNA sense strand
ucucaagcaucgaugucaa

SEQ ID NO: 32755 - RNA, 19 nt, Homo sapiens
  misc_RNA (1)...(19): siRNA sense strand
gggcgacagaugugaaaga

SEQ ID NO: 32756 - RNA, 19 nt, Homo sapiens
  misc_RNA (1)...(19): siRNA sense strand
ggcacgaggucaggaagau

SEQ ID NO: 32757 - RNA, 19 nt, Homo sapiens
  misc_RNA (1)...(19): siRNA sense strand
caacgaagccauuuucagu

SEQ ID NO: 32758 - RNA, 19 nt, Homo sapiens
  misc_RNA (1)...(19): siRNA sense strand
ccugggcacugucucuguu

SEQ ID NO: 32759 - RNA, 19 nt, Homo sapiens
  misc_RNA (1)...(19): siRNA sense strand
ccacggcgucucuuccuau

SEQ ID NO: 32760 - RNA, 19 nt, Homo sapiens
  misc_RNA (1)...(19): siRNA sense strand
acgaaugcuuggacaacaa

SEQ ID NO: 32761 - RNA, 19 nt, Homo sapiens
  misc_RNA (1)...(19): siRNA sense strand
caaccucacccagccaaga

SEQ ID NO: 32762 - RNA, 19 nt, Homo sapiens
  misc_RNA (1)...(19): siRNA sense strand
caagugccagugugaggaa

SEQ ID NO: 32763 - RNA, 19 nt, Homo sapiens
  misc_RNA (1)...(19): siRNA sense strand
cgucugcaaugaccuuaag

SEQ ID NO: 32764 - RNA, 19 nt, Homo sapiens
  misc_RNA (1)...(19): siRNA sense strand
guaggggucuuuacguguu

SEQ ID NO: 32765 - RNA, 19 nt, Homo sapiens
  misc_RNA (1)...(19): siRNA sense strand
gauggucagucuggaggau

SEQ ID NO: 32766 - RNA, 19 nt, Homo sapiens
  misc_RNA (1)...(19): siRNA sense strand
gggaaaugcaucuccuaca

SEQ ID NO: 32767 - RNA, 19 nt, Homo sapiens
  misc_RNA (1)...(19): siRNA sense strand
gcuugucugucaccugcaa

SEQ ID NO: 32768 - RNA, 19 nt, Homo sapiens
  misc_RNA (1)...(19): siRNA sense strand
ccacagccguaaggacaca

SEQ ID NO: 32769 - RNA, 19 nt, Homo sapiens
  misc_RNA (1)...(19): siRNA sense strand
agugugaccgggaauauga

SEQ ID NO: 32770 - RNA, 19 nt, Homo sapiens
  misc_RNA (1)...(19): siRNA sense strand
gcuggcagaggaaaugaga

SEQ ID NO: 32771 - RNA, 19 nt, Homo sapiens
  misc_RNA (1)...(19): siRNA sense strand
cgguggagauagugacaau

SEQ ID NO: 32772 - RNA, 19 nt, Homo sapiens
  misc_RNA (1)...(19): siRNA sense strand
caaacuucacuccaucuca

SEQ ID NO: 32773 - RNA, 19 nt, Homo sapiens
  misc_RNA (1)...(19): siRNA sense strand
ugaaguuggcugcguuaau

SEQ ID NO: 32774 - RNA, 19 nt, Homo sapiens
  misc_RNA (1)...(19): siRNA sense strand
ggacccaacaaguucaagu

SEQ ID NO: 32775 - RNA, 19 nt, Homo sapiens
  misc_RNA (1)...(19): siRNA sense strand
cacgaggucaggaagauga

SEQ ID NO: 32776 - RNA, 19 nt, Homo sapiens
  misc_RNA (1)...(19): siRNA sense strand
caacgaaugcuuggacaac

SEQ ID NO: 32777 - RNA, 19 nt, Homo sapiens
  misc_RNA (1)...(19): siRNA sense strand
ucugcaacauggcuagaga

SEQ ID NO: 32778 - RNA, 19 nt, Homo sapiens
  misc_RNA (1)...(19): siRNA sense strand
cgacugcaaggacaaaucu

SEQ ID NO: 32779 - RNA, 19 nt, Homo sapiens
  misc_RNA (1)...(19): siRNA sense strand
aaacguuauucagggagaa

SEQ ID NO: 32780 - RNA, 19 nt, Homo sapiens
  misc_RNA (1)...(19): siRNA sense strand
ccgcugcauuccucaguuc

SEQ ID NO: 32781 - RNA, 19 nt, Homo sapiens
  misc_RNA (1)...(19): siRNA sense strand
ccaaguggacugcgacaac

SEQ ID NO: 32782 - RNA, 19 nt, Homo sapiens
  misc_RNA (1)...(19): siRNA sense strand
ugccgggacuggucagaug

SEQ ID NO: 32783 - RNA, 19 nt, Homo sapiens
  misc_RNA (1)...(19): siRNA sense strand
gacccaacaaguucaagug

SEQ ID NO: 32784 - RNA, 19 nt, Homo sapiens
  misc_RNA (1)...(19): siRNA sense strand
cgaguuccacugccuaagu

SEQ ID NO: 32785 - RNA, 19 nt, Homo sapiens
  misc_RNA (1)...(19): siRNA sense strand
agaagaccacagaggauga

SEQ ID NO: 32786 - RNA, 19 nt, Homo sapiens
  misc_RNA (1)...(19): siRNA sense strand
acuccaaacuucacuccau

SEQ ID NO: 32787 - RNA, 19 nt, Homo sapiens
  misc_RNA (1)...(19): siRNA sense strand
gcacgaggucaggaagaug

SEQ ID NO: 32788 - RNA, 19 nt, Homo sapiens
  misc_RNA (1)...(19): siRNA sense strand
gaggagugaacugguguga

SEQ ID NO: 32789 - RNA, 19 nt, Homo sapiens
  misc_RNA (1)...(19): siRNA sense strand
ucagaagaccacagaggau

SEQ ID NO: 32790 - RNA, 19 nt, Homo sapiens
  misc_RNA (1)...(19): siRNA sense strand
gugcuccucgucuuccuuu

SEQ ID NO: 32791 - RNA, 19 nt, Homo sapiens
  misc_RNA (1)...(19): siRNA sense strand
caacagauccucaccagua

SEQ ID NO: 32792 - RNA, 19 nt, Homo sapiens
  misc_RNA (1)...(19): siRNA sense strand
ccagaaacgugauccaaau

SEQ ID NO: 32793 - RNA, 19 nt, Homo sapiens
  misc_RNA (1)...(19): siRNA sense strand
gaaacgugauccaaauauc

SEQ ID NO: 32794 - RNA, 19 nt, Homo sapiens
  misc_RNA (1)...(19): siRNA sense strand
cagaaacgugauccaaaua

SEQ ID NO: 32795 - RNA, 19 nt, Homo sapiens
  misc_RNA (1)...(19): siRNA sense strand
ccaguaugccuuccagaaa

SEQ ID NO: 32796 - RNA, 19 nt, Homo sapiens
  misc_RNA (1)...(19): siRNA sense strand
aacagaaagucaccgguuu

SEQ ID NO: 32797 - RNA, 19 nt, Homo sapiens
  misc_RNA (1)...(19): siRNA sense strand
gcagucagucuccuccaaa

SEQ ID NO: 32798 - RNA, 19 nt, Homo sapiens
  misc_RNA (1)...(19): siRNA sense strand
aguccaagaugacaccaaa

SEQ ID NO: 32799 - RNA, 19 nt, Homo sapiens
  misc_RNA (1)...(19): siRNA sense strand
ccaacgaccuggagaaccu

SEQ ID NO: 32800 - RNA, 19 nt, Homo sapiens
  misc_RNA (1)...(19): siRNA sense strand
ucaccaggaucaaugacau

SEQ ID NO: 32801 - RNA, 19 nt, Homo sapiens
  misc_RNA (1)...(19): siRNA sense strand
ucagucuccuccaaacaga

SEQ ID NO: 32802 - RNA, 19 nt, Homo sapiens
  misc_RNA (1)...(19): siRNA sense strand
gaaccuccgggaucuucuu

SEQ ID NO: 32803 - RNA, 19 nt, Homo sapiens
  misc_RNA (1)...(19): siRNA sense strand
gagaaccuccgggaucuuc

SEQ ID NO: 32804 - RNA, 19 nt, Homo sapiens
  misc_RNA (1)...(19): siRNA sense strand
agaaacgugauccaaauau

SEQ ID NO: 32805 - RNA, 19 nt, Homo sapiens
  misc_RNA (1)...(19): siRNA sense strand
ggcccuaucuuuucuaugu

SEQ ID NO: 32806 - RNA, 19 nt, Homo sapiens
  misc_RNA (1)...(19): siRNA sense strand
caguaugccuuccagaaac

SEQ ID NO: 32807 - RNA, 19 nt, Homo sapiens
  misc_RNA (1)...(19): siRNA sense strand
auccugaccuuauccaaga

SEQ ID NO: 32808 - RNA, 19 nt, Homo sapiens
  misc_RNA (1)...(19): siRNA sense strand
ccaaaacccucaucaagac

SEQ ID NO: 32809 - RNA, 19 nt, Homo sapiens
  misc_RNA (1)...(19): siRNA sense strand
aacagauccucaccaguau

SEQ ID NO: 32810 - RNA, 19 nt, Homo sapiens
  misc_RNA (1)...(19): siRNA sense strand
acaauugucaccaggauca

SEQ ID NO: 32811 - RNA, 19 nt, Homo sapiens
  misc_RNA (1)...(19): siRNA sense strand
caagcugugcccauccaaa

SEQ ID NO: 32812 - RNA, 19 nt, Homo sapiens
  misc_RNA (1)...(19): siRNA sense strand
acagaaagucaccgguuug

SEQ ID NO: 32813 - RNA, 19 nt, Homo sapiens
  misc_RNA (1)...(19): siRNA sense strand
uggcuuuggcccuaucuuu

SEQ ID NO: 32814 - RNA, 19 nt, Homo sapiens
  misc_RNA (1)...(19): siRNA sense strand
aaacccucaucaagacaau

SEQ ID NO: 32815 - RNA, 19 nt, Homo sapiens
  misc_RNA (1)...(19): siRNA sense strand
gaaggcaucugcauagaga

SEQ ID NO: 32816 - RNA, 19 nt, Homo sapiens
  misc_RNA (1)...(19): siRNA sense strand
gaaucaguaugucuacaaa

SEQ ID NO: 32817 - RNA, 19 nt, Homo sapiens
  misc_RNA (1)...(19): siRNA sense strand
gcaagccacuauuuacugu

SEQ ID NO: 32818 - RNA, 19 nt, Homo sapiens
  misc_RNA (1)...(19): siRNA sense strand
ggaggucacaggcagguua

SEQ ID NO: 32819 - RNA, 19 nt, Homo sapiens
  misc_RNA (1)...(19): siRNA sense strand
acagauaaacuucgaguaa

SEQ ID NO: 32820 - RNA, 19 nt, Homo sapiens
  misc_RNA (1)...(19): siRNA sense strand
guugugaauuuagcucuua

SEQ ID NO: 32821 - RNA, 19 nt, Homo sapiens
  misc_RNA (1)...(19): siRNA sense strand
gcauagagaggccagagaa

SEQ ID NO: 32822 - RNA, 19 nt, Homo sapiens
  misc_RNA (1)...(19): siRNA sense strand
ugucagagccgacccguuu

SEQ ID NO: 32823 - RNA, 19 nt, Homo sapiens
  misc_RNA (1)...(19): siRNA sense strand
cauccucguugugaauuua

SEQ ID NO: 32824 - RNA, 19 nt, Homo sapiens
  misc_RNA (1)...(19): siRNA sense strand
gaaggaaguugugguuggu

SEQ ID NO: 32825 - RNA, 19 nt, Homo sapiens
  misc_RNA (1)...(19): siRNA sense strand
aaucaacaguuucagauca

SEQ ID NO: 32826 - RNA, 19 nt, Homo sapiens
  misc_RNA (1)...(19): siRNA sense strand
gagccgacccguuucaaga

SEQ ID NO: 32827 - RNA, 19 nt, Homo sapiens
  misc_RNA (1)...(19): siRNA sense strand
gacggcaagccacuauuua

SEQ ID NO: 32828 - RNA, 19 nt, Homo sapiens
  misc_RNA (1)...(19): siRNA sense strand
guuucaagaccuuagauua

SEQ ID NO: 32829 - RNA, 19 nt, Homo sapiens
  misc_RNA (1)...(19): siRNA sense strand
ucaagaccuuagauuagaa

SEQ ID NO: 32830 - RNA, 19 nt, Homo sapiens
  misc_RNA (1)...(19): siRNA sense strand
ggccagagaaucaguaugu

SEQ ID NO: 32831 - RNA, 19 nt, Homo sapiens
  misc_RNA (1)...(19): siRNA sense strand
cgacggcaagccacuauuu

SEQ ID NO: 32832 - RNA, 19 nt, Homo sapiens
  misc_RNA (1)...(19): siRNA sense strand
gaaggggaaucagaauuuu

SEQ ID NO: 32833 - RNA, 19 nt, Homo sapiens
  misc_RNA (1)...(19): siRNA sense strand
ggaaggggaaucagaauuu

SEQ ID NO: 32834 - RNA, 19 nt, Homo sapiens
  misc_RNA (1)...(19): siRNA sense strand
cagagaaucaguaugucua

SEQ ID NO: 32835 - RNA, 19 nt, Homo sapiens
  misc_RNA (1)...(19): siRNA sense strand
gcucuuacaauuuggauuc

SEQ ID NO: 32836 - RNA, 19 nt, Homo sapiens
  misc_RNA (1)...(19): siRNA sense strand
cccagaaugugacuguaaa

SEQ ID NO: 32837 - RNA, 19 nt, Homo sapiens
  misc_RNA (1)...(19): siRNA sense strand
caaucaacccagaauguga

SEQ ID NO: 32838 - RNA, 19 nt, Homo sapiens
  misc_RNA (1)...(19): siRNA sense strand
ugguagaaguccagaauca

SEQ ID NO: 32839 - RNA, 19 nt, Homo sapiens
  misc_RNA (1)...(19): siRNA sense strand
aaaagucggucccaaaaug

SEQ ID NO: 32840 - RNA, 19 nt, Homo sapiens
  misc_RNA (1)...(19): siRNA sense strand
gaaugggccacuugugugu

SEQ ID NO: 32841 - RNA, 19 nt, Homo sapiens
  misc_RNA (1)...(19): siRNA sense strand
cccauuguaugccaaagaa

SEQ ID NO: 32842 - RNA, 19 nt, Homo sapiens
  misc_RNA (1)...(19): siRNA sense strand
gagaaucaguaugucuaca

SEQ ID NO: 32843 - RNA, 19 nt, Homo sapiens
  misc_RNA (1)...(19): siRNA sense strand
uagagaggccagagaauca

SEQ ID NO: 32844 - RNA, 19 nt, Homo sapiens
  misc_RNA (1)...(19): siRNA sense strand
ggaaugcuugugcuugaug

SEQ ID NO: 32845 - RNA, 19 nt, Homo sapiens
  misc_RNA (1)...(19): siRNA sense strand
cagauaaacuucgaguaac

SEQ ID NO: 32846 - RNA, 19 nt, Homo sapiens
  misc_RNA (1)...(19): siRNA sense strand
aguccagaaucaacaguuu

SEQ ID NO: 32847 - RNA, 19 nt, Homo sapiens
  misc_RNA (1)...(19): siRNA sense strand
uucaagaccuuagauuaga

SEQ ID NO: 32848 - RNA, 19 nt, Homo sapiens
  misc_RNA (1)...(19): siRNA sense strand
gaaucaacaguuucagauc

SEQ ID NO: 32849 - RNA, 19 nt, Homo sapiens
  misc_RNA (1)...(19): siRNA sense strand
ucauaguagugauggaaug

SEQ ID NO: 32850 - RNA, 19 nt, Homo sapiens
  misc_RNA (1)...(19): siRNA sense strand
ugagaaggaaguugugguu

SEQ ID NO: 32851 - RNA, 19 nt, Homo sapiens
  misc_RNA (1)...(19): siRNA sense strand
caacccagaaugugacugu

SEQ ID NO: 32852 - RNA, 19 nt, Homo sapiens
  misc_RNA (1)...(19): siRNA sense strand
gcauuuauggcuggagaaa

SEQ ID NO: 32853 - RNA, 19 nt, Homo sapiens
  misc_RNA (1)...(19): siRNA sense strand
cagaaucaacaguuucaga

SEQ ID NO: 32854 - RNA, 19 nt, Homo sapiens
  misc_RNA (1)...(19): siRNA sense strand
ugcugaaacugugugcuua

SEQ ID NO: 32855 - RNA, 19 nt, Homo sapiens
  misc_RNA (1)...(19): siRNA sense strand
gcaggaaugggccacuugu

SEQ ID NO: 32856 - RNA, 19 nt, Homo sapiens
  misc_RNA (1)...(19): siRNA sense strand
guacacuacagccacagaa

SEQ ID NO: 32857 - RNA, 19 nt, Homo sapiens
  misc_RNA (1)...(19): siRNA sense strand
agauaaacuucgaguaacu

SEQ ID NO: 32858 - RNA, 19 nt, Homo sapiens
  misc_RNA (1)...(19): siRNA sense strand
gaggucacaggcagguuaa

SEQ ID NO: 32859 - RNA, 19 nt, Homo sapiens
  misc_RNA (1)...(19): siRNA sense strand
caguaugucuacaaaauug

SEQ ID NO: 32860 - RNA, 19 nt, Homo sapiens
  misc_RNA (1)...(19): siRNA sense strand
gagccucuacgaaaucugu

SEQ ID NO: 32861 - RNA, 19 nt, Homo sapiens
  misc_RNA (1)...(19): siRNA sense strand
ucgaguaacugggccugaa

SEQ ID NO: 32862 - RNA, 19 nt, Homo sapiens
  misc_RNA (1)...(19): siRNA sense strand
guagaaguccagaaucaac

SEQ ID NO: 32863 - RNA, 19 nt, Homo sapiens
  misc_RNA (1)...(19): siRNA sense strand
gaggcgcuuucucaaaugg

SEQ ID NO: 32864 - RNA, 19 nt, Homo sapiens
  misc_RNA (1)...(19): siRNA sense strand
caacgacggcaagccacua

SEQ ID NO: 32865 - RNA, 19 nt, Homo sapiens
  misc_RNA (1)...(19): siRNA sense strand
cagcaggaaugggccacuu

SEQ ID NO: 32866 - RNA, 19 nt, Homo sapiens
  misc_RNA (1)...(19): siRNA sense strand
cuacgaaaucugugugugu

SEQ ID NO: 32867 - RNA, 19 nt, Homo sapiens
  misc_RNA (1)...(19): siRNA sense strand
uacaaucaacccagaaugu

SEQ ID NO: 32868 - RNA, 19 nt, Homo sapiens
  misc_RNA (1)...(19): siRNA sense strand
gguagaaguccagaaucaa

SEQ ID NO: 32869 - RNA, 19 nt, Homo sapiens
  misc_RNA (1)...(19): siRNA sense strand
auggaaugcuugugcuuga

SEQ ID NO: 32870 - RNA, 19 nt, Homo sapiens
  misc_RNA (1)...(19): siRNA sense strand
gauaaacuucgaguaacug

SEQ ID NO: 32871 - RNA, 19 nt, Homo sapiens
  misc_RNA (1)...(19): siRNA sense strand
uagaugagaaggaaguugu

SEQ ID NO: 32872 - RNA, 19 nt, Homo sapiens
  misc_RNA (1)...(19): siRNA sense strand
gccacuauuuacuguagau

SEQ ID NO: 32873 - RNA, 19 nt, Homo sapiens
  misc_RNA (1)...(19): siRNA sense strand
aagccacuauuuacuguag

SEQ ID NO: 32874 - RNA, 19 nt, Homo sapiens
  misc_RNA (1)...(19): siRNA sense strand
agaaucaacaguuucagau

SEQ ID NO: 32875 - RNA, 19 nt, Homo sapiens
  misc_RNA (1)...(19): siRNA sense strand
uaguagugauggaaugcuu

SEQ ID NO: 32876 - RNA, 19 nt, Homo sapiens
  misc_RNA (1)...(19): siRNA sense strand
caucauccucguugugaau

SEQ ID NO: 32877 - RNA, 19 nt, Homo sapiens
  misc_RNA (1)...(19): siRNA sense strand
uuucaagaccuuagauuag

SEQ ID NO: 32878 - RNA, 19 nt, Homo sapiens
  misc_RNA (1)...(19): siRNA sense strand
ggcaagccacuauuuacug

SEQ ID NO: 32879 - RNA, 19 nt, Homo sapiens
  misc_RNA (1)...(19): siRNA sense strand
agaaucaguaugucuacaa

SEQ ID NO: 32880 - RNA, 19 nt, Homo sapiens
  misc_RNA (1)...(19): siRNA sense strand
guccagaugggaagcugua

SEQ ID NO: 32881 - RNA, 19 nt, Homo sapiens
  misc_RNA (1)...(19): siRNA sense strand
caaggggugugcauauuca

SEQ ID NO: 32882 - RNA, 19 nt, Homo sapiens
  misc_RNA (1)...(19): siRNA sense strand
ucauccucguugugaauuu

SEQ ID NO: 32883 - RNA, 19 nt, Homo sapiens
  misc_RNA (1)...(19): siRNA sense strand
cagaaugugacuguaaaug

SEQ ID NO: 32884 - RNA, 19 nt, Homo sapiens
  misc_RNA (1)...(19): siRNA sense strand
cauuguaugccaaagaaau

SEQ ID NO: 32885 - RNA, 19 nt, Homo sapiens
  misc_RNA (1)...(19): siRNA sense strand
uacuguagaugagaaggaa

SEQ ID NO: 32886 - RNA, 19 nt, Homo sapiens
  misc_RNA (1)...(19): siRNA sense strand
ugugguugguacagauaaa

SEQ ID NO: 32887 - RNA, 19 nt, Homo sapiens
  misc_RNA (1)...(19): siRNA sense strand
caagaccuuagauuagaau

SEQ ID NO: 32888 - RNA, 19 nt, Homo sapiens
  misc_RNA (1)...(19): siRNA sense strand
augggccacuuguguguaa

SEQ ID NO: 32889 - RNA, 19 nt, Homo sapiens
  misc_RNA (1)...(19): siRNA sense strand
gugaauuuagcucuuacaa

SEQ ID NO: 32890 - RNA, 19 nt, Homo sapiens
  misc_RNA (1)...(19): siRNA sense strand
gcuugugcuugaugcugaa

SEQ ID NO: 32891 - RNA, 19 nt, Homo sapiens
  misc_RNA (1)...(19): siRNA sense strand
gauagaagcuaaugccuuu

SEQ ID NO: 32892 - RNA, 19 nt, Homo sapiens
  misc_RNA (1)...(19): siRNA sense strand
caaaguaccucuuaucaca

SEQ ID NO: 32893 - RNA, 19 nt, Homo sapiens
  misc_RNA (1)...(19): siRNA sense strand
ggaaaccacucucucacaa

SEQ ID NO: 32894 - RNA, 19 nt, Homo sapiens
  misc_RNA (1)...(19): siRNA sense strand
caaauaagccuucucaauc

SEQ ID NO: 32895 - RNA, 19 nt, Homo sapiens
  misc_RNA (1)...(19): siRNA sense strand
ugaauaugguuucugcuua

SEQ ID NO: 32896 - RNA, 19 nt, Homo sapiens
  misc_RNA (1)...(19): siRNA sense strand
guacagcucuccuagacaa

SEQ ID NO: 32897 - RNA, 19 nt, Homo sapiens
  misc_RNA (1)...(19): siRNA sense strand
caucucagcugccuucaaa

SEQ ID NO: 32898 - RNA, 19 nt, Homo sapiens
  misc_RNA (1)...(19): siRNA sense strand
gaauuaauggcuaccaaua

SEQ ID NO: 32899 - RNA, 19 nt, Homo sapiens
  misc_RNA (1)...(19): siRNA sense strand
caaacuauauggaaaugga

SEQ ID NO: 32900 - RNA, 19 nt, Homo sapiens
  misc_RNA (1)...(19): siRNA sense strand
gggcugaacuuuauagaag

SEQ ID NO: 32901 - RNA, 19 nt, Homo sapiens
  misc_RNA (1)...(19): siRNA sense strand
cgucaucacucuagaaaga

SEQ ID NO: 32902 - RNA, 19 nt, Homo sapiens
  misc_RNA (1)...(19): siRNA sense strand
ggauauuucuuccaccaaa

SEQ ID NO: 32903 - RNA, 19 nt, Homo sapiens
  misc_RNA (1)...(19): siRNA sense strand
agacaugccauucugauua

SEQ ID NO: 32904 - RNA, 19 nt, Homo sapiens
  misc_RNA (1)...(19): siRNA sense strand
ugacuucacuggagcuaaa

SEQ ID NO: 32905 - RNA, 19 nt, Homo sapiens
  misc_RNA (1)...(19): siRNA sense strand
gagaaacauuugucaaucu

SEQ ID NO: 32906 - RNA, 19 nt, Homo sapiens
  misc_RNA (1)...(19): siRNA sense strand
gcucauagccucaguugau

SEQ ID NO: 32907 - RNA, 19 nt, Homo sapiens
  misc_RNA (1)...(19): siRNA sense strand
ggacgacacugacuucacu

SEQ ID NO: 32908 - RNA, 19 nt, Homo sapiens
  misc_RNA (1)...(19): siRNA sense strand
guccugauuuggcugauua

SEQ ID NO: 32909 - RNA, 19 nt, Homo sapiens
  misc_RNA (1)...(19): siRNA sense strand
ccaagggccaguacuauaa

SEQ ID NO: 32910 - RNA, 19 nt, Homo sapiens
  misc_RNA (1)...(19): siRNA sense strand
gugguggccuucuucauaa

SEQ ID NO: 32911 - RNA, 19 nt, Homo sapiens
  misc_RNA (1)...(19): siRNA sense strand
gacaugccauucugauuau

SEQ ID NO: 32912 - RNA, 19 nt, Homo sapiens
  misc_RNA (1)...(19): siRNA sense strand
gaauaugguuucugcuuac

SEQ ID NO: 32913 - RNA, 19 nt, Homo sapiens
  misc_RNA (1)...(19): siRNA sense strand
gcauggcaccuaucucuuu

SEQ ID NO: 32914 - RNA, 19 nt, Homo sapiens
  misc_RNA (1)...(19): siRNA sense strand
gaagaaguacaaagucaug

SEQ ID NO: 32915 - RNA, 19 nt, Homo sapiens
  misc_RNA (1)...(19): siRNA sense strand
gaucaaauaagccuucuca

SEQ ID NO: 32916 - RNA, 19 nt, Homo sapiens
  misc_RNA (1)...(19): siRNA sense strand
ucaaagugaucccaucuca

SEQ ID NO: 32917 - RNA, 19 nt, Homo sapiens
  misc_RNA (1)...(19): siRNA sense strand
gaucccaucucaagcuuuc

SEQ ID NO: 32918 - RNA, 19 nt, Homo sapiens
  misc_RNA (1)...(19): siRNA sense strand
uuagaaacuugccaacaaa

SEQ ID NO: 32919 - RNA, 19 nt, Homo sapiens
  misc_RNA (1)...(19): siRNA sense strand
uaaggaaagugaguaacaa

SEQ ID NO: 32920 - RNA, 19 nt, Homo sapiens
  misc_RNA (1)...(19): siRNA sense strand
agacaagacucgcuacaca

SEQ ID NO: 32921 - RNA, 19 nt, Homo sapiens
  misc_RNA (1)...(19): siRNA sense strand
ucaaauaagccuucucaau

SEQ ID NO: 32922 - RNA, 19 nt, Homo sapiens
  misc_RNA (1)...(19): siRNA sense strand
uggaaaggauagaagcuaa

SEQ ID NO: 32923 - RNA, 19 nt, Homo sapiens
  misc_RNA (1)...(19): siRNA sense strand
gaggauggcucuuuucuuc

SEQ ID NO: 32924 - RNA, 19 nt, Homo sapiens
  misc_RNA (1)...(19): siRNA sense strand
gaaaggauagaagcuaaug

SEQ ID NO: 32925 - RNA, 19 nt, Homo sapiens
  misc_RNA (1)...(19): siRNA sense strand
acauugcacugucaaggua

SEQ ID NO: 32926 - RNA, 19 nt, Homo sapiens
  misc_RNA (1)...(19): siRNA sense strand
uuuagaaacuugccaacaa

SEQ ID NO: 32927 - RNA, 19 nt, Homo sapiens
  misc_RNA (1)...(19): siRNA sense strand
ggucuucuccucugaauca

SEQ ID NO: 32928 - RNA, 19 nt, Homo sapiens
  misc_RNA (1)...(19): siRNA sense strand
gaaauacugauccagaaca

SEQ ID NO: 32929 - RNA, 19 nt, Homo sapiens
  misc_RNA (1)...(19): siRNA sense strand
caucaauucuugugccaau

SEQ ID NO: 32930 - RNA, 19 nt, Homo sapiens
  misc_RNA (1)...(19): siRNA sense strand
guucgaaacccagaauuaa

SEQ ID NO: 32931 - RNA, 19 nt, Homo sapiens
  misc_RNA (1)...(19): siRNA sense strand
aaauugccaucaagagaaa

SEQ ID NO: 32932 - RNA, 19 nt, Homo sapiens
  misc_RNA (1)...(19): siRNA sense strand
ccgaaaaccuuggauauuu

SEQ ID NO: 32933 - RNA, 19 nt, Homo sapiens
  misc_RNA (1)...(19): siRNA sense strand
aaauuuggcugcuguaaac

SEQ ID NO: 32934 - RNA, 19 nt, Homo sapiens
  misc_RNA (1)...(19): siRNA sense strand
caaauuuggcugcuguaaa

SEQ ID NO: 32935 - RNA, 19 nt, Homo sapiens
  misc_RNA (1)...(19): siRNA sense strand
caugugcaaucucuccuuu

SEQ ID NO: 32936 - RNA, 19 nt, Homo sapiens
  misc_RNA (1)...(19): siRNA sense strand
ccugacaagucguuacaaa

SEQ ID NO: 32937 - RNA, 19 nt, Homo sapiens
  misc_RNA (1)...(19): siRNA sense strand
cuguaacacucaaacuaua

SEQ ID NO: 32938 - RNA, 19 nt, Homo sapiens
  misc_RNA (1)...(19): siRNA sense strand
gccaauccauuucuguaug

SEQ ID NO: 32939 - RNA, 19 nt, Homo sapiens
  misc_RNA (1)...(19): siRNA sense strand
guaaggaaagugaguaaca

SEQ ID NO: 32940 - RNA, 19 nt, Homo sapiens
  misc_RNA (1)...(19): siRNA sense strand
ugaaagcacaguaaggaaa

SEQ ID NO: 32941 - RNA, 19 nt, Homo sapiens
  misc_RNA (1)...(19): siRNA sense strand
uggagaagaugcacaaugg

SEQ ID NO: 32942 - RNA, 19 nt, Homo sapiens
  misc_RNA (1)...(19): siRNA sense strand
acacaggcaucagaaaguu

SEQ ID NO: 32943 - RNA, 19 nt, Homo sapiens
  misc_RNA (1)...(19): siRNA sense strand
ucacaguaaccaacucuaa

SEQ ID NO: 32944 - RNA, 19 nt, Homo sapiens
  misc_RNA (1)...(19): siRNA sense strand
guacuauaaccaugccaua

SEQ ID NO: 32945 - RNA, 19 nt, Homo sapiens
  misc_RNA (1)...(19): siRNA sense strand
gaaagugaguaacaaaaca

SEQ ID NO: 32946 - RNA, 19 nt, Homo sapiens
  misc_RNA (1)...(19): siRNA sense strand
gaaagcacaguaaggaaag

SEQ ID NO: 32947 - RNA, 19 nt, Homo sapiens
  misc_RNA (1)...(19): siRNA sense strand
aaaccacucucucacaagu

SEQ ID NO: 32948 - RNA, 19 nt, Homo sapiens
  misc_RNA (1)...(19): siRNA sense strand
aagcugcgauuaagacaug

SEQ ID NO: 32949 - RNA, 19 nt, Homo sapiens
  misc_RNA (1)...(19): siRNA sense strand
acaaagucaugcauucaau

SEQ ID NO: 32950 - RNA, 19 nt, Homo sapiens
  misc_RNA (1)...(19): siRNA sense strand
gagcccggagcauuuauaa

SEQ ID NO: 32951 - RNA, 19 nt, Homo sapiens
  misc_RNA (1)...(19): siRNA sense strand
gcaaauuuggcugcuguaa

SEQ ID NO: 32952 - RNA, 19 nt, Homo sapiens
  misc_RNA (1)...(19): siRNA sense strand
cuaagacauuccaaagaga

SEQ ID NO: 32953 - RNA, 19 nt, Homo sapiens
  misc_RNA (1)...(19): siRNA sense strand
gcucuuuucuucucuaauu

SEQ ID NO: 32954 - RNA, 19 nt, Homo sapiens
  misc_RNA (1)...(19): siRNA sense strand
aaaccaagggccaguacua

SEQ ID NO: 32955 - RNA, 19 nt, Homo sapiens
  misc_RNA (1)...(19): siRNA sense strand
cuaccucccugucaaagug

SEQ ID NO: 32956 - RNA, 19 nt, Homo sapiens
  misc_RNA (1)...(19): siRNA sense strand
acaugaaggucaguauuug

SEQ ID NO: 32957 - RNA, 19 nt, Homo sapiens
  misc_RNA (1)...(19): siRNA sense strand
cagaauuaauggcuaccaa

SEQ ID NO: 32958 - RNA, 19 nt, Homo sapiens
  misc_RNA (1)...(19): siRNA sense strand
uaaccaccauaccaggaaa

SEQ ID NO: 32959 - RNA, 19 nt, Homo sapiens
  misc_RNA (1)...(19): siRNA sense strand
uggcuucacuggaucaaau

SEQ ID NO: 32960 - RNA, 19 nt, Homo sapiens
  misc_RNA (1)...(19): siRNA sense strand
gcugaacuuuauagaagga

SEQ ID NO: 32961 - RNA, 19 nt, Homo sapiens
  misc_RNA (1)...(19): siRNA sense strand
ugugguggccuucuucaua

SEQ ID NO: 32962 - RNA, 19 nt, Homo sapiens
  misc_RNA (1)...(19): siRNA sense strand
cugaaauacugauccagaa

SEQ ID NO: 32963 - RNA, 19 nt, Homo sapiens
  misc_RNA (1)...(19): siRNA sense strand
agagaaacauuugucaauc

SEQ ID NO: 32964 - RNA, 19 nt, Homo sapiens
  misc_RNA (1)...(19): siRNA sense strand
caagagaaacauuugucaa

SEQ ID NO: 32965 - RNA, 19 nt, Homo sapiens
  misc_RNA (1)...(19): siRNA sense strand
ggccuagaguccauucaga

SEQ ID NO: 32966 - RNA, 19 nt, Homo sapiens
  misc_RNA (1)...(19): siRNA sense strand
ggaugaauaaugaaucugu

SEQ ID NO: 32967 - RNA, 19 nt, Homo sapiens
  misc_RNA (1)...(19): siRNA sense strand
aaacguacaucuggagaag

SEQ ID NO: 32968 - RNA, 19 nt, Homo sapiens
  misc_RNA (1)...(19): siRNA sense strand
caauccaccuugaaguugu

SEQ ID NO: 32969 - RNA, 19 nt, Homo sapiens
  misc_RNA (1)...(19): siRNA sense strand
uacaugaaggucaguauuu

SEQ ID NO: 32970 - RNA, 19 nt, Homo sapiens
  misc_RNA (1)...(19): siRNA sense strand
guacaaagucaugcauuca

SEQ ID NO: 32971 - RNA, 19 nt, Homo sapiens
  misc_RNA (1)...(19): siRNA sense strand
ccuugaaguuguccacauu

SEQ ID NO: 32972 - RNA, 19 nt, Homo sapiens
  misc_RNA (1)...(19): siRNA sense strand
aaauaagccuucucaaucc

SEQ ID NO: 32973 - RNA, 19 nt, Homo sapiens
  misc_RNA (1)...(19): siRNA sense strand
acuaagacauuccaaagag

SEQ ID NO: 32974 - RNA, 19 nt, Homo sapiens
  misc_RNA (1)...(19): siRNA sense strand
uaaccauccugauucucaa

SEQ ID NO: 32975 - RNA, 19 nt, Homo sapiens
  misc_RNA (1)...(19): siRNA sense strand
ggacuaugaauaugguuuc

SEQ ID NO: 32976 - RNA, 19 nt, Homo sapiens
  misc_RNA (1)...(19): siRNA sense strand
uaacacaggcaucagaaag

SEQ ID NO: 32977 - RNA, 19 nt, Homo sapiens
  misc_RNA (1)...(19): siRNA sense strand
aauuugugcuugcuacauu

SEQ ID NO: 32978 - RNA, 19 nt, Homo sapiens
  misc_RNA (1)...(19): siRNA sense strand
guggccuucuucauaauuu

SEQ ID NO: 32979 - RNA, 19 nt, Homo sapiens
  misc_RNA (1)...(19): siRNA sense strand
ucaaugugguggccuucuu

SEQ ID NO: 32980 - RNA, 19 nt, Homo sapiens
  misc_RNA (1)...(19): siRNA sense strand
gcgauuaagacaugccauu

SEQ ID NO: 32981 - RNA, 19 nt, Homo sapiens
  misc_RNA (1)...(19): siRNA sense strand
caccaucaccuaugcuauu

SEQ ID NO: 32982 - RNA, 19 nt, Homo sapiens
  misc_RNA (1)...(19): siRNA sense strand
aaagugaucccaucucaag

SEQ ID NO: 32983 - RNA, 19 nt, Homo sapiens
  misc_RNA (1)...(19): siRNA sense strand
ugacaaccuccucaauuug

SEQ ID NO: 32984 - RNA, 19 nt, Homo sapiens
  misc_RNA (1)...(19): siRNA sense strand
cugauuuggcugauuaaua

SEQ ID NO: 32985 - RNA, 19 nt, Homo sapiens
  misc_RNA (1)...(19): siRNA sense strand
ggaaaggauagaagcuaau

SEQ ID NO: 32986 - RNA, 19 nt, Homo sapiens
  misc_RNA (1)...(19): siRNA sense strand
aaacuuacagugccucguu

SEQ ID NO: 32987 - RNA, 19 nt, Homo sapiens
  misc_RNA (1)...(19): siRNA sense strand
uugaagaaguacaaaguca

SEQ ID NO: 32988 - RNA, 19 nt, Homo sapiens
  misc_RNA (1)...(19): siRNA sense strand
uaauggcuaccaauaaaga

SEQ ID NO: 32989 - RNA, 19 nt, Homo sapiens
  misc_RNA (1)...(19): siRNA sense strand
gaccaaaagcugcgauuaa

SEQ ID NO: 32990 - RNA, 19 nt, Homo sapiens
  misc_RNA (1)...(19): siRNA sense strand
ucacuaagacauuccaaag

SEQ ID NO: 32991 - RNA, 19 nt, Homo sapiens
  misc_RNA (1)...(19): siRNA sense strand
gaagauagacaucaucaaa

SEQ ID NO: 32992 - RNA, 19 nt, Homo sapiens
  misc_RNA (1)...(19): siRNA sense strand
gaacaaugcuucccucucu

SEQ ID NO: 32993 - RNA, 19 nt, Homo sapiens
  misc_RNA (1)...(19): siRNA sense strand
caaagaagccugagaagga

SEQ ID NO: 32994 - RNA, 19 nt, Homo sapiens
  misc_RNA (1)...(19): siRNA sense strand
gaaagaggguaaagcaaag

SEQ ID NO: 32995 - RNA, 19 nt, Homo sapiens
  misc_RNA (1)...(19): siRNA sense strand
gaagaugccugcuggaaac

SEQ ID NO: 32996 - RNA, 19 nt, Homo sapiens
  misc_RNA (1)...(19): siRNA sense strand
ggaagcagcucccgaaacg

SEQ ID NO: 32997 - RNA, 19 nt, Homo sapiens
  misc_RNA (1)...(19): siRNA sense strand
ugaagacccuggauguuga

SEQ ID NO: 32998 - RNA, 19 nt, Homo sapiens
  misc_RNA (1)...(19): siRNA sense strand
ggaagaaggaggaggaaga

SEQ ID NO: 32999 - RNA, 19 nt, Homo sapiens
  misc_RNA (1)...(19): siRNA sense strand
ggagacagagggcgaguuu

SEQ ID NO: 33000 - RNA, 19 nt, Homo sapiens
  misc_RNA (1)...(19): siRNA sense strand
gagaaggaggcauccaaua

SEQ ID NO: 33001 - RNA, 19 nt, Homo sapiens
  misc_RNA (1)...(19): siRNA sense strand
ggaagaugccugcuggaaa

SEQ ID NO: 33002 - RNA, 19 nt, Homo sapiens
  misc_RNA (1)...(19): siRNA sense strand
gaagaaggaggaggaagaa

SEQ ID NO: 33003 - RNA, 19 nt, Homo sapiens
  misc_RNA (1)...(19): siRNA sense strand
ggauccaucugguuacaau

SEQ ID NO: 33004 - RNA, 19 nt, Homo sapiens
  misc_RNA (1)...(19): siRNA sense strand
ccaaggacaucgagcagau

SEQ ID NO: 33005 - RNA, 19 nt, Homo sapiens
  misc_RNA (1)...(19): siRNA sense strand
ccaagaagauagacaucau

SEQ ID NO: 33006 - RNA, 19 nt, Homo sapiens
  misc_RNA (1)...(19): siRNA sense strand
caacuaucaucccguggaa

SEQ ID NO: 33007 - RNA, 19 nt, Homo sapiens
  misc_RNA (1)...(19): siRNA sense strand
gaaacggaccauucaggaa

SEQ ID NO: 33008 - RNA, 19 nt, Homo sapiens
  misc_RNA (1)...(19): siRNA sense strand
gaccucaucuaccucaaug

SEQ ID NO: 33009 - RNA, 19 nt, Homo sapiens
  misc_RNA (1)...(19): siRNA sense strand
agaagcagauccagccauu

SEQ ID NO: 33010 - RNA, 19 nt, Homo sapiens
  misc_RNA (1)...(19): siRNA sense strand
ggaaguacccggacaucau

SEQ ID NO: 33011 - RNA, 19 nt, Homo sapiens
  misc_RNA (1)...(19): siRNA sense strand
gcagcgaaguaucauguca

SEQ ID NO: 33012 - RNA, 19 nt, Homo sapiens
  misc_RNA (1)...(19): siRNA sense strand
caagaaagaggguaaagca

SEQ ID NO: 33013 - RNA, 19 nt, Homo sapiens
  misc_RNA (1)...(19): siRNA sense strand
agaaagaggguaaagcaaa

SEQ ID NO: 33014 - RNA, 19 nt, Homo sapiens
  misc_RNA (1)...(19): siRNA sense strand
gcaggaaucaggaagacaa

SEQ ID NO: 33015 - RNA, 19 nt, Homo sapiens
  misc_RNA (1)...(19): siRNA sense strand
ccaagacgcucagcagcuu

SEQ ID NO: 33016 - RNA, 19 nt, Homo sapiens
  misc_RNA (1)...(19): siRNA sense strand
cgaaagaaagccucacaga

SEQ ID NO: 33017 - RNA, 19 nt, Homo sapiens
  misc_RNA (1)...(19): siRNA sense strand
gccaagagaucgcacaacu

SEQ ID NO: 33018 - RNA, 19 nt, Homo sapiens
  misc_RNA (1)...(19): siRNA sense strand
acaacuggcucaagcugaa

SEQ ID NO: 33019 - RNA, 19 nt, Homo sapiens
  misc_RNA (1)...(19): siRNA sense strand
caauggagagucccuggua

SEQ ID NO: 33020 - RNA, 19 nt, Homo sapiens
  misc_RNA (1)...(19): siRNA sense strand
gaaguacccggacaucauc

SEQ ID NO: 33021 - RNA, 19 nt, Homo sapiens
  misc_RNA (1)...(19): siRNA sense strand
ggaagcaaagucagauuca

SEQ ID NO: 33022 - RNA, 19 nt, Homo sapiens
  misc_RNA (1)...(19): siRNA sense strand
gauagauggcgcugugauu

SEQ ID NO: 33023 - RNA, 19 nt, Homo sapiens
  misc_RNA (1)...(19): siRNA sense strand
guuacaauccugccaagaa

SEQ ID NO: 33024 - RNA, 19 nt, Homo sapiens
  misc_RNA (1)...(19): siRNA sense strand
ggcucaagcugaagaagga

SEQ ID NO: 33025 - RNA, 19 nt, Homo sapiens
  misc_RNA (1)...(19): siRNA sense strand
aaagucagauucagaacca

SEQ ID NO: 33026 - RNA, 19 nt, Homo sapiens
  misc_RNA (1)...(19): siRNA sense strand
ccaccucccuggacaccaa

SEQ ID NO: 33027 - RNA, 19 nt, Homo sapiens
  misc_RNA (1)...(19): siRNA sense strand
gcucugacccugaagauac

SEQ ID NO: 33028 - RNA, 19 nt, Homo sapiens
  misc_RNA (1)...(19): siRNA sense strand
gugaagacccuggauguug

SEQ ID NO: 33029 - RNA, 19 nt, Homo sapiens
  misc_RNA (1)...(19): siRNA sense strand
gaaggaggaggaagaagag

SEQ ID NO: 33030 - RNA, 19 nt, Homo sapiens
  misc_RNA (1)...(19): siRNA sense strand
ggagaacuuuguggagaca

SEQ ID NO: 33031 - RNA, 19 nt, Homo sapiens
  misc_RNA (1)...(19): siRNA sense strand
cgaaguaucaugucauuuu

SEQ ID NO: 33032 - RNA, 19 nt, Homo sapiens
  misc_RNA (1)...(19): siRNA sense strand
agauagacaucaucaaagg

SEQ ID NO: 33033 - RNA, 19 nt, Homo sapiens
  misc_RNA (1)...(19): siRNA sense strand
caaaggcggcacugaagga

SEQ ID NO: 33034 - RNA, 19 nt, Homo sapiens
  misc_RNA (1)...(19): siRNA sense strand
gaagacaacacugggaagu

SEQ ID NO: 33035 - RNA, 19 nt, Homo sapiens
  misc_RNA (1)...(19): siRNA sense strand
agacaacacugggaaguac

SEQ ID NO: 33036 - RNA, 19 nt, Homo sapiens
  misc_RNA (1)...(19): siRNA sense strand
gaggagaccccgaaagaaa

SEQ ID NO: 33037 - RNA, 19 nt, Homo sapiens
  misc_RNA (1)...(19): siRNA sense strand
gaaggaggcauccaauagc

SEQ ID NO: 33038 - RNA, 19 nt, Homo sapiens
  misc_RNA (1)...(19): siRNA sense strand
cccugaagauaccuacuaa

SEQ ID NO: 33039 - RNA, 19 nt, Homo sapiens
  misc_RNA (1)...(19): siRNA sense strand
gaagcaaagucagauucag

SEQ ID NO: 33040 - RNA, 19 nt, Homo sapiens
  misc_RNA (1)...(19): siRNA sense strand
agacagagggcgaguuugu

SEQ ID NO: 33041 - RNA, 19 nt, Homo sapiens
  misc_RNA (1)...(19): siRNA sense strand
aagcaaagaagccugagaa

SEQ ID NO: 33042 - RNA, 19 nt, Homo sapiens
  misc_RNA (1)...(19): siRNA sense strand
ccacagccaagaagauaga

SEQ ID NO: 33043 - RNA, 19 nt, Homo sapiens
  misc_RNA (1)...(19): siRNA sense strand
agaaggaggcauccaauag

SEQ ID NO: 33044 - RNA, 19 nt, Homo sapiens
  misc_RNA (1)...(19): siRNA sense strand
acagagaagccaagaggaa

SEQ ID NO: 33045 - RNA, 19 nt, Homo sapiens
  misc_RNA (1)...(19): siRNA sense strand
gcagauccagccauuccaa

SEQ ID NO: 33046 - RNA, 19 nt, Homo sapiens
  misc_RNA (1)...(19): siRNA sense strand
gcagagaccccgacggaaa

SEQ ID NO: 33047 - RNA, 19 nt, Homo sapiens
  misc_RNA (1)...(19): siRNA sense strand
agaaggaggaggaagaaga

SEQ ID NO: 33048 - RNA, 19 nt, Homo sapiens
  misc_RNA (1)...(19): siRNA sense strand
gagaagccaagaggaagaa

SEQ ID NO: 33049 - RNA, 19 nt, Homo sapiens
  misc_RNA (1)...(19): siRNA sense strand
ucgagcagaucgccgaguu

SEQ ID NO: 33050 - RNA, 19 nt, Homo sapiens
  misc_RNA (1)...(19): siRNA sense strand
gcccggacguuugagaaga

SEQ ID NO: 33051 - RNA, 19 nt, Homo sapiens
  misc_RNA (1)...(19): siRNA sense strand
uggagacgcugagcaacuu

SEQ ID NO: 33052 - RNA, 19 nt, Homo sapiens
  misc_RNA (1)...(19): siRNA sense strand
ucgcuucccucgguuuauu

SEQ ID NO: 33053 - RNA, 19 nt, Homo sapiens
  misc_RNA (1)...(19): siRNA sense strand
gcccuuacgugcggauaga

SEQ ID NO: 33054 - RNA, 19 nt, Homo sapiens
  misc_RNA (1)...(19): siRNA sense strand
gaagaucgaggaggugucu

SEQ ID NO: 33055 - RNA, 19 nt, Homo sapiens
  misc_RNA (1)...(19): siRNA sense strand
uccaauagcagcagagaga

SEQ ID NO: 33056 - RNA, 19 nt, Homo sapiens
  misc_RNA (1)...(19): siRNA sense strand
caccugcgaauacaaauau

SEQ ID NO: 33057 - RNA, 19 nt, Homo sapiens
  misc_RNA (1)...(19): siRNA sense strand
uuacaauccugccaagaac

SEQ ID NO: 33058 - RNA, 19 nt, Homo sapiens
  misc_RNA (1)...(19): siRNA sense strand
ccuacgagaucgccaagag

SEQ ID NO: 33059 - RNA, 19 nt, Homo sapiens
  misc_RNA (1)...(19): siRNA sense strand
gauccagccauuccaagug

SEQ ID NO: 33060 - RNA, 19 nt, Homo sapiens
  misc_RNA (1)...(19): siRNA sense strand
gagcuuggcgugggugaug

SEQ ID NO: 33061 - RNA, 19 nt, Homo sapiens
  misc_RNA (1)...(19): siRNA sense strand
ccuaaagaccuccaaagca

SEQ ID NO: 33062 - RNA, 19 nt, Homo sapiens
  misc_RNA (1)...(19): siRNA sense strand
ucaccugcgaauacaaaua

SEQ ID NO: 33063 - RNA, 19 nt, Homo sapiens
  misc_RNA (1)...(19): siRNA sense strand
gcuuugaggaggcagcuuu

SEQ ID NO: 33064 - RNA, 19 nt, Homo sapiens
  misc_RNA (1)...(19): siRNA sense strand
gccaagaacaacuaucauc

SEQ ID NO: 33065 - RNA, 19 nt, Homo sapiens
  misc_RNA (1)...(19): siRNA sense strand
gugaugguguccuucucaa

SEQ ID NO: 33066 - RNA, 19 nt, Homo sapiens
  misc_RNA (1)...(19): siRNA sense strand
aagcaaagucagauucaga

SEQ ID NO: 33067 - RNA, 19 nt, Homo sapiens
  misc_RNA (1)...(19): siRNA sense strand
ucccaucggucacauccuu

SEQ ID NO: 33068 - RNA, 19 nt, Homo sapiens
  misc_RNA (1)...(19): siRNA sense strand
gcgaggggcugauggugaa

SEQ ID NO: 33069 - RNA, 19 nt, Homo sapiens
  misc_RNA (1)...(19): siRNA sense strand
agacagcagaggccagaaa

SEQ ID NO: 33070 - RNA, 19 nt, Homo sapiens
  misc_RNA (1)...(19): siRNA sense strand
ggugaagacccuggauguu

SEQ ID NO: 33071 - RNA, 19 nt, Homo sapiens
  misc_RNA (1)...(19): siRNA sense strand
agcgaaguaucaugucauu

SEQ ID NO: 33072 - RNA, 19 nt, Homo sapiens
  misc_RNA (1)...(19): siRNA sense strand
agccugagguggccacgaa

SEQ ID NO: 33073 - RNA, 19 nt, Homo sapiens
  misc_RNA (1)...(19): siRNA sense strand
caagaagauagacaucauc

SEQ ID NO: 33074 - RNA, 19 nt, Homo sapiens
  misc_RNA (1)...(19): siRNA sense strand
cgaccuggaccgaauuauc

SEQ ID NO: 33075 - RNA, 19 nt, Homo sapiens
  misc_RNA (1)...(19): siRNA sense strand
ccaacaaggcgaggacuca

SEQ ID NO: 33076 - RNA, 19 nt, Homo sapiens
  misc_RNA (1)...(19): siRNA sense strand
aaggaggcauccaauagca

SEQ ID NO: 33077 - RNA, 19 nt, Homo sapiens
  misc_RNA (1)...(19): siRNA sense strand
agaacuuuguggagacaga

SEQ ID NO: 33078 - RNA, 19 nt, Homo sapiens
  misc_RNA (1)...(19): siRNA sense strand
aagcugagcccagggauuc

SEQ ID NO: 33079 - RNA, 19 nt, Homo sapiens
  misc_RNA (1)...(19): siRNA sense strand
ggauagauggcgcugugau

SEQ ID NO: 33080 - RNA, 19 nt, Homo sapiens
  misc_RNA (1)...(19): siRNA sense strand
acaaugcuucccucucuga

SEQ ID NO: 33081 - RNA, 19 nt, Homo sapiens
  misc_RNA (1)...(19): siRNA sense strand
gcuuucaccugcgaauaca

SEQ ID NO: 33082 - RNA, 19 nt, Homo sapiens
  misc_RNA (1)...(19): siRNA sense strand
ccggaagccagcagucaaa

SEQ ID NO: 33083 - RNA, 19 nt, Homo sapiens
  misc_RNA (1)...(19): siRNA sense strand
ccucucccauggacaguuc

SEQ ID NO: 33084 - RNA, 19 nt, Homo sapiens
  misc_RNA (1)...(19): siRNA sense strand
gaagacccuggauguugau

SEQ ID NO: 33085 - RNA, 19 nt, Homo sapiens
  misc_RNA (1)...(19): siRNA sense strand
ggaggagcaaggcaugauc

SEQ ID NO: 33086 - RNA, 19 nt, Homo sapiens
  misc_RNA (1)...(19): siRNA sense strand
aagaagauagacaucauca

SEQ ID NO: 33087 - RNA, 19 nt, Homo sapiens
  misc_RNA (1)...(19): siRNA sense strand
ggugaugguguccuucuca

SEQ ID NO: 33088 - RNA, 19 nt, Homo sapiens
  misc_RNA (1)...(19): siRNA sense strand
ugaggacgaggacagagaa

SEQ ID NO: 33089 - RNA, 19 nt, Homo sapiens
  misc_RNA (1)...(19): siRNA sense strand
ugaagaggccagggaggaa

SEQ ID NO: 33090 - RNA, 19 nt, Homo sapiens
  misc_RNA (1)...(19): siRNA sense strand
ccucaucuaccucaaugga

SEQ ID NO: 33091 - RNA, 19 nt, Homo sapiens
  misc_RNA (1)...(19): siRNA sense strand
gacagaagauggauauauu

SEQ ID NO: 33092 - RNA, 19 nt, Homo sapiens
  misc_RNA (1)...(19): siRNA sense strand
gaagauggauauauucugu

SEQ ID NO: 33093 - RNA, 19 nt, Homo sapiens
  misc_RNA (1)...(19): siRNA sense strand
gaagcagugccaagaauua

SEQ ID NO: 33094 - RNA, 19 nt, Homo sapiens
  misc_RNA (1)...(19): siRNA sense strand
gaauaaaacuggccaagaa

SEQ ID NO: 33095 - RNA, 19 nt, Homo sapiens
  misc_RNA (1)...(19): siRNA sense strand
gccaagaacaaguguauua

SEQ ID NO: 33096 - RNA, 19 nt, Homo sapiens
  misc_RNA (1)...(19): siRNA sense strand
gcacucaugucauacugaa

SEQ ID NO: 33097 - RNA, 19 nt, Homo sapiens
  misc_RNA (1)...(19): siRNA sense strand
ggauauauucugugccuua

SEQ ID NO: 33098 - RNA, 19 nt, Homo sapiens
  misc_RNA (1)...(19): siRNA sense strand
ugaaggagcucuguggaaa

SEQ ID NO: 33099 - RNA, 19 nt, Homo sapiens
  misc_RNA (1)...(19): siRNA sense strand
cauaagacacucucaguuu

SEQ ID NO: 33100 - RNA, 19 nt, Homo sapiens
  misc_RNA (1)...(19): siRNA sense strand
gaaugugagugaaauuauc

SEQ ID NO: 33101 - RNA, 19 nt, Homo sapiens
  misc_RNA (1)...(19): siRNA sense strand
gauauauucugugccuuaa

SEQ ID NO: 33102 - RNA, 19 nt, Homo sapiens
  misc_RNA (1)...(19): siRNA sense strand
gaaccauucugacaaaggu

SEQ ID NO: 33103 - RNA, 19 nt, Homo sapiens
  misc_RNA (1)...(19): siRNA sense strand
ucacaaaccuugccaacag

SEQ ID NO: 33104 - RNA, 19 nt, Homo sapiens
  misc_RNA (1)...(19): siRNA sense strand
ugacaaaggucccaaacca

SEQ ID NO: 33105 - RNA, 19 nt, Homo sapiens
  misc_RNA (1)...(19): siRNA sense strand
gcagugccaagaauuauuu

SEQ ID NO: 33106 - RNA, 19 nt, Homo sapiens
  misc_RNA (1)...(19): siRNA sense strand
ugacucagaucaccaacuu

SEQ ID NO: 33107 - RNA, 19 nt, Homo sapiens
  misc_RNA (1)...(19): siRNA sense strand
uccauuaacuucauucuga

SEQ ID NO: 33108 - RNA, 19 nt, Homo sapiens
  misc_RNA (1)...(19): siRNA sense strand
agaguuauccucccacaua

SEQ ID NO: 33109 - RNA, 19 nt, Homo sapiens
  misc_RNA (1)...(19): siRNA sense strand
gggaagcagugccaagaau

SEQ ID NO: 33110 - RNA, 19 nt, Homo sapiens
  misc_RNA (1)...(19): siRNA sense strand
ggcaacagcagaggaaaua

SEQ ID NO: 33111 - RNA, 19 nt, Homo sapiens
  misc_RNA (1)...(19): siRNA sense strand
ggccaaauuaggacgauua

SEQ ID NO: 33112 - RNA, 19 nt, Homo sapiens
  misc_RNA (1)...(19): siRNA sense strand
cguuugcacucaugucaua

SEQ ID NO: 33113 - RNA, 19 nt, Homo sapiens
  misc_RNA (1)...(19): siRNA sense strand
ggaagcagugccaagaauu

SEQ ID NO: 33114 - RNA, 19 nt, Homo sapiens
  misc_RNA (1)...(19): siRNA sense strand
ccuuggaggcuuuauaaua

SEQ ID NO: 33115 - RNA, 19 nt, Homo sapiens
  misc_RNA (1)...(19): siRNA sense strand
gaccuaccagcuuccauua

SEQ ID NO: 33116 - RNA, 19 nt, Homo sapiens
  misc_RNA (1)...(19): siRNA sense strand
ugucuagaguggauguaua

SEQ ID NO: 33117 - RNA, 19 nt, Homo sapiens
  misc_RNA (1)...(19): siRNA sense strand
caaauuaggacgauuacca

SEQ ID NO: 33118 - RNA, 19 nt, Homo sapiens
  misc_RNA (1)...(19): siRNA sense strand
gggagcaucuugacuucau

SEQ ID NO: 33119 - RNA, 19 nt, Homo sapiens
  misc_RNA (1)...(19): siRNA sense strand
cuacgacgucaauaucuua

SEQ ID NO: 33120 - RNA, 19 nt, Homo sapiens
  misc_RNA (1)...(19): siRNA sense strand
caagaacaaguguauuaug

SEQ ID NO: 33121 - RNA, 19 nt, Homo sapiens
  misc_RNA (1)...(19): siRNA sense strand
gaacuucugugcaaaacau

SEQ ID NO: 33122 - RNA, 19 nt, Homo sapiens
  misc_RNA (1)...(19): siRNA sense strand
auaagacacucucaguuuc

SEQ ID NO: 33123 - RNA, 19 nt, Homo sapiens
  misc_RNA (1)...(19): siRNA sense strand
gagcaucuugacuucauuu

SEQ ID NO: 33124 - RNA, 19 nt, Homo sapiens
  misc_RNA (1)...(19): siRNA sense strand
cgacgucaauaucuuacug

SEQ ID NO: 33125 - RNA, 19 nt, Homo sapiens
  misc_RNA (1)...(19): siRNA sense strand
gaaacugacagcuguggau

SEQ ID NO: 33126 - RNA, 19 nt, Homo sapiens
  misc_RNA (1)...(19): siRNA sense strand
aaauaugucuagaguggau

SEQ ID NO: 33127 - RNA, 19 nt, Homo sapiens
  misc_RNA (1)...(19): siRNA sense strand
ggagcaucuugacuucauu

SEQ ID NO: 33128 - RNA, 19 nt, Homo sapiens
  misc_RNA (1)...(19): siRNA sense strand
gugaaauuaucucuuacug

SEQ ID NO: 33129 - RNA, 19 nt, Homo sapiens
  misc_RNA (1)...(19): siRNA sense strand
ugagacagaagauggauau

SEQ ID NO: 33130 - RNA, 19 nt, Homo sapiens
  misc_RNA (1)...(19): siRNA sense strand
gaaggagcucuguggaaau

SEQ ID NO: 33131 - RNA, 19 nt, Homo sapiens
  misc_RNA (1)...(19): siRNA sense strand
caaggcaccacuauagguu

SEQ ID NO: 33132 - RNA, 19 nt, Homo sapiens
  misc_RNA (1)...(19): siRNA sense strand
uuucuucuguguggauuua

SEQ ID NO: 33133 - RNA, 19 nt, Homo sapiens
  misc_RNA (1)...(19): siRNA sense strand
agacagaagauggauauau

SEQ ID NO: 33134 - RNA, 19 nt, Homo sapiens
  misc_RNA (1)...(19): siRNA sense strand
gauccugaaacaaacauga

SEQ ID NO: 33135 - RNA, 19 nt, Homo sapiens
  misc_RNA (1)...(19): siRNA sense strand
auucugggcuuucaguuau

SEQ ID NO: 33136 - RNA, 19 nt, Homo sapiens
  misc_RNA (1)...(19): siRNA sense strand
ucuaguaacugggucacaa

SEQ ID NO: 33137 - RNA, 19 nt, Homo sapiens
  misc_RNA (1)...(19): siRNA sense strand
uuaggacgauuaccagauc

SEQ ID NO: 33138 - RNA, 19 nt, Homo sapiens
  misc_RNA (1)...(19): siRNA sense strand
ccaagaacaaguguauuau

SEQ ID NO: 33139 - RNA, 19 nt, Homo sapiens
  misc_RNA (1)...(19): siRNA sense strand
augaugagauggcaaaaua

SEQ ID NO: 33140 - RNA, 19 nt, Homo sapiens
  misc_RNA (1)...(19): siRNA sense strand
caaaggucccaaaccaguu

SEQ ID NO: 33141 - RNA, 19 nt, Homo sapiens
  misc_RNA (1)...(19): siRNA sense strand
ucucaaggcaccacuauag

SEQ ID NO: 33142 - RNA, 19 nt, Homo sapiens
  misc_RNA (1)...(19): siRNA sense strand
cagcuuccauuaacuucau

SEQ ID NO: 33143 - RNA, 19 nt, Homo sapiens
  misc_RNA (1)...(19): siRNA sense strand
guaacugggucacaaaccu

SEQ ID NO: 33144 - RNA, 19 nt, Homo sapiens
  misc_RNA (1)...(19): siRNA sense strand
gcuggaacuucugugcaaa

SEQ ID NO: 33145 - RNA, 19 nt, Homo sapiens
  misc_RNA (1)...(19): siRNA sense strand
uguauuaugugggucauuc

SEQ ID NO: 33146 - RNA, 19 nt, Homo sapiens
  misc_RNA (1)...(19): siRNA sense strand
aaauaugaccuaccagcuu

SEQ ID NO: 33147 - RNA, 19 nt, Homo sapiens
  misc_RNA (1)...(19): siRNA sense strand
gaguuauccucccacauac

SEQ ID NO: 33148 - RNA, 19 nt, Homo sapiens
  misc_RNA (1)...(19): siRNA sense strand
guacccacguuugcacuca

SEQ ID NO: 33149 - RNA, 19 nt, Homo sapiens
  misc_RNA (1)...(19): siRNA sense strand
ugaccuaccagcuuccauu

SEQ ID NO: 33150 - RNA, 19 nt, Homo sapiens
  misc_RNA (1)...(19): siRNA sense strand
guuaugaugagauggcaaa

SEQ ID NO: 33151 - RNA, 19 nt, Homo sapiens
  misc_RNA (1)...(19): siRNA sense strand
gguguuccaugagagcauu

SEQ ID NO: 33152 - RNA, 19 nt, Homo sapiens
  misc_RNA (1)...(19): siRNA sense strand
gaggaauaccuaguugaga

SEQ ID NO: 33153 - RNA, 19 nt, Homo sapiens
  misc_RNA (1)...(19): siRNA sense strand
gcuggcagauucuaguaac

SEQ ID NO: 33154 - RNA, 19 nt, Homo sapiens
  misc_RNA (1)...(19): siRNA sense strand
gcuguuaaauuccaaaagu

SEQ ID NO: 33155 - RNA, 19 nt, Homo sapiens
  misc_RNA (1)...(19): siRNA sense strand
ccuaccagcuuccauuaac

SEQ ID NO: 33156 - RNA, 19 nt, Homo sapiens
  misc_RNA (1)...(19): siRNA sense strand
ggaauaccuaguugagaca

SEQ ID NO: 33157 - RNA, 19 nt, Homo sapiens
  misc_RNA (1)...(19): siRNA sense strand
ucuacgacgucaauaucuu

SEQ ID NO: 33158 - RNA, 19 nt, Homo sapiens
  misc_RNA (1)...(19): siRNA sense strand
acgacuggcuugcagaugu

SEQ ID NO: 33159 - RNA, 19 nt, Homo sapiens
  misc_RNA (1)...(19): siRNA sense strand
ggagcucuguggaaaucuc

SEQ ID NO: 33160 - RNA, 19 nt, Homo sapiens
  misc_RNA (1)...(19): siRNA sense strand
aaggagcucuguggaaauc

SEQ ID NO: 33161 - RNA, 19 nt, Homo sapiens
  misc_RNA (1)...(19): siRNA sense strand
cuagcccuauggccaaauu

SEQ ID NO: 33162 - RNA, 19 nt, Homo sapiens
  misc_RNA (1)...(19): siRNA sense strand
ccuggucucggaaacauaa

SEQ ID NO: 33163 - RNA, 19 nt, Homo sapiens
  misc_RNA (1)...(19): siRNA sense strand
gggcuucauucuugcugau

SEQ ID NO: 33164 - RNA, 19 nt, Homo sapiens
  misc_RNA (1)...(19): siRNA sense strand
cgacuggcuugcagauguc

SEQ ID NO: 33165 - RNA, 19 nt, Homo sapiens
  misc_RNA (1)...(19): siRNA sense strand
guuauccucccacauacaa

SEQ ID NO: 33166 - RNA, 19 nt, Homo sapiens
  misc_RNA (1)...(19): siRNA sense strand
gagugaaauuaucucuuac

SEQ ID NO: 33167 - RNA, 19 nt, Homo sapiens
  misc_RNA (1)...(19): siRNA sense strand
ggaaugggagcaucuugac

SEQ ID NO: 33168 - RNA, 19 nt, Homo sapiens
  misc_RNA (1)...(19): siRNA sense strand
ucaauaucuuacugacuca

SEQ ID NO: 33169 - RNA, 19 nt, Homo sapiens
  misc_RNA (1)...(19): siRNA sense strand
gggcaacagcagaggaaau

SEQ ID NO: 33170 - RNA, 19 nt, Homo sapiens
  misc_RNA (1)...(19): siRNA sense strand
cuaaugaggaaauaucagu

SEQ ID NO: 33171 - RNA, 19 nt, Homo sapiens
  misc_RNA (1)...(19): siRNA sense strand
cggaaugggagcaucuuga

SEQ ID NO: 33172 - RNA, 19 nt, Homo sapiens
  misc_RNA (1)...(19): siRNA sense strand
uucauuacaaccagaguua

SEQ ID NO: 33173 - RNA, 19 nt, Homo sapiens
  misc_RNA (1)...(19): siRNA sense strand
auaccuaguugagacagaa

SEQ ID NO: 33174 - RNA, 19 nt, Homo sapiens
  misc_RNA (1)...(19): siRNA sense strand
cuguguggauuuaaugaga

SEQ ID NO: 33175 - RNA, 19 nt, Homo sapiens
  misc_RNA (1)...(19): siRNA sense strand
agugaggaauaccuaguug

SEQ ID NO: 33176 - RNA, 19 nt, Homo sapiens
  misc_RNA (1)...(19): siRNA sense strand
uuucaguuaugaugagaug

SEQ ID NO: 33177 - RNA, 19 nt, Homo sapiens
  misc_RNA (1)...(19): siRNA sense strand
gggcuuucaguuaugauga

SEQ ID NO: 33178 - RNA, 19 nt, Homo sapiens
  misc_RNA (1)...(19): siRNA sense strand
aauucugggcuuucaguua

SEQ ID NO: 33179 - RNA, 19 nt, Homo sapiens
  misc_RNA (1)...(19): siRNA sense strand
gaaacauaagacacucuca

SEQ ID NO: 33180 - RNA, 19 nt, Homo sapiens
  misc_RNA (1)...(19): siRNA sense strand
uaacugggucacaaaccuu

SEQ ID NO: 33181 - RNA, 19 nt, Homo sapiens
  misc_RNA (1)...(19): siRNA sense strand
gaauucugggcuuucaguu

SEQ ID NO: 33182 - RNA, 19 nt, Homo sapiens
  misc_RNA (1)...(19): siRNA sense strand
caguuucucaggaugaauu

SEQ ID NO: 33183 - RNA, 19 nt, Homo sapiens
  misc_RNA (1)...(19): siRNA sense strand
aaugggagcaucuugacuu

SEQ ID NO: 33184 - RNA, 19 nt, Homo sapiens
  misc_RNA (1)...(19): siRNA sense strand
aaaggucccaaaccaguug

SEQ ID NO: 33185 - RNA, 19 nt, Homo sapiens
  misc_RNA (1)...(19): siRNA sense strand
aggaugaauucugggcuuu

SEQ ID NO: 33186 - RNA, 19 nt, Homo sapiens
  misc_RNA (1)...(19): siRNA sense strand
aaugaggaaauaucaguga

SEQ ID NO: 33187 - RNA, 19 nt, Homo sapiens
  misc_RNA (1)...(19): siRNA sense strand
guguggauuuaaugagaga

SEQ ID NO: 33188 - RNA, 19 nt, Homo sapiens
  misc_RNA (1)...(19): siRNA sense strand
uuaugugggucauucucaa

SEQ ID NO: 33189 - RNA, 19 nt, Homo sapiens
  misc_RNA (1)...(19): siRNA sense strand
gagacagaagauggauaua

SEQ ID NO: 33190 - RNA, 19 nt, Homo sapiens
  misc_RNA (1)...(19): siRNA sense strand
ucccaaaccaguugucuuc

SEQ ID NO: 33191 - RNA, 19 nt, Homo sapiens
  misc_RNA (1)...(19): siRNA sense strand
aaacacagaugaccuacua

SEQ ID NO: 33192 - RNA, 19 nt, Homo sapiens
  misc_RNA (1)...(19): siRNA sense strand
ggagaaacccagcaaagaa

SEQ ID NO: 33193 - RNA, 19 nt, Homo sapiens
  misc_RNA (1)...(19): siRNA sense strand
caaaggaauugcuaguaau

SEQ ID NO: 33194 - RNA, 19 nt, Homo sapiens
  misc_RNA (1)...(19): siRNA sense strand
gcacacgugucaggauuug

SEQ ID NO: 33195 - RNA, 19 nt, Homo sapiens
  misc_RNA (1)...(19): siRNA sense strand
gaagccauguucaccuaau

SEQ ID NO: 33196 - RNA, 19 nt, Homo sapiens
  misc_RNA (1)...(19): siRNA sense strand
cgugaaaugugaaauaaag

SEQ ID NO: 33197 - RNA, 19 nt, Homo sapiens
  misc_RNA (1)...(19): siRNA sense strand
gagaaacccagcaaagaau

SEQ ID NO: 33198 - RNA, 19 nt, Homo sapiens
  misc_RNA (1)...(19): siRNA sense strand
ccagagccauuuggaagaa

SEQ ID NO: 33199 - RNA, 19 nt, Homo sapiens
  misc_RNA (1)...(19): siRNA sense strand
gugcacacgugucaggauu

SEQ ID NO: 33200 - RNA, 19 nt, Homo sapiens
  misc_RNA (1)...(19): siRNA sense strand
gaaacccagcaaagaauga

SEQ ID NO: 33201 - RNA, 19 nt, Homo sapiens
  misc_RNA (1)...(19): siRNA sense strand
uuaaagauccaguucauca

SEQ ID NO: 33202 - RNA, 19 nt, Homo sapiens
  misc_RNA (1)...(19): siRNA sense strand
gaaaccagagccauuugga

SEQ ID NO: 33203 - RNA, 19 nt, Homo sapiens
  misc_RNA (1)...(19): siRNA sense strand
aaacugagacgccaauaca

SEQ ID NO: 33204 - RNA, 19 nt, Homo sapiens
  misc_RNA (1)...(19): siRNA sense strand
ggaugccauucauaccuuu

SEQ ID NO: 33205 - RNA, 19 nt, Homo sapiens
  misc_RNA (1)...(19): siRNA sense strand
ucgaagccauguucaccua

SEQ ID NO: 33206 - RNA, 19 nt, Homo sapiens
  misc_RNA (1)...(19): siRNA sense strand
gcaacacgcugggcuacca

SEQ ID NO: 33207 - RNA, 19 nt, Homo sapiens
  misc_RNA (1)...(19): siRNA sense strand
ccagauuccugcucuuugg

SEQ ID NO: 33208 - RNA, 19 nt, Homo sapiens
  misc_RNA (1)...(19): siRNA sense strand
ucaaucauccggacacguu

SEQ ID NO: 33209 - RNA, 19 nt, Homo sapiens
  misc_RNA (1)...(19): siRNA sense strand
gaagacgaucagagucaaa

SEQ ID NO: 33210 - RNA, 19 nt, Homo sapiens
  misc_RNA (1)...(19): siRNA sense strand
gaccagauuccugcucuuu

SEQ ID NO: 33211 - RNA, 19 nt, Homo sapiens
  misc_RNA (1)...(19): siRNA sense strand
caucaaacagcccauagga

SEQ ID NO: 33212 - RNA, 19 nt, Homo sapiens
  misc_RNA (1)...(19): siRNA sense strand
acagaugaccuacuacuuc

SEQ ID NO: 33213 - RNA, 19 nt, Homo sapiens
  misc_RNA (1)...(19): siRNA sense strand
gagcucuacagacauauug

SEQ ID NO: 33214 - RNA, 19 nt, Homo sapiens
  misc_RNA (1)...(19): siRNA sense strand
guggugacaugaacagcuu

SEQ ID NO: 33215 - RNA, 19 nt, Homo sapiens
  misc_RNA (1)...(19): siRNA sense strand
gccaucacccagaccauaa

SEQ ID NO: 33216 - RNA, 19 nt, Homo sapiens
  misc_RNA (1)...(19): siRNA sense strand
gagaaaaugcagaaaauuc

SEQ ID NO: 33217 - RNA, 19 nt, Homo sapiens
  misc_RNA (1)...(19): siRNA sense strand
acaaaacgcugcaugagau

SEQ ID NO: 33218 - RNA, 19 nt, Homo sapiens
  misc_RNA (1)...(19): siRNA sense strand
ugaagacgaucagagucaa

SEQ ID NO: 33219 - RNA, 19 nt, Homo sapiens
  misc_RNA (1)...(19): siRNA sense strand
gaacaaaagagaaaaugca

SEQ ID NO: 33220 - RNA, 19 nt, Homo sapiens
  misc_RNA (1)...(19): siRNA sense strand
gcaggagaaacccagcaaa

SEQ ID NO: 33221 - RNA, 19 nt, Homo sapiens
  misc_RNA (1)...(19): siRNA sense strand
caaaagagaaaaugcagaa

SEQ ID NO: 33222 - RNA, 19 nt, Homo sapiens
  misc_RNA (1)...(19): siRNA sense strand
caaacaacuuuuaccaugu

SEQ ID NO: 33223 - RNA, 19 nt, Homo sapiens
  misc_RNA (1)...(19): siRNA sense strand
cuucgugaaaugugaaaua

SEQ ID NO: 33224 - RNA, 19 nt, Homo sapiens
  misc_RNA (1)...(19): siRNA sense strand
ccugaaaccagagccauuu

SEQ ID NO: 33225 - RNA, 19 nt, Homo sapiens
  misc_RNA (1)...(19): siRNA sense strand
gauaucggcgagcugauca

SEQ ID NO: 33226 - RNA, 19 nt, Homo sapiens
  misc_RNA (1)...(19): siRNA sense strand
uaaagauccaguucaucaa

SEQ ID NO: 33227 - RNA, 19 nt, Homo sapiens
  misc_RNA (1)...(19): siRNA sense strand
gguggaacgcacaagauug

SEQ ID NO: 33228 - RNA, 19 nt, Homo sapiens
  misc_RNA (1)...(19): siRNA sense strand
aagccauguucaccuaauu

SEQ ID NO: 33229 - RNA, 19 nt, Homo sapiens
  misc_RNA (1)...(19): siRNA sense strand
caaagcgaaagaucagaug

SEQ ID NO: 33230 - RNA, 19 nt, Homo sapiens
  misc_RNA (1)...(19): siRNA sense strand
ucggcgagcugaucaugau

SEQ ID NO: 33231 - RNA, 19 nt, Homo sapiens
  misc_RNA (1)...(19): siRNA sense strand
gaugccauucauaccuuua

SEQ ID NO: 33232 - RNA, 19 nt, Homo sapiens
  misc_RNA (1)...(19): siRNA sense strand
aaaucuucgugaaauguga

SEQ ID NO: 33233 - RNA, 19 nt, Homo sapiens
  misc_RNA (1)...(19): siRNA sense strand
acguauuccuuucuuauca

SEQ ID NO: 33234 - RNA, 19 nt, Homo sapiens
  misc_RNA (1)...(19): siRNA sense strand
aaucgucuuucuccagaug

SEQ ID NO: 33235 - RNA, 19 nt, Homo sapiens
  misc_RNA (1)...(19): siRNA sense strand
gcaucuuuauccaaucaag

SEQ ID NO: 33236 - RNA, 19 nt, Homo sapiens
  misc_RNA (1)...(19): siRNA sense strand
uggaugccauucauaccuu

SEQ ID NO: 33237 - RNA, 19 nt, Homo sapiens
  misc_RNA (1)...(19): siRNA sense strand
caaucauccggacacguua

SEQ ID NO: 33238 - RNA, 19 nt, Homo sapiens
  misc_RNA (1)...(19): siRNA sense strand
caucaaagcgaaagaucag

SEQ ID NO: 33239 - RNA, 19 nt, Homo sapiens
  misc_RNA (1)...(19): siRNA sense strand
gcagaaaauucccaucacu

SEQ ID NO: 33240 - RNA, 19 nt, Homo sapiens
  misc_RNA (1)...(19): siRNA sense strand
gagacgccaauacaaacaa

SEQ ID NO: 33241 - RNA, 19 nt, Homo sapiens
  misc_RNA (1)...(19): siRNA sense strand
acugagacgccaauacaaa

SEQ ID NO: 33242 - RNA, 19 nt, Homo sapiens
  misc_RNA (1)...(19): siRNA sense strand
gcccagcacggcuucaaug

SEQ ID NO: 33243 - RNA, 19 nt, Homo sapiens
  misc_RNA (1)...(19): siRNA sense strand
aaaccagagccauuuggaa

SEQ ID NO: 33244 - RNA, 19 nt, Homo sapiens
  misc_RNA (1)...(19): siRNA sense strand
caaacaaaacgcugcauga

SEQ ID NO: 33245 - RNA, 19 nt, Homo sapiens
  misc_RNA (1)...(19): siRNA sense strand
gagaaucacagggcuggau

SEQ ID NO: 33246 - RNA, 19 nt, Homo sapiens
  misc_RNA (1)...(19): siRNA sense strand
aguuaaagauccaguucau

SEQ ID NO: 33247 - RNA, 19 nt, Homo sapiens
  misc_RNA (1)...(19): siRNA sense strand
aggacacuaugacuucuau

SEQ ID NO: 33248 - RNA, 19 nt, Homo sapiens
  misc_RNA (1)...(19): siRNA sense strand
ucaaagcgaaagaucagau

SEQ ID NO: 33249 - RNA, 19 nt, Homo sapiens
  misc_RNA (1)...(19): siRNA sense strand
caggagaaacccagcaaag

SEQ ID NO: 33250 - RNA, 19 nt, Homo sapiens
  misc_RNA (1)...(19): siRNA sense strand
aaacgcugcaugagaugaa

SEQ ID NO: 33251 - RNA, 19 nt, Homo sapiens
  misc_RNA (1)...(19): siRNA sense strand
ggauaucggcgagcugauc

SEQ ID NO: 33252 - RNA, 19 nt, Homo sapiens
  misc_RNA (1)...(19): siRNA sense strand
ugucacuacucggaacaaa

SEQ ID NO: 33253 - RNA, 19 nt, Homo sapiens
  misc_RNA (1)...(19): siRNA sense strand
ccaguuaaagauccaguuc

SEQ ID NO: 33254 - RNA, 19 nt, Homo sapiens
  misc_RNA (1)...(19): siRNA sense strand
gagcgaucggugcaccuuu

SEQ ID NO: 33255 - RNA, 19 nt, Homo sapiens
  misc_RNA (1)...(19): siRNA sense strand
ccacucaggccucguucug

SEQ ID NO: 33256 - RNA, 19 nt, Homo sapiens
  misc_RNA (1)...(19): siRNA sense strand
ccgcggagcaagagcaaga

SEQ ID NO: 33257 - RNA, 19 nt, Homo sapiens
  misc_RNA (1)...(19): siRNA sense strand
aaacaucaaagcgaaagau

SEQ ID NO: 33258 - RNA, 19 nt, Homo sapiens
  misc_RNA (1)...(19): siRNA sense strand
caaacugagacgccaauac

SEQ ID NO: 33259 - RNA, 19 nt, Homo sapiens
  misc_RNA (1)...(19): siRNA sense strand
uuacaggagugcggcuuca

SEQ ID NO: 33260 - RNA, 19 nt, Homo sapiens
  misc_RNA (1)...(19): siRNA sense strand
guggaacgcacaagauugg

SEQ ID NO: 33261 - RNA, 19 nt, Homo sapiens
  misc_RNA (1)...(19): siRNA sense strand
aggagaaacccagcaaaga

SEQ ID NO: 33262 - RNA, 19 nt, Homo sapiens
  misc_RNA (1)...(19): siRNA sense strand
aaagcgaaagaucagauga

SEQ ID NO: 33263 - RNA, 19 nt, Homo sapiens
  misc_RNA (1)...(19): siRNA sense strand
agagccauuuggaagaaga

SEQ ID NO: 33264 - RNA, 19 nt, Homo sapiens
  misc_RNA (1)...(19): siRNA sense strand
cuaccuggccguccaaaua

SEQ ID NO: 33265 - RNA, 19 nt, Homo sapiens
  misc_RNA (1)...(19): siRNA sense strand
gagcuacggaggcgucucu

SEQ ID NO: 33266 - RNA, 19 nt, Homo sapiens
  misc_RNA (1)...(19): siRNA sense strand
ccggugggagcgucaagua

SEQ ID NO: 33267 - RNA, 19 nt, Homo sapiens
  misc_RNA (1)...(19): siRNA sense strand
ccucgcagcaggucacuca

SEQ ID NO: 33268 - RNA, 19 nt, Homo sapiens
  misc_RNA (1)...(19): siRNA sense strand
gaagagugauucauacuuu

SEQ ID NO: 33269 - RNA, 19 nt, Homo sapiens
  misc_RNA (1)...(19): siRNA sense strand
gaaaguaaauuugcccuaa

SEQ ID NO: 33270 - RNA, 19 nt, Homo sapiens
  misc_RNA (1)...(19): siRNA sense strand
gcaacaaucugggcuauga

SEQ ID NO: 33271 - RNA, 19 nt, Homo sapiens
  misc_RNA (1)...(19): siRNA sense strand
caggaagucugaccaauaa

SEQ ID NO: 33272 - RNA, 19 nt, Homo sapiens
  misc_RNA (1)...(19): siRNA sense strand
gaaccagacuccaauguca

SEQ ID NO: 33273 - RNA, 19 nt, Homo sapiens
  misc_RNA (1)...(19): siRNA sense strand
gcaggaagucugaccaaua

SEQ ID NO: 33274 - RNA, 19 nt, Homo sapiens
  misc_RNA (1)...(19): siRNA sense strand
gaaaugccaugacaagucu

SEQ ID NO: 33275 - RNA, 19 nt, Homo sapiens
  misc_RNA (1)...(19): siRNA sense strand
acaagucucugaauaagaa

SEQ ID NO: 33276 - RNA, 19 nt, Homo sapiens
  misc_RNA (1)...(19): siRNA sense strand
caugacaagucucugaaua

SEQ ID NO: 33277 - RNA, 19 nt, Homo sapiens
  misc_RNA (1)...(19): siRNA sense strand
ccuacaaagucuuccauua

SEQ ID NO: 33278 - RNA, 19 nt, Homo sapiens
  misc_RNA (1)...(19): siRNA sense strand
gaaaggcaccugcgguauu

SEQ ID NO: 33279 - RNA, 19 nt, Homo sapiens
  misc_RNA (1)...(19): siRNA sense strand
ggaccuaacuuugaguaug

SEQ ID NO: 33280 - RNA, 19 nt, Homo sapiens
  misc_RNA (1)...(19): siRNA sense strand
gagaacuacucauguugaa

SEQ ID NO: 33281 - RNA, 19 nt, Homo sapiens
  misc_RNA (1)...(19): siRNA sense strand
gaaagaaccgcugcaacaa

SEQ ID NO: 33282 - RNA, 19 nt, Homo sapiens
  misc_RNA (1)...(19): siRNA sense strand
aaaggcaccugcgguauuu

SEQ ID NO: 33283 - RNA, 19 nt, Homo sapiens
  misc_RNA (1)...(19): siRNA sense strand
gggcucugcuugaguugua

SEQ ID NO: 33284 - RNA, 19 nt, Homo sapiens
  misc_RNA (1)...(19): siRNA sense strand
gaaguuuccacaaauaaga

SEQ ID NO: 33285 - RNA, 19 nt, Homo sapiens
  misc_RNA (1)...(19): siRNA sense strand
ccugaaguuuccacaaaua

SEQ ID NO: 33286 - RNA, 19 nt, Homo sapiens
  misc_RNA (1)...(19): siRNA sense strand
gagaaagggcucugcuuga

SEQ ID NO: 33287 - RNA, 19 nt, Homo sapiens
  misc_RNA (1)...(19): siRNA sense strand
gaagacucguucucagaug

SEQ ID NO: 33288 - RNA, 19 nt, Homo sapiens
  misc_RNA (1)...(19): siRNA sense strand
ggagaacuacucauguuga

SEQ ID NO: 33289 - RNA, 19 nt, Homo sapiens
  misc_RNA (1)...(19): siRNA sense strand
aaggugaucuucuguucua

SEQ ID NO: 33290 - RNA, 19 nt, Homo sapiens
  misc_RNA (1)...(19): siRNA sense strand
gaaaccaguugggcauguu

SEQ ID NO: 33291 - RNA, 19 nt, Homo sapiens
  misc_RNA (1)...(19): siRNA sense strand
aaagggcucugcuugaguu

SEQ ID NO: 33292 - RNA, 19 nt, Homo sapiens
  misc_RNA (1)...(19): siRNA sense strand
uaacuacccucuggacaau

SEQ ID NO: 33293 - RNA, 19 nt, Homo sapiens
  misc_RNA (1)...(19): siRNA sense strand
acacagagguagauauugg

SEQ ID NO: 33294 - RNA, 19 nt, Homo sapiens
  misc_RNA (1)...(19): siRNA sense strand
gaagcuauccgcgugauug

SEQ ID NO: 33295 - RNA, 19 nt, Homo sapiens
  misc_RNA (1)...(19): siRNA sense strand
ggaagucugaccaauaaga

SEQ ID NO: 33296 - RNA, 19 nt, Homo sapiens
  misc_RNA (1)...(19): siRNA sense strand
gaagucugaccaauaagaa

SEQ ID NO: 33297 - RNA, 19 nt, Homo sapiens
  misc_RNA (1)...(19): siRNA sense strand
gagaggacuuggagaugug

SEQ ID NO: 33298 - RNA, 19 nt, Homo sapiens
  misc_RNA (1)...(19): siRNA sense strand
guucucagaugcccuacaa

SEQ ID NO: 33299 - RNA, 19 nt, Homo sapiens
  misc_RNA (1)...(19): siRNA sense strand
agagguagauauuggagaa

SEQ ID NO: 33300 - RNA, 19 nt, Homo sapiens
  misc_RNA (1)...(19): siRNA sense strand
ucgacucucuguugaauga

SEQ ID NO: 33301 - RNA, 19 nt, Homo sapiens
  misc_RNA (1)...(19): siRNA sense strand
ugacaagucucugaauaag

SEQ ID NO: 33302 - RNA, 19 nt, Homo sapiens
  misc_RNA (1)...(19): siRNA sense strand
agucuuccauuaccaagua

SEQ ID NO: 33303 - RNA, 19 nt, Homo sapiens
  misc_RNA (1)...(19): siRNA sense strand
ggaagagugauucauacuu

SEQ ID NO: 33304 - RNA, 19 nt, Homo sapiens
  misc_RNA (1)...(19): siRNA sense strand
gguagauauuggagaacua

SEQ ID NO: 33305 - RNA, 19 nt, Homo sapiens
  misc_RNA (1)...(19): siRNA sense strand
guagacgucuuacacacau

SEQ ID NO: 33306 - RNA, 19 nt, Homo sapiens
  misc_RNA (1)...(19): siRNA sense strand
cagcuggaccuaacuuuga

SEQ ID NO: 33307 - RNA, 19 nt, Homo sapiens
  misc_RNA (1)...(19): siRNA sense strand
agaaagaaccgcugcaaca

SEQ ID NO: 33308 - RNA, 19 nt, Homo sapiens
  misc_RNA (1)...(19): siRNA sense strand
gaccuaacuuugaguaugc

SEQ ID NO: 33309 - RNA, 19 nt, Homo sapiens
  misc_RNA (1)...(19): siRNA sense strand
gagagaaccagacuccaau

SEQ ID NO: 33310 - RNA, 19 nt, Homo sapiens
  misc_RNA (1)...(19): siRNA sense strand
aagaaccgcugcaacaauc

SEQ ID NO: 33311 - RNA, 19 nt, Homo sapiens
  misc_RNA (1)...(19): siRNA sense strand
cagaauuacuggccucgau

SEQ ID NO: 33312 - RNA, 19 nt, Homo sapiens
  misc_RNA (1)...(19): siRNA sense strand
aauggaagagugauucaua

SEQ ID NO: 33313 - RNA, 19 nt, Homo sapiens
  misc_RNA (1)...(19): siRNA sense strand
guggcuaccugucauuuca

SEQ ID NO: 33314 - RNA, 19 nt, Homo sapiens
  misc_RNA (1)...(19): siRNA sense strand
cacgagcgcuccauucauc

SEQ ID NO: 33315 - RNA, 19 nt, Homo sapiens
  misc_RNA (1)...(19): siRNA sense strand
gacgguaacaggaauguau

SEQ ID NO: 33316 - RNA, 19 nt, Homo sapiens
  misc_RNA (1)...(19): siRNA sense strand
uuacacagagguagauauu

SEQ ID NO: 33317 - RNA, 19 nt, Homo sapiens
  misc_RNA (1)...(19): siRNA sense strand
caucgacucucuguugaau

SEQ ID NO: 33318 - RNA, 19 nt, Homo sapiens
  misc_RNA (1)...(19): siRNA sense strand
ccaccucauucccggagua

SEQ ID NO: 33319 - RNA, 19 nt, Homo sapiens
  misc_RNA (1)...(19): siRNA sense strand
ggacacuugccaccucauu

SEQ ID NO: 33320 - RNA, 19 nt, Homo sapiens
  misc_RNA (1)...(19): siRNA sense strand
ugccugaaguuuccacaaa

SEQ ID NO: 33321 - RNA, 19 nt, Homo sapiens
  misc_RNA (1)...(19): siRNA sense strand
gugaaacccauaccaauca

SEQ ID NO: 33322 - RNA, 19 nt, Homo sapiens
  misc_RNA (1)...(19): siRNA sense strand
gauguggaccagcuaguga

SEQ ID NO: 33323 - RNA, 19 nt, Homo sapiens
  misc_RNA (1)...(19): siRNA sense strand
gaaagucaacagaauuacu

SEQ ID NO: 33324 - RNA, 19 nt, Homo sapiens
  misc_RNA (1)...(19): siRNA sense strand
gcaccugcgguauuuguga

SEQ ID NO: 33325 - RNA, 19 nt, Homo sapiens
  misc_RNA (1)...(19): siRNA sense strand
cuacaaagucuuccauuac

SEQ ID NO: 33326 - RNA, 19 nt, Homo sapiens
  misc_RNA (1)...(19): siRNA sense strand
ccauucaucucuucaucga

SEQ ID NO: 33327 - RNA, 19 nt, Homo sapiens
  misc_RNA (1)...(19): siRNA sense strand
guaacaggaauguaugaga

SEQ ID NO: 33328 - RNA, 19 nt, Homo sapiens
  misc_RNA (1)...(19): siRNA sense strand
gaccaaagaagagauuuua

SEQ ID NO: 33329 - RNA, 19 nt, Homo sapiens
  misc_RNA (1)...(19): siRNA sense strand
gauauuggagaacuacuca

SEQ ID NO: 33330 - RNA, 19 nt, Homo sapiens
  misc_RNA (1)...(19): siRNA sense strand
gagugaaacccauaccaau

SEQ ID NO: 33331 - RNA, 19 nt, Homo sapiens
  misc_RNA (1)...(19): siRNA sense strand
gaaagggcucugcuugagu

SEQ ID NO: 33332 - RNA, 19 nt, Homo sapiens
  misc_RNA (1)...(19): siRNA sense strand
uaacuuugaguaugcagaa

SEQ ID NO: 33333 - RNA, 19 nt, Homo sapiens
  misc_RNA (1)...(19): siRNA sense strand
ggaaaggcaccugcgguau

SEQ ID NO: 33334 - RNA, 19 nt, Homo sapiens
  misc_RNA (1)...(19): siRNA sense strand
agaaagggcucugcuugag

SEQ ID NO: 33335 - RNA, 19 nt, Homo sapiens
  misc_RNA (1)...(19): siRNA sense strand
agagaggacuuggagaugu

SEQ ID NO: 33336 - RNA, 19 nt, Homo sapiens
  misc_RNA (1)...(19): siRNA sense strand
caauaagaaagucaacaga

SEQ ID NO: 33337 - RNA, 19 nt, Homo sapiens
  misc_RNA (1)...(19): siRNA sense strand
ugaaaugccaugacaaguc

SEQ ID NO: 33338 - RNA, 19 nt, Homo sapiens
  misc_RNA (1)...(19): siRNA sense strand
uuggagaacuacucauguu

SEQ ID NO: 33339 - RNA, 19 nt, Homo sapiens
  misc_RNA (1)...(19): siRNA sense strand
ccaaucaggccuuugagau

SEQ ID NO: 33340 - RNA, 19 nt, Homo sapiens
  misc_RNA (1)...(19): siRNA sense strand
caaagucuuccauuaccaa

SEQ ID NO: 33341 - RNA, 19 nt, Homo sapiens
  misc_RNA (1)...(19): siRNA sense strand
aaaguaaauuugcccuaag

SEQ ID NO: 33342 - RNA, 19 nt, Homo sapiens
  misc_RNA (1)...(19): siRNA sense strand
gagaagcuauccgcgugau

SEQ ID NO: 33343 - RNA, 19 nt, Homo sapiens
  misc_RNA (1)...(19): siRNA sense strand
agacacagcugaggacacu

SEQ ID NO: 33344 - RNA, 19 nt, Homo sapiens
  misc_RNA (1)...(19): siRNA sense strand
cagaugcccuacaaagucu

SEQ ID NO: 33345 - RNA, 19 nt, Homo sapiens
  misc_RNA (1)...(19): siRNA sense strand
aaaagaagcagcaaaaugu

SEQ ID NO: 33346 - RNA, 19 nt, Homo sapiens
  misc_RNA (1)...(19): siRNA sense strand
caaaagaagcagcaaaaug

SEQ ID NO: 33347 - RNA, 19 nt, Homo sapiens
  misc_RNA (1)...(19): siRNA sense strand
gagaaccagacuccaaugu

SEQ ID NO: 33348 - RNA, 19 nt, Homo sapiens
  misc_RNA (1)...(19): siRNA sense strand
gccugaaguuuccacaaau

SEQ ID NO: 33349 - RNA, 19 nt, Homo sapiens
  misc_RNA (1)...(19): siRNA sense strand
ucagaugcccuacaaaguc

SEQ ID NO: 33350 - RNA, 19 nt, Homo sapiens
  misc_RNA (1)...(19): siRNA sense strand
gagagaggacuuggagaug

SEQ ID NO: 33351 - RNA, 19 nt, Homo sapiens
  misc_RNA (1)...(19): siRNA sense strand
cuucaucgacucucuguug

SEQ ID NO: 33352 - RNA, 19 nt, Homo sapiens
  misc_RNA (1)...(19): siRNA sense strand
gacaagucucugaauaaga

SEQ ID NO: 33353 - RNA, 19 nt, Homo sapiens
  misc_RNA (1)...(19): siRNA sense strand
gcgcuccauucaucucuuc

SEQ ID NO: 33354 - RNA, 19 nt, Homo sapiens
  misc_RNA (1)...(19): siRNA sense strand
caaauggaagagugauuca

SEQ ID NO: 33355 - RNA, 19 nt, Homo sapiens
  misc_RNA (1)...(19): siRNA sense strand
aaagaaccgcugcaacaau

SEQ ID NO: 33356 - RNA, 19 nt, Homo sapiens
  misc_RNA (1)...(19): siRNA sense strand
guagaaagaaccgcugcaa

SEQ ID NO: 33357 - RNA, 19 nt, Homo sapiens
  misc_RNA (1)...(19): siRNA sense strand
gcuggacgguaacaggaau

SEQ ID NO: 33358 - RNA, 19 nt, Homo sapiens
  misc_RNA (1)...(19): siRNA sense strand
ggaauccagaaaccaguug

SEQ ID NO: 33359 - RNA, 19 nt, Homo sapiens
  misc_RNA (1)...(19): siRNA sense strand
ucaaauggaagagugauuc

SEQ ID NO: 33360 - RNA, 19 nt, Homo sapiens
  misc_RNA (1)...(19): siRNA sense strand
gcagcaaaauguaccugaa

SEQ ID NO: 33361 - RNA, 19 nt, Homo sapiens
  misc_RNA (1)...(19): siRNA sense strand
cuaccugucauuucaauca

SEQ ID NO: 33362 - RNA, 19 nt, Homo sapiens
  misc_RNA (1)...(19): siRNA sense strand
caccugcgguauuugugaa

SEQ ID NO: 33363 - RNA, 19 nt, Homo sapiens
  misc_RNA (1)...(19): siRNA sense strand
agagagaaccagacuccaa

SEQ ID NO: 33364 - RNA, 19 nt, Homo sapiens
  misc_RNA (1)...(19): siRNA sense strand
ccauaccaaucaggccuuu

SEQ ID NO: 33365 - RNA, 19 nt, Homo sapiens
  misc_RNA (1)...(19): siRNA sense strand
guccaucucuugggauaca

SEQ ID NO: 33366 - RNA, 19 nt, Homo sapiens
  misc_RNA (1)...(19): siRNA sense strand
uggaccagcuagugaagug

SEQ ID NO: 33367 - RNA, 19 nt, Homo sapiens
  misc_RNA (1)...(19): siRNA sense strand
aaagucaacagaauuacug

SEQ ID NO: 33368 - RNA, 19 nt, Homo sapiens
  misc_RNA (1)...(19): siRNA sense strand
gcuggaccauccugcauua

SEQ ID NO: 33369 - RNA, 19 nt, Homo sapiens
  misc_RNA (1)...(19): siRNA sense strand
gaagcuggaucgcuacuca

SEQ ID NO: 33370 - RNA, 19 nt, Homo sapiens
  misc_RNA (1)...(19): siRNA sense strand
cuacacggcugucuucaca

SEQ ID NO: 33371 - RNA, 19 nt, Homo sapiens
  misc_RNA (1)...(19): siRNA sense strand
ccaacggcaucgacaugaa

SEQ ID NO: 33372 - RNA, 19 nt, Homo sapiens
  misc_RNA (1)...(19): siRNA sense strand
ggacauccucaucaacuuc

SEQ ID NO: 33373 - RNA, 19 nt, Homo sapiens
  misc_RNA (1)...(19): siRNA sense strand
ggaccauccugcauuacag

SEQ ID NO: 33374 - RNA, 19 nt, Homo sapiens
  misc_RNA (1)...(19): siRNA sense strand
ccgacgugcugccugagua

SEQ ID NO: 33375 - RNA, 19 nt, Homo sapiens
  misc_RNA (1)...(19): siRNA sense strand
ggcaacgucucucccaaca

SEQ ID NO: 33376 - RNA, 19 nt, Homo sapiens
  misc_RNA (1)...(19): siRNA sense strand
gugcuguucuugcucaugu

SEQ ID NO: 33377 - RNA, 19 nt, Homo sapiens
  misc_RNA (1)...(19): siRNA sense strand
gcaucgccguccacuacuu

SEQ ID NO: 33378 - RNA, 19 nt, Homo sapiens
  misc_RNA (1)...(19): siRNA sense strand
caacgugucggccaucauc

SEQ ID NO: 33379 - RNA, 19 nt, Homo sapiens
  misc_RNA (1)...(19): siRNA sense strand
ucagcagccucaccagugu

SEQ ID NO: 33380 - RNA, 19 nt, Homo sapiens
  misc_RNA (1)...(19): siRNA sense strand
gcucauuggcucccucaug

SEQ ID NO: 33381 - RNA, 19 nt, Homo sapiens
  misc_RNA (1)...(19): siRNA sense strand
caacaccaacucagagaag

SEQ ID NO: 33382 - RNA, 19 nt, Homo sapiens
  misc_RNA (1)...(19): siRNA sense strand
ugacggcgcucuacuucac

SEQ ID NO: 33383 - RNA, 19 nt, Homo sapiens
  misc_RNA (1)...(19): siRNA sense strand
gcgcucuacuucaccuuca

SEQ ID NO: 33384 - RNA, 19 nt, Homo sapiens
  misc_RNA (1)...(19): siRNA sense strand
cagcacgccugguccuaca

SEQ ID NO: 33385 - RNA, 19 nt, Homo sapiens
  misc_RNA (1)...(19): siRNA sense strand
cucauuggcucccucaugu

SEQ ID NO: 33386 - RNA, 19 nt, Homo sapiens
  misc_RNA (1)...(19): siRNA sense strand
caucuacacggcugucuuc

SEQ ID NO: 33387 - RNA, 19 nt, Homo sapiens
  misc_RNA (1)...(19): siRNA sense strand
ccaucaaggacaaguaugu

SEQ ID NO: 33388 - RNA, 19 nt, Homo sapiens
  misc_RNA (1)...(19): siRNA sense strand
gcugguuccucaucgacau

SEQ ID NO: 33389 - RNA, 19 nt, Homo sapiens
  misc_RNA (1)...(19): siRNA sense strand
uggacauccucaucaacuu

SEQ ID NO: 33390 - RNA, 19 nt, Homo sapiens
  misc_RNA (1)...(19): siRNA sense strand
ccuucgaccugcucaucuu

SEQ ID NO: 33391 - RNA, 19 nt, Homo sapiens
  misc_RNA (1)...(19): siRNA sense strand
gaaguucaagaccacacau

SEQ ID NO: 33392 - RNA, 19 nt, Homo sapiens
  misc_RNA (1)...(19): siRNA sense strand
uugcucaugugcaccuuug

SEQ ID NO: 33393 - RNA, 19 nt, Homo sapiens
  misc_RNA (1)...(19): siRNA sense strand
gcuggaccauccugcauua

SEQ ID NO: 33394 - RNA, 19 nt, Homo sapiens
  misc_RNA (1)...(19): siRNA sense strand
gaagcuggaucgcuacuca

SEQ ID NO: 33395 - RNA, 19 nt, Homo sapiens
  misc_RNA (1)...(19): siRNA sense strand
cuacacggcugucuucaca

SEQ ID NO: 33396 - RNA, 19 nt, Homo sapiens
  misc_RNA (1)...(19): siRNA sense strand
ccaacggcaucgacaugaa

SEQ ID NO: 33397 - RNA, 19 nt, Homo sapiens
  misc_RNA (1)...(19): siRNA sense strand
ggacauccucaucaacuuc

SEQ ID NO: 33398 - RNA, 19 nt, Homo sapiens
  misc_RNA (1)...(19): siRNA sense strand
ggaccauccugcauuacag

SEQ ID NO: 33399 - RNA, 19 nt, Homo sapiens
  misc_RNA (1)...(19): siRNA sense strand
ccgacgugcugccugagua

SEQ ID NO: 33400 - RNA, 19 nt, Homo sapiens
  misc_RNA (1)...(19): siRNA sense strand
ggcaacgucucucccaaca

SEQ ID NO: 33401 - RNA, 19 nt, Homo sapiens
  misc_RNA (1)...(19): siRNA sense strand
gugcuguucuugcucaugu

SEQ ID NO: 33402 - RNA, 19 nt, Homo sapiens
  misc_RNA (1)...(19): siRNA sense strand
gcaucgccguccacuacuu

SEQ ID NO: 33403 - RNA, 19 nt, Homo sapiens
  misc_RNA (1)...(19): siRNA sense strand
caacgugucggccaucauc

SEQ ID NO: 33404 - RNA, 19 nt, Homo sapiens
  misc_RNA (1)...(19): siRNA sense strand
ucagcagccucaccagugu

SEQ ID NO: 33405 - RNA, 19 nt, Homo sapiens
  misc_RNA (1)...(19): siRNA sense strand
gcucauuggcucccucaug

SEQ ID NO: 33406 - RNA, 19 nt, Homo sapiens
  misc_RNA (1)...(19): siRNA sense strand
caacaccaacucagagaag

SEQ ID NO: 33407 - RNA, 19 nt, Homo sapiens
  misc_RNA (1)...(19): siRNA sense strand
ugacggcgcucuacuucac

SEQ ID NO: 33408 - RNA, 19 nt, Homo sapiens
  misc_RNA (1)...(19): siRNA sense strand
gcgcucuacuucaccuuca

SEQ ID NO: 33409 - RNA, 19 nt, Homo sapiens
  misc_RNA (1)...(19): siRNA sense strand
cagcacgccugguccuaca

SEQ ID NO: 33410 - RNA, 19 nt, Homo sapiens
  misc_RNA (1)...(19): siRNA sense strand
cucauuggcucccucaugu

SEQ ID NO: 33411 - RNA, 19 nt, Homo sapiens
  misc_RNA (1)...(19): siRNA sense strand
caucuacacggcugucuuc

SEQ ID NO: 33412 - RNA, 19 nt, Homo sapiens
  misc_RNA (1)...(19): siRNA sense strand
ccaucaaggacaaguaugu

SEQ ID NO: 33413 - RNA, 19 nt, Homo sapiens
  misc_RNA (1)...(19): siRNA sense strand
gcugguuccucaucgacau

SEQ ID NO: 33414 - RNA, 19 nt, Homo sapiens
  misc_RNA (1)...(19): siRNA sense strand
uggacauccucaucaacuu

SEQ ID NO: 33415 - RNA, 19 nt, Homo sapiens
  misc_RNA (1)...(19): siRNA sense strand
ccuucgaccugcucaucuu

SEQ ID NO: 33416 - RNA, 19 nt, Homo sapiens
  misc_RNA (1)...(19): siRNA sense strand
gaaguucaagaccacacau

SEQ ID NO: 33417 - RNA, 19 nt, Homo sapiens
  misc_RNA (1)...(19): siRNA sense strand
uugcucaugugcaccuuug

SEQ ID NO: 33418 - RNA, 19 nt, Homo sapiens
  misc_RNA (1)...(19): siRNA sense strand
gcuggaccauccugcauua

SEQ ID NO: 33419 - RNA, 19 nt, Homo sapiens
  misc_RNA (1)...(19): siRNA sense strand
gaagcuggaucgcuacuca

SEQ ID NO: 33420 - RNA, 19 nt, Homo sapiens
  misc_RNA (1)...(19): siRNA sense strand
cuacacggcugucuucaca

SEQ ID NO: 33421 - RNA, 19 nt, Homo sapiens
  misc_RNA (1)...(19): siRNA sense strand
ccaacggcaucgacaugaa

SEQ ID NO: 33422 - RNA, 19 nt, Homo sapiens
  misc_RNA (1)...(19): siRNA sense strand
ggacauccucaucaacuuc

SEQ ID NO: 33423 - RNA, 19 nt, Homo sapiens
  misc_RNA (1)...(19): siRNA sense strand
ggaccauccugcauuacag

SEQ ID NO: 33424 - RNA, 19 nt, Homo sapiens
  misc_RNA (1)...(19): siRNA sense strand
ccgacgugcugccugagua

SEQ ID NO: 33425 - RNA, 19 nt, Homo sapiens
  misc_RNA (1)...(19): siRNA sense strand
ggcaacgucucucccaaca

SEQ ID NO: 33426 - RNA, 19 nt, Homo sapiens
  misc_RNA (1)...(19): siRNA sense strand
gugcuguucuugcucaugu

SEQ ID NO: 33427 - RNA, 19 nt, Homo sapiens
  misc_RNA (1)...(19): siRNA sense strand
gcaucgccguccacuacuu

SEQ ID NO: 33428 - RNA, 19 nt, Homo sapiens
  misc_RNA (1)...(19): siRNA sense strand
caacgugucggccaucauc

SEQ ID NO: 33429 - RNA, 19 nt, Homo sapiens
  misc_RNA (1)...(19): siRNA sense strand
ucagcagccucaccagugu

SEQ ID NO: 33430 - RNA, 19 nt, Homo sapiens
  misc_RNA (1)...(19): siRNA sense strand
gcucauuggcucccucaug

SEQ ID NO: 33431 - RNA, 19 nt, Homo sapiens
  misc_RNA (1)...(19): siRNA sense strand
caacaccaacucagagaag

SEQ ID NO: 33432 - RNA, 19 nt, Homo sapiens
  misc_RNA (1)...(19): siRNA sense strand
ugacggcgcucuacuucac

SEQ ID NO: 33433 - RNA, 19 nt, Homo sapiens
  misc_RNA (1)...(19): siRNA sense strand
gcgcucuacuucaccuuca

SEQ ID NO: 33434 - RNA, 19 nt, Homo sapiens
  misc_RNA (1)...(19): siRNA sense strand
cagcacgccugguccuaca

SEQ ID NO: 33435 - RNA, 19 nt, Homo sapiens
  misc_RNA (1)...(19): siRNA sense strand
cucauuggcucccucaugu

SEQ ID NO: 33436 - RNA, 19 nt, Homo sapiens
  misc_RNA (1)...(19): siRNA sense strand
caucuacacggcugucuuc

SEQ ID NO: 33437 - RNA, 19 nt, Homo sapiens
  misc_RNA (1)...(19): siRNA sense strand
ccaucaaggacaaguaugu

SEQ ID NO: 33438 - RNA, 19 nt, Homo sapiens
  misc_RNA (1)...(19): siRNA sense strand
gcugguuccucaucgacau

SEQ ID NO: 33439 - RNA, 19 nt, Homo sapiens
  misc_RNA (1)...(19): siRNA sense strand
uggacauccucaucaacuu

SEQ ID NO: 33440 - RNA, 19 nt, Homo sapiens
  misc_RNA (1)...(19): siRNA sense strand
ccuucgaccugcucaucuu

SEQ ID NO: 33441 - RNA, 19 nt, Homo sapiens
  misc_RNA (1)...(19): siRNA sense strand
gaaguucaagaccacacau

SEQ ID NO: 33442 - RNA, 19 nt, Homo sapiens
  misc_RNA (1)...(19): siRNA sense strand
uugcucaugugcaccuuug

SEQ ID NO: 33443 - RNA, 19 nt, Homo sapiens
  misc_RNA (1)...(19): siRNA sense strand
gagaagggcugccaagaug

SEQ ID NO: 33444 - RNA, 19 nt, Homo sapiens
  misc_RNA (1)...(19): siRNA sense strand
gaaggagccuggacguuug

SEQ ID NO: 33445 - RNA, 19 nt, Homo sapiens
  misc_RNA (1)...(19): siRNA sense strand
gcacagaggccuucagaga

SEQ ID NO: 33446 - RNA, 19 nt, Homo sapiens
  misc_RNA (1)...(19): siRNA sense strand
aaaggacacugccaagaua

SEQ ID NO: 33447 - RNA, 19 nt, Homo sapiens
  misc_RNA (1)...(19): siRNA sense strand
gagaguguguggauauuga

SEQ ID NO: 33448 - RNA, 19 nt, Homo sapiens
  misc_RNA (1)...(19): siRNA sense strand
gaaugagugugaugacuug

SEQ ID NO: 33449 - RNA, 19 nt, Homo sapiens
  misc_RNA (1)...(19): siRNA sense strand
ggaaggagccuggacguuu

SEQ ID NO: 33450 - RNA, 19 nt, Homo sapiens
  misc_RNA (1)...(19): siRNA sense strand
ggacagugcugcccaggau

SEQ ID NO: 33451 - RNA, 19 nt, Homo sapiens
  misc_RNA (1)...(19): siRNA sense strand
gaaaggacacugccaagau

SEQ ID NO: 33452 - RNA, 19 nt, Homo sapiens
  misc_RNA (1)...(19): siRNA sense strand
caacacagccggucacuca

SEQ ID NO: 33453 - RNA, 19 nt, Homo sapiens
  misc_RNA (1)...(19): siRNA sense strand
gccaagauaucaacgaaug

SEQ ID NO: 33454 - RNA, 19 nt, Homo sapiens
  misc_RNA (1)...(19): siRNA sense strand
gaacgagugugagcuuaug

SEQ ID NO: 33455 - RNA, 19 nt, Homo sapiens
  misc_RNA (1)...(19): siRNA sense strand
gaugggagaugcgucaauu

SEQ ID NO: 33456 - RNA, 19 nt, Homo sapiens
  misc_RNA (1)...(19): siRNA sense strand
gugaagauguggaugaaug

SEQ ID NO: 33457 - RNA, 19 nt, Homo sapiens
  misc_RNA (1)...(19): siRNA sense strand
ccacgggucuuucuucugu

SEQ ID NO: 33458 - RNA, 19 nt, Homo sapiens
  misc_RNA (1)...(19): siRNA sense strand
caacguggcucgcauugag

SEQ ID NO: 33459 - RNA, 19 nt, Homo sapiens
  misc_RNA (1)...(19): siRNA sense strand
acacuugucuggccuguga

SEQ ID NO: 33460 - RNA, 19 nt, Homo sapiens
  misc_RNA (1)...(19): siRNA sense strand
gaggagcucugaggucuau

SEQ ID NO: 33461 - RNA, 19 nt, Homo sapiens
  misc_RNA (1)...(19): siRNA sense strand
ccacauggccugcguagau

SEQ ID NO: 33462 - RNA, 19 nt, Homo sapiens
  misc_RNA (1)...(19): siRNA sense strand
gcagcuaccugugcacaug

SEQ ID NO: 33463 - RNA, 19 nt, Homo sapiens
  misc_RNA (1)...(19): siRNA sense strand
ucaacaccgugccugguua

SEQ ID NO: 33464 - RNA, 19 nt, Homo sapiens
  misc_RNA (1)...(19): siRNA sense strand
gagacugcauugacauaga

SEQ ID NO: 33465 - RNA, 19 nt, Homo sapiens
  misc_RNA (1)...(19): siRNA sense strand
gaaagugcaccaaccuaga

SEQ ID NO: 33466 - RNA, 19 nt, Homo sapiens
  misc_RNA (1)...(19): siRNA sense strand
guagccagcucucuuccaa

SEQ ID NO: 33467 - RNA, 19 nt, Homo sapiens
  misc_RNA (1)...(19): siRNA sense strand
gguacugggugaaugaaga

SEQ ID NO: 33468 - RNA, 19 nt, Homo sapiens
  misc_RNA (1)...(19): siRNA sense strand
acagaggccuucagagaga

SEQ ID NO: 33469 - RNA, 19 nt, Homo sapiens
  misc_RNA (1)...(19): siRNA sense strand
ggaccuggccugugagaau

SEQ ID NO: 33470 - RNA, 19 nt, Homo sapiens
  misc_RNA (1)...(19): siRNA sense strand
gacagaccauguacacaga

SEQ ID NO: 33471 - RNA, 19 nt, Homo sapiens
  misc_RNA (1)...(19): siRNA sense strand
gaacggagacugcauugac

SEQ ID NO: 33472 - RNA, 19 nt, Homo sapiens
  misc_RNA (1)...(19): siRNA sense strand
gcaaggacgcggagugugu

SEQ ID NO: 33473 - RNA, 19 nt, Homo sapiens
  misc_RNA (1)...(19): siRNA sense strand
ggaugagugugugauauuc

SEQ ID NO: 33474 - RNA, 19 nt, Homo sapiens
  misc_RNA (1)...(19): siRNA sense strand
gaccagggcuucgagaucu

SEQ ID NO: 33475 - RNA, 19 nt, Homo sapiens
  misc_RNA (1)...(19): siRNA sense strand
ggaaaggacacugccaaga

SEQ ID NO: 33476 - RNA, 19 nt, Homo sapiens
  misc_RNA (1)...(19): siRNA sense strand
ggagggcacugugucaaca

SEQ ID NO: 33477 - RNA, 19 nt, Homo sapiens
  misc_RNA (1)...(19): siRNA sense strand
gggcagcgagugugagaaa

SEQ ID NO: 33478 - RNA, 19 nt, Homo sapiens
  misc_RNA (1)...(19): siRNA sense strand
gugaacgagugugagcuua

SEQ ID NO: 33479 - RNA, 19 nt, Homo sapiens
  misc_RNA (1)...(19): siRNA sense strand
guacacagaugcggaugag

SEQ ID NO: 33480 - RNA, 19 nt, Homo sapiens
  misc_RNA (1)...(19): siRNA sense strand
gcggaugagugugugauau

SEQ ID NO: 33481 - RNA, 19 nt, Homo sapiens
  misc_RNA (1)...(19): siRNA sense strand
gaccuggccugugagaaug

SEQ ID NO: 33482 - RNA, 19 nt, Homo sapiens
  misc_RNA (1)...(19): siRNA sense strand
ggcugaaccucacggagaa

SEQ ID NO: 33483 - RNA, 19 nt, Homo sapiens
  misc_RNA (1)...(19): siRNA sense strand
uugcagagauacaggaaga

SEQ ID NO: 33484 - RNA, 19 nt, Homo sapiens
  misc_RNA (1)...(19): siRNA sense strand
gcaccugcacccugccuuu

SEQ ID NO: 33485 - RNA, 19 nt, Homo sapiens
  misc_RNA (1)...(19): siRNA sense strand
cagccaagguguacagucu

SEQ ID NO: 33486 - RNA, 19 nt, Homo sapiens
  misc_RNA (1)...(19): siRNA sense strand
cuacgaugcuucccacaag

SEQ ID NO: 33487 - RNA, 19 nt, Homo sapiens
  misc_RNA (1)...(19): siRNA sense strand
gcagcgagugugagaaaug

SEQ ID NO: 33488 - RNA, 19 nt, Homo sapiens
  misc_RNA (1)...(19): siRNA sense strand
gaucugcccuaguggaaaa

SEQ ID NO: 33489 - RNA, 19 nt, Homo sapiens
  misc_RNA (1)...(19): siRNA sense strand
ccaauggcaccguguguga

SEQ ID NO: 33490 - RNA, 19 nt, Homo sapiens
  misc_RNA (1)...(19): siRNA sense strand
ggaggcgagugcaagaaca

SEQ ID NO: 33491 - RNA, 19 nt, Homo sapiens
  misc_RNA (1)...(19): siRNA sense strand
gaacggguacugggugaau

SEQ ID NO: 33492 - RNA, 19 nt, Homo sapiens
  misc_RNA (1)...(19): siRNA sense strand
gaagggcugccaagaugug

SEQ ID NO: 33493 - RNA, 19 nt, Homo sapiens
  misc_RNA (1)...(19): siRNA sense strand
ggacacugccaagauauca

SEQ ID NO: 33494 - RNA, 19 nt, Homo sapiens
  misc_RNA (1)...(19): siRNA sense strand
ugacgagugugaggacuau

SEQ ID NO: 33495 - RNA, 19 nt, Homo sapiens
  misc_RNA (1)...(19): siRNA sense strand
gagaucugcccuaguggaa

SEQ ID NO: 33496 - RNA, 19 nt, Homo sapiens
  misc_RNA (1)...(19): siRNA sense strand
augcagaccuggccucaug

SEQ ID NO: 33497 - RNA, 19 nt, Homo sapiens
  misc_RNA (1)...(19): siRNA sense strand
gaccugcacuacagcaucu

SEQ ID NO: 33498 - RNA, 19 nt, Homo sapiens
  misc_RNA (1)...(19): siRNA sense strand
gaacaccacacaggcugaa

SEQ ID NO: 33499 - RNA, 19 nt, Homo sapiens
  misc_RNA (1)...(19): siRNA sense strand
ggagcuguguagaugugaa

SEQ ID NO: 33500 - RNA, 19 nt, Homo sapiens
  misc_RNA (1)...(19): siRNA sense strand
ccgaugaccugcacuacag

SEQ ID NO: 33501 - RNA, 19 nt, Homo sapiens
  misc_RNA (1)...(19): siRNA sense strand
gggcuacaccugugacugu

SEQ ID NO: 33502 - RNA, 19 nt, Homo sapiens
  misc_RNA (1)...(19): siRNA sense strand
gaagcaguccacuuucaca

SEQ ID NO: 33503 - RNA, 19 nt, Homo sapiens
  misc_RNA (1)...(19): siRNA sense strand
caccaaccacuguaucaaa

SEQ ID NO: 33504 - RNA, 19 nt, Homo sapiens
  misc_RNA (1)...(19): siRNA sense strand
aaagugcaccaaccuagaa

SEQ ID NO: 33505 - RNA, 19 nt, Homo sapiens
  misc_RNA (1)...(19): siRNA sense strand
gauacaggaagaacaagug

SEQ ID NO: 33506 - RNA, 19 nt, Homo sapiens
  misc_RNA (1)...(19): siRNA sense strand
gcggaucaccaagcagaua

SEQ ID NO: 33507 - RNA, 19 nt, Homo sapiens
  misc_RNA (1)...(19): siRNA sense strand
cucacucacugccaagaua

SEQ ID NO: 33508 - RNA, 19 nt, Homo sapiens
  misc_RNA (1)...(19): siRNA sense strand
agauguggaugaaugugaa

SEQ ID NO: 33509 - RNA, 19 nt, Homo sapiens
  misc_RNA (1)...(19): siRNA sense strand
gggacuguguggaugugaa

SEQ ID NO: 33510 - RNA, 19 nt, Homo sapiens
  misc_RNA (1)...(19): siRNA sense strand
ggacgcggagugugugaau

SEQ ID NO: 33511 - RNA, 19 nt, Homo sapiens
  misc_RNA (1)...(19): siRNA sense strand
gcaccaaccacuguaucaa

SEQ ID NO: 33512 - RNA, 19 nt, Homo sapiens
  misc_RNA (1)...(19): siRNA sense strand
gcuuccagcuggccaaugg

SEQ ID NO: 33513 - RNA, 19 nt, Homo sapiens
  misc_RNA (1)...(19): siRNA sense strand
gacgcggagugugugaaua

SEQ ID NO: 33514 - RNA, 19 nt, Homo sapiens
  misc_RNA (1)...(19): siRNA sense strand
gaaagccgaggaggaggaa

SEQ ID NO: 33515 - RNA, 19 nt, Homo sapiens
  misc_RNA (1)...(19): siRNA sense strand
gcaaucccggcuuccacua

SEQ ID NO: 33516 - RNA, 19 nt, Homo sapiens
  misc_RNA (1)...(19): siRNA sense strand
gagcuuaugcuggcgguau

SEQ ID NO: 33517 - RNA, 19 nt, Homo sapiens
  misc_RNA (1)...(19): siRNA sense strand
ugacuccugugaagaugug

SEQ ID NO: 33518 - RNA, 19 nt, Homo sapiens
  misc_RNA (1)...(19): siRNA sense strand
ugagaagggcugccaagau

SEQ ID NO: 33519 - RNA, 19 nt, Homo sapiens
  misc_RNA (1)...(19): siRNA sense strand
gcuacaucauggucaggaa

SEQ ID NO: 33520 - RNA, 19 nt, Homo sapiens
  misc_RNA (1)...(19): siRNA sense strand
ggaaaagggcgcugcauca

SEQ ID NO: 33521 - RNA, 19 nt, Homo sapiens
  misc_RNA (1)...(19): siRNA sense strand
agagauacaggaagaacaa

SEQ ID NO: 33522 - RNA, 19 nt, Homo sapiens
  misc_RNA (1)...(19): siRNA sense strand
ugugugaggaugugaauga

SEQ ID NO: 33523 - RNA, 19 nt, Homo sapiens
  misc_RNA (1)...(19): siRNA sense strand
ggccugcugugcucugugu

SEQ ID NO: 33524 - RNA, 19 nt, Homo sapiens
  misc_RNA (1)...(19): siRNA sense strand
ugaaugagugugaugacuu

SEQ ID NO: 33525 - RNA, 19 nt, Homo sapiens
  misc_RNA (1)...(19): siRNA sense strand
ccacccgcauggacugcua

SEQ ID NO: 33526 - RNA, 19 nt, Homo sapiens
  misc_RNA (1)...(19): siRNA sense strand
ggagaguguguggauauug

SEQ ID NO: 33527 - RNA, 19 nt, Homo sapiens
  misc_RNA (1)...(19): siRNA sense strand
cgagggcuccuucaacugu

SEQ ID NO: 33528 - RNA, 19 nt, Homo sapiens
  misc_RNA (1)...(19): siRNA sense strand
acaggagugucaagauauc

SEQ ID NO: 33529 - RNA, 19 nt, Homo sapiens
  misc_RNA (1)...(19): siRNA sense strand
gagaaaaucaagaagauca

SEQ ID NO: 33530 - RNA, 19 nt, Homo sapiens
  misc_RNA (1)...(19): siRNA sense strand
agcgagaucugcccuagug

SEQ ID NO: 33531 - RNA, 19 nt, Homo sapiens
  misc_RNA (1)...(19): siRNA sense strand
agugggagcuguguagaug

SEQ ID NO: 33532 - RNA, 19 nt, Homo sapiens
  misc_RNA (1)...(19): siRNA sense strand
cugccaagauaucaacgaa

SEQ ID NO: 33533 - RNA, 19 nt, Homo sapiens
  misc_RNA (1)...(19): siRNA sense strand
cggaugagugugugauauu

SEQ ID NO: 33534 - RNA, 19 nt, Homo sapiens
  misc_RNA (1)...(19): siRNA sense strand
gaugugaaugagugucuga

SEQ ID NO: 33535 - RNA, 19 nt, Homo sapiens
  misc_RNA (1)...(19): siRNA sense strand
cugaacggcugugagaaug

SEQ ID NO: 33536 - RNA, 19 nt, Homo sapiens
  misc_RNA (1)...(19): siRNA sense strand
ggaccgcacacccauccuu

SEQ ID NO: 33537 - RNA, 19 nt, Homo sapiens
  misc_RNA (1)...(19): siRNA sense strand
acaagaagugugaggauca

SEQ ID NO: 33538 - RNA, 19 nt, Homo sapiens
  misc_RNA (1)...(19): siRNA sense strand
caacaccgugccugguuau

SEQ ID NO: 33539 - RNA, 19 nt, Homo sapiens
  misc_RNA (1)...(19): siRNA sense strand
guggagaguguguggauau

SEQ ID NO: 33540 - RNA, 19 nt, Homo sapiens
  misc_RNA (1)...(19): siRNA sense strand
caggauggacaacagcaaa

SEQ ID NO: 33541 - RNA, 19 nt, Homo sapiens
  misc_RNA (1)...(19): siRNA sense strand
cacauggccugcguagaug

SEQ ID NO: 33542 - RNA, 19 nt, Homo sapiens
  misc_RNA (1)...(19): siRNA sense strand
caccgugccugguuauguc

SEQ ID NO: 33543 - RNA, 19 nt, Homo sapiens
  misc_RNA (1)...(19): siRNA sense strand
cuacaaugcuggagacaga

SEQ ID NO: 33544 - RNA, 19 nt, Homo sapiens
  misc_RNA (1)...(19): siRNA sense strand
ggagagugguuacaacaca

SEQ ID NO: 33545 - RNA, 19 nt, Homo sapiens
  misc_RNA (1)...(19): siRNA sense strand
ggagacagaagcacugauu

SEQ ID NO: 33546 - RNA, 19 nt, Homo sapiens
  misc_RNA (1)...(19): siRNA sense strand
ucaagguuguggaguguaa

SEQ ID NO: 33547 - RNA, 19 nt, Homo sapiens
  misc_RNA (1)...(19): siRNA sense strand
gagacagaagcacugauua

SEQ ID NO: 33548 - RNA, 19 nt, Homo sapiens
  misc_RNA (1)...(19): siRNA sense strand
acagagauguccgucagua

SEQ ID NO: 33549 - RNA, 19 nt, Homo sapiens
  misc_RNA (1)...(19): siRNA sense strand
ccaaaugggagagugguua

SEQ ID NO: 33550 - RNA, 19 nt, Homo sapiens
  misc_RNA (1)...(19): siRNA sense strand
uaugggauauuucagauca

SEQ ID NO: 33551 - RNA, 19 nt, Homo sapiens
  misc_RNA (1)...(19): siRNA sense strand
ggaaucagccuagcaaacu

SEQ ID NO: 33552 - RNA, 19 nt, Homo sapiens
  misc_RNA (1)...(19): siRNA sense strand
aagcacugauuaugggaua

SEQ ID NO: 33553 - RNA, 19 nt, Homo sapiens
  misc_RNA (1)...(19): siRNA sense strand
gaaucagccuagcaaacug

SEQ ID NO: 33554 - RNA, 19 nt, Homo sapiens
  misc_RNA (1)...(19): siRNA sense strand
cuagcaaacuggauguguu

SEQ ID NO: 33555 - RNA, 19 nt, Homo sapiens
  misc_RNA (1)...(19): siRNA sense strand
gauuaugggauauuucaga

SEQ ID NO: 33556 - RNA, 19 nt, Homo sapiens
  misc_RNA (1)...(19): siRNA sense strand
gacagaagcacugauuaug

SEQ ID NO: 33557 - RNA, 19 nt, Homo sapiens
  misc_RNA (1)...(19): siRNA sense strand
gcacugauuaugggauauu

SEQ ID NO: 33558 - RNA, 19 nt, Homo sapiens
  misc_RNA (1)...(19): siRNA sense strand
agacagaagcacugauuau

SEQ ID NO: 33559 - RNA, 19 nt, Homo sapiens
  misc_RNA (1)...(19): siRNA sense strand
ccacaaggcauuagagcau

SEQ ID NO: 33560 - RNA, 19 nt, Homo sapiens
  misc_RNA (1)...(19): siRNA sense strand
cacacgagcuacaaacuac

SEQ ID NO: 33561 - RNA, 19 nt, Homo sapiens
  misc_RNA (1)...(19): siRNA sense strand
gagauguccgucaguaugu

SEQ ID NO: 33562 - RNA, 19 nt, Homo sapiens
  misc_RNA (1)...(19): siRNA sense strand
acacacgagcuacaaacua

SEQ ID NO: 33563 - RNA, 19 nt, Homo sapiens
  misc_RNA (1)...(19): siRNA sense strand
aaagaggguuguccgugau

SEQ ID NO: 33564 - RNA, 19 nt, Homo sapiens
  misc_RNA (1)...(19): siRNA sense strand
ggagaaaucguugucaaaa

SEQ ID NO: 33565 - RNA, 19 nt, Homo sapiens
  misc_RNA (1)...(19): siRNA sense strand
guucaagguuguggagugu

SEQ ID NO: 33566 - RNA, 19 nt, Homo sapiens
  misc_RNA (1)...(19): siRNA sense strand
ggugugaguuggccagaac

SEQ ID NO: 33567 - RNA, 19 nt, Homo sapiens
  misc_RNA (1)...(19): siRNA sense strand
gguuacaacacacgagcua

SEQ ID NO: 33568 - RNA, 19 nt, Homo sapiens
  misc_RNA (1)...(19): siRNA sense strand
gcuguagcuugugcaaaga

SEQ ID NO: 33569 - RNA, 19 nt, Homo sapiens
  misc_RNA (1)...(19): siRNA sense strand
cuuguccuccuuucuguua

SEQ ID NO: 33570 - RNA, 19 nt, Homo sapiens
  misc_RNA (1)...(19): siRNA sense strand
agagauguccgucaguaug

SEQ ID NO: 33571 - RNA, 19 nt, Homo sapiens
  misc_RNA (1)...(19): siRNA sense strand
agaaaucguugucaaaaca

SEQ ID NO: 33572 - RNA, 19 nt, Homo sapiens
  misc_RNA (1)...(19): siRNA sense strand
gagcaguuaaugccuguca

SEQ ID NO: 33573 - RNA, 19 nt, Homo sapiens
  misc_RNA (1)...(19): siRNA sense strand
caacacacgagcuacaaac

SEQ ID NO: 33574 - RNA, 19 nt, Homo sapiens
  misc_RNA (1)...(19): siRNA sense strand
gaaaagauugggaauggau

SEQ ID NO: 33575 - RNA, 19 nt, Homo sapiens
  misc_RNA (1)...(19): siRNA sense strand
gagcuacaaacuacaaugc

SEQ ID NO: 33576 - RNA, 19 nt, Homo sapiens
  misc_RNA (1)...(19): siRNA sense strand
uggagaaaucguugucaaa

SEQ ID NO: 33577 - RNA, 19 nt, Homo sapiens
  misc_RNA (1)...(19): siRNA sense strand
gggcuuguccuccuuucug

SEQ ID NO: 33578 - RNA, 19 nt, Homo sapiens
  misc_RNA (1)...(19): siRNA sense strand
ucaguauguucaagguugu

SEQ ID NO: 33579 - RNA, 19 nt, Homo sapiens
  misc_RNA (1)...(19): siRNA sense strand
acagaagcacugauuaugg

SEQ ID NO: 33580 - RNA, 19 nt, Homo sapiens
  misc_RNA (1)...(19): siRNA sense strand
ugggauauuucagaucaau

SEQ ID NO: 33581 - RNA, 19 nt, Homo sapiens
  misc_RNA (1)...(19): siRNA sense strand
ugcuguagcuugugcaaag

SEQ ID NO: 33582 - RNA, 19 nt, Homo sapiens
  misc_RNA (1)...(19): siRNA sense strand
cauuuauccugcagugcuu

SEQ ID NO: 33583 - RNA, 19 nt, Homo sapiens
  misc_RNA (1)...(19): siRNA sense strand
gggaaucagccuagcaaac

SEQ ID NO: 33584 - RNA, 19 nt, Homo sapiens
  misc_RNA (1)...(19): siRNA sense strand
gagaaaucguugucaaaac

SEQ ID NO: 33585 - RNA, 19 nt, Homo sapiens
  misc_RNA (1)...(19): siRNA sense strand
cacugauuaugggauauuu

SEQ ID NO: 33586 - RNA, 19 nt, Homo sapiens
  misc_RNA (1)...(19): siRNA sense strand
gcauggagaaaucguuguc

SEQ ID NO: 33587 - RNA, 19 nt, Homo sapiens
  misc_RNA (1)...(19): siRNA sense strand
ggaaugagcauguugauua

SEQ ID NO: 33588 - RNA, 19 nt, Homo sapiens
  misc_RNA (1)...(19): siRNA sense strand
ugaaagagcucauugacaa

SEQ ID NO: 33589 - RNA, 19 nt, Homo sapiens
  misc_RNA (1)...(19): siRNA sense strand
ggaaucccauugcauauuu

SEQ ID NO: 33590 - RNA, 19 nt, Homo sapiens
  misc_RNA (1)...(19): siRNA sense strand
gcacagagacugccacaaa

SEQ ID NO: 33591 - RNA, 19 nt, Homo sapiens
  misc_RNA (1)...(19): siRNA sense strand
gaauauggcguuaguguuu

SEQ ID NO: 33592 - RNA, 19 nt, Homo sapiens
  misc_RNA (1)...(19): siRNA sense strand
gaucaugacucaauaugga

SEQ ID NO: 33593 - RNA, 19 nt, Homo sapiens
  misc_RNA (1)...(19): siRNA sense strand
gcaaauacguaauuaaugc

SEQ ID NO: 33594 - RNA, 19 nt, Homo sapiens
  misc_RNA (1)...(19): siRNA sense strand
gaucggagguggcauuuca

SEQ ID NO: 33595 - RNA, 19 nt, Homo sapiens
  misc_RNA (1)...(19): siRNA sense strand
ggacaggguuggaggaaga

SEQ ID NO: 33596 - RNA, 19 nt, Homo sapiens
  misc_RNA (1)...(19): siRNA sense strand
ggaggaagaacauauacua

SEQ ID NO: 33597 - RNA, 19 nt, Homo sapiens
  misc_RNA (1)...(19): siRNA sense strand
gauauucucugucaccaau

SEQ ID NO: 33598 - RNA, 19 nt, Homo sapiens
  misc_RNA (1)...(19): siRNA sense strand
uagagacgcugaaccauga

SEQ ID NO: 33599 - RNA, 19 nt, Homo sapiens
  misc_RNA (1)...(19): siRNA sense strand
ccaagaagcuuuacaucca

SEQ ID NO: 33600 - RNA, 19 nt, Homo sapiens
  misc_RNA (1)...(19): siRNA sense strand
gagagaaaccaguuaauuc

SEQ ID NO: 33601 - RNA, 19 nt, Homo sapiens
  misc_RNA (1)...(19): siRNA sense strand
caagugagcgaacggauaa

SEQ ID NO: 33602 - RNA, 19 nt, Homo sapiens
  misc_RNA (1)...(19): siRNA sense strand
gcagagagaaaccaguuaa

SEQ ID NO: 33603 - RNA, 19 nt, Homo sapiens
  misc_RNA (1)...(19): siRNA sense strand
gccaaacucuugacugaau

SEQ ID NO: 33604 - RNA, 19 nt, Homo sapiens
  misc_RNA (1)...(19): siRNA sense strand
gcugaaccaugaacauuau

SEQ ID NO: 33605 - RNA, 19 nt, Homo sapiens
  misc_RNA (1)...(19): siRNA sense strand
gugagcgucucguucaaua

SEQ ID NO: 33606 - RNA, 19 nt, Homo sapiens
  misc_RNA (1)...(19): siRNA sense strand
acaagaaccugaaucaaag

SEQ ID NO: 33607 - RNA, 19 nt, Homo sapiens
  misc_RNA (1)...(19): siRNA sense strand
cuaaggagcugggcauaga

SEQ ID NO: 33608 - RNA, 19 nt, Homo sapiens
  misc_RNA (1)...(19): siRNA sense strand
aaaggaaccugcccucugu

SEQ ID NO: 33609 - RNA, 19 nt, Homo sapiens
  misc_RNA (1)...(19): siRNA sense strand
ccggaaagcugaucgacuu

SEQ ID NO: 33610 - RNA, 19 nt, Homo sapiens
  misc_RNA (1)...(19): siRNA sense strand
ggaagaagaaggauuacug

SEQ ID NO: 33611 - RNA, 19 nt, Homo sapiens
  misc_RNA (1)...(19): siRNA sense strand
gagugcaaauacguaauua

SEQ ID NO: 33612 - RNA, 19 nt, Homo sapiens
  misc_RNA (1)...(19): siRNA sense strand
ccaaacucuugacugaaua

SEQ ID NO: 33613 - RNA, 19 nt, Homo sapiens
  misc_RNA (1)...(19): siRNA sense strand
agaugaagaugcuccaauu

SEQ ID NO: 33614 - RNA, 19 nt, Homo sapiens
  misc_RNA (1)...(19): siRNA sense strand
gaaugagcauguugauuac

SEQ ID NO: 33615 - RNA, 19 nt, Homo sapiens
  misc_RNA (1)...(19): siRNA sense strand
gaagaagaaggauuacugu

SEQ ID NO: 33616 - RNA, 19 nt, Homo sapiens
  misc_RNA (1)...(19): siRNA sense strand
uacaagaaccugaaucaaa

SEQ ID NO: 33617 - RNA, 19 nt, Homo sapiens
  misc_RNA (1)...(19): siRNA sense strand
gaaagagcucauugacaaa

SEQ ID NO: 33618 - RNA, 19 nt, Homo sapiens
  misc_RNA (1)...(19): siRNA sense strand
ggaaauaaggaagaagaaa

SEQ ID NO: 33619 - RNA, 19 nt, Homo sapiens
  misc_RNA (1)...(19): siRNA sense strand
ucaauaaccuuggaugaca

SEQ ID NO: 33620 - RNA, 19 nt, Homo sapiens
  misc_RNA (1)...(19): siRNA sense strand
gggcauagagacuuacaaa

SEQ ID NO: 33621 - RNA, 19 nt, Homo sapiens
  misc_RNA (1)...(19): siRNA sense strand
ggaaggugaccgagaaaga

SEQ ID NO: 33622 - RNA, 19 nt, Homo sapiens
  misc_RNA (1)...(19): siRNA sense strand
cuagggaggucuuaaaugg

SEQ ID NO: 33623 - RNA, 19 nt, Homo sapiens
  misc_RNA (1)...(19): siRNA sense strand
gcauguugauuacguagau

SEQ ID NO: 33624 - RNA, 19 nt, Homo sapiens
  misc_RNA (1)...(19): siRNA sense strand
gaaaaucugugagcucuau

SEQ ID NO: 33625 - RNA, 19 nt, Homo sapiens
  misc_RNA (1)...(19): siRNA sense strand
gaugaagaugcuccaauuu

SEQ ID NO: 33626 - RNA, 19 nt, Homo sapiens
  misc_RNA (1)...(19): siRNA sense strand
gaagaugcuccaauuucaa

SEQ ID NO: 33627 - RNA, 19 nt, Homo sapiens
  misc_RNA (1)...(19): siRNA sense strand
gacaacaucaucauagaga

SEQ ID NO: 33628 - RNA, 19 nt, Homo sapiens
  misc_RNA (1)...(19): siRNA sense strand
gaaggagauuccaacugau

SEQ ID NO: 33629 - RNA, 19 nt, Homo sapiens
  misc_RNA (1)...(19): siRNA sense strand
gugacaacaucaucauaga

SEQ ID NO: 33630 - RNA, 19 nt, Homo sapiens
  misc_RNA (1)...(19): siRNA sense strand
gggcaccacucggauauuc

SEQ ID NO: 33631 - RNA, 19 nt, Homo sapiens
  misc_RNA (1)...(19): siRNA sense strand
ucaacaugcugacaaaugg

SEQ ID NO: 33632 - RNA, 19 nt, Homo sapiens
  misc_RNA (1)...(19): siRNA sense strand
uugcuaagcuacauaagga

SEQ ID NO: 33633 - RNA, 19 nt, Homo sapiens
  misc_RNA (1)...(19): siRNA sense strand
gacaaaaucugcuggacaa

SEQ ID NO: 33634 - RNA, 19 nt, Homo sapiens
  misc_RNA (1)...(19): siRNA sense strand
cugccaaacucuugacuga

SEQ ID NO: 33635 - RNA, 19 nt, Homo sapiens
  misc_RNA (1)...(19): siRNA sense strand
gagaccaagugaagcugaa

SEQ ID NO: 33636 - RNA, 19 nt, Homo sapiens
  misc_RNA (1)...(19): siRNA sense strand
gaaccugcccucuguuucu

SEQ ID NO: 33637 - RNA, 19 nt, Homo sapiens
  misc_RNA (1)...(19): siRNA sense strand
gaggaagaacauauacuau

SEQ ID NO: 33638 - RNA, 19 nt, Homo sapiens
  misc_RNA (1)...(19): siRNA sense strand
uaaauggucucgggaaggu

SEQ ID NO: 33639 - RNA, 19 nt, Homo sapiens
  misc_RNA (1)...(19): siRNA sense strand
gaugcuccaauuucaauaa

SEQ ID NO: 33640 - RNA, 19 nt, Homo sapiens
  misc_RNA (1)...(19): siRNA sense strand
ucuggaagaagaaggauua

SEQ ID NO: 33641 - RNA, 19 nt, Homo sapiens
  misc_RNA (1)...(19): siRNA sense strand
gaaucccauugcauauuug

SEQ ID NO: 33642 - RNA, 19 nt, Homo sapiens
  misc_RNA (1)...(19): siRNA sense strand
gagcgucucguucaauaug

SEQ ID NO: 33643 - RNA, 19 nt, Homo sapiens
  misc_RNA (1)...(19): siRNA sense strand
gaaucuuacgcuugucuaa

SEQ ID NO: 33644 - RNA, 19 nt, Homo sapiens
  misc_RNA (1)...(19): siRNA sense strand
agagaaaccaguuaauuca

SEQ ID NO: 33645 - RNA, 19 nt, Homo sapiens
  misc_RNA (1)...(19): siRNA sense strand
ccacucggauauucucugu

SEQ ID NO: 33646 - RNA, 19 nt, Homo sapiens
  misc_RNA (1)...(19): siRNA sense strand
gaaaucacccacaccuucu

SEQ ID NO: 33647 - RNA, 19 nt, Homo sapiens
  misc_RNA (1)...(19): siRNA sense strand
gguacaagaaccugaauca

SEQ ID NO: 33648 - RNA, 19 nt, Homo sapiens
  misc_RNA (1)...(19): siRNA sense strand
uauaaggaaugagcauguu

SEQ ID NO: 33649 - RNA, 19 nt, Homo sapiens
  misc_RNA (1)...(19): siRNA sense strand
agagagaaaccaguuaauu

SEQ ID NO: 33650 - RNA, 19 nt, Homo sapiens
  misc_RNA (1)...(19): siRNA sense strand
ucaagugagcgaacggaua

SEQ ID NO: 33651 - RNA, 19 nt, Homo sapiens
  misc_RNA (1)...(19): siRNA sense strand
aacagaaucuuacgcuugu

SEQ ID NO: 33652 - RNA, 19 nt, Homo sapiens
  misc_RNA (1)...(19): siRNA sense strand
gaaagcugaucgacuugcu

SEQ ID NO: 33653 - RNA, 19 nt, Homo sapiens
  misc_RNA (1)...(19): siRNA sense strand
caauuucaauaaccuugga

SEQ ID NO: 33654 - RNA, 19 nt, Homo sapiens
  misc_RNA (1)...(19): siRNA sense strand
uacauccagugcauuauga

SEQ ID NO: 33655 - RNA, 19 nt, Homo sapiens
  misc_RNA (1)...(19): siRNA sense strand
gcuaagcuacauaaggaaa

SEQ ID NO: 33656 - RNA, 19 nt, Homo sapiens
  misc_RNA (1)...(19): siRNA sense strand
caucaugggcuucauucuu

SEQ ID NO: 33657 - RNA, 19 nt, Homo sapiens
  misc_RNA (1)...(19): siRNA sense strand
uaaggaaugagcauguuga

SEQ ID NO: 33658 - RNA, 19 nt, Homo sapiens
  misc_RNA (1)...(19): siRNA sense strand
gcuaggcgguuugcuuauc

SEQ ID NO: 33659 - RNA, 19 nt, Homo sapiens
  misc_RNA (1)...(19): siRNA sense strand
aggacuaucugcugccaaa

SEQ ID NO: 33660 - RNA, 19 nt, Homo sapiens
  misc_RNA (1)...(19): siRNA sense strand
guuggaggaagaacauaua

SEQ ID NO: 33661 - RNA, 19 nt, Homo sapiens
  misc_RNA (1)...(19): siRNA sense strand
acucggauauucucuguca

SEQ ID NO: 33662 - RNA, 19 nt, Homo sapiens
  misc_RNA (1)...(19): siRNA sense strand
cagcagagagaaaccaguu

SEQ ID NO: 33663 - RNA, 19 nt, Homo sapiens
  misc_RNA (1)...(19): siRNA sense strand
ggaagaagaaaaucuguga

SEQ ID NO: 33664 - RNA, 19 nt, Homo sapiens
  misc_RNA (1)...(19): siRNA sense strand
cauaaggaaauaaggaaga

SEQ ID NO: 33665 - RNA, 19 nt, Homo sapiens
  misc_RNA (1)...(19): siRNA sense strand
cuacauaaggaaauaagga

SEQ ID NO: 33666 - RNA, 19 nt, Homo sapiens
  misc_RNA (1)...(19): siRNA sense strand
ugagcauguugauuacgua

SEQ ID NO: 33667 - RNA, 19 nt, Homo sapiens
  misc_RNA (1)...(19): siRNA sense strand
gcugcaugaucauugaaga

SEQ ID NO: 33668 - RNA, 19 nt, Homo sapiens
  misc_RNA (1)...(19): siRNA sense strand
ggggaaaacauauccauuu

SEQ ID NO: 33669 - RNA, 19 nt, Homo sapiens
  misc_RNA (1)...(19): siRNA sense strand
gacugaauauggcguuagu

SEQ ID NO: 33670 - RNA, 19 nt, Homo sapiens
  misc_RNA (1)...(19): siRNA sense strand
gagcugucauuaagugcau

SEQ ID NO: 33671 - RNA, 19 nt, Homo sapiens
  misc_RNA (1)...(19): siRNA sense strand
cugcuaggcgguuugcuua

SEQ ID NO: 33672 - RNA, 19 nt, Homo sapiens
  misc_RNA (1)...(19): siRNA sense strand
acaaagugaaugucaguga

SEQ ID NO: 33673 - RNA, 19 nt, Homo sapiens
  misc_RNA (1)...(19): siRNA sense strand
gcugaagaucauuggauuu

SEQ ID NO: 33674 - RNA, 19 nt, Homo sapiens
  misc_RNA (1)...(19): siRNA sense strand
guacaagaaccugaaucaa

SEQ ID NO: 33675 - RNA, 19 nt, Homo sapiens
  misc_RNA (1)...(19): siRNA sense strand
cacagagacugccacaaag

SEQ ID NO: 33676 - RNA, 19 nt, Homo sapiens
  misc_RNA (1)...(19): siRNA sense strand
aucaugggcuucauucuug

SEQ ID NO: 33677 - RNA, 19 nt, Homo sapiens
  misc_RNA (1)...(19): siRNA sense strand
ugagugcaaauacguaauu

SEQ ID NO: 33678 - RNA, 19 nt, Homo sapiens
  misc_RNA (1)...(19): siRNA sense strand
gaacauuaugagugcaaau

SEQ ID NO: 33679 - RNA, 19 nt, Homo sapiens
  misc_RNA (1)...(19): siRNA sense strand
guagguggaucuggucaag

SEQ ID NO: 33680 - RNA, 19 nt, Homo sapiens
  misc_RNA (1)...(19): siRNA sense strand
ccauugcauauuuggauua

SEQ ID NO: 33681 - RNA, 19 nt, Homo sapiens
  misc_RNA (1)...(19): siRNA sense strand
ucagugagcgucucguuca

SEQ ID NO: 33682 - RNA, 19 nt, Homo sapiens
  misc_RNA (1)...(19): siRNA sense strand
cagcuagggaggucuuaaa

SEQ ID NO: 33683 - RNA, 19 nt, Homo sapiens
  misc_RNA (1)...(19): siRNA sense strand
aaaaucugcuggacaaaga

SEQ ID NO: 33684 - RNA, 19 nt, Homo sapiens
  misc_RNA (1)...(19): siRNA sense strand
gcuagggaggucuuaaaug

SEQ ID NO: 33685 - RNA, 19 nt, Homo sapiens
  misc_RNA (1)...(19): siRNA sense strand
caagagaaggcgaguaucg

SEQ ID NO: 33686 - RNA, 19 nt, Homo sapiens
  misc_RNA (1)...(19): siRNA sense strand
aaagacugcuaggcgguuu

SEQ ID NO: 33687 - RNA, 19 nt, Homo sapiens
  misc_RNA (1)...(19): siRNA sense strand
ccaggaagcuuguauuuua

SEQ ID NO: 33688 - RNA, 19 nt, Homo sapiens
  misc_RNA (1)...(19): siRNA sense strand
ccaaguaccuggacgaaga

SEQ ID NO: 33689 - RNA, 19 nt, Homo sapiens
  misc_RNA (1)...(19): siRNA sense strand
gcaacgugcugguggcuuu

SEQ ID NO: 33690 - RNA, 19 nt, Homo sapiens
  misc_RNA (1)...(19): siRNA sense strand
ggacagaaaugaggaggau

SEQ ID NO: 33691 - RNA, 19 nt, Homo sapiens
  misc_RNA (1)...(19): siRNA sense strand
ggagagggacacccggaua

SEQ ID NO: 33692 - RNA, 19 nt, Homo sapiens
  misc_RNA (1)...(19): siRNA sense strand
gaaccucucagaagacaga

SEQ ID NO: 33693 - RNA, 19 nt, Homo sapiens
  misc_RNA (1)...(19): siRNA sense strand
gaaggacuacaccaaggua

SEQ ID NO: 33694 - RNA, 19 nt, Homo sapiens
  misc_RNA (1)...(19): siRNA sense strand
gagcagcaauccccagaua

SEQ ID NO: 33695 - RNA, 19 nt, Homo sapiens
  misc_RNA (1)...(19): siRNA sense strand
gagagggacacccggauaa

SEQ ID NO: 33696 - RNA, 19 nt, Homo sapiens
  misc_RNA (1)...(19): siRNA sense strand
ggccaagucucuggugaaa

SEQ ID NO: 33697 - RNA, 19 nt, Homo sapiens
  misc_RNA (1)...(19): siRNA sense strand
gagagugcuuguccagguu

SEQ ID NO: 33698 - RNA, 19 nt, Homo sapiens
  misc_RNA (1)...(19): siRNA sense strand
caauggccaugguggacua

SEQ ID NO: 33699 - RNA, 19 nt, Homo sapiens
  misc_RNA (1)...(19): siRNA sense strand
ccaagucucuggugaaagc

SEQ ID NO: 33700 - RNA, 19 nt, Homo sapiens
  misc_RNA (1)...(19): siRNA sense strand
gucacuggccguaagauua

SEQ ID NO: 33701 - RNA, 19 nt, Homo sapiens
  misc_RNA (1)...(19): siRNA sense strand
gccaagggcuuugacuuca

SEQ ID NO: 33702 - RNA, 19 nt, Homo sapiens
  misc_RNA (1)...(19): siRNA sense strand
ccauuuccaucuucaccua

SEQ ID NO: 33703 - RNA, 19 nt, Homo sapiens
  misc_RNA (1)...(19): siRNA sense strand
ugaagaagcccaucuacca

SEQ ID NO: 33704 - RNA, 19 nt, Homo sapiens
  misc_RNA (1)...(19): siRNA sense strand
ucagggauuuggacuugaa

SEQ ID NO: 33705 - RNA, 19 nt, Homo sapiens
  misc_RNA (1)...(19): siRNA sense strand
agacucaggugacaguuca

SEQ ID NO: 33706 - RNA, 19 nt, Homo sapiens
  misc_RNA (1)...(19): siRNA sense strand
ggacaauggcgcagucauc

SEQ ID NO: 33707 - RNA, 19 nt, Homo sapiens
  misc_RNA (1)...(19): siRNA sense strand
caagguggccugugagaca

SEQ ID NO: 33708 - RNA, 19 nt, Homo sapiens
  misc_RNA (1)...(19): siRNA sense strand
cuacggccauuucggaaga

SEQ ID NO: 33709 - RNA, 19 nt, Homo sapiens
  misc_RNA (1)...(19): siRNA sense strand
uacggaaccucucagaaga

SEQ ID NO: 33710 - RNA, 19 nt, Homo sapiens
  misc_RNA (1)...(19): siRNA sense strand
ggcaggagaucaggguuug

SEQ ID NO: 33711 - RNA, 19 nt, Homo sapiens
  misc_RNA (1)...(19): siRNA sense strand
ugucagggauuuggacuug

SEQ ID NO: 33712 - RNA, 19 nt, Homo sapiens
  misc_RNA (1)...(19): siRNA sense strand
ggugacaguucaguacaug

SEQ ID NO: 33713 - RNA, 19 nt, Homo sapiens
  misc_RNA (1)...(19): siRNA sense strand
ucacuggccguaagauuau

SEQ ID NO: 33714 - RNA, 19 nt, Homo sapiens
  misc_RNA (1)...(19): siRNA sense strand
uggauguggugcauaagaa

SEQ ID NO: 33715 - RNA, 19 nt, Homo sapiens
  misc_RNA (1)...(19): siRNA sense strand
ccgagccgcuguccauuuc

SEQ ID NO: 33716 - RNA, 19 nt, Homo sapiens
  misc_RNA (1)...(19): siRNA sense strand
agcgagagcugcuggaugu

SEQ ID NO: 33717 - RNA, 19 nt, Homo sapiens
  misc_RNA (1)...(19): siRNA sense strand
gggcaggagaucaggguuu

SEQ ID NO: 33718 - RNA, 19 nt, Homo sapiens
  misc_RNA (1)...(19): siRNA sense strand
agaagcccaucuaccagaa

SEQ ID NO: 33719 - RNA, 19 nt, Homo sapiens
  misc_RNA (1)...(19): siRNA sense strand
cuacggaaccucucagaag

SEQ ID NO: 33720 - RNA, 19 nt, Homo sapiens
  misc_RNA (1)...(19): siRNA sense strand
guagaccgcucagcugcau

SEQ ID NO: 33721 - RNA, 19 nt, Homo sapiens
  misc_RNA (1)...(19): siRNA sense strand
gagggacacccggauaaga

SEQ ID NO: 33722 - RNA, 19 nt, Homo sapiens
  misc_RNA (1)...(19): siRNA sense strand
gggauuuggacuugaagaa

SEQ ID NO: 33723 - RNA, 19 nt, Homo sapiens
  misc_RNA (1)...(19): siRNA sense strand
ggaaggacuacaccaaggu

SEQ ID NO: 33724 - RNA, 19 nt, Homo sapiens
  misc_RNA (1)...(19): siRNA sense strand
gcagcaauccccagauauu

SEQ ID NO: 33725 - RNA, 19 nt, Homo sapiens
  misc_RNA (1)...(19): siRNA sense strand
ccagguuuccuaugccauu

SEQ ID NO: 33726 - RNA, 19 nt, Homo sapiens
  misc_RNA (1)...(19): siRNA sense strand
gccgagccgcuguccauuu

SEQ ID NO: 33727 - RNA, 19 nt, Homo sapiens
  misc_RNA (1)...(19): siRNA sense strand
ugcuggauguggugcauaa

SEQ ID NO: 33728 - RNA, 19 nt, Homo sapiens
  misc_RNA (1)...(19): siRNA sense strand
ucaagcacaucggcuacga

SEQ ID NO: 33729 - RNA, 19 nt, Homo sapiens
  misc_RNA (1)...(19): siRNA sense strand
gcuguccauuuccaucuuc

SEQ ID NO: 33730 - RNA, 19 nt, Homo sapiens
  misc_RNA (1)...(19): siRNA sense strand
ccgcucagcugcauaugcu

SEQ ID NO: 33731 - RNA, 19 nt, Homo sapiens
  misc_RNA (1)...(19): siRNA sense strand
acagaaaugaggaggaugu

SEQ ID NO: 33732 - RNA, 19 nt, Homo sapiens
  misc_RNA (1)...(19): siRNA sense strand
aagcccaucuaccagaaga

SEQ ID NO: 33733 - RNA, 19 nt, Homo sapiens
  misc_RNA (1)...(19): siRNA sense strand
gguuugauguucggcuaug

SEQ ID NO: 33734 - RNA, 19 nt, Homo sapiens
  misc_RNA (1)...(19): siRNA sense strand
ucccaggaagcuuguauuu

SEQ ID NO: 33735 - RNA, 19 nt, Homo sapiens
  misc_RNA (1)...(19): siRNA sense strand
gcagcacaacgaagacauc

SEQ ID NO: 33736 - RNA, 19 nt, Homo sapiens
  misc_RNA (1)...(19): siRNA sense strand
gugcugcuguguggugaga

SEQ ID NO: 33737 - RNA, 19 nt, Homo sapiens
  misc_RNA (1)...(19): siRNA sense strand
gagccgcuguccauuucca

SEQ ID NO: 33738 - RNA, 19 nt, Homo sapiens
  misc_RNA (1)...(19): siRNA sense strand
agauuauuguggacaccua

SEQ ID NO: 33739 - RNA, 19 nt, Homo sapiens
  misc_RNA (1)...(19): siRNA sense strand
gggacaccaucaagcacau

SEQ ID NO: 33740 - RNA, 19 nt, Homo sapiens
  misc_RNA (1)...(19): siRNA sense strand
acaucacgcuggaggagau

SEQ ID NO: 33741 - RNA, 19 nt, Homo sapiens
  misc_RNA (1)...(19): siRNA sense strand
ggauuuggacuugaagaag

SEQ ID NO: 33742 - RNA, 19 nt, Homo sapiens
  misc_RNA (1)...(19): siRNA sense strand
cggaaccucucagaagaca

SEQ ID NO: 33743 - RNA, 19 nt, Homo sapiens
  misc_RNA (1)...(19): siRNA sense strand
gcugcuguguggugagauc

SEQ ID NO: 33744 - RNA, 19 nt, Homo sapiens
  misc_RNA (1)...(19): siRNA sense strand
ccaucauccuugcucacaa

SEQ ID NO: 33745 - RNA, 19 nt, Homo sapiens
  misc_RNA (1)...(19): siRNA sense strand
ugagggacaccaucaagca

SEQ ID NO: 33746 - RNA, 19 nt, Homo sapiens
  misc_RNA (1)...(19): siRNA sense strand
ggccugacucuaagacuca

SEQ ID NO: 33747 - RNA, 19 nt, Homo sapiens
  misc_RNA (1)...(19): siRNA sense strand
ggcugcggccugacucuaa

SEQ ID NO: 33748 - RNA, 19 nt, Homo sapiens
  misc_RNA (1)...(19): siRNA sense strand
gcugcggccugacucuaag

SEQ ID NO: 33749 - RNA, 19 nt, Homo sapiens
  misc_RNA (1)...(19): siRNA sense strand
cagguuuccuaugccauug

SEQ ID NO: 33750 - RNA, 19 nt, Homo sapiens
  misc_RNA (1)...(19): siRNA sense strand
gggugucacuggccguaag

SEQ ID NO: 33751 - RNA, 19 nt, Homo sapiens
  misc_RNA (1)...(19): siRNA sense strand
aaacagaaauggcacguau

SEQ ID NO: 33752 - RNA, 19 nt, Homo sapiens
  misc_RNA (1)...(19): siRNA sense strand
ugaugaagauuguguauug

SEQ ID NO: 33753 - RNA, 19 nt, Homo sapiens
  misc_RNA (1)...(19): siRNA sense strand
gaaauagacugaccuacac

SEQ ID NO: 33754 - RNA, 19 nt, Homo sapiens
  misc_RNA (1)...(19): siRNA sense strand
gcaaacaaguugggaacaa

SEQ ID NO: 33755 - RNA, 19 nt, Homo sapiens
  misc_RNA (1)...(19): siRNA sense strand
ggaaauagacugaccuaca

SEQ ID NO: 33756 - RNA, 19 nt, Homo sapiens
  misc_RNA (1)...(19): siRNA sense strand
caacaaugcugguucugau

SEQ ID NO: 33757 - RNA, 19 nt, Homo sapiens
  misc_RNA (1)...(19): siRNA sense strand
cagaaacugugaccuguga

SEQ ID NO: 33758 - RNA, 19 nt, Homo sapiens
  misc_RNA (1)...(19): siRNA sense strand
gaagacagaagggcaguuu

SEQ ID NO: 33759 - RNA, 19 nt, Homo sapiens
  misc_RNA (1)...(19): siRNA sense strand
gugaaggccuuguguguca

SEQ ID NO: 33760 - RNA, 19 nt, Homo sapiens
  misc_RNA (1)...(19): siRNA sense strand
gauuguguauugcuacuga

SEQ ID NO: 33761 - RNA, 19 nt, Homo sapiens
  misc_RNA (1)...(19): siRNA sense strand
agaaauggcacguaucaaa

SEQ ID NO: 33762 - RNA, 19 nt, Homo sapiens
  misc_RNA (1)...(19): siRNA sense strand
gugaaauaaugaccuuuga

SEQ ID NO: 33763 - RNA, 19 nt, Homo sapiens
  misc_RNA (1)...(19): siRNA sense strand
caggaaugcugcagagaau

SEQ ID NO: 33764 - RNA, 19 nt, Homo sapiens
  misc_RNA (1)...(19): siRNA sense strand
ugaagauuguguauugcua

SEQ ID NO: 33765 - RNA, 19 nt, Homo sapiens
  misc_RNA (1)...(19): siRNA sense strand
gaccuucucucugggcaaa

SEQ ID NO: 33766 - RNA, 19 nt, Homo sapiens
  misc_RNA (1)...(19): siRNA sense strand
agacugaccuacacaaacu

SEQ ID NO: 33767 - RNA, 19 nt, Homo sapiens
  misc_RNA (1)...(19): siRNA sense strand
gaaauggcacguaucaaaa

SEQ ID NO: 33768 - RNA, 19 nt, Homo sapiens
  misc_RNA (1)...(19): siRNA sense strand
caaacaaguugggaacaag

SEQ ID NO: 33769 - RNA, 19 nt, Homo sapiens
  misc_RNA (1)...(19): siRNA sense strand
ggcagcgucuuacucagaa

SEQ ID NO: 33770 - RNA, 19 nt, Homo sapiens
  misc_RNA (1)...(19): siRNA sense strand
ggugaaauaaugaccuuug

SEQ ID NO: 33771 - RNA, 19 nt, Homo sapiens
  misc_RNA (1)...(19): siRNA sense strand
gaaagaaaagcucugcaaa

SEQ ID NO: 33772 - RNA, 19 nt, Homo sapiens
  misc_RNA (1)...(19): siRNA sense strand
uucagaaucucaucaagga

SEQ ID NO: 33773 - RNA, 19 nt, Homo sapiens
  misc_RNA (1)...(19): siRNA sense strand
ccaggaaugcugcagagaa

SEQ ID NO: 33774 - RNA, 19 nt, Homo sapiens
  misc_RNA (1)...(19): siRNA sense strand
ggaaugcugcagagaaugg

SEQ ID NO: 33775 - RNA, 19 nt, Homo sapiens
  misc_RNA (1)...(19): siRNA sense strand
caaugcugguucugaugaa

SEQ ID NO: 33776 - RNA, 19 nt, Homo sapiens
  misc_RNA (1)...(19): siRNA sense strand
ucacugaugagaagacaga

SEQ ID NO: 33777 - RNA, 19 nt, Homo sapiens
  misc_RNA (1)...(19): siRNA sense strand
acagaaauggcacguauca

SEQ ID NO: 33778 - RNA, 19 nt, Homo sapiens
  misc_RNA (1)...(19): siRNA sense strand
ggaaauccagggccuucug

SEQ ID NO: 33779 - RNA, 19 nt, Homo sapiens
  misc_RNA (1)...(19): siRNA sense strand
caacggcuucccaggcaaa

SEQ ID NO: 33780 - RNA, 19 nt, Homo sapiens
  misc_RNA (1)...(19): siRNA sense strand
ccaacaaugcugguucuga

SEQ ID NO: 33781 - RNA, 19 nt, Homo sapiens
  misc_RNA (1)...(19): siRNA sense strand
gguggcagcgucuuacuca

SEQ ID NO: 33782 - RNA, 19 nt, Homo sapiens
  misc_RNA (1)...(19): siRNA sense strand
guaugguggcagcgucuua

SEQ ID NO: 33783 - RNA, 19 nt, Homo sapiens
  misc_RNA (1)...(19): siRNA sense strand
aagaaaagcucugcaaaca

SEQ ID NO: 33784 - RNA, 19 nt, Homo sapiens
  misc_RNA (1)...(19): siRNA sense strand
aaaaggagacccuggaaaa

SEQ ID NO: 33785 - RNA, 19 nt, Homo sapiens
  misc_RNA (1)...(19): siRNA sense strand
ccaagggcucagaggcuua

SEQ ID NO: 33786 - RNA, 19 nt, Homo sapiens
  misc_RNA (1)...(19): siRNA sense strand
gaucugacaggaaauagac

SEQ ID NO: 33787 - RNA, 19 nt, Homo sapiens
  misc_RNA (1)...(19): siRNA sense strand
agacagaagggcaguuugu

SEQ ID NO: 33788 - RNA, 19 nt, Homo sapiens
  misc_RNA (1)...(19): siRNA sense strand
gcagcgucuuacucagaaa

SEQ ID NO: 33789 - RNA, 19 nt, Homo sapiens
  misc_RNA (1)...(19): siRNA sense strand
ggaucugacaggaaauaga

SEQ ID NO: 33790 - RNA, 19 nt, Homo sapiens
  misc_RNA (1)...(19): siRNA sense strand
uuguggaucugacaggaaa

SEQ ID NO: 33791 - RNA, 19 nt, Homo sapiens
  misc_RNA (1)...(19): siRNA sense strand
gaugaagauuguguauugc

SEQ ID NO: 33792 - RNA, 19 nt, Homo sapiens
  misc_RNA (1)...(19): siRNA sense strand
acaaugcugguucugauga

SEQ ID NO: 33793 - RNA, 19 nt, Homo sapiens
  misc_RNA (1)...(19): siRNA sense strand
cugcagugauugccuguag

SEQ ID NO: 33794 - RNA, 19 nt, Homo sapiens
  misc_RNA (1)...(19): siRNA sense strand
caggaaauagacugaccua

SEQ ID NO: 33795 - RNA, 19 nt, Homo sapiens
  misc_RNA (1)...(19): siRNA sense strand
guggaucugacaggaaaua

SEQ ID NO: 33796 - RNA, 19 nt, Homo sapiens
  misc_RNA (1)...(19): siRNA sense strand
caaacagaaauggcacgua

SEQ ID NO: 33797 - RNA, 19 nt, Homo sapiens
  misc_RNA (1)...(19): siRNA sense strand
ugaccuacacaaacuggaa

SEQ ID NO: 33798 - RNA, 19 nt, Homo sapiens
  misc_RNA (1)...(19): siRNA sense strand
aaaaguggcugaccuucuc

SEQ ID NO: 33799 - RNA, 19 nt, Homo sapiens
  misc_RNA (1)...(19): siRNA sense strand
ucucugggcaaacaaguug

SEQ ID NO: 33800 - RNA, 19 nt, Homo sapiens
  misc_RNA (1)...(19): siRNA sense strand
caacacagcaagaaauaau

SEQ ID NO: 33801 - RNA, 19 nt, Homo sapiens
  misc_RNA (1)...(19): siRNA sense strand
caacaacacagcaagaaau

SEQ ID NO: 33802 - RNA, 19 nt, Homo sapiens
  misc_RNA (1)...(19): siRNA sense strand
caucaucgacucccuguuu

SEQ ID NO: 33803 - RNA, 19 nt, Homo sapiens
  misc_RNA (1)...(19): siRNA sense strand
gcucagggacgcauucaaa

SEQ ID NO: 33804 - RNA, 19 nt, Homo sapiens
  misc_RNA (1)...(19): siRNA sense strand
cgacuguccucgugugguu

SEQ ID NO: 33805 - RNA, 19 nt, Homo sapiens
  misc_RNA (1)...(19): siRNA sense strand
ggacuggcaucaccauggu

SEQ ID NO: 33806 - RNA, 19 nt, Homo sapiens
  misc_RNA (1)...(19): siRNA sense strand
gaucuucucccaucaugug

SEQ ID NO: 33807 - RNA, 19 nt, Homo sapiens
  misc_RNA (1)...(19): siRNA sense strand
uggcuguguucaagaauaa

SEQ ID NO: 33808 - RNA, 19 nt, Homo sapiens
  misc_RNA (1)...(19): siRNA sense strand
gaucauauugagaaacaug

SEQ ID NO: 33809 - RNA, 19 nt, Homo sapiens
  misc_RNA (1)...(19): siRNA sense strand
aaacaugggcuaucucaag

SEQ ID NO: 33810 - RNA, 19 nt, Homo sapiens
  misc_RNA (1)...(19): siRNA sense strand
ugagaaacaugggcuaucu

SEQ ID NO: 33811 - RNA, 19 nt, Homo sapiens
  misc_RNA (1)...(19): siRNA sense strand
cuacugcgccugcuacaug

SEQ ID NO: 33812 - RNA, 19 nt, Homo sapiens
  misc_RNA (1)...(19): siRNA sense strand
aacaacacagcaagaaaua

SEQ ID NO: 33813 - RNA, 19 nt, Homo sapiens
  misc_RNA (1)...(19): siRNA sense strand
cugcuuggcuccaucuuca

SEQ ID NO: 33814 - RNA, 19 nt, Homo sapiens
  misc_RNA (1)...(19): siRNA sense strand
aagaaauaauuccgacugu

SEQ ID NO: 33815 - RNA, 19 nt, Homo sapiens
  misc_RNA (1)...(19): siRNA sense strand
cagccuauauaagaucuug

SEQ ID NO: 33816 - RNA, 19 nt, Homo sapiens
  misc_RNA (1)...(19): siRNA sense strand
cugaucauauugagaaaca

SEQ ID NO: 33817 - RNA, 19 nt, Homo sapiens
  misc_RNA (1)...(19): siRNA sense strand
ucaacaacacagcaagaaa

SEQ ID NO: 33818 - RNA, 19 nt, Homo sapiens
  misc_RNA (1)...(19): siRNA sense strand
gcacauuaucaacucguau

SEQ ID NO: 33819 - RNA, 19 nt, Homo sapiens
  misc_RNA (1)...(19): siRNA sense strand
gugaacggcauguugauca

SEQ ID NO: 33820 - RNA, 19 nt, Homo sapiens
  misc_RNA (1)...(19): siRNA sense strand
ccaggugaacggcauguug

SEQ ID NO: 33821 - RNA, 19 nt, Homo sapiens
  misc_RNA (1)...(19): siRNA sense strand
caggugaacggcauguuga

SEQ ID NO: 33822 - RNA, 19 nt, Homo sapiens
  misc_RNA (1)...(19): siRNA sense strand
acacagcaagaaauaauuc

SEQ ID NO: 33823 - RNA, 19 nt, Homo sapiens
  misc_RNA (1)...(19): siRNA sense strand
caucaacaacacagcaaga

SEQ ID NO: 33824 - RNA, 19 nt, Homo sapiens
  misc_RNA (1)...(19): siRNA sense strand
gaaacaugggcuaucucaa

SEQ ID NO: 33825 - RNA, 19 nt, Homo sapiens
  misc_RNA (1)...(19): siRNA sense strand
cuggcuguguucaagaaua

SEQ ID NO: 33826 - RNA, 19 nt, Homo sapiens
  misc_RNA (1)...(19): siRNA sense strand
guagcuuggccauaucuga

SEQ ID NO: 33827 - RNA, 19 nt, Homo sapiens
  misc_RNA (1)...(19): siRNA sense strand
cugggcagccuauauaaga

SEQ ID NO: 33828 - RNA, 19 nt, Homo sapiens
  misc_RNA (1)...(19): siRNA sense strand
ccaggcacccauguacuuu

SEQ ID NO: 33829 - RNA, 19 nt, Homo sapiens
  misc_RNA (1)...(19): siRNA sense strand
ugacauucugcccaaguaa

SEQ ID NO: 33830 - RNA, 19 nt, Homo sapiens
  misc_RNA (1)...(19): siRNA sense strand
agaaacaugggcuaucuca

SEQ ID NO: 33831 - RNA, 19 nt, Homo sapiens
  misc_RNA (1)...(19): siRNA sense strand
ccacguggcaguuuugaaa

SEQ ID NO: 33832 - RNA, 19 nt, Homo sapiens
  misc_RNA (1)...(19): siRNA sense strand
ucauugaccccuucauaua

SEQ ID NO: 33833 - RNA, 19 nt, Homo sapiens
  misc_RNA (1)...(19): siRNA sense strand
ugaacggcauguugaucau

SEQ ID NO: 33834 - RNA, 19 nt, Homo sapiens
  misc_RNA (1)...(19): siRNA sense strand
caacucguaugaaaacauc

SEQ ID NO: 33835 - RNA, 19 nt, Homo sapiens
  misc_RNA (1)...(19): siRNA sense strand
augacauucugcccaagua

SEQ ID NO: 33836 - RNA, 19 nt, Homo sapiens
  misc_RNA (1)...(19): siRNA sense strand
gaugacauucugcccaagu

SEQ ID NO: 33837 - RNA, 19 nt, Homo sapiens
  misc_RNA (1)...(19): siRNA sense strand
ggaaaauauccugaucaua

SEQ ID NO: 33838 - RNA, 19 nt, Homo sapiens
  misc_RNA (1)...(19): siRNA sense strand
gaagaggcauauucaguuu

SEQ ID NO: 33839 - RNA, 19 nt, Homo sapiens
  misc_RNA (1)...(19): siRNA sense strand
caauuaaggugugggauua

SEQ ID NO: 33840 - RNA, 19 nt, Homo sapiens
  misc_RNA (1)...(19): siRNA sense strand
cagcguagaucaaacagua

SEQ ID NO: 33841 - RNA, 19 nt, Homo sapiens
  misc_RNA (1)...(19): siRNA sense strand
aaaggaagcugaauuagau

SEQ ID NO: 33842 - RNA, 19 nt, Homo sapiens
  misc_RNA (1)...(19): siRNA sense strand
ggaauuagaaucaaagcua

SEQ ID NO: 33843 - RNA, 19 nt, Homo sapiens
  misc_RNA (1)...(19): siRNA sense strand
caaacuggcuacuguguga

SEQ ID NO: 33844 - RNA, 19 nt, Homo sapiens
  misc_RNA (1)...(19): siRNA sense strand
caauggagaucauauagug

SEQ ID NO: 33845 - RNA, 19 nt, Homo sapiens
  misc_RNA (1)...(19): siRNA sense strand
ccacaauguuucuucagua

SEQ ID NO: 33846 - RNA, 19 nt, Homo sapiens
  misc_RNA (1)...(19): siRNA sense strand
ugaacuaaaucgagcuaua

SEQ ID NO: 33847 - RNA, 19 nt, Homo sapiens
  misc_RNA (1)...(19): siRNA sense strand
ugaacgaacucuuaaagga

SEQ ID NO: 33848 - RNA, 19 nt, Homo sapiens
  misc_RNA (1)...(19): siRNA sense strand
cugcagauaugaccauuaa

SEQ ID NO: 33849 - RNA, 19 nt, Homo sapiens
  misc_RNA (1)...(19): siRNA sense strand
cauccuguguucaguguua

SEQ ID NO: 33850 - RNA, 19 nt, Homo sapiens
  misc_RNA (1)...(19): siRNA sense strand
acaacgagaugaacuaaau

SEQ ID NO: 33851 - RNA, 19 nt, Homo sapiens
  misc_RNA (1)...(19): siRNA sense strand
gaagcugaauuagauguga

SEQ ID NO: 33852 - RNA, 19 nt, Homo sapiens
  misc_RNA (1)...(19): siRNA sense strand
agacaagacuauuaagaug

SEQ ID NO: 33853 - RNA, 19 nt, Homo sapiens
  misc_RNA (1)...(19): siRNA sense strand
caacaggaucugagacuaa

SEQ ID NO: 33854 - RNA, 19 nt, Homo sapiens
  misc_RNA (1)...(19): siRNA sense strand
gcacggccaugaccacaau

SEQ ID NO: 33855 - RNA, 19 nt, Homo sapiens
  misc_RNA (1)...(19): siRNA sense strand
gcaacaggaucugagacua

SEQ ID NO: 33856 - RNA, 19 nt, Homo sapiens
  misc_RNA (1)...(19): siRNA sense strand
ccagagacaagacuauuaa

SEQ ID NO: 33857 - RNA, 19 nt, Homo sapiens
  misc_RNA (1)...(19): siRNA sense strand
gaacuaaaucgagcuauag

SEQ ID NO: 33858 - RNA, 19 nt, Homo sapiens
  misc_RNA (1)...(19): siRNA sense strand
gagacaagacuauuaagau

SEQ ID NO: 33859 - RNA, 19 nt, Homo sapiens
  misc_RNA (1)...(19): siRNA sense strand
ccagaaagcucauauuccu

SEQ ID NO: 33860 - RNA, 19 nt, Homo sapiens
  misc_RNA (1)...(19): siRNA sense strand
cagaggaugcuacaauuaa

SEQ ID NO: 33861 - RNA, 19 nt, Homo sapiens
  misc_RNA (1)...(19): siRNA sense strand
gacaagacccuacgcguau

SEQ ID NO: 33862 - RNA, 19 nt, Homo sapiens
  misc_RNA (1)...(19): siRNA sense strand
caagauggcacucugauag

SEQ ID NO: 33863 - RNA, 19 nt, Homo sapiens
  misc_RNA (1)...(19): siRNA sense strand
gcuacugugugaagacauu

SEQ ID NO: 33864 - RNA, 19 nt, Homo sapiens
  misc_RNA (1)...(19): siRNA sense strand
caaugcgcaugaacacuuu

SEQ ID NO: 33865 - RNA, 19 nt, Homo sapiens
  misc_RNA (1)...(19): siRNA sense strand
uaaaggacauacagacucu

SEQ ID NO: 33866 - RNA, 19 nt, Homo sapiens
  misc_RNA (1)...(19): siRNA sense strand
gaaacgagacccaaaagaa

SEQ ID NO: 33867 - RNA, 19 nt, Homo sapiens
  misc_RNA (1)...(19): siRNA sense strand
gaacaagcgaugcaugaag

SEQ ID NO: 33868 - RNA, 19 nt, Homo sapiens
  misc_RNA (1)...(19): siRNA sense strand
ggaguucuguuccauucug

SEQ ID NO: 33869 - RNA, 19 nt, Homo sapiens
  misc_RNA (1)...(19): siRNA sense strand
ucagaggaugcuacaauua

SEQ ID NO: 33870 - RNA, 19 nt, Homo sapiens
  misc_RNA (1)...(19): siRNA sense strand
gcagauaugaccauuaaac

SEQ ID NO: 33871 - RNA, 19 nt, Homo sapiens
  misc_RNA (1)...(19): siRNA sense strand
ggccaugaccacaauguuu

SEQ ID NO: 33872 - RNA, 19 nt, Homo sapiens
  misc_RNA (1)...(19): siRNA sense strand
ggucguagcaacaaaggaa

SEQ ID NO: 33873 - RNA, 19 nt, Homo sapiens
  misc_RNA (1)...(19): siRNA sense strand
gagacaacgagaugaacua

SEQ ID NO: 33874 - RNA, 19 nt, Homo sapiens
  misc_RNA (1)...(19): siRNA sense strand
gaagcaacaggaucugaga

SEQ ID NO: 33875 - RNA, 19 nt, Homo sapiens
  misc_RNA (1)...(19): siRNA sense strand
acaagacuauuaagaugug

SEQ ID NO: 33876 - RNA, 19 nt, Homo sapiens
  misc_RNA (1)...(19): siRNA sense strand
aacaagcgaugcaugaaga

SEQ ID NO: 33877 - RNA, 19 nt, Homo sapiens
  misc_RNA (1)...(19): siRNA sense strand
gaaucaaagcuaaaugaag

SEQ ID NO: 33878 - RNA, 19 nt, Homo sapiens
  misc_RNA (1)...(19): siRNA sense strand
agaagguuauggaauuaga

SEQ ID NO: 33879 - RNA, 19 nt, Homo sapiens
  misc_RNA (1)...(19): siRNA sense strand
gaagguuauggaauuagaa

SEQ ID NO: 33880 - RNA, 19 nt, Homo sapiens
  misc_RNA (1)...(19): siRNA sense strand
ccacaagacggcacccuau

SEQ ID NO: 33881 - RNA, 19 nt, Homo sapiens
  misc_RNA (1)...(19): siRNA sense strand
uuuguuaccuccuuggauu

SEQ ID NO: 33882 - RNA, 19 nt, Homo sapiens
  misc_RNA (1)...(19): siRNA sense strand
aaaucgagcuauagcagau

SEQ ID NO: 33883 - RNA, 19 nt, Homo sapiens
  misc_RNA (1)...(19): siRNA sense strand
gcccaauggagaucauaua

SEQ ID NO: 33884 - RNA, 19 nt, Homo sapiens
  misc_RNA (1)...(19): siRNA sense strand
gguuauggaauuagaauca

SEQ ID NO: 33885 - RNA, 19 nt, Homo sapiens
  misc_RNA (1)...(19): siRNA sense strand
gauuaucuucguucaaaug

SEQ ID NO: 33886 - RNA, 19 nt, Homo sapiens
  misc_RNA (1)...(19): siRNA sense strand
gacaagacuauuaagaugu

SEQ ID NO: 33887 - RNA, 19 nt, Homo sapiens
  misc_RNA (1)...(19): siRNA sense strand
cacaauguuucuucaguag

SEQ ID NO: 33888 - RNA, 19 nt, Homo sapiens
  misc_RNA (1)...(19): siRNA sense strand
uccagucacucgagucauu

SEQ ID NO: 33889 - RNA, 19 nt, Homo sapiens
  misc_RNA (1)...(19): siRNA sense strand
ccagagacaacgagaugaa

SEQ ID NO: 33890 - RNA, 19 nt, Homo sapiens
  misc_RNA (1)...(19): siRNA sense strand
ugaccacaauguuucuuca

SEQ ID NO: 33891 - RNA, 19 nt, Homo sapiens
  misc_RNA (1)...(19): siRNA sense strand
ucaaugcgcaugaacacuu

SEQ ID NO: 33892 - RNA, 19 nt, Homo sapiens
  misc_RNA (1)...(19): siRNA sense strand
ugaccagacugugcgugua

SEQ ID NO: 33893 - RNA, 19 nt, Homo sapiens
  misc_RNA (1)...(19): siRNA sense strand
ucaagauggcacucugaua

SEQ ID NO: 33894 - RNA, 19 nt, Homo sapiens
  misc_RNA (1)...(19): siRNA sense strand
gagaauggguacguauggu

SEQ ID NO: 33895 - RNA, 19 nt, Homo sapiens
  misc_RNA (1)...(19): siRNA sense strand
aacaggaucugagacuaaa

SEQ ID NO: 33896 - RNA, 19 nt, Homo sapiens
  misc_RNA (1)...(19): siRNA sense strand
gaugugggaugucaguacu

SEQ ID NO: 33897 - RNA, 19 nt, Homo sapiens
  misc_RNA (1)...(19): siRNA sense strand
ggucacaggaguccaguca

SEQ ID NO: 33898 - RNA, 19 nt, Homo sapiens
  misc_RNA (1)...(19): siRNA sense strand
cuauuaagaugugggaugu

SEQ ID NO: 33899 - RNA, 19 nt, Homo sapiens
  misc_RNA (1)...(19): siRNA sense strand
guacaggacauuucauucg

SEQ ID NO: 33900 - RNA, 19 nt, Homo sapiens
  misc_RNA (1)...(19): siRNA sense strand
ggugugggauuaugagacu

SEQ ID NO: 33901 - RNA, 19 nt, Homo sapiens
  misc_RNA (1)...(19): siRNA sense strand
ucacaggaguccagucacu

SEQ ID NO: 33902 - RNA, 19 nt, Homo sapiens
  misc_RNA (1)...(19): siRNA sense strand
auagccagcuguuccaaug

SEQ ID NO: 33903 - RNA, 19 nt, Homo sapiens
  misc_RNA (1)...(19): siRNA sense strand
gcguaugggauuacaagaa

SEQ ID NO: 33904 - RNA, 19 nt, Homo sapiens
  misc_RNA (1)...(19): siRNA sense strand
auggacaucuguuauuaga

SEQ ID NO: 33905 - RNA, 19 nt, Homo sapiens
  misc_RNA (1)...(19): siRNA sense strand
gugucugccucaagggaua

SEQ ID NO: 33906 - RNA, 19 nt, Homo sapiens
  misc_RNA (1)...(19): siRNA sense strand
aagaacaagcgaugcauga

SEQ ID NO: 33907 - RNA, 19 nt, Homo sapiens
  misc_RNA (1)...(19): siRNA sense strand
cguaugggauuacaagaac

SEQ ID NO: 33908 - RNA, 19 nt, Homo sapiens
  misc_RNA (1)...(19): siRNA sense strand
gaugaacuaaaucgagcua

SEQ ID NO: 33909 - RNA, 19 nt, Homo sapiens
  misc_RNA (1)...(19): siRNA sense strand
gaccagacugugcguguau

SEQ ID NO: 33910 - RNA, 19 nt, Homo sapiens
  misc_RNA (1)...(19): siRNA sense strand
cacagagaauggguacgua

SEQ ID NO: 33911 - RNA, 19 nt, Homo sapiens
  misc_RNA (1)...(19): siRNA sense strand
acaauuaaggugugggauu

SEQ ID NO: 33912 - RNA, 19 nt, Homo sapiens
  misc_RNA (1)...(19): siRNA sense strand
gcguagaucaaacaguaaa

SEQ ID NO: 33913 - RNA, 19 nt, Homo sapiens
  misc_RNA (1)...(19): siRNA sense strand
uacaggacauuucauucga

SEQ ID NO: 33914 - RNA, 19 nt, Homo sapiens
  misc_RNA (1)...(19): siRNA sense strand
uucagaggaugcuacaauu

SEQ ID NO: 33915 - RNA, 19 nt, Homo sapiens
  misc_RNA (1)...(19): siRNA sense strand
agagacaagacuauuaaga

SEQ ID NO: 33916 - RNA, 19 nt, Homo sapiens
  misc_RNA (1)...(19): siRNA sense strand
uccagagacaagacuauua

SEQ ID NO: 33917 - RNA, 19 nt, Homo sapiens
  misc_RNA (1)...(19): siRNA sense strand
ggcuuugaaugcaucagaa

SEQ ID NO: 33918 - RNA, 19 nt, Homo sapiens
  misc_RNA (1)...(19): siRNA sense strand
gauccagagacaagacuau

SEQ ID NO: 33919 - RNA, 19 nt, Homo sapiens
  misc_RNA (1)...(19): siRNA sense strand
cauauuccuccaucucuga

SEQ ID NO: 33920 - RNA, 19 nt, Homo sapiens
  misc_RNA (1)...(19): siRNA sense strand
agaauggguacguauggua

SEQ ID NO: 33921 - RNA, 19 nt, Homo sapiens
  misc_RNA (1)...(19): siRNA sense strand
agacaacgagaugaacuaa

SEQ ID NO: 33922 - RNA, 19 nt, Homo sapiens
  misc_RNA (1)...(19): siRNA sense strand
gccaugaccacaauguuuc

SEQ ID NO: 33923 - RNA, 19 nt, Homo sapiens
  misc_RNA (1)...(19): siRNA sense strand
agaggaugcuacaauuaag

SEQ ID NO: 33924 - RNA, 19 nt, Homo sapiens
  misc_RNA (1)...(19): siRNA sense strand
gaucaaacaguaaaagugu

SEQ ID NO: 33925 - RNA, 19 nt, Homo sapiens
  misc_RNA (1)...(19): siRNA sense strand
cuccaucucugaagcaaca

SEQ ID NO: 33926 - RNA, 19 nt, Homo sapiens
  misc_RNA (1)...(19): siRNA sense strand
gauuuugaacgaacucuua

SEQ ID NO: 33927 - RNA, 19 nt, Homo sapiens
  misc_RNA (1)...(19): siRNA sense strand
aagcugaauuagaugugaa

SEQ ID NO: 33928 - RNA, 19 nt, Homo sapiens
  misc_RNA (1)...(19): siRNA sense strand
gacaacgagaugaacuaaa

SEQ ID NO: 33929 - RNA, 19 nt, Homo sapiens
  misc_RNA (1)...(19): siRNA sense strand
caucaugcccaauggagau

SEQ ID NO: 33930 - RNA, 19 nt, Homo sapiens
  misc_RNA (1)...(19): siRNA sense strand
caagacggcacccuauguc

SEQ ID NO: 33931 - RNA, 19 nt, Homo sapiens
  misc_RNA (1)...(19): siRNA sense strand
ccucgugggucaugauaac

SEQ ID NO: 33932 - RNA, 19 nt, Homo sapiens
  misc_RNA (1)...(19): siRNA sense strand
ggaagcugaauuagaugug

SEQ ID NO: 33933 - RNA, 19 nt, Homo sapiens
  misc_RNA (1)...(19): siRNA sense strand
cuucagaggaugcuacaau

SEQ ID NO: 33934 - RNA, 19 nt, Homo sapiens
  misc_RNA (1)...(19): siRNA sense strand
ugguaaaccugggccauuc

SEQ ID NO: 33935 - RNA, 19 nt, Homo sapiens
  misc_RNA (1)...(19): siRNA sense strand
agugcaaacuggcuacugu

SEQ ID NO: 33936 - RNA, 19 nt, Homo sapiens
  misc_RNA (1)...(19): siRNA sense strand
caaagcuaaaugaagcaaa

SEQ ID NO: 33937 - RNA, 19 nt, Homo sapiens
  misc_RNA (1)...(19): siRNA sense strand
gacccucaaugcgcaugaa

SEQ ID NO: 33938 - RNA, 19 nt, Homo sapiens
  misc_RNA (1)...(19): siRNA sense strand
gaacacagcuccucugacu

SEQ ID NO: 33939 - RNA, 19 nt, Homo sapiens
  misc_RNA (1)...(19): siRNA sense strand
ggaaagaugcgaccuagaa

SEQ ID NO: 33940 - RNA, 19 nt, Homo sapiens
  misc_RNA (1)...(19): siRNA sense strand
gaaauucuccugacucuag

SEQ ID NO: 33941 - RNA, 19 nt, Homo sapiens
  misc_RNA (1)...(19): siRNA sense strand
guucagaaauggaaauguu

SEQ ID NO: 33942 - RNA, 19 nt, Homo sapiens
  misc_RNA (1)...(19): siRNA sense strand
gaccacuccucaagagaua

SEQ ID NO: 33943 - RNA, 19 nt, Homo sapiens
  misc_RNA (1)...(19): siRNA sense strand
gcacaaaguacuucucaga

SEQ ID NO: 33944 - RNA, 19 nt, Homo sapiens
  misc_RNA (1)...(19): siRNA sense strand
gaaggaaggcccuggaaau

SEQ ID NO: 33945 - RNA, 19 nt, Homo sapiens
  misc_RNA (1)...(19): siRNA sense strand
gaucccacaucuauacauu

SEQ ID NO: 33946 - RNA, 19 nt, Homo sapiens
  misc_RNA (1)...(19): siRNA sense strand
gaaauggaaauguucaaug

SEQ ID NO: 33947 - RNA, 19 nt, Homo sapiens
  misc_RNA (1)...(19): siRNA sense strand
gaauauuccacacaagaaa

SEQ ID NO: 33948 - RNA, 19 nt, Homo sapiens
  misc_RNA (1)...(19): siRNA sense strand
guucugggcucuccgaguu

SEQ ID NO: 33949 - RNA, 19 nt, Homo sapiens
  misc_RNA (1)...(19): siRNA sense strand
gcccgcaaauccagaaauu

SEQ ID NO: 33950 - RNA, 19 nt, Homo sapiens
  misc_RNA (1)...(19): siRNA sense strand
ggacauuggagacaucuug

SEQ ID NO: 33951 - RNA, 19 nt, Homo sapiens
  misc_RNA (1)...(19): siRNA sense strand
gaagaguguuagacuugga

SEQ ID NO: 33952 - RNA, 19 nt, Homo sapiens
  misc_RNA (1)...(19): siRNA sense strand
ggagaaggcagugagcuuu

SEQ ID NO: 33953 - RNA, 19 nt, Homo sapiens
  misc_RNA (1)...(19): siRNA sense strand
uuugacagcuguaucauug

SEQ ID NO: 33954 - RNA, 19 nt, Homo sapiens
  misc_RNA (1)...(19): siRNA sense strand
gaugaucugaagaguguua

SEQ ID NO: 33955 - RNA, 19 nt, Homo sapiens
  misc_RNA (1)...(19): siRNA sense strand
ccacucugcuggucaccua

SEQ ID NO: 33956 - RNA, 19 nt, Homo sapiens
  misc_RNA (1)...(19): siRNA sense strand
ugacagcuguaucauuguu

SEQ ID NO: 33957 - RNA, 19 nt, Homo sapiens
  misc_RNA (1)...(19): siRNA sense strand
cagaaacccugcguucaga

SEQ ID NO: 33958 - RNA, 19 nt, Homo sapiens
  misc_RNA (1)...(19): siRNA sense strand
agaagcagcuggagcaucu

SEQ ID NO: 33959 - RNA, 19 nt, Homo sapiens
  misc_RNA (1)...(19): siRNA sense strand
ggaaagggaacaugacucu

SEQ ID NO: 33960 - RNA, 19 nt, Homo sapiens
  misc_RNA (1)...(19): siRNA sense strand
cugaugaucugaagagugu

SEQ ID NO: 33961 - RNA, 19 nt, Homo sapiens
  misc_RNA (1)...(19): siRNA sense strand
gagaagagcacaaaguacu

SEQ ID NO: 33962 - RNA, 19 nt, Homo sapiens
  misc_RNA (1)...(19): siRNA sense strand
agucagaguuuguggagaa

SEQ ID NO: 33963 - RNA, 19 nt, Homo sapiens
  misc_RNA (1)...(19): siRNA sense strand
gcuacuggguggugauaau

SEQ ID NO: 33964 - RNA, 19 nt, Homo sapiens
  misc_RNA (1)...(19): siRNA sense strand
gaaacccugcguucagaaa

SEQ ID NO: 33965 - RNA, 19 nt, Homo sapiens
  misc_RNA (1)...(19): siRNA sense strand
ggaagcaucuccuuuuaca

SEQ ID NO: 33966 - RNA, 19 nt, Homo sapiens
  misc_RNA (1)...(19): siRNA sense strand
acacagcuccucugacuau

SEQ ID NO: 33967 - RNA, 19 nt, Homo sapiens
  misc_RNA (1)...(19): siRNA sense strand
ugccaggacucccaugaaa

SEQ ID NO: 33968 - RNA, 19 nt, Homo sapiens
  misc_RNA (1)...(19): siRNA sense strand
gagcacaaaguacuucuca

SEQ ID NO: 33969 - RNA, 19 nt, Homo sapiens
  misc_RNA (1)...(19): siRNA sense strand
gcaggacauuggagacauc

SEQ ID NO: 33970 - RNA, 19 nt, Homo sapiens
  misc_RNA (1)...(19): siRNA sense strand
gagcccaucugccucaucu

SEQ ID NO: 33971 - RNA, 19 nt, Homo sapiens
  misc_RNA (1)...(19): siRNA sense strand
aaagacagcugcgaaucug

SEQ ID NO: 33972 - RNA, 19 nt, Homo sapiens
  misc_RNA (1)...(19): siRNA sense strand
uggagaagagcacaaagua

SEQ ID NO: 33973 - RNA, 19 nt, Homo sapiens
  misc_RNA (1)...(19): siRNA sense strand
gaacuucugcaggacauug

SEQ ID NO: 33974 - RNA, 19 nt, Homo sapiens
  misc_RNA (1)...(19): siRNA sense strand
gcaggcccuucgaagugua

SEQ ID NO: 33975 - RNA, 19 nt, Homo sapiens
  misc_RNA (1)...(19): siRNA sense strand
ggaaggagacccaguugac

SEQ ID NO: 33976 - RNA, 19 nt, Homo sapiens
  misc_RNA (1)...(19): siRNA sense strand
gaaagaugcgaccuagaag

SEQ ID NO: 33977 - RNA, 19 nt, Homo sapiens
  misc_RNA (1)...(19): siRNA sense strand
ucgagaaguucaaguucaa

SEQ ID NO: 33978 - RNA, 19 nt, Homo sapiens
  misc_RNA (1)...(19): siRNA sense strand
caccagaagucagaguuug

SEQ ID NO: 33979 - RNA, 19 nt, Homo sapiens
  misc_RNA (1)...(19): siRNA sense strand
ggaccacuccucaagagau

SEQ ID NO: 33980 - RNA, 19 nt, Homo sapiens
  misc_RNA (1)...(19): siRNA sense strand
ugaagaagcugagaaaauc

SEQ ID NO: 33981 - RNA, 19 nt, Homo sapiens
  misc_RNA (1)...(19): siRNA sense strand
gccuugaggucaccauuuc

SEQ ID NO: 33982 - RNA, 19 nt, Homo sapiens
  misc_RNA (1)...(19): siRNA sense strand
uggagcagguguacuacuu

SEQ ID NO: 33983 - RNA, 19 nt, Homo sapiens
  misc_RNA (1)...(19): siRNA sense strand
gagccaggccggugaagau

SEQ ID NO: 33984 - RNA, 19 nt, Homo sapiens
  misc_RNA (1)...(19): siRNA sense strand
ucaggcacaugcuguuaau

SEQ ID NO: 33985 - RNA, 19 nt, Homo sapiens
  misc_RNA (1)...(19): siRNA sense strand
gcucaggcacaugcuguua

SEQ ID NO: 33986 - RNA, 19 nt, Homo sapiens
  misc_RNA (1)...(19): siRNA sense strand
ggacgugggccagaugguu

SEQ ID NO: 33987 - RNA, 19 nt, Homo sapiens
  misc_RNA (1)...(19): siRNA sense strand
gcauaugacacccgcguau

SEQ ID NO: 33988 - RNA, 19 nt, Homo sapiens
  misc_RNA (1)...(19): siRNA sense strand
ugccucaucugcagucuga

SEQ ID NO: 33989 - RNA, 19 nt, Homo sapiens
  misc_RNA (1)...(19): siRNA sense strand
gagcaaacgcagagagaag

SEQ ID NO: 33990 - RNA, 19 nt, Homo sapiens
  misc_RNA (1)...(19): siRNA sense strand
aaagggaacaugacucugu

SEQ ID NO: 33991 - RNA, 19 nt, Homo sapiens
  misc_RNA (1)...(19): siRNA sense strand
gaacacaagaagaaaauuc

SEQ ID NO: 33992 - RNA, 19 nt, Homo sapiens
  misc_RNA (1)...(19): siRNA sense strand
gugauaaugaugaaggaaa

SEQ ID NO: 33993 - RNA, 19 nt, Homo sapiens
  misc_RNA (1)...(19): siRNA sense strand
ugcaagacauccauaagca

SEQ ID NO: 33994 - RNA, 19 nt, Homo sapiens
  misc_RNA (1)...(19): siRNA sense strand
ccaaggagugccagucaga

SEQ ID NO: 33995 - RNA, 19 nt, Homo sapiens
  misc_RNA (1)...(19): siRNA sense strand
aaacugaagcgcugaagca

SEQ ID NO: 33996 - RNA, 19 nt, Homo sapiens
  misc_RNA (1)...(19): siRNA sense strand
ccaggaaggagacccaguu

SEQ ID NO: 33997 - RNA, 19 nt, Homo sapiens
  misc_RNA (1)...(19): siRNA sense strand
gugcaggcccuucgaagug

SEQ ID NO: 33998 - RNA, 19 nt, Homo sapiens
  misc_RNA (1)...(19): siRNA sense strand
auggaaauguucaauguuc

SEQ ID NO: 33999 - RNA, 19 nt, Homo sapiens
  misc_RNA (1)...(19): siRNA sense strand
guaccugugugcgugauuc

SEQ ID NO: 34000 - RNA, 19 nt, Homo sapiens
  misc_RNA (1)...(19): siRNA sense strand
gagaaggcagugagcuuuc

SEQ ID NO: 34001 - RNA, 19 nt, Homo sapiens
  misc_RNA (1)...(19): siRNA sense strand
ccaaccucaucuucucuga

SEQ ID NO: 34002 - RNA, 19 nt, Homo sapiens
  misc_RNA (1)...(19): siRNA sense strand
ggagaagagcacaaaguac

SEQ ID NO: 34003 - RNA, 19 nt, Homo sapiens
  misc_RNA (1)...(19): siRNA sense strand
ccaccagaagucagaguuu

SEQ ID NO: 34004 - RNA, 19 nt, Homo sapiens
  misc_RNA (1)...(19): siRNA sense strand
gcuggugcccuaugacuuc

SEQ ID NO: 34005 - RNA, 19 nt, Homo sapiens
  misc_RNA (1)...(19): siRNA sense strand
agacauccauaagcaggaa

SEQ ID NO: 34006 - RNA, 19 nt, Homo sapiens
  misc_RNA (1)...(19): siRNA sense strand
gagacaagacagcauggau

SEQ ID NO: 34007 - RNA, 19 nt, Homo sapiens
  misc_RNA (1)...(19): siRNA sense strand
ugaaggaaggcccuggaaa

SEQ ID NO: 34008 - RNA, 19 nt, Homo sapiens
  misc_RNA (1)...(19): siRNA sense strand
cagcuccucugacuaucug

SEQ ID NO: 34009 - RNA, 19 nt, Homo sapiens
  misc_RNA (1)...(19): siRNA sense strand
ucugaagaguguuagacuu

SEQ ID NO: 34010 - RNA, 19 nt, Homo sapiens
  misc_RNA (1)...(19): siRNA sense strand
gggaacuucugcaggacau

SEQ ID NO: 34011 - RNA, 19 nt, Homo sapiens
  misc_RNA (1)...(19): siRNA sense strand
ccagaugguugggcagauc

SEQ ID NO: 34012 - RNA, 19 nt, Homo sapiens
  misc_RNA (1)...(19): siRNA sense strand
gguggagguuggagacaag

SEQ ID NO: 34013 - RNA, 19 nt, Homo sapiens
  misc_RNA (1)...(19): siRNA sense strand
ggaagcuggagcaggugua

SEQ ID NO: 34014 - RNA, 19 nt, Homo sapiens
  misc_RNA (1)...(19): siRNA sense strand
cugaagaguguuagacuug

SEQ ID NO: 34015 - RNA, 19 nt, Homo sapiens
  misc_RNA (1)...(19): siRNA sense strand
ccacuccucaagagauaaa

SEQ ID NO: 34016 - RNA, 19 nt, Homo sapiens
  misc_RNA (1)...(19): siRNA sense strand
ggagugcaggcccuucgaa

SEQ ID NO: 34017 - RNA, 19 nt, Homo sapiens
  misc_RNA (1)...(19): siRNA sense strand
gggcaucugcggaccugaa

SEQ ID NO: 34018 - RNA, 19 nt, Homo sapiens
  misc_RNA (1)...(19): siRNA sense strand
uaccugcccucgggaaaga

SEQ ID NO: 34019 - RNA, 19 nt, Homo sapiens
  misc_RNA (1)...(19): siRNA sense strand
ggagugccagucagaaugg

SEQ ID NO: 34020 - RNA, 19 nt, Homo sapiens
  misc_RNA (1)...(19): siRNA sense strand
gauuggcgcucaggcacau

SEQ ID NO: 34021 - RNA, 19 nt, Homo sapiens
  misc_RNA (1)...(19): siRNA sense strand
ggguggugauaaugaugaa

SEQ ID NO: 34022 - RNA, 19 nt, Homo sapiens
  misc_RNA (1)...(19): siRNA sense strand
ccaggacucccaugaaagg

SEQ ID NO: 34023 - RNA, 19 nt, Homo sapiens
  misc_RNA (1)...(19): siRNA sense strand
cagggcagccauucaggaa

SEQ ID NO: 34024 - RNA, 19 nt, Homo sapiens
  misc_RNA (1)...(19): siRNA sense strand
ccugggagccugcaagaca

SEQ ID NO: 34025 - RNA, 19 nt, Homo sapiens
  misc_RNA (1)...(19): siRNA sense strand
ucagaaacccugcguucag

SEQ ID NO: 34026 - RNA, 19 nt, Homo sapiens
  misc_RNA (1)...(19): siRNA sense strand
cagaguuuguggagaagag

SEQ ID NO: 34027 - RNA, 19 nt, Homo sapiens
  misc_RNA (1)...(19): siRNA sense strand
agaagaaaauucagaagca

SEQ ID NO: 34028 - RNA, 19 nt, Homo sapiens
  misc_RNA (1)...(19): siRNA sense strand
uccagcugcucuucuguga

SEQ ID NO: 34029 - RNA, 19 nt, Homo sapiens
  misc_RNA (1)...(19): siRNA sense strand
ccacagggcagccauucag

SEQ ID NO: 34030 - RNA, 19 nt, Homo sapiens
  misc_RNA (1)...(19): siRNA sense strand
ucagaaauggaaauguuca

SEQ ID NO: 34031 - RNA, 19 nt, Homo sapiens
  misc_RNA (1)...(19): siRNA sense strand
caacuccuccaccagaagu

SEQ ID NO: 34032 - RNA, 19 nt, Homo sapiens
  misc_RNA (1)...(19): siRNA sense strand
ggccaaggagugccaguca

SEQ ID NO: 34033 - RNA, 19 nt, Homo sapiens
  misc_RNA (1)...(19): siRNA sense strand
gcagaucaggaaggcauau

SEQ ID NO: 34034 - RNA, 19 nt, Homo sapiens
  misc_RNA (1)...(19): siRNA sense strand
ggagcagguguacuacuuc

SEQ ID NO: 34035 - RNA, 19 nt, Homo sapiens
  misc_RNA (1)...(19): siRNA sense strand
uggagcaucugaagaagcu

SEQ ID NO: 34036 - RNA, 19 nt, Homo sapiens
  misc_RNA (1)...(19): siRNA sense strand
ggaaaagacagcugcgaau

SEQ ID NO: 34037 - RNA, 19 nt, Homo sapiens
  misc_RNA (1)...(19): siRNA sense strand
aagaacacagcuccucuga

SEQ ID NO: 34038 - RNA, 19 nt, Homo sapiens
  misc_RNA (1)...(19): siRNA sense strand
gaaggucuccgaugucaua

SEQ ID NO: 34039 - RNA, 19 nt, Homo sapiens
  misc_RNA (1)...(19): siRNA sense strand
gaucauacaugcgcuguga

SEQ ID NO: 34040 - RNA, 19 nt, Homo sapiens
  misc_RNA (1)...(19): siRNA sense strand
gccgugagcuggugaagaa

SEQ ID NO: 34041 - RNA, 19 nt, Homo sapiens
  misc_RNA (1)...(19): siRNA sense strand
ugaagaaggucuccgaugu

SEQ ID NO: 34042 - RNA, 19 nt, Homo sapiens
  misc_RNA (1)...(19): siRNA sense strand
ggagcuggcuguaccugaa

SEQ ID NO: 34043 - RNA, 19 nt, Homo sapiens
  misc_RNA (1)...(19): siRNA sense strand
gaucaugccuggguagugu

SEQ ID NO: 34044 - RNA, 19 nt, Homo sapiens
  misc_RNA (1)...(19): siRNA sense strand
ugggacaucuggaaaggua

SEQ ID NO: 34045 - RNA, 19 nt, Homo sapiens
  misc_RNA (1)...(19): siRNA sense strand
caaggaguucuuugaagua

SEQ ID NO: 34046 - RNA, 19 nt, Homo sapiens
  misc_RNA (1)...(19): siRNA sense strand
acaaggaguucuuugaagu

SEQ ID NO: 34047 - RNA, 19 nt, Homo sapiens
  misc_RNA (1)...(19): siRNA sense strand
gaaccuggcagaucuagag

SEQ ID NO: 34048 - RNA, 19 nt, Homo sapiens
  misc_RNA (1)...(19): siRNA sense strand
ggucuccgaugucauaugg

SEQ ID NO: 34049 - RNA, 19 nt, Homo sapiens
  misc_RNA (1)...(19): siRNA sense strand
ccacugucauccaggacua

SEQ ID NO: 34050 - RNA, 19 nt, Homo sapiens
  misc_RNA (1)...(19): siRNA sense strand
acgaggagaucuacaagga

SEQ ID NO: 34051 - RNA, 19 nt, Homo sapiens
  misc_RNA (1)...(19): siRNA sense strand
cgucaucccuaccaacguu

SEQ ID NO: 34052 - RNA, 19 nt, Homo sapiens
  misc_RNA (1)...(19): siRNA sense strand
gaagaaggucuccgauguc

SEQ ID NO: 34053 - RNA, 19 nt, Homo sapiens
  misc_RNA (1)...(19): siRNA sense strand
gggaagacgaggagaucua

SEQ ID NO: 34054 - RNA, 19 nt, Homo sapiens
  misc_RNA (1)...(19): siRNA sense strand
gaacacaucuaccccuaca

SEQ ID NO: 34055 - RNA, 19 nt, Homo sapiens
  misc_RNA (1)...(19): siRNA sense strand
gaagaugaagggcaugaag

SEQ ID NO: 34056 - RNA, 19 nt, Homo sapiens
  misc_RNA (1)...(19): siRNA sense strand
ugacuacacucugucuuuc

SEQ ID NO: 34057 - RNA, 19 nt, Homo sapiens
  misc_RNA (1)...(19): siRNA sense strand
cuacaaggaguucuuugaa

SEQ ID NO: 34058 - RNA, 19 nt, Homo sapiens
  misc_RNA (1)...(19): siRNA sense strand
cagaaggugcgcauaguga

SEQ ID NO: 34059 - RNA, 19 nt, Homo sapiens
  misc_RNA (1)...(19): siRNA sense strand
gccaucaacccuuccauug

SEQ ID NO: 34060 - RNA, 19 nt, Homo sapiens
  misc_RNA (1)...(19): siRNA sense strand
gugacuacacucugucuuu

SEQ ID NO: 34061 - RNA, 19 nt, Homo sapiens
  misc_RNA (1)...(19): siRNA sense strand
ugaaguagccaaugauguc

SEQ ID NO: 34062 - RNA, 19 nt, Homo sapiens
  misc_RNA (1)...(19): siRNA sense strand
gaucuacaaggaguucuuu

SEQ ID NO: 34063 - RNA, 19 nt, Homo sapiens
  misc_RNA (1)...(19): siRNA sense strand
gcagaaggugcgcauagug

SEQ ID NO: 34064 - RNA, 19 nt, Homo sapiens
  misc_RNA (1)...(19): siRNA sense strand
aagaaggucuccgauguca

SEQ ID NO: 34065 - RNA, 19 nt, Homo sapiens
  misc_RNA (1)...(19): siRNA sense strand
gaccuacuaucgggaugaa

SEQ ID NO: 34066 - RNA, 19 nt, Homo sapiens
  misc_RNA (1)...(19): siRNA sense strand
uagggaaccuggcagaucu

SEQ ID NO: 34067 - RNA, 19 nt, Homo sapiens
  misc_RNA (1)...(19): siRNA sense strand
ucuccgaugucauauggaa

SEQ ID NO: 34068 - RNA, 19 nt, Homo sapiens
  misc_RNA (1)...(19): siRNA sense strand
gagaagaugaagggcauga

SEQ ID NO: 34069 - RNA, 19 nt, Homo sapiens
  misc_RNA (1)...(19): siRNA sense strand
cgacguggugcgccuguuu

SEQ ID NO: 34070 - RNA, 19 nt, Homo sapiens
  misc_RNA (1)...(19): siRNA sense strand
ucuuugaaguagccaauga

SEQ ID NO: 34071 - RNA, 19 nt, Homo sapiens
  misc_RNA (1)...(19): siRNA sense strand
uacaaggaguucuuugaag

SEQ ID NO: 34072 - RNA, 19 nt, Homo sapiens
  misc_RNA (1)...(19): siRNA sense strand
ccugaaaggaucauacaug

SEQ ID NO: 34073 - RNA, 19 nt, Homo sapiens
  misc_RNA (1)...(19): siRNA sense strand
gaaguagccaaugauguca

SEQ ID NO: 34074 - RNA, 19 nt, Homo sapiens
  misc_RNA (1)...(19): siRNA sense strand
ccacauccagucccucuuc

SEQ ID NO: 34075 - RNA, 19 nt, Homo sapiens
  misc_RNA (1)...(19): siRNA sense strand
ggcagaaggugcgcauagu

SEQ ID NO: 34076 - RNA, 19 nt, Homo sapiens
  misc_RNA (1)...(19): siRNA sense strand
gcagaugaagaagcagaaa

SEQ ID NO: 34077 - RNA, 19 nt, Homo sapiens
  misc_RNA (1)...(19): siRNA sense strand
cagcuccgguguggccuuu

SEQ ID NO: 34078 - RNA, 19 nt, Homo sapiens
  misc_RNA (1)...(19): siRNA sense strand
gaccugggacaucuggaaa

SEQ ID NO: 34079 - RNA, 19 nt, Homo sapiens
  misc_RNA (1)...(19): siRNA sense strand
gagcuggcuguaccugaaa

SEQ ID NO: 34080 - RNA, 19 nt, Homo sapiens
  misc_RNA (1)...(19): siRNA sense strand
cagacccacucacccucua

SEQ ID NO: 34081 - RNA, 19 nt, Homo sapiens
  misc_RNA (1)...(19): siRNA sense strand
ggagaucuacaaggaguuc

SEQ ID NO: 34082 - RNA, 19 nt, Homo sapiens
  misc_RNA (1)...(19): siRNA sense strand
gcugugaccgcaagaugga

SEQ ID NO: 34083 - RNA, 19 nt, Homo sapiens
  misc_RNA (1)...(19): siRNA sense strand
ggaagccuccugggacugu

SEQ ID NO: 34084 - RNA, 19 nt, Homo sapiens
  misc_RNA (1)...(19): siRNA sense strand
gggcugggccaccuuucuu

SEQ ID NO: 34085 - RNA, 19 nt, Homo sapiens
  misc_RNA (1)...(19): siRNA sense strand
ucuaugaccugggacaucu

SEQ ID NO: 34086 - RNA, 19 nt, Homo sapiens
  misc_RNA (1)...(19): siRNA sense strand
ugaaggaggcagccagcuu

SEQ ID NO: 34087 - RNA, 19 nt, Homo sapiens
  misc_RNA (1)...(19): siRNA sense strand
ggaagacgaggagaucuac

SEQ ID NO: 34088 - RNA, 19 nt, Homo sapiens
  misc_RNA (1)...(19): siRNA sense strand
ccucagccaagaccuacua

SEQ ID NO: 34089 - RNA, 19 nt, Homo sapiens
  misc_RNA (1)...(19): siRNA sense strand
agucgcaagugcagaugaa

SEQ ID NO: 34090 - RNA, 19 nt, Homo sapiens
  misc_RNA (1)...(19): siRNA sense strand
ucuacaaggaguucuuuga

SEQ ID NO: 34091 - RNA, 19 nt, Homo sapiens
  misc_RNA (1)...(19): siRNA sense strand
ugcucuggcugcucuauga

SEQ ID NO: 34092 - RNA, 19 nt, Homo sapiens
  misc_RNA (1)...(19): siRNA sense strand
gcagcgcaaaggccucuga

SEQ ID NO: 34093 - RNA, 19 nt, Homo sapiens
  misc_RNA (1)...(19): siRNA sense strand
agauggagguggcguucau

SEQ ID NO: 34094 - RNA, 19 nt, Homo sapiens
  misc_RNA (1)...(19): siRNA sense strand
gaugaagaagcagaaagug

SEQ ID NO: 34095 - RNA, 19 nt, Homo sapiens
  misc_RNA (1)...(19): siRNA sense strand
cgcaagugcagaugaagaa

SEQ ID NO: 34096 - RNA, 19 nt, Homo sapiens
  misc_RNA (1)...(19): siRNA sense strand
uccagucccucuucagcuu

SEQ ID NO: 34097 - RNA, 19 nt, Homo sapiens
  misc_RNA (1)...(19): siRNA sense strand
gcgcugugaccgcaagaug

SEQ ID NO: 34098 - RNA, 19 nt, Homo sapiens
  misc_RNA (1)...(19): siRNA sense strand
uggccgaccugucuaucau

SEQ ID NO: 34099 - RNA, 19 nt, Homo sapiens
  misc_RNA (1)...(19): siRNA sense strand
aaggaguucuuugaaguag

SEQ ID NO: 34100 - RNA, 19 nt, Homo sapiens
  misc_RNA (1)...(19): siRNA sense strand
cagccaagaccuacuaucg

SEQ ID NO: 34101 - RNA, 19 nt, Homo sapiens
  misc_RNA (1)...(19): siRNA sense strand
gucccucuauccucgagaa

SEQ ID NO: 34102 - RNA, 19 nt, Homo sapiens
  misc_RNA (1)...(19): siRNA sense strand
gccaucaagcugcaacuca

SEQ ID NO: 34103 - RNA, 19 nt, Homo sapiens
  misc_RNA (1)...(19): siRNA sense strand
ccgacucgcuggagcuucu

SEQ ID NO: 34104 - RNA, 19 nt, Homo sapiens
  misc_RNA (1)...(19): siRNA sense strand
gaaggucuccgaugucaua

SEQ ID NO: 34105 - RNA, 19 nt, Homo sapiens
  misc_RNA (1)...(19): siRNA sense strand
gaucauacaugcgcuguga

SEQ ID NO: 34106 - RNA, 19 nt, Homo sapiens
  misc_RNA (1)...(19): siRNA sense strand
gccgugagcuggugaagaa

SEQ ID NO: 34107 - RNA, 19 nt, Homo sapiens
  misc_RNA (1)...(19): siRNA sense strand
ugaagaaggucuccgaugu

SEQ ID NO: 34108 - RNA, 19 nt, Homo sapiens
  misc_RNA (1)...(19): siRNA sense strand
ggagcuggcuguaccugaa

SEQ ID NO: 34109 - RNA, 19 nt, Homo sapiens
  misc_RNA (1)...(19): siRNA sense strand
gaucaugccuggguagugu

SEQ ID NO: 34110 - RNA, 19 nt, Homo sapiens
  misc_RNA (1)...(19): siRNA sense strand
ugggacaucuggaaaggua

SEQ ID NO: 34111 - RNA, 19 nt, Homo sapiens
  misc_RNA (1)...(19): siRNA sense strand
caaggaguucuuugaagua

SEQ ID NO: 34112 - RNA, 19 nt, Homo sapiens
  misc_RNA (1)...(19): siRNA sense strand
acaaggaguucuuugaagu

SEQ ID NO: 34113 - RNA, 19 nt, Homo sapiens
  misc_RNA (1)...(19): siRNA sense strand
gaaccuggcagaucuagag

SEQ ID NO: 34114 - RNA, 19 nt, Homo sapiens
  misc_RNA (1)...(19): siRNA sense strand
ggucuccgaugucauaugg

SEQ ID NO: 34115 - RNA, 19 nt, Homo sapiens
  misc_RNA (1)...(19): siRNA sense strand
ccacugucauccaggacua

SEQ ID NO: 34116 - RNA, 19 nt, Homo sapiens
  misc_RNA (1)...(19): siRNA sense strand
acgaggagaucuacaagga

SEQ ID NO: 34117 - RNA, 19 nt, Homo sapiens
  misc_RNA (1)...(19): siRNA sense strand
cgucaucccuaccaacguu

SEQ ID NO: 34118 - RNA, 19 nt, Homo sapiens
  misc_RNA (1)...(19): siRNA sense strand
gaagaaggucuccgauguc

SEQ ID NO: 34119 - RNA, 19 nt, Homo sapiens
  misc_RNA (1)...(19): siRNA sense strand
gggaagacgaggagaucua

SEQ ID NO: 34120 - RNA, 19 nt, Homo sapiens
  misc_RNA (1)...(19): siRNA sense strand
gaacacaucuaccccuaca

SEQ ID NO: 34121 - RNA, 19 nt, Homo sapiens
  misc_RNA (1)...(19): siRNA sense strand
gaagaugaagggcaugaag

SEQ ID NO: 34122 - RNA, 19 nt, Homo sapiens
  misc_RNA (1)...(19): siRNA sense strand
ugacuacacucugucuuuc

SEQ ID NO: 34123 - RNA, 19 nt, Homo sapiens
  misc_RNA (1)...(19): siRNA sense strand
cuacaaggaguucuuugaa

SEQ ID NO: 34124 - RNA, 19 nt, Homo sapiens
  misc_RNA (1)...(19): siRNA sense strand
cagaaggugcgcauaguga

SEQ ID NO: 34125 - RNA, 19 nt, Homo sapiens
  misc_RNA (1)...(19): siRNA sense strand
gccaucaacccuuccauug

SEQ ID NO: 34126 - RNA, 19 nt, Homo sapiens
  misc_RNA (1)...(19): siRNA sense strand
gugacuacacucugucuuu

SEQ ID NO: 34127 - RNA, 19 nt, Homo sapiens
  misc_RNA (1)...(19): siRNA sense strand
ugaaguagccaaugauguc

SEQ ID NO: 34128 - RNA, 19 nt, Homo sapiens
  misc_RNA (1)...(19): siRNA sense strand
gaucuacaaggaguucuuu

SEQ ID NO: 34129 - RNA, 19 nt, Homo sapiens
  misc_RNA (1)...(19): siRNA sense strand
gcagaaggugcgcauagug

SEQ ID NO: 34130 - RNA, 19 nt, Homo sapiens
  misc_RNA (1)...(19): siRNA sense strand
aagaaggucuccgauguca

SEQ ID NO: 34131 - RNA, 19 nt, Homo sapiens
  misc_RNA (1)...(19): siRNA sense strand
gaccuacuaucgggaugaa

SEQ ID NO: 34132 - RNA, 19 nt, Homo sapiens
  misc_RNA (1)...(19): siRNA sense strand
uagggaaccuggcagaucu

SEQ ID NO: 34133 - RNA, 19 nt, Homo sapiens
  misc_RNA (1)...(19): siRNA sense strand
ucuccgaugucauauggaa

SEQ ID NO: 34134 - RNA, 19 nt, Homo sapiens
  misc_RNA (1)...(19): siRNA sense strand
gagaagaugaagggcauga

SEQ ID NO: 34135 - RNA, 19 nt, Homo sapiens
  misc_RNA (1)...(19): siRNA sense strand
cgacguggugcgccuguuu

SEQ ID NO: 34136 - RNA, 19 nt, Homo sapiens
  misc_RNA (1)...(19): siRNA sense strand
ucuuugaaguagccaauga

SEQ ID NO: 34137 - RNA, 19 nt, Homo sapiens
  misc_RNA (1)...(19): siRNA sense strand
uacaaggaguucuuugaag

SEQ ID NO: 34138 - RNA, 19 nt, Homo sapiens
  misc_RNA (1)...(19): siRNA sense strand
ccugaaaggaucauacaug

SEQ ID NO: 34139 - RNA, 19 nt, Homo sapiens
  misc_RNA (1)...(19): siRNA sense strand
gaaguagccaaugauguca

SEQ ID NO: 34140 - RNA, 19 nt, Homo sapiens
  misc_RNA (1)...(19): siRNA sense strand
ccacauccagucccucuuc

SEQ ID NO: 34141 - RNA, 19 nt, Homo sapiens
  misc_RNA (1)...(19): siRNA sense strand
ggcagaaggugcgcauagu

SEQ ID NO: 34142 - RNA, 19 nt, Homo sapiens
  misc_RNA (1)...(19): siRNA sense strand
gcagaugaagaagcagaaa

SEQ ID NO: 34143 - RNA, 19 nt, Homo sapiens
  misc_RNA (1)...(19): siRNA sense strand
cagcuccgguguggccuuu

SEQ ID NO: 34144 - RNA, 19 nt, Homo sapiens
  misc_RNA (1)...(19): siRNA sense strand
gaccugggacaucuggaaa

SEQ ID NO: 34145 - RNA, 19 nt, Homo sapiens
  misc_RNA (1)...(19): siRNA sense strand
gagcuggcuguaccugaaa

SEQ ID NO: 34146 - RNA, 19 nt, Homo sapiens
  misc_RNA (1)...(19): siRNA sense strand
cagacccacucacccucua

SEQ ID NO: 34147 - RNA, 19 nt, Homo sapiens
  misc_RNA (1)...(19): siRNA sense strand
ggagaucuacaaggaguuc

SEQ ID NO: 34148 - RNA, 19 nt, Homo sapiens
  misc_RNA (1)...(19): siRNA sense strand
gcugugaccgcaagaugga

SEQ ID NO: 34149 - RNA, 19 nt, Homo sapiens
  misc_RNA (1)...(19): siRNA sense strand
ggaagccuccugggacugu

SEQ ID NO: 34150 - RNA, 19 nt, Homo sapiens
  misc_RNA (1)...(19): siRNA sense strand
gggcugggccaccuuucuu

SEQ ID NO: 34151 - RNA, 19 nt, Homo sapiens
  misc_RNA (1)...(19): siRNA sense strand
ucuaugaccugggacaucu

SEQ ID NO: 34152 - RNA, 19 nt, Homo sapiens
  misc_RNA (1)...(19): siRNA sense strand
ugaaggaggcagccagcuu

SEQ ID NO: 34153 - RNA, 19 nt, Homo sapiens
  misc_RNA (1)...(19): siRNA sense strand
ggaagacgaggagaucuac

SEQ ID NO: 34154 - RNA, 19 nt, Homo sapiens
  misc_RNA (1)...(19): siRNA sense strand
ccucagccaagaccuacua

SEQ ID NO: 34155 - RNA, 19 nt, Homo sapiens
  misc_RNA (1)...(19): siRNA sense strand
agucgcaagugcagaugaa

SEQ ID NO: 34156 - RNA, 19 nt, Homo sapiens
  misc_RNA (1)...(19): siRNA sense strand
ucuacaaggaguucuuuga

SEQ ID NO: 34157 - RNA, 19 nt, Homo sapiens
  misc_RNA (1)...(19): siRNA sense strand
ugcucuggcugcucuauga

SEQ ID NO: 34158 - RNA, 19 nt, Homo sapiens
  misc_RNA (1)...(19): siRNA sense strand
gcagcgcaaaggccucuga

SEQ ID NO: 34159 - RNA, 19 nt, Homo sapiens
  misc_RNA (1)...(19): siRNA sense strand
agauggagguggcguucau

SEQ ID NO: 34160 - RNA, 19 nt, Homo sapiens
  misc_RNA (1)...(19): siRNA sense strand
gaugaagaagcagaaagug

SEQ ID NO: 34161 - RNA, 19 nt, Homo sapiens
  misc_RNA (1)...(19): siRNA sense strand
cgcaagugcagaugaagaa

SEQ ID NO: 34162 - RNA, 19 nt, Homo sapiens
  misc_RNA (1)...(19): siRNA sense strand
uccagucccucuucagcuu

SEQ ID NO: 34163 - RNA, 19 nt, Homo sapiens
  misc_RNA (1)...(19): siRNA sense strand
gcgcugugaccgcaagaug

SEQ ID NO: 34164 - RNA, 19 nt, Homo sapiens
  misc_RNA (1)...(19): siRNA sense strand
uggccgaccugucuaucau

SEQ ID NO: 34165 - RNA, 19 nt, Homo sapiens
  misc_RNA (1)...(19): siRNA sense strand
aaggaguucuuugaaguag

SEQ ID NO: 34166 - RNA, 19 nt, Homo sapiens
  misc_RNA (1)...(19): siRNA sense strand
cagccaagaccuacuaucg

SEQ ID NO: 34167 - RNA, 19 nt, Homo sapiens
  misc_RNA (1)...(19): siRNA sense strand
gucccucuauccucgagaa

SEQ ID NO: 34168 - RNA, 19 nt, Homo sapiens
  misc_RNA (1)...(19): siRNA sense strand
gccaucaagcugcaacuca

SEQ ID NO: 34169 - RNA, 19 nt, Homo sapiens
  misc_RNA (1)...(19): siRNA sense strand
ccgacucgcuggagcuucu

SEQ ID NO: 34170 - RNA, 19 nt, Homo sapiens
  misc_RNA (1)...(19): siRNA sense strand
gaaggucuccgaugucaua

SEQ ID NO: 34171 - RNA, 19 nt, Homo sapiens
  misc_RNA (1)...(19): siRNA sense strand
gaucauacaugcgcuguga

SEQ ID NO: 34172 - RNA, 19 nt, Homo sapiens
  misc_RNA (1)...(19): siRNA sense strand
gccgugagcuggugaagaa

SEQ ID NO: 34173 - RNA, 19 nt, Homo sapiens
  misc_RNA (1)...(19): siRNA sense strand
ugaagaaggucuccgaugu

SEQ ID NO: 34174 - RNA, 19 nt, Homo sapiens
  misc_RNA (1)...(19): siRNA sense strand
ggagcuggcuguaccugaa

SEQ ID NO: 34175 - RNA, 19 nt, Homo sapiens
  misc_RNA (1)...(19): siRNA sense strand
gaucaugccuggguagugu

SEQ ID NO: 34176 - RNA, 19 nt, Homo sapiens
  misc_RNA (1)...(19): siRNA sense strand
ugggacaucuggaaaggua

SEQ ID NO: 34177 - RNA, 19 nt, Homo sapiens
  misc_RNA (1)...(19): siRNA sense strand
caaggaguucuuugaagua

SEQ ID NO: 34178 - RNA, 19 nt, Homo sapiens
  misc_RNA (1)...(19): siRNA sense strand
acaaggaguucuuugaagu

SEQ ID NO: 34179 - RNA, 19 nt, Homo sapiens
  misc_RNA (1)...(19): siRNA sense strand
gaaccuggcagaucuagag

SEQ ID NO: 34180 - RNA, 19 nt, Homo sapiens
  misc_RNA (1)...(19): siRNA sense strand
ggucuccgaugucauaugg

SEQ ID NO: 34181 - RNA, 19 nt, Homo sapiens
  misc_RNA (1)...(19): siRNA sense strand
ccacugucauccaggacua

SEQ ID NO: 34182 - RNA, 19 nt, Homo sapiens
  misc_RNA (1)...(19): siRNA sense strand
acgaggagaucuacaagga

SEQ ID NO: 34183 - RNA, 19 nt, Homo sapiens
  misc_RNA (1)...(19): siRNA sense strand
cgucaucccuaccaacguu

SEQ ID NO: 34184 - RNA, 19 nt, Homo sapiens
  misc_RNA (1)...(19): siRNA sense strand
gaagaaggucuccgauguc

SEQ ID NO: 34185 - RNA, 19 nt, Homo sapiens
  misc_RNA (1)...(19): siRNA sense strand
gggaagacgaggagaucua

SEQ ID NO: 34186 - RNA, 19 nt, Homo sapiens
  misc_RNA (1)...(19): siRNA sense strand
gaacacaucuaccccuaca

SEQ ID NO: 34187 - RNA, 19 nt, Homo sapiens
  misc_RNA (1)...(19): siRNA sense strand
gaagaugaagggcaugaag

SEQ ID NO: 34188 - RNA, 19 nt, Homo sapiens
  misc_RNA (1)...(19): siRNA sense strand
ugacuacacucugucuuuc

SEQ ID NO: 34189 - RNA, 19 nt, Homo sapiens
  misc_RNA (1)...(19): siRNA sense strand
cuacaaggaguucuuugaa

SEQ ID NO: 34190 - RNA, 19 nt, Homo sapiens
  misc_RNA (1)...(19): siRNA sense strand
cagaaggugcgcauaguga

SEQ ID NO: 34191 - RNA, 19 nt, Homo sapiens
  misc_RNA (1)...(19): siRNA sense strand
gccaucaacccuuccauug

SEQ ID NO: 34192 - RNA, 19 nt, Homo sapiens
  misc_RNA (1)...(19): siRNA sense strand
gugacuacacucugucuuu

SEQ ID NO: 34193 - RNA, 19 nt, Homo sapiens
  misc_RNA (1)...(19): siRNA sense strand
ugaaguagccaaugauguc

SEQ ID NO: 34194 - RNA, 19 nt, Homo sapiens
  misc_RNA (1)...(19): siRNA sense strand
gaucuacaaggaguucuuu

SEQ ID NO: 34195 - RNA, 19 nt, Homo sapiens
  misc_RNA (1)...(19): siRNA sense strand
gcagaaggugcgcauagug

SEQ ID NO: 34196 - RNA, 19 nt, Homo sapiens
  misc_RNA (1)...(19): siRNA sense strand
aagaaggucuccgauguca

SEQ ID NO: 34197 - RNA, 19 nt, Homo sapiens
  misc_RNA (1)...(19): siRNA sense strand
gaccuacuaucgggaugaa

SEQ ID NO: 34198 - RNA, 19 nt, Homo sapiens
  misc_RNA (1)...(19): siRNA sense strand
uagggaaccuggcagaucu

SEQ ID NO: 34199 - RNA, 19 nt, Homo sapiens
  misc_RNA (1)...(19): siRNA sense strand
ucuccgaugucauauggaa

SEQ ID NO: 34200 - RNA, 19 nt, Homo sapiens
  misc_RNA (1)...(19): siRNA sense strand
gagaagaugaagggcauga

SEQ ID NO: 34201 - RNA, 19 nt, Homo sapiens
  misc_RNA (1)...(19): siRNA sense strand
cgacguggugcgccuguuu

SEQ ID NO: 34202 - RNA, 19 nt, Homo sapiens
  misc_RNA (1)...(19): siRNA sense strand
ucuuugaaguagccaauga

SEQ ID NO: 34203 - RNA, 19 nt, Homo sapiens
  misc_RNA (1)...(19): siRNA sense strand
uacaaggaguucuuugaag

SEQ ID NO: 34204 - RNA, 19 nt, Homo sapiens
  misc_RNA (1)...(19): siRNA sense strand
ccugaaaggaucauacaug

SEQ ID NO: 34205 - RNA, 19 nt, Homo sapiens
  misc_RNA (1)...(19): siRNA sense strand
gaaguagccaaugauguca

SEQ ID NO: 34206 - RNA, 19 nt, Homo sapiens
  misc_RNA (1)...(19): siRNA sense strand
ccacauccagucccucuuc

SEQ ID NO: 34207 - RNA, 19 nt, Homo sapiens
  misc_RNA (1)...(19): siRNA sense strand
ggcagaaggugcgcauagu

SEQ ID NO: 34208 - RNA, 19 nt, Homo sapiens
  misc_RNA (1)...(19): siRNA sense strand
gcagaugaagaagcagaaa

SEQ ID NO: 34209 - RNA, 19 nt, Homo sapiens
  misc_RNA (1)...(19): siRNA sense strand
cagcuccgguguggccuuu

SEQ ID NO: 34210 - RNA, 19 nt, Homo sapiens
  misc_RNA (1)...(19): siRNA sense strand
gaccugggacaucuggaaa

SEQ ID NO: 34211 - RNA, 19 nt, Homo sapiens
  misc_RNA (1)...(19): siRNA sense strand
gagcuggcuguaccugaaa

SEQ ID NO: 34212 - RNA, 19 nt, Homo sapiens
  misc_RNA (1)...(19): siRNA sense strand
cagacccacucacccucua

SEQ ID NO: 34213 - RNA, 19 nt, Homo sapiens
  misc_RNA (1)...(19): siRNA sense strand
ggagaucuacaaggaguuc

SEQ ID NO: 34214 - RNA, 19 nt, Homo sapiens
  misc_RNA (1)...(19): siRNA sense strand
gcugugaccgcaagaugga

SEQ ID NO: 34215 - RNA, 19 nt, Homo sapiens
  misc_RNA (1)...(19): siRNA sense strand
ggaagccuccugggacugu

SEQ ID NO: 34216 - RNA, 19 nt, Homo sapiens
  misc_RNA (1)...(19): siRNA sense strand
gggcugggccaccuuucuu

SEQ ID NO: 34217 - RNA, 19 nt, Homo sapiens
  misc_RNA (1)...(19): siRNA sense strand
ucuaugaccugggacaucu

SEQ ID NO: 34218 - RNA, 19 nt, Homo sapiens
  misc_RNA (1)...(19): siRNA sense strand
ugaaggaggcagccagcuu

SEQ ID NO: 34219 - RNA, 19 nt, Homo sapiens
  misc_RNA (1)...(19): siRNA sense strand
ggaagacgaggagaucuac

SEQ ID NO: 34220 - RNA, 19 nt, Homo sapiens
  misc_RNA (1)...(19): siRNA sense strand
ccucagccaagaccuacua

SEQ ID NO: 34221 - RNA, 19 nt, Homo sapiens
  misc_RNA (1)...(19): siRNA sense strand
agucgcaagugcagaugaa

SEQ ID NO: 34222 - RNA, 19 nt, Homo sapiens
  misc_RNA (1)...(19): siRNA sense strand
ucuacaaggaguucuuuga

SEQ ID NO: 34223 - RNA, 19 nt, Homo sapiens
  misc_RNA (1)...(19): siRNA sense strand
ugcucuggcugcucuauga

SEQ ID NO: 34224 - RNA, 19 nt, Homo sapiens
  misc_RNA (1)...(19): siRNA sense strand
gcagcgcaaaggccucuga

SEQ ID NO: 34225 - RNA, 19 nt, Homo sapiens
  misc_RNA (1)...(19): siRNA sense strand
agauggagguggcguucau

SEQ ID NO: 34226 - RNA, 19 nt, Homo sapiens
  misc_RNA (1)...(19): siRNA sense strand
gaugaagaagcagaaagug

SEQ ID NO: 34227 - RNA, 19 nt, Homo sapiens
  misc_RNA (1)...(19): siRNA sense strand
cgcaagugcagaugaagaa

SEQ ID NO: 34228 - RNA, 19 nt, Homo sapiens
  misc_RNA (1)...(19): siRNA sense strand
uccagucccucuucagcuu

SEQ ID NO: 34229 - RNA, 19 nt, Homo sapiens
  misc_RNA (1)...(19): siRNA sense strand
gcgcugugaccgcaagaug

SEQ ID NO: 34230 - RNA, 19 nt, Homo sapiens
  misc_RNA (1)...(19): siRNA sense strand
uggccgaccugucuaucau

SEQ ID NO: 34231 - RNA, 19 nt, Homo sapiens
  misc_RNA (1)...(19): siRNA sense strand
aaggaguucuuugaaguag

SEQ ID NO: 34232 - RNA, 19 nt, Homo sapiens
  misc_RNA (1)...(19): siRNA sense strand
cagccaagaccuacuaucg

SEQ ID NO: 34233 - RNA, 19 nt, Homo sapiens
  misc_RNA (1)...(19): siRNA sense strand
gucccucuauccucgagaa

SEQ ID NO: 34234 - RNA, 19 nt, Homo sapiens
  misc_RNA (1)...(19): siRNA sense strand
gccaucaagcugcaacuca

SEQ ID NO: 34235 - RNA, 19 nt, Homo sapiens
  misc_RNA (1)...(19): siRNA sense strand
ccgacucgcuggagcuucu

SEQ ID NO: 34236 - RNA, 19 nt, Homo sapiens
  misc_RNA (1)...(19): siRNA sense strand
gaaggucuccgaugucaua

SEQ ID NO: 34237 - RNA, 19 nt, Homo sapiens
  misc_RNA (1)...(19): siRNA sense strand
gaucauacaugcgcuguga

SEQ ID NO: 34238 - RNA, 19 nt, Homo sapiens
  misc_RNA (1)...(19): siRNA sense strand
gccgugagcuggugaagaa

SEQ ID NO: 34239 - RNA, 19 nt, Homo sapiens
  misc_RNA (1)...(19): siRNA sense strand
ugaagaaggucuccgaugu

SEQ ID NO: 34240 - RNA, 19 nt, Homo sapiens
  misc_RNA (1)...(19): siRNA sense strand
ggagcuggcuguaccugaa

SEQ ID NO: 34241 - RNA, 19 nt, Homo sapiens
  misc_RNA (1)...(19): siRNA sense strand
gaucaugccuggguagugu

SEQ ID NO: 34242 - RNA, 19 nt, Homo sapiens
  misc_RNA (1)...(19): siRNA sense strand
ugggacaucuggaaaggua

SEQ ID NO: 34243 - RNA, 19 nt, Homo sapiens
  misc_RNA (1)...(19): siRNA sense strand
caaggaguucuuugaagua

SEQ ID NO: 34244 - RNA, 19 nt, Homo sapiens
  misc_RNA (1)...(19): siRNA sense strand
acaaggaguucuuugaagu

SEQ ID NO: 34245 - RNA, 19 nt, Homo sapiens
  misc_RNA (1)...(19): siRNA sense strand
gaaccuggcagaucuagag

SEQ ID NO: 34246 - RNA, 19 nt, Homo sapiens
  misc_RNA (1)...(19): siRNA sense strand
ggucuccgaugucauaugg

SEQ ID NO: 34247 - RNA, 19 nt, Homo sapiens
  misc_RNA (1)...(19): siRNA sense strand
ccacugucauccaggacua

SEQ ID NO: 34248 - RNA, 19 nt, Homo sapiens
  misc_RNA (1)...(19): siRNA sense strand
acgaggagaucuacaagga

SEQ ID NO: 34249 - RNA, 19 nt, Homo sapiens
  misc_RNA (1)...(19): siRNA sense strand
cgucaucccuaccaacguu

SEQ ID NO: 34250 - RNA, 19 nt, Homo sapiens
  misc_RNA (1)...(19): siRNA sense strand
gaagaaggucuccgauguc

SEQ ID NO: 34251 - RNA, 19 nt, Homo sapiens
  misc_RNA (1)...(19): siRNA sense strand
gggaagacgaggagaucua

SEQ ID NO: 34252 - RNA, 19 nt, Homo sapiens
  misc_RNA (1)...(19): siRNA sense strand
gaacacaucuaccccuaca

SEQ ID NO: 34253 - RNA, 19 nt, Homo sapiens
  misc_RNA (1)...(19): siRNA sense strand
gaagaugaagggcaugaag

SEQ ID NO: 34254 - RNA, 19 nt, Homo sapiens
  misc_RNA (1)...(19): siRNA sense strand
ugacuacacucugucuuuc

SEQ ID NO: 34255 - RNA, 19 nt, Homo sapiens
  misc_RNA (1)...(19): siRNA sense strand
cuacaaggaguucuuugaa

SEQ ID NO: 34256 - RNA, 19 nt, Homo sapiens
  misc_RNA (1)...(19): siRNA sense strand
cagaaggugcgcauaguga

SEQ ID NO: 34257 - RNA, 19 nt, Homo sapiens
  misc_RNA (1)...(19): siRNA sense strand
gccaucaacccuuccauug

SEQ ID NO: 34258 - RNA, 19 nt, Homo sapiens
  misc_RNA (1)...(19): siRNA sense strand
gugacuacacucugucuuu

SEQ ID NO: 34259 - RNA, 19 nt, Homo sapiens
  misc_RNA (1)...(19): siRNA sense strand
ugaaguagccaaugauguc

SEQ ID NO: 34260 - RNA, 19 nt, Homo sapiens
  misc_RNA (1)...(19): siRNA sense strand
gaucuacaaggaguucuuu

SEQ ID NO: 34261 - RNA, 19 nt, Homo sapiens
  misc_RNA (1)...(19): siRNA sense strand
gcagaaggugcgcauagug

SEQ ID NO: 34262 - RNA, 19 nt, Homo sapiens
  misc_RNA (1)...(19): siRNA sense strand
aagaaggucuccgauguca

SEQ ID NO: 34263 - RNA, 19 nt, Homo sapiens
  misc_RNA (1)...(19): siRNA sense strand
gaccuacuaucgggaugaa

SEQ ID NO: 34264 - RNA, 19 nt, Homo sapiens
  misc_RNA (1)...(19): siRNA sense strand
uagggaaccuggcagaucu

SEQ ID NO: 34265 - RNA, 19 nt, Homo sapiens
  misc_RNA (1)...(19): siRNA sense strand
ucuccgaugucauauggaa

SEQ ID NO: 34266 - RNA, 19 nt, Homo sapiens
  misc_RNA (1)...(19): siRNA sense strand
gagaagaugaagggcauga

SEQ ID NO: 34267 - RNA, 19 nt, Homo sapiens
  misc_RNA (1)...(19): siRNA sense strand
cgacguggugcgccuguuu

SEQ ID NO: 34268 - RNA, 19 nt, Homo sapiens
  misc_RNA (1)...(19): siRNA sense strand
ucuuugaaguagccaauga

SEQ ID NO: 34269 - RNA, 19 nt, Homo sapiens
  misc_RNA (1)...(19): siRNA sense strand
uacaaggaguucuuugaag

SEQ ID NO: 34270 - RNA, 19 nt, Homo sapiens
  misc_RNA (1)...(19): siRNA sense strand
ccugaaaggaucauacaug

SEQ ID NO: 34271 - RNA, 19 nt, Homo sapiens
  misc_RNA (1)...(19): siRNA sense strand
gaaguagccaaugauguca

SEQ ID NO: 34272 - RNA, 19 nt, Homo sapiens
  misc_RNA (1)...(19): siRNA sense strand
ccacauccagucccucuuc

SEQ ID NO: 34273 - RNA, 19 nt, Homo sapiens
  misc_RNA (1)...(19): siRNA sense strand
ggcagaaggugcgcauagu

SEQ ID NO: 34274 - RNA, 19 nt, Homo sapiens
  misc_RNA (1)...(19): siRNA sense strand
gcagaugaagaagcagaaa

SEQ ID NO: 34275 - RNA, 19 nt, Homo sapiens
  misc_RNA (1)...(19): siRNA sense strand
cagcuccgguguggccuuu

SEQ ID NO: 34276 - RNA, 19 nt, Homo sapiens
  misc_RNA (1)...(19): siRNA sense strand
gaccugggacaucuggaaa

SEQ ID NO: 34277 - RNA, 19 nt, Homo sapiens
  misc_RNA (1)...(19): siRNA sense strand
gagcuggcuguaccugaaa

SEQ ID NO: 34278 - RNA, 19 nt, Homo sapiens
  misc_RNA (1)...(19): siRNA sense strand
cagacccacucacccucua

SEQ ID NO: 34279 - RNA, 19 nt, Homo sapiens
  misc_RNA (1)...(19): siRNA sense strand
ggagaucuacaaggaguuc

SEQ ID NO: 34280 - RNA, 19 nt, Homo sapiens
  misc_RNA (1)...(19): siRNA sense strand
gcugugaccgcaagaugga

SEQ ID NO: 34281 - RNA, 19 nt, Homo sapiens
  misc_RNA (1)...(19): siRNA sense strand
ggaagccuccugggacugu

SEQ ID NO: 34282 - RNA, 19 nt, Homo sapiens
  misc_RNA (1)...(19): siRNA sense strand
gggcugggccaccuuucuu

SEQ ID NO: 34283 - RNA, 19 nt, Homo sapiens
  misc_RNA (1)...(19): siRNA sense strand
ucuaugaccugggacaucu

SEQ ID NO: 34284 - RNA, 19 nt, Homo sapiens
  misc_RNA (1)...(19): siRNA sense strand
ugaaggaggcagccagcuu

SEQ ID NO: 34285 - RNA, 19 nt, Homo sapiens
  misc_RNA (1)...(19): siRNA sense strand
ggaagacgaggagaucuac

SEQ ID NO: 34286 - RNA, 19 nt, Homo sapiens
  misc_RNA (1)...(19): siRNA sense strand
ccucagccaagaccuacua

SEQ ID NO: 34287 - RNA, 19 nt, Homo sapiens
  misc_RNA (1)...(19): siRNA sense strand
agucgcaagugcagaugaa

SEQ ID NO: 34288 - RNA, 19 nt, Homo sapiens
  misc_RNA (1)...(19): siRNA sense strand
ucuacaaggaguucuuuga

SEQ ID NO: 34289 - RNA, 19 nt, Homo sapiens
  misc_RNA (1)...(19): siRNA sense strand
ugcucuggcugcucuauga

SEQ ID NO: 34290 - RNA, 19 nt, Homo sapiens
  misc_RNA (1)...(19): siRNA sense strand
gcagcgcaaaggccucuga

SEQ ID NO: 34291 - RNA, 19 nt, Homo sapiens
  misc_RNA (1)...(19): siRNA sense strand
agauggagguggcguucau

SEQ ID NO: 34292 - RNA, 19 nt, Homo sapiens
  misc_RNA (1)...(19): siRNA sense strand
gaugaagaagcagaaagug

SEQ ID NO: 34293 - RNA, 19 nt, Homo sapiens
  misc_RNA (1)...(19): siRNA sense strand
cgcaagugcagaugaagaa

SEQ ID NO: 34294 - RNA, 19 nt, Homo sapiens
  misc_RNA (1)...(19): siRNA sense strand
uccagucccucuucagcuu

SEQ ID NO: 34295 - RNA, 19 nt, Homo sapiens
  misc_RNA (1)...(19): siRNA sense strand
gcgcugugaccgcaagaug

SEQ ID NO: 34296 - RNA, 19 nt, Homo sapiens
  misc_RNA (1)...(19): siRNA sense strand
uggccgaccugucuaucau

SEQ ID NO: 34297 - RNA, 19 nt, Homo sapiens
  misc_RNA (1)...(19): siRNA sense strand
aaggaguucuuugaaguag

SEQ ID NO: 34298 - RNA, 19 nt, Homo sapiens
  misc_RNA (1)...(19): siRNA sense strand
cagccaagaccuacuaucg

SEQ ID NO: 34299 - RNA, 19 nt, Homo sapiens
  misc_RNA (1)...(19): siRNA sense strand
gucccucuauccucgagaa

SEQ ID NO: 34300 - RNA, 19 nt, Homo sapiens
  misc_RNA (1)...(19): siRNA sense strand
gccaucaagcugcaacuca

SEQ ID NO: 34301 - RNA, 19 nt, Homo sapiens
  misc_RNA (1)...(19): siRNA sense strand
ccgacucgcuggagcuucu

SEQ ID NO: 34302 - RNA, 19 nt, Homo sapiens
  misc_RNA (1)...(19): siRNA sense strand
gaaggucuccgaugucaua

SEQ ID NO: 34303 - RNA, 19 nt, Homo sapiens
  misc_RNA (1)...(19): siRNA sense strand
gaucauacaugcgcuguga

SEQ ID NO: 34304 - RNA, 19 nt, Homo sapiens
  misc_RNA (1)...(19): siRNA sense strand
gccgugagcuggugaagaa

SEQ ID NO: 34305 - RNA, 19 nt, Homo sapiens
  misc_RNA (1)...(19): siRNA sense strand
ugaagaaggucuccgaugu

SEQ ID NO: 34306 - RNA, 19 nt, Homo sapiens
  misc_RNA (1)...(19): siRNA sense strand
ggagcuggcuguaccugaa

SEQ ID NO: 34307 - RNA, 19 nt, Homo sapiens
  misc_RNA (1)...(19): siRNA sense strand
gaucaugccuggguagugu

SEQ ID NO: 34308 - RNA, 19 nt, Homo sapiens
  misc_RNA (1)...(19): siRNA sense strand
ugggacaucuggaaaggua

SEQ ID NO: 34309 - RNA, 19 nt, Homo sapiens
  misc_RNA (1)...(19): siRNA sense strand
caaggaguucuuugaagua

SEQ ID NO: 34310 - RNA, 19 nt, Homo sapiens
  misc_RNA (1)...(19): siRNA sense strand
acaaggaguucuuugaagu

SEQ ID NO: 34311 - RNA, 19 nt, Homo sapiens
  misc_RNA (1)...(19): siRNA sense strand
gaaccuggcagaucuagag

SEQ ID NO: 34312 - RNA, 19 nt, Homo sapiens
  misc_RNA (1)...(19): siRNA sense strand
ggucuccgaugucauaugg

SEQ ID NO: 34313 - RNA, 19 nt, Homo sapiens
  misc_RNA (1)...(19): siRNA sense strand
ccacugucauccaggacua

SEQ ID NO: 34314 - RNA, 19 nt, Homo sapiens
  misc_RNA (1)...(19): siRNA sense strand
acgaggagaucuacaagga

SEQ ID NO: 34315 - RNA, 19 nt, Homo sapiens
  misc_RNA (1)...(19): siRNA sense strand
cgucaucccuaccaacguu

SEQ ID NO: 34316 - RNA, 19 nt, Homo sapiens
  misc_RNA (1)...(19): siRNA sense strand
gaagaaggucuccgauguc

SEQ ID NO: 34317 - RNA, 19 nt, Homo sapiens
  misc_RNA (1)...(19): siRNA sense strand
gggaagacgaggagaucua

SEQ ID NO: 34318 - RNA, 19 nt, Homo sapiens
  misc_RNA (1)...(19): siRNA sense strand
gaacacaucuaccccuaca

SEQ ID NO: 34319 - RNA, 19 nt, Homo sapiens
  misc_RNA (1)...(19): siRNA sense strand
gaagaugaagggcaugaag

SEQ ID NO: 34320 - RNA, 19 nt, Homo sapiens
  misc_RNA (1)...(19): siRNA sense strand
ugacuacacucugucuuuc

SEQ ID NO: 34321 - RNA, 19 nt, Homo sapiens
  misc_RNA (1)...(19): siRNA sense strand
cuacaaggaguucuuugaa

SEQ ID NO: 34322 - RNA, 19 nt, Homo sapiens
  misc_RNA (1)...(19): siRNA sense strand
cagaaggugcgcauaguga

SEQ ID NO: 34323 - RNA, 19 nt, Homo sapiens
  misc_RNA (1)...(19): siRNA sense strand
gccaucaacccuuccauug

SEQ ID NO: 34324 - RNA, 19 nt, Homo sapiens
  misc_RNA (1)...(19): siRNA sense strand
gugacuacacucugucuuu

SEQ ID NO: 34325 - RNA, 19 nt, Homo sapiens
  misc_RNA (1)...(19): siRNA sense strand
ugaaguagccaaugauguc

SEQ ID NO: 34326 - RNA, 19 nt, Homo sapiens
  misc_RNA (1)...(19): siRNA sense strand
gaucuacaaggaguucuuu

SEQ ID NO: 34327 - RNA, 19 nt, Homo sapiens
  misc_RNA (1)...(19): siRNA sense strand
gcagaaggugcgcauagug

SEQ ID NO: 34328 - RNA, 19 nt, Homo sapiens
  misc_RNA (1)...(19): siRNA sense strand
aagaaggucuccgauguca

SEQ ID NO: 34329 - RNA, 19 nt, Homo sapiens
  misc_RNA (1)...(19): siRNA sense strand
gaccuacuaucgggaugaa

SEQ ID NO: 34330 - RNA, 19 nt, Homo sapiens
  misc_RNA (1)...(19): siRNA sense strand
uagggaaccuggcagaucu

SEQ ID NO: 34331 - RNA, 19 nt, Homo sapiens
  misc_RNA (1)...(19): siRNA sense strand
ucuccgaugucauauggaa

SEQ ID NO: 34332 - RNA, 19 nt, Homo sapiens
  misc_RNA (1)...(19): siRNA sense strand
gagaagaugaagggcauga

SEQ ID NO: 34333 - RNA, 19 nt, Homo sapiens
  misc_RNA (1)...(19): siRNA sense strand
cgacguggugcgccuguuu

SEQ ID NO: 34334 - RNA, 19 nt, Homo sapiens
  misc_RNA (1)...(19): siRNA sense strand
ucuuugaaguagccaauga

SEQ ID NO: 34335 - RNA, 19 nt, Homo sapiens
  misc_RNA (1)...(19): siRNA sense strand
uacaaggaguucuuugaag

SEQ ID NO: 34336 - RNA, 19 nt, Homo sapiens
  misc_RNA (1)...(19): siRNA sense strand
ccugaaaggaucauacaug

SEQ ID NO: 34337 - RNA, 19 nt, Homo sapiens
  misc_RNA (1)...(19): siRNA sense strand
gaaguagccaaugauguca

SEQ ID NO: 34338 - RNA, 19 nt, Homo sapiens
  misc_RNA (1)...(19): siRNA sense strand
ccacauccagucccucuuc

SEQ ID NO: 34339 - RNA, 19 nt, Homo sapiens
  misc_RNA (1)...(19): siRNA sense strand
ggcagaaggugcgcauagu

SEQ ID NO: 34340 - RNA, 19 nt, Homo sapiens
  misc_RNA (1)...(19): siRNA sense strand
gcagaugaagaagcagaaa

SEQ ID NO: 34341 - RNA, 19 nt, Homo sapiens
  misc_RNA (1)...(19): siRNA sense strand
cagcuccgguguggccuuu

SEQ ID NO: 34342 - RNA, 19 nt, Homo sapiens
  misc_RNA (1)...(19): siRNA sense strand
gaccugggacaucuggaaa

SEQ ID NO: 34343 - RNA, 19 nt, Homo sapiens
  misc_RNA (1)...(19): siRNA sense strand
gagcuggcuguaccugaaa

SEQ ID NO: 34344 - RNA, 19 nt, Homo sapiens
  misc_RNA (1)...(19): siRNA sense strand
cagacccacucacccucua

SEQ ID NO: 34345 - RNA, 19 nt, Homo sapiens
  misc_RNA (1)...(19): siRNA sense strand
ggagaucuacaaggaguuc

SEQ ID NO: 34346 - RNA, 19 nt, Homo sapiens
  misc_RNA (1)...(19): siRNA sense strand
gcugugaccgcaagaugga

SEQ ID NO: 34347 - RNA, 19 nt, Homo sapiens
  misc_RNA (1)...(19): siRNA sense strand
ggaagccuccugggacugu

SEQ ID NO: 34348 - RNA, 19 nt, Homo sapiens
  misc_RNA (1)...(19): siRNA sense strand
gggcugggccaccuuucuu

SEQ ID NO: 34349 - RNA, 19 nt, Homo sapiens
  misc_RNA (1)...(19): siRNA sense strand
ucuaugaccugggacaucu

SEQ ID NO: 34350 - RNA, 19 nt, Homo sapiens
  misc_RNA (1)...(19): siRNA sense strand
ugaaggaggcagccagcuu

SEQ ID NO: 34351 - RNA, 19 nt, Homo sapiens
  misc_RNA (1)...(19): siRNA sense strand
ggaagacgaggagaucuac

SEQ ID NO: 34352 - RNA, 19 nt, Homo sapiens
  misc_RNA (1)...(19): siRNA sense strand
ccucagccaagaccuacua

SEQ ID NO: 34353 - RNA, 19 nt, Homo sapiens
  misc_RNA (1)...(19): siRNA sense strand
agucgcaagugcagaugaa

SEQ ID NO: 34354 - RNA, 19 nt, Homo sapiens
  misc_RNA (1)...(19): siRNA sense strand
ucuacaaggaguucuuuga

SEQ ID NO: 34355 - RNA, 19 nt, Homo sapiens
  misc_RNA (1)...(19): siRNA sense strand
ugcucuggcugcucuauga

SEQ ID NO: 34356 - RNA, 19 nt, Homo sapiens
  misc_RNA (1)...(19): siRNA sense strand
gcagcgcaaaggccucuga

SEQ ID NO: 34357 - RNA, 19 nt, Homo sapiens
  misc_RNA (1)...(19): siRNA sense strand
agauggagguggcguucau

SEQ ID NO: 34358 - RNA, 19 nt, Homo sapiens
  misc_RNA (1)...(19): siRNA sense strand
gaugaagaagcagaaagug

SEQ ID NO: 34359 - RNA, 19 nt, Homo sapiens
  misc_RNA (1)...(19): siRNA sense strand
cgcaagugcagaugaagaa

SEQ ID NO: 34360 - RNA, 19 nt, Homo sapiens
  misc_RNA (1)...(19): siRNA sense strand
uccagucccucuucagcuu

SEQ ID NO: 34361 - RNA, 19 nt, Homo sapiens
  misc_RNA (1)...(19): siRNA sense strand
gcgcugugaccgcaagaug

SEQ ID NO: 34362 - RNA, 19 nt, Homo sapiens
  misc_RNA (1)...(19): siRNA sense strand
uggccgaccugucuaucau

SEQ ID NO: 34363 - RNA, 19 nt, Homo sapiens
  misc_RNA (1)...(19): siRNA sense strand
aaggaguucuuugaaguag

SEQ ID NO: 34364 - RNA, 19 nt, Homo sapiens
  misc_RNA (1)...(19): siRNA sense strand
cagccaagaccuacuaucg

SEQ ID NO: 34365 - RNA, 19 nt, Homo sapiens
  misc_RNA (1)...(19): siRNA sense strand
gucccucuauccucgagaa

SEQ ID NO: 34366 - RNA, 19 nt, Homo sapiens
  misc_RNA (1)...(19): siRNA sense strand
gccaucaagcugcaacuca

SEQ ID NO: 34367 - RNA, 19 nt, Homo sapiens
  misc_RNA (1)...(19): siRNA sense strand
ccgacucgcuggagcuucu

SEQ ID NO: 34368 - RNA, 19 nt, Homo sapiens
  misc_RNA (1)...(19): siRNA sense strand
gaaggucuccgaugucaua

SEQ ID NO: 34369 - RNA, 19 nt, Homo sapiens
  misc_RNA (1)...(19): siRNA sense strand
gaucauacaugcgcuguga

SEQ ID NO: 34370 - RNA, 19 nt, Homo sapiens
  misc_RNA (1)...(19): siRNA sense strand
gccgugagcuggugaagaa

SEQ ID NO: 34371 - RNA, 19 nt, Homo sapiens
  misc_RNA (1)...(19): siRNA sense strand
ugaagaaggucuccgaugu

SEQ ID NO: 34372 - RNA, 19 nt, Homo sapiens
  misc_RNA (1)...(19): siRNA sense strand
ggagcuggcuguaccugaa

SEQ ID NO: 34373 - RNA, 19 nt, Homo sapiens
  misc_RNA (1)...(19): siRNA sense strand
gaucaugccuggguagugu

SEQ ID NO: 34374 - RNA, 19 nt, Homo sapiens
  misc_RNA (1)...(19): siRNA sense strand
ugggacaucuggaaaggua

SEQ ID NO: 34375 - RNA, 19 nt, Homo sapiens
  misc_RNA (1)...(19): siRNA sense strand
caaggaguucuuugaagua

SEQ ID NO: 34376 - RNA, 19 nt, Homo sapiens
  misc_RNA (1)...(19): siRNA sense strand
acaaggaguucuuugaagu

SEQ ID NO: 34377 - RNA, 19 nt, Homo sapiens
  misc_RNA (1)...(19): siRNA sense strand
gaaccuggcagaucuagag

SEQ ID NO: 34378 - RNA, 19 nt, Homo sapiens
  misc_RNA (1)...(19): siRNA sense strand
ggucuccgaugucauaugg

SEQ ID NO: 34379 - RNA, 19 nt, Homo sapiens
  misc_RNA (1)...(19): siRNA sense strand
ccacugucauccaggacua

SEQ ID NO: 34380 - RNA, 19 nt, Homo sapiens
  misc_RNA (1)...(19): siRNA sense strand
acgaggagaucuacaagga

SEQ ID NO: 34381 - RNA, 19 nt, Homo sapiens
  misc_RNA (1)...(19): siRNA sense strand
cgucaucccuaccaacguu

SEQ ID NO: 34382 - RNA, 19 nt, Homo sapiens
  misc_RNA (1)...(19): siRNA sense strand
gaagaaggucuccgauguc

SEQ ID NO: 34383 - RNA, 19 nt, Homo sapiens
  misc_RNA (1)...(19): siRNA sense strand
gggaagacgaggagaucua

SEQ ID NO: 34384 - RNA, 19 nt, Homo sapiens
  misc_RNA (1)...(19): siRNA sense strand
gaacacaucuaccccuaca

SEQ ID NO: 34385 - RNA, 19 nt, Homo sapiens
  misc_RNA (1)...(19): siRNA sense strand
gaagaugaagggcaugaag

SEQ ID NO: 34386 - RNA, 19 nt, Homo sapiens
  misc_RNA (1)...(19): siRNA sense strand
ugacuacacucugucuuuc

SEQ ID NO: 34387 - RNA, 19 nt, Homo sapiens
  misc_RNA (1)...(19): siRNA sense strand
cuacaaggaguucuuugaa

SEQ ID NO: 34388 - RNA, 19 nt, Homo sapiens
  misc_RNA (1)...(19): siRNA sense strand
cagaaggugcgcauaguga

SEQ ID NO: 34389 - RNA, 19 nt, Homo sapiens
  misc_RNA (1)...(19): siRNA sense strand
gccaucaacccuuccauug

SEQ ID NO: 34390 - RNA, 19 nt, Homo sapiens
  misc_RNA (1)...(19): siRNA sense strand
gugacuacacucugucuuu

SEQ ID NO: 34391 - RNA, 19 nt, Homo sapiens
  misc_RNA (1)...(19): siRNA sense strand
ugaaguagccaaugauguc

SEQ ID NO: 34392 - RNA, 19 nt, Homo sapiens
  misc_RNA (1)...(19): siRNA sense strand
gaucuacaaggaguucuuu

SEQ ID NO: 34393 - RNA, 19 nt, Homo sapiens
  misc_RNA (1)...(19): siRNA sense strand
gcagaaggugcgcauagug

SEQ ID NO: 34394 - RNA, 19 nt, Homo sapiens
  misc_RNA (1)...(19): siRNA sense strand
aagaaggucuccgauguca

SEQ ID NO: 34395 - RNA, 19 nt, Homo sapiens
  misc_RNA (1)...(19): siRNA sense strand
gaccuacuaucgggaugaa

SEQ ID NO: 34396 - RNA, 19 nt, Homo sapiens
  misc_RNA (1)...(19): siRNA sense strand
uagggaaccuggcagaucu

SEQ ID NO: 34397 - RNA, 19 nt, Homo sapiens
  misc_RNA (1)...(19): siRNA sense strand
ucuccgaugucauauggaa

SEQ ID NO: 34398 - RNA, 19 nt, Homo sapiens
  misc_RNA (1)...(19): siRNA sense strand
gagaagaugaagggcauga

SEQ ID NO: 34399 - RNA, 19 nt, Homo sapiens
  misc_RNA (1)...(19): siRNA sense strand
cgacguggugcgccuguuu

SEQ ID NO: 34400 - RNA, 19 nt, Homo sapiens
  misc_RNA (1)...(19): siRNA sense strand
ucuuugaaguagccaauga

SEQ ID NO: 34401 - RNA, 19 nt, Homo sapiens
  misc_RNA (1)...(19): siRNA sense strand
uacaaggaguucuuugaag

SEQ ID NO: 34402 - RNA, 19 nt, Homo sapiens
  misc_RNA (1)...(19): siRNA sense strand
ccugaaaggaucauacaug

SEQ ID NO: 34403 - RNA, 19 nt, Homo sapiens
  misc_RNA (1)...(19): siRNA sense strand
gaaguagccaaugauguca

SEQ ID NO: 34404 - RNA, 19 nt, Homo sapiens
  misc_RNA (1)...(19): siRNA sense strand
ccacauccagucccucuuc

SEQ ID NO: 34405 - RNA, 19 nt, Homo sapiens
  misc_RNA (1)...(19): siRNA sense strand
ggcagaaggugcgcauagu

SEQ ID NO: 34406 - RNA, 19 nt, Homo sapiens
  misc_RNA (1)...(19): siRNA sense strand
gcagaugaagaagcagaaa

SEQ ID NO: 34407 - RNA, 19 nt, Homo sapiens
  misc_RNA (1)...(19): siRNA sense strand
cagcuccgguguggccuuu

SEQ ID NO: 34408 - RNA, 19 nt, Homo sapiens
  misc_RNA (1)...(19): siRNA sense strand
gaccugggacaucuggaaa

SEQ ID NO: 34409 - RNA, 19 nt, Homo sapiens
  misc_RNA (1)...(19): siRNA sense strand
gagcuggcuguaccugaaa

SEQ ID NO: 34410 - RNA, 19 nt, Homo sapiens
  misc_RNA (1)...(19): siRNA sense strand
cagacccacucacccucua

SEQ ID NO: 34411 - RNA, 19 nt, Homo sapiens
  misc_RNA (1)...(19): siRNA sense strand
ggagaucuacaaggaguuc

SEQ ID NO: 34412 - RNA, 19 nt, Homo sapiens
  misc_RNA (1)...(19): siRNA sense strand
gcugugaccgcaagaugga

SEQ ID NO: 34413 - RNA, 19 nt, Homo sapiens
  misc_RNA (1)...(19): siRNA sense strand
ggaagccuccugggacugu

SEQ ID NO: 34414 - RNA, 19 nt, Homo sapiens
  misc_RNA (1)...(19): siRNA sense strand
gggcugggccaccuuucuu

SEQ ID NO: 34415 - RNA, 19 nt, Homo sapiens
  misc_RNA (1)...(19): siRNA sense strand
ucuaugaccugggacaucu

SEQ ID NO: 34416 - RNA, 19 nt, Homo sapiens
  misc_RNA (1)...(19): siRNA sense strand
ugaaggaggcagccagcuu

SEQ ID NO: 34417 - RNA, 19 nt, Homo sapiens
  misc_RNA (1)...(19): siRNA sense strand
ggaagacgaggagaucuac

SEQ ID NO: 34418 - RNA, 19 nt, Homo sapiens
  misc_RNA (1)...(19): siRNA sense strand
ccucagccaagaccuacua

SEQ ID NO: 34419 - RNA, 19 nt, Homo sapiens
  misc_RNA (1)...(19): siRNA sense strand
agucgcaagugcagaugaa

SEQ ID NO: 34420 - RNA, 19 nt, Homo sapiens
  misc_RNA (1)...(19): siRNA sense strand
ucuacaaggaguucuuuga

SEQ ID NO: 34421 - RNA, 19 nt, Homo sapiens
  misc_RNA (1)...(19): siRNA sense strand
ugcucuggcugcucuauga

SEQ ID NO: 34422 - RNA, 19 nt, Homo sapiens
  misc_RNA (1)...(19): siRNA sense strand
gcagcgcaaaggccucuga

SEQ ID NO: 34423 - RNA, 19 nt, Homo sapiens
  misc_RNA (1)...(19): siRNA sense strand
agauggagguggcguucau

SEQ ID NO: 34424 - RNA, 19 nt, Homo sapiens
  misc_RNA (1)...(19): siRNA sense strand
gaugaagaagcagaaagug

SEQ ID NO: 34425 - RNA, 19 nt, Homo sapiens
  misc_RNA (1)...(19): siRNA sense strand
cgcaagugcagaugaagaa

SEQ ID NO: 34426 - RNA, 19 nt, Homo sapiens
  misc_RNA (1)...(19): siRNA sense strand
uccagucccucuucagcuu

SEQ ID NO: 34427 - RNA, 19 nt, Homo sapiens
  misc_RNA (1)...(19): siRNA sense strand
gcgcugugaccgcaagaug

SEQ ID NO: 34428 - RNA, 19 nt, Homo sapiens
  misc_RNA (1)...(19): siRNA sense strand
uggccgaccugucuaucau

SEQ ID NO: 34429 - RNA, 19 nt, Homo sapiens
  misc_RNA (1)...(19): siRNA sense strand
aaggaguucuuugaaguag

SEQ ID NO: 34430 - RNA, 19 nt, Homo sapiens
  misc_RNA (1)...(19): siRNA sense strand
cagccaagaccuacuaucg

SEQ ID NO: 34431 - RNA, 19 nt, Homo sapiens
  misc_RNA (1)...(19): siRNA sense strand
gucccucuauccucgagaa

SEQ ID NO: 34432 - RNA, 19 nt, Homo sapiens
  misc_RNA (1)...(19): siRNA sense strand
gccaucaagcugcaacuca

SEQ ID NO: 34433 - RNA, 19 nt, Homo sapiens
  misc_RNA (1)...(19): siRNA sense strand
ccgacucgcuggagcuucu

SEQ ID NO: 34434 - RNA, 19 nt, Homo sapiens
  misc_RNA (1)...(19): siRNA sense strand
gaaggucuccgaugucaua

SEQ ID NO: 34435 - RNA, 19 nt, Homo sapiens
  misc_RNA (1)...(19): siRNA sense strand
gaucauacaugcgcuguga

SEQ ID NO: 34436 - RNA, 19 nt, Homo sapiens
  misc_RNA (1)...(19): siRNA sense strand
gccgugagcuggugaagaa

SEQ ID NO: 34437 - RNA, 19 nt, Homo sapiens
  misc_RNA (1)...(19): siRNA sense strand
ugaagaaggucuccgaugu

SEQ ID NO: 34438 - RNA, 19 nt, Homo sapiens
  misc_RNA (1)...(19): siRNA sense strand
ggagcuggcuguaccugaa

SEQ ID NO: 34439 - RNA, 19 nt, Homo sapiens
  misc_RNA (1)...(19): siRNA sense strand
gaucaugccuggguagugu

SEQ ID NO: 34440 - RNA, 19 nt, Homo sapiens
  misc_RNA (1)...(19): siRNA sense strand
ugggacaucuggaaaggua

SEQ ID NO: 34441 - RNA, 19 nt, Homo sapiens
  misc_RNA (1)...(19): siRNA sense strand
caaggaguucuuugaagua

SEQ ID NO: 34442 - RNA, 19 nt, Homo sapiens
  misc_RNA (1)...(19): siRNA sense strand
acaaggaguucuuugaagu

SEQ ID NO: 34443 - RNA, 19 nt, Homo sapiens
  misc_RNA (1)...(19): siRNA sense strand
gaaccuggcagaucuagag

SEQ ID NO: 34444 - RNA, 19 nt, Homo sapiens
  misc_RNA (1)...(19): siRNA sense strand
ggucuccgaugucauaugg

SEQ ID NO: 34445 - RNA, 19 nt, Homo sapiens
  misc_RNA (1)...(19): siRNA sense strand
ccacugucauccaggacua

SEQ ID NO: 34446 - RNA, 19 nt, Homo sapiens
  misc_RNA (1)...(19): siRNA sense strand
acgaggagaucuacaagga

SEQ ID NO: 34447 - RNA, 19 nt, Homo sapiens
  misc_RNA (1)...(19): siRNA sense strand
cgucaucccuaccaacguu

SEQ ID NO: 34448 - RNA, 19 nt, Homo sapiens
  misc_RNA (1)...(19): siRNA sense strand
gaagaaggucuccgauguc

SEQ ID NO: 34449 - RNA, 19 nt, Homo sapiens
  misc_RNA (1)...(19): siRNA sense strand
gggaagacgaggagaucua

SEQ ID NO: 34450 - RNA, 19 nt, Homo sapiens
  misc_RNA (1)...(19): siRNA sense strand
gaacacaucuaccccuaca

SEQ ID NO: 34451 - RNA, 19 nt, Homo sapiens
  misc_RNA (1)...(19): siRNA sense strand
gaagaugaagggcaugaag

SEQ ID NO: 34452 - RNA, 19 nt, Homo sapiens
  misc_RNA (1)...(19): siRNA sense strand
ugacuacacucugucuuuc

SEQ ID NO: 34453 - RNA, 19 nt, Homo sapiens
  misc_RNA (1)...(19): siRNA sense strand
cuacaaggaguucuuugaa

SEQ ID NO: 34454 - RNA, 19 nt, Homo sapiens
  misc_RNA (1)...(19): siRNA sense strand
cagaaggugcgcauaguga

SEQ ID NO: 34455 - RNA, 19 nt, Homo sapiens
  misc_RNA (1)...(19): siRNA sense strand
gccaucaacccuuccauug

SEQ ID NO: 34456 - RNA, 19 nt, Homo sapiens
  misc_RNA (1)...(19): siRNA sense strand
gugacuacacucugucuuu

SEQ ID NO: 34457 - RNA, 19 nt, Homo sapiens
  misc_RNA (1)...(19): siRNA sense strand
ugaaguagccaaugauguc

SEQ ID NO: 34458 - RNA, 19 nt, Homo sapiens
  misc_RNA (1)...(19): siRNA sense strand
gaucuacaaggaguucuuu

SEQ ID NO: 34459 - RNA, 19 nt, Homo sapiens
  misc_RNA (1)...(19): siRNA sense strand
gcagaaggugcgcauagug

SEQ ID NO: 34460 - RNA, 19 nt, Homo sapiens
  misc_RNA (1)...(19): siRNA sense strand
aagaaggucuccgauguca

SEQ ID NO: 34461 - RNA, 19 nt, Homo sapiens
  misc_RNA (1)...(19): siRNA sense strand
gaccuacuaucgggaugaa

SEQ ID NO: 34462 - RNA, 19 nt, Homo sapiens
  misc_RNA (1)...(19): siRNA sense strand
uagggaaccuggcagaucu

SEQ ID NO: 34463 - RNA, 19 nt, Homo sapiens
  misc_RNA (1)...(19): siRNA sense strand
ucuccgaugucauauggaa

SEQ ID NO: 34464 - RNA, 19 nt, Homo sapiens
  misc_RNA (1)...(19): siRNA sense strand
gagaagaugaagggcauga

SEQ ID NO: 34465 - RNA, 19 nt, Homo sapiens
  misc_RNA (1)...(19): siRNA sense strand
cgacguggugcgccuguuu

SEQ ID NO: 34466 - RNA, 19 nt, Homo sapiens
  misc_RNA (1)...(19): siRNA sense strand
ucuuugaaguagccaauga

SEQ ID NO: 34467 - RNA, 19 nt, Homo sapiens
  misc_RNA (1)...(19): siRNA sense strand
uacaaggaguucuuugaag

SEQ ID NO: 34468 - RNA, 19 nt, Homo sapiens
  misc_RNA (1)...(19): siRNA sense strand
ccugaaaggaucauacaug

SEQ ID NO: 34469 - RNA, 19 nt, Homo sapiens
  misc_RNA (1)...(19): siRNA sense strand
gaaguagccaaugauguca

SEQ ID NO: 34470 - RNA, 19 nt, Homo sapiens
  misc_RNA (1)...(19): siRNA sense strand
ccacauccagucccucuuc

SEQ ID NO: 34471 - RNA, 19 nt, Homo sapiens
  misc_RNA (1)...(19): siRNA sense strand
ggcagaaggugcgcauagu

SEQ ID NO: 34472 - RNA, 19 nt, Homo sapiens
  misc_RNA (1)...(19): siRNA sense strand
gcagaugaagaagcagaaa

SEQ ID NO: 34473 - RNA, 19 nt, Homo sapiens
  misc_RNA (1)...(19): siRNA sense strand
cagcuccgguguggccuuu

SEQ ID NO: 34474 - RNA, 19 nt, Homo sapiens
  misc_RNA (1)...(19): siRNA sense strand
gaccugggacaucuggaaa

SEQ ID NO: 34475 - RNA, 19 nt, Homo sapiens
  misc_RNA (1)...(19): siRNA sense strand
gagcuggcuguaccugaaa

SEQ ID NO: 34476 - RNA, 19 nt, Homo sapiens
  misc_RNA (1)...(19): siRNA sense strand
cagacccacucacccucua

SEQ ID NO: 34477 - RNA, 19 nt, Homo sapiens
  misc_RNA (1)...(19): siRNA sense strand
ggagaucuacaaggaguuc

SEQ ID NO: 34478 - RNA, 19 nt, Homo sapiens
  misc_RNA (1)...(19): siRNA sense strand
gcugugaccgcaagaugga

SEQ ID NO: 34479 - RNA, 19 nt, Homo sapiens
  misc_RNA (1)...(19): siRNA sense strand
ggaagccuccugggacugu

SEQ ID NO: 34480 - RNA, 19 nt, Homo sapiens
  misc_RNA (1)...(19): siRNA sense strand
gggcugggccaccuuucuu

SEQ ID NO: 34481 - RNA, 19 nt, Homo sapiens
  misc_RNA (1)...(19): siRNA sense strand
ucuaugaccugggacaucu

SEQ ID NO: 34482 - RNA, 19 nt, Homo sapiens
  misc_RNA (1)...(19): siRNA sense strand
ugaaggaggcagccagcuu

SEQ ID NO: 34483 - RNA, 19 nt, Homo sapiens
  misc_RNA (1)...(19): siRNA sense strand
ggaagacgaggagaucuac

SEQ ID NO: 34484 - RNA, 19 nt, Homo sapiens
  misc_RNA (1)...(19): siRNA sense strand
ccucagccaagaccuacua

SEQ ID NO: 34485 - RNA, 19 nt, Homo sapiens
  misc_RNA (1)...(19): siRNA sense strand
agucgcaagugcagaugaa

SEQ ID NO: 34486 - RNA, 19 nt, Homo sapiens
  misc_RNA (1)...(19): siRNA sense strand
ucuacaaggaguucuuuga

SEQ ID NO: 34487 - RNA, 19 nt, Homo sapiens
  misc_RNA (1)...(19): siRNA sense strand
ugcucuggcugcucuauga

SEQ ID NO: 34488 - RNA, 19 nt, Homo sapiens
  misc_RNA (1)...(19): siRNA sense strand
gcagcgcaaaggccucuga

SEQ ID NO: 34489 - RNA, 19 nt, Homo sapiens
  misc_RNA (1)...(19): siRNA sense strand
agauggagguggcguucau

SEQ ID NO: 34490 - RNA, 19 nt, Homo sapiens
  misc_RNA (1)...(19): siRNA sense strand
gaugaagaagcagaaagug

SEQ ID NO: 34491 - RNA, 19 nt, Homo sapiens
  misc_RNA (1)...(19): siRNA sense strand
cgcaagugcagaugaagaa

SEQ ID NO: 34492 - RNA, 19 nt, Homo sapiens
  misc_RNA (1)...(19): siRNA sense strand
uccagucccucuucagcuu

SEQ ID NO: 34493 - RNA, 19 nt, Homo sapiens
  misc_RNA (1)...(19): siRNA sense strand
gcgcugugaccgcaagaug

SEQ ID NO: 34494 - RNA, 19 nt, Homo sapiens
  misc_RNA (1)...(19): siRNA sense strand
uggccgaccugucuaucau

SEQ ID NO: 34495 - RNA, 19 nt, Homo sapiens
  misc_RNA (1)...(19): siRNA sense strand
aaggaguucuuugaaguag

SEQ ID NO: 34496 - RNA, 19 nt, Homo sapiens
  misc_RNA (1)...(19): siRNA sense strand
cagccaagaccuacuaucg

SEQ ID NO: 34497 - RNA, 19 nt, Homo sapiens
  misc_RNA (1)...(19): siRNA sense strand
gucccucuauccucgagaa

SEQ ID NO: 34498 - RNA, 19 nt, Homo sapiens
  misc_RNA (1)...(19): siRNA sense strand
gccaucaagcugcaacuca

SEQ ID NO: 34499 - RNA, 19 nt, Homo sapiens
  misc_RNA (1)...(19): siRNA sense strand
ccgacucgcuggagcuucu

SEQ ID NO: 34500 - RNA, 19 nt, Homo sapiens
  misc_RNA (1)...(19): siRNA sense strand
gaaagaaccucucaacauu

SEQ ID NO: 34501 - RNA, 19 nt, Homo sapiens
  misc_RNA (1)...(19): siRNA sense strand
gaagaucaguuuccuaauu

SEQ ID NO: 34502 - RNA, 19 nt, Homo sapiens
  misc_RNA (1)...(19): siRNA sense strand
ggacaaggcugaccauaug

SEQ ID NO: 34503 - RNA, 19 nt, Homo sapiens
  misc_RNA (1)...(19): siRNA sense strand
ccaaugaccugcugaaauu

SEQ ID NO: 34504 - RNA, 19 nt, Homo sapiens
  misc_RNA (1)...(19): siRNA sense strand
gaacagcgagcuaaauaua

SEQ ID NO: 34505 - RNA, 19 nt, Homo sapiens
  misc_RNA (1)...(19): siRNA sense strand
gagcauacauuaaaccaaa

SEQ ID NO: 34506 - RNA, 19 nt, Homo sapiens
  misc_RNA (1)...(19): siRNA sense strand
ggaagaagaucacgaagau

SEQ ID NO: 34507 - RNA, 19 nt, Homo sapiens
  misc_RNA (1)...(19): siRNA sense strand
ggacaaugauggcaagaaa

SEQ ID NO: 34508 - RNA, 19 nt, Homo sapiens
  misc_RNA (1)...(19): siRNA sense strand
ccagagacauguaugauaa

SEQ ID NO: 34509 - RNA, 19 nt, Homo sapiens
  misc_RNA (1)...(19): siRNA sense strand
aauaagagcugugagaaua

SEQ ID NO: 34510 - RNA, 19 nt, Homo sapiens
  misc_RNA (1)...(19): siRNA sense strand
gaacagaaucacugacaua

SEQ ID NO: 34511 - RNA, 19 nt, Homo sapiens
  misc_RNA (1)...(19): siRNA sense strand
gaaguccucuuaacaucua

SEQ ID NO: 34512 - RNA, 19 nt, Homo sapiens
  misc_RNA (1)...(19): siRNA sense strand
agacaagcaucuucaguua

SEQ ID NO: 34513 - RNA, 19 nt, Homo sapiens
  misc_RNA (1)...(19): siRNA sense strand
gaaacuguaugcuggauga

SEQ ID NO: 34514 - RNA, 19 nt, Homo sapiens
  misc_RNA (1)...(19): siRNA sense strand
gaacuggugucccggauau

SEQ ID NO: 34515 - RNA, 19 nt, Homo sapiens
  misc_RNA (1)...(19): siRNA sense strand
gcacaaagcaagccagauu

SEQ ID NO: 34516 - RNA, 19 nt, Homo sapiens
  misc_RNA (1)...(19): siRNA sense strand
gaucuucucuacuuucauu

SEQ ID NO: 34517 - RNA, 19 nt, Homo sapiens
  misc_RNA (1)...(19): siRNA sense strand
ggagguguuuggaaagaua

SEQ ID NO: 34518 - RNA, 19 nt, Homo sapiens
  misc_RNA (1)...(19): siRNA sense strand
ggaaagaaccucucaacau

SEQ ID NO: 34519 - RNA, 19 nt, Homo sapiens
  misc_RNA (1)...(19): siRNA sense strand
ccaaagcgaugaaauaucu

SEQ ID NO: 34520 - RNA, 19 nt, Homo sapiens
  misc_RNA (1)...(19): siRNA sense strand
gcacuguuauuacuacuug

SEQ ID NO: 34521 - RNA, 19 nt, Homo sapiens
  misc_RNA (1)...(19): siRNA sense strand
uaaaggagaccucaccaua

SEQ ID NO: 34522 - RNA, 19 nt, Homo sapiens
  misc_RNA (1)...(19): siRNA sense strand
gugcaaagcugccagugaa

SEQ ID NO: 34523 - RNA, 19 nt, Homo sapiens
  misc_RNA (1)...(19): siRNA sense strand
caacaucgcucuaauucag

SEQ ID NO: 34524 - RNA, 19 nt, Homo sapiens
  misc_RNA (1)...(19): siRNA sense strand
ugaguuugcuguuaaauug

SEQ ID NO: 34525 - RNA, 19 nt, Homo sapiens
  misc_RNA (1)...(19): siRNA sense strand
ucacgaagaucccauugaa

SEQ ID NO: 34526 - RNA, 19 nt, Homo sapiens
  misc_RNA (1)...(19): siRNA sense strand
gcaauaccauaaauucuuc

SEQ ID NO: 34527 - RNA, 19 nt, Homo sapiens
  misc_RNA (1)...(19): siRNA sense strand
ggaaaugccucuggagugu

SEQ ID NO: 34528 - RNA, 19 nt, Homo sapiens
  misc_RNA (1)...(19): siRNA sense strand
ucaaauaugucaacgacuu

SEQ ID NO: 34529 - RNA, 19 nt, Homo sapiens
  misc_RNA (1)...(19): siRNA sense strand
cagaaucacugacauagga

SEQ ID NO: 34530 - RNA, 19 nt, Homo sapiens
  misc_RNA (1)...(19): siRNA sense strand
uaagagcugugagaauaua

SEQ ID NO: 34531 - RNA, 19 nt, Homo sapiens
  misc_RNA (1)...(19): siRNA sense strand
caaagaaggaaguguuuaa

SEQ ID NO: 34532 - RNA, 19 nt, Homo sapiens
  misc_RNA (1)...(19): siRNA sense strand
aguuaaaggugaaguguua

SEQ ID NO: 34533 - RNA, 19 nt, Homo sapiens
  misc_RNA (1)...(19): siRNA sense strand
gagccagccugaaugauga

SEQ ID NO: 34534 - RNA, 19 nt, Homo sapiens
  misc_RNA (1)...(19): siRNA sense strand
cagcaaagccaauuuauca

SEQ ID NO: 34535 - RNA, 19 nt, Homo sapiens
  misc_RNA (1)...(19): siRNA sense strand
guaagugcccgaaguguaa

SEQ ID NO: 34536 - RNA, 19 nt, Homo sapiens
  misc_RNA (1)...(19): siRNA sense strand
gaucagaauuucacaggau

SEQ ID NO: 34537 - RNA, 19 nt, Homo sapiens
  misc_RNA (1)...(19): siRNA sense strand
cuauguggauccuguaaua

SEQ ID NO: 34538 - RNA, 19 nt, Homo sapiens
  misc_RNA (1)...(19): siRNA sense strand
ggaaauaagagcugugaga

SEQ ID NO: 34539 - RNA, 19 nt, Homo sapiens
  misc_RNA (1)...(19): siRNA sense strand
ucaacaagaucgucaacaa

SEQ ID NO: 34540 - RNA, 19 nt, Homo sapiens
  misc_RNA (1)...(19): siRNA sense strand
cuacuuaugugaacguaaa

SEQ ID NO: 34541 - RNA, 19 nt, Homo sapiens
  misc_RNA (1)...(19): siRNA sense strand
ggagaaguuucccaauuuc

SEQ ID NO: 34542 - RNA, 19 nt, Homo sapiens
  misc_RNA (1)...(19): siRNA sense strand
ugauauauccaguccauua

SEQ ID NO: 34543 - RNA, 19 nt, Homo sapiens
  misc_RNA (1)...(19): siRNA sense strand
uuaaagaucugggcaguga

SEQ ID NO: 34544 - RNA, 19 nt, Homo sapiens
  misc_RNA (1)...(19): siRNA sense strand
gaaauaagagcugugagaa

SEQ ID NO: 34545 - RNA, 19 nt, Homo sapiens
  misc_RNA (1)...(19): siRNA sense strand
aaugagagcugcaccuuga

SEQ ID NO: 34546 - RNA, 19 nt, Homo sapiens
  misc_RNA (1)...(19): siRNA sense strand
ggauuucggaggaauaaua

SEQ ID NO: 34547 - RNA, 19 nt, Homo sapiens
  misc_RNA (1)...(19): siRNA sense strand
cguaaacaccuuugauaua

SEQ ID NO: 34548 - RNA, 19 nt, Homo sapiens
  misc_RNA (1)...(19): siRNA sense strand
gaaagucugcaaacucaaa

SEQ ID NO: 34549 - RNA, 19 nt, Homo sapiens
  misc_RNA (1)...(19): siRNA sense strand
ccagcuugcuagacaaaua

SEQ ID NO: 34550 - RNA, 19 nt, Homo sapiens
  misc_RNA (1)...(19): siRNA sense strand
gaagauaacgcugaugaug

SEQ ID NO: 34551 - RNA, 19 nt, Homo sapiens
  misc_RNA (1)...(19): siRNA sense strand
guacauaauccuguguuua

SEQ ID NO: 34552 - RNA, 19 nt, Homo sapiens
  misc_RNA (1)...(19): siRNA sense strand
guaaagaggcacuagcaaa

SEQ ID NO: 34553 - RNA, 19 nt, Homo sapiens
  misc_RNA (1)...(19): siRNA sense strand
gaagcaggaaggaacuuua

SEQ ID NO: 34554 - RNA, 19 nt, Homo sapiens
  misc_RNA (1)...(19): siRNA sense strand
cgagaauggucauaaaugu

SEQ ID NO: 34555 - RNA, 19 nt, Homo sapiens
  misc_RNA (1)...(19): siRNA sense strand
gaauaucgaacagaguuua

SEQ ID NO: 34556 - RNA, 19 nt, Homo sapiens
  misc_RNA (1)...(19): siRNA sense strand
gcugguggcacuuuacuua

SEQ ID NO: 34557 - RNA, 19 nt, Homo sapiens
  misc_RNA (1)...(19): siRNA sense strand
uaggagaaguuucccaauu

SEQ ID NO: 34558 - RNA, 19 nt, Homo sapiens
  misc_RNA (1)...(19): siRNA sense strand
cagaagaucaguuuccuaa

SEQ ID NO: 34559 - RNA, 19 nt, Homo sapiens
  misc_RNA (1)...(19): siRNA sense strand
gcacuuuacuuacuuuaac

SEQ ID NO: 34560 - RNA, 19 nt, Homo sapiens
  misc_RNA (1)...(19): siRNA sense strand
gcaaaauacuguccacauu

SEQ ID NO: 34561 - RNA, 19 nt, Homo sapiens
  misc_RNA (1)...(19): siRNA sense strand
aggagaaguuucccaauuu

SEQ ID NO: 34562 - RNA, 19 nt, Homo sapiens
  misc_RNA (1)...(19): siRNA sense strand
ggaaagauaacaucaacau

SEQ ID NO: 34563 - RNA, 19 nt, Homo sapiens
  misc_RNA (1)...(19): siRNA sense strand
gacguaaacaccuuugaua

SEQ ID NO: 34564 - RNA, 19 nt, Homo sapiens
  misc_RNA (1)...(19): siRNA sense strand
caaaugaaucuguagacua

SEQ ID NO: 34565 - RNA, 19 nt, Homo sapiens
  misc_RNA (1)...(19): siRNA sense strand
gaauuucacaggauugauu

SEQ ID NO: 34566 - RNA, 19 nt, Homo sapiens
  misc_RNA (1)...(19): siRNA sense strand
ggacauggacucaacagau

SEQ ID NO: 34567 - RNA, 19 nt, Homo sapiens
  misc_RNA (1)...(19): siRNA sense strand
gugcauucccuaucaaaua

SEQ ID NO: 34568 - RNA, 19 nt, Homo sapiens
  misc_RNA (1)...(19): siRNA sense strand
gaucauccauugcauucga

SEQ ID NO: 34569 - RNA, 19 nt, Homo sapiens
  misc_RNA (1)...(19): siRNA sense strand
guaaaggaccgguucauca

SEQ ID NO: 34570 - RNA, 19 nt, Homo sapiens
  misc_RNA (1)...(19): siRNA sense strand
caaucauacugcugacaua

SEQ ID NO: 34571 - RNA, 19 nt, Homo sapiens
  misc_RNA (1)...(19): siRNA sense strand
gagaugaaugugaauauga

SEQ ID NO: 34572 - RNA, 19 nt, Homo sapiens
  misc_RNA (1)...(19): siRNA sense strand
ggaucgaucugccaugugu

SEQ ID NO: 34573 - RNA, 19 nt, Homo sapiens
  misc_RNA (1)...(19): siRNA sense strand
ggaaacacccauccagaau

SEQ ID NO: 34574 - RNA, 19 nt, Homo sapiens
  misc_RNA (1)...(19): siRNA sense strand
gaaauugaacagcgagcua

SEQ ID NO: 34575 - RNA, 19 nt, Homo sapiens
  misc_RNA (1)...(19): siRNA sense strand
uaacaucuauauccaccuu

SEQ ID NO: 34576 - RNA, 19 nt, Homo sapiens
  misc_RNA (1)...(19): siRNA sense strand
caacaagaucgucaacaaa

SEQ ID NO: 34577 - RNA, 19 nt, Homo sapiens
  misc_RNA (1)...(19): siRNA sense strand
gcagcgcguugacuuauuc

SEQ ID NO: 34578 - RNA, 19 nt, Homo sapiens
  misc_RNA (1)...(19): siRNA sense strand
gaaaugcgcccauccuuuu

SEQ ID NO: 34579 - RNA, 19 nt, Homo sapiens
  misc_RNA (1)...(19): siRNA sense strand
gugaaauccuugaacagaa

SEQ ID NO: 34580 - RNA, 19 nt, Homo sapiens
  misc_RNA (1)...(19): siRNA sense strand
gaaauucauccaaccaaau

SEQ ID NO: 34581 - RNA, 19 nt, Homo sapiens
  misc_RNA (1)...(19): siRNA sense strand
gagacaagcaucuucaguu

SEQ ID NO: 34582 - RNA, 19 nt, Homo sapiens
  misc_RNA (1)...(19): siRNA sense strand
gagcugcaccuugacuuua

SEQ ID NO: 34583 - RNA, 19 nt, Homo sapiens
  misc_RNA (1)...(19): siRNA sense strand
gaagguugcugaguacaag

SEQ ID NO: 34584 - RNA, 19 nt, Homo sapiens
  misc_RNA (1)...(19): siRNA sense strand
gaaguuucccaauuucuga

SEQ ID NO: 34585 - RNA, 19 nt, Homo sapiens
  misc_RNA (1)...(19): siRNA sense strand
aaacacccauccagaaugu

SEQ ID NO: 34586 - RNA, 19 nt, Homo sapiens
  misc_RNA (1)...(19): siRNA sense strand
ugaauuaguucgcuacgau

SEQ ID NO: 34587 - RNA, 19 nt, Homo sapiens
  misc_RNA (1)...(19): siRNA sense strand
gguguugucucaauaucaa

SEQ ID NO: 34588 - RNA, 19 nt, Homo sapiens
  misc_RNA (1)...(19): siRNA sense strand
gacauggacucaacagauc

SEQ ID NO: 34589 - RNA, 19 nt, Homo sapiens
  misc_RNA (1)...(19): siRNA sense strand
gauuguggagcauacauua

SEQ ID NO: 34590 - RNA, 19 nt, Homo sapiens
  misc_RNA (1)...(19): siRNA sense strand
gagguucacugcauauucu

SEQ ID NO: 34591 - RNA, 19 nt, Homo sapiens
  misc_RNA (1)...(19): siRNA sense strand
gaacgcuacuuaugugaac

SEQ ID NO: 34592 - RNA, 19 nt, Homo sapiens
  misc_RNA (1)...(19): siRNA sense strand
ucagcgaucuucucuacuu

SEQ ID NO: 34593 - RNA, 19 nt, Homo sapiens
  misc_RNA (1)...(19): siRNA sense strand
caagugcaguauccucuga

SEQ ID NO: 34594 - RNA, 19 nt, Homo sapiens
  misc_RNA (1)...(19): siRNA sense strand
gaugggauccuuuccaaau

SEQ ID NO: 34595 - RNA, 19 nt, Homo sapiens
  misc_RNA (1)...(19): siRNA sense strand
cauaaacucuggauugcau

SEQ ID NO: 34596 - RNA, 19 nt, Homo sapiens
  misc_RNA (1)...(19): siRNA sense strand
ugaaauccuugaacagaau

SEQ ID NO: 34597 - RNA, 19 nt, Homo sapiens
  misc_RNA (1)...(19): siRNA sense strand
cagucaagguugcugauuu

SEQ ID NO: 34598 - RNA, 19 nt, Homo sapiens
  misc_RNA (1)...(19): siRNA sense strand
gcgaugaaauaucuugcaa

SEQ ID NO: 34599 - RNA, 19 nt, Homo sapiens
  misc_RNA (1)...(19): siRNA sense strand
gaaucugccugcgaaguga

SEQ ID NO: 34600 - RNA, 19 nt, Homo sapiens
  misc_RNA (1)...(19): siRNA sense strand
ggaccuggcuggagaagaa

SEQ ID NO: 34601 - RNA, 19 nt, Homo sapiens
  misc_RNA (1)...(19): siRNA sense strand
acaaggagcucccgcagua

SEQ ID NO: 34602 - RNA, 19 nt, Homo sapiens
  misc_RNA (1)...(19): siRNA sense strand
aggcuaagcuuguacaaua

SEQ ID NO: 34603 - RNA, 19 nt, Homo sapiens
  misc_RNA (1)...(19): siRNA sense strand
ggaagaagaggcccuauga

SEQ ID NO: 34604 - RNA, 19 nt, Homo sapiens
  misc_RNA (1)...(19): siRNA sense strand
gcacauaggaccagaugaa

SEQ ID NO: 34605 - RNA, 19 nt, Homo sapiens
  misc_RNA (1)...(19): siRNA sense strand
gaacaggggucuccaguau

SEQ ID NO: 34606 - RNA, 19 nt, Homo sapiens
  misc_RNA (1)...(19): siRNA sense strand
gaagugaucggugagagua

SEQ ID NO: 34607 - RNA, 19 nt, Homo sapiens
  misc_RNA (1)...(19): siRNA sense strand
caacaggauucacggauca

SEQ ID NO: 34608 - RNA, 19 nt, Homo sapiens
  misc_RNA (1)...(19): siRNA sense strand
ccaagucccugaaggaugu

SEQ ID NO: 34609 - RNA, 19 nt, Homo sapiens
  misc_RNA (1)...(19): siRNA sense strand
agaaggugcuugcgaggua

SEQ ID NO: 34610 - RNA, 19 nt, Homo sapiens
  misc_RNA (1)...(19): siRNA sense strand
gagaggagcagcagcaaga

SEQ ID NO: 34611 - RNA, 19 nt, Homo sapiens
  misc_RNA (1)...(19): siRNA sense strand
ggagaugccagcagaaguu

SEQ ID NO: 34612 - RNA, 19 nt, Homo sapiens
  misc_RNA (1)...(19): siRNA sense strand
cagcugaaguccuuggaaa

SEQ ID NO: 34613 - RNA, 19 nt, Homo sapiens
  misc_RNA (1)...(19): siRNA sense strand
ccacuucuaugaccagaug

SEQ ID NO: 34614 - RNA, 19 nt, Homo sapiens
  misc_RNA (1)...(19): siRNA sense strand
gaaagcuugugcagacuca

SEQ ID NO: 34615 - RNA, 19 nt, Homo sapiens
  misc_RNA (1)...(19): siRNA sense strand
ccaacaagcuuccaaaaug

SEQ ID NO: 34616 - RNA, 19 nt, Homo sapiens
  misc_RNA (1)...(19): siRNA sense strand
gugaugcgcuacuuugaga

SEQ ID NO: 34617 - RNA, 19 nt, Homo sapiens
  misc_RNA (1)...(19): siRNA sense strand
cgaggaggcuggaauuugg

SEQ ID NO: 34618 - RNA, 19 nt, Homo sapiens
  misc_RNA (1)...(19): siRNA sense strand
ugaccugggugccuacaaa

SEQ ID NO: 34619 - RNA, 19 nt, Homo sapiens
  misc_RNA (1)...(19): siRNA sense strand
ccacugaccugcccagcau

SEQ ID NO: 34620 - RNA, 19 nt, Homo sapiens
  misc_RNA (1)...(19): siRNA sense strand
gaagaggcccuaugacaac

SEQ ID NO: 34621 - RNA, 19 nt, Homo sapiens
  misc_RNA (1)...(19): siRNA sense strand
gcagaaaagucagaaaaga

SEQ ID NO: 34622 - RNA, 19 nt, Homo sapiens
  misc_RNA (1)...(19): siRNA sense strand
ggcuaagcuuguacaauaa

SEQ ID NO: 34623 - RNA, 19 nt, Homo sapiens
  misc_RNA (1)...(19): siRNA sense strand
ggagaaaaccgaccagauu

SEQ ID NO: 34624 - RNA, 19 nt, Homo sapiens
  misc_RNA (1)...(19): siRNA sense strand
caaggccgacgcccuauuu

SEQ ID NO: 34625 - RNA, 19 nt, Homo sapiens
  misc_RNA (1)...(19): siRNA sense strand
cagcagaaguugggcagaa

SEQ ID NO: 34626 - RNA, 19 nt, Homo sapiens
  misc_RNA (1)...(19): siRNA sense strand
cauggaaggugaugaagag

SEQ ID NO: 34627 - RNA, 19 nt, Homo sapiens
  misc_RNA (1)...(19): siRNA sense strand
gcuguugugugacauggaa

SEQ ID NO: 34628 - RNA, 19 nt, Homo sapiens
  misc_RNA (1)...(19): siRNA sense strand
ggcgauggccaaaggcuua

SEQ ID NO: 34629 - RNA, 19 nt, Homo sapiens
  misc_RNA (1)...(19): siRNA sense strand
gcaaggacauuuucaagca

SEQ ID NO: 34630 - RNA, 19 nt, Homo sapiens
  misc_RNA (1)...(19): siRNA sense strand
cagggaggcuuaugccaau

SEQ ID NO: 34631 - RNA, 19 nt, Homo sapiens
  misc_RNA (1)...(19): siRNA sense strand
ugagggacccauccaguuu

SEQ ID NO: 34632 - RNA, 19 nt, Homo sapiens
  misc_RNA (1)...(19): siRNA sense strand
guacgacuuugucuucucu

SEQ ID NO: 34633 - RNA, 19 nt, Homo sapiens
  misc_RNA (1)...(19): siRNA sense strand
ggccaaaggcuuaguccaa

SEQ ID NO: 34634 - RNA, 19 nt, Homo sapiens
  misc_RNA (1)...(19): siRNA sense strand
ugacauggaaggugaugaa

SEQ ID NO: 34635 - RNA, 19 nt, Homo sapiens
  misc_RNA (1)...(19): siRNA sense strand
caugggcucuggcaaaucu

SEQ ID NO: 34636 - RNA, 19 nt, Homo sapiens
  misc_RNA (1)...(19): siRNA sense strand
cauaggaccagaugaagug

SEQ ID NO: 34637 - RNA, 19 nt, Homo sapiens
  misc_RNA (1)...(19): siRNA sense strand
ggucagggcaagagcuauu

SEQ ID NO: 34638 - RNA, 19 nt, Homo sapiens
  misc_RNA (1)...(19): siRNA sense strand
ccaguacgacuuugucuuc

SEQ ID NO: 34639 - RNA, 19 nt, Homo sapiens
  misc_RNA (1)...(19): siRNA sense strand
agaagaggcccuaugacaa

SEQ ID NO: 34640 - RNA, 19 nt, Homo sapiens
  misc_RNA (1)...(19): siRNA sense strand
ggccgcagacaucaaagua

SEQ ID NO: 34641 - RNA, 19 nt, Homo sapiens
  misc_RNA (1)...(19): siRNA sense strand
ggaccuggaugcgcugagu

SEQ ID NO: 34642 - RNA, 19 nt, Homo sapiens
  misc_RNA (1)...(19): siRNA sense strand
ccaaaggcuuaguccaaca

SEQ ID NO: 34643 - RNA, 19 nt, Homo sapiens
  misc_RNA (1)...(19): siRNA sense strand
gcucacugcaggacacgua

SEQ ID NO: 34644 - RNA, 19 nt, Homo sapiens
  misc_RNA (1)...(19): siRNA sense strand
aggaacaccugcaacaaca

SEQ ID NO: 34645 - RNA, 19 nt, Homo sapiens
  misc_RNA (1)...(19): siRNA sense strand
ggccacuucuucucaguca

SEQ ID NO: 34646 - RNA, 19 nt, Homo sapiens
  misc_RNA (1)...(19): siRNA sense strand
acacagacaccaucaacug

SEQ ID NO: 34647 - RNA, 19 nt, Homo sapiens
  misc_RNA (1)...(19): siRNA sense strand
uggagacgcuggcgaugug

SEQ ID NO: 34648 - RNA, 19 nt, Homo sapiens
  misc_RNA (1)...(19): siRNA sense strand
uggaugcgcugagugagaa

SEQ ID NO: 34649 - RNA, 19 nt, Homo sapiens
  misc_RNA (1)...(19): siRNA sense strand
ucagcugugucacccguuu

SEQ ID NO: 34650 - RNA, 19 nt, Homo sapiens
  misc_RNA (1)...(19): siRNA sense strand
ggaggcuuaugccaauauc

SEQ ID NO: 34651 - RNA, 19 nt, Homo sapiens
  misc_RNA (1)...(19): siRNA sense strand
ggacgcccaccaucccauu

SEQ ID NO: 34652 - RNA, 19 nt, Homo sapiens
  misc_RNA (1)...(19): siRNA sense strand
caccaucgagccuuucaaa

SEQ ID NO: 34653 - RNA, 19 nt, Homo sapiens
  misc_RNA (1)...(19): siRNA sense strand
aagaagaggcccuaugaca

SEQ ID NO: 34654 - RNA, 19 nt, Homo sapiens
  misc_RNA (1)...(19): siRNA sense strand
gcaaggccgacgcccuauu

SEQ ID NO: 34655 - RNA, 19 nt, Homo sapiens
  misc_RNA (1)...(19): siRNA sense strand
caacaagcuuccaaaaugg

SEQ ID NO: 34656 - RNA, 19 nt, Homo sapiens
  misc_RNA (1)...(19): siRNA sense strand
ucguugagcugccugaauc

SEQ ID NO: 34657 - RNA, 19 nt, Homo sapiens
  misc_RNA (1)...(19): siRNA sense strand
acucagaacccgacacaga

SEQ ID NO: 34658 - RNA, 19 nt, Homo sapiens
  misc_RNA (1)...(19): siRNA sense strand
ggccugagcaaggacauuu

SEQ ID NO: 34659 - RNA, 19 nt, Homo sapiens
  misc_RNA (1)...(19): siRNA sense strand
ggacguccaguacaacaag

SEQ ID NO: 34660 - RNA, 19 nt, Homo sapiens
  misc_RNA (1)...(19): siRNA sense strand
ccgcagcacuggcauuugc

SEQ ID NO: 34661 - RNA, 19 nt, Homo sapiens
  misc_RNA (1)...(19): siRNA sense strand
ccagcuuccuccugcaaug

SEQ ID NO: 34662 - RNA, 19 nt, Homo sapiens
  misc_RNA (1)...(19): siRNA sense strand
ccuauggccugcaggaucu

SEQ ID NO: 34663 - RNA, 19 nt, Homo sapiens
  misc_RNA (1)...(19): siRNA sense strand
gagggacccauccaguuug

SEQ ID NO: 34664 - RNA, 19 nt, Homo sapiens
  misc_RNA (1)...(19): siRNA sense strand
acucagaggacgagaaguu

SEQ ID NO: 34665 - RNA, 19 nt, Homo sapiens
  misc_RNA (1)...(19): siRNA sense strand
gacagagcaccaagacaga

SEQ ID NO: 34666 - RNA, 19 nt, Homo sapiens
  misc_RNA (1)...(19): siRNA sense strand
ggucuccaguauauucauc

SEQ ID NO: 34667 - RNA, 19 nt, Homo sapiens
  misc_RNA (1)...(19): siRNA sense strand
ccaaggcagcucacagugu

SEQ ID NO: 34668 - RNA, 19 nt, Homo sapiens
  misc_RNA (1)...(19): siRNA sense strand
guggcgaaaucaaggacaa

SEQ ID NO: 34669 - RNA, 19 nt, Homo sapiens
  misc_RNA (1)...(19): siRNA sense strand
gagcuggaagcgcaagaug

SEQ ID NO: 34670 - RNA, 19 nt, Homo sapiens
  misc_RNA (1)...(19): siRNA sense strand
cccauucaguguccaggaa

SEQ ID NO: 34671 - RNA, 19 nt, Homo sapiens
  misc_RNA (1)...(19): siRNA sense strand
gggaggcuuaugccaauau

SEQ ID NO: 34672 - RNA, 19 nt, Homo sapiens
  misc_RNA (1)...(19): siRNA sense strand
ggaagaccugggaaagcuu

SEQ ID NO: 34673 - RNA, 19 nt, Homo sapiens
  misc_RNA (1)...(19): siRNA sense strand
gaagaagaggcccuaugac

SEQ ID NO: 34674 - RNA, 19 nt, Homo sapiens
  misc_RNA (1)...(19): siRNA sense strand
gaccggccacuucuucuca

SEQ ID NO: 34675 - RNA, 19 nt, Homo sapiens
  misc_RNA (1)...(19): siRNA sense strand
acaggggucuccaguauau

SEQ ID NO: 34676 - RNA, 19 nt, Homo sapiens
  misc_RNA (1)...(19): siRNA sense strand
gagaugccagcagaaguug

SEQ ID NO: 34677 - RNA, 19 nt, Homo sapiens
  misc_RNA (1)...(19): siRNA sense strand
gcgcugagugagaacaaga

SEQ ID NO: 34678 - RNA, 19 nt, Homo sapiens
  misc_RNA (1)...(19): siRNA sense strand
uggaagaccugggaaagcu

SEQ ID NO: 34679 - RNA, 19 nt, Homo sapiens
  misc_RNA (1)...(19): siRNA sense strand
ccgaggaggcuggaauuug

SEQ ID NO: 34680 - RNA, 19 nt, Homo sapiens
  misc_RNA (1)...(19): siRNA sense strand
gcucugaguggcgaaauca

SEQ ID NO: 34681 - RNA, 19 nt, Homo sapiens
  misc_RNA (1)...(19): siRNA sense strand
cgacacagacaccaucaac

SEQ ID NO: 34682 - RNA, 19 nt, Homo sapiens
  misc_RNA (1)...(19): siRNA sense strand
gcguucugcucauccuaga

SEQ ID NO: 34683 - RNA, 19 nt, Homo sapiens
  misc_RNA (1)...(19): siRNA sense strand
cccaugggcucuggcaaau

SEQ ID NO: 34684 - RNA, 19 nt, Homo sapiens
  misc_RNA (1)...(19): siRNA sense strand
gggcagaaaagucagaaaa

SEQ ID NO: 34685 - RNA, 19 nt, Homo sapiens
  misc_RNA (1)...(19): siRNA sense strand
ucaaagccaagucccugaa

SEQ ID NO: 34686 - RNA, 19 nt, Homo sapiens
  misc_RNA (1)...(19): siRNA sense strand
ccucacgccuccugaugca

SEQ ID NO: 34687 - RNA, 19 nt, Homo sapiens
  misc_RNA (1)...(19): siRNA sense strand
uggcugggcugaucuucca

SEQ ID NO: 34688 - RNA, 19 nt, Homo sapiens
  misc_RNA (1)...(19): siRNA sense strand
gcauugaccccaaggaaga

SEQ ID NO: 34689 - RNA, 19 nt, Homo sapiens
  misc_RNA (1)...(19): siRNA sense strand
gaugacagagcaccaagac

SEQ ID NO: 34690 - RNA, 19 nt, Homo sapiens
  misc_RNA (1)...(19): siRNA sense strand
ggaugacagagcaccaaga

SEQ ID NO: 34691 - RNA, 19 nt, Homo sapiens
  misc_RNA (1)...(19): siRNA sense strand
uggagcaggcccaggcaua

SEQ ID NO: 34692 - RNA, 19 nt, Homo sapiens
  misc_RNA (1)...(19): siRNA sense strand
ucuccaguauauucaucua

SEQ ID NO: 34693 - RNA, 19 nt, Homo sapiens
  misc_RNA (1)...(19): siRNA sense strand
gagaaaaccgaccagauuc

SEQ ID NO: 34694 - RNA, 19 nt, Homo sapiens
  misc_RNA (1)...(19): siRNA sense strand
ggcuggagaagaagagauu

SEQ ID NO: 34695 - RNA, 19 nt, Homo sapiens
  misc_RNA (1)...(19): siRNA sense strand
uuggaaacccucaaucugu

SEQ ID NO: 34696 - RNA, 19 nt, Homo sapiens
  misc_RNA (1)...(19): siRNA sense strand
aggagaaguucaccaucga

SEQ ID NO: 34697 - RNA, 19 nt, Homo sapiens
  misc_RNA (1)...(19): siRNA sense strand
gccucuaccacuucuauga

SEQ ID NO: 34698 - RNA, 19 nt, Homo sapiens
  misc_RNA (1)...(19): siRNA sense strand
ggccgaggaggcuggaauu

SEQ ID NO: 34699 - RNA, 19 nt, Homo sapiens
  misc_RNA (1)...(19): siRNA sense strand
gcgaaaucaaggacaagga

SEQ ID NO: 34700 - RNA, 19 nt, Homo sapiens
  misc_RNA (1)...(19): siRNA sense strand
gaagauguccugggaaaua

SEQ ID NO: 34701 - RNA, 19 nt, Homo sapiens
  misc_RNA (1)...(19): siRNA sense strand
gaaggaagaugccaugaag

SEQ ID NO: 34702 - RNA, 19 nt, Homo sapiens
  misc_RNA (1)...(19): siRNA sense strand
ggaaaggaccucaggauga

SEQ ID NO: 34703 - RNA, 19 nt, Homo sapiens
  misc_RNA (1)...(19): siRNA sense strand
ggaaagugcuggugcuuca

SEQ ID NO: 34704 - RNA, 19 nt, Homo sapiens
  misc_RNA (1)...(19): siRNA sense strand
gcucagaccuuggccauga

SEQ ID NO: 34705 - RNA, 19 nt, Homo sapiens
  misc_RNA (1)...(19): siRNA sense strand
gaacacagcgggaaucaca

SEQ ID NO: 34706 - RNA, 19 nt, Homo sapiens
  misc_RNA (1)...(19): siRNA sense strand
cagaagauguccugggaaa

SEQ ID NO: 34707 - RNA, 19 nt, Homo sapiens
  misc_RNA (1)...(19): siRNA sense strand
ccacacagcucggauuuca

SEQ ID NO: 34708 - RNA, 19 nt, Homo sapiens
  misc_RNA (1)...(19): siRNA sense strand
gaaaggaccucaggaugac

SEQ ID NO: 34709 - RNA, 19 nt, Homo sapiens
  misc_RNA (1)...(19): siRNA sense strand
ggauggaucugugcaguca

SEQ ID NO: 34710 - RNA, 19 nt, Homo sapiens
  misc_RNA (1)...(19): siRNA sense strand
ccaugaacgucaggaauuu

SEQ ID NO: 34711 - RNA, 19 nt, Homo sapiens
  misc_RNA (1)...(19): siRNA sense strand
gagauuagggucugugaga

SEQ ID NO: 34712 - RNA, 19 nt, Homo sapiens
  misc_RNA (1)...(19): siRNA sense strand
gaacgucaggaauuucuug

SEQ ID NO: 34713 - RNA, 19 nt, Homo sapiens
  misc_RNA (1)...(19): siRNA sense strand
ucaggaauuucuugaagga

SEQ ID NO: 34714 - RNA, 19 nt, Homo sapiens
  misc_RNA (1)...(19): siRNA sense strand
gacccuggcucauaucaag

SEQ ID NO: 34715 - RNA, 19 nt, Homo sapiens
  misc_RNA (1)...(19): siRNA sense strand
ggaacuacggcgauaucua

SEQ ID NO: 34716 - RNA, 19 nt, Homo sapiens
  misc_RNA (1)...(19): siRNA sense strand
ucugugagauccaugaaga

SEQ ID NO: 34717 - RNA, 19 nt, Homo sapiens
  misc_RNA (1)...(19): siRNA sense strand
gcucccagcauuucuacua

SEQ ID NO: 34718 - RNA, 19 nt, Homo sapiens
  misc_RNA (1)...(19): siRNA sense strand
aagauguccugggaaauaa

SEQ ID NO: 34719 - RNA, 19 nt, Homo sapiens
  misc_RNA (1)...(19): siRNA sense strand
gccaugaacgucaggaauu

SEQ ID NO: 34720 - RNA, 19 nt, Homo sapiens
  misc_RNA (1)...(19): siRNA sense strand
gaaagaaggcuugcauucc

SEQ ID NO: 34721 - RNA, 19 nt, Homo sapiens
  misc_RNA (1)...(19): siRNA sense strand
cgucaggaauuucuugaag

SEQ ID NO: 34722 - RNA, 19 nt, Homo sapiens
  misc_RNA (1)...(19): siRNA sense strand
gcuucuggcuggcaucuuc

SEQ ID NO: 34723 - RNA, 19 nt, Homo sapiens
  misc_RNA (1)...(19): siRNA sense strand
accaggagcucccagcauu

SEQ ID NO: 34724 - RNA, 19 nt, Homo sapiens
  misc_RNA (1)...(19): siRNA sense strand
cccacagucuucguuauaa

SEQ ID NO: 34725 - RNA, 19 nt, Homo sapiens
  misc_RNA (1)...(19): siRNA sense strand
gaagaccaagacacacuau

SEQ ID NO: 34726 - RNA, 19 nt, Homo sapiens
  misc_RNA (1)...(19): siRNA sense strand
agaaagaaggcuugcauuc

SEQ ID NO: 34727 - RNA, 19 nt, Homo sapiens
  misc_RNA (1)...(19): siRNA sense strand
uaucaaggaccagaaagaa

SEQ ID NO: 34728 - RNA, 19 nt, Homo sapiens
  misc_RNA (1)...(19): siRNA sense strand
ggagcucccagcauuucua

SEQ ID NO: 34729 - RNA, 19 nt, Homo sapiens
  misc_RNA (1)...(19): siRNA sense strand
ugagauccaugaagacaac

SEQ ID NO: 34730 - RNA, 19 nt, Homo sapiens
  misc_RNA (1)...(19): siRNA sense strand
uggcuggcaucuucccuuu

SEQ ID NO: 34731 - RNA, 19 nt, Homo sapiens
  misc_RNA (1)...(19): siRNA sense strand
ugaaggaagaugccaugaa

SEQ ID NO: 34732 - RNA, 19 nt, Homo sapiens
  misc_RNA (1)...(19): siRNA sense strand
uauguccguuguuguaaga

SEQ ID NO: 34733 - RNA, 19 nt, Homo sapiens
  misc_RNA (1)...(19): siRNA sense strand
gacacacuaucacgcuaug

SEQ ID NO: 34734 - RNA, 19 nt, Homo sapiens
  misc_RNA (1)...(19): siRNA sense strand
caccaggauuugccaagga

SEQ ID NO: 34735 - RNA, 19 nt, Homo sapiens
  misc_RNA (1)...(19): siRNA sense strand
agaccaagacacacuauca

SEQ ID NO: 34736 - RNA, 19 nt, Homo sapiens
  misc_RNA (1)...(19): siRNA sense strand
ccagaaagaaggcuugcau

SEQ ID NO: 34737 - RNA, 19 nt, Homo sapiens
  misc_RNA (1)...(19): siRNA sense strand
ccaugaagaccaagacaca

SEQ ID NO: 34738 - RNA, 19 nt, Homo sapiens
  misc_RNA (1)...(19): siRNA sense strand
aagaugccaugaagaccaa

SEQ ID NO: 34739 - RNA, 19 nt, Homo sapiens
  misc_RNA (1)...(19): siRNA sense strand
cagaaagaaggcuugcauu

SEQ ID NO: 34740 - RNA, 19 nt, Homo sapiens
  misc_RNA (1)...(19): siRNA sense strand
gcuggcaucuucccuuuug

SEQ ID NO: 34741 - RNA, 19 nt, Homo sapiens
  misc_RNA (1)...(19): siRNA sense strand
ggacagugggcagaagaug

SEQ ID NO: 34742 - RNA, 19 nt, Homo sapiens
  misc_RNA (1)...(19): siRNA sense strand
gagcucuuccucucccaaa

SEQ ID NO: 34743 - RNA, 19 nt, Homo sapiens
  misc_RNA (1)...(19): siRNA sense strand
ccacagucuucguuauaac

SEQ ID NO: 34744 - RNA, 19 nt, Homo sapiens
  misc_RNA (1)...(19): siRNA sense strand
ggagaggagcagagguuca

SEQ ID NO: 34745 - RNA, 19 nt, Homo sapiens
  misc_RNA (1)...(19): siRNA sense strand
ugaagaccaagacacacua

SEQ ID NO: 34746 - RNA, 19 nt, Homo sapiens
  misc_RNA (1)...(19): siRNA sense strand
ccaggagcucccagcauuu

SEQ ID NO: 34747 - RNA, 19 nt, Homo sapiens
  misc_RNA (1)...(19): siRNA sense strand
gauguccugggaaauaaga

SEQ ID NO: 34748 - RNA, 19 nt, Homo sapiens
  misc_RNA (1)...(19): siRNA sense strand
ugcaggaacuacggcgaua

SEQ ID NO: 34749 - RNA, 19 nt, Homo sapiens
  misc_RNA (1)...(19): siRNA sense strand
ucauaucaaggaccagaaa

SEQ ID NO: 34750 - RNA, 19 nt, Homo sapiens
  misc_RNA (1)...(19): siRNA sense strand
gcagaaaugcagggcaaag

SEQ ID NO: 34751 - RNA, 19 nt, Homo sapiens
  misc_RNA (1)...(19): siRNA sense strand
gacagugggcagaagaugu

SEQ ID NO: 34752 - RNA, 19 nt, Homo sapiens
  misc_RNA (1)...(19): siRNA sense strand
gauuagggucugugagauc

SEQ ID NO: 34753 - RNA, 19 nt, Homo sapiens
  misc_RNA (1)...(19): siRNA sense strand
guccguuguuguaagaaga

SEQ ID NO: 34754 - RNA, 19 nt, Homo sapiens
  misc_RNA (1)...(19): siRNA sense strand
gcaggaacuacggcgauau

SEQ ID NO: 34755 - RNA, 19 nt, Homo sapiens
  misc_RNA (1)...(19): siRNA sense strand
guucaccugcuacauggaa

SEQ ID NO: 34756 - RNA, 19 nt, Homo sapiens
  misc_RNA (1)...(19): siRNA sense strand
ugacagggaacggaaagga

SEQ ID NO: 34757 - RNA, 19 nt, Homo sapiens
  misc_RNA (1)...(19): siRNA sense strand
aaggagaggagcagagguu

SEQ ID NO: 34758 - RNA, 19 nt, Homo sapiens
  misc_RNA (1)...(19): siRNA sense strand
cagagucauuggcagacau

SEQ ID NO: 34759 - RNA, 19 nt, Homo sapiens
  misc_RNA (1)...(19): siRNA sense strand
gaacugaccugcccuauuu

SEQ ID NO: 34760 - RNA, 19 nt, Homo sapiens
  misc_RNA (1)...(19): siRNA sense strand
cagcaaagacgacagauua

SEQ ID NO: 34761 - RNA, 19 nt, Homo sapiens
  misc_RNA (1)...(19): siRNA sense strand
gcugauagcuggaugauag

SEQ ID NO: 34762 - RNA, 19 nt, Homo sapiens
  misc_RNA (1)...(19): siRNA sense strand
gaacaagugucugacgauu

SEQ ID NO: 34763 - RNA, 19 nt, Homo sapiens
  misc_RNA (1)...(19): siRNA sense strand
acaaacagccaaccauuua

SEQ ID NO: 34764 - RNA, 19 nt, Homo sapiens
  misc_RNA (1)...(19): siRNA sense strand
agaagaaacugcuagaaug

SEQ ID NO: 34765 - RNA, 19 nt, Homo sapiens
  misc_RNA (1)...(19): siRNA sense strand
caugauaacuugacaguag

SEQ ID NO: 34766 - RNA, 19 nt, Homo sapiens
  misc_RNA (1)...(19): siRNA sense strand
ggagugugaucuucucauu

SEQ ID NO: 34767 - RNA, 19 nt, Homo sapiens
  misc_RNA (1)...(19): siRNA sense strand
gaaaucaaccucaaugaca

SEQ ID NO: 34768 - RNA, 19 nt, Homo sapiens
  misc_RNA (1)...(19): siRNA sense strand
gaaagccacucacccgaau

SEQ ID NO: 34769 - RNA, 19 nt, Homo sapiens
  misc_RNA (1)...(19): siRNA sense strand
gcacacagccucugcuuca

SEQ ID NO: 34770 - RNA, 19 nt, Homo sapiens
  misc_RNA (1)...(19): siRNA sense strand
caaacuggcucagcagauu

SEQ ID NO: 34771 - RNA, 19 nt, Homo sapiens
  misc_RNA (1)...(19): siRNA sense strand
uaacggcucuaucgccuuu

SEQ ID NO: 34772 - RNA, 19 nt, Homo sapiens
  misc_RNA (1)...(19): siRNA sense strand
gugaauauguacuguguga

SEQ ID NO: 34773 - RNA, 19 nt, Homo sapiens
  misc_RNA (1)...(19): siRNA sense strand
caaagacgacagauuauug

SEQ ID NO: 34774 - RNA, 19 nt, Homo sapiens
  misc_RNA (1)...(19): siRNA sense strand
gagaagaaacugcuagaau

SEQ ID NO: 34775 - RNA, 19 nt, Homo sapiens
  misc_RNA (1)...(19): siRNA sense strand
acaagugucugacgauuau

SEQ ID NO: 34776 - RNA, 19 nt, Homo sapiens
  misc_RNA (1)...(19): siRNA sense strand
gaagaaacugcuagaaugu

SEQ ID NO: 34777 - RNA, 19 nt, Homo sapiens
  misc_RNA (1)...(19): siRNA sense strand
ugacacauuugacaccuuu

SEQ ID NO: 34778 - RNA, 19 nt, Homo sapiens
  misc_RNA (1)...(19): siRNA sense strand
gcagugagccugggaaguu

SEQ ID NO: 34779 - RNA, 19 nt, Homo sapiens
  misc_RNA (1)...(19): siRNA sense strand
gaagaccugugucacuugu

SEQ ID NO: 34780 - RNA, 19 nt, Homo sapiens
  misc_RNA (1)...(19): siRNA sense strand
gcaaagacgacagauuauu

SEQ ID NO: 34781 - RNA, 19 nt, Homo sapiens
  misc_RNA (1)...(19): siRNA sense strand
gcaaggaaauccccauuga

SEQ ID NO: 34782 - RNA, 19 nt, Homo sapiens
  misc_RNA (1)...(19): siRNA sense strand
gaaguggucauaaguggaa

SEQ ID NO: 34783 - RNA, 19 nt, Homo sapiens
  misc_RNA (1)...(19): siRNA sense strand
ccaaaccugucaacauguu

SEQ ID NO: 34784 - RNA, 19 nt, Homo sapiens
  misc_RNA (1)...(19): siRNA sense strand
uaaacuggaucccaaaucu

SEQ ID NO: 34785 - RNA, 19 nt, Homo sapiens
  misc_RNA (1)...(19): siRNA sense strand
gacaaacagccaaccauuu

SEQ ID NO: 34786 - RNA, 19 nt, Homo sapiens
  misc_RNA (1)...(19): siRNA sense strand
ccacucacccgaauaagaa

SEQ ID NO: 34787 - RNA, 19 nt, Homo sapiens
  misc_RNA (1)...(19): siRNA sense strand
ugugaccgaugaccaguua

SEQ ID NO: 34788 - RNA, 19 nt, Homo sapiens
  misc_RNA (1)...(19): siRNA sense strand
uggaguagcuggaaaugug

SEQ ID NO: 34789 - RNA, 19 nt, Homo sapiens
  misc_RNA (1)...(19): siRNA sense strand
gaagguccucugccaguuu

SEQ ID NO: 34790 - RNA, 19 nt, Homo sapiens
  misc_RNA (1)...(19): siRNA sense strand
cuggaaauguguuuauuga

SEQ ID NO: 34791 - RNA, 19 nt, Homo sapiens
  misc_RNA (1)...(19): siRNA sense strand
gaugagaaggugaauaugu

SEQ ID NO: 34792 - RNA, 19 nt, Homo sapiens
  misc_RNA (1)...(19): siRNA sense strand
augagaaggugaauaugua

SEQ ID NO: 34793 - RNA, 19 nt, Homo sapiens
  misc_RNA (1)...(19): siRNA sense strand
gcauccugcuggacuauga

SEQ ID NO: 34794 - RNA, 19 nt, Homo sapiens
  misc_RNA (1)...(19): siRNA sense strand
cugaaggugucccaugaua

SEQ ID NO: 34795 - RNA, 19 nt, Homo sapiens
  misc_RNA (1)...(19): siRNA sense strand
ccaaguacaucuucauggu

SEQ ID NO: 34796 - RNA, 19 nt, Homo sapiens
  misc_RNA (1)...(19): siRNA sense strand
agugugaucuucucauuga

SEQ ID NO: 34797 - RNA, 19 nt, Homo sapiens
  misc_RNA (1)...(19): siRNA sense strand
gaaggugaauauguacugu

SEQ ID NO: 34798 - RNA, 19 nt, Homo sapiens
  misc_RNA (1)...(19): siRNA sense strand
cuacagacugcuaagaaua

SEQ ID NO: 34799 - RNA, 19 nt, Homo sapiens
  misc_RNA (1)...(19): siRNA sense strand
guuaaucugugccuugugu

SEQ ID NO: 34800 - RNA, 19 nt, Homo sapiens
  misc_RNA (1)...(19): siRNA sense strand
ccaaaucugcucaucgaaa

SEQ ID NO: 34801 - RNA, 19 nt, Homo sapiens
  misc_RNA (1)...(19): siRNA sense strand
gaaugucuggauuaccuua

SEQ ID NO: 34802 - RNA, 19 nt, Homo sapiens
  misc_RNA (1)...(19): siRNA sense strand
ugagcgcuaugacaaauug

SEQ ID NO: 34803 - RNA, 19 nt, Homo sapiens
  misc_RNA (1)...(19): siRNA sense strand
gaccuccgaugaugaguuc

SEQ ID NO: 34804 - RNA, 19 nt, Homo sapiens
  misc_RNA (1)...(19): siRNA sense strand
agaaugaucaugcgcguuu

SEQ ID NO: 34805 - RNA, 19 nt, Homo sapiens
  misc_RNA (1)...(19): siRNA sense strand
aaacagccaaccauuuaaa

SEQ ID NO: 34806 - RNA, 19 nt, Homo sapiens
  misc_RNA (1)...(19): siRNA sense strand
caaacagccaaccauuuaa

SEQ ID NO: 34807 - RNA, 19 nt, Homo sapiens
  misc_RNA (1)...(19): siRNA sense strand
gauaguacccaacaucaag

SEQ ID NO: 34808 - RNA, 19 nt, Homo sapiens
  misc_RNA (1)...(19): siRNA sense strand
caaaucugcucaucgaaaa

SEQ ID NO: 34809 - RNA, 19 nt, Homo sapiens
  misc_RNA (1)...(19): siRNA sense strand
gagacacaauagcaaggaa

SEQ ID NO: 34810 - RNA, 19 nt, Homo sapiens
  misc_RNA (1)...(19): siRNA sense strand
gaaggugucccaugauaac

SEQ ID NO: 34811 - RNA, 19 nt, Homo sapiens
  misc_RNA (1)...(19): siRNA sense strand
gagcuccaguacaccauau

SEQ ID NO: 34812 - RNA, 19 nt, Homo sapiens
  misc_RNA (1)...(19): siRNA sense strand
ucccaacccucccacaauu

SEQ ID NO: 34813 - RNA, 19 nt, Homo sapiens
  misc_RNA (1)...(19): siRNA sense strand
gcuuggagcaugaggauga

SEQ ID NO: 34814 - RNA, 19 nt, Homo sapiens
  misc_RNA (1)...(19): siRNA sense strand
ggugucccaugauaacuug

SEQ ID NO: 34815 - RNA, 19 nt, Homo sapiens
  misc_RNA (1)...(19): siRNA sense strand
gaugaggcuucgcaaacug

SEQ ID NO: 34816 - RNA, 19 nt, Homo sapiens
  misc_RNA (1)...(19): siRNA sense strand
gcuagaaugucuggauuac

SEQ ID NO: 34817 - RNA, 19 nt, Homo sapiens
  misc_RNA (1)...(19): siRNA sense strand
uaaccucaccaaccuuauu

SEQ ID NO: 34818 - RNA, 19 nt, Homo sapiens
  misc_RNA (1)...(19): siRNA sense strand
cgaauaagaagcccuuuac

SEQ ID NO: 34819 - RNA, 19 nt, Homo sapiens
  misc_RNA (1)...(19): siRNA sense strand
cugggaaguugaagacaaa

SEQ ID NO: 34820 - RNA, 19 nt, Homo sapiens
  misc_RNA (1)...(19): siRNA sense strand
gcucugcacagcuucauau

SEQ ID NO: 34821 - RNA, 19 nt, Homo sapiens
  misc_RNA (1)...(19): siRNA sense strand
gagagaagaaacugcuaga

SEQ ID NO: 34822 - RNA, 19 nt, Homo sapiens
  misc_RNA (1)...(19): siRNA sense strand
ugagaucauucagcaaaga

SEQ ID NO: 34823 - RNA, 19 nt, Homo sapiens
  misc_RNA (1)...(19): siRNA sense strand
caaugcaucacgucaagaa

SEQ ID NO: 34824 - RNA, 19 nt, Homo sapiens
  misc_RNA (1)...(19): siRNA sense strand
gaauaagaagcccuuuaca

SEQ ID NO: 34825 - RNA, 19 nt, Homo sapiens
  misc_RNA (1)...(19): siRNA sense strand
ccgaauaagaagcccuuua

SEQ ID NO: 34826 - RNA, 19 nt, Homo sapiens
  misc_RNA (1)...(19): siRNA sense strand
gcuggaaauguguuuauug

SEQ ID NO: 34827 - RNA, 19 nt, Homo sapiens
  misc_RNA (1)...(19): siRNA sense strand
uagaaugucuggauuaccu

SEQ ID NO: 34828 - RNA, 19 nt, Homo sapiens
  misc_RNA (1)...(19): siRNA sense strand
ccuacagacugcuaagaau

SEQ ID NO: 34829 - RNA, 19 nt, Homo sapiens
  misc_RNA (1)...(19): siRNA sense strand
uggcuaaacucauccaaac

SEQ ID NO: 34830 - RNA, 19 nt, Homo sapiens
  misc_RNA (1)...(19): siRNA sense strand
aagcaaaacuuagagagua

SEQ ID NO: 34831 - RNA, 19 nt, Homo sapiens
  misc_RNA (1)...(19): siRNA sense strand
ugagugagcgcuaugacaa

SEQ ID NO: 34832 - RNA, 19 nt, Homo sapiens
  misc_RNA (1)...(19): siRNA sense strand
ugacaccuuugccuuagau

SEQ ID NO: 34833 - RNA, 19 nt, Homo sapiens
  misc_RNA (1)...(19): siRNA sense strand
aguagaacgugaugaguca

SEQ ID NO: 34834 - RNA, 19 nt, Homo sapiens
  misc_RNA (1)...(19): siRNA sense strand
ucccaaaucugcucaucga

SEQ ID NO: 34835 - RNA, 19 nt, Homo sapiens
  misc_RNA (1)...(19): siRNA sense strand
agacaaacagccaaccauu

SEQ ID NO: 34836 - RNA, 19 nt, Homo sapiens
  misc_RNA (1)...(19): siRNA sense strand
cauaugacaccaucacugu

SEQ ID NO: 34837 - RNA, 19 nt, Homo sapiens
  misc_RNA (1)...(19): siRNA sense strand
auccaaaccugucaacaug

SEQ ID NO: 34838 - RNA, 19 nt, Homo sapiens
  misc_RNA (1)...(19): siRNA sense strand
caccuucgacgucgcauuu

SEQ ID NO: 34839 - RNA, 19 nt, Homo sapiens
  misc_RNA (1)...(19): siRNA sense strand
ugaacuccauccaccucua

SEQ ID NO: 34840 - RNA, 19 nt, Homo sapiens
  misc_RNA (1)...(19): siRNA sense strand
caacgucacccuacagaac

SEQ ID NO: 34841 - RNA, 19 nt, Homo sapiens
  misc_RNA (1)...(19): siRNA sense strand
uacaggccaucgucugauu

SEQ ID NO: 34842 - RNA, 19 nt, Homo sapiens
  misc_RNA (1)...(19): siRNA sense strand
ugaaggugucccaugauaa

SEQ ID NO: 34843 - RNA, 19 nt, Homo sapiens
  misc_RNA (1)...(19): siRNA sense strand
gaagacaaacagccaacca

SEQ ID NO: 34844 - RNA, 19 nt, Homo sapiens
  misc_RNA (1)...(19): siRNA sense strand
gcaaacuggcucagcagau

SEQ ID NO: 34845 - RNA, 19 nt, Homo sapiens
  misc_RNA (1)...(19): siRNA sense strand
ggaacaagugucugacgau

SEQ ID NO: 34846 - RNA, 19 nt, Homo sapiens
  misc_RNA (1)...(19): siRNA sense strand
gcauuugcgcagccuguuu

SEQ ID NO: 34847 - RNA, 19 nt, Homo sapiens
  misc_RNA (1)...(19): siRNA sense strand
ccugggaaguugaagacaa

SEQ ID NO: 34848 - RNA, 19 nt, Homo sapiens
  misc_RNA (1)...(19): siRNA sense strand
caaauugacagaggagugu

SEQ ID NO: 34849 - RNA, 19 nt, Homo sapiens
  misc_RNA (1)...(19): siRNA sense strand
uacccaacaucaagcagaa

SEQ ID NO: 34850 - RNA, 19 nt, Homo sapiens
  misc_RNA (1)...(19): siRNA sense strand
gucguuagucuguguaauu

SEQ ID NO: 34851 - RNA, 19 nt, Homo sapiens
  misc_RNA (1)...(19): siRNA sense strand
agaaacugcuagaaugucu

SEQ ID NO: 34852 - RNA, 19 nt, Homo sapiens
  misc_RNA (1)...(19): siRNA sense strand
aaccucaccaaccuuauua

SEQ ID NO: 34853 - RNA, 19 nt, Homo sapiens
  misc_RNA (1)...(19): siRNA sense strand
gaagagucacacaccugaa

SEQ ID NO: 34854 - RNA, 19 nt, Homo sapiens
  misc_RNA (1)...(19): siRNA sense strand
aacugaaggugucccauga

SEQ ID NO: 34855 - RNA, 19 nt, Homo sapiens
  misc_RNA (1)...(19): siRNA sense strand
gcagagcggcaccaaguac

SEQ ID NO: 34856 - RNA, 19 nt, Homo sapiens
  misc_RNA (1)...(19): siRNA sense strand
cauuggaccuccgaugaug

SEQ ID NO: 34857 - RNA, 19 nt, Homo sapiens
  misc_RNA (1)...(19): siRNA sense strand
caaagaagggaaggugaug

SEQ ID NO: 34858 - RNA, 19 nt, Homo sapiens
  misc_RNA (1)...(19): siRNA sense strand
gcauuggaccuccgaugau

SEQ ID NO: 34859 - RNA, 19 nt, Homo sapiens
  misc_RNA (1)...(19): siRNA sense strand
gaacugaccugcccuauuu

SEQ ID NO: 34860 - RNA, 19 nt, Homo sapiens
  misc_RNA (1)...(19): siRNA sense strand
cagcaaagacgacagauua

SEQ ID NO: 34861 - RNA, 19 nt, Homo sapiens
  misc_RNA (1)...(19): siRNA sense strand
gcugauagcuggaugauag

SEQ ID NO: 34862 - RNA, 19 nt, Homo sapiens
  misc_RNA (1)...(19): siRNA sense strand
gaacaagugucugacgauu

SEQ ID NO: 34863 - RNA, 19 nt, Homo sapiens
  misc_RNA (1)...(19): siRNA sense strand
acaaacagccaaccauuua

SEQ ID NO: 34864 - RNA, 19 nt, Homo sapiens
  misc_RNA (1)...(19): siRNA sense strand
agaagaaacugcuagaaug

SEQ ID NO: 34865 - RNA, 19 nt, Homo sapiens
  misc_RNA (1)...(19): siRNA sense strand
caugauaacuugacaguag

SEQ ID NO: 34866 - RNA, 19 nt, Homo sapiens
  misc_RNA (1)...(19): siRNA sense strand
ggagugugaucuucucauu

SEQ ID NO: 34867 - RNA, 19 nt, Homo sapiens
  misc_RNA (1)...(19): siRNA sense strand
gaaaucaaccucaaugaca

SEQ ID NO: 34868 - RNA, 19 nt, Homo sapiens
  misc_RNA (1)...(19): siRNA sense strand
gaaagccacucacccgaau

SEQ ID NO: 34869 - RNA, 19 nt, Homo sapiens
  misc_RNA (1)...(19): siRNA sense strand
gcacacagccucugcuuca

SEQ ID NO: 34870 - RNA, 19 nt, Homo sapiens
  misc_RNA (1)...(19): siRNA sense strand
caaacuggcucagcagauu

SEQ ID NO: 34871 - RNA, 19 nt, Homo sapiens
  misc_RNA (1)...(19): siRNA sense strand
uaacggcucuaucgccuuu

SEQ ID NO: 34872 - RNA, 19 nt, Homo sapiens
  misc_RNA (1)...(19): siRNA sense strand
gugaauauguacuguguga

SEQ ID NO: 34873 - RNA, 19 nt, Homo sapiens
  misc_RNA (1)...(19): siRNA sense strand
caaagacgacagauuauug

SEQ ID NO: 34874 - RNA, 19 nt, Homo sapiens
  misc_RNA (1)...(19): siRNA sense strand
gagaagaaacugcuagaau

SEQ ID NO: 34875 - RNA, 19 nt, Homo sapiens
  misc_RNA (1)...(19): siRNA sense strand
acaagugucugacgauuau

SEQ ID NO: 34876 - RNA, 19 nt, Homo sapiens
  misc_RNA (1)...(19): siRNA sense strand
gaagaaacugcuagaaugu

SEQ ID NO: 34877 - RNA, 19 nt, Homo sapiens
  misc_RNA (1)...(19): siRNA sense strand
ugacacauuugacaccuuu

SEQ ID NO: 34878 - RNA, 19 nt, Homo sapiens
  misc_RNA (1)...(19): siRNA sense strand
gcagugagccugggaaguu

SEQ ID NO: 34879 - RNA, 19 nt, Homo sapiens
  misc_RNA (1)...(19): siRNA sense strand
gaagaccugugucacuugu

SEQ ID NO: 34880 - RNA, 19 nt, Homo sapiens
  misc_RNA (1)...(19): siRNA sense strand
gcaaagacgacagauuauu

SEQ ID NO: 34881 - RNA, 19 nt, Homo sapiens
  misc_RNA (1)...(19): siRNA sense strand
gcaaggaaauccccauuga

SEQ ID NO: 34882 - RNA, 19 nt, Homo sapiens
  misc_RNA (1)...(19): siRNA sense strand
gaaguggucauaaguggaa

SEQ ID NO: 34883 - RNA, 19 nt, Homo sapiens
  misc_RNA (1)...(19): siRNA sense strand
ccaaaccugucaacauguu

SEQ ID NO: 34884 - RNA, 19 nt, Homo sapiens
  misc_RNA (1)...(19): siRNA sense strand
uaaacuggaucccaaaucu

SEQ ID NO: 34885 - RNA, 19 nt, Homo sapiens
  misc_RNA (1)...(19): siRNA sense strand
gacaaacagccaaccauuu

SEQ ID NO: 34886 - RNA, 19 nt, Homo sapiens
  misc_RNA (1)...(19): siRNA sense strand
ccacucacccgaauaagaa

SEQ ID NO: 34887 - RNA, 19 nt, Homo sapiens
  misc_RNA (1)...(19): siRNA sense strand
ugugaccgaugaccaguua

SEQ ID NO: 34888 - RNA, 19 nt, Homo sapiens
  misc_RNA (1)...(19): siRNA sense strand
uggaguagcuggaaaugug

SEQ ID NO: 34889 - RNA, 19 nt, Homo sapiens
  misc_RNA (1)...(19): siRNA sense strand
gaagguccucugccaguuu

SEQ ID NO: 34890 - RNA, 19 nt, Homo sapiens
  misc_RNA (1)...(19): siRNA sense strand
cuggaaauguguuuauuga

SEQ ID NO: 34891 - RNA, 19 nt, Homo sapiens
  misc_RNA (1)...(19): siRNA sense strand
gaugagaaggugaauaugu

SEQ ID NO: 34892 - RNA, 19 nt, Homo sapiens
  misc_RNA (1)...(19): siRNA sense strand
augagaaggugaauaugua

SEQ ID NO: 34893 - RNA, 19 nt, Homo sapiens
  misc_RNA (1)...(19): siRNA sense strand
gcauccugcuggacuauga

SEQ ID NO: 34894 - RNA, 19 nt, Homo sapiens
  misc_RNA (1)...(19): siRNA sense strand
cugaaggugucccaugaua

SEQ ID NO: 34895 - RNA, 19 nt, Homo sapiens
  misc_RNA (1)...(19): siRNA sense strand
ccaaguacaucuucauggu

SEQ ID NO: 34896 - RNA, 19 nt, Homo sapiens
  misc_RNA (1)...(19): siRNA sense strand
agugugaucuucucauuga

SEQ ID NO: 34897 - RNA, 19 nt, Homo sapiens
  misc_RNA (1)...(19): siRNA sense strand
gaaggugaauauguacugu

SEQ ID NO: 34898 - RNA, 19 nt, Homo sapiens
  misc_RNA (1)...(19): siRNA sense strand
cuacagacugcuaagaaua

SEQ ID NO: 34899 - RNA, 19 nt, Homo sapiens
  misc_RNA (1)...(19): siRNA sense strand
guuaaucugugccuugugu

SEQ ID NO: 34900 - RNA, 19 nt, Homo sapiens
  misc_RNA (1)...(19): siRNA sense strand
ccaaaucugcucaucgaaa

SEQ ID NO: 34901 - RNA, 19 nt, Homo sapiens
  misc_RNA (1)...(19): siRNA sense strand
gaaugucuggauuaccuua

SEQ ID NO: 34902 - RNA, 19 nt, Homo sapiens
  misc_RNA (1)...(19): siRNA sense strand
ugagcgcuaugacaaauug

SEQ ID NO: 34903 - RNA, 19 nt, Homo sapiens
  misc_RNA (1)...(19): siRNA sense strand
gaccuccgaugaugaguuc

SEQ ID NO: 34904 - RNA, 19 nt, Homo sapiens
  misc_RNA (1)...(19): siRNA sense strand
agaaugaucaugcgcguuu

SEQ ID NO: 34905 - RNA, 19 nt, Homo sapiens
  misc_RNA (1)...(19): siRNA sense strand
aaacagccaaccauuuaaa

SEQ ID NO: 34906 - RNA, 19 nt, Homo sapiens
  misc_RNA (1)...(19): siRNA sense strand
caaacagccaaccauuuaa

SEQ ID NO: 34907 - RNA, 19 nt, Homo sapiens
  misc_RNA (1)...(19): siRNA sense strand
gauaguacccaacaucaag

SEQ ID NO: 34908 - RNA, 19 nt, Homo sapiens
  misc_RNA (1)...(19): siRNA sense strand
caaaucugcucaucgaaaa

SEQ ID NO: 34909 - RNA, 19 nt, Homo sapiens
  misc_RNA (1)...(19): siRNA sense strand
gagacacaauagcaaggaa

SEQ ID NO: 34910 - RNA, 19 nt, Homo sapiens
  misc_RNA (1)...(19): siRNA sense strand
gaaggugucccaugauaac

SEQ ID NO: 34911 - RNA, 19 nt, Homo sapiens
  misc_RNA (1)...(19): siRNA sense strand
gagcuccaguacaccauau

SEQ ID NO: 34912 - RNA, 19 nt, Homo sapiens
  misc_RNA (1)...(19): siRNA sense strand
ucccaacccucccacaauu

SEQ ID NO: 34913 - RNA, 19 nt, Homo sapiens
  misc_RNA (1)...(19): siRNA sense strand
gcuuggagcaugaggauga

SEQ ID NO: 34914 - RNA, 19 nt, Homo sapiens
  misc_RNA (1)...(19): siRNA sense strand
ggugucccaugauaacuug

SEQ ID NO: 34915 - RNA, 19 nt, Homo sapiens
  misc_RNA (1)...(19): siRNA sense strand
gaugaggcuucgcaaacug

SEQ ID NO: 34916 - RNA, 19 nt, Homo sapiens
  misc_RNA (1)...(19): siRNA sense strand
gcuagaaugucuggauuac

SEQ ID NO: 34917 - RNA, 19 nt, Homo sapiens
  misc_RNA (1)...(19): siRNA sense strand
uaaccucaccaaccuuauu

SEQ ID NO: 34918 - RNA, 19 nt, Homo sapiens
  misc_RNA (1)...(19): siRNA sense strand
cgaauaagaagcccuuuac

SEQ ID NO: 34919 - RNA, 19 nt, Homo sapiens
  misc_RNA (1)...(19): siRNA sense strand
cugggaaguugaagacaaa

SEQ ID NO: 34920 - RNA, 19 nt, Homo sapiens
  misc_RNA (1)...(19): siRNA sense strand
gcucugcacagcuucauau

SEQ ID NO: 34921 - RNA, 19 nt, Homo sapiens
  misc_RNA (1)...(19): siRNA sense strand
gagagaagaaacugcuaga

SEQ ID NO: 34922 - RNA, 19 nt, Homo sapiens
  misc_RNA (1)...(19): siRNA sense strand
ugagaucauucagcaaaga

SEQ ID NO: 34923 - RNA, 19 nt, Homo sapiens
  misc_RNA (1)...(19): siRNA sense strand
caaugcaucacgucaagaa

SEQ ID NO: 34924 - RNA, 19 nt, Homo sapiens
  misc_RNA (1)...(19): siRNA sense strand
gaauaagaagcccuuuaca

SEQ ID NO: 34925 - RNA, 19 nt, Homo sapiens
  misc_RNA (1)...(19): siRNA sense strand
ccgaauaagaagcccuuua

SEQ ID NO: 34926 - RNA, 19 nt, Homo sapiens
  misc_RNA (1)...(19): siRNA sense strand
gcuggaaauguguuuauug

SEQ ID NO: 34927 - RNA, 19 nt, Homo sapiens
  misc_RNA (1)...(19): siRNA sense strand
uagaaugucuggauuaccu

SEQ ID NO: 34928 - RNA, 19 nt, Homo sapiens
  misc_RNA (1)...(19): siRNA sense strand
ccuacagacugcuaagaau

SEQ ID NO: 34929 - RNA, 19 nt, Homo sapiens
  misc_RNA (1)...(19): siRNA sense strand
uggcuaaacucauccaaac

SEQ ID NO: 34930 - RNA, 19 nt, Homo sapiens
  misc_RNA (1)...(19): siRNA sense strand
aagcaaaacuuagagagua

SEQ ID NO: 34931 - RNA, 19 nt, Homo sapiens
  misc_RNA (1)...(19): siRNA sense strand
ugagugagcgcuaugacaa

SEQ ID NO: 34932 - RNA, 19 nt, Homo sapiens
  misc_RNA (1)...(19): siRNA sense strand
ugacaccuuugccuuagau

SEQ ID NO: 34933 - RNA, 19 nt, Homo sapiens
  misc_RNA (1)...(19): siRNA sense strand
aguagaacgugaugaguca

SEQ ID NO: 34934 - RNA, 19 nt, Homo sapiens
  misc_RNA (1)...(19): siRNA sense strand
ucccaaaucugcucaucga

SEQ ID NO: 34935 - RNA, 19 nt, Homo sapiens
  misc_RNA (1)...(19): siRNA sense strand
agacaaacagccaaccauu

SEQ ID NO: 34936 - RNA, 19 nt, Homo sapiens
  misc_RNA (1)...(19): siRNA sense strand
cauaugacaccaucacugu

SEQ ID NO: 34937 - RNA, 19 nt, Homo sapiens
  misc_RNA (1)...(19): siRNA sense strand
auccaaaccugucaacaug

SEQ ID NO: 34938 - RNA, 19 nt, Homo sapiens
  misc_RNA (1)...(19): siRNA sense strand
caccuucgacgucgcauuu

SEQ ID NO: 34939 - RNA, 19 nt, Homo sapiens
  misc_RNA (1)...(19): siRNA sense strand
ugaacuccauccaccucua

SEQ ID NO: 34940 - RNA, 19 nt, Homo sapiens
  misc_RNA (1)...(19): siRNA sense strand
caacgucacccuacagaac

SEQ ID NO: 34941 - RNA, 19 nt, Homo sapiens
  misc_RNA (1)...(19): siRNA sense strand
uacaggccaucgucugauu

SEQ ID NO: 34942 - RNA, 19 nt, Homo sapiens
  misc_RNA (1)...(19): siRNA sense strand
ugaaggugucccaugauaa

SEQ ID NO: 34943 - RNA, 19 nt, Homo sapiens
  misc_RNA (1)...(19): siRNA sense strand
gaagacaaacagccaacca

SEQ ID NO: 34944 - RNA, 19 nt, Homo sapiens
  misc_RNA (1)...(19): siRNA sense strand
gcaaacuggcucagcagau

SEQ ID NO: 34945 - RNA, 19 nt, Homo sapiens
  misc_RNA (1)...(19): siRNA sense strand
ggaacaagugucugacgau

SEQ ID NO: 34946 - RNA, 19 nt, Homo sapiens
  misc_RNA (1)...(19): siRNA sense strand
gcauuugcgcagccuguuu

SEQ ID NO: 34947 - RNA, 19 nt, Homo sapiens
  misc_RNA (1)...(19): siRNA sense strand
ccugggaaguugaagacaa

SEQ ID NO: 34948 - RNA, 19 nt, Homo sapiens
  misc_RNA (1)...(19): siRNA sense strand
caaauugacagaggagugu

SEQ ID NO: 34949 - RNA, 19 nt, Homo sapiens
  misc_RNA (1)...(19): siRNA sense strand
uacccaacaucaagcagaa

SEQ ID NO: 34950 - RNA, 19 nt, Homo sapiens
  misc_RNA (1)...(19): siRNA sense strand
gucguuagucuguguaauu

SEQ ID NO: 34951 - RNA, 19 nt, Homo sapiens
  misc_RNA (1)...(19): siRNA sense strand
agaaacugcuagaaugucu

SEQ ID NO: 34952 - RNA, 19 nt, Homo sapiens
  misc_RNA (1)...(19): siRNA sense strand
aaccucaccaaccuuauua

SEQ ID NO: 34953 - RNA, 19 nt, Homo sapiens
  misc_RNA (1)...(19): siRNA sense strand
gaagagucacacaccugaa

SEQ ID NO: 34954 - RNA, 19 nt, Homo sapiens
  misc_RNA (1)...(19): siRNA sense strand
aacugaaggugucccauga

SEQ ID NO: 34955 - RNA, 19 nt, Homo sapiens
  misc_RNA (1)...(19): siRNA sense strand
gcagagcggcaccaaguac

SEQ ID NO: 34956 - RNA, 19 nt, Homo sapiens
  misc_RNA (1)...(19): siRNA sense strand
cauuggaccuccgaugaug

SEQ ID NO: 34957 - RNA, 19 nt, Homo sapiens
  misc_RNA (1)...(19): siRNA sense strand
caaagaagggaaggugaug

SEQ ID NO: 34958 - RNA, 19 nt, Homo sapiens
  misc_RNA (1)...(19): siRNA sense strand
gcauuggaccuccgaugau

SEQ ID NO: 34959 - RNA, 19 nt, Homo sapiens
  misc_RNA (1)...(19): siRNA sense strand
gaacugaccugcccuauuu

SEQ ID NO: 34960 - RNA, 19 nt, Homo sapiens
  misc_RNA (1)...(19): siRNA sense strand
cagcaaagacgacagauua

SEQ ID NO: 34961 - RNA, 19 nt, Homo sapiens
  misc_RNA (1)...(19): siRNA sense strand
gcugauagcuggaugauag

SEQ ID NO: 34962 - RNA, 19 nt, Homo sapiens
  misc_RNA (1)...(19): siRNA sense strand
acaaacagccaaccauuua

SEQ ID NO: 34963 - RNA, 19 nt, Homo sapiens
  misc_RNA (1)...(19): siRNA sense strand
agaagaaacugcuagaaug

SEQ ID NO: 34964 - RNA, 19 nt, Homo sapiens
  misc_RNA (1)...(19): siRNA sense strand
caugauaacuugacaguag

SEQ ID NO: 34965 - RNA, 19 nt, Homo sapiens
  misc_RNA (1)...(19): siRNA sense strand
ggagugugaucuucucauu

SEQ ID NO: 34966 - RNA, 19 nt, Homo sapiens
  misc_RNA (1)...(19): siRNA sense strand
gaaaucaaccucaaugaca

SEQ ID NO: 34967 - RNA, 19 nt, Homo sapiens
  misc_RNA (1)...(19): siRNA sense strand
gaaagccacucacccgaau

SEQ ID NO: 34968 - RNA, 19 nt, Homo sapiens
  misc_RNA (1)...(19): siRNA sense strand
gcacacagccucugcuuca

SEQ ID NO: 34969 - RNA, 19 nt, Homo sapiens
  misc_RNA (1)...(19): siRNA sense strand
caaacuggcucagcagauu

SEQ ID NO: 34970 - RNA, 19 nt, Homo sapiens
  misc_RNA (1)...(19): siRNA sense strand
gugaauauguacuguguga

SEQ ID NO: 34971 - RNA, 19 nt, Homo sapiens
  misc_RNA (1)...(19): siRNA sense strand
caaagacgacagauuauug

SEQ ID NO: 34972 - RNA, 19 nt, Homo sapiens
  misc_RNA (1)...(19): siRNA sense strand
gagaagaaacugcuagaau

SEQ ID NO: 34973 - RNA, 19 nt, Homo sapiens
  misc_RNA (1)...(19): siRNA sense strand
gaagaaacugcuagaaugu

SEQ ID NO: 34974 - RNA, 19 nt, Homo sapiens
  misc_RNA (1)...(19): siRNA sense strand
ugacacauuugacaccuuu

SEQ ID NO: 34975 - RNA, 19 nt, Homo sapiens
  misc_RNA (1)...(19): siRNA sense strand
gcagugagccugggaaguu

SEQ ID NO: 34976 - RNA, 19 nt, Homo sapiens
  misc_RNA (1)...(19): siRNA sense strand
gaagaccugugucacuugu

SEQ ID NO: 34977 - RNA, 19 nt, Homo sapiens
  misc_RNA (1)...(19): siRNA sense strand
gcaaagacgacagauuauu

SEQ ID NO: 34978 - RNA, 19 nt, Homo sapiens
  misc_RNA (1)...(19): siRNA sense strand
gaaguggucauaaguggaa

SEQ ID NO: 34979 - RNA, 19 nt, Homo sapiens
  misc_RNA (1)...(19): siRNA sense strand
ccaaaccugucaacauguu

SEQ ID NO: 34980 - RNA, 19 nt, Homo sapiens
  misc_RNA (1)...(19): siRNA sense strand
uaaacuggaucccaaaucu

SEQ ID NO: 34981 - RNA, 19 nt, Homo sapiens
  misc_RNA (1)...(19): siRNA sense strand
gacaaacagccaaccauuu

SEQ ID NO: 34982 - RNA, 19 nt, Homo sapiens
  misc_RNA (1)...(19): siRNA sense strand
ccacucacccgaauaagaa

SEQ ID NO: 34983 - RNA, 19 nt, Homo sapiens
  misc_RNA (1)...(19): siRNA sense strand
ugugaccgaugaccaguua

SEQ ID NO: 34984 - RNA, 19 nt, Homo sapiens
  misc_RNA (1)...(19): siRNA sense strand
uggaguagcuggaaaugug

SEQ ID NO: 34985 - RNA, 19 nt, Homo sapiens
  misc_RNA (1)...(19): siRNA sense strand
gaagguccucugccaguuu

SEQ ID NO: 34986 - RNA, 19 nt, Homo sapiens
  misc_RNA (1)...(19): siRNA sense strand
cuggaaauguguuuauuga

SEQ ID NO: 34987 - RNA, 19 nt, Homo sapiens
  misc_RNA (1)...(19): siRNA sense strand
gaugagaaggugaauaugu

SEQ ID NO: 34988 - RNA, 19 nt, Homo sapiens
  misc_RNA (1)...(19): siRNA sense strand
augagaaggugaauaugua

SEQ ID NO: 34989 - RNA, 19 nt, Homo sapiens
  misc_RNA (1)...(19): siRNA sense strand
cugaaggugucccaugaua

SEQ ID NO: 34990 - RNA, 19 nt, Homo sapiens
  misc_RNA (1)...(19): siRNA sense strand
ccaaguacaucuucauggu

SEQ ID NO: 34991 - RNA, 19 nt, Homo sapiens
  misc_RNA (1)...(19): siRNA sense strand
agugugaucuucucauuga

SEQ ID NO: 34992 - RNA, 19 nt, Homo sapiens
  misc_RNA (1)...(19): siRNA sense strand
gaaggugaauauguacugu

SEQ ID NO: 34993 - RNA, 19 nt, Homo sapiens
  misc_RNA (1)...(19): siRNA sense strand
cuacagacugcuaagaaua

SEQ ID NO: 34994 - RNA, 19 nt, Homo sapiens
  misc_RNA (1)...(19): siRNA sense strand
guuaaucugugccuugugu

SEQ ID NO: 34995 - RNA, 19 nt, Homo sapiens
  misc_RNA (1)...(19): siRNA sense strand
ccaaaucugcucaucgaaa

SEQ ID NO: 34996 - RNA, 19 nt, Homo sapiens
  misc_RNA (1)...(19): siRNA sense strand
gaaugucuggauuaccuua

SEQ ID NO: 34997 - RNA, 19 nt, Homo sapiens
  misc_RNA (1)...(19): siRNA sense strand
ugagcgcuaugacaaauug

SEQ ID NO: 34998 - RNA, 19 nt, Homo sapiens
  misc_RNA (1)...(19): siRNA sense strand
gaccuccgaugaugaguuc

SEQ ID NO: 34999 - RNA, 19 nt, Homo sapiens
  misc_RNA (1)...(19): siRNA sense strand
agaaugaucaugcgcguuu

SEQ ID NO: 35000 - RNA, 19 nt, Homo sapiens
  misc_RNA (1)...(19): siRNA sense strand
aaacagccaaccauuuaaa

SEQ ID NO: 35001 - RNA, 19 nt, Homo sapiens
  misc_RNA (1)...(19): siRNA sense strand
caaacagccaaccauuuaa

SEQ ID NO: 35002 - RNA, 19 nt, Homo sapiens
  misc_RNA (1)...(19): siRNA sense strand
gauaguacccaacaucaag

SEQ ID NO: 35003 - RNA, 19 nt, Homo sapiens
  misc_RNA (1)...(19): siRNA sense strand
caaaucugcucaucgaaaa

SEQ ID NO: 35004 - RNA, 19 nt, Homo sapiens
  misc_RNA (1)...(19): siRNA sense strand
gaaggugucccaugauaac

SEQ ID NO: 35005 - RNA, 19 nt, Homo sapiens
  misc_RNA (1)...(19): siRNA sense strand
gagcuccaguacaccauau

SEQ ID NO: 35006 - RNA, 19 nt, Homo sapiens
  misc_RNA (1)...(19): siRNA sense strand
ucccaacccucccacaauu

SEQ ID NO: 35007 - RNA, 19 nt, Homo sapiens
  misc_RNA (1)...(19): siRNA sense strand
gcuuggagcaugaggauga

SEQ ID NO: 35008 - RNA, 19 nt, Homo sapiens
  misc_RNA (1)...(19): siRNA sense strand
ggugucccaugauaacuug

SEQ ID NO: 35009 - RNA, 19 nt, Homo sapiens
  misc_RNA (1)...(19): siRNA sense strand
gaugaggcuucgcaaacug

SEQ ID NO: 35010 - RNA, 19 nt, Homo sapiens
  misc_RNA (1)...(19): siRNA sense strand
gcuagaaugucuggauuac

SEQ ID NO: 35011 - RNA, 19 nt, Homo sapiens
  misc_RNA (1)...(19): siRNA sense strand
uaaccucaccaaccuuauu

SEQ ID NO: 35012 - RNA, 19 nt, Homo sapiens
  misc_RNA (1)...(19): siRNA sense strand
cgaauaagaagcccuuuac

SEQ ID NO: 35013 - RNA, 19 nt, Homo sapiens
  misc_RNA (1)...(19): siRNA sense strand
cugggaaguugaagacaaa

SEQ ID NO: 35014 - RNA, 19 nt, Homo sapiens
  misc_RNA (1)...(19): siRNA sense strand
gcucugcacagcuucauau

SEQ ID NO: 35015 - RNA, 19 nt, Homo sapiens
  misc_RNA (1)...(19): siRNA sense strand
gagagaagaaacugcuaga

SEQ ID NO: 35016 - RNA, 19 nt, Homo sapiens
  misc_RNA (1)...(19): siRNA sense strand
ugagaucauucagcaaaga

SEQ ID NO: 35017 - RNA, 19 nt, Homo sapiens
  misc_RNA (1)...(19): siRNA sense strand
caaugcaucacgucaagaa

SEQ ID NO: 35018 - RNA, 19 nt, Homo sapiens
  misc_RNA (1)...(19): siRNA sense strand
gaauaagaagcccuuuaca

SEQ ID NO: 35019 - RNA, 19 nt, Homo sapiens
  misc_RNA (1)...(19): siRNA sense strand
ccgaauaagaagcccuuua

SEQ ID NO: 35020 - RNA, 19 nt, Homo sapiens
  misc_RNA (1)...(19): siRNA sense strand
gcuggaaauguguuuauug

SEQ ID NO: 35021 - RNA, 19 nt, Homo sapiens
  misc_RNA (1)...(19): siRNA sense strand
uagaaugucuggauuaccu

SEQ ID NO: 35022 - RNA, 19 nt, Homo sapiens
  misc_RNA (1)...(19): siRNA sense strand
ccuacagacugcuaagaau

SEQ ID NO: 35023 - RNA, 19 nt, Homo sapiens
  misc_RNA (1)...(19): siRNA sense strand
uggcuaaacucauccaaac

SEQ ID NO: 35024 - RNA, 19 nt, Homo sapiens
  misc_RNA (1)...(19): siRNA sense strand
aagcaaaacuuagagagua

SEQ ID NO: 35025 - RNA, 19 nt, Homo sapiens
  misc_RNA (1)...(19): siRNA sense strand
ugagugagcgcuaugacaa

SEQ ID NO: 35026 - RNA, 19 nt, Homo sapiens
  misc_RNA (1)...(19): siRNA sense strand
ugacaccuuugccuuagau

SEQ ID NO: 35027 - RNA, 19 nt, Homo sapiens
  misc_RNA (1)...(19): siRNA sense strand
aguagaacgugaugaguca

SEQ ID NO: 35028 - RNA, 19 nt, Homo sapiens
  misc_RNA (1)...(19): siRNA sense strand
ucccaaaucugcucaucga

SEQ ID NO: 35029 - RNA, 19 nt, Homo sapiens
  misc_RNA (1)...(19): siRNA sense strand
agacaaacagccaaccauu

SEQ ID NO: 35030 - RNA, 19 nt, Homo sapiens
  misc_RNA (1)...(19): siRNA sense strand
cauaugacaccaucacugu

SEQ ID NO: 35031 - RNA, 19 nt, Homo sapiens
  misc_RNA (1)...(19): siRNA sense strand
auccaaaccugucaacaug

SEQ ID NO: 35032 - RNA, 19 nt, Homo sapiens
  misc_RNA (1)...(19): siRNA sense strand
caacgucacccuacagaac

SEQ ID NO: 35033 - RNA, 19 nt, Homo sapiens
  misc_RNA (1)...(19): siRNA sense strand
uacaggccaucgucugauu

SEQ ID NO: 35034 - RNA, 19 nt, Homo sapiens
  misc_RNA (1)...(19): siRNA sense strand
ugaaggugucccaugauaa

SEQ ID NO: 35035 - RNA, 19 nt, Homo sapiens
  misc_RNA (1)...(19): siRNA sense strand
gaagacaaacagccaacca

SEQ ID NO: 35036 - RNA, 19 nt, Homo sapiens
  misc_RNA (1)...(19): siRNA sense strand
gcaaacuggcucagcagau

SEQ ID NO: 35037 - RNA, 19 nt, Homo sapiens
  misc_RNA (1)...(19): siRNA sense strand
ccugggaaguugaagacaa

SEQ ID NO: 35038 - RNA, 19 nt, Homo sapiens
  misc_RNA (1)...(19): siRNA sense strand
caaauugacagaggagugu

SEQ ID NO: 35039 - RNA, 19 nt, Homo sapiens
  misc_RNA (1)...(19): siRNA sense strand
uacccaacaucaagcagaa

SEQ ID NO: 35040 - RNA, 19 nt, Homo sapiens
  misc_RNA (1)...(19): siRNA sense strand
gucguuagucuguguaauu

SEQ ID NO: 35041 - RNA, 19 nt, Homo sapiens
  misc_RNA (1)...(19): siRNA sense strand
agaaacugcuagaaugucu

SEQ ID NO: 35042 - RNA, 19 nt, Homo sapiens
  misc_RNA (1)...(19): siRNA sense strand
aaccucaccaaccuuauua

SEQ ID NO: 35043 - RNA, 19 nt, Homo sapiens
  misc_RNA (1)...(19): siRNA sense strand
gaagagucacacaccugaa

SEQ ID NO: 35044 - RNA, 19 nt, Homo sapiens
  misc_RNA (1)...(19): siRNA sense strand
aacugaaggugucccauga

SEQ ID NO: 35045 - RNA, 19 nt, Homo sapiens
  misc_RNA (1)...(19): siRNA sense strand
gcagagcggcaccaaguac

SEQ ID NO: 35046 - RNA, 19 nt, Homo sapiens
  misc_RNA (1)...(19): siRNA sense strand
cauuggaccuccgaugaug

SEQ ID NO: 35047 - RNA, 19 nt, Homo sapiens
  misc_RNA (1)...(19): siRNA sense strand
caaagaagggaaggugaug

SEQ ID NO: 35048 - RNA, 19 nt, Homo sapiens
  misc_RNA (1)...(19): siRNA sense strand
aggaugagaaggugaauau

SEQ ID NO: 35049 - RNA, 19 nt, Homo sapiens
  misc_RNA (1)...(19): siRNA sense strand
gcauuggaccuccgaugau

SEQ ID NO: 35050 - RNA, 19 nt, Homo sapiens
  misc_RNA (1)...(19): siRNA sense strand
cugcacagcuucauaugac

SEQ ID NO: 35051 - RNA, 19 nt, Homo sapiens
  misc_RNA (1)...(19): siRNA sense strand
gguucuaauuccugaaauc

SEQ ID NO: 35052 - RNA, 19 nt, Homo sapiens
  misc_RNA (1)...(19): siRNA sense strand
gagugagcgcuaugacaaa

SEQ ID NO: 35053 - RNA, 19 nt, Homo sapiens
  misc_RNA (1)...(19): siRNA sense strand
ucuaauuccugaaaucaac

SEQ ID NO: 35054 - RNA, 19 nt, Homo sapiens
  misc_RNA (1)...(19): siRNA sense strand
gcccaccgcauccuaguau

SEQ ID NO: 35055 - RNA, 19 nt, Homo sapiens
  misc_RNA (1)...(19): siRNA sense strand
gaucccaaaucugcucauc

SEQ ID NO: 35056 - RNA, 19 nt, Homo sapiens
  misc_RNA (1)...(19): siRNA sense strand
ggaccuccgaugaugaguu

SEQ ID NO: 35057 - RNA, 19 nt, Homo sapiens
  misc_RNA (1)...(19): siRNA sense strand
cugcuagaaugucuggauu

SEQ ID NO: 35058 - RNA, 19 nt, Homo sapiens
  misc_RNA (1)...(19): siRNA sense strand
ggaaacacuggagucagaa

SEQ ID NO: 35059 - RNA, 19 nt, Homo sapiens
  misc_RNA (1)...(19): siRNA sense strand
gaaagaagaucuggauauu

SEQ ID NO: 35060 - RNA, 19 nt, Homo sapiens
  misc_RNA (1)...(19): siRNA sense strand
gaaauuggaugugaggaua

SEQ ID NO: 35061 - RNA, 19 nt, Homo sapiens
  misc_RNA (1)...(19): siRNA sense strand
ggcauuaguuucucaguua

SEQ ID NO: 35062 - RNA, 19 nt, Homo sapiens
  misc_RNA (1)...(19): siRNA sense strand
ggaaaugacugcagcuugu

SEQ ID NO: 35063 - RNA, 19 nt, Homo sapiens
  misc_RNA (1)...(19): siRNA sense strand
gaagaaggcugagaugcuu

SEQ ID NO: 35064 - RNA, 19 nt, Homo sapiens
  misc_RNA (1)...(19): siRNA sense strand
ggaagauggucccaaagaa

SEQ ID NO: 35065 - RNA, 19 nt, Homo sapiens
  misc_RNA (1)...(19): siRNA sense strand
aagaaggacuugcugaaua

SEQ ID NO: 35066 - RNA, 19 nt, Homo sapiens
  misc_RNA (1)...(19): siRNA sense strand
ggaagauucugauguggaa

SEQ ID NO: 35067 - RNA, 19 nt, Homo sapiens
  misc_RNA (1)...(19): siRNA sense strand
ggaaagaagaucuggauau

SEQ ID NO: 35068 - RNA, 19 nt, Homo sapiens
  misc_RNA (1)...(19): siRNA sense strand
gaaaacagcugauggaaag

SEQ ID NO: 35069 - RNA, 19 nt, Homo sapiens
  misc_RNA (1)...(19): siRNA sense strand
gaauguggauguuaaugug

SEQ ID NO: 35070 - RNA, 19 nt, Homo sapiens
  misc_RNA (1)...(19): siRNA sense strand
aagaagaucuggauauugu

SEQ ID NO: 35071 - RNA, 19 nt, Homo sapiens
  misc_RNA (1)...(19): siRNA sense strand
gacaguagcugauguuagg

SEQ ID NO: 35072 - RNA, 19 nt, Homo sapiens
  misc_RNA (1)...(19): siRNA sense strand
ccaccaagcuuagugaaga

SEQ ID NO: 35073 - RNA, 19 nt, Homo sapiens
  misc_RNA (1)...(19): siRNA sense strand
gcaaguuacucagauggaa

SEQ ID NO: 35074 - RNA, 19 nt, Homo sapiens
  misc_RNA (1)...(19): siRNA sense strand
gaagaugauucccgaaagg

SEQ ID NO: 35075 - RNA, 19 nt, Homo sapiens
  misc_RNA (1)...(19): siRNA sense strand
gagaagagaggaccuacuu

SEQ ID NO: 35076 - RNA, 19 nt, Homo sapiens
  misc_RNA (1)...(19): siRNA sense strand
gcauuaguuucucaguuaa

SEQ ID NO: 35077 - RNA, 19 nt, Homo sapiens
  misc_RNA (1)...(19): siRNA sense strand
aacagaagcuugaugcauu

SEQ ID NO: 35078 - RNA, 19 nt, Homo sapiens
  misc_RNA (1)...(19): siRNA sense strand
gcaaacuacucagugaaga

SEQ ID NO: 35079 - RNA, 19 nt, Homo sapiens
  misc_RNA (1)...(19): siRNA sense strand
gcaccgggaucaggaaaga

SEQ ID NO: 35080 - RNA, 19 nt, Homo sapiens
  misc_RNA (1)...(19): siRNA sense strand
uaaccugccugaucuauac

SEQ ID NO: 35081 - RNA, 19 nt, Homo sapiens
  misc_RNA (1)...(19): siRNA sense strand
ggagaaggaucauuaaccu

SEQ ID NO: 35082 - RNA, 19 nt, Homo sapiens
  misc_RNA (1)...(19): siRNA sense strand
gaggauaagacagauauuu

SEQ ID NO: 35083 - RNA, 19 nt, Homo sapiens
  misc_RNA (1)...(19): siRNA sense strand
ggaaguuguuggcagguau

SEQ ID NO: 35084 - RNA, 19 nt, Homo sapiens
  misc_RNA (1)...(19): siRNA sense strand
ccucaaccguggacaauau

SEQ ID NO: 35085 - RNA, 19 nt, Homo sapiens
  misc_RNA (1)...(19): siRNA sense strand
agaggaagauggucccaaa

SEQ ID NO: 35086 - RNA, 19 nt, Homo sapiens
  misc_RNA (1)...(19): siRNA sense strand
ucauuaaccucacuagugu

SEQ ID NO: 35087 - RNA, 19 nt, Homo sapiens
  misc_RNA (1)...(19): siRNA sense strand
gcagcaagaugaggagaug

SEQ ID NO: 35088 - RNA, 19 nt, Homo sapiens
  misc_RNA (1)...(19): siRNA sense strand
guaccucaguuuagaaauc

SEQ ID NO: 35089 - RNA, 19 nt, Homo sapiens
  misc_RNA (1)...(19): siRNA sense strand
gucgagaacugauagaaau

SEQ ID NO: 35090 - RNA, 19 nt, Homo sapiens
  misc_RNA (1)...(19): siRNA sense strand
gaagaucuggauauuguau

SEQ ID NO: 35091 - RNA, 19 nt, Homo sapiens
  misc_RNA (1)...(19): siRNA sense strand
cuaaacauuucacagaaga

SEQ ID NO: 35092 - RNA, 19 nt, Homo sapiens
  misc_RNA (1)...(19): siRNA sense strand
ggaagcaguacauaucuga

SEQ ID NO: 35093 - RNA, 19 nt, Homo sapiens
  misc_RNA (1)...(19): siRNA sense strand
uaaagaaugcgcuauguuc

SEQ ID NO: 35094 - RNA, 19 nt, Homo sapiens
  misc_RNA (1)...(19): siRNA sense strand
gaaagccucaguaaagaau

SEQ ID NO: 35095 - RNA, 19 nt, Homo sapiens
  misc_RNA (1)...(19): siRNA sense strand
cugaauacauuguugaguu

SEQ ID NO: 35096 - RNA, 19 nt, Homo sapiens
  misc_RNA (1)...(19): siRNA sense strand
cuaguaaacugcaguccuu

SEQ ID NO: 35097 - RNA, 19 nt, Homo sapiens
  misc_RNA (1)...(19): siRNA sense strand
ccacaaguauucaagugau

SEQ ID NO: 35098 - RNA, 19 nt, Homo sapiens
  misc_RNA (1)...(19): siRNA sense strand
cacagaagauggaaauauc

SEQ ID NO: 35099 - RNA, 19 nt, Homo sapiens
  misc_RNA (1)...(19): siRNA sense strand
acagaagcuugaugcauuu

SEQ ID NO: 35100 - RNA, 19 nt, Homo sapiens
  misc_RNA (1)...(19): siRNA sense strand
ugauagaaauuggauguga

SEQ ID NO: 35101 - RNA, 19 nt, Homo sapiens
  misc_RNA (1)...(19): siRNA sense strand
gaagaagaaggcugagaug

SEQ ID NO: 35102 - RNA, 19 nt, Homo sapiens
  misc_RNA (1)...(19): siRNA sense strand
caaagaaggacuugcugaa

SEQ ID NO: 35103 - RNA, 19 nt, Homo sapiens
  misc_RNA (1)...(19): siRNA sense strand
ucuaccagauacucauuua

SEQ ID NO: 35104 - RNA, 19 nt, Homo sapiens
  misc_RNA (1)...(19): siRNA sense strand
gaaaugacugcagcuugua

SEQ ID NO: 35105 - RNA, 19 nt, Homo sapiens
  misc_RNA (1)...(19): siRNA sense strand
ucagaaaugucagagaaga

SEQ ID NO: 35106 - RNA, 19 nt, Homo sapiens
  misc_RNA (1)...(19): siRNA sense strand
cuucagaaaugucagagaa

SEQ ID NO: 35107 - RNA, 19 nt, Homo sapiens
  misc_RNA (1)...(19): siRNA sense strand
ucacagaggauaagacaga

SEQ ID NO: 35108 - RNA, 19 nt, Homo sapiens
  misc_RNA (1)...(19): siRNA sense strand
gaacugauagaaauuggau

SEQ ID NO: 35109 - RNA, 19 nt, Homo sapiens
  misc_RNA (1)...(19): siRNA sense strand
gugcauacagagcaaguua

SEQ ID NO: 35110 - RNA, 19 nt, Homo sapiens
  misc_RNA (1)...(19): siRNA sense strand
gaagauggucccaaagaag

SEQ ID NO: 35111 - RNA, 19 nt, Homo sapiens
  misc_RNA (1)...(19): siRNA sense strand
cagcuaaugcuaucaaaga

SEQ ID NO: 35112 - RNA, 19 nt, Homo sapiens
  misc_RNA (1)...(19): siRNA sense strand
gaacagaagcuugaugcau

SEQ ID NO: 35113 - RNA, 19 nt, Homo sapiens
  misc_RNA (1)...(19): siRNA sense strand
gagggaggccugaaguuga

SEQ ID NO: 35114 - RNA, 19 nt, Homo sapiens
  misc_RNA (1)...(19): siRNA sense strand
gaaagagacaucgggaaga

SEQ ID NO: 35115 - RNA, 19 nt, Homo sapiens
  misc_RNA (1)...(19): siRNA sense strand
agucugaccucgucuucua

SEQ ID NO: 35116 - RNA, 19 nt, Homo sapiens
  misc_RNA (1)...(19): siRNA sense strand
gaaguugauucagauccaa

SEQ ID NO: 35117 - RNA, 19 nt, Homo sapiens
  misc_RNA (1)...(19): siRNA sense strand
cccagaauguggauguuaa

SEQ ID NO: 35118 - RNA, 19 nt, Homo sapiens
  misc_RNA (1)...(19): siRNA sense strand
gagagacaguagcugaugu

SEQ ID NO: 35119 - RNA, 19 nt, Homo sapiens
  misc_RNA (1)...(19): siRNA sense strand
guaaacugcaguccuuuga

SEQ ID NO: 35120 - RNA, 19 nt, Homo sapiens
  misc_RNA (1)...(19): siRNA sense strand
gaggauuuagccaguauuu

SEQ ID NO: 35121 - RNA, 19 nt, Homo sapiens
  misc_RNA (1)...(19): siRNA sense strand
guaaagaaugcgcuauguu

SEQ ID NO: 35122 - RNA, 19 nt, Homo sapiens
  misc_RNA (1)...(19): siRNA sense strand
uggaaaugguggaagauga

SEQ ID NO: 35123 - RNA, 19 nt, Homo sapiens
  misc_RNA (1)...(19): siRNA sense strand
gggcuaggcagcaagauga

SEQ ID NO: 35124 - RNA, 19 nt, Homo sapiens
  misc_RNA (1)...(19): siRNA sense strand
gaagcuugaugcauuucug

SEQ ID NO: 35125 - RNA, 19 nt, Homo sapiens
  misc_RNA (1)...(19): siRNA sense strand
gaugauugagaacuguuua

SEQ ID NO: 35126 - RNA, 19 nt, Homo sapiens
  misc_RNA (1)...(19): siRNA sense strand
ggauuuagccaguauuucu

SEQ ID NO: 35127 - RNA, 19 nt, Homo sapiens
  misc_RNA (1)...(19): siRNA sense strand
gauauuguaugugaaaggu

SEQ ID NO: 35128 - RNA, 19 nt, Homo sapiens
  misc_RNA (1)...(19): siRNA sense strand
ugagaugcuugcagacuau

SEQ ID NO: 35129 - RNA, 19 nt, Homo sapiens
  misc_RNA (1)...(19): siRNA sense strand
uccgggagauguugcauaa

SEQ ID NO: 35130 - RNA, 19 nt, Homo sapiens
  misc_RNA (1)...(19): siRNA sense strand
aaagagacaucgggaagau

SEQ ID NO: 35131 - RNA, 19 nt, Homo sapiens
  misc_RNA (1)...(19): siRNA sense strand
gaugcaaaauccacaagua

SEQ ID NO: 35132 - RNA, 19 nt, Homo sapiens
  misc_RNA (1)...(19): siRNA sense strand
ccagaugguucguacagau

SEQ ID NO: 35133 - RNA, 19 nt, Homo sapiens
  misc_RNA (1)...(19): siRNA sense strand
gaaguagugauaaggucua

SEQ ID NO: 35134 - RNA, 19 nt, Homo sapiens
  misc_RNA (1)...(19): siRNA sense strand
gagaaaagccauagaaaca

SEQ ID NO: 35135 - RNA, 19 nt, Homo sapiens
  misc_RNA (1)...(19): siRNA sense strand
auugagaacuguuuagaug

SEQ ID NO: 35136 - RNA, 19 nt, Homo sapiens
  misc_RNA (1)...(19): siRNA sense strand
cuaaugcuaucaaagagau

SEQ ID NO: 35137 - RNA, 19 nt, Homo sapiens
  misc_RNA (1)...(19): siRNA sense strand
ggaaaugguggaagaugau

SEQ ID NO: 35138 - RNA, 19 nt, Homo sapiens
  misc_RNA (1)...(19): siRNA sense strand
gauggaaagugugcauaca

SEQ ID NO: 35139 - RNA, 19 nt, Homo sapiens
  misc_RNA (1)...(19): siRNA sense strand
ucacagaagauggaaauau

SEQ ID NO: 35140 - RNA, 19 nt, Homo sapiens
  misc_RNA (1)...(19): siRNA sense strand
uaucuucauucuucgacua

SEQ ID NO: 35141 - RNA, 19 nt, Homo sapiens
  misc_RNA (1)...(19): siRNA sense strand
agaaggacuugcugaauac

SEQ ID NO: 35142 - RNA, 19 nt, Homo sapiens
  misc_RNA (1)...(19): siRNA sense strand
gcaaaccccuguccaguca

SEQ ID NO: 35143 - RNA, 19 nt, Homo sapiens
  misc_RNA (1)...(19): siRNA sense strand
gaaaagccauagaaacagu

SEQ ID NO: 35144 - RNA, 19 nt, Homo sapiens
  misc_RNA (1)...(19): siRNA sense strand
gguuacauauccaaugcaa

SEQ ID NO: 35145 - RNA, 19 nt, Homo sapiens
  misc_RNA (1)...(19): siRNA sense strand
uggaaagugugcauacaga

SEQ ID NO: 35146 - RNA, 19 nt, Homo sapiens
  misc_RNA (1)...(19): siRNA sense strand
gagaacugauagaaauugg

SEQ ID NO: 35147 - RNA, 19 nt, Homo sapiens
  misc_RNA (1)...(19): siRNA sense strand
gccaguauuucuaccuaug

SEQ ID NO: 35148 - RNA, 19 nt, Homo sapiens
  misc_RNA (1)...(19): siRNA sense strand
ugagaacuguuuagaugca

SEQ ID NO: 35149 - RNA, 19 nt, Homo sapiens
  misc_RNA (1)...(19): siRNA sense strand
gaaaugguggaagaugauu

SEQ ID NO: 35150 - RNA, 19 nt, Homo sapiens
  misc_RNA (1)...(19): siRNA sense strand
ggauaagacagauauuucu

SEQ ID NO: 35151 - RNA, 19 nt, Homo sapiens
  misc_RNA (1)...(19): siRNA sense strand
ugauucagauccaagacaa

SEQ ID NO: 35152 - RNA, 19 nt, Homo sapiens
  misc_RNA (1)...(19): siRNA sense strand
aaugcaaacuacucaguga

SEQ ID NO: 35153 - RNA, 19 nt, Homo sapiens
  misc_RNA (1)...(19): siRNA sense strand
uaaaccaugugcuggcaau

SEQ ID NO: 35154 - RNA, 19 nt, Homo sapiens
  misc_RNA (1)...(19): siRNA sense strand
uagccaguauuucuaccua

SEQ ID NO: 35155 - RNA, 19 nt, Homo sapiens
  misc_RNA (1)...(19): siRNA sense strand
cugagaugcuugcagacua

SEQ ID NO: 35156 - RNA, 19 nt, Homo sapiens
  misc_RNA (1)...(19): siRNA sense strand
caaacuacucagugaagaa

SEQ ID NO: 35157 - RNA, 19 nt, Homo sapiens
  misc_RNA (1)...(19): siRNA sense strand
ucaagugauuguuaaagag

SEQ ID NO: 35158 - RNA, 19 nt, Homo sapiens
  misc_RNA (1)...(19): siRNA sense strand
cagagcaaguuacucagau

SEQ ID NO: 35159 - RNA, 19 nt, Homo sapiens
  misc_RNA (1)...(19): siRNA sense strand
ggaaguaccugcccacgua

SEQ ID NO: 35160 - RNA, 19 nt, Homo sapiens
  misc_RNA (1)...(19): siRNA sense strand
gaggacggcuucucucuuc

SEQ ID NO: 35161 - RNA, 19 nt, Homo sapiens
  misc_RNA (1)...(19): siRNA sense strand
ccaagcagcugguggacaa

SEQ ID NO: 35162 - RNA, 19 nt, Homo sapiens
  misc_RNA (1)...(19): siRNA sense strand
caacggccaugaggaagua

SEQ ID NO: 35163 - RNA, 19 nt, Homo sapiens
  misc_RNA (1)...(19): siRNA sense strand
gaacuccuauccuacuuca

SEQ ID NO: 35164 - RNA, 19 nt, Homo sapiens
  misc_RNA (1)...(19): siRNA sense strand
ccauggaacuccuauccua

SEQ ID NO: 35165 - RNA, 19 nt, Homo sapiens
  misc_RNA (1)...(19): siRNA sense strand
gaaccaaauugcaguggau

SEQ ID NO: 35166 - RNA, 19 nt, Homo sapiens
  misc_RNA (1)...(19): siRNA sense strand
gcccggagcaggacaaaua

SEQ ID NO: 35167 - RNA, 19 nt, Homo sapiens
  misc_RNA (1)...(19): siRNA sense strand
caggagcgcucacucaugu

SEQ ID NO: 35168 - RNA, 19 nt, Homo sapiens
  misc_RNA (1)...(19): siRNA sense strand
gagcaggucaugaggauug

SEQ ID NO: 35169 - RNA, 19 nt, Homo sapiens
  misc_RNA (1)...(19): siRNA sense strand
caucaucgguacccaguuc

SEQ ID NO: 35170 - RNA, 19 nt, Homo sapiens
  misc_RNA (1)...(19): siRNA sense strand
ucaacgcgcucacuuccuu

SEQ ID NO: 35171 - RNA, 19 nt, Homo sapiens
  misc_RNA (1)...(19): siRNA sense strand
gccaacgucuucaccaaug

SEQ ID NO: 35172 - RNA, 19 nt, Homo sapiens
  misc_RNA (1)...(19): siRNA sense strand
ccacguaccguuccuacaa

SEQ ID NO: 35173 - RNA, 19 nt, Homo sapiens
  misc_RNA (1)...(19): siRNA sense strand
ggaccugccugcucugaac

SEQ ID NO: 35174 - RNA, 19 nt, Homo sapiens
  misc_RNA (1)...(19): siRNA sense strand
ucaccaccgugucuaagaa

SEQ ID NO: 35175 - RNA, 19 nt, Homo sapiens
  misc_RNA (1)...(19): siRNA sense strand
gauccgggagcgauuguuu

SEQ ID NO: 35176 - RNA, 19 nt, Homo sapiens
  misc_RNA (1)...(19): siRNA sense strand
cuucuucucuucucucaga

SEQ ID NO: 35177 - RNA, 19 nt, Homo sapiens
  misc_RNA (1)...(19): siRNA sense strand
gaucaucugcgacaacaca

SEQ ID NO: 35178 - RNA, 19 nt, Homo sapiens
  misc_RNA (1)...(19): siRNA sense strand
ccaacaacaucgacaucug

SEQ ID NO: 35179 - RNA, 19 nt, Homo sapiens
  misc_RNA (1)...(19): siRNA sense strand
ucagaugcaugguggacuu

SEQ ID NO: 35180 - RNA, 19 nt, Homo sapiens
  misc_RNA (1)...(19): siRNA sense strand
ggaccacgaccucgacuuc

SEQ ID NO: 35181 - RNA, 19 nt, Homo sapiens
  misc_RNA (1)...(19): siRNA sense strand
gaaauuggcgaggaaacug

SEQ ID NO: 35182 - RNA, 19 nt, Homo sapiens
  misc_RNA (1)...(19): siRNA sense strand
guacacuuccugcauugaa

SEQ ID NO: 35183 - RNA, 19 nt, Homo sapiens
  misc_RNA (1)...(19): siRNA sense strand
aaccagcgcuuccaagaca

SEQ ID NO: 35184 - RNA, 19 nt, Homo sapiens
  misc_RNA (1)...(19): siRNA sense strand
uugacaaccugcacgauga

SEQ ID NO: 35185 - RNA, 19 nt, Homo sapiens
  misc_RNA (1)...(19): siRNA sense strand
ugguccagaucaucacuua

SEQ ID NO: 35186 - RNA, 19 nt, Homo sapiens
  misc_RNA (1)...(19): siRNA sense strand
gacaaauaccgcaccauca

SEQ ID NO: 35187 - RNA, 19 nt, Homo sapiens
  misc_RNA (1)...(19): siRNA sense strand
cauccaacccuucauguuc

SEQ ID NO: 35188 - RNA, 19 nt, Homo sapiens
  misc_RNA (1)...(19): siRNA sense strand
ccgcccagcugaauguguu

SEQ ID NO: 35189 - RNA, 19 nt, Homo sapiens
  misc_RNA (1)...(19): siRNA sense strand
gcaucaccaccgugucuaa

SEQ ID NO: 35190 - RNA, 19 nt, Homo sapiens
  misc_RNA (1)...(19): siRNA sense strand
acaaccggcuggccacaga

SEQ ID NO: 35191 - RNA, 19 nt, Homo sapiens
  misc_RNA (1)...(19): siRNA sense strand
gcuggaagguggcauugac

SEQ ID NO: 35192 - RNA, 19 nt, Homo sapiens
  misc_RNA (1)...(19): siRNA sense strand
caguacacuuccugcauug

SEQ ID NO: 35193 - RNA, 19 nt, Homo sapiens
  misc_RNA (1)...(19): siRNA sense strand
ugaauguguuguccaaguc

SEQ ID NO: 35194 - RNA, 19 nt, Homo sapiens
  misc_RNA (1)...(19): siRNA sense strand
gcugaggaaccugaaauug

SEQ ID NO: 35195 - RNA, 19 nt, Homo sapiens
  misc_RNA (1)...(19): siRNA sense strand
ucaccgggaugugcaacaa

SEQ ID NO: 35196 - RNA, 19 nt, Homo sapiens
  misc_RNA (1)...(19): siRNA sense strand
gaccaggagcgcucacuca

SEQ ID NO: 35197 - RNA, 19 nt, Homo sapiens
  misc_RNA (1)...(19): siRNA sense strand
ucaaccagcgcuuccaaga

SEQ ID NO: 35198 - RNA, 19 nt, Homo sapiens
  misc_RNA (1)...(19): siRNA sense strand
ggagcgcucacucauguuc

SEQ ID NO: 35199 - RNA, 19 nt, Homo sapiens
  misc_RNA (1)...(19): siRNA sense strand
ccaggaagcccggaagauc

SEQ ID NO: 35200 - RNA, 19 nt, Homo sapiens
  misc_RNA (1)...(19): siRNA sense strand
aaauugcaguggaugagau

SEQ ID NO: 35201 - RNA, 19 nt, Homo sapiens
  misc_RNA (1)...(19): siRNA sense strand
cugaauguguuguccaagu

SEQ ID NO: 35202 - RNA, 19 nt, Homo sapiens
  misc_RNA (1)...(19): siRNA sense strand
ccgggauggugaucgguuu

SEQ ID NO: 35203 - RNA, 19 nt, Homo sapiens
  misc_RNA (1)...(19): siRNA sense strand
gaauguguuguccaaguca

SEQ ID NO: 35204 - RNA, 19 nt, Homo sapiens
  misc_RNA (1)...(19): siRNA sense strand
caaauugcaguggaugaga

SEQ ID NO: 35205 - RNA, 19 nt, Homo sapiens
  misc_RNA (1)...(19): siRNA sense strand
gggacacccguuccaguga

SEQ ID NO: 35206 - RNA, 19 nt, Homo sapiens
  misc_RNA (1)...(19): siRNA sense strand
cuucauguccaacucauau

SEQ ID NO: 35207 - RNA, 19 nt, Homo sapiens
  misc_RNA (1)...(19): siRNA sense strand
gacacccguuccagugaga

SEQ ID NO: 35208 - RNA, 19 nt, Homo sapiens
  misc_RNA (1)...(19): siRNA sense strand
uagaccugcuggagaggaa

SEQ ID NO: 35209 - RNA, 19 nt, Homo sapiens
  misc_RNA (1)...(19): siRNA sense strand
cacguaccguuccuacaau

SEQ ID NO: 35210 - RNA, 19 nt, Homo sapiens
  misc_RNA (1)...(19): siRNA sense strand
cggaucaucugcgacaaca

SEQ ID NO: 35211 - RNA, 19 nt, Homo sapiens
  misc_RNA (1)...(19): siRNA sense strand
ggaacuccuauccuacuuc

SEQ ID NO: 35212 - RNA, 19 nt, Homo sapiens
  misc_RNA (1)...(19): siRNA sense strand
ugaaucgucagaaccaaau

SEQ ID NO: 35213 - RNA, 19 nt, Homo sapiens
  misc_RNA (1)...(19): siRNA sense strand
ucgccaacgucuucaccaa

SEQ ID NO: 35214 - RNA, 19 nt, Homo sapiens
  misc_RNA (1)...(19): siRNA sense strand
gccaugguccagaucauca

SEQ ID NO: 35215 - RNA, 19 nt, Homo sapiens
  misc_RNA (1)...(19): siRNA sense strand
caacugcaguacacuuccu

SEQ ID NO: 35216 - RNA, 19 nt, Homo sapiens
  misc_RNA (1)...(19): siRNA sense strand
ccaggagcgcucacucaug

SEQ ID NO: 35217 - RNA, 19 nt, Homo sapiens
  misc_RNA (1)...(19): siRNA sense strand
gacuuugucaacugcagua

SEQ ID NO: 35218 - RNA, 19 nt, Homo sapiens
  misc_RNA (1)...(19): siRNA sense strand
ccacuccucgccugcauca

SEQ ID NO: 35219 - RNA, 19 nt, Homo sapiens
  misc_RNA (1)...(19): siRNA sense strand
gaugcaugguggacuuagg

SEQ ID NO: 35220 - RNA, 19 nt, Homo sapiens
  misc_RNA (1)...(19): siRNA sense strand
gaaucgucagaaccaaauu

SEQ ID NO: 35221 - RNA, 19 nt, Homo sapiens
  misc_RNA (1)...(19): siRNA sense strand
cagaugcaugguggacuua

SEQ ID NO: 35222 - RNA, 19 nt, Homo sapiens
  misc_RNA (1)...(19): siRNA sense strand
uggaacuccuauccuacuu

SEQ ID NO: 35223 - RNA, 19 nt, Homo sapiens
  misc_RNA (1)...(19): siRNA sense strand
cagaucaacgcgcucacuu

SEQ ID NO: 35224 - RNA, 19 nt, Homo sapiens
  misc_RNA (1)...(19): siRNA sense strand
ggagguaaaucaacauaua

SEQ ID NO: 35225 - RNA, 19 nt, Homo sapiens
  misc_RNA (1)...(19): siRNA sense strand
gaauagagcuggaaauaag

SEQ ID NO: 35226 - RNA, 19 nt, Homo sapiens
  misc_RNA (1)...(19): siRNA sense strand
gaagagaccuuaacuaugc

SEQ ID NO: 35227 - RNA, 19 nt, Homo sapiens
  misc_RNA (1)...(19): siRNA sense strand
gcuaaaagcugaaguaaua

SEQ ID NO: 35228 - RNA, 19 nt, Homo sapiens
  misc_RNA (1)...(19): siRNA sense strand
caaaugcccuuuacugaaa

SEQ ID NO: 35229 - RNA, 19 nt, Homo sapiens
  misc_RNA (1)...(19): siRNA sense strand
gcagcaaacuuacaagauu

SEQ ID NO: 35230 - RNA, 19 nt, Homo sapiens
  misc_RNA (1)...(19): siRNA sense strand
caaagaaucugcagagugu

SEQ ID NO: 35231 - RNA, 19 nt, Homo sapiens
  misc_RNA (1)...(19): siRNA sense strand
gaagaaaggugucugugau

SEQ ID NO: 35232 - RNA, 19 nt, Homo sapiens
  misc_RNA (1)...(19): siRNA sense strand
uugcagagcuugcuaauuu

SEQ ID NO: 35233 - RNA, 19 nt, Homo sapiens
  misc_RNA (1)...(19): siRNA sense strand
gaggagagauugaauuuag

SEQ ID NO: 35234 - RNA, 19 nt, Homo sapiens
  misc_RNA (1)...(19): siRNA sense strand
gaagaugcagucaacauua

SEQ ID NO: 35235 - RNA, 19 nt, Homo sapiens
  misc_RNA (1)...(19): siRNA sense strand
gaucaguucuccaaucuug

SEQ ID NO: 35236 - RNA, 19 nt, Homo sapiens
  misc_RNA (1)...(19): siRNA sense strand
ggacaaggaagaauuauau

SEQ ID NO: 35237 - RNA, 19 nt, Homo sapiens
  misc_RNA (1)...(19): siRNA sense strand
gaaauaaggcauccaagga

SEQ ID NO: 35238 - RNA, 19 nt, Homo sapiens
  misc_RNA (1)...(19): siRNA sense strand
ucacagcacucaccacuga

SEQ ID NO: 35239 - RNA, 19 nt, Homo sapiens
  misc_RNA (1)...(19): siRNA sense strand
gaaaggacaaggaagaauu

SEQ ID NO: 35240 - RNA, 19 nt, Homo sapiens
  misc_RNA (1)...(19): siRNA sense strand
gugcacaguuuggauauua

SEQ ID NO: 35241 - RNA, 19 nt, Homo sapiens
  misc_RNA (1)...(19): siRNA sense strand
gagauugaauuuaguggaa

SEQ ID NO: 35242 - RNA, 19 nt, Homo sapiens
  misc_RNA (1)...(19): siRNA sense strand
uguagaagaugcagaauug

SEQ ID NO: 35243 - RNA, 19 nt, Homo sapiens
  misc_RNA (1)...(19): siRNA sense strand
gcagaugaauagugcugua

SEQ ID NO: 35244 - RNA, 19 nt, Homo sapiens
  misc_RNA (1)...(19): siRNA sense strand
ccagaagaaugguguuaaa

SEQ ID NO: 35245 - RNA, 19 nt, Homo sapiens
  misc_RNA (1)...(19): siRNA sense strand
gaagugcuaucuggaaaga

SEQ ID NO: 35246 - RNA, 19 nt, Homo sapiens
  misc_RNA (1)...(19): siRNA sense strand
ggagaaugauugguauuug

SEQ ID NO: 35247 - RNA, 19 nt, Homo sapiens
  misc_RNA (1)...(19): siRNA sense strand
aaucagauaccaacuguua

SEQ ID NO: 35248 - RNA, 19 nt, Homo sapiens
  misc_RNA (1)...(19): siRNA sense strand
ggaaagagagcaaggugaa

SEQ ID NO: 35249 - RNA, 19 nt, Homo sapiens
  misc_RNA (1)...(19): siRNA sense strand
gaggcagacuuuacaagaa

SEQ ID NO: 35250 - RNA, 19 nt, Homo sapiens
  misc_RNA (1)...(19): siRNA sense strand
ccaagaaguuucaaagaca

SEQ ID NO: 35251 - RNA, 19 nt, Homo sapiens
  misc_RNA (1)...(19): siRNA sense strand
ggagaaaggacaaggaaga

SEQ ID NO: 35252 - RNA, 19 nt, Homo sapiens
  misc_RNA (1)...(19): siRNA sense strand
agaaagcccuggaacuuga

SEQ ID NO: 35253 - RNA, 19 nt, Homo sapiens
  misc_RNA (1)...(19): siRNA sense strand
ggcaaucucucucaguuug

SEQ ID NO: 35254 - RNA, 19 nt, Homo sapiens
  misc_RNA (1)...(19): siRNA sense strand
gagcaccuguuccauaugu

SEQ ID NO: 35255 - RNA, 19 nt, Homo sapiens
  misc_RNA (1)...(19): siRNA sense strand
gaaacaacuuuagauaugg

SEQ ID NO: 35256 - RNA, 19 nt, Homo sapiens
  misc_RNA (1)...(19): siRNA sense strand
cuaaugacguauacuuuga

SEQ ID NO: 35257 - RNA, 19 nt, Homo sapiens
  misc_RNA (1)...(19): siRNA sense strand
caacauauauucgacaaac

SEQ ID NO: 35258 - RNA, 19 nt, Homo sapiens
  misc_RNA (1)...(19): siRNA sense strand
cagcagaaguguccauugu

SEQ ID NO: 35259 - RNA, 19 nt, Homo sapiens
  misc_RNA (1)...(19): siRNA sense strand
caaggagaaugauugguau

SEQ ID NO: 35260 - RNA, 19 nt, Homo sapiens
  misc_RNA (1)...(19): siRNA sense strand
gaccuuaacuaugcuuuau

SEQ ID NO: 35261 - RNA, 19 nt, Homo sapiens
  misc_RNA (1)...(19): siRNA sense strand
caauauuucuucaggcuau

SEQ ID NO: 35262 - RNA, 19 nt, Homo sapiens
  misc_RNA (1)...(19): siRNA sense strand
uuacugaucuucguucuga

SEQ ID NO: 35263 - RNA, 19 nt, Homo sapiens
  misc_RNA (1)...(19): siRNA sense strand
ugaauucccugauaaugau

SEQ ID NO: 35264 - RNA, 19 nt, Homo sapiens
  misc_RNA (1)...(19): siRNA sense strand
guagauauccagaagaaug

SEQ ID NO: 35265 - RNA, 19 nt, Homo sapiens
  misc_RNA (1)...(19): siRNA sense strand
cagcaaacuuacaagauug

SEQ ID NO: 35266 - RNA, 19 nt, Homo sapiens
  misc_RNA (1)...(19): siRNA sense strand
caagaaguuucaaagacaa

SEQ ID NO: 35267 - RNA, 19 nt, Homo sapiens
  misc_RNA (1)...(19): siRNA sense strand
uuagaacucuuaucagaug

SEQ ID NO: 35268 - RNA, 19 nt, Homo sapiens
  misc_RNA (1)...(19): siRNA sense strand
caaagaggaggaauucuga

SEQ ID NO: 35269 - RNA, 19 nt, Homo sapiens
  misc_RNA (1)...(19): siRNA sense strand
gagaaugauugguauuugg

SEQ ID NO: 35270 - RNA, 19 nt, Homo sapiens
  misc_RNA (1)...(19): siRNA sense strand
ggauuccagugcacaguuu

SEQ ID NO: 35271 - RNA, 19 nt, Homo sapiens
  misc_RNA (1)...(19): siRNA sense strand
aaacugagacagauaauuc

SEQ ID NO: 35272 - RNA, 19 nt, Homo sapiens
  misc_RNA (1)...(19): siRNA sense strand
aagacaagcagcaaacuua

SEQ ID NO: 35273 - RNA, 19 nt, Homo sapiens
  misc_RNA (1)...(19): siRNA sense strand
ccaaucagauaccaacugu

SEQ ID NO: 35274 - RNA, 19 nt, Homo sapiens
  misc_RNA (1)...(19): siRNA sense strand
ccucaggucugcaaccaaa

SEQ ID NO: 35275 - RNA, 19 nt, Homo sapiens
  misc_RNA (1)...(19): siRNA sense strand
aaaggacaaggaagaauua

SEQ ID NO: 35276 - RNA, 19 nt, Homo sapiens
  misc_RNA (1)...(19): siRNA sense strand
aagaugcagucaacauuaa

SEQ ID NO: 35277 - RNA, 19 nt, Homo sapiens
  misc_RNA (1)...(19): siRNA sense strand
aaccaugaauuccuuguaa

SEQ ID NO: 35278 - RNA, 19 nt, Homo sapiens
  misc_RNA (1)...(19): siRNA sense strand
gagaaucgcaaggauauga

SEQ ID NO: 35279 - RNA, 19 nt, Homo sapiens
  misc_RNA (1)...(19): siRNA sense strand
ccagagaucuuggcuugga

SEQ ID NO: 35280 - RNA, 19 nt, Homo sapiens
  misc_RNA (1)...(19): siRNA sense strand
gccaguauaugaaauugga

SEQ ID NO: 35281 - RNA, 19 nt, Homo sapiens
  misc_RNA (1)...(19): siRNA sense strand
aaaggugucugugaucaaa

SEQ ID NO: 35282 - RNA, 19 nt, Homo sapiens
  misc_RNA (1)...(19): siRNA sense strand
ugaauuuaguggaagcuuu

SEQ ID NO: 35283 - RNA, 19 nt, Homo sapiens
  misc_RNA (1)...(19): siRNA sense strand
gacauucucuuugguaaca

SEQ ID NO: 35284 - RNA, 19 nt, Homo sapiens
  misc_RNA (1)...(19): siRNA sense strand
ugaaacaaaugcccuuuac

SEQ ID NO: 35285 - RNA, 19 nt, Homo sapiens
  misc_RNA (1)...(19): siRNA sense strand
gaauagaggagagauugaa

SEQ ID NO: 35286 - RNA, 19 nt, Homo sapiens
  misc_RNA (1)...(19): siRNA sense strand
gaaucagguugcaguuuca

SEQ ID NO: 35287 - RNA, 19 nt, Homo sapiens
  misc_RNA (1)...(19): siRNA sense strand
gcagucaacauuaauaagu

SEQ ID NO: 35288 - RNA, 19 nt, Homo sapiens
  misc_RNA (1)...(19): siRNA sense strand
aagaauagagcuggaaaua

SEQ ID NO: 35289 - RNA, 19 nt, Homo sapiens
  misc_RNA (1)...(19): siRNA sense strand
gugaauucccugauaauga

SEQ ID NO: 35290 - RNA, 19 nt, Homo sapiens
  misc_RNA (1)...(19): siRNA sense strand
cgaaggagacgcugcaguu

SEQ ID NO: 35291 - RNA, 19 nt, Homo sapiens
  misc_RNA (1)...(19): siRNA sense strand
cagcuuugcucacguguca

SEQ ID NO: 35292 - RNA, 19 nt, Homo sapiens
  misc_RNA (1)...(19): siRNA sense strand
gaacagaauagaggagaga

SEQ ID NO: 35293 - RNA, 19 nt, Homo sapiens
  misc_RNA (1)...(19): siRNA sense strand
gggaaacugagacagauaa

SEQ ID NO: 35294 - RNA, 19 nt, Homo sapiens
  misc_RNA (1)...(19): siRNA sense strand
ggaccaaaggaauguguuu

SEQ ID NO: 35295 - RNA, 19 nt, Homo sapiens
  misc_RNA (1)...(19): siRNA sense strand
uagaggagagauugaauuu

SEQ ID NO: 35296 - RNA, 19 nt, Homo sapiens
  misc_RNA (1)...(19): siRNA sense strand
aaacaaaugcccuuuacug

SEQ ID NO: 35297 - RNA, 19 nt, Homo sapiens
  misc_RNA (1)...(19): siRNA sense strand
gaaccaaugcagacacuca

SEQ ID NO: 35298 - RNA, 19 nt, Homo sapiens
  misc_RNA (1)...(19): siRNA sense strand
ggaguuggguauguggauu

SEQ ID NO: 35299 - RNA, 19 nt, Homo sapiens
  misc_RNA (1)...(19): siRNA sense strand
uugaggaguuucaguauau

SEQ ID NO: 35300 - RNA, 19 nt, Homo sapiens
  misc_RNA (1)...(19): siRNA sense strand
acagcaaauugacuucuuu

SEQ ID NO: 35301 - RNA, 19 nt, Homo sapiens
  misc_RNA (1)...(19): siRNA sense strand
gaugcagucaacauuaaua

SEQ ID NO: 35302 - RNA, 19 nt, Homo sapiens
  misc_RNA (1)...(19): siRNA sense strand
gaaauuauuguuggcaguu

SEQ ID NO: 35303 - RNA, 19 nt, Homo sapiens
  misc_RNA (1)...(19): siRNA sense strand
agaaucagguugcaguuuc

SEQ ID NO: 35304 - RNA, 19 nt, Homo sapiens
  misc_RNA (1)...(19): siRNA sense strand
gaaacugagacagauaauu

SEQ ID NO: 35305 - RNA, 19 nt, Homo sapiens
  misc_RNA (1)...(19): siRNA sense strand
ugagacagauaauucaaag

SEQ ID NO: 35306 - RNA, 19 nt, Homo sapiens
  misc_RNA (1)...(19): siRNA sense strand
gaaucgcaaggauaugaua

SEQ ID NO: 35307 - RNA, 19 nt, Homo sapiens
  misc_RNA (1)...(19): siRNA sense strand
ggaugccauuguuaaagaa

SEQ ID NO: 35308 - RNA, 19 nt, Homo sapiens
  misc_RNA (1)...(19): siRNA sense strand
gacccuggcaaacagauua

SEQ ID NO: 35309 - RNA, 19 nt, Homo sapiens
  misc_RNA (1)...(19): siRNA sense strand
gccaagaaguuucaaagac

SEQ ID NO: 35310 - RNA, 19 nt, Homo sapiens
  misc_RNA (1)...(19): siRNA sense strand
ugccagaaauggagaauca

SEQ ID NO: 35311 - RNA, 19 nt, Homo sapiens
  misc_RNA (1)...(19): siRNA sense strand
ucagaugauuccaacuuug

SEQ ID NO: 35312 - RNA, 19 nt, Homo sapiens
  misc_RNA (1)...(19): siRNA sense strand
gaaagagagcaaggugaaa

SEQ ID NO: 35313 - RNA, 19 nt, Homo sapiens
  misc_RNA (1)...(19): siRNA sense strand
aagaagugcuaucuggaaa

SEQ ID NO: 35314 - RNA, 19 nt, Homo sapiens
  misc_RNA (1)...(19): siRNA sense strand
agagugugcuaaacagaaa

SEQ ID NO: 35315 - RNA, 19 nt, Homo sapiens
  misc_RNA (1)...(19): siRNA sense strand
gcaaccaaagauucauuaa

SEQ ID NO: 35316 - RNA, 19 nt, Homo sapiens
  misc_RNA (1)...(19): siRNA sense strand
guacucauggcccaaauug

SEQ ID NO: 35317 - RNA, 19 nt, Homo sapiens
  misc_RNA (1)...(19): siRNA sense strand
caauaugggagguaaauca

SEQ ID NO: 35318 - RNA, 19 nt, Homo sapiens
  misc_RNA (1)...(19): siRNA sense strand
gagaaaggacaaggaagaa

SEQ ID NO: 35319 - RNA, 19 nt, Homo sapiens
  misc_RNA (1)...(19): siRNA sense strand
gugaaacaaaugcccuuua

SEQ ID NO: 35320 - RNA, 19 nt, Homo sapiens
  misc_RNA (1)...(19): siRNA sense strand
uaauuucccuaagcaugua

SEQ ID NO: 35321 - RNA, 19 nt, Homo sapiens
  misc_RNA (1)...(19): siRNA sense strand
gcugaaauguuggaaacug

SEQ ID NO: 35322 - RNA, 19 nt, Homo sapiens
  misc_RNA (1)...(19): siRNA sense strand
cauuguggacugcaucuua

SEQ ID NO: 35323 - RNA, 19 nt, Homo sapiens
  misc_RNA (1)...(19): siRNA sense strand
gcccuuuacugaaauguca

SEQ ID NO: 35324 - RNA, 19 nt, Homo sapiens
  misc_RNA (1)...(19): siRNA sense strand
gaagagauauguuugagau

SEQ ID NO: 35325 - RNA, 19 nt, Homo sapiens
  misc_RNA (1)...(19): siRNA sense strand
gagaaugagucuauuaaga

SEQ ID NO: 35326 - RNA, 19 nt, Homo sapiens
  misc_RNA (1)...(19): siRNA sense strand
gagaaacacuaaucacuga

SEQ ID NO: 35327 - RNA, 19 nt, Homo sapiens
  misc_RNA (1)...(19): siRNA sense strand
gaacauaucaagcucguuu

SEQ ID NO: 35328 - RNA, 19 nt, Homo sapiens
  misc_RNA (1)...(19): siRNA sense strand
gaaacggauucuucucuaa

SEQ ID NO: 35329 - RNA, 19 nt, Homo sapiens
  misc_RNA (1)...(19): siRNA sense strand
ggugugaucucgagaauug

SEQ ID NO: 35330 - RNA, 19 nt, Homo sapiens
  misc_RNA (1)...(19): siRNA sense strand
ggaaacggauucuucucua

SEQ ID NO: 35331 - RNA, 19 nt, Homo sapiens
  misc_RNA (1)...(19): siRNA sense strand
gacaggagccauucaagua

SEQ ID NO: 35332 - RNA, 19 nt, Homo sapiens
  misc_RNA (1)...(19): siRNA sense strand
cgagaaagacagaagguua

SEQ ID NO: 35333 - RNA, 19 nt, Homo sapiens
  misc_RNA (1)...(19): siRNA sense strand
gggaagaguuuacaucaca

SEQ ID NO: 35334 - RNA, 19 nt, Homo sapiens
  misc_RNA (1)...(19): siRNA sense strand
ugaaagugaugaugcauau

SEQ ID NO: 35335 - RNA, 19 nt, Homo sapiens
  misc_RNA (1)...(19): siRNA sense strand
ggacauuguuuauccuaau

SEQ ID NO: 35336 - RNA, 19 nt, Homo sapiens
  misc_RNA (1)...(19): siRNA sense strand
guucagugcuugugcauug

SEQ ID NO: 35337 - RNA, 19 nt, Homo sapiens
  misc_RNA (1)...(19): siRNA sense strand
guggauggauggacaguuu

SEQ ID NO: 35338 - RNA, 19 nt, Homo sapiens
  misc_RNA (1)...(19): siRNA sense strand
ucaaguagcagacaaaguu

SEQ ID NO: 35339 - RNA, 19 nt, Homo sapiens
  misc_RNA (1)...(19): siRNA sense strand
gacagaagguuacagaaag

SEQ ID NO: 35340 - RNA, 19 nt, Homo sapiens
  misc_RNA (1)...(19): siRNA sense strand
gcugaccguucuccuauuu

SEQ ID NO: 35341 - RNA, 19 nt, Homo sapiens
  misc_RNA (1)...(19): siRNA sense strand
acuaaucacugacaaagaa

SEQ ID NO: 35342 - RNA, 19 nt, Homo sapiens
  misc_RNA (1)...(19): siRNA sense strand
ggacauaaauuugcaucuc

SEQ ID NO: 35343 - RNA, 19 nt, Homo sapiens
  misc_RNA (1)...(19): siRNA sense strand
uaaaugcaguggccaacaa

SEQ ID NO: 35344 - RNA, 19 nt, Homo sapiens
  misc_RNA (1)...(19): siRNA sense strand
ggaaacgaaauaaagauga

SEQ ID NO: 35345 - RNA, 19 nt, Homo sapiens
  misc_RNA (1)...(19): siRNA sense strand
gaauaggucauggugauaa

SEQ ID NO: 35346 - RNA, 19 nt, Homo sapiens
  misc_RNA (1)...(19): siRNA sense strand
ggccacagcagaagagaua

SEQ ID NO: 35347 - RNA, 19 nt, Homo sapiens
  misc_RNA (1)...(19): siRNA sense strand
ugaaucugcucgagaaaga

SEQ ID NO: 35348 - RNA, 19 nt, Homo sapiens
  misc_RNA (1)...(19): siRNA sense strand
gcagaagagauauguuuga

SEQ ID NO: 35349 - RNA, 19 nt, Homo sapiens
  misc_RNA (1)...(19): siRNA sense strand
cagcagaagagauauguuu

SEQ ID NO: 35350 - RNA, 19 nt, Homo sapiens
  misc_RNA (1)...(19): siRNA sense strand
ccgauuugguacuuucuua

SEQ ID NO: 35351 - RNA, 19 nt, Homo sapiens
  misc_RNA (1)...(19): siRNA sense strand
uggaucaucuguauaguug

SEQ ID NO: 35352 - RNA, 19 nt, Homo sapiens
  misc_RNA (1)...(19): siRNA sense strand
ggaagaguuuacaucacaa

SEQ ID NO: 35353 - RNA, 19 nt, Homo sapiens
  misc_RNA (1)...(19): siRNA sense strand
aaucaccauuggagaauaa

SEQ ID NO: 35354 - RNA, 19 nt, Homo sapiens
  misc_RNA (1)...(19): siRNA sense strand
gaauuccagugcugucaug

SEQ ID NO: 35355 - RNA, 19 nt, Homo sapiens
  misc_RNA (1)...(19): siRNA sense strand
ggauucuucucuaauacuu

SEQ ID NO: 35356 - RNA, 19 nt, Homo sapiens
  misc_RNA (1)...(19): siRNA sense strand
gaggacgucucgagaugga

SEQ ID NO: 35357 - RNA, 19 nt, Homo sapiens
  misc_RNA (1)...(19): siRNA sense strand
caucacaaauuaucgucuu

SEQ ID NO: 35358 - RNA, 19 nt, Homo sapiens
  misc_RNA (1)...(19): siRNA sense strand
gauuguguguggcaaaugu

SEQ ID NO: 35359 - RNA, 19 nt, Homo sapiens
  misc_RNA (1)...(19): siRNA sense strand
cauugaaggguucgaaaua

SEQ ID NO: 35360 - RNA, 19 nt, Homo sapiens
  misc_RNA (1)...(19): siRNA sense strand
guagaagaaucucauuggu

SEQ ID NO: 35361 - RNA, 19 nt, Homo sapiens
  misc_RNA (1)...(19): siRNA sense strand
gaacuuuucuucuuagaca

SEQ ID NO: 35362 - RNA, 19 nt, Homo sapiens
  misc_RNA (1)...(19): siRNA sense strand
cugcaucaacuucuaaaua

SEQ ID NO: 35363 - RNA, 19 nt, Homo sapiens
  misc_RNA (1)...(19): siRNA sense strand
ggaggaggauaugaaagug

SEQ ID NO: 35364 - RNA, 19 nt, Homo sapiens
  misc_RNA (1)...(19): siRNA sense strand
gaugcaagacccagcguaa

SEQ ID NO: 35365 - RNA, 19 nt, Homo sapiens
  misc_RNA (1)...(19): siRNA sense strand
agacagaagguuacagaaa

SEQ ID NO: 35366 - RNA, 19 nt, Homo sapiens
  misc_RNA (1)...(19): siRNA sense strand
ugggugaauuacuacauua

SEQ ID NO: 35367 - RNA, 19 nt, Homo sapiens
  misc_RNA (1)...(19): siRNA sense strand
gaagaguuuacaucacaaa

SEQ ID NO: 35368 - RNA, 19 nt, Homo sapiens
  misc_RNA (1)...(19): siRNA sense strand
ugaaggacauuguuuaucc

SEQ ID NO: 35369 - RNA, 19 nt, Homo sapiens
  misc_RNA (1)...(19): siRNA sense strand
uaucauaacgccgaacuuu

SEQ ID NO: 35370 - RNA, 19 nt, Homo sapiens
  misc_RNA (1)...(19): siRNA sense strand
aacggauucuucucuaaua

SEQ ID NO: 35371 - RNA, 19 nt, Homo sapiens
  misc_RNA (1)...(19): siRNA sense strand
ccagugcugucauggauuc

SEQ ID NO: 35372 - RNA, 19 nt, Homo sapiens
  misc_RNA (1)...(19): siRNA sense strand
ugugcaaacucacuucuga

SEQ ID NO: 35373 - RNA, 19 nt, Homo sapiens
  misc_RNA (1)...(19): siRNA sense strand
uauaguugccgauuuggua

SEQ ID NO: 35374 - RNA, 19 nt, Homo sapiens
  misc_RNA (1)...(19): siRNA sense strand
aaauuugcaucucgaauag

SEQ ID NO: 35375 - RNA, 19 nt, Homo sapiens
  misc_RNA (1)...(19): siRNA sense strand
cagggagacuaauaaacaa

SEQ ID NO: 35376 - RNA, 19 nt, Homo sapiens
  misc_RNA (1)...(19): siRNA sense strand
ucagggagacuaauaaaca

SEQ ID NO: 35377 - RNA, 19 nt, Homo sapiens
  misc_RNA (1)...(19): siRNA sense strand
guaaagacaugagaaaccu

SEQ ID NO: 35378 - RNA, 19 nt, Homo sapiens
  misc_RNA (1)...(19): siRNA sense strand
ucgaauaggucauggugau

SEQ ID NO: 35379 - RNA, 19 nt, Homo sapiens
  misc_RNA (1)...(19): siRNA sense strand
gaugaccuccggagaguug

SEQ ID NO: 35380 - RNA, 19 nt, Homo sapiens
  misc_RNA (1)...(19): siRNA sense strand
gcucacagucugccauuau

SEQ ID NO: 35381 - RNA, 19 nt, Homo sapiens
  misc_RNA (1)...(19): siRNA sense strand
guuaucagggagacuaaua

SEQ ID NO: 35382 - RNA, 19 nt, Homo sapiens
  misc_RNA (1)...(19): siRNA sense strand
gcaagacccagcguaaaug

SEQ ID NO: 35383 - RNA, 19 nt, Homo sapiens
  misc_RNA (1)...(19): siRNA sense strand
aaacucaccauuuaugaug

SEQ ID NO: 35384 - RNA, 19 nt, Homo sapiens
  misc_RNA (1)...(19): siRNA sense strand
gagguucgcuuugaaacag

SEQ ID NO: 35385 - RNA, 19 nt, Homo sapiens
  misc_RNA (1)...(19): siRNA sense strand
acucauugguuagaacaua

SEQ ID NO: 35386 - RNA, 19 nt, Homo sapiens
  misc_RNA (1)...(19): siRNA sense strand
ggacugcucagcugacauc

SEQ ID NO: 35387 - RNA, 19 nt, Homo sapiens
  misc_RNA (1)...(19): siRNA sense strand
aaacacuaaucacugacaa

SEQ ID NO: 35388 - RNA, 19 nt, Homo sapiens
  misc_RNA (1)...(19): siRNA sense strand
aagaggacgucucgagaug

SEQ ID NO: 35389 - RNA, 19 nt, Homo sapiens
  misc_RNA (1)...(19): siRNA sense strand
gaaauaucucgauguuauc

SEQ ID NO: 35390 - RNA, 19 nt, Homo sapiens
  misc_RNA (1)...(19): siRNA sense strand
gauguuaucagggagacua

SEQ ID NO: 35391 - RNA, 19 nt, Homo sapiens
  misc_RNA (1)...(19): siRNA sense strand
aaagacagaagguuacaga

SEQ ID NO: 35392 - RNA, 19 nt, Homo sapiens
  misc_RNA (1)...(19): siRNA sense strand
ucucauugguuguccaguu

SEQ ID NO: 35393 - RNA, 19 nt, Homo sapiens
  misc_RNA (1)...(19): siRNA sense strand
gaaacacuaaucacugaca

SEQ ID NO: 35394 - RNA, 19 nt, Homo sapiens
  misc_RNA (1)...(19): siRNA sense strand
caccauuuaugaugcaaga

SEQ ID NO: 35395 - RNA, 19 nt, Homo sapiens
  misc_RNA (1)...(19): siRNA sense strand
cagaagagauauguuugag

SEQ ID NO: 35396 - RNA, 19 nt, Homo sapiens
  misc_RNA (1)...(19): siRNA sense strand
uauauccaguugccaguau

SEQ ID NO: 35397 - RNA, 19 nt, Homo sapiens
  misc_RNA (1)...(19): siRNA sense strand
gagaaagacagaagguuac

SEQ ID NO: 35398 - RNA, 19 nt, Homo sapiens
  misc_RNA (1)...(19): siRNA sense strand
caaguagcagacaaaguuu

SEQ ID NO: 35399 - RNA, 19 nt, Homo sapiens
  misc_RNA (1)...(19): siRNA sense strand
uagaagaaucucauugguu

SEQ ID NO: 35400 - RNA, 19 nt, Homo sapiens
  misc_RNA (1)...(19): siRNA sense strand
aaagugaaggacauuguuu

SEQ ID NO: 35401 - RNA, 19 nt, Homo sapiens
  misc_RNA (1)...(19): siRNA sense strand
gggaaacgaaauaaagaug

SEQ ID NO: 35402 - RNA, 19 nt, Homo sapiens
  misc_RNA (1)...(19): siRNA sense strand
gaaaauaagacggucauug

SEQ ID NO: 35403 - RNA, 19 nt, Homo sapiens
  misc_RNA (1)...(19): siRNA sense strand
ggaaggccacagcagaaga

SEQ ID NO: 35404 - RNA, 19 nt, Homo sapiens
  misc_RNA (1)...(19): siRNA sense strand
caguaugcgucacuuggaa

SEQ ID NO: 35405 - RNA, 19 nt, Homo sapiens
  misc_RNA (1)...(19): siRNA sense strand
cugcucagcugacauccuu

SEQ ID NO: 35406 - RNA, 19 nt, Homo sapiens
  misc_RNA (1)...(19): siRNA sense strand
gguaugagugggaaacgaa

SEQ ID NO: 35407 - RNA, 19 nt, Homo sapiens
  misc_RNA (1)...(19): siRNA sense strand
gauggacaguuuacaaucc

SEQ ID NO: 35408 - RNA, 19 nt, Homo sapiens
  misc_RNA (1)...(19): siRNA sense strand
uaucgugccucagaugaug

SEQ ID NO: 35409 - RNA, 19 nt, Homo sapiens
  misc_RNA (1)...(19): siRNA sense strand
cuguauaguugccgauuug

SEQ ID NO: 35410 - RNA, 19 nt, Homo sapiens
  misc_RNA (1)...(19): siRNA sense strand
gaugcugaccguucuccua

SEQ ID NO: 35411 - RNA, 19 nt, Homo sapiens
  misc_RNA (1)...(19): siRNA sense strand
aauaggucauggugauaaa

SEQ ID NO: 35412 - RNA, 19 nt, Homo sapiens
  misc_RNA (1)...(19): siRNA sense strand
ggagaaugagucuauuaag

SEQ ID NO: 35413 - RNA, 19 nt, Homo sapiens
  misc_RNA (1)...(19): siRNA sense strand
gaaaauuccuauggucuag

SEQ ID NO: 35414 - RNA, 19 nt, Homo sapiens
  misc_RNA (1)...(19): siRNA sense strand
aaacaguucccuacagcuu

SEQ ID NO: 35415 - RNA, 19 nt, Homo sapiens
  misc_RNA (1)...(19): siRNA sense strand
gcauugaaggguucgaaau

SEQ ID NO: 35416 - RNA, 19 nt, Homo sapiens
  misc_RNA (1)...(19): siRNA sense strand
uggagaaugagucuauuaa

SEQ ID NO: 35417 - RNA, 19 nt, Homo sapiens
  misc_RNA (1)...(19): siRNA sense strand
gaggaggauaugaaaguga

SEQ ID NO: 35418 - RNA, 19 nt, Homo sapiens
  misc_RNA (1)...(19): siRNA sense strand
caacaggaggaggauauga

SEQ ID NO: 35419 - RNA, 19 nt, Homo sapiens
  misc_RNA (1)...(19): siRNA sense strand
uaagugcuaugagcucugu

SEQ ID NO: 35420 - RNA, 19 nt, Homo sapiens
  misc_RNA (1)...(19): siRNA sense strand
ggucuagauauuacuugua

SEQ ID NO: 35421 - RNA, 19 nt, Homo sapiens
  misc_RNA (1)...(19): siRNA sense strand
ucacagucugccauuauuu

SEQ ID NO: 35422 - RNA, 19 nt, Homo sapiens
  misc_RNA (1)...(19): siRNA sense strand
cgccaacucugccaagcuu

SEQ ID NO: 35423 - RNA, 19 nt, Homo sapiens
  misc_RNA (1)...(19): siRNA sense strand
uaucagggagacuaauaaa

SEQ ID NO: 35424 - RNA, 19 nt, Homo sapiens
  misc_RNA (1)...(19): siRNA sense strand
gaagacagcuuuguuauag

SEQ ID NO: 35425 - RNA, 19 nt, Homo sapiens
  misc_RNA (1)...(19): siRNA sense strand
ggaaaugccugcaagcaaa

SEQ ID NO: 35426 - RNA, 19 nt, Homo sapiens
  misc_RNA (1)...(19): siRNA sense strand
gaaguaaccugaacaucuu

SEQ ID NO: 35427 - RNA, 19 nt, Homo sapiens
  misc_RNA (1)...(19): siRNA sense strand
guagauaucucuggaaauu

SEQ ID NO: 35428 - RNA, 19 nt, Homo sapiens
  misc_RNA (1)...(19): siRNA sense strand
caacuggucucucauuaaa

SEQ ID NO: 35429 - RNA, 19 nt, Homo sapiens
  misc_RNA (1)...(19): siRNA sense strand
gcucagaccugucaccuuu

SEQ ID NO: 35430 - RNA, 19 nt, Homo sapiens
  misc_RNA (1)...(19): siRNA sense strand
ggacugaauuuccuacaaa

SEQ ID NO: 35431 - RNA, 19 nt, Homo sapiens
  misc_RNA (1)...(19): siRNA sense strand
ggauguaucugcuggcuuu

SEQ ID NO: 35432 - RNA, 19 nt, Homo sapiens
  misc_RNA (1)...(19): siRNA sense strand
gaaaggacuuauucugcua

SEQ ID NO: 35433 - RNA, 19 nt, Homo sapiens
  misc_RNA (1)...(19): siRNA sense strand
gaacaucuuucaguacauu

SEQ ID NO: 35434 - RNA, 19 nt, Homo sapiens
  misc_RNA (1)...(19): siRNA sense strand
gaugaaggauguaaauguu

SEQ ID NO: 35435 - RNA, 19 nt, Homo sapiens
  misc_RNA (1)...(19): siRNA sense strand
gaagaagaccuuaaacaga

SEQ ID NO: 35436 - RNA, 19 nt, Homo sapiens
  misc_RNA (1)...(19): siRNA sense strand
caacguggauguggccuua

SEQ ID NO: 35437 - RNA, 19 nt, Homo sapiens
  misc_RNA (1)...(19): siRNA sense strand
aagaagaccuuaaacagaa

SEQ ID NO: 35438 - RNA, 19 nt, Homo sapiens
  misc_RNA (1)...(19): siRNA sense strand
gaaauggucgcucacaauu

SEQ ID NO: 35439 - RNA, 19 nt, Homo sapiens
  misc_RNA (1)...(19): siRNA sense strand
caagagaacucagagaugu

SEQ ID NO: 35440 - RNA, 19 nt, Homo sapiens
  misc_RNA (1)...(19): siRNA sense strand
caagauugaugucuggaaa

SEQ ID NO: 35441 - RNA, 19 nt, Homo sapiens
  misc_RNA (1)...(19): siRNA sense strand
ucacacaacuggucucuca

SEQ ID NO: 35442 - RNA, 19 nt, Homo sapiens
  misc_RNA (1)...(19): siRNA sense strand
gagguuaugucucucagaa

SEQ ID NO: 35443 - RNA, 19 nt, Homo sapiens
  misc_RNA (1)...(19): siRNA sense strand
gcaaagaccuacgcuccuu

SEQ ID NO: 35444 - RNA, 19 nt, Homo sapiens
  misc_RNA (1)...(19): siRNA sense strand
cagagaaacuguuaugauc

SEQ ID NO: 35445 - RNA, 19 nt, Homo sapiens
  misc_RNA (1)...(19): siRNA sense strand
gaagcaggcccaagauuga

SEQ ID NO: 35446 - RNA, 19 nt, Homo sapiens
  misc_RNA (1)...(19): siRNA sense strand
uaagauagaagacagcuuu

SEQ ID NO: 35447 - RNA, 19 nt, Homo sapiens
  misc_RNA (1)...(19): siRNA sense strand
gcaauggaguuuagcuugu

SEQ ID NO: 35448 - RNA, 19 nt, Homo sapiens
  misc_RNA (1)...(19): siRNA sense strand
gaguuuagcuugugguauc

SEQ ID NO: 35449 - RNA, 19 nt, Homo sapiens
  misc_RNA (1)...(19): siRNA sense strand
acuggucucucauuaaaua

SEQ ID NO: 35450 - RNA, 19 nt, Homo sapiens
  misc_RNA (1)...(19): siRNA sense strand
gcaugcagauggacaagga

SEQ ID NO: 35451 - RNA, 19 nt, Homo sapiens
  misc_RNA (1)...(19): siRNA sense strand
ggaaaccaguacagaaaca

SEQ ID NO: 35452 - RNA, 19 nt, Homo sapiens
  misc_RNA (1)...(19): siRNA sense strand
gaaaguugugucagaauga

SEQ ID NO: 35453 - RNA, 19 nt, Homo sapiens
  misc_RNA (1)...(19): siRNA sense strand
gagaaacuguuaugaucau

SEQ ID NO: 35454 - RNA, 19 nt, Homo sapiens
  misc_RNA (1)...(19): siRNA sense strand
ugaaggauguaaauguuga

SEQ ID NO: 35455 - RNA, 19 nt, Homo sapiens
  misc_RNA (1)...(19): siRNA sense strand
ugugaaagcuggccuggaa

SEQ ID NO: 35456 - RNA, 19 nt, Homo sapiens
  misc_RNA (1)...(19): siRNA sense strand
gaucaucacugggacacuu

SEQ ID NO: 35457 - RNA, 19 nt, Homo sapiens
  misc_RNA (1)...(19): siRNA sense strand
gauguggccuuacuaugga

SEQ ID NO: 35458 - RNA, 19 nt, Homo sapiens
  misc_RNA (1)...(19): siRNA sense strand
guagccaggugguuauuga

SEQ ID NO: 35459 - RNA, 19 nt, Homo sapiens
  misc_RNA (1)...(19): siRNA sense strand
guucaaagguucuauuggu

SEQ ID NO: 35460 - RNA, 19 nt, Homo sapiens
  misc_RNA (1)...(19): siRNA sense strand
cacaacuggucucucauua

SEQ ID NO: 35461 - RNA, 19 nt, Homo sapiens
  misc_RNA (1)...(19): siRNA sense strand
cuacaucugucaccaccua

SEQ ID NO: 35462 - RNA, 19 nt, Homo sapiens
  misc_RNA (1)...(19): siRNA sense strand
guacuccacugaaguucuu

SEQ ID NO: 35463 - RNA, 19 nt, Homo sapiens
  misc_RNA (1)...(19): siRNA sense strand
ggaaauggucgcucacaau

SEQ ID NO: 35464 - RNA, 19 nt, Homo sapiens
  misc_RNA (1)...(19): siRNA sense strand
gauagaagacagcuuuguu

SEQ ID NO: 35465 - RNA, 19 nt, Homo sapiens
  misc_RNA (1)...(19): siRNA sense strand
gaccuacgcuccuucaucu

SEQ ID NO: 35466 - RNA, 19 nt, Homo sapiens
  misc_RNA (1)...(19): siRNA sense strand
aaauaacgaugaaggaugu

SEQ ID NO: 35467 - RNA, 19 nt, Homo sapiens
  misc_RNA (1)...(19): siRNA sense strand
gaugaccaguugauccaaa

SEQ ID NO: 35468 - RNA, 19 nt, Homo sapiens
  misc_RNA (1)...(19): siRNA sense strand
aaugaaggcugcaaacuca

SEQ ID NO: 35469 - RNA, 19 nt, Homo sapiens
  misc_RNA (1)...(19): siRNA sense strand
gaagaaagaagagauccuu

SEQ ID NO: 35470 - RNA, 19 nt, Homo sapiens
  misc_RNA (1)...(19): siRNA sense strand
gaaauuagagcugaagaca

SEQ ID NO: 35471 - RNA, 19 nt, Homo sapiens
  misc_RNA (1)...(19): siRNA sense strand
gaaauuguaaagugaccua

SEQ ID NO: 35472 - RNA, 19 nt, Homo sapiens
  misc_RNA (1)...(19): siRNA sense strand
uagggugacugugguaaua

SEQ ID NO: 35473 - RNA, 19 nt, Homo sapiens
  misc_RNA (1)...(19): siRNA sense strand
caacggauacagugauuug

SEQ ID NO: 35474 - RNA, 19 nt, Homo sapiens
  misc_RNA (1)...(19): siRNA sense strand
ggccuuggauucaugcaaa

SEQ ID NO: 35475 - RNA, 19 nt, Homo sapiens
  misc_RNA (1)...(19): siRNA sense strand
aauggucgcucacaauuau

SEQ ID NO: 35476 - RNA, 19 nt, Homo sapiens
  misc_RNA (1)...(19): siRNA sense strand
aguggaagcuaagaaguua

SEQ ID NO: 35477 - RNA, 19 nt, Homo sapiens
  misc_RNA (1)...(19): siRNA sense strand
gacaucagagaaacuguua

SEQ ID NO: 35478 - RNA, 19 nt, Homo sapiens
  misc_RNA (1)...(19): siRNA sense strand
agagauccuucaaauacua

SEQ ID NO: 35479 - RNA, 19 nt, Homo sapiens
  misc_RNA (1)...(19): siRNA sense strand
ggacugcgaagaaagaaga

SEQ ID NO: 35480 - RNA, 19 nt, Homo sapiens
  misc_RNA (1)...(19): siRNA sense strand
ucagaaaguugugucagaa

SEQ ID NO: 35481 - RNA, 19 nt, Homo sapiens
  misc_RNA (1)...(19): siRNA sense strand
ggacuccucuuuugugaaa

SEQ ID NO: 35482 - RNA, 19 nt, Homo sapiens
  misc_RNA (1)...(19): siRNA sense strand
uaacugaugaggugaagaa

SEQ ID NO: 35483 - RNA, 19 nt, Homo sapiens
  misc_RNA (1)...(19): siRNA sense strand
ggucuugggugucaguuca

SEQ ID NO: 35484 - RNA, 19 nt, Homo sapiens
  misc_RNA (1)...(19): siRNA sense strand
gaagcuccauucaggcaau

SEQ ID NO: 35485 - RNA, 19 nt, Homo sapiens
  misc_RNA (1)...(19): siRNA sense strand
gaccucagacucauuagaa

SEQ ID NO: 35486 - RNA, 19 nt, Homo sapiens
  misc_RNA (1)...(19): siRNA sense strand
uaucgaagcagaaauuaga

SEQ ID NO: 35487 - RNA, 19 nt, Homo sapiens
  misc_RNA (1)...(19): siRNA sense strand
gaaacuuccuggccuucau

SEQ ID NO: 35488 - RNA, 19 nt, Homo sapiens
  misc_RNA (1)...(19): siRNA sense strand
agauaucucuggaaauugu

SEQ ID NO: 35489 - RNA, 19 nt, Homo sapiens
  misc_RNA (1)...(19): siRNA sense strand
gguaauaaccacugacauc

SEQ ID NO: 35490 - RNA, 19 nt, Homo sapiens
  misc_RNA (1)...(19): siRNA sense strand
ugccuacacuggcuacaua

SEQ ID NO: 35491 - RNA, 19 nt, Homo sapiens
  misc_RNA (1)...(19): siRNA sense strand
ucagaccucagacucauua

SEQ ID NO: 35492 - RNA, 19 nt, Homo sapiens
  misc_RNA (1)...(19): siRNA sense strand
agaagacagcuuuguuaua

SEQ ID NO: 35493 - RNA, 19 nt, Homo sapiens
  misc_RNA (1)...(19): siRNA sense strand
ggauguggccuuacuaugg

SEQ ID NO: 35494 - RNA, 19 nt, Homo sapiens
  misc_RNA (1)...(19): siRNA sense strand
gaaagcguauuagcaggau

SEQ ID NO: 35495 - RNA, 19 nt, Homo sapiens
  misc_RNA (1)...(19): siRNA sense strand
gaagaccuuaaacagaaua

SEQ ID NO: 35496 - RNA, 19 nt, Homo sapiens
  misc_RNA (1)...(19): siRNA sense strand
uagcugugcuugcugaaga

SEQ ID NO: 35497 - RNA, 19 nt, Homo sapiens
  misc_RNA (1)...(19): siRNA sense strand
auagaagacagcuuuguua

SEQ ID NO: 35498 - RNA, 19 nt, Homo sapiens
  misc_RNA (1)...(19): siRNA sense strand
ccaaugagguagauaucuc

SEQ ID NO: 35499 - RNA, 19 nt, Homo sapiens
  misc_RNA (1)...(19): siRNA sense strand
gaaugaaggcugcaaacuc

SEQ ID NO: 35500 - RNA, 19 nt, Homo sapiens
  misc_RNA (1)...(19): siRNA sense strand
ccucaggacugcgaagaaa

SEQ ID NO: 35501 - RNA, 19 nt, Homo sapiens
  misc_RNA (1)...(19): siRNA sense strand
cgaagcaggcccaagauug

SEQ ID NO: 35502 - RNA, 19 nt, Homo sapiens
  misc_RNA (1)...(19): siRNA sense strand
guacacggccauucccauu

SEQ ID NO: 35503 - RNA, 19 nt, Homo sapiens
  misc_RNA (1)...(19): siRNA sense strand
ugucagccauccucuuuga

SEQ ID NO: 35504 - RNA, 19 nt, Homo sapiens
  misc_RNA (1)...(19): siRNA sense strand
caagacauccuacguuugg

SEQ ID NO: 35505 - RNA, 19 nt, Homo sapiens
  misc_RNA (1)...(19): siRNA sense strand
gucagaaaguugugucaga

SEQ ID NO: 35506 - RNA, 19 nt, Homo sapiens
  misc_RNA (1)...(19): siRNA sense strand
gaccaguugauccaaauaa

SEQ ID NO: 35507 - RNA, 19 nt, Homo sapiens
  misc_RNA (1)...(19): siRNA sense strand
caguacccauucuuaguuu

SEQ ID NO: 35508 - RNA, 19 nt, Homo sapiens
  misc_RNA (1)...(19): siRNA sense strand
guuacaaucuggacuaaaa

SEQ ID NO: 35509 - RNA, 19 nt, Homo sapiens
  misc_RNA (1)...(19): siRNA sense strand
agaaaguugugucagaaug

SEQ ID NO: 35510 - RNA, 19 nt, Homo sapiens
  misc_RNA (1)...(19): siRNA sense strand
gaagaaacacacaauuuug

SEQ ID NO: 35511 - RNA, 19 nt, Homo sapiens
  misc_RNA (1)...(19): siRNA sense strand
auagcgaggucuggauuua

SEQ ID NO: 35512 - RNA, 19 nt, Homo sapiens
  misc_RNA (1)...(19): siRNA sense strand
gcucuggaaccaccaauga

SEQ ID NO: 35513 - RNA, 19 nt, Homo sapiens
  misc_RNA (1)...(19): siRNA sense strand
ugucaccaccuauaagaua

SEQ ID NO: 35514 - RNA, 19 nt, Homo sapiens
  misc_RNA (1)...(19): siRNA sense strand
guaauaaccacugacauca

SEQ ID NO: 35515 - RNA, 19 nt, Homo sapiens
  misc_RNA (1)...(19): siRNA sense strand
ucacaauuaugaccguuuc

SEQ ID NO: 35516 - RNA, 19 nt, Homo sapiens
  misc_RNA (1)...(19): siRNA sense strand
cugaagaaacacacaauuu

SEQ ID NO: 35517 - RNA, 19 nt, Homo sapiens
  misc_RNA (1)...(19): siRNA sense strand
cauauucagcuucuguuaa

SEQ ID NO: 35518 - RNA, 19 nt, Homo sapiens
  misc_RNA (1)...(19): siRNA sense strand
cuuggaagcucugcaaaga

SEQ ID NO: 35519 - RNA, 19 nt, Homo sapiens
  misc_RNA (1)...(19): siRNA sense strand
uaacaauccauccuacaug

SEQ ID NO: 35520 - RNA, 19 nt, Homo sapiens
  misc_RNA (1)...(19): siRNA sense strand
gcagugacaucagagaaac

SEQ ID NO: 35521 - RNA, 19 nt, Homo sapiens
  misc_RNA (1)...(19): siRNA sense strand
aauuagagcugaagacaac

SEQ ID NO: 35522 - RNA, 19 nt, Homo sapiens
  misc_RNA (1)...(19): siRNA sense strand
ccaggguggucuagcuauu

SEQ ID NO: 35523 - RNA, 19 nt, Homo sapiens
  misc_RNA (1)...(19): siRNA sense strand
gaacucagagaugugcaaa

SEQ ID NO: 35524 - RNA, 19 nt, Homo sapiens
  misc_RNA (1)...(19): siRNA sense strand
gaagaagccuuguguguug

SEQ ID NO: 35525 - RNA, 19 nt, Homo sapiens
  misc_RNA (1)...(19): siRNA sense strand
ggagagcgcuguaauguug

SEQ ID NO: 35526 - RNA, 19 nt, Homo sapiens
  misc_RNA (1)...(19): siRNA sense strand
gaacauaguuggaguaguc

SEQ ID NO: 35527 - RNA, 19 nt, Homo sapiens
  misc_RNA (1)...(19): siRNA sense strand
gagauuagcuauaaggauu

SEQ ID NO: 35528 - RNA, 19 nt, Homo sapiens
  misc_RNA (1)...(19): siRNA sense strand
ccacaaagcagauauaauu

SEQ ID NO: 35529 - RNA, 19 nt, Homo sapiens
  misc_RNA (1)...(19): siRNA sense strand
gagaagcucuuacguuaug

SEQ ID NO: 35530 - RNA, 19 nt, Homo sapiens
  misc_RNA (1)...(19): siRNA sense strand
guugauaucuuacucauug

SEQ ID NO: 35531 - RNA, 19 nt, Homo sapiens
  misc_RNA (1)...(19): siRNA sense strand
gaagaaaccagagugcuua

SEQ ID NO: 35532 - RNA, 19 nt, Homo sapiens
  misc_RNA (1)...(19): siRNA sense strand
cugagaagcucuuacguua

SEQ ID NO: 35533 - RNA, 19 nt, Homo sapiens
  misc_RNA (1)...(19): siRNA sense strand
gagaaggccaggaagauua

SEQ ID NO: 35534 - RNA, 19 nt, Homo sapiens
  misc_RNA (1)...(19): siRNA sense strand
ccaaggaaauggagagauu

SEQ ID NO: 35535 - RNA, 19 nt, Homo sapiens
  misc_RNA (1)...(19): siRNA sense strand
gggagaagcuaaacgaaga

SEQ ID NO: 35536 - RNA, 19 nt, Homo sapiens
  misc_RNA (1)...(19): siRNA sense strand
cagaagagcuccaugaaag

SEQ ID NO: 35537 - RNA, 19 nt, Homo sapiens
  misc_RNA (1)...(19): siRNA sense strand
gaucucaucuggaauaaag

SEQ ID NO: 35538 - RNA, 19 nt, Homo sapiens
  misc_RNA (1)...(19): siRNA sense strand
ccaagcaccuaaaggauuu

SEQ ID NO: 35539 - RNA, 19 nt, Homo sapiens
  misc_RNA (1)...(19): siRNA sense strand
gaggagauacuuacccuua

SEQ ID NO: 35540 - RNA, 19 nt, Homo sapiens
  misc_RNA (1)...(19): siRNA sense strand
ccaggaaggucuacgauga

SEQ ID NO: 35541 - RNA, 19 nt, Homo sapiens
  misc_RNA (1)...(19): siRNA sense strand
gaaaugagaccuuuuauug

SEQ ID NO: 35542 - RNA, 19 nt, Homo sapiens
  misc_RNA (1)...(19): siRNA sense strand
aaacugggcuuuaauccaa

SEQ ID NO: 35543 - RNA, 19 nt, Homo sapiens
  misc_RNA (1)...(19): siRNA sense strand
cagccuauguccucuguua

SEQ ID NO: 35544 - RNA, 19 nt, Homo sapiens
  misc_RNA (1)...(19): siRNA sense strand
gaugaaacgccuucuauga

SEQ ID NO: 35545 - RNA, 19 nt, Homo sapiens
  misc_RNA (1)...(19): siRNA sense strand
gaaauggcccugucgaaga

SEQ ID NO: 35546 - RNA, 19 nt, Homo sapiens
  misc_RNA (1)...(19): siRNA sense strand
caacuuguaugccauuaau

SEQ ID NO: 35547 - RNA, 19 nt, Homo sapiens
  misc_RNA (1)...(19): siRNA sense strand
ugaaagaguucgccgagaa

SEQ ID NO: 35548 - RNA, 19 nt, Homo sapiens
  misc_RNA (1)...(19): siRNA sense strand
gaucauaucagggaaauug

SEQ ID NO: 35549 - RNA, 19 nt, Homo sapiens
  misc_RNA (1)...(19): siRNA sense strand
guccuuggcugcaauaauu

SEQ ID NO: 35550 - RNA, 19 nt, Homo sapiens
  misc_RNA (1)...(19): siRNA sense strand
caacagaaacagacacaaa

SEQ ID NO: 35551 - RNA, 19 nt, Homo sapiens
  misc_RNA (1)...(19): siRNA sense strand
ggagagggauuugucauca

SEQ ID NO: 35552 - RNA, 19 nt, Homo sapiens
  misc_RNA (1)...(19): siRNA sense strand
caagggaagugcauuguca

SEQ ID NO: 35553 - RNA, 19 nt, Homo sapiens
  misc_RNA (1)...(19): siRNA sense strand
caagugcaaugaccagauu

SEQ ID NO: 35554 - RNA, 19 nt, Homo sapiens
  misc_RNA (1)...(19): siRNA sense strand
gaucaaggaaguuugcuaa

SEQ ID NO: 35555 - RNA, 19 nt, Homo sapiens
  misc_RNA (1)...(19): siRNA sense strand
ggcauuagguuaacagaau

SEQ ID NO: 35556 - RNA, 19 nt, Homo sapiens
  misc_RNA (1)...(19): siRNA sense strand
ugcaauaauuuccgaguua

SEQ ID NO: 35557 - RNA, 19 nt, Homo sapiens
  misc_RNA (1)...(19): siRNA sense strand
cagggacgaucguugauaa

SEQ ID NO: 35558 - RNA, 19 nt, Homo sapiens
  misc_RNA (1)...(19): siRNA sense strand
aggaucagguugaggauua

SEQ ID NO: 35559 - RNA, 19 nt, Homo sapiens
  misc_RNA (1)...(19): siRNA sense strand
ggaaaucauggaagaauau

SEQ ID NO: 35560 - RNA, 19 nt, Homo sapiens
  misc_RNA (1)...(19): siRNA sense strand
gaaauggagagauuagcua

SEQ ID NO: 35561 - RNA, 19 nt, Homo sapiens
  misc_RNA (1)...(19): siRNA sense strand
ccuaauauccuaaccauug

SEQ ID NO: 35562 - RNA, 19 nt, Homo sapiens
  misc_RNA (1)...(19): siRNA sense strand
ugaaacgccuucuaugaug

SEQ ID NO: 35563 - RNA, 19 nt, Homo sapiens
  misc_RNA (1)...(19): siRNA sense strand
ggucaggaauuuaaagauc

SEQ ID NO: 35564 - RNA, 19 nt, Homo sapiens
  misc_RNA (1)...(19): siRNA sense strand
gggauaugauacagacuaa

SEQ ID NO: 35565 - RNA, 19 nt, Homo sapiens
  misc_RNA (1)...(19): siRNA sense strand
guucccagcuguuagauga

SEQ ID NO: 35566 - RNA, 19 nt, Homo sapiens
  misc_RNA (1)...(19): siRNA sense strand
cgacauaggcaagaacaua

SEQ ID NO: 35567 - RNA, 19 nt, Homo sapiens
  misc_RNA (1)...(19): siRNA sense strand
ggacuggaauggaggaaca

SEQ ID NO: 35568 - RNA, 19 nt, Homo sapiens
  misc_RNA (1)...(19): siRNA sense strand
gaccagauuuugcaacuua

SEQ ID NO: 35569 - RNA, 19 nt, Homo sapiens
  misc_RNA (1)...(19): siRNA sense strand
cuagagcccuucaggauug

SEQ ID NO: 35570 - RNA, 19 nt, Homo sapiens
  misc_RNA (1)...(19): siRNA sense strand
gcagauaucauugaaacaa

SEQ ID NO: 35571 - RNA, 19 nt, Homo sapiens
  misc_RNA (1)...(19): siRNA sense strand
gcagaagagcuccaugaaa

SEQ ID NO: 35572 - RNA, 19 nt, Homo sapiens
  misc_RNA (1)...(19): siRNA sense strand
gcacggagccauacuacug

SEQ ID NO: 35573 - RNA, 19 nt, Homo sapiens
  misc_RNA (1)...(19): siRNA sense strand
gaagaacgccuugaguaug

SEQ ID NO: 35574 - RNA, 19 nt, Homo sapiens
  misc_RNA (1)...(19): siRNA sense strand
gauugaagcuggguuaaag

SEQ ID NO: 35575 - RNA, 19 nt, Homo sapiens
  misc_RNA (1)...(19): siRNA sense strand
gauuaugcauugaggaaga

SEQ ID NO: 35576 - RNA, 19 nt, Homo sapiens
  misc_RNA (1)...(19): siRNA sense strand
gggcagauaucauugaaac

SEQ ID NO: 35577 - RNA, 19 nt, Homo sapiens
  misc_RNA (1)...(19): siRNA sense strand
gagcaaggccuaugaggau

SEQ ID NO: 35578 - RNA, 19 nt, Homo sapiens
  misc_RNA (1)...(19): siRNA sense strand
agacaggaauuaagagguu

SEQ ID NO: 35579 - RNA, 19 nt, Homo sapiens
  misc_RNA (1)...(19): siRNA sense strand
gucaauagcauuagucuga

SEQ ID NO: 35580 - RNA, 19 nt, Homo sapiens
  misc_RNA (1)...(19): siRNA sense strand
uggcugagguugagaaaug

SEQ ID NO: 35581 - RNA, 19 nt, Homo sapiens
  misc_RNA (1)...(19): siRNA sense strand
gaugaauacuuugaggaaa

SEQ ID NO: 35582 - RNA, 19 nt, Homo sapiens
  misc_RNA (1)...(19): siRNA sense strand
ccacacagcaguuaaaaua

SEQ ID NO: 35583 - RNA, 19 nt, Homo sapiens
  misc_RNA (1)...(19): siRNA sense strand
ccgagaagcucaccaugug

SEQ ID NO: 35584 - RNA, 19 nt, Homo sapiens
  misc_RNA (1)...(19): siRNA sense strand
ugaacacacugauuaguca

SEQ ID NO: 35585 - RNA, 19 nt, Homo sapiens
  misc_RNA (1)...(19): siRNA sense strand
gcucuggguccgacuaaua

SEQ ID NO: 35586 - RNA, 19 nt, Homo sapiens
  misc_RNA (1)...(19): siRNA sense strand
gguugaggauuaugcauug

SEQ ID NO: 35587 - RNA, 19 nt, Homo sapiens
  misc_RNA (1)...(19): siRNA sense strand
aaucgaggcuuucccaaga

SEQ ID NO: 35588 - RNA, 19 nt, Homo sapiens
  misc_RNA (1)...(19): siRNA sense strand
uauaaggauuccauuguug

SEQ ID NO: 35589 - RNA, 19 nt, Homo sapiens
  misc_RNA (1)...(19): siRNA sense strand
gggugcagcugaaaugaga

SEQ ID NO: 35590 - RNA, 19 nt, Homo sapiens
  misc_RNA (1)...(19): siRNA sense strand
ccagugaagcccacguuua

SEQ ID NO: 35591 - RNA, 19 nt, Homo sapiens
  misc_RNA (1)...(19): siRNA sense strand
gaaaccucccuguguauga

SEQ ID NO: 35592 - RNA, 19 nt, Homo sapiens
  misc_RNA (1)...(19): siRNA sense strand
cagaauaaguggaggucuu

SEQ ID NO: 35593 - RNA, 19 nt, Homo sapiens
  misc_RNA (1)...(19): siRNA sense strand
gaugauggcaugcuagaug

SEQ ID NO: 35594 - RNA, 19 nt, Homo sapiens
  misc_RNA (1)...(19): siRNA sense strand
gcaggaaacuaugaagaag

SEQ ID NO: 35595 - RNA, 19 nt, Homo sapiens
  misc_RNA (1)...(19): siRNA sense strand
cagcugaaaugagaccuuu

SEQ ID NO: 35596 - RNA, 19 nt, Homo sapiens
  misc_RNA (1)...(19): siRNA sense strand
gcagaggccuuugcagaag

SEQ ID NO: 35597 - RNA, 19 nt, Homo sapiens
  misc_RNA (1)...(19): siRNA sense strand
ggaagccuuucuuugaugu

SEQ ID NO: 35598 - RNA, 19 nt, Homo sapiens
  misc_RNA (1)...(19): siRNA sense strand
ugcagaagcugguggacua

SEQ ID NO: 35599 - RNA, 19 nt, Homo sapiens
  misc_RNA (1)...(19): siRNA sense strand
cuauaaggauuccauuguu

SEQ ID NO: 35600 - RNA, 19 nt, Homo sapiens
  misc_RNA (1)...(19): siRNA sense strand
caucauggcaggaaacuau

SEQ ID NO: 35601 - RNA, 19 nt, Homo sapiens
  misc_RNA (1)...(19): siRNA sense strand
gagcccagguguuggaugu

SEQ ID NO: 35602 - RNA, 19 nt, Homo sapiens
  misc_RNA (1)...(19): siRNA sense strand
ggaugaauacuuugaggaa

SEQ ID NO: 35603 - RNA, 19 nt, Homo sapiens
  misc_RNA (1)...(19): siRNA sense strand
ccugaugaauggaaugaaa

SEQ ID NO: 35604 - RNA, 19 nt, Homo sapiens
  misc_RNA (1)...(19): siRNA sense strand
aaauggcccugucgaagaa

SEQ ID NO: 35605 - RNA, 19 nt, Homo sapiens
  misc_RNA (1)...(19): siRNA sense strand
gaaggacaggcaacagaaa

SEQ ID NO: 35606 - RNA, 19 nt, Homo sapiens
  misc_RNA (1)...(19): siRNA sense strand
ggagaaggccaggaagauu

SEQ ID NO: 35607 - RNA, 19 nt, Homo sapiens
  misc_RNA (1)...(19): siRNA sense strand
auaggaacaucacauuuga

SEQ ID NO: 35608 - RNA, 19 nt, Homo sapiens
  misc_RNA (1)...(19): siRNA sense strand
uagaagaagaggacccuua

SEQ ID NO: 35609 - RNA, 19 nt, Homo sapiens
  misc_RNA (1)...(19): siRNA sense strand
uaacggcacaguagaagaa

SEQ ID NO: 35610 - RNA, 19 nt, Homo sapiens
  misc_RNA (1)...(19): siRNA sense strand
cgaagaacgccuugaguau

SEQ ID NO: 35611 - RNA, 19 nt, Homo sapiens
  misc_RNA (1)...(19): siRNA sense strand
caccaacuuuguuaacauu

SEQ ID NO: 35612 - RNA, 19 nt, Homo sapiens
  misc_RNA (1)...(19): siRNA sense strand
uggauuaaauugugcuuug

SEQ ID NO: 35613 - RNA, 19 nt, Homo sapiens
  misc_RNA (1)...(19): siRNA sense strand
ggucaacaccagaucauau

SEQ ID NO: 35614 - RNA, 19 nt, Homo sapiens
  misc_RNA (1)...(19): siRNA sense strand
gaggagcaaccacuucaaa

SEQ ID NO: 35615 - RNA, 19 nt, Homo sapiens
  misc_RNA (1)...(19): siRNA sense strand
cuggaaaccucccugugua

SEQ ID NO: 35616 - RNA, 19 nt, Homo sapiens
  misc_RNA (1)...(19): siRNA sense strand
gggaagaaagucauucaga

SEQ ID NO: 35617 - RNA, 19 nt, Homo sapiens
  misc_RNA (1)...(19): siRNA sense strand
auggagagauuagcuauaa

SEQ ID NO: 35618 - RNA, 19 nt, Homo sapiens
  misc_RNA (1)...(19): siRNA sense strand
uauaggaacaucacauuug

SEQ ID NO: 35619 - RNA, 19 nt, Homo sapiens
  misc_RNA (1)...(19): siRNA sense strand
aggaaaucauggaagaaua

SEQ ID NO: 35620 - RNA, 19 nt, Homo sapiens
  misc_RNA (1)...(19): siRNA sense strand
uaaaauagcuccgagauac

SEQ ID NO: 35621 - RNA, 19 nt, Homo sapiens
  misc_RNA (1)...(19): siRNA sense strand
gauagugaaugcuggaaac

SEQ ID NO: 35622 - RNA, 19 nt, Homo sapiens
  misc_RNA (1)...(19): siRNA sense strand
caaggagaggagauacuua

SEQ ID NO: 35623 - RNA, 19 nt, Homo sapiens
  misc_RNA (1)...(19): siRNA sense strand
gugaagcccacguuuauug

SEQ ID NO: 35624 - RNA, 19 nt, Homo sapiens
  misc_RNA (1)...(19): siRNA sense strand
ggacuuaccugaagaacuu

SEQ ID NO: 35625 - RNA, 19 nt, Homo sapiens
  misc_RNA (1)...(19): siRNA sense strand
gaugagagcugguagaaga

SEQ ID NO: 35626 - RNA, 19 nt, Homo sapiens
  misc_RNA (1)...(19): siRNA sense strand
gcaauaaguucuauaagga

SEQ ID NO: 35627 - RNA, 19 nt, Homo sapiens
  misc_RNA (1)...(19): siRNA sense strand
ucaagaggguucauaaauu

SEQ ID NO: 35628 - RNA, 19 nt, Homo sapiens
  misc_RNA (1)...(19): siRNA sense strand
ggaaugaauuucuauaugg

SEQ ID NO: 35629 - RNA, 19 nt, Homo sapiens
  misc_RNA (1)...(19): siRNA sense strand
uauaguaacuggagaagaa

SEQ ID NO: 35630 - RNA, 19 nt, Homo sapiens
  misc_RNA (1)...(19): siRNA sense strand
caagaggguucauaaauuc

SEQ ID NO: 35631 - RNA, 19 nt, Homo sapiens
  misc_RNA (1)...(19): siRNA sense strand
caggaucccuacaauaaua

SEQ ID NO: 35632 - RNA, 19 nt, Homo sapiens
  misc_RNA (1)...(19): siRNA sense strand
gaccauauccuaccaugua

SEQ ID NO: 35633 - RNA, 19 nt, Homo sapiens
  misc_RNA (1)...(19): siRNA sense strand
ggaaauauccuggcucuug

SEQ ID NO: 35634 - RNA, 19 nt, Homo sapiens
  misc_RNA (1)...(19): siRNA sense strand
acucugggcucacuuaaua

SEQ ID NO: 35635 - RNA, 19 nt, Homo sapiens
  misc_RNA (1)...(19): siRNA sense strand
gaacucaucaaagaacuua

SEQ ID NO: 35636 - RNA, 19 nt, Homo sapiens
  misc_RNA (1)...(19): siRNA sense strand
cagcagggauuaucaguug

SEQ ID NO: 35637 - RNA, 19 nt, Homo sapiens
  misc_RNA (1)...(19): siRNA sense strand
uggaaugucucacaaauga

SEQ ID NO: 35638 - RNA, 19 nt, Homo sapiens
  misc_RNA (1)...(19): siRNA sense strand
gaacauaaagcgaaugauc

SEQ ID NO: 35639 - RNA, 19 nt, Homo sapiens
  misc_RNA (1)...(19): siRNA sense strand
gagcauaucgccaggaauu

SEQ ID NO: 35640 - RNA, 19 nt, Homo sapiens
  misc_RNA (1)...(19): siRNA sense strand
gcaccaagguugucuuucu

SEQ ID NO: 35641 - RNA, 19 nt, Homo sapiens
  misc_RNA (1)...(19): siRNA sense strand
gaaguucuggcaauugaua

SEQ ID NO: 35642 - RNA, 19 nt, Homo sapiens
  misc_RNA (1)...(19): siRNA sense strand
gagagauacuauggacuua

SEQ ID NO: 35643 - RNA, 19 nt, Homo sapiens
  misc_RNA (1)...(19): siRNA sense strand
gauggaaugucucacaaau

SEQ ID NO: 35644 - RNA, 19 nt, Homo sapiens
  misc_RNA (1)...(19): siRNA sense strand
gguauuuggugaacauaaa

SEQ ID NO: 35645 - RNA, 19 nt, Homo sapiens
  misc_RNA (1)...(19): siRNA sense strand
cggaagggaucucuauaaa

SEQ ID NO: 35646 - RNA, 19 nt, Homo sapiens
  misc_RNA (1)...(19): siRNA sense strand
gaacacacaaaucaucauu

SEQ ID NO: 35647 - RNA, 19 nt, Homo sapiens
  misc_RNA (1)...(19): siRNA sense strand
ggaaauagcaaagaugaga

SEQ ID NO: 35648 - RNA, 19 nt, Homo sapiens
  misc_RNA (1)...(19): siRNA sense strand
gauuaucaguugccuuuga

SEQ ID NO: 35649 - RNA, 19 nt, Homo sapiens
  misc_RNA (1)...(19): siRNA sense strand
gaauuucuguuugaaguug

SEQ ID NO: 35650 - RNA, 19 nt, Homo sapiens
  misc_RNA (1)...(19): siRNA sense strand
gggaauaccuaaacuucga

SEQ ID NO: 35651 - RNA, 19 nt, Homo sapiens
  misc_RNA (1)...(19): siRNA sense strand
cagcagggaucaagcuuug

SEQ ID NO: 35652 - RNA, 19 nt, Homo sapiens
  misc_RNA (1)...(19): siRNA sense strand
aaucacagaugcccugaaa

SEQ ID NO: 35653 - RNA, 19 nt, Homo sapiens
  misc_RNA (1)...(19): siRNA sense strand
gaagcagcaaucuguauaa

SEQ ID NO: 35654 - RNA, 19 nt, Homo sapiens
  misc_RNA (1)...(19): siRNA sense strand
ggaagaaagcaauaaguuc

SEQ ID NO: 35655 - RNA, 19 nt, Homo sapiens
  misc_RNA (1)...(19): siRNA sense strand
guucuuacaugauggaaug

SEQ ID NO: 35656 - RNA, 19 nt, Homo sapiens
  misc_RNA (1)...(19): siRNA sense strand
acacacaaaucaucauuca

SEQ ID NO: 35657 - RNA, 19 nt, Homo sapiens
  misc_RNA (1)...(19): siRNA sense strand
gagcaggaucccuacaaua

SEQ ID NO: 35658 - RNA, 19 nt, Homo sapiens
  misc_RNA (1)...(19): siRNA sense strand
gcaaagaugagagcuggua

SEQ ID NO: 35659 - RNA, 19 nt, Homo sapiens
  misc_RNA (1)...(19): siRNA sense strand
gaagggaucucuauaaaac

SEQ ID NO: 35660 - RNA, 19 nt, Homo sapiens
  misc_RNA (1)...(19): siRNA sense strand
uggagaaaguaaagagaua

SEQ ID NO: 35661 - RNA, 19 nt, Homo sapiens
  misc_RNA (1)...(19): siRNA sense strand
cagcaaagcacaugccaaa

SEQ ID NO: 35662 - RNA, 19 nt, Homo sapiens
  misc_RNA (1)...(19): siRNA sense strand
gggauuaucaguugccuuu

SEQ ID NO: 35663 - RNA, 19 nt, Homo sapiens
  misc_RNA (1)...(19): siRNA sense strand
cgaaacaggcagauugaaa

SEQ ID NO: 35664 - RNA, 19 nt, Homo sapiens
  misc_RNA (1)...(19): siRNA sense strand
ggauuggaguacucuagaa

SEQ ID NO: 35665 - RNA, 19 nt, Homo sapiens
  misc_RNA (1)...(19): siRNA sense strand
gauaccaccucaggauuau

SEQ ID NO: 35666 - RNA, 19 nt, Homo sapiens
  misc_RNA (1)...(19): siRNA sense strand
uaaagcgaaugaucgaaug

SEQ ID NO: 35667 - RNA, 19 nt, Homo sapiens
  misc_RNA (1)...(19): siRNA sense strand
uagcggagauggaaauauc

SEQ ID NO: 35668 - RNA, 19 nt, Homo sapiens
  misc_RNA (1)...(19): siRNA sense strand
ggaucaagcuuuggcugaa

SEQ ID NO: 35669 - RNA, 19 nt, Homo sapiens
  misc_RNA (1)...(19): siRNA sense strand
caaagcacaugccaaaauu

SEQ ID NO: 35670 - RNA, 19 nt, Homo sapiens
  misc_RNA (1)...(19): siRNA sense strand
ggagaaaguaaagagauaa

SEQ ID NO: 35671 - RNA, 19 nt, Homo sapiens
  misc_RNA (1)...(19): siRNA sense strand
gaagacaagcuagaauaga

SEQ ID NO: 35672 - RNA, 19 nt, Homo sapiens
  misc_RNA (1)...(19): siRNA sense strand
uaccuaaacuucgaauuga

SEQ ID NO: 35673 - RNA, 19 nt, Homo sapiens
  misc_RNA (1)...(19): siRNA sense strand
gggagguucuuacaugaug

SEQ ID NO: 35674 - RNA, 19 nt, Homo sapiens
  misc_RNA (1)...(19): siRNA sense strand
ucaauuaguggauaccaua

SEQ ID NO: 35675 - RNA, 19 nt, Homo sapiens
  misc_RNA (1)...(19): siRNA sense strand
gauggaauuccuuuagaaa

SEQ ID NO: 35676 - RNA, 19 nt, Homo sapiens
  misc_RNA (1)...(19): siRNA sense strand
aaacccagaagaccuaaua

SEQ ID NO: 35677 - RNA, 19 nt, Homo sapiens
  misc_RNA (1)...(19): siRNA sense strand
ugaugaagcuuuggguuug

SEQ ID NO: 35678 - RNA, 19 nt, Homo sapiens
  misc_RNA (1)...(19): siRNA sense strand
gaaugucucacaaaugaug

SEQ ID NO: 35679 - RNA, 19 nt, Homo sapiens
  misc_RNA (1)...(19): siRNA sense strand
gaaccauccaugaaaauua

SEQ ID NO: 35680 - RNA, 19 nt, Homo sapiens
  misc_RNA (1)...(19): siRNA sense strand
ggaauuuggagaaaguaaa

SEQ ID NO: 35681 - RNA, 19 nt, Homo sapiens
  misc_RNA (1)...(19): siRNA sense strand
agaaugugcugcccgaaga

SEQ ID NO: 35682 - RNA, 19 nt, Homo sapiens
  misc_RNA (1)...(19): siRNA sense strand
ugauggaauuccuuuagaa

SEQ ID NO: 35683 - RNA, 19 nt, Homo sapiens
  misc_RNA (1)...(19): siRNA sense strand
ugauaccaccucaggauua

SEQ ID NO: 35684 - RNA, 19 nt, Homo sapiens
  misc_RNA (1)...(19): siRNA sense strand
ccaggaauuuggagaaagu

SEQ ID NO: 35685 - RNA, 19 nt, Homo sapiens
  misc_RNA (1)...(19): siRNA sense strand
aagacaagcuagaauagau

SEQ ID NO: 35686 - RNA, 19 nt, Homo sapiens
  misc_RNA (1)...(19): siRNA sense strand
ccgaagacaagcuagaaua

SEQ ID NO: 35687 - RNA, 19 nt, Homo sapiens
  misc_RNA (1)...(19): siRNA sense strand
gagggaauaccuaaacuuc

SEQ ID NO: 35688 - RNA, 19 nt, Homo sapiens
  misc_RNA (1)...(19): siRNA sense strand
guacugcaauagaagcaau

SEQ ID NO: 35689 - RNA, 19 nt, Homo sapiens
  misc_RNA (1)...(19): siRNA sense strand
caaaucaucauucaagaag

SEQ ID NO: 35690 - RNA, 19 nt, Homo sapiens
  misc_RNA (1)...(19): siRNA sense strand
cgacacaucguggcuauga

SEQ ID NO: 35691 - RNA, 19 nt, Homo sapiens
  misc_RNA (1)...(19): siRNA sense strand
ggaugcaucucgggcaaga

SEQ ID NO: 35692 - RNA, 19 nt, Homo sapiens
  misc_RNA (1)...(19): siRNA sense strand
gaagaaauggguggaaugg

SEQ ID NO: 35693 - RNA, 19 nt, Homo sapiens
  misc_RNA (1)...(19): siRNA sense strand
caaaaucucuucuucuaag

SEQ ID NO: 35694 - RNA, 19 nt, Homo sapiens
  misc_RNA (1)...(19): siRNA sense strand
uuccaguucuugcaaauuu

SEQ ID NO: 35695 - RNA, 19 nt, Homo sapiens
  misc_RNA (1)...(19): siRNA sense strand
gacuaugaauggagcaguu

SEQ ID NO: 35696 - RNA, 19 nt, Homo sapiens
  misc_RNA (1)...(19): siRNA sense strand
cagauauucuugucaugug

SEQ ID NO: 35697 - RNA, 19 nt, Homo sapiens
  misc_RNA (1)...(19): siRNA sense strand
uuccugaacucaucaaaga

SEQ ID NO: 35698 - RNA, 19 nt, Homo sapiens
  misc_RNA (1)...(19): siRNA sense strand
gcauaucgccaggaauuug

SEQ ID NO: 35699 - RNA, 19 nt, Homo sapiens
  misc_RNA (1)...(19): siRNA sense strand
gaaacaggcagauugaaaa

SEQ ID NO: 35700 - RNA, 19 nt, Homo sapiens
  misc_RNA (1)...(19): siRNA sense strand
gaguugcuauugacacugu

SEQ ID NO: 35701 - RNA, 19 nt, Homo sapiens
  misc_RNA (1)...(19): siRNA sense strand
ucaggugcuugaugauauu

SEQ ID NO: 35702 - RNA, 19 nt, Homo sapiens
  misc_RNA (1)...(19): siRNA sense strand
acacaaaucaucauucaag

SEQ ID NO: 35703 - RNA, 19 nt, Homo sapiens
  misc_RNA (1)...(19): siRNA sense strand
cacaaaucaucauucaaga

SEQ ID NO: 35704 - RNA, 19 nt, Homo sapiens
  misc_RNA (1)...(19): siRNA sense strand
uaacaucugcuaucaagag

SEQ ID NO: 35705 - RNA, 19 nt, Homo sapiens
  misc_RNA (1)...(19): siRNA sense strand
aaagguauuuggugaacau

SEQ ID NO: 35706 - RNA, 19 nt, Homo sapiens
  misc_RNA (1)...(19): siRNA sense strand
uaaauaaguaccaguugga

SEQ ID NO: 35707 - RNA, 19 nt, Homo sapiens
  misc_RNA (1)...(19): siRNA sense strand
gaguaaauaaguaccaguu

SEQ ID NO: 35708 - RNA, 19 nt, Homo sapiens
  misc_RNA (1)...(19): siRNA sense strand
ccuaccauguauaccuuua

SEQ ID NO: 35709 - RNA, 19 nt, Homo sapiens
  misc_RNA (1)...(19): siRNA sense strand
agaagcagcaaucuguaua

SEQ ID NO: 35710 - RNA, 19 nt, Homo sapiens
  misc_RNA (1)...(19): siRNA sense strand
gccaggaacacacaaauca

SEQ ID NO: 35711 - RNA, 19 nt, Homo sapiens
  misc_RNA (1)...(19): siRNA sense strand
gcaggaucccuacaauaau

SEQ ID NO: 35712 - RNA, 19 nt, Homo sapiens
  misc_RNA (1)...(19): siRNA sense strand
gcaguuauuccaguucuug

SEQ ID NO: 35713 - RNA, 19 nt, Homo sapiens
  misc_RNA (1)...(19): siRNA sense strand
gagcaguuauuccaguucu

SEQ ID NO: 35714 - RNA, 19 nt, Homo sapiens
  misc_RNA (1)...(19): siRNA sense strand
gguucgaaauacauacauu

SEQ ID NO: 35715 - RNA, 19 nt, Homo sapiens
  misc_RNA (1)...(19): siRNA sense strand
ggccagauauucuugucau

SEQ ID NO: 35716 - RNA, 19 nt, Homo sapiens
  misc_RNA (1)...(19): siRNA sense strand
agcaggaucccuacaauaa

SEQ ID NO: 35717 - RNA, 19 nt, Homo sapiens
  misc_RNA (1)...(19): siRNA sense strand
gcagauggauuggaguacu

SEQ ID NO: 35718 - RNA, 19 nt, Homo sapiens
  misc_RNA (1)...(19): siRNA sense strand
ccggaagggaucucuauaa

SEQ ID NO: 35719 - RNA, 19 nt, Homo sapiens
  misc_RNA (1)...(19): siRNA sense strand
uugaugauauugagaagug

SEQ ID NO: 35720 - RNA, 19 nt, Homo sapiens
  misc_RNA (1)...(19): siRNA sense strand
ccucgcugcuggucauaaa

SEQ ID NO: 35721 - RNA, 19 nt, Homo sapiens
  misc_RNA (1)...(19): siRNA sense strand
ccagacuccucgugaagug

SEQ ID NO: 35722 - RNA, 19 nt, Homo sapiens
  misc_RNA (1)...(19): siRNA sense strand
gugcgaaacaggcagauug

SEQ ID NO: 35723 - RNA, 19 nt, Homo sapiens
  misc_RNA (1)...(19): siRNA sense strand
ggcaauugauaauacuuca

SEQ ID NO: 35724 - RNA, 19 nt, Homo sapiens
  misc_RNA (1)...(19): siRNA sense strand
gaaacaggcugcucaaguu

SEQ ID NO: 35725 - RNA, 19 nt, Homo sapiens
  misc_RNA (1)...(19): siRNA sense strand
gaaaguggaccucagcuua

SEQ ID NO: 35726 - RNA, 19 nt, Homo sapiens
  misc_RNA (1)...(19): siRNA sense strand
gggaagauuucauccuuaa

SEQ ID NO: 35727 - RNA, 19 nt, Homo sapiens
  misc_RNA (1)...(19): siRNA sense strand
gaacauuccuccggcuuca

SEQ ID NO: 35728 - RNA, 19 nt, Homo sapiens
  misc_RNA (1)...(19): siRNA sense strand
gaccucagcuuacccaaca

SEQ ID NO: 35729 - RNA, 19 nt, Homo sapiens
  misc_RNA (1)...(19): siRNA sense strand
caaggaggauuuggagcua

SEQ ID NO: 35730 - RNA, 19 nt, Homo sapiens
  misc_RNA (1)...(19): siRNA sense strand
uggaagagcucauugacau

SEQ ID NO: 35731 - RNA, 19 nt, Homo sapiens
  misc_RNA (1)...(19): siRNA sense strand
gaagauuucauccuuaaag

SEQ ID NO: 35732 - RNA, 19 nt, Homo sapiens
  misc_RNA (1)...(19): siRNA sense strand
gcuggccuuucuuuacuua

SEQ ID NO: 35733 - RNA, 19 nt, Homo sapiens
  misc_RNA (1)...(19): siRNA sense strand
cagcagcccuccugacugu

SEQ ID NO: 35734 - RNA, 19 nt, Homo sapiens
  misc_RNA (1)...(19): siRNA sense strand
uggagaacaugccguggua

SEQ ID NO: 35735 - RNA, 19 nt, Homo sapiens
  misc_RNA (1)...(19): siRNA sense strand
gaaagucauccuucaugga

SEQ ID NO: 35736 - RNA, 19 nt, Homo sapiens
  misc_RNA (1)...(19): siRNA sense strand
gaggauuuggagcuaauua

SEQ ID NO: 35737 - RNA, 19 nt, Homo sapiens
  misc_RNA (1)...(19): siRNA sense strand
gcuguauccuugaacuuga

SEQ ID NO: 35738 - RNA, 19 nt, Homo sapiens
  misc_RNA (1)...(19): siRNA sense strand
cgugguacauggcaaggua

SEQ ID NO: 35739 - RNA, 19 nt, Homo sapiens
  misc_RNA (1)...(19): siRNA sense strand
ccacagcaaugggaaagug

SEQ ID NO: 35740 - RNA, 19 nt, Homo sapiens
  misc_RNA (1)...(19): siRNA sense strand
gagccuggauaucguagug

SEQ ID NO: 35741 - RNA, 19 nt, Homo sapiens
  misc_RNA (1)...(19): siRNA sense strand
ucacaacacccaccucaga

SEQ ID NO: 35742 - RNA, 19 nt, Homo sapiens
  misc_RNA (1)...(19): siRNA sense strand
gaaccagcaccaucugaau

SEQ ID NO: 35743 - RNA, 19 nt, Homo sapiens
  misc_RNA (1)...(19): siRNA sense strand
caagguagcacuggcugua

SEQ ID NO: 35744 - RNA, 19 nt, Homo sapiens
  misc_RNA (1)...(19): siRNA sense strand
uggccuuucuuuacuuaua

SEQ ID NO: 35745 - RNA, 19 nt, Homo sapiens
  misc_RNA (1)...(19): siRNA sense strand
gggaaagucauccuucaug

SEQ ID NO: 35746 - RNA, 19 nt, Homo sapiens
  misc_RNA (1)...(19): siRNA sense strand
ggugguggcuguggcauca

SEQ ID NO: 35747 - RNA, 19 nt, Homo sapiens
  misc_RNA (1)...(19): siRNA sense strand
gagcaaguggagaagcuaa

SEQ ID NO: 35748 - RNA, 19 nt, Homo sapiens
  misc_RNA (1)...(19): siRNA sense strand
agggaagauuucauccuua

SEQ ID NO: 35749 - RNA, 19 nt, Homo sapiens
  misc_RNA (1)...(19): siRNA sense strand
caaagucccucgcaauacc

SEQ ID NO: 35750 - RNA, 19 nt, Homo sapiens
  misc_RNA (1)...(19): siRNA sense strand
ggaaaguggaccucagcuu

SEQ ID NO: 35751 - RNA, 19 nt, Homo sapiens
  misc_RNA (1)...(19): siRNA sense strand
cuccugaccucaauagaug

SEQ ID NO: 35752 - RNA, 19 nt, Homo sapiens
  misc_RNA (1)...(19): siRNA sense strand
ggcuuugacugcuuggaaa

SEQ ID NO: 35753 - RNA, 19 nt, Homo sapiens
  misc_RNA (1)...(19): siRNA sense strand
ccucagagcaaguggagaa

SEQ ID NO: 35754 - RNA, 19 nt, Homo sapiens
  misc_RNA (1)...(19): siRNA sense strand
ggaagauuucauccuuaaa

SEQ ID NO: 35755 - RNA, 19 nt, Homo sapiens
  misc_RNA (1)...(19): siRNA sense strand
gugcuggccuuucuuuacu

SEQ ID NO: 35756 - RNA, 19 nt, Homo sapiens
  misc_RNA (1)...(19): siRNA sense strand
ggaagagcucauugacaug

SEQ ID NO: 35757 - RNA, 19 nt, Homo sapiens
  misc_RNA (1)...(19): siRNA sense strand
gcacuggcuguauccuuga

SEQ ID NO: 35758 - RNA, 19 nt, Homo sapiens
  misc_RNA (1)...(19): siRNA sense strand
uaacaagugggccuuccaa

SEQ ID NO: 35759 - RNA, 19 nt, Homo sapiens
  misc_RNA (1)...(19): siRNA sense strand
ccuuguggcuggcgucaga

SEQ ID NO: 35760 - RNA, 19 nt, Homo sapiens
  misc_RNA (1)...(19): siRNA sense strand
gagaacaugccgugguaca

SEQ ID NO: 35761 - RNA, 19 nt, Homo sapiens
  misc_RNA (1)...(19): siRNA sense strand
accaaagucccucgcaaua

SEQ ID NO: 35762 - RNA, 19 nt, Homo sapiens
  misc_RNA (1)...(19): siRNA sense strand
gauuuggagcuaauuaaca

SEQ ID NO: 35763 - RNA, 19 nt, Homo sapiens
  misc_RNA (1)...(19): siRNA sense strand
agaaacaggcugcucaagu

SEQ ID NO: 35764 - RNA, 19 nt, Homo sapiens
  misc_RNA (1)...(19): siRNA sense strand
uaccaucaagggaagauuu

SEQ ID NO: 35765 - RNA, 19 nt, Homo sapiens
  misc_RNA (1)...(19): siRNA sense strand
gaccagcuguggcuuugac

SEQ ID NO: 35766 - RNA, 19 nt, Homo sapiens
  misc_RNA (1)...(19): siRNA sense strand
gcugugcuggccuuucuuu

SEQ ID NO: 35767 - RNA, 19 nt, Homo sapiens
  misc_RNA (1)...(19): siRNA sense strand
gcaauaccagggcccuugu

SEQ ID NO: 35768 - RNA, 19 nt, Homo sapiens
  misc_RNA (1)...(19): siRNA sense strand
agucauccuucauggagaa

SEQ ID NO: 35769 - RNA, 19 nt, Homo sapiens
  misc_RNA (1)...(19): siRNA sense strand
gguggaccaaggaggauuu

SEQ ID NO: 35770 - RNA, 19 nt, Homo sapiens
  misc_RNA (1)...(19): siRNA sense strand
ucccaaacccgcugaagga

SEQ ID NO: 35771 - RNA, 19 nt, Homo sapiens
  misc_RNA (1)...(19): siRNA sense strand
gcuguggcuuugacugcuu

SEQ ID NO: 35772 - RNA, 19 nt, Homo sapiens
  misc_RNA (1)...(19): siRNA sense strand
ucacuggacacaagcuuuc

SEQ ID NO: 35773 - RNA, 19 nt, Homo sapiens
  misc_RNA (1)...(19): siRNA sense strand
ugaaccagcaccaucugaa

SEQ ID NO: 35774 - RNA, 19 nt, Homo sapiens
  misc_RNA (1)...(19): siRNA sense strand
cugcucaaguucccagaga

SEQ ID NO: 35775 - RNA, 19 nt, Homo sapiens
  misc_RNA (1)...(19): siRNA sense strand
acuuauaccuguccaucug

SEQ ID NO: 35776 - RNA, 19 nt, Homo sapiens
  misc_RNA (1)...(19): siRNA sense strand
gcaaguggagaagcuaaag

SEQ ID NO: 35777 - RNA, 19 nt, Homo sapiens
  misc_RNA (1)...(19): siRNA sense strand
cagagcaaguggagaagcu

SEQ ID NO: 35778 - RNA, 19 nt, Homo sapiens
  misc_RNA (1)...(19): siRNA sense strand
ggccuuucuuuacuuauac

SEQ ID NO: 35779 - RNA, 19 nt, Homo sapiens
  misc_RNA (1)...(19): siRNA sense strand
gcagcccuccugacugugu

SEQ ID NO: 35780 - RNA, 19 nt, Homo sapiens
  misc_RNA (1)...(19): siRNA sense strand
gcucaaguucccagagauc

SEQ ID NO: 35781 - RNA, 19 nt, Homo sapiens
  misc_RNA (1)...(19): siRNA sense strand
aaacaggcugcucaaguuc

SEQ ID NO: 35782 - RNA, 19 nt, Homo sapiens
  misc_RNA (1)...(19): siRNA sense strand
ccaaagucccucgcaauac

SEQ ID NO: 35783 - RNA, 19 nt, Homo sapiens
  misc_RNA (1)...(19): siRNA sense strand
ggauuuggagcuaauuaac

SEQ ID NO: 35784 - RNA, 19 nt, Homo sapiens
  misc_RNA (1)...(19): siRNA sense strand
caccaaagucccucgcaau

SEQ ID NO: 35785 - RNA, 19 nt, Homo sapiens
  misc_RNA (1)...(19): siRNA sense strand
aaggaggauuuggagcuaa

SEQ ID NO: 35786 - RNA, 19 nt, Homo sapiens
  misc_RNA (1)...(19): siRNA sense strand
gauguggccaggcuucagu

SEQ ID NO: 35787 - RNA, 19 nt, Homo sapiens
  misc_RNA (1)...(19): siRNA sense strand
ggcuguauccuugaacuug

SEQ ID NO: 35788 - RNA, 19 nt, Homo sapiens
  misc_RNA (1)...(19): siRNA sense strand
uggcugugcuggccuuucu

SEQ ID NO: 35789 - RNA, 19 nt, Homo sapiens
  misc_RNA (1)...(19): siRNA sense strand
gcacggagcucuuugugaa

SEQ ID NO: 35790 - RNA, 19 nt, Homo sapiens
  misc_RNA (1)...(19): siRNA sense strand
acaagaagcugcuguguga

SEQ ID NO: 35791 - RNA, 19 nt, Homo sapiens
  misc_RNA (1)...(19): siRNA sense strand
gcacagccuuucagaagaa

SEQ ID NO: 35792 - RNA, 19 nt, Homo sapiens
  misc_RNA (1)...(19): siRNA sense strand
ucaaauggcucaagaaugg

SEQ ID NO: 35793 - RNA, 19 nt, Homo sapiens
  misc_RNA (1)...(19): siRNA sense strand
gggaggagaccuucaaaua

SEQ ID NO: 35794 - RNA, 19 nt, Homo sapiens
  misc_RNA (1)...(19): siRNA sense strand
gcaggaaccucccaagauc

SEQ ID NO: 35795 - RNA, 19 nt, Homo sapiens
  misc_RNA (1)...(19): siRNA sense strand
gaccaggcaucaccuauga

SEQ ID NO: 35796 - RNA, 19 nt, Homo sapiens
  misc_RNA (1)...(19): siRNA sense strand
gcaagaagaagaagagcua

SEQ ID NO: 35797 - RNA, 19 nt, Homo sapiens
  misc_RNA (1)...(19): siRNA sense strand
gcagaaagccgacaagaag

SEQ ID NO: 35798 - RNA, 19 nt, Homo sapiens
  misc_RNA (1)...(19): siRNA sense strand
ccaaggagcccgucuuuau

SEQ ID NO: 35799 - RNA, 19 nt, Homo sapiens
  misc_RNA (1)...(19): siRNA sense strand
ucaaauaccgguucaagaa

SEQ ID NO: 35800 - RNA, 19 nt, Homo sapiens
  misc_RNA (1)...(19): siRNA sense strand
gaauaugguuggcuuuagu

SEQ ID NO: 35801 - RNA, 19 nt, Homo sapiens
  misc_RNA (1)...(19): siRNA sense strand
gcauaaaggugucccacau

SEQ ID NO: 35802 - RNA, 19 nt, Homo sapiens
  misc_RNA (1)...(19): siRNA sense strand
gagcaaaggccacaagauc

SEQ ID NO: 35803 - RNA, 19 nt, Homo sapiens
  misc_RNA (1)...(19): siRNA sense strand
aaaagaagcuggaggugua

SEQ ID NO: 35804 - RNA, 19 nt, Homo sapiens
  misc_RNA (1)...(19): siRNA sense strand
gaagaagagcacagccuuu

SEQ ID NO: 35805 - RNA, 19 nt, Homo sapiens
  misc_RNA (1)...(19): siRNA sense strand
ccagagggcugcucagagu

SEQ ID NO: 35806 - RNA, 19 nt, Homo sapiens
  misc_RNA (1)...(19): siRNA sense strand
ggaugcagcugaacuucga

SEQ ID NO: 35807 - RNA, 19 nt, Homo sapiens
  misc_RNA (1)...(19): siRNA sense strand
gggcagagaaggaagauga

SEQ ID NO: 35808 - RNA, 19 nt, Homo sapiens
  misc_RNA (1)...(19): siRNA sense strand
gguuguagcuggaaauaag

SEQ ID NO: 35809 - RNA, 19 nt, Homo sapiens
  misc_RNA (1)...(19): siRNA sense strand
gagcacagccuuucagaag

SEQ ID NO: 35810 - RNA, 19 nt, Homo sapiens
  misc_RNA (1)...(19): siRNA sense strand
gaggucaaauggcucaaga

SEQ ID NO: 35811 - RNA, 19 nt, Homo sapiens
  misc_RNA (1)...(19): siRNA sense strand
ggaguuugagugugaagua

SEQ ID NO: 35812 - RNA, 19 nt, Homo sapiens
  misc_RNA (1)...(19): siRNA sense strand
ggaacuggcugaccaugac

SEQ ID NO: 35813 - RNA, 19 nt, Homo sapiens
  misc_RNA (1)...(19): siRNA sense strand
ggaggagaccuucaaauac

SEQ ID NO: 35814 - RNA, 19 nt, Homo sapiens
  misc_RNA (1)...(19): siRNA sense strand
ccagcaaggucuaucuguu

SEQ ID NO: 35815 - RNA, 19 nt, Homo sapiens
  misc_RNA (1)...(19): siRNA sense strand
gccagaccauucagaagaa

SEQ ID NO: 35816 - RNA, 19 nt, Homo sapiens
  misc_RNA (1)...(19): siRNA sense strand
ggguggaguuugaguguga

SEQ ID NO: 35817 - RNA, 19 nt, Homo sapiens
  misc_RNA (1)...(19): siRNA sense strand
gaggagaccuucaaauacc

SEQ ID NO: 35818 - RNA, 19 nt, Homo sapiens
  misc_RNA (1)...(19): siRNA sense strand
ugacagagcacacaucgau

SEQ ID NO: 35819 - RNA, 19 nt, Homo sapiens
  misc_RNA (1)...(19): siRNA sense strand
gcagagacaccaccugauc

SEQ ID NO: 35820 - RNA, 19 nt, Homo sapiens
  misc_RNA (1)...(19): siRNA sense strand
ccaccaaggacaaauuuga

SEQ ID NO: 35821 - RNA, 19 nt, Homo sapiens
  misc_RNA (1)...(19): siRNA sense strand
acacaucgauacuggugaa

SEQ ID NO: 35822 - RNA, 19 nt, Homo sapiens
  misc_RNA (1)...(19): siRNA sense strand
gaagccagucucagccuuu

SEQ ID NO: 35823 - RNA, 19 nt, Homo sapiens
  misc_RNA (1)...(19): siRNA sense strand
ccuaugagccacccaacua

SEQ ID NO: 35824 - RNA, 19 nt, Homo sapiens
  misc_RNA (1)...(19): siRNA sense strand
cagaauaugguuggcuuua

SEQ ID NO: 35825 - RNA, 19 nt, Homo sapiens
  misc_RNA (1)...(19): siRNA sense strand
ugccagagcucaucauugg

SEQ ID NO: 35826 - RNA, 19 nt, Homo sapiens
  misc_RNA (1)...(19): siRNA sense strand
caucgauacuggugaagga

SEQ ID NO: 35827 - RNA, 19 nt, Homo sapiens
  misc_RNA (1)...(19): siRNA sense strand
acacugggauucuggacuu

SEQ ID NO: 35828 - RNA, 19 nt, Homo sapiens
  misc_RNA (1)...(19): siRNA sense strand
cagccaagcuccacuucau

SEQ ID NO: 35829 - RNA, 19 nt, Homo sapiens
  misc_RNA (1)...(19): siRNA sense strand
gcagcaaguacaucuuuga

SEQ ID NO: 35830 - RNA, 19 nt, Homo sapiens
  misc_RNA (1)...(19): siRNA sense strand
caaaggaccaggcgguguu

SEQ ID NO: 35831 - RNA, 19 nt, Homo sapiens
  misc_RNA (1)...(19): siRNA sense strand
cugcagggccaccaacuua

SEQ ID NO: 35832 - RNA, 19 nt, Homo sapiens
  misc_RNA (1)...(19): siRNA sense strand
gcgcaucgccuuccaguac

SEQ ID NO: 35833 - RNA, 19 nt, Homo sapiens
  misc_RNA (1)...(19): siRNA sense strand
ggucaaauggcucaagaau

SEQ ID NO: 35834 - RNA, 19 nt, Homo sapiens
  misc_RNA (1)...(19): siRNA sense strand
gcaagaagccacggucagu

SEQ ID NO: 35835 - RNA, 19 nt, Homo sapiens
  misc_RNA (1)...(19): siRNA sense strand
ucaccgucuuggagcauua

SEQ ID NO: 35836 - RNA, 19 nt, Homo sapiens
  misc_RNA (1)...(19): siRNA sense strand
ccacccaccuggcaguaga

SEQ ID NO: 35837 - RNA, 19 nt, Homo sapiens
  misc_RNA (1)...(19): siRNA sense strand
uccacaaacugaccauuga

SEQ ID NO: 35838 - RNA, 19 nt, Homo sapiens
  misc_RNA (1)...(19): siRNA sense strand
gcaugaggcgcgaugagaa

SEQ ID NO: 35839 - RNA, 19 nt, Homo sapiens
  misc_RNA (1)...(19): siRNA sense strand
gaggugagcauccgcaaca

SEQ ID NO: 35840 - RNA, 19 nt, Homo sapiens
  misc_RNA (1)...(19): siRNA sense strand
ggaccaggcgguguucaaa

SEQ ID NO: 35841 - RNA, 19 nt, Homo sapiens
  misc_RNA (1)...(19): siRNA sense strand
ggucauagaggcagagaag

SEQ ID NO: 35842 - RNA, 19 nt, Homo sapiens
  misc_RNA (1)...(19): siRNA sense strand
acagagggcacacggcaua

SEQ ID NO: 35843 - RNA, 19 nt, Homo sapiens
  misc_RNA (1)...(19): siRNA sense strand
gcgaugaguggguguuuga

SEQ ID NO: 35844 - RNA, 19 nt, Homo sapiens
  misc_RNA (1)...(19): siRNA sense strand
ggcagcggguggaguuuga

SEQ ID NO: 35845 - RNA, 19 nt, Homo sapiens
  misc_RNA (1)...(19): siRNA sense strand
gccaggagauccagaugag

SEQ ID NO: 35846 - RNA, 19 nt, Homo sapiens
  misc_RNA (1)...(19): siRNA sense strand
aagauuuccugguucaaga

SEQ ID NO: 35847 - RNA, 19 nt, Homo sapiens
  misc_RNA (1)...(19): siRNA sense strand
gaguuugagugugaaguau

SEQ ID NO: 35848 - RNA, 19 nt, Homo sapiens
  misc_RNA (1)...(19): siRNA sense strand
ugaaccuucucaucccuuu

SEQ ID NO: 35849 - RNA, 19 nt, Homo sapiens
  misc_RNA (1)...(19): siRNA sense strand
guguguggcugaagaaugg

SEQ ID NO: 35850 - RNA, 19 nt, Homo sapiens
  misc_RNA (1)...(19): siRNA sense strand
aagccagucucagccuuua

SEQ ID NO: 35851 - RNA, 19 nt, Homo sapiens
  misc_RNA (1)...(19): siRNA sense strand
caaggagcccgucuuuauc

SEQ ID NO: 35852 - RNA, 19 nt, Homo sapiens
  misc_RNA (1)...(19): siRNA sense strand
cagcaaggucuaucuguuc

SEQ ID NO: 35853 - RNA, 19 nt, Homo sapiens
  misc_RNA (1)...(19): siRNA sense strand
ggcaggaaccucccaagau

SEQ ID NO: 35854 - RNA, 19 nt, Homo sapiens
  misc_RNA (1)...(19): siRNA sense strand
caagaaggacgggcagaga

SEQ ID NO: 35855 - RNA, 19 nt, Homo sapiens
  misc_RNA (1)...(19): siRNA sense strand
ccgcugagcugggagaaag

SEQ ID NO: 35856 - RNA, 19 nt, Homo sapiens
  misc_RNA (1)...(19): siRNA sense strand
gaagagcacagccuuucag

SEQ ID NO: 35857 - RNA, 19 nt, Homo sapiens
  misc_RNA (1)...(19): siRNA sense strand
ccaaggacaaauuugaaug

SEQ ID NO: 35858 - RNA, 19 nt, Homo sapiens
  misc_RNA (1)...(19): siRNA sense strand
cagaugagcggcagcaagu

SEQ ID NO: 35859 - RNA, 19 nt, Homo sapiens
  misc_RNA (1)...(19): siRNA sense strand
uaugagccacccaacuaua

SEQ ID NO: 35860 - RNA, 19 nt, Homo sapiens
  misc_RNA (1)...(19): siRNA sense strand
caccaaggagcccgucuuu

SEQ ID NO: 35861 - RNA, 19 nt, Homo sapiens
  misc_RNA (1)...(19): siRNA sense strand
gacagagcacacaucgaua

SEQ ID NO: 35862 - RNA, 19 nt, Homo sapiens
  misc_RNA (1)...(19): siRNA sense strand
gcucagcagcucucaaugg

SEQ ID NO: 35863 - RNA, 19 nt, Homo sapiens
  misc_RNA (1)...(19): siRNA sense strand
ggcagcaaguacaucuuug

SEQ ID NO: 35864 - RNA, 19 nt, Homo sapiens
  misc_RNA (1)...(19): siRNA sense strand
cggcagcaaguacaucuuu

SEQ ID NO: 35865 - RNA, 19 nt, Homo sapiens
  misc_RNA (1)...(19): siRNA sense strand
ccuccaaggucaaguucga

SEQ ID NO: 35866 - RNA, 19 nt, Homo sapiens
  misc_RNA (1)...(19): siRNA sense strand
gcugaacuucgaccugauu

SEQ ID NO: 35867 - RNA, 19 nt, Homo sapiens
  misc_RNA (1)...(19): siRNA sense strand
caucagccagugcucauug

SEQ ID NO: 35868 - RNA, 19 nt, Homo sapiens
  misc_RNA (1)...(19): siRNA sense strand
aagcguacccugaccauca

SEQ ID NO: 35869 - RNA, 19 nt, Homo sapiens
  misc_RNA (1)...(19): siRNA sense strand
caccaaggacaaauuugaa

SEQ ID NO: 35870 - RNA, 19 nt, Homo sapiens
  misc_RNA (1)...(19): siRNA sense strand
gcuacagcguggaguacug

SEQ ID NO: 35871 - RNA, 19 nt, Homo sapiens
  misc_RNA (1)...(19): siRNA sense strand
gaguggguguuugacaaga

SEQ ID NO: 35872 - RNA, 19 nt, Homo sapiens
  misc_RNA (1)...(19): siRNA sense strand
caaauaccgguucaagaag

SEQ ID NO: 35873 - RNA, 19 nt, Homo sapiens
  misc_RNA (1)...(19): siRNA sense strand
gacaucagcgccagcaaca

SEQ ID NO: 35874 - RNA, 19 nt, Homo sapiens
  misc_RNA (1)...(19): siRNA sense strand
caucagcgccagcaacaag

SEQ ID NO: 35875 - RNA, 19 nt, Homo sapiens
  misc_RNA (1)...(19): siRNA sense strand
gcagggccaccaacuuaca

SEQ ID NO: 35876 - RNA, 19 nt, Homo sapiens
  misc_RNA (1)...(19): siRNA sense strand
gaagccgccuguggucaag

SEQ ID NO: 35877 - RNA, 19 nt, Homo sapiens
  misc_RNA (1)...(19): siRNA sense strand
cccaagauuuccugguuca

SEQ ID NO: 35878 - RNA, 19 nt, Homo sapiens
  misc_RNA (1)...(19): siRNA sense strand
cagaaagccgacaagaaga

SEQ ID NO: 35879 - RNA, 19 nt, Homo sapiens
  misc_RNA (1)...(19): siRNA sense strand
ccauuggccucuucgugau

SEQ ID NO: 35880 - RNA, 19 nt, Homo sapiens
  misc_RNA (1)...(19): siRNA sense strand
ggacgugugggagauccua

SEQ ID NO: 35881 - RNA, 19 nt, Homo sapiens
  misc_RNA (1)...(19): siRNA sense strand
cagcaagcagggaguguug

SEQ ID NO: 35882 - RNA, 19 nt, Homo sapiens
  misc_RNA (1)...(19): siRNA sense strand
agaauaugguuggcuuuag

SEQ ID NO: 35883 - RNA, 19 nt, Homo sapiens
  misc_RNA (1)...(19): siRNA sense strand
ugacggugcgcauugagaa

SEQ ID NO: 35884 - RNA, 19 nt, Homo sapiens
  misc_RNA (1)...(19): siRNA sense strand
guccacaaacugaccauug

SEQ ID NO: 35885 - RNA, 19 nt, Homo sapiens
  misc_RNA (1)...(19): siRNA sense strand
accaggcgguguucaaaug

SEQ ID NO: 35886 - RNA, 19 nt, Homo sapiens
  misc_RNA (1)...(19): siRNA sense strand
uugagaacauggaggacaa

SEQ ID NO: 35887 - RNA, 19 nt, Homo sapiens
  misc_RNA (1)...(19): siRNA sense strand
ggguggaccugagcagcaa

SEQ ID NO: 35888 - RNA, 19 nt, Homo sapiens
  misc_RNA (1)...(19): siRNA sense strand
cgccagaccauucagaaga

SEQ ID NO: 35889 - RNA, 19 nt, Homo sapiens
  misc_RNA (1)...(19): siRNA sense strand
gcaaggagcuggaggagaa

SEQ ID NO: 35890 - RNA, 19 nt, Homo sapiens
  misc_RNA (1)...(19): siRNA sense strand
gcacagagcucuucaaacu

SEQ ID NO: 35891 - RNA, 19 nt, Homo sapiens
  misc_RNA (1)...(19): siRNA sense strand
gaacaaggauccucucaau

SEQ ID NO: 35892 - RNA, 19 nt, Homo sapiens
  misc_RNA (1)...(19): siRNA sense strand
gcaaguggaugaucuggaa

SEQ ID NO: 35893 - RNA, 19 nt, Homo sapiens
  misc_RNA (1)...(19): siRNA sense strand
agagagagauuaucacauu

SEQ ID NO: 35894 - RNA, 19 nt, Homo sapiens
  misc_RNA (1)...(19): siRNA sense strand
gcauugaccucaucgagaa

SEQ ID NO: 35895 - RNA, 19 nt, Homo sapiens
  misc_RNA (1)...(19): siRNA sense strand
cagaggagcugaagaagga

SEQ ID NO: 35896 - RNA, 19 nt, Homo sapiens
  misc_RNA (1)...(19): siRNA sense strand
gcacgaagggcuugaauga

SEQ ID NO: 35897 - RNA, 19 nt, Homo sapiens
  misc_RNA (1)...(19): siRNA sense strand
ccaagagggucauccagua

SEQ ID NO: 35898 - RNA, 19 nt, Homo sapiens
  misc_RNA (1)...(19): siRNA sense strand
gagggacaguucauugaua

SEQ ID NO: 35899 - RNA, 19 nt, Homo sapiens
  misc_RNA (1)...(19): siRNA sense strand
gcaagaagcagcugcagaa

SEQ ID NO: 35900 - RNA, 19 nt, Homo sapiens
  misc_RNA (1)...(19): siRNA sense strand
ugaacaagcugaugaccaa

SEQ ID NO: 35901 - RNA, 19 nt, Homo sapiens
  misc_RNA (1)...(19): siRNA sense strand
ggaagacagucaacaccaa

SEQ ID NO: 35902 - RNA, 19 nt, Homo sapiens
  misc_RNA (1)...(19): siRNA sense strand
gagagagauuaucacauuu

SEQ ID NO: 35903 - RNA, 19 nt, Homo sapiens
  misc_RNA (1)...(19): siRNA sense strand
gcaagacagugaccgugaa

SEQ ID NO: 35904 - RNA, 19 nt, Homo sapiens
  misc_RNA (1)...(19): siRNA sense strand
acaaggauccucucaauga

SEQ ID NO: 35905 - RNA, 19 nt, Homo sapiens
  misc_RNA (1)...(19): siRNA sense strand
guuggcaucugcagacaua

SEQ ID NO: 35906 - RNA, 19 nt, Homo sapiens
  misc_RNA (1)...(19): siRNA sense strand
acaaguggcugccggugua

SEQ ID NO: 35907 - RNA, 19 nt, Homo sapiens
  misc_RNA (1)...(19): siRNA sense strand
ucaaggagcucaccuacca

SEQ ID NO: 35908 - RNA, 19 nt, Homo sapiens
  misc_RNA (1)...(19): siRNA sense strand
gcggaaagacuauccauga

SEQ ID NO: 35909 - RNA, 19 nt, Homo sapiens
  misc_RNA (1)...(19): siRNA sense strand
ggacauucauugacuuugg

SEQ ID NO: 35910 - RNA, 19 nt, Homo sapiens
  misc_RNA (1)...(19): siRNA sense strand
acaccaaccuguccaaguu

SEQ ID NO: 35911 - RNA, 19 nt, Homo sapiens
  misc_RNA (1)...(19): siRNA sense strand
caacagagaacaaggugaa

SEQ ID NO: 35912 - RNA, 19 nt, Homo sapiens
  misc_RNA (1)...(19): siRNA sense strand
gcugaagagugcagaaaga

SEQ ID NO: 35913 - RNA, 19 nt, Homo sapiens
  misc_RNA (1)...(19): siRNA sense strand
gaaagcagagagagauuau

SEQ ID NO: 35914 - RNA, 19 nt, Homo sapiens
  misc_RNA (1)...(19): siRNA sense strand
ucaaagaggcgcuagagaa

SEQ ID NO: 35915 - RNA, 19 nt, Homo sapiens
  misc_RNA (1)...(19): siRNA sense strand
agaaugagaucgaggacuu

SEQ ID NO: 35916 - RNA, 19 nt, Homo sapiens
  misc_RNA (1)...(19): siRNA sense strand
ggagauggcugggcuggau

SEQ ID NO: 35917 - RNA, 19 nt, Homo sapiens
  misc_RNA (1)...(19): siRNA sense strand
ugaagaggcugacaagucu

SEQ ID NO: 35918 - RNA, 19 nt, Homo sapiens
  misc_RNA (1)...(19): siRNA sense strand
gggcaaauccgccaacuuc

SEQ ID NO: 35919 - RNA, 19 nt, Homo sapiens
  misc_RNA (1)...(19): siRNA sense strand
acagagcucuucaaacuca

SEQ ID NO: 35920 - RNA, 19 nt, Homo sapiens
  misc_RNA (1)...(19): siRNA sense strand
gcaaaggcaaggccaagaa

SEQ ID NO: 35921 - RNA, 19 nt, Homo sapiens
  misc_RNA (1)...(19): siRNA sense strand
gagaaacacgcaacagaga

SEQ ID NO: 35922 - RNA, 19 nt, Homo sapiens
  misc_RNA (1)...(19): siRNA sense strand
cagaggaacuucgacaaga

SEQ ID NO: 35923 - RNA, 19 nt, Homo sapiens
  misc_RNA (1)...(19): siRNA sense strand
agauucagcuggaggcuaa

SEQ ID NO: 35924 - RNA, 19 nt, Homo sapiens
  misc_RNA (1)...(19): siRNA sense strand
cgacaacgccuaucaguac

SEQ ID NO: 35925 - RNA, 19 nt, Homo sapiens
  misc_RNA (1)...(19): siRNA sense strand
ggacgaagccgagcagauc

SEQ ID NO: 35926 - RNA, 19 nt, Homo sapiens
  misc_RNA (1)...(19): siRNA sense strand
gcaggaaugcugaggagaa

SEQ ID NO: 35927 - RNA, 19 nt, Homo sapiens
  misc_RNA (1)...(19): siRNA sense strand
gaggugugcucgccagaau

SEQ ID NO: 35928 - RNA, 19 nt, Homo sapiens
  misc_RNA (1)...(19): siRNA sense strand
ugcgggagcuggagaauga

SEQ ID NO: 35929 - RNA, 19 nt, Homo sapiens
  misc_RNA (1)...(19): siRNA sense strand
ccaguacuuugcuguuauu

SEQ ID NO: 35930 - RNA, 19 nt, Homo sapiens
  misc_RNA (1)...(19): siRNA sense strand
ucaagagccuccagagcuu

SEQ ID NO: 35931 - RNA, 19 nt, Homo sapiens
  misc_RNA (1)...(19): siRNA sense strand
acgcaaggauugaggauga

SEQ ID NO: 35932 - RNA, 19 nt, Homo sapiens
  misc_RNA (1)...(19): siRNA sense strand
ggaguucacacgccucaaa

SEQ ID NO: 35933 - RNA, 19 nt, Homo sapiens
  misc_RNA (1)...(19): siRNA sense strand
ggaagaggagugcauguuc

SEQ ID NO: 35934 - RNA, 19 nt, Homo sapiens
  misc_RNA (1)...(19): siRNA sense strand
gaaagugggcaaugaguac

SEQ ID NO: 35935 - RNA, 19 nt, Homo sapiens
  misc_RNA (1)...(19): siRNA sense strand
gccaagagccgugacauug

SEQ ID NO: 35936 - RNA, 19 nt, Homo sapiens
  misc_RNA (1)...(19): siRNA sense strand
aggcugagcuggaggaguu

SEQ ID NO: 35937 - RNA, 19 nt, Homo sapiens
  misc_RNA (1)...(19): siRNA sense strand
uggaagaccagaugaauga

SEQ ID NO: 35938 - RNA, 19 nt, Homo sapiens
  misc_RNA (1)...(19): siRNA sense strand
ucacaaccaguacaaguuu

SEQ ID NO: 35939 - RNA, 19 nt, Homo sapiens
  misc_RNA (1)...(19): siRNA sense strand
gcagagagagauuaucaca

SEQ ID NO: 35940 - RNA, 19 nt, Homo sapiens
  misc_RNA (1)...(19): siRNA sense strand
gagcaggagcugauugaga

SEQ ID NO: 35941 - RNA, 19 nt, Homo sapiens
  misc_RNA (1)...(19): siRNA sense strand
gagacucccugcugguaau

SEQ ID NO: 35942 - RNA, 19 nt, Homo sapiens
  misc_RNA (1)...(19): siRNA sense strand
gagcucauggccacugaua

SEQ ID NO: 35943 - RNA, 19 nt, Homo sapiens
  misc_RNA (1)...(19): siRNA sense strand
gcaaugaguacgucaccaa

SEQ ID NO: 35944 - RNA, 19 nt, Homo sapiens
  misc_RNA (1)...(19): siRNA sense strand
gggcccagcuggaguucaa

SEQ ID NO: 35945 - RNA, 19 nt, Homo sapiens
  misc_RNA (1)...(19): siRNA sense strand
cugcagcccuggacaagaa

SEQ ID NO: 35946 - RNA, 19 nt, Homo sapiens
  misc_RNA (1)...(19): siRNA sense strand
ggacguagagcgcuccaau

SEQ ID NO: 35947 - RNA, 19 nt, Homo sapiens
  misc_RNA (1)...(19): siRNA sense strand
agaucgagaugaacaagaa

SEQ ID NO: 35948 - RNA, 19 nt, Homo sapiens
  misc_RNA (1)...(19): siRNA sense strand
gggcuaagguggagaagcu

SEQ ID NO: 35949 - RNA, 19 nt, Homo sapiens
  misc_RNA (1)...(19): siRNA sense strand
ggaaggaucccuggagcaa

SEQ ID NO: 35950 - RNA, 19 nt, Homo sapiens
  misc_RNA (1)...(19): siRNA sense strand
acgagaggcuggaggauga

SEQ ID NO: 35951 - RNA, 19 nt, Homo sapiens
  misc_RNA (1)...(19): siRNA sense strand
ccaccgacaugaccuucaa

SEQ ID NO: 35952 - RNA, 19 nt, Homo sapiens
  misc_RNA (1)...(19): siRNA sense strand
gcaagaggcccaccaacag

SEQ ID NO: 35953 - RNA, 19 nt, Homo sapiens
  misc_RNA (1)...(19): siRNA sense strand
ucagcucccuggacauuga

SEQ ID NO: 35954 - RNA, 19 nt, Homo sapiens
  misc_RNA (1)...(19): siRNA sense strand
gcacccuguuugccaacua

SEQ ID NO: 35955 - RNA, 19 nt, Homo sapiens
  misc_RNA (1)...(19): siRNA sense strand
ugaaagcagagagagauua

SEQ ID NO: 35956 - RNA, 19 nt, Homo sapiens
  misc_RNA (1)...(19): siRNA sense strand
cuucgugccugaugacaaa

SEQ ID NO: 35957 - RNA, 19 nt, Homo sapiens
  misc_RNA (1)...(19): siRNA sense strand
gaacauucgggccuucaug

SEQ ID NO: 35958 - RNA, 19 nt, Homo sapiens
  misc_RNA (1)...(19): siRNA sense strand
gggcugaugcgccuauuga

SEQ ID NO: 35959 - RNA, 19 nt, Homo sapiens
  misc_RNA (1)...(19): siRNA sense strand
gcacugaagaggcugacaa

SEQ ID NO: 35960 - RNA, 19 nt, Homo sapiens
  misc_RNA (1)...(19): siRNA sense strand
aaagggacaucgaugaucu

SEQ ID NO: 35961 - RNA, 19 nt, Homo sapiens
  misc_RNA (1)...(19): siRNA sense strand
caaagaggcgcuagagaag

SEQ ID NO: 35962 - RNA, 19 nt, Homo sapiens
  misc_RNA (1)...(19): siRNA sense strand
gaucacaaccaguacaagu

SEQ ID NO: 35963 - RNA, 19 nt, Homo sapiens
  misc_RNA (1)...(19): siRNA sense strand
caaaggcaaggccaagaaa

SEQ ID NO: 35964 - RNA, 19 nt, Homo sapiens
  misc_RNA (1)...(19): siRNA sense strand
uaccaaauccugucuaaca

SEQ ID NO: 35965 - RNA, 19 nt, Homo sapiens
  misc_RNA (1)...(19): siRNA sense strand
ugucccagcuccagacuga

SEQ ID NO: 35966 - RNA, 19 nt, Homo sapiens
  misc_RNA (1)...(19): siRNA sense strand
gaagauggagcugcaguca

SEQ ID NO: 35967 - RNA, 19 nt, Homo sapiens
  misc_RNA (1)...(19): siRNA sense strand
uggaacaucuggagaccuu

SEQ ID NO: 35968 - RNA, 19 nt, Homo sapiens
  misc_RNA (1)...(19): siRNA sense strand
cagcacagagcucuucaaa

SEQ ID NO: 35969 - RNA, 19 nt, Homo sapiens
  misc_RNA (1)...(19): siRNA sense strand
gaggcaagcucaccuacac

SEQ ID NO: 35970 - RNA, 19 nt, Homo sapiens
  misc_RNA (1)...(19): siRNA sense strand
agcagaagcuggagaagga

SEQ ID NO: 35971 - RNA, 19 nt, Homo sapiens
  misc_RNA (1)...(19): siRNA sense strand
ucaagccgcugcugaagag

SEQ ID NO: 35972 - RNA, 19 nt, Homo sapiens
  misc_RNA (1)...(19): siRNA sense strand
ccaacaaccccuacgauua

SEQ ID NO: 35973 - RNA, 19 nt, Homo sapiens
  misc_RNA (1)...(19): siRNA sense strand
gaacaucuggagaccuuca

SEQ ID NO: 35974 - RNA, 19 nt, Homo sapiens
  misc_RNA (1)...(19): siRNA sense strand
aggcuaaccuggagaagau

SEQ ID NO: 35975 - RNA, 19 nt, Homo sapiens
  misc_RNA (1)...(19): siRNA sense strand
uggagaagcugcgcucaga

SEQ ID NO: 35976 - RNA, 19 nt, Homo sapiens
  misc_RNA (1)...(19): siRNA sense strand
aaggaucccuggagcaaga

SEQ ID NO: 35977 - RNA, 19 nt, Homo sapiens
  misc_RNA (1)...(19): siRNA sense strand
gucgugggcuuguaucaga

SEQ ID NO: 35978 - RNA, 19 nt, Homo sapiens
  misc_RNA (1)...(19): siRNA sense strand
gggugaaagugggcaauga

SEQ ID NO: 35979 - RNA, 19 nt, Homo sapiens
  misc_RNA (1)...(19): siRNA sense strand
ucuaccaaauccugucuaa

SEQ ID NO: 35980 - RNA, 19 nt, Homo sapiens
  misc_RNA (1)...(19): siRNA sense strand
gaaggaggaccaggugaug

SEQ ID NO: 35981 - RNA, 19 nt, Homo sapiens
  misc_RNA (1)...(19): siRNA sense strand
gcucucaacgcaaggauug

SEQ ID NO: 35982 - RNA, 19 nt, Homo sapiens
  misc_RNA (1)...(19): siRNA sense strand
ugaaagugggcaaugagua

SEQ ID NO: 35983 - RNA, 19 nt, Homo sapiens
  misc_RNA (1)...(19): siRNA sense strand
gaguauggcaagacaguga

SEQ ID NO: 35984 - RNA, 19 nt, Homo sapiens
  misc_RNA (1)...(19): siRNA sense strand
ccaaauccugucuaacaaa

SEQ ID NO: 35985 - RNA, 19 nt, Homo sapiens
  misc_RNA (1)...(19): siRNA sense strand
caaauccugucuaacaaaa

SEQ ID NO: 35986 - RNA, 19 nt, Homo sapiens
  misc_RNA (1)...(19): siRNA sense strand
gugaagggcaugaggaaga

SEQ ID NO: 35987 - RNA, 19 nt, Homo sapiens
  misc_RNA (1)...(19): siRNA sense strand
gauggaaggagaccucaau

SEQ ID NO: 35988 - RNA, 19 nt, Homo sapiens
  misc_RNA (1)...(19): siRNA sense strand
cagcagaacccacccaagu

SEQ ID NO: 35989 - RNA, 19 nt, Homo sapiens
  misc_RNA (1)...(19): siRNA sense strand
gaacagggauggcuucauu

SEQ ID NO: 35990 - RNA, 19 nt, Homo sapiens
  misc_RNA (1)...(19): siRNA sense strand
ccaauuaacuuuacugugu

SEQ ID NO: 35991 - RNA, 19 nt, Homo sapiens
  misc_RNA (1)...(19): siRNA sense strand
gcugaaggcugauuacguu

SEQ ID NO: 35992 - RNA, 19 nt, Homo sapiens
  misc_RNA (1)...(19): siRNA sense strand
ugacgugacuggaaacuug

SEQ ID NO: 35993 - RNA, 19 nt, Homo sapiens
  misc_RNA (1)...(19): siRNA sense strand
ggaggagguugaccagaug

SEQ ID NO: 35994 - RNA, 19 nt, Homo sapiens
  misc_RNA (1)...(19): siRNA sense strand
acaagaaccuggugcacau

SEQ ID NO: 35995 - RNA, 19 nt, Homo sapiens
  misc_RNA (1)...(19): siRNA sense strand
aaaccauucucaacgcauu

SEQ ID NO: 35996 - RNA, 19 nt, Homo sapiens
  misc_RNA (1)...(19): siRNA sense strand
uaagaaagcaaagaagaga

SEQ ID NO: 35997 - RNA, 19 nt, Homo sapiens
  misc_RNA (1)...(19): siRNA sense strand
caacgcauucaaaguguuu

SEQ ID NO: 35998 - RNA, 19 nt, Homo sapiens
  misc_RNA (1)...(19): siRNA sense strand
caucaucacccacggagaa

SEQ ID NO: 35999 - RNA, 19 nt, Homo sapiens
  misc_RNA (1)...(19): siRNA sense strand
gaucugagagacaccuuug

SEQ ID NO: 36000 - RNA, 19 nt, Homo sapiens
  misc_RNA (1)...(19): siRNA sense strand
agacccaaauccaggaauu

SEQ ID NO: 36001 - RNA, 19 nt, Homo sapiens
  misc_RNA (1)...(19): siRNA sense strand
ugacaagaacgaucugaga

SEQ ID NO: 36002 - RNA, 19 nt, Homo sapiens
  misc_RNA (1)...(19): siRNA sense strand
ucacuaucauggaccagaa

SEQ ID NO: 36003 - RNA, 19 nt, Homo sapiens
  misc_RNA (1)...(19): siRNA sense strand
gaggcuccggguccaauua

SEQ ID NO: 36004 - RNA, 19 nt, Homo sapiens
  misc_RNA (1)...(19): siRNA sense strand
gggauggcuucauugacaa

SEQ ID NO: 36005 - RNA, 19 nt, Homo sapiens
  misc_RNA (1)...(19): siRNA sense strand
agggauggcuucauugaca

SEQ ID NO: 36006 - RNA, 19 nt, Homo sapiens
  misc_RNA (1)...(19): siRNA sense strand
gagcggacccugaggaaac

SEQ ID NO: 36007 - RNA, 19 nt, Homo sapiens
  misc_RNA (1)...(19): siRNA sense strand
caacguguucuccauguuc

SEQ ID NO: 36008 - RNA, 19 nt, Homo sapiens
  misc_RNA (1)...(19): siRNA sense strand
ccuaagaaagcaaagaaga

SEQ ID NO: 36009 - RNA, 19 nt, Homo sapiens
  misc_RNA (1)...(19): siRNA sense strand
ucucaacgcauucaaagug

SEQ ID NO: 36010 - RNA, 19 nt, Homo sapiens
  misc_RNA (1)...(19): siRNA sense strand
ccaacguguucuccauguu

SEQ ID NO: 36011 - RNA, 19 nt, Homo sapiens
  misc_RNA (1)...(19): siRNA sense strand
gaaccuggugcacaucauc

SEQ ID NO: 36012 - RNA, 19 nt, Homo sapiens
  misc_RNA (1)...(19): siRNA sense strand
aggaggagguugaccagau

SEQ ID NO: 36013 - RNA, 19 nt, Homo sapiens
  misc_RNA (1)...(19): siRNA sense strand
cuggaaacuuggacuacaa

SEQ ID NO: 36014 - RNA, 19 nt, Homo sapiens
  misc_RNA (1)...(19): siRNA sense strand
caccuaagaaagcaaagaa

SEQ ID NO: 36015 - RNA, 19 nt, Homo sapiens
  misc_RNA (1)...(19): siRNA sense strand
acaagaacgaucugagaga

SEQ ID NO: 36016 - RNA, 19 nt, Homo sapiens
  misc_RNA (1)...(19): siRNA sense strand
ucaacgcauucaaaguguu

SEQ ID NO: 36017 - RNA, 19 nt, Homo sapiens
  misc_RNA (1)...(19): siRNA sense strand
gcaccuaagaaagcaaaga

SEQ ID NO: 36018 - RNA, 19 nt, Homo sapiens
  misc_RNA (1)...(19): siRNA sense strand
uuacuguguuccucucaau

SEQ ID NO: 36019 - RNA, 19 nt, Homo sapiens
  misc_RNA (1)...(19): siRNA sense strand
ugacuggaaacuuggacua

SEQ ID NO: 36020 - RNA, 19 nt, Homo sapiens
  misc_RNA (1)...(19): siRNA sense strand
guguuccucucaauguuug

SEQ ID NO: 36021 - RNA, 19 nt, Homo sapiens
  misc_RNA (1)...(19): siRNA sense strand
gcugauuacguucgggaaa

SEQ ID NO: 36022 - RNA, 19 nt, Homo sapiens
  misc_RNA (1)...(19): siRNA sense strand
ugauuacguucgggaaaug

SEQ ID NO: 36023 - RNA, 19 nt, Homo sapiens
  misc_RNA (1)...(19): siRNA sense strand
acagggauggcuucauuga

SEQ ID NO: 36024 - RNA, 19 nt, Homo sapiens
  misc_RNA (1)...(19): siRNA sense strand
ggagguugaccagauguuc

SEQ ID NO: 36025 - RNA, 19 nt, Homo sapiens
  misc_RNA (1)...(19): siRNA sense strand
ggagcggacccugaggaaa

SEQ ID NO: 36026 - RNA, 19 nt, Homo sapiens
  misc_RNA (1)...(19): siRNA sense strand
ccggguccaauuaacuuua

SEQ ID NO: 36027 - RNA, 19 nt, Homo sapiens
  misc_RNA (1)...(19): siRNA sense strand
cuaagaaagcaaagaagag

SEQ ID NO: 36028 - RNA, 19 nt, Homo sapiens
  misc_RNA (1)...(19): siRNA sense strand
cugauuacguucgggaaau

SEQ ID NO: 36029 - RNA, 19 nt, Homo sapiens
  misc_RNA (1)...(19): siRNA sense strand
caucaacuaugaagcauuu

SEQ ID NO: 36030 - RNA, 19 nt, Homo sapiens
  misc_RNA (1)...(19): siRNA sense strand
cuaaggaggucgaguuuga

SEQ ID NO: 36031 - RNA, 19 nt, Homo sapiens
  misc_RNA (1)...(19): siRNA sense strand
ccaagaugauggacuuuga

SEQ ID NO: 36032 - RNA, 19 nt, Homo sapiens
  misc_RNA (1)...(19): siRNA sense strand
aggaagagcucaauaccaa

SEQ ID NO: 36033 - RNA, 19 nt, Homo sapiens
  misc_RNA (1)...(19): siRNA sense strand
gugagaggcugacagaaga

SEQ ID NO: 36034 - RNA, 19 nt, Homo sapiens
  misc_RNA (1)...(19): siRNA sense strand
gaagagcucaauaccaaga

SEQ ID NO: 36035 - RNA, 19 nt, Homo sapiens
  misc_RNA (1)...(19): siRNA sense strand
ugauggacuuugaaacuuu

SEQ ID NO: 36036 - RNA, 19 nt, Homo sapiens
  misc_RNA (1)...(19): siRNA sense strand
guucacaccugagcagauu

SEQ ID NO: 36037 - RNA, 19 nt, Homo sapiens
  misc_RNA (1)...(19): siRNA sense strand
gaugauggacuuugaaacu

SEQ ID NO: 36038 - RNA, 19 nt, Homo sapiens
  misc_RNA (1)...(19): siRNA sense strand
aagacgaaguggagaaguu

SEQ ID NO: 36039 - RNA, 19 nt, Homo sapiens
  misc_RNA (1)...(19): siRNA sense strand
auaccaagaugauggacuu

SEQ ID NO: 36040 - RNA, 19 nt, Homo sapiens
  misc_RNA (1)...(19): siRNA sense strand
cagcacauuuccaagaaca

SEQ ID NO: 36041 - RNA, 19 nt, Homo sapiens
  misc_RNA (1)...(19): siRNA sense strand
caccugagcagauugaaga

SEQ ID NO: 36042 - RNA, 19 nt, Homo sapiens
  misc_RNA (1)...(19): siRNA sense strand
cugagcagauugaagaguu

SEQ ID NO: 36043 - RNA, 19 nt, Homo sapiens
  misc_RNA (1)...(19): siRNA sense strand
ugucaugggugcugagcuu

SEQ ID NO: 36044 - RNA, 19 nt, Homo sapiens
  misc_RNA (1)...(19): siRNA sense strand
ggugagaggcugacagaag

SEQ ID NO: 36045 - RNA, 19 nt, Homo sapiens
  misc_RNA (1)...(19): siRNA sense strand
ggacacaggcaccuaugag

SEQ ID NO: 36046 - RNA, 19 nt, Homo sapiens
  misc_RNA (1)...(19): siRNA sense strand
gagcucaauaccaagauga

SEQ ID NO: 36047 - RNA, 19 nt, Homo sapiens
  misc_RNA (1)...(19): siRNA sense strand
agacaggaagagcucaaua

SEQ ID NO: 36048 - RNA, 19 nt, Homo sapiens
  misc_RNA (1)...(19): siRNA sense strand
caagaugauggacuuugaa

SEQ ID NO: 36049 - RNA, 19 nt, Homo sapiens
  misc_RNA (1)...(19): siRNA sense strand
caaggacacaggcaccuau

SEQ ID NO: 36050 - RNA, 19 nt, Homo sapiens
  misc_RNA (1)...(19): siRNA sense strand
ggcaagaggacuccaaugg

SEQ ID NO: 36051 - RNA, 19 nt, Homo sapiens
  misc_RNA (1)...(19): siRNA sense strand
guugauggcugggcaagag

SEQ ID NO: 36052 - RNA, 19 nt, Homo sapiens
  misc_RNA (1)...(19): siRNA sense strand
caacuaugaagcauuugug

SEQ ID NO: 36053 - RNA, 19 nt, Homo sapiens
  misc_RNA (1)...(19): siRNA sense strand
uccagcacauuuccaagaa

SEQ ID NO: 36054 - RNA, 19 nt, Homo sapiens
  misc_RNA (1)...(19): siRNA sense strand
gcugacagaagacgaagug

SEQ ID NO: 36055 - RNA, 19 nt, Homo sapiens
  misc_RNA (1)...(19): siRNA sense strand
uccaauggcugcaucaacu

SEQ ID NO: 36056 - RNA, 19 nt, Homo sapiens
  misc_RNA (1)...(19): siRNA sense strand
ccaauggcugcaucaacua

SEQ ID NO: 36057 - RNA, 19 nt, Homo sapiens
  misc_RNA (1)...(19): siRNA sense strand
gacaggaagagcucaauac

SEQ ID NO: 36058 - RNA, 19 nt, Homo sapiens
  misc_RNA (1)...(19): siRNA sense strand
agccagagcccaagaagga

SEQ ID NO: 36059 - RNA, 19 nt, Homo sapiens
  misc_RNA (1)...(19): siRNA sense strand
gcccuaaggaggucgaguu

SEQ ID NO: 36060 - RNA, 19 nt, Homo sapiens
  misc_RNA (1)...(19): siRNA sense strand
guuugaugcuuccaagauc

SEQ ID NO: 36061 - RNA, 19 nt, Homo sapiens
  misc_RNA (1)...(19): siRNA sense strand
gcacauuuccaagaacaag

SEQ ID NO: 36062 - RNA, 19 nt, Homo sapiens
  misc_RNA (1)...(19): siRNA sense strand
ccaagugugagaugaagau

SEQ ID NO: 36063 - RNA, 19 nt, Homo sapiens
  misc_RNA (1)...(19): siRNA sense strand
cagaagacgaaguggagaa

SEQ ID NO: 36064 - RNA, 19 nt, Homo sapiens
  misc_RNA (1)...(19): siRNA sense strand
aaacuuuccugccuaugcu

SEQ ID NO: 36065 - RNA, 19 nt, Homo sapiens
  misc_RNA (1)...(19): siRNA sense strand
ucacaccugagcagauuga

SEQ ID NO: 36066 - RNA, 19 nt, Homo sapiens
  misc_RNA (1)...(19): siRNA sense strand
ugagcagauugaagaguuc

SEQ ID NO: 36067 - RNA, 19 nt, Homo sapiens
  misc_RNA (1)...(19): siRNA sense strand
cuaugaagcauuugugaag

SEQ ID NO: 36068 - RNA, 19 nt, Homo sapiens
  misc_RNA (1)...(19): siRNA sense strand
gaggcugacagaagacgaa

SEQ ID NO: 36069 - RNA, 19 nt, Homo sapiens
  misc_RNA (1)...(19): siRNA sense strand
gggcaauggcacugucaug

SEQ ID NO: 36070 - RNA, 19 nt, Homo sapiens
  misc_RNA (1)...(19): siRNA sense strand
caauggcugcaucaacuau

SEQ ID NO: 36071 - RNA, 19 nt, Homo sapiens
  misc_RNA (1)...(19): siRNA sense strand
ggaagccaagacaggaaga

SEQ ID NO: 36072 - RNA, 19 nt, Homo sapiens
  misc_RNA (1)...(19): siRNA sense strand
gcaucaacuaugaagcauu

SEQ ID NO: 36073 - RNA, 19 nt, Homo sapiens
  misc_RNA (1)...(19): siRNA sense strand
aagaugauggacuuugaaa

SEQ ID NO: 36074 - RNA, 19 nt, Homo sapiens
  misc_RNA (1)...(19): siRNA sense strand
gaggucgaguuugaugcuu

SEQ ID NO: 36075 - RNA, 19 nt, Homo sapiens
  misc_RNA (1)...(19): siRNA sense strand
caagacaggaagagcucaa

SEQ ID NO: 36076 - RNA, 19 nt, Homo sapiens
  misc_RNA (1)...(19): siRNA sense strand
ucaauaccaagaugaugga

SEQ ID NO: 36077 - RNA, 19 nt, Homo sapiens
  misc_RNA (1)...(19): siRNA sense strand
gcucaauaccaagaugaug

SEQ ID NO: 36078 - RNA, 19 nt, Homo sapiens
  misc_RNA (1)...(19): siRNA sense strand
gaacaaaccugggagacaa

SEQ ID NO: 36079 - RNA, 19 nt, Homo sapiens
  misc_RNA (1)...(19): siRNA sense strand
gaacugaaguccgagcuaa

SEQ ID NO: 36080 - RNA, 19 nt, Homo sapiens
  misc_RNA (1)...(19): siRNA sense strand
ccagaacugucauaagaua

SEQ ID NO: 36081 - RNA, 19 nt, Homo sapiens
  misc_RNA (1)...(19): siRNA sense strand
gagaacagcagaaacaauu

SEQ ID NO: 36082 - RNA, 19 nt, Homo sapiens
  misc_RNA (1)...(19): siRNA sense strand
gcacguugcugcagcuuug

SEQ ID NO: 36083 - RNA, 19 nt, Homo sapiens
  misc_RNA (1)...(19): siRNA sense strand
guccagaacugucauaaga

SEQ ID NO: 36084 - RNA, 19 nt, Homo sapiens
  misc_RNA (1)...(19): siRNA sense strand
caacuuugcuuaugacaca

SEQ ID NO: 36085 - RNA, 19 nt, Homo sapiens
  misc_RNA (1)...(19): siRNA sense strand
gaagagaagaagcgacuaa

SEQ ID NO: 36086 - RNA, 19 nt, Homo sapiens
  misc_RNA (1)...(19): siRNA sense strand
ucaagaaccgcuauaagua

SEQ ID NO: 36087 - RNA, 19 nt, Homo sapiens
  misc_RNA (1)...(19): siRNA sense strand
cagcagcacccaacgcuua

SEQ ID NO: 36088 - RNA, 19 nt, Homo sapiens
  misc_RNA (1)...(19): siRNA sense strand
gcaggccucugggucauuu

SEQ ID NO: 36089 - RNA, 19 nt, Homo sapiens
  misc_RNA (1)...(19): siRNA sense strand
ugaacauggucacuuauga

SEQ ID NO: 36090 - RNA, 19 nt, Homo sapiens
  misc_RNA (1)...(19): siRNA sense strand
ccaugucagucauccauaa

SEQ ID NO: 36091 - RNA, 19 nt, Homo sapiens
  misc_RNA (1)...(19): siRNA sense strand
ugacuuggcuguggaugaa

SEQ ID NO: 36092 - RNA, 19 nt, Homo sapiens
  misc_RNA (1)...(19): siRNA sense strand
caccggauguggagaacua

SEQ ID NO: 36093 - RNA, 19 nt, Homo sapiens
  misc_RNA (1)...(19): siRNA sense strand
gcagcaugauugacuacaa

SEQ ID NO: 36094 - RNA, 19 nt, Homo sapiens
  misc_RNA (1)...(19): siRNA sense strand
gaccucaucagccaguuua

SEQ ID NO: 36095 - RNA, 19 nt, Homo sapiens
  misc_RNA (1)...(19): siRNA sense strand
ggacaguucccguauucuu

SEQ ID NO: 36096 - RNA, 19 nt, Homo sapiens
  misc_RNA (1)...(19): siRNA sense strand
ggccaaaggugccauuguc

SEQ ID NO: 36097 - RNA, 19 nt, Homo sapiens
  misc_RNA (1)...(19): siRNA sense strand
gccaaugccuucaucaucu

SEQ ID NO: 36098 - RNA, 19 nt, Homo sapiens
  misc_RNA (1)...(19): siRNA sense strand
gaaggccaaugaccagagu

SEQ ID NO: 36099 - RNA, 19 nt, Homo sapiens
  misc_RNA (1)...(19): siRNA sense strand
ccaccaggcuccagagaag

SEQ ID NO: 36100 - RNA, 19 nt, Homo sapiens
  misc_RNA (1)...(19): siRNA sense strand
acuugaacauggucacuua

SEQ ID NO: 36101 - RNA, 19 nt, Homo sapiens
  misc_RNA (1)...(19): siRNA sense strand
gcacagguaucagcaagac

SEQ ID NO: 36102 - RNA, 19 nt, Homo sapiens
  misc_RNA (1)...(19): siRNA sense strand
gagcagagccaggccaugu

SEQ ID NO: 36103 - RNA, 19 nt, Homo sapiens
  misc_RNA (1)...(19): siRNA sense strand
acaucaagcucuccaagau

SEQ ID NO: 36104 - RNA, 19 nt, Homo sapiens
  misc_RNA (1)...(19): siRNA sense strand
uaagauaugagcugaauac

SEQ ID NO: 36105 - RNA, 19 nt, Homo sapiens
  misc_RNA (1)...(19): siRNA sense strand
gcaaguaugguguguggau

SEQ ID NO: 36106 - RNA, 19 nt, Homo sapiens
  misc_RNA (1)...(19): siRNA sense strand
gaacagcagaaacaauuac

SEQ ID NO: 36107 - RNA, 19 nt, Homo sapiens
  misc_RNA (1)...(19): siRNA sense strand
caagucaguucuggaggaa

SEQ ID NO: 36108 - RNA, 19 nt, Homo sapiens
  misc_RNA (1)...(19): siRNA sense strand
guuccugcuucccgaauuu

SEQ ID NO: 36109 - RNA, 19 nt, Homo sapiens
  misc_RNA (1)...(19): siRNA sense strand
agacaaacauccguaagca

SEQ ID NO: 36110 - RNA, 19 nt, Homo sapiens
  misc_RNA (1)...(19): siRNA sense strand
ggauguggagaacuaguuu

SEQ ID NO: 36111 - RNA, 19 nt, Homo sapiens
  misc_RNA (1)...(19): siRNA sense strand
gacaguucccguauucuug

SEQ ID NO: 36112 - RNA, 19 nt, Homo sapiens
  misc_RNA (1)...(19): siRNA sense strand
caagaaccgcuauaaguac

SEQ ID NO: 36113 - RNA, 19 nt, Homo sapiens
  misc_RNA (1)...(19): siRNA sense strand
gaaguccgagcuaacugaa

SEQ ID NO: 36114 - RNA, 19 nt, Homo sapiens
  misc_RNA (1)...(19): siRNA sense strand
gaugcuaccgucaacuuug

SEQ ID NO: 36115 - RNA, 19 nt, Homo sapiens
  misc_RNA (1)...(19): siRNA sense strand
aaacauccguaagcaguca

SEQ ID NO: 36116 - RNA, 19 nt, Homo sapiens
  misc_RNA (1)...(19): siRNA sense strand
ggagguagcaaggcugaga

SEQ ID NO: 36117 - RNA, 19 nt, Homo sapiens
  misc_RNA (1)...(19): siRNA sense strand
gagcgggaccagcuggaaa

SEQ ID NO: 36118 - RNA, 19 nt, Homo sapiens
  misc_RNA (1)...(19): siRNA sense strand
gaaucuggaacucgaacaa

SEQ ID NO: 36119 - RNA, 19 nt, Homo sapiens
  misc_RNA (1)...(19): siRNA sense strand
aaacugaacccagagaauc

SEQ ID NO: 36120 - RNA, 19 nt, Homo sapiens
  misc_RNA (1)...(19): siRNA sense strand
agaacagcagaaacaauua

SEQ ID NO: 36121 - RNA, 19 nt, Homo sapiens
  misc_RNA (1)...(19): siRNA sense strand
ggaacugaaguccgagcua

SEQ ID NO: 36122 - RNA, 19 nt, Homo sapiens
  misc_RNA (1)...(19): siRNA sense strand
gccaggagguuggaaagca

SEQ ID NO: 36123 - RNA, 19 nt, Homo sapiens
  misc_RNA (1)...(19): siRNA sense strand
gcagagccaggccauguca

SEQ ID NO: 36124 - RNA, 19 nt, Homo sapiens
  misc_RNA (1)...(19): siRNA sense strand
caaacugaacccagagaau

SEQ ID NO: 36125 - RNA, 19 nt, Homo sapiens
  misc_RNA (1)...(19): siRNA sense strand
cagcaccgaugaggccaaa

SEQ ID NO: 36126 - RNA, 19 nt, Homo sapiens
  misc_RNA (1)...(19): siRNA sense strand
caggagaccacguggagaa

SEQ ID NO: 36127 - RNA, 19 nt, Homo sapiens
  misc_RNA (1)...(19): siRNA sense strand
gucagucauccauaacuua

SEQ ID NO: 36128 - RNA, 19 nt, Homo sapiens
  misc_RNA (1)...(19): siRNA sense strand
gaaguuucuacguggaauu

SEQ ID NO: 36129 - RNA, 19 nt, Homo sapiens
  misc_RNA (1)...(19): siRNA sense strand
agucaguucuggaggaaga

SEQ ID NO: 36130 - RNA, 19 nt, Homo sapiens
  misc_RNA (1)...(19): siRNA sense strand
gacaucaagcucuccaaga

SEQ ID NO: 36131 - RNA, 19 nt, Homo sapiens
  misc_RNA (1)...(19): siRNA sense strand
ccaaugccuucaucaucug

SEQ ID NO: 36132 - RNA, 19 nt, Homo sapiens
  misc_RNA (1)...(19): siRNA sense strand
gggagacaaacauccguaa

SEQ ID NO: 36133 - RNA, 19 nt, Homo sapiens
  misc_RNA (1)...(19): siRNA sense strand
gagaccacguggagaaucg

SEQ ID NO: 36134 - RNA, 19 nt, Homo sapiens
  misc_RNA (1)...(19): siRNA sense strand
agaacuaguuuggguagga

SEQ ID NO: 36135 - RNA, 19 nt, Homo sapiens
  misc_RNA (1)...(19): siRNA sense strand
ugucagucauccauaacuu

SEQ ID NO: 36136 - RNA, 19 nt, Homo sapiens
  misc_RNA (1)...(19): siRNA sense strand
acagcagcaugauugacua

SEQ ID NO: 36137 - RNA, 19 nt, Homo sapiens
  misc_RNA (1)...(19): siRNA sense strand
uaaguacagcagcaugauu

SEQ ID NO: 36138 - RNA, 19 nt, Homo sapiens
  misc_RNA (1)...(19): siRNA sense strand
uauaaguacagcagcauga

SEQ ID NO: 36139 - RNA, 19 nt, Homo sapiens
  misc_RNA (1)...(19): siRNA sense strand
aagaaccgcuauaaguaca

SEQ ID NO: 36140 - RNA, 19 nt, Homo sapiens
  misc_RNA (1)...(19): siRNA sense strand
agugaaggcugagaaggaa

SEQ ID NO: 36141 - RNA, 19 nt, Homo sapiens
  misc_RNA (1)...(19): siRNA sense strand
cuucuaagguucacauacu

SEQ ID NO: 36142 - RNA, 19 nt, Homo sapiens
  misc_RNA (1)...(19): siRNA sense strand
gccaguauaccuucagugu

SEQ ID NO: 36143 - RNA, 19 nt, Homo sapiens
  misc_RNA (1)...(19): siRNA sense strand
cagcaugauugacuacaac

SEQ ID NO: 36144 - RNA, 19 nt, Homo sapiens
  misc_RNA (1)...(19): siRNA sense strand
cuacacggacauugacuug

SEQ ID NO: 36145 - RNA, 19 nt, Homo sapiens
  misc_RNA (1)...(19): siRNA sense strand
gagccuccuccaccaauug

SEQ ID NO: 36146 - RNA, 19 nt, Homo sapiens
  misc_RNA (1)...(19): siRNA sense strand
gcaagaaaaugagaaucug

SEQ ID NO: 36147 - RNA, 19 nt, Homo sapiens
  misc_RNA (1)...(19): siRNA sense strand
ugaaguccgagcuaacuga

SEQ ID NO: 36148 - RNA, 19 nt, Homo sapiens
  misc_RNA (1)...(19): siRNA sense strand
ccgucaacuuugcuuauga

SEQ ID NO: 36149 - RNA, 19 nt, Homo sapiens
  misc_RNA (1)...(19): siRNA sense strand
cugaauaccgagacaguga

SEQ ID NO: 36150 - RNA, 19 nt, Homo sapiens
  misc_RNA (1)...(19): siRNA sense strand
gggacaacuugaacauggu

SEQ ID NO: 36151 - RNA, 19 nt, Homo sapiens
  misc_RNA (1)...(19): siRNA sense strand
gagagccuccuccaccaau

SEQ ID NO: 36152 - RNA, 19 nt, Homo sapiens
  misc_RNA (1)...(19): siRNA sense strand
gagacaaacauccguaagc

SEQ ID NO: 36153 - RNA, 19 nt, Homo sapiens
  misc_RNA (1)...(19): siRNA sense strand
cagugaaggcugagaagga

SEQ ID NO: 36154 - RNA, 19 nt, Homo sapiens
  misc_RNA (1)...(19): siRNA sense strand
cagaugcuaccgucaacuu

SEQ ID NO: 36155 - RNA, 19 nt, Homo sapiens
  misc_RNA (1)...(19): siRNA sense strand
aguccgagcuaacugaagu

SEQ ID NO: 36156 - RNA, 19 nt, Homo sapiens
  misc_RNA (1)...(19): siRNA sense strand
aaguacagcagcaugauug

SEQ ID NO: 36157 - RNA, 19 nt, Homo sapiens
  misc_RNA (1)...(19): siRNA sense strand
gaccaucccauucaagaac

SEQ ID NO: 36158 - RNA, 19 nt, Homo sapiens
  misc_RNA (1)...(19): siRNA sense strand
cagcuacaccucagcagau

SEQ ID NO: 36159 - RNA, 19 nt, Homo sapiens
  misc_RNA (1)...(19): siRNA sense strand
ggagacaaacauccguaag

SEQ ID NO: 36160 - RNA, 19 nt, Homo sapiens
  misc_RNA (1)...(19): siRNA sense strand
ggaagagaagaagcgacua

SEQ ID NO: 36161 - RNA, 19 nt, Homo sapiens
  misc_RNA (1)...(19): siRNA sense strand
gcaaccuccuccgagacaa

SEQ ID NO: 36162 - RNA, 19 nt, Homo sapiens
  misc_RNA (1)...(19): siRNA sense strand
ccaaacugaacccagagaa

SEQ ID NO: 36163 - RNA, 19 nt, Homo sapiens
  misc_RNA (1)...(19): siRNA sense strand
ccauuguccucuccaaacu

SEQ ID NO: 36164 - RNA, 19 nt, Homo sapiens
  misc_RNA (1)...(19): siRNA sense strand
gcaccgaugaggccaaagg

SEQ ID NO: 36165 - RNA, 19 nt, Homo sapiens
  misc_RNA (1)...(19): siRNA sense strand
guggagaaucgacacaguu

SEQ ID NO: 36166 - RNA, 19 nt, Homo sapiens
  misc_RNA (1)...(19): siRNA sense strand
gaaacaauuacuggcaagu

SEQ ID NO: 36167 - RNA, 19 nt, Homo sapiens
  misc_RNA (1)...(19): siRNA sense strand
gagguagcaaggcugagaa

SEQ ID NO: 36168 - RNA, 19 nt, Homo sapiens
  misc_RNA (1)...(19): siRNA sense strand
aucaagcucuccaagaugu

SEQ ID NO: 36169 - RNA, 19 nt, Homo sapiens
  misc_RNA (1)...(19): siRNA sense strand
uaugacacaggcacaggua

SEQ ID NO: 36170 - RNA, 19 nt, Homo sapiens
  misc_RNA (1)...(19): siRNA sense strand
cgaacaaaccugggagaca

SEQ ID NO: 36171 - RNA, 19 nt, Homo sapiens
  misc_RNA (1)...(19): siRNA sense strand
ugagaacagcagaaacaau

SEQ ID NO: 36172 - RNA, 19 nt, Homo sapiens
  misc_RNA (1)...(19): siRNA sense strand
caagcucuccaagauguga

SEQ ID NO: 36173 - RNA, 19 nt, Homo sapiens
  misc_RNA (1)...(19): siRNA sense strand
uucaagaaccgcuauaagu

SEQ ID NO: 36174 - RNA, 19 nt, Homo sapiens
  misc_RNA (1)...(19): siRNA sense strand
uggagaaucgacacaguug

SEQ ID NO: 36175 - RNA, 19 nt, Homo sapiens
  misc_RNA (1)...(19): siRNA sense strand
agaagcgacuaaggcaaga

SEQ ID NO: 36176 - RNA, 19 nt, Homo sapiens
  misc_RNA (1)...(19): siRNA sense strand
cauucaagaaccgcuauaa

SEQ ID NO: 36177 - RNA, 19 nt, Homo sapiens
  misc_RNA (1)...(19): siRNA sense strand
gacacaggcacagguauca

SEQ ID NO: 36178 - RNA, 19 nt, Homo sapiens
  misc_RNA (1)...(19): siRNA sense strand
gaacuuuggucucagcuua

SEQ ID NO: 36179 - RNA, 19 nt, Homo sapiens
  misc_RNA (1)...(19): siRNA sense strand
ccaaagaacugcauaagug

SEQ ID NO: 36180 - RNA, 19 nt, Homo sapiens
  misc_RNA (1)...(19): siRNA sense strand
acacauaccuaaacauuga

SEQ ID NO: 36181 - RNA, 19 nt, Homo sapiens
  misc_RNA (1)...(19): siRNA sense strand
gcgcuucccucauggcauu

SEQ ID NO: 36182 - RNA, 19 nt, Homo sapiens
  misc_RNA (1)...(19): siRNA sense strand
gcugcaacauuaacuguga

SEQ ID NO: 36183 - RNA, 19 nt, Homo sapiens
  misc_RNA (1)...(19): siRNA sense strand
ucaagaaccuggagauguc

SEQ ID NO: 36184 - RNA, 19 nt, Homo sapiens
  misc_RNA (1)...(19): siRNA sense strand
gcaccacacuggacaaggu

SEQ ID NO: 36185 - RNA, 19 nt, Homo sapiens
  misc_RNA (1)...(19): siRNA sense strand
ggacaugggcuacacauac

SEQ ID NO: 36186 - RNA, 19 nt, Homo sapiens
  misc_RNA (1)...(19): siRNA sense strand
caaagaacugcauaaguga

SEQ ID NO: 36187 - RNA, 19 nt, Homo sapiens
  misc_RNA (1)...(19): siRNA sense strand
ggagaugucccagcaguga

SEQ ID NO: 36188 - RNA, 19 nt, Homo sapiens
  misc_RNA (1)...(19): siRNA sense strand
gcaggaccgauaugccuua

SEQ ID NO: 36189 - RNA, 19 nt, Homo sapiens
  misc_RNA (1)...(19): siRNA sense strand
cuacacauaccuaaacauu

SEQ ID NO: 36190 - RNA, 19 nt, Homo sapiens
  misc_RNA (1)...(19): siRNA sense strand
ggucucagcuuagagcaau

SEQ ID NO: 36191 - RNA, 19 nt, Homo sapiens
  misc_RNA (1)...(19): siRNA sense strand
ccacagaccugcguaccau

SEQ ID NO: 36192 - RNA, 19 nt, Homo sapiens
  misc_RNA (1)...(19): siRNA sense strand
cccaagcgcuucccucaug

SEQ ID NO: 36193 - RNA, 19 nt, Homo sapiens
  misc_RNA (1)...(19): siRNA sense strand
cuacucaggugacaucauc

SEQ ID NO: 36194 - RNA, 19 nt, Homo sapiens
  misc_RNA (1)...(19): siRNA sense strand
ggaaugacccugacaugcu

SEQ ID NO: 36195 - RNA, 19 nt, Homo sapiens
  misc_RNA (1)...(19): siRNA sense strand
ccgggucugugauauauga

SEQ ID NO: 36196 - RNA, 19 nt, Homo sapiens
  misc_RNA (1)...(19): siRNA sense strand
agaauccacucaugaucaa

SEQ ID NO: 36197 - RNA, 19 nt, Homo sapiens
  misc_RNA (1)...(19): siRNA sense strand
caccgggucugugauauau

SEQ ID NO: 36198 - RNA, 19 nt, Homo sapiens
  misc_RNA (1)...(19): siRNA sense strand
cgcuuccgcugcaacauua

SEQ ID NO: 36199 - RNA, 19 nt, Homo sapiens
  misc_RNA (1)...(19): siRNA sense strand
gauggcugcugcccugaau

SEQ ID NO: 36200 - RNA, 19 nt, Homo sapiens
  misc_RNA (1)...(19): siRNA sense strand
gugaugaggacccaaagaa

SEQ ID NO: 36201 - RNA, 19 nt, Homo sapiens
  misc_RNA (1)...(19): siRNA sense strand
guaccuguaucccaucaag

SEQ ID NO: 36202 - RNA, 19 nt, Homo sapiens
  misc_RNA (1)...(19): siRNA sense strand
ucaguggccuccgagauga

SEQ ID NO: 36203 - RNA, 19 nt, Homo sapiens
  misc_RNA (1)...(19): siRNA sense strand
gacgcaggauucacaagga

SEQ ID NO: 36204 - RNA, 19 nt, Homo sapiens
  misc_RNA (1)...(19): siRNA sense strand
gaagguagacaugcucaag

SEQ ID NO: 36205 - RNA, 19 nt, Homo sapiens
  misc_RNA (1)...(19): siRNA sense strand
cagaauccacucaugauca

SEQ ID NO: 36206 - RNA, 19 nt, Homo sapiens
  misc_RNA (1)...(19): siRNA sense strand
ggacccaaagaacugcaua

SEQ ID NO: 36207 - RNA, 19 nt, Homo sapiens
  misc_RNA (1)...(19): siRNA sense strand
aaucaaccaggaucccuua

SEQ ID NO: 36208 - RNA, 19 nt, Homo sapiens
  misc_RNA (1)...(19): siRNA sense strand
gcagaauccacucaugauc

SEQ ID NO: 36209 - RNA, 19 nt, Homo sapiens
  misc_RNA (1)...(19): siRNA sense strand
gaacgcuuccgcugcaaca

SEQ ID NO: 36210 - RNA, 19 nt, Homo sapiens
  misc_RNA (1)...(19): siRNA sense strand
gaugaggacccaaagaacu

SEQ ID NO: 36211 - RNA, 19 nt, Homo sapiens
  misc_RNA (1)...(19): siRNA sense strand
gacccaaagaacugcauaa

SEQ ID NO: 36212 - RNA, 19 nt, Homo sapiens
  misc_RNA (1)...(19): siRNA sense strand
caacauuaacugugaugag

SEQ ID NO: 36213 - RNA, 19 nt, Homo sapiens
  misc_RNA (1)...(19): siRNA sense strand
caaccucuggcguaacuau

SEQ ID NO: 36214 - RNA, 19 nt, Homo sapiens
  misc_RNA (1)...(19): siRNA sense strand
ggccugaaguuggguaucu

SEQ ID NO: 36215 - RNA, 19 nt, Homo sapiens
  misc_RNA (1)...(19): siRNA sense strand
ggcuagcgccuuagucuuc

SEQ ID NO: 36216 - RNA, 19 nt, Homo sapiens
  misc_RNA (1)...(19): siRNA sense strand
gggacaugggcuacacaua

SEQ ID NO: 36217 - RNA, 19 nt, Homo sapiens
  misc_RNA (1)...(19): siRNA sense strand
gcccagaacauggacauuc

SEQ ID NO: 36218 - RNA, 19 nt, Homo sapiens
  misc_RNA (1)...(19): siRNA sense strand
gacaugggcuacacauacc

SEQ ID NO: 36219 - RNA, 19 nt, Homo sapiens
  misc_RNA (1)...(19): siRNA sense strand
acgcaggauucacaaggaa

SEQ ID NO: 36220 - RNA, 19 nt, Homo sapiens
  misc_RNA (1)...(19): siRNA sense strand
aaagaacugcauaagugaa

SEQ ID NO: 36221 - RNA, 19 nt, Homo sapiens
  misc_RNA (1)...(19): siRNA sense strand
cugcagaauccacucauga

SEQ ID NO: 36222 - RNA, 19 nt, Homo sapiens
  misc_RNA (1)...(19): siRNA sense strand
gcugcucauugggaacuuu

SEQ ID NO: 36223 - RNA, 19 nt, Homo sapiens
  misc_RNA (1)...(19): siRNA sense strand
ucugcaaccucuggcguaa

SEQ ID NO: 36224 - RNA, 19 nt, Homo sapiens
  misc_RNA (1)...(19): siRNA sense strand
gggcuacacauaccuaaac

SEQ ID NO: 36225 - RNA, 19 nt, Homo sapiens
  misc_RNA (1)...(19): siRNA sense strand
ggcuacacauaccuaaaca

SEQ ID NO: 36226 - RNA, 19 nt, Homo sapiens
  misc_RNA (1)...(19): siRNA sense strand
gccugaaguuggguaucua

SEQ ID NO: 36227 - RNA, 19 nt, Homo sapiens
  misc_RNA (1)...(19): siRNA sense strand
uggcguaacuaugaugaca

SEQ ID NO: 36228 - RNA, 19 nt, Homo sapiens
  misc_RNA (1)...(19): siRNA sense strand
ccugacaugcugcucauug

SEQ ID NO: 36229 - RNA, 19 nt, Homo sapiens
  misc_RNA (1)...(19): siRNA sense strand
ucuccauccugaauugguu

SEQ ID NO: 36230 - RNA, 19 nt, Homo sapiens
  misc_RNA (1)...(19): siRNA sense strand
gcaacauuaacugugauga

SEQ ID NO: 36231 - RNA, 19 nt, Homo sapiens
  misc_RNA (1)...(19): siRNA sense strand
aaucucucaucgaagugua

SEQ ID NO: 36232 - RNA, 19 nt, Homo sapiens
  misc_RNA (1)...(19): siRNA sense strand
gcacagaacuccacucaaa

SEQ ID NO: 36233 - RNA, 19 nt, Homo sapiens
  misc_RNA (1)...(19): siRNA sense strand
gagaagaggcuauguuuaa

SEQ ID NO: 36234 - RNA, 19 nt, Homo sapiens
  misc_RNA (1)...(19): siRNA sense strand
ggacaaacuucgacccuuu

SEQ ID NO: 36235 - RNA, 19 nt, Homo sapiens
  misc_RNA (1)...(19): siRNA sense strand
gggaggaaaugcugaauaa

SEQ ID NO: 36236 - RNA, 19 nt, Homo sapiens
  misc_RNA (1)...(19): siRNA sense strand
gcacuuacuuuacgaccua

SEQ ID NO: 36237 - RNA, 19 nt, Homo sapiens
  misc_RNA (1)...(19): siRNA sense strand
caggagagcuuaucacaga

SEQ ID NO: 36238 - RNA, 19 nt, Homo sapiens
  misc_RNA (1)...(19): siRNA sense strand
cgacaaagccgacuacaug

SEQ ID NO: 36239 - RNA, 19 nt, Homo sapiens
  misc_RNA (1)...(19): siRNA sense strand
uaaacuggguuguuacauu

SEQ ID NO: 36240 - RNA, 19 nt, Homo sapiens
  misc_RNA (1)...(19): siRNA sense strand
cagcagagcccaucgagua

SEQ ID NO: 36241 - RNA, 19 nt, Homo sapiens
  misc_RNA (1)...(19): siRNA sense strand
gcagagugauucagguuga

SEQ ID NO: 36242 - RNA, 19 nt, Homo sapiens
  misc_RNA (1)...(19): siRNA sense strand
gaaguuggaggacgaguaa

SEQ ID NO: 36243 - RNA, 19 nt, Homo sapiens
  misc_RNA (1)...(19): siRNA sense strand
caaccaaaccucuugauau

SEQ ID NO: 36244 - RNA, 19 nt, Homo sapiens
  misc_RNA (1)...(19): siRNA sense strand
ggagaagaggcuauguuua

SEQ ID NO: 36245 - RNA, 19 nt, Homo sapiens
  misc_RNA (1)...(19): siRNA sense strand
gcgaggagcuucggcacua

SEQ ID NO: 36246 - RNA, 19 nt, Homo sapiens
  misc_RNA (1)...(19): siRNA sense strand
ugucauggcuuauccagaa

SEQ ID NO: 36247 - RNA, 19 nt, Homo sapiens
  misc_RNA (1)...(19): siRNA sense strand
gaucgcuucuguuggcaua

SEQ ID NO: 36248 - RNA, 19 nt, Homo sapiens
  misc_RNA (1)...(19): siRNA sense strand
ucaguaacgugaaguaugu

SEQ ID NO: 36249 - RNA, 19 nt, Homo sapiens
  misc_RNA (1)...(19): siRNA sense strand
gacaggagacuggauauuu

SEQ ID NO: 36250 - RNA, 19 nt, Homo sapiens
  misc_RNA (1)...(19): siRNA sense strand
ugaaguaugucauguugga

SEQ ID NO: 36251 - RNA, 19 nt, Homo sapiens
  misc_RNA (1)...(19): siRNA sense strand
gaaagcagacuacccgaau

SEQ ID NO: 36252 - RNA, 19 nt, Homo sapiens
  misc_RNA (1)...(19): siRNA sense strand
gaauaucuuuacccuuguu

SEQ ID NO: 36253 - RNA, 19 nt, Homo sapiens
  misc_RNA (1)...(19): siRNA sense strand
guuaaugacucccaagcaa

SEQ ID NO: 36254 - RNA, 19 nt, Homo sapiens
  misc_RNA (1)...(19): siRNA sense strand
gaauaaggcugagguuggu

SEQ ID NO: 36255 - RNA, 19 nt, Homo sapiens
  misc_RNA (1)...(19): siRNA sense strand
aaccaaaccucuugauaug

SEQ ID NO: 36256 - RNA, 19 nt, Homo sapiens
  misc_RNA (1)...(19): siRNA sense strand
aaacuggguuguuacauuc

SEQ ID NO: 36257 - RNA, 19 nt, Homo sapiens
  misc_RNA (1)...(19): siRNA sense strand
gcaauucucagcauggauu

SEQ ID NO: 36258 - RNA, 19 nt, Homo sapiens
  misc_RNA (1)...(19): siRNA sense strand
agaaacagguuacauggau

SEQ ID NO: 36259 - RNA, 19 nt, Homo sapiens
  misc_RNA (1)...(19): siRNA sense strand
gaucugaguucgacuucau

SEQ ID NO: 36260 - RNA, 19 nt, Homo sapiens
  misc_RNA (1)...(19): siRNA sense strand
gccaaacaauuacaagaau

SEQ ID NO: 36261 - RNA, 19 nt, Homo sapiens
  misc_RNA (1)...(19): siRNA sense strand
cagcauggauuuauaucga

SEQ ID NO: 36262 - RNA, 19 nt, Homo sapiens
  misc_RNA (1)...(19): siRNA sense strand
gaaggcuacuggccggaaa

SEQ ID NO: 36263 - RNA, 19 nt, Homo sapiens
  misc_RNA (1)...(19): siRNA sense strand
aaauguggcugcacuacuu

SEQ ID NO: 36264 - RNA, 19 nt, Homo sapiens
  misc_RNA (1)...(19): siRNA sense strand
cagcgaaccucgagaccaa

SEQ ID NO: 36265 - RNA, 19 nt, Homo sapiens
  misc_RNA (1)...(19): siRNA sense strand
gaacagcacuggaaaacuc

SEQ ID NO: 36266 - RNA, 19 nt, Homo sapiens
  misc_RNA (1)...(19): siRNA sense strand
cagagacgcuuuugaaauu

SEQ ID NO: 36267 - RNA, 19 nt, Homo sapiens
  misc_RNA (1)...(19): siRNA sense strand
cagaauggguccacgacaa

SEQ ID NO: 36268 - RNA, 19 nt, Homo sapiens
  misc_RNA (1)...(19): siRNA sense strand
ccaaacaauuacaagaaug

SEQ ID NO: 36269 - RNA, 19 nt, Homo sapiens
  misc_RNA (1)...(19): siRNA sense strand
aaagcagacuacccgaaua

SEQ ID NO: 36270 - RNA, 19 nt, Homo sapiens
  misc_RNA (1)...(19): siRNA sense strand
uaguagugguguucaauuu

SEQ ID NO: 36271 - RNA, 19 nt, Homo sapiens
  misc_RNA (1)...(19): siRNA sense strand
ggccagccguguccaugua

SEQ ID NO: 36272 - RNA, 19 nt, Homo sapiens
  misc_RNA (1)...(19): siRNA sense strand
ggaguucaccguucacguu

SEQ ID NO: 36273 - RNA, 19 nt, Homo sapiens
  misc_RNA (1)...(19): siRNA sense strand
ccacagcuuugcccaugaa

SEQ ID NO: 36274 - RNA, 19 nt, Homo sapiens
  misc_RNA (1)...(19): siRNA sense strand
gagcgaaguuucagagacu

SEQ ID NO: 36275 - RNA, 19 nt, Homo sapiens
  misc_RNA (1)...(19): siRNA sense strand
agaagaaggugcuaauguc

SEQ ID NO: 36276 - RNA, 19 nt, Homo sapiens
  misc_RNA (1)...(19): siRNA sense strand
gaguaagucgugaauuaaa

SEQ ID NO: 36277 - RNA, 19 nt, Homo sapiens
  misc_RNA (1)...(19): siRNA sense strand
ucacguugcuuuggccuuu

SEQ ID NO: 36278 - RNA, 19 nt, Homo sapiens
  misc_RNA (1)...(19): siRNA sense strand
gaaacaaggcugagaaucc

SEQ ID NO: 36279 - RNA, 19 nt, Homo sapiens
  misc_RNA (1)...(19): siRNA sense strand
gaggacaggagacuggaua

SEQ ID NO: 36280 - RNA, 19 nt, Homo sapiens
  misc_RNA (1)...(19): siRNA sense strand
ggaggugguucaucagagu

SEQ ID NO: 36281 - RNA, 19 nt, Homo sapiens
  misc_RNA (1)...(19): siRNA sense strand
gccagaagauuggagaaga

SEQ ID NO: 36282 - RNA, 19 nt, Homo sapiens
  misc_RNA (1)...(19): siRNA sense strand
acaaacagcuucccaaaau

SEQ ID NO: 36283 - RNA, 19 nt, Homo sapiens
  misc_RNA (1)...(19): siRNA sense strand
aaacaaacagcuucccaaa

SEQ ID NO: 36284 - RNA, 19 nt, Homo sapiens
  misc_RNA (1)...(19): siRNA sense strand
gcagaccauguuccaguua

SEQ ID NO: 36285 - RNA, 19 nt, Homo sapiens
  misc_RNA (1)...(19): siRNA sense strand
ggaaguuggaggacgagua

SEQ ID NO: 36286 - RNA, 19 nt, Homo sapiens
  misc_RNA (1)...(19): siRNA sense strand
gaauggaucagacgaugga

SEQ ID NO: 36287 - RNA, 19 nt, Homo sapiens
  misc_RNA (1)...(19): siRNA sense strand
cgugaaguaugucauguug

SEQ ID NO: 36288 - RNA, 19 nt, Homo sapiens
  misc_RNA (1)...(19): siRNA sense strand
cuacacaggaguuucagua

SEQ ID NO: 36289 - RNA, 19 nt, Homo sapiens
  misc_RNA (1)...(19): siRNA sense strand
aaacgcagauuaccaugca

SEQ ID NO: 36290 - RNA, 19 nt, Homo sapiens
  misc_RNA (1)...(19): siRNA sense strand
gaagaggcuauguuuaauc

SEQ ID NO: 36291 - RNA, 19 nt, Homo sapiens
  misc_RNA (1)...(19): siRNA sense strand
cgacuucauugucagguau

SEQ ID NO: 36292 - RNA, 19 nt, Homo sapiens
  misc_RNA (1)...(19): siRNA sense strand
gaauauccagcacuuacuu

SEQ ID NO: 36293 - RNA, 19 nt, Homo sapiens
  misc_RNA (1)...(19): siRNA sense strand
gcccaugaaacgcagauua

SEQ ID NO: 36294 - RNA, 19 nt, Homo sapiens
  misc_RNA (1)...(19): siRNA sense strand
uaaagaagaaggugcuaau

SEQ ID NO: 36295 - RNA, 19 nt, Homo sapiens
  misc_RNA (1)...(19): siRNA sense strand
gaguucgacuucauuguca

SEQ ID NO: 36296 - RNA, 19 nt, Homo sapiens
  misc_RNA (1)...(19): siRNA sense strand
gacaucagccaguugacua

SEQ ID NO: 36297 - RNA, 19 nt, Homo sapiens
  misc_RNA (1)...(19): siRNA sense strand
caacucagguuuugccauu

SEQ ID NO: 36298 - RNA, 19 nt, Homo sapiens
  misc_RNA (1)...(19): siRNA sense strand
gcucauugaucggaauuuc

SEQ ID NO: 36299 - RNA, 19 nt, Homo sapiens
  misc_RNA (1)...(19): siRNA sense strand
cagaccauguuccaguuaa

SEQ ID NO: 36300 - RNA, 19 nt, Homo sapiens
  misc_RNA (1)...(19): siRNA sense strand
cuaauguccugaccacaga

SEQ ID NO: 36301 - RNA, 19 nt, Homo sapiens
  misc_RNA (1)...(19): siRNA sense strand
gagacgggcuggaccuuac

SEQ ID NO: 36302 - RNA, 19 nt, Homo sapiens
  misc_RNA (1)...(19): siRNA sense strand
gaggaaaugcugaauaagg

SEQ ID NO: 36303 - RNA, 19 nt, Homo sapiens
  misc_RNA (1)...(19): siRNA sense strand
aaacuucgacccuuuggaa

SEQ ID NO: 36304 - RNA, 19 nt, Homo sapiens
  misc_RNA (1)...(19): siRNA sense strand
cgaguaagucgugaauuaa

SEQ ID NO: 36305 - RNA, 19 nt, Homo sapiens
  misc_RNA (1)...(19): siRNA sense strand
gggaagcagcuccaacuga

SEQ ID NO: 36306 - RNA, 19 nt, Homo sapiens
  misc_RNA (1)...(19): siRNA sense strand
uaaauuauacucgccagaa

SEQ ID NO: 36307 - RNA, 19 nt, Homo sapiens
  misc_RNA (1)...(19): siRNA sense strand
gcgggacaccucagacuuu

SEQ ID NO: 36308 - RNA, 19 nt, Homo sapiens
  misc_RNA (1)...(19): siRNA sense strand
guauauagucacccagaaa

SEQ ID NO: 36309 - RNA, 19 nt, Homo sapiens
  misc_RNA (1)...(19): siRNA sense strand
aaccagagaauaugacuuu

SEQ ID NO: 36310 - RNA, 19 nt, Homo sapiens
  misc_RNA (1)...(19): siRNA sense strand
ggagagcuuaucacagaaa

SEQ ID NO: 36311 - RNA, 19 nt, Homo sapiens
  misc_RNA (1)...(19): siRNA sense strand
caacaggcaguggaaauug

SEQ ID NO: 36312 - RNA, 19 nt, Homo sapiens
  misc_RNA (1)...(19): siRNA sense strand
guggacagcugggaggaaa

SEQ ID NO: 36313 - RNA, 19 nt, Homo sapiens
  misc_RNA (1)...(19): siRNA sense strand
agaagaggcuauguuuaau

SEQ ID NO: 36314 - RNA, 19 nt, Homo sapiens
  misc_RNA (1)...(19): siRNA sense strand
ggaaaaucaugccaaacaa

SEQ ID NO: 36315 - RNA, 19 nt, Homo sapiens
  misc_RNA (1)...(19): siRNA sense strand
ggaccuuacggacauugua

SEQ ID NO: 36316 - RNA, 19 nt, Homo sapiens
  misc_RNA (1)...(19): siRNA sense strand
ucucacacaucaacuggaa

SEQ ID NO: 36317 - RNA, 19 nt, Homo sapiens
  misc_RNA (1)...(19): siRNA sense strand
ggacaggagacuggauauu

SEQ ID NO: 36318 - RNA, 19 nt, Homo sapiens
  misc_RNA (1)...(19): siRNA sense strand
gaguggaguucaccguuca

SEQ ID NO: 36319 - RNA, 19 nt, Homo sapiens
  misc_RNA (1)...(19): siRNA sense strand
ggacaccucagacuuugug

SEQ ID NO: 36320 - RNA, 19 nt, Homo sapiens
  misc_RNA (1)...(19): siRNA sense strand
cagguuacauggaucagau

SEQ ID NO: 36321 - RNA, 19 nt, Homo sapiens
  misc_RNA (1)...(19): siRNA sense strand
gggaaaccagagaauauga

SEQ ID NO: 36322 - RNA, 19 nt, Homo sapiens
  misc_RNA (1)...(19): siRNA sense strand
gaaacaggacagaauaaaa

SEQ ID NO: 36323 - RNA, 19 nt, Homo sapiens
  misc_RNA (1)...(19): siRNA sense strand
ccacgacccuggacgacau

SEQ ID NO: 36324 - RNA, 19 nt, Homo sapiens
  misc_RNA (1)...(19): siRNA sense strand
ugguggaugucauggcuua

SEQ ID NO: 36325 - RNA, 19 nt, Homo sapiens
  misc_RNA (1)...(19): siRNA sense strand
ccagagaauaugacuuuau

SEQ ID NO: 36326 - RNA, 19 nt, Homo sapiens
  misc_RNA (1)...(19): siRNA sense strand
gguguuggccugcacauuc

SEQ ID NO: 36327 - RNA, 19 nt, Homo sapiens
  misc_RNA (1)...(19): siRNA sense strand
ggacugggccugugcucau

SEQ ID NO: 36328 - RNA, 19 nt, Homo sapiens
  misc_RNA (1)...(19): siRNA sense strand
ucccagcgcuuucuacauc

SEQ ID NO: 36329 - RNA, 19 nt, Homo sapiens
  misc_RNA (1)...(19): siRNA sense strand
uggagaagaggcuauguuu

SEQ ID NO: 36330 - RNA, 19 nt, Homo sapiens
  misc_RNA (1)...(19): siRNA sense strand
ugaaacaggacagaauaaa

SEQ ID NO: 36331 - RNA, 19 nt, Homo sapiens
  misc_RNA (1)...(19): siRNA sense strand
gugaaacaggacagaauaa

SEQ ID NO: 36332 - RNA, 19 nt, Homo sapiens
  misc_RNA (1)...(19): siRNA sense strand
aaagaaauguucccuauug

SEQ ID NO: 36333 - RNA, 19 nt, Homo sapiens
  misc_RNA (1)...(19): siRNA sense strand
ucaccgagaucuacgaguu

SEQ ID NO: 36334 - RNA, 19 nt, Homo sapiens
  misc_RNA (1)...(19): siRNA sense strand
gcccaaagauggcaagagu

SEQ ID NO: 36335 - RNA, 19 nt, Homo sapiens
  misc_RNA (1)...(19): siRNA sense strand
gaucuacgaguuccauaaa

SEQ ID NO: 36336 - RNA, 19 nt, Homo sapiens
  misc_RNA (1)...(19): siRNA sense strand
gcucgagggugaagcuguu

SEQ ID NO: 36337 - RNA, 19 nt, Homo sapiens
  misc_RNA (1)...(19): siRNA sense strand
gcgccgaccucauccugaa

SEQ ID NO: 36338 - RNA, 19 nt, Homo sapiens
  misc_RNA (1)...(19): siRNA sense strand
gcuggugggucaucaggaa

SEQ ID NO: 36339 - RNA, 19 nt, Homo sapiens
  misc_RNA (1)...(19): siRNA sense strand
gcaagaguaccgcgacaga

SEQ ID NO: 36340 - RNA, 19 nt, Homo sapiens
  misc_RNA (1)...(19): siRNA sense strand
aagaaauguucccuauuga

SEQ ID NO: 36341 - RNA, 19 nt, Homo sapiens
  misc_RNA (1)...(19): siRNA sense strand
cauacuugaugcccaaaga

SEQ ID NO: 36342 - RNA, 19 nt, Homo sapiens
  misc_RNA (1)...(19): siRNA sense strand
ccaaagauggcaagaguac

SEQ ID NO: 36343 - RNA, 19 nt, Homo sapiens
  misc_RNA (1)...(19): siRNA sense strand
guacauguuccuggugaaa

SEQ ID NO: 36344 - RNA, 19 nt, Homo sapiens
  misc_RNA (1)...(19): siRNA sense strand
ccaucauccugcagacgua

SEQ ID NO: 36345 - RNA, 19 nt, Homo sapiens
  misc_RNA (1)...(19): siRNA sense strand
acauguuccuggugaaaug

SEQ ID NO: 36346 - RNA, 19 nt, Homo sapiens
  misc_RNA (1)...(19): siRNA sense strand
gcuacuuuccguccaugua

SEQ ID NO: 36347 - RNA, 19 nt, Homo sapiens
  misc_RNA (1)...(19): siRNA sense strand
cgaguuccauaaaaccuua

SEQ ID NO: 36348 - RNA, 19 nt, Homo sapiens
  misc_RNA (1)...(19): siRNA sense strand
ucaaggugcgcccugauga

SEQ ID NO: 36349 - RNA, 19 nt, Homo sapiens
  misc_RNA (1)...(19): siRNA sense strand
ccagccagcacuaugugua

SEQ ID NO: 36350 - RNA, 19 nt, Homo sapiens
  misc_RNA (1)...(19): siRNA sense strand
ucaugagccugcccaccaa

SEQ ID NO: 36351 - RNA, 19 nt, Homo sapiens
  misc_RNA (1)...(19): siRNA sense strand
gcacacuuaccgaguacug

SEQ ID NO: 36352 - RNA, 19 nt, Homo sapiens
  misc_RNA (1)...(19): siRNA sense strand
guacccagccagcacuaug

SEQ ID NO: 36353 - RNA, 19 nt, Homo sapiens
  misc_RNA (1)...(19): siRNA sense strand
gagaucuacgaguuccaua

SEQ ID NO: 36354 - RNA, 19 nt, Homo sapiens
  misc_RNA (1)...(19): siRNA sense strand
agggcacacuuaccgagua

SEQ ID NO: 36355 - RNA, 19 nt, Homo sapiens
  misc_RNA (1)...(19): siRNA sense strand
gugaagcuguugaggucau

SEQ ID NO: 36356 - RNA, 19 nt, Homo sapiens
  misc_RNA (1)...(19): siRNA sense strand
gagagcgguuggugguucu

SEQ ID NO: 36357 - RNA, 19 nt, Homo sapiens
  misc_RNA (1)...(19): siRNA sense strand
gccagagacauacuugaug

SEQ ID NO: 36358 - RNA, 19 nt, Homo sapiens
  misc_RNA (1)...(19): siRNA sense strand
gggcacacuuaccgaguac

SEQ ID NO: 36359 - RNA, 19 nt, Homo sapiens
  misc_RNA (1)...(19): siRNA sense strand
cuguugaggucauucacaa

SEQ ID NO: 36360 - RNA, 19 nt, Homo sapiens
  misc_RNA (1)...(19): siRNA sense strand
ggcgaucaauccagagaac

SEQ ID NO: 36361 - RNA, 19 nt, Homo sapiens
  misc_RNA (1)...(19): siRNA sense strand
ggugggucaucaggaaaga

SEQ ID NO: 36362 - RNA, 19 nt, Homo sapiens
  misc_RNA (1)...(19): siRNA sense strand
agccauacgucgccaucaa

SEQ ID NO: 36363 - RNA, 19 nt, Homo sapiens
  misc_RNA (1)...(19): siRNA sense strand
ugaagcuguugaggucauu

SEQ ID NO: 36364 - RNA, 19 nt, Homo sapiens
  misc_RNA (1)...(19): siRNA sense strand
ccauguaccugcaaaaguc

SEQ ID NO: 36365 - RNA, 19 nt, Homo sapiens
  misc_RNA (1)...(19): siRNA sense strand
ggaaccagcugauagacua

SEQ ID NO: 36366 - RNA, 19 nt, Homo sapiens
  misc_RNA (1)...(19): siRNA sense strand
caacagaaccucagcuuaa

SEQ ID NO: 36367 - RNA, 19 nt, Homo sapiens
  misc_RNA (1)...(19): siRNA sense strand
gagaaggccuuuaccagaa

SEQ ID NO: 36368 - RNA, 19 nt, Homo sapiens
  misc_RNA (1)...(19): siRNA sense strand
gaccaaggcuuuccagaug

SEQ ID NO: 36369 - RNA, 19 nt, Homo sapiens
  misc_RNA (1)...(19): siRNA sense strand
uaucaaaggugaaugaaga

SEQ ID NO: 36370 - RNA, 19 nt, Homo sapiens
  misc_RNA (1)...(19): siRNA sense strand
ccugugagguguuauauaa

SEQ ID NO: 36371 - RNA, 19 nt, Homo sapiens
  misc_RNA (1)...(19): siRNA sense strand
ggaaagcacucggagagaa

SEQ ID NO: 36372 - RNA, 19 nt, Homo sapiens
  misc_RNA (1)...(19): siRNA sense strand
ggaagcagaagcuauauga

SEQ ID NO: 36373 - RNA, 19 nt, Homo sapiens
  misc_RNA (1)...(19): siRNA sense strand
gaacauugucuuugucuug

SEQ ID NO: 36374 - RNA, 19 nt, Homo sapiens
  misc_RNA (1)...(19): siRNA sense strand
uggaggcacucuucaguua

SEQ ID NO: 36375 - RNA, 19 nt, Homo sapiens
  misc_RNA (1)...(19): siRNA sense strand
gaagugaagcucaguguuc

SEQ ID NO: 36376 - RNA, 19 nt, Homo sapiens
  misc_RNA (1)...(19): siRNA sense strand
cagaggaccuggaguuuca

SEQ ID NO: 36377 - RNA, 19 nt, Homo sapiens
  misc_RNA (1)...(19): siRNA sense strand
ccacgagcaugaagucuga

SEQ ID NO: 36378 - RNA, 19 nt, Homo sapiens
  misc_RNA (1)...(19): siRNA sense strand
ugaagaagggcaaugauaa

SEQ ID NO: 36379 - RNA, 19 nt, Homo sapiens
  misc_RNA (1)...(19): siRNA sense strand
gaagaacaguuagcauugg

SEQ ID NO: 36380 - RNA, 19 nt, Homo sapiens
  misc_RNA (1)...(19): siRNA sense strand
cggauuugcuucaacauug

SEQ ID NO: 36381 - RNA, 19 nt, Homo sapiens
  misc_RNA (1)...(19): siRNA sense strand
ggcaguggcuuacuuccaa

SEQ ID NO: 36382 - RNA, 19 nt, Homo sapiens
  misc_RNA (1)...(19): siRNA sense strand
gaggcacucuucaguuaug

SEQ ID NO: 36383 - RNA, 19 nt, Homo sapiens
  misc_RNA (1)...(19): siRNA sense strand
gaacacagugggugaccaa

SEQ ID NO: 36384 - RNA, 19 nt, Homo sapiens
  misc_RNA (1)...(19): siRNA sense strand
caagaaggaggaauggaaa

SEQ ID NO: 36385 - RNA, 19 nt, Homo sapiens
  misc_RNA (1)...(19): siRNA sense strand
ucaaggugcacuacaagua

SEQ ID NO: 36386 - RNA, 19 nt, Homo sapiens
  misc_RNA (1)...(19): siRNA sense strand
ccaagaaggaggaauggaa

SEQ ID NO: 36387 - RNA, 19 nt, Homo sapiens
  misc_RNA (1)...(19): siRNA sense strand
aagaagagcuccaggucau

SEQ ID NO: 36388 - RNA, 19 nt, Homo sapiens
  misc_RNA (1)...(19): siRNA sense strand
uaagaaaggcagccaagug

SEQ ID NO: 36389 - RNA, 19 nt, Homo sapiens
  misc_RNA (1)...(19): siRNA sense strand
ccaaggcuuuccagaugaa

SEQ ID NO: 36390 - RNA, 19 nt, Homo sapiens
  misc_RNA (1)...(19): siRNA sense strand
cagggaacauugucuuugu

SEQ ID NO: 36391 - RNA, 19 nt, Homo sapiens
  misc_RNA (1)...(19): siRNA sense strand
acaaggcgauggagugugu

SEQ ID NO: 36392 - RNA, 19 nt, Homo sapiens
  misc_RNA (1)...(19): siRNA sense strand
aaaggugaaugaagaaugg

SEQ ID NO: 36393 - RNA, 19 nt, Homo sapiens
  misc_RNA (1)...(19): siRNA sense strand
gccuuuaccagaagcauua

SEQ ID NO: 36394 - RNA, 19 nt, Homo sapiens
  misc_RNA (1)...(19): siRNA sense strand
cuaauaaccagacaacaga

SEQ ID NO: 36395 - RNA, 19 nt, Homo sapiens
  misc_RNA (1)...(19): siRNA sense strand
aagaagagccuaaggaagu

SEQ ID NO: 36396 - RNA, 19 nt, Homo sapiens
  misc_RNA (1)...(19): siRNA sense strand
ugaagaacaguuagcauug

SEQ ID NO: 36397 - RNA, 19 nt, Homo sapiens
  misc_RNA (1)...(19): siRNA sense strand
uuaaagaagccuugauuca

SEQ ID NO: 36398 - RNA, 19 nt, Homo sapiens
  misc_RNA (1)...(19): siRNA sense strand
gaagaagggcaaugauaac

SEQ ID NO: 36399 - RNA, 19 nt, Homo sapiens
  misc_RNA (1)...(19): siRNA sense strand
caucugugguggaucaaga

SEQ ID NO: 36400 - RNA, 19 nt, Homo sapiens
  misc_RNA (1)...(19): siRNA sense strand
gagggaugcucuacuacca

SEQ ID NO: 36401 - RNA, 19 nt, Homo sapiens
  misc_RNA (1)...(19): siRNA sense strand
gaaccucagcuuaagaaag

SEQ ID NO: 36402 - RNA, 19 nt, Homo sapiens
  misc_RNA (1)...(19): siRNA sense strand
gagggaaccagcugauaga

SEQ ID NO: 36403 - RNA, 19 nt, Homo sapiens
  misc_RNA (1)...(19): siRNA sense strand
aacgagggaugcucuacua

SEQ ID NO: 36404 - RNA, 19 nt, Homo sapiens
  misc_RNA (1)...(19): siRNA sense strand
gaaugaagaauggcuggaa

SEQ ID NO: 36405 - RNA, 19 nt, Homo sapiens
  misc_RNA (1)...(19): siRNA sense strand
gaacccaaggaaagugaaa

SEQ ID NO: 36406 - RNA, 19 nt, Homo sapiens
  misc_RNA (1)...(19): siRNA sense strand
ggcaagcuguuucgaccaa

SEQ ID NO: 36407 - RNA, 19 nt, Homo sapiens
  misc_RNA (1)...(19): siRNA sense strand
ggaacauugucuuugucuu

SEQ ID NO: 36408 - RNA, 19 nt, Homo sapiens
  misc_RNA (1)...(19): siRNA sense strand
gcaacuacagauuuggaaa

SEQ ID NO: 36409 - RNA, 19 nt, Homo sapiens
  misc_RNA (1)...(19): siRNA sense strand
gcauguacacuauccugaa

SEQ ID NO: 36410 - RNA, 19 nt, Homo sapiens
  misc_RNA (1)...(19): siRNA sense strand
caaguacacgguagucaug

SEQ ID NO: 36411 - RNA, 19 nt, Homo sapiens
  misc_RNA (1)...(19): siRNA sense strand
gggccacggucauguucaa

SEQ ID NO: 36412 - RNA, 19 nt, Homo sapiens
  misc_RNA (1)...(19): siRNA sense strand
caaaggugaaugaagaaug

SEQ ID NO: 36413 - RNA, 19 nt, Homo sapiens
  misc_RNA (1)...(19): siRNA sense strand
gcuaauaaccagacaacag

SEQ ID NO: 36414 - RNA, 19 nt, Homo sapiens
  misc_RNA (1)...(19): siRNA sense strand
gcauuggccacgagcauga

SEQ ID NO: 36415 - RNA, 19 nt, Homo sapiens
  misc_RNA (1)...(19): siRNA sense strand
gaaagcacucggagagaag

SEQ ID NO: 36416 - RNA, 19 nt, Homo sapiens
  misc_RNA (1)...(19): siRNA sense strand
cagaugaacccaaggaaag

SEQ ID NO: 36417 - RNA, 19 nt, Homo sapiens
  misc_RNA (1)...(19): siRNA sense strand
ccagaugaacccaaggaaa

SEQ ID NO: 36418 - RNA, 19 nt, Homo sapiens
  misc_RNA (1)...(19): siRNA sense strand
gccaucagccucuggaaug

SEQ ID NO: 36419 - RNA, 19 nt, Homo sapiens
  misc_RNA (1)...(19): siRNA sense strand
cagaagacagcaugaagga

SEQ ID NO: 36420 - RNA, 19 nt, Homo sapiens
  misc_RNA (1)...(19): siRNA sense strand
acacuauccugaagaacau

SEQ ID NO: 36421 - RNA, 19 nt, Homo sapiens
  misc_RNA (1)...(19): siRNA sense strand
cagaaccucagcuuaagaa

SEQ ID NO: 36422 - RNA, 19 nt, Homo sapiens
  misc_RNA (1)...(19): siRNA sense strand
ggauuugcuucaacauugg

SEQ ID NO: 36423 - RNA, 19 nt, Homo sapiens
  misc_RNA (1)...(19): siRNA sense strand
ggaagugaagcucaguguu

SEQ ID NO: 36424 - RNA, 19 nt, Homo sapiens
  misc_RNA (1)...(19): siRNA sense strand
ucaccaggccagaaacaaa

SEQ ID NO: 36425 - RNA, 19 nt, Homo sapiens
  misc_RNA (1)...(19): siRNA sense strand
uaaagaagccuugauucag

SEQ ID NO: 36426 - RNA, 19 nt, Homo sapiens
  misc_RNA (1)...(19): siRNA sense strand
ccaucagccucuggaauga

SEQ ID NO: 36427 - RNA, 19 nt, Homo sapiens
  misc_RNA (1)...(19): siRNA sense strand
aaccucagcuuaagaaagg

SEQ ID NO: 36428 - RNA, 19 nt, Homo sapiens
  misc_RNA (1)...(19): siRNA sense strand
gcagagaaggccuuuacca

SEQ ID NO: 36429 - RNA, 19 nt, Homo sapiens
  misc_RNA (1)...(19): siRNA sense strand
gacaguuucucuggguuug

SEQ ID NO: 36430 - RNA, 19 nt, Homo sapiens
  misc_RNA (1)...(19): siRNA sense strand
caagcuguuucgaccaaau

SEQ ID NO: 36431 - RNA, 19 nt, Homo sapiens
  misc_RNA (1)...(19): siRNA sense strand
gcaagcuguuucgaccaaa

SEQ ID NO: 36432 - RNA, 19 nt, Homo sapiens
  misc_RNA (1)...(19): siRNA sense strand
ucaagcuguuugccuguga

SEQ ID NO: 36433 - RNA, 19 nt, Homo sapiens
  misc_RNA (1)...(19): siRNA sense strand
acaacagaaccucagcuua

SEQ ID NO: 36434 - RNA, 19 nt, Homo sapiens
  misc_RNA (1)...(19): siRNA sense strand
uggcaucugugguggauca

SEQ ID NO: 36435 - RNA, 19 nt, Homo sapiens
  misc_RNA (1)...(19): siRNA sense strand
cugaagaacaguuagcauu

SEQ ID NO: 36436 - RNA, 19 nt, Homo sapiens
  misc_RNA (1)...(19): siRNA sense strand
cugcgcaacuacagauuug

SEQ ID NO: 36437 - RNA, 19 nt, Homo sapiens
  misc_RNA (1)...(19): siRNA sense strand
uguacacuauccugaagaa

SEQ ID NO: 36438 - RNA, 19 nt, Homo sapiens
  misc_RNA (1)...(19): siRNA sense strand
uugaagaagggcaaugaua

SEQ ID NO: 36439 - RNA, 19 nt, Homo sapiens
  misc_RNA (1)...(19): siRNA sense strand
ggucaugccagggaacauu

SEQ ID NO: 36440 - RNA, 19 nt, Homo sapiens
  misc_RNA (1)...(19): siRNA sense strand
gacaacagaaccucagcuu

SEQ ID NO: 36441 - RNA, 19 nt, Homo sapiens
  misc_RNA (1)...(19): siRNA sense strand
caucccagcuccuccuagu

SEQ ID NO: 36442 - RNA, 19 nt, Homo sapiens
  misc_RNA (1)...(19): siRNA sense strand
gaucuucagggcucuggaa

SEQ ID NO: 36443 - RNA, 19 nt, Homo sapiens
  misc_RNA (1)...(19): siRNA sense strand
caacuacagauuuggaaag

SEQ ID NO: 36444 - RNA, 19 nt, Homo sapiens
  misc_RNA (1)...(19): siRNA sense strand
uaauccugguguuaucaaa

SEQ ID NO: 36445 - RNA, 19 nt, Homo sapiens
  misc_RNA (1)...(19): siRNA sense strand
cauguacacuauccugaag

SEQ ID NO: 36446 - RNA, 19 nt, Homo sapiens
  misc_RNA (1)...(19): siRNA sense strand
ccuuaaagaagccuugauu

SEQ ID NO: 36447 - RNA, 19 nt, Homo sapiens
  misc_RNA (1)...(19): siRNA sense strand
ggaggcacucuucaguuau

SEQ ID NO: 36448 - RNA, 19 nt, Homo sapiens
  misc_RNA (1)...(19): siRNA sense strand
cgagggaaccagcugauag

SEQ ID NO: 36449 - RNA, 19 nt, Homo sapiens
  misc_RNA (1)...(19): siRNA sense strand
gcccagacauuccaaaauc

SEQ ID NO: 36450 - RNA, 19 nt, Homo sapiens
  misc_RNA (1)...(19): siRNA sense strand
gaagacugcgcaacuacag

SEQ ID NO: 36451 - RNA, 19 nt, Homo sapiens
  misc_RNA (1)...(19): siRNA sense strand
agaagagccuaaggaagug

SEQ ID NO: 36452 - RNA, 19 nt, Homo sapiens
  misc_RNA (1)...(19): siRNA sense strand
aacauugucuuugucuuga

SEQ ID NO: 36453 - RNA, 19 nt, Homo sapiens
  misc_RNA (1)...(19): siRNA sense strand
gcauuaaccgagacaagca

SEQ ID NO: 36454 - RNA, 19 nt, Homo sapiens
  misc_RNA (1)...(19): siRNA sense strand
ugaccaaggcuuuccagau

SEQ ID NO: 36455 - RNA, 19 nt, Homo sapiens
  misc_RNA (1)...(19): siRNA sense strand
gcugucaccaggccagaaa

SEQ ID NO: 36456 - RNA, 19 nt, Homo sapiens
  misc_RNA (1)...(19): siRNA sense strand
ggccaagaaggauuaccua

SEQ ID NO: 36457 - RNA, 19 nt, Homo sapiens
  misc_RNA (1)...(19): siRNA sense strand
gaagaacaugacugaagca

SEQ ID NO: 36458 - RNA, 19 nt, Homo sapiens
  misc_RNA (1)...(19): siRNA sense strand
uaacugggccacggucaug

SEQ ID NO: 36459 - RNA, 19 nt, Homo sapiens
  misc_RNA (1)...(19): siRNA sense strand
gcucaccgugugcuauuug

SEQ ID NO: 36460 - RNA, 19 nt, Homo sapiens
  misc_RNA (1)...(19): siRNA sense strand
gcacucggagagaagucua

SEQ ID NO: 36461 - RNA, 19 nt, Homo sapiens
  misc_RNA (1)...(19): siRNA sense strand
caaggugcacuacaaguac

SEQ ID NO: 36462 - RNA, 19 nt, Homo sapiens
  misc_RNA (1)...(19): siRNA sense strand
cacucaaggugcacuacaa

SEQ ID NO: 36463 - RNA, 19 nt, Homo sapiens
  misc_RNA (1)...(19): siRNA sense strand
ccagggaacauugucuuug

SEQ ID NO: 36464 - RNA, 19 nt, Homo sapiens
  misc_RNA (1)...(19): siRNA sense strand
gccagggaacauugucuuu

SEQ ID NO: 36465 - RNA, 19 nt, Homo sapiens
  misc_RNA (1)...(19): siRNA sense strand
acggacagcucauucauaa

SEQ ID NO: 36466 - RNA, 19 nt, Homo sapiens
  misc_RNA (1)...(19): siRNA sense strand
uguacuagcugcauccuuu

SEQ ID NO: 36467 - RNA, 19 nt, Homo sapiens
  misc_RNA (1)...(19): siRNA sense strand
guucagcacuguccucaag

SEQ ID NO: 36468 - RNA, 19 nt, Homo sapiens
  misc_RNA (1)...(19): siRNA sense strand
gcaugaggcaccacuaugu

SEQ ID NO: 36469 - RNA, 19 nt, Homo sapiens
  misc_RNA (1)...(19): siRNA sense strand
gguacauccucuccuguca

SEQ ID NO: 36470 - RNA, 19 nt, Homo sapiens
  misc_RNA (1)...(19): siRNA sense strand
gagaaaacauguacuagcu

SEQ ID NO: 36471 - RNA, 19 nt, Homo sapiens
  misc_RNA (1)...(19): siRNA sense strand
ggagauacagacaguaaaa

SEQ ID NO: 36472 - RNA, 19 nt, Homo sapiens
  misc_RNA (1)...(19): siRNA sense strand
cuauguggauucuaucagu

SEQ ID NO: 36473 - RNA, 19 nt, Homo sapiens
  misc_RNA (1)...(19): siRNA sense strand
gacccucgacgcugcauga

SEQ ID NO: 36474 - RNA, 19 nt, Homo sapiens
  misc_RNA (1)...(19): siRNA sense strand
ugggagauacagacaguaa

SEQ ID NO: 36475 - RNA, 19 nt, Homo sapiens
  misc_RNA (1)...(19): siRNA sense strand
caaguguagcucaaagaug

SEQ ID NO: 36476 - RNA, 19 nt, Homo sapiens
  misc_RNA (1)...(19): siRNA sense strand
aaugggagauacagacagu

SEQ ID NO: 36477 - RNA, 19 nt, Homo sapiens
  misc_RNA (1)...(19): siRNA sense strand
gggagauacagacaguaaa

SEQ ID NO: 36478 - RNA, 19 nt, Homo sapiens
  misc_RNA (1)...(19): siRNA sense strand
ucagucacccauuguacaa

SEQ ID NO: 36479 - RNA, 19 nt, Homo sapiens
  misc_RNA (1)...(19): siRNA sense strand
ggugauaaugggagauaca

SEQ ID NO: 36480 - RNA, 19 nt, Homo sapiens
  misc_RNA (1)...(19): siRNA sense strand
ucacugcgaggaaugcaau

SEQ ID NO: 36481 - RNA, 19 nt, Homo sapiens
  misc_RNA (1)...(19): siRNA sense strand
ucagcacuguccucaagca

SEQ ID NO: 36482 - RNA, 19 nt, Homo sapiens
  misc_RNA (1)...(19): siRNA sense strand
gagcaaggaugaugguguu

SEQ ID NO: 36483 - RNA, 19 nt, Homo sapiens
  misc_RNA (1)...(19): siRNA sense strand
gaaagagacaguccagcua

SEQ ID NO: 36484 - RNA, 19 nt, Homo sapiens
  misc_RNA (1)...(19): siRNA sense strand
cggaaucucucccuggaua

SEQ ID NO: 36485 - RNA, 19 nt, Homo sapiens
  misc_RNA (1)...(19): siRNA sense strand
cgauggagcuucagcaaug

SEQ ID NO: 36486 - RNA, 19 nt, Homo sapiens
  misc_RNA (1)...(19): siRNA sense strand
ggaccgggcucugguauuc

SEQ ID NO: 36487 - RNA, 19 nt, Homo sapiens
  misc_RNA (1)...(19): siRNA sense strand
ugagacaggaguaguauuu

SEQ ID NO: 36488 - RNA, 19 nt, Homo sapiens
  misc_RNA (1)...(19): siRNA sense strand
ggagacagaucggcucagu

SEQ ID NO: 36489 - RNA, 19 nt, Homo sapiens
  misc_RNA (1)...(19): siRNA sense strand
gaauuguccuccgcagcua

SEQ ID NO: 36490 - RNA, 19 nt, Homo sapiens
  misc_RNA (1)...(19): siRNA sense strand
cuacagcguucauugucaa

SEQ ID NO: 36491 - RNA, 19 nt, Homo sapiens
  misc_RNA (1)...(19): siRNA sense strand
gagcaucuccguggccaaa

SEQ ID NO: 36492 - RNA, 19 nt, Homo sapiens
  misc_RNA (1)...(19): siRNA sense strand
ggcagcacauggucuccua

SEQ ID NO: 36493 - RNA, 19 nt, Homo sapiens
  misc_RNA (1)...(19): siRNA sense strand
cauccagaguuccgaguga

SEQ ID NO: 36494 - RNA, 19 nt, Homo sapiens
  misc_RNA (1)...(19): siRNA sense strand
cagguggccucuaccaugu

SEQ ID NO: 36495 - RNA, 19 nt, Homo sapiens
  misc_RNA (1)...(19): siRNA sense strand
gcagcuaugaugccuguga

SEQ ID NO: 36496 - RNA, 19 nt, Homo sapiens
  misc_RNA (1)...(19): siRNA sense strand
gaaaccagaacaacuacca

SEQ ID NO: 36497 - RNA, 19 nt, Homo sapiens
  misc_RNA (1)...(19): siRNA sense strand
gcacucuucucgccuuugc

SEQ ID NO: 36498 - RNA, 19 nt, Homo sapiens
  misc_RNA (1)...(19): siRNA sense strand
ccacugccacugccgaauu

SEQ ID NO: 36499 - RNA, 19 nt, Homo sapiens
  misc_RNA (1)...(19): siRNA sense strand
gaaucucucccuggauauu

SEQ ID NO: 36500 - RNA, 19 nt, Homo sapiens
  misc_RNA (1)...(19): siRNA sense strand
gguggccucuaccauguug

SEQ ID NO: 36501 - RNA, 19 nt, Homo sapiens
  misc_RNA (1)...(19): siRNA sense strand
gcucagucgucaucaaugc

SEQ ID NO: 36502 - RNA, 19 nt, Homo sapiens
  misc_RNA (1)...(19): siRNA sense strand
agaaaggccggaaccacua

SEQ ID NO: 36503 - RNA, 19 nt, Homo sapiens
  misc_RNA (1)...(19): siRNA sense strand
ccucagcgaugaucauggu

SEQ ID NO: 36504 - RNA, 19 nt, Homo sapiens
  misc_RNA (1)...(19): siRNA sense strand
cggaaccacuacacagaga

SEQ ID NO: 36505 - RNA, 19 nt, Homo sapiens
  misc_RNA (1)...(19): siRNA sense strand
agacaggaguaguauuucu

SEQ ID NO: 36506 - RNA, 19 nt, Homo sapiens
  misc_RNA (1)...(19): siRNA sense strand
aaagagacaguccagcuau

SEQ ID NO: 36507 - RNA, 19 nt, Homo sapiens
  misc_RNA (1)...(19): siRNA sense strand
guagugagcgauguugaga

SEQ ID NO: 36508 - RNA, 19 nt, Homo sapiens
  misc_RNA (1)...(19): siRNA sense strand
gcuccggcauugucuucuu

SEQ ID NO: 36509 - RNA, 19 nt, Homo sapiens
  misc_RNA (1)...(19): siRNA sense strand
gcaaggaugaugguguuuc

SEQ ID NO: 36510 - RNA, 19 nt, Homo sapiens
  misc_RNA (1)...(19): siRNA sense strand
gggcacucuucucgccuuu

SEQ ID NO: 36511 - RNA, 19 nt, Homo sapiens
  misc_RNA (1)...(19): siRNA sense strand
gguccaaggcugagaacga

SEQ ID NO: 36512 - RNA, 19 nt, Homo sapiens
  misc_RNA (1)...(19): siRNA sense strand
cccgaaaccagaacaacua

SEQ ID NO: 36513 - RNA, 19 nt, Homo sapiens
  misc_RNA (1)...(19): siRNA sense strand
gacaggaguaguauuucuu

SEQ ID NO: 36514 - RNA, 19 nt, Homo sapiens
  misc_RNA (1)...(19): siRNA sense strand
acaggaguaguauuucuuu

SEQ ID NO: 36515 - RNA, 19 nt, Homo sapiens
  misc_RNA (1)...(19): siRNA sense strand
gcuguaggguuuggguguu

SEQ ID NO: 36516 - RNA, 19 nt, Homo sapiens
  misc_RNA (1)...(19): siRNA sense strand
gaugaaugccagcccuaug

SEQ ID NO: 36517 - RNA, 19 nt, Homo sapiens
  misc_RNA (1)...(19): siRNA sense strand
ggaguaguauuucuuuucu

SEQ ID NO: 36518 - RNA, 19 nt, Homo sapiens
  misc_RNA (1)...(19): siRNA sense strand
gcauugucuucuucuccaa

SEQ ID NO: 36519 - RNA, 19 nt, Homo sapiens
  misc_RNA (1)...(19): siRNA sense strand
ggucagcccaagcaggaaa

SEQ ID NO: 36520 - RNA, 19 nt, Homo sapiens
  misc_RNA (1)...(19): siRNA sense strand
ugaugccugugauacacua

SEQ ID NO: 36521 - RNA, 19 nt, Homo sapiens
  misc_RNA (1)...(19): siRNA sense strand
ccuacagcguucauuguca

SEQ ID NO: 36522 - RNA, 19 nt, Homo sapiens
  misc_RNA (1)...(19): siRNA sense strand
caaggaugaugguguuucc

SEQ ID NO: 36523 - RNA, 19 nt, Homo sapiens
  misc_RNA (1)...(19): siRNA sense strand
gggcaguagugagcgaugu

SEQ ID NO: 36524 - RNA, 19 nt, Homo sapiens
  misc_RNA (1)...(19): siRNA sense strand
gaaaggccggaaccacuac

SEQ ID NO: 36525 - RNA, 19 nt, Homo sapiens
  misc_RNA (1)...(19): siRNA sense strand
aagagacaguccagcuaug

SEQ ID NO: 36526 - RNA, 19 nt, Homo sapiens
  misc_RNA (1)...(19): siRNA sense strand
gucaccagcuccggcauug

SEQ ID NO: 36527 - RNA, 19 nt, Homo sapiens
  misc_RNA (1)...(19): siRNA sense strand
cagcuaugaugccugugau

SEQ ID NO: 36528 - RNA, 19 nt, Homo sapiens
  misc_RNA (1)...(19): siRNA sense strand
cacugccacugccgaauug

SEQ ID NO: 36529 - RNA, 19 nt, Homo sapiens
  misc_RNA (1)...(19): siRNA sense strand
cgucaucaaugcccgaaac

SEQ ID NO: 36530 - RNA, 19 nt, Homo sapiens
  misc_RNA (1)...(19): siRNA sense strand
agugagcgauguugagaca

SEQ ID NO: 36531 - RNA, 19 nt, Homo sapiens
  misc_RNA (1)...(19): siRNA sense strand
gcaguagugagcgauguug

SEQ ID NO: 36532 - RNA, 19 nt, Homo sapiens
  misc_RNA (1)...(19): siRNA sense strand
gggacggagucuucugucu

SEQ ID NO: 36533 - RNA, 19 nt, Homo sapiens
  misc_RNA (1)...(19): siRNA sense strand
ggaaucucucccuggauau

SEQ ID NO: 36534 - RNA, 19 nt, Homo sapiens
  misc_RNA (1)...(19): siRNA sense strand
ucuacguccuguaugagaa

SEQ ID NO: 36535 - RNA, 19 nt, Homo sapiens
  misc_RNA (1)...(19): siRNA sense strand
gauggagcuucagcaaugg

SEQ ID NO: 36536 - RNA, 19 nt, Homo sapiens
  misc_RNA (1)...(19): siRNA sense strand
ucaaugcccgaaaccagaa

SEQ ID NO: 36537 - RNA, 19 nt, Homo sapiens
  misc_RNA (1)...(19): siRNA sense strand
gccggaaccacuacacaga

SEQ ID NO: 36538 - RNA, 19 nt, Homo sapiens
  misc_RNA (1)...(19): siRNA sense strand
cccagcacauccagaguuc

SEQ ID NO: 36539 - RNA, 19 nt, Homo sapiens
  misc_RNA (1)...(19): siRNA sense strand
gagacaggaguaguauuuc

SEQ ID NO: 36540 - RNA, 19 nt, Homo sapiens
  misc_RNA (1)...(19): siRNA sense strand
gcgauggagcuucagcaau

SEQ ID NO: 36541 - RNA, 19 nt, Homo sapiens
  misc_RNA (1)...(19): siRNA sense strand
guauggagcaaggaugaug

SEQ ID NO: 36542 - RNA, 19 nt, Homo sapiens
  misc_RNA (1)...(19): siRNA sense strand
gcuaugaugccugugauac

SEQ ID NO: 36543 - RNA, 19 nt, Homo sapiens
  misc_RNA (1)...(19): siRNA sense strand
ggaauaagaugguagaaua

SEQ ID NO: 36544 - RNA, 19 nt, Homo sapiens
  misc_RNA (1)...(19): siRNA sense strand
gauagaagcuacaguaaua

SEQ ID NO: 36545 - RNA, 19 nt, Homo sapiens
  misc_RNA (1)...(19): siRNA sense strand
gaagauaacucugucauuu

SEQ ID NO: 36546 - RNA, 19 nt, Homo sapiens
  misc_RNA (1)...(19): siRNA sense strand
caacaaagcuaauccuuaa

SEQ ID NO: 36547 - RNA, 19 nt, Homo sapiens
  misc_RNA (1)...(19): siRNA sense strand
gaagaaaucugccuaguag

SEQ ID NO: 36548 - RNA, 19 nt, Homo sapiens
  misc_RNA (1)...(19): siRNA sense strand
gaacaaaccauagcuauaa

SEQ ID NO: 36549 - RNA, 19 nt, Homo sapiens
  misc_RNA (1)...(19): siRNA sense strand
gaauucaccuucuacauuu

SEQ ID NO: 36550 - RNA, 19 nt, Homo sapiens
  misc_RNA (1)...(19): siRNA sense strand
ggaauuaacuguuuguuca

SEQ ID NO: 36551 - RNA, 19 nt, Homo sapiens
  misc_RNA (1)...(19): siRNA sense strand
gaaacuggcugagcacaua

SEQ ID NO: 36552 - RNA, 19 nt, Homo sapiens
  misc_RNA (1)...(19): siRNA sense strand
gcaaacagguggcaggaaa

SEQ ID NO: 36553 - RNA, 19 nt, Homo sapiens
  misc_RNA (1)...(19): siRNA sense strand
caucuuaccugcaaaguuu

SEQ ID NO: 36554 - RNA, 19 nt, Homo sapiens
  misc_RNA (1)...(19): siRNA sense strand
agaacuagcucaaagauuu

SEQ ID NO: 36555 - RNA, 19 nt, Homo sapiens
  misc_RNA (1)...(19): siRNA sense strand
gagauuagcucacaaaugc

SEQ ID NO: 36556 - RNA, 19 nt, Homo sapiens
  misc_RNA (1)...(19): siRNA sense strand
gacaagagcuacauuuaug

SEQ ID NO: 36557 - RNA, 19 nt, Homo sapiens
  misc_RNA (1)...(19): siRNA sense strand
gcagugaaguugaagauga

SEQ ID NO: 36558 - RNA, 19 nt, Homo sapiens
  misc_RNA (1)...(19): siRNA sense strand
caacuucaaugcagucuuu

SEQ ID NO: 36559 - RNA, 19 nt, Homo sapiens
  misc_RNA (1)...(19): siRNA sense strand
aaacagacuuucucucuaa

SEQ ID NO: 36560 - RNA, 19 nt, Homo sapiens
  misc_RNA (1)...(19): siRNA sense strand
ccaaagacgugguugauga

SEQ ID NO: 36561 - RNA, 19 nt, Homo sapiens
  misc_RNA (1)...(19): siRNA sense strand
ggaaauaccagucaaaugu

SEQ ID NO: 36562 - RNA, 19 nt, Homo sapiens
  misc_RNA (1)...(19): siRNA sense strand
cagauaauccguauucuua

SEQ ID NO: 36563 - RNA, 19 nt, Homo sapiens
  misc_RNA (1)...(19): siRNA sense strand
ggacagaacuagcucaaag

SEQ ID NO: 36564 - RNA, 19 nt, Homo sapiens
  misc_RNA (1)...(19): siRNA sense strand
gaaggaaacagcauuuaaa

SEQ ID NO: 36565 - RNA, 19 nt, Homo sapiens
  misc_RNA (1)...(19): siRNA sense strand
gcaagaacagucagaauuu

SEQ ID NO: 36566 - RNA, 19 nt, Homo sapiens
  misc_RNA (1)...(19): siRNA sense strand
gaaaggggcuugaaguuaa

SEQ ID NO: 36567 - RNA, 19 nt, Homo sapiens
  misc_RNA (1)...(19): siRNA sense strand
uaaagaagguugcgcaguu

SEQ ID NO: 36568 - RNA, 19 nt, Homo sapiens
  misc_RNA (1)...(19): siRNA sense strand
ggaggaggauccauagauu

SEQ ID NO: 36569 - RNA, 19 nt, Homo sapiens
  misc_RNA (1)...(19): siRNA sense strand
cgaagucgcugcagccuaa

SEQ ID NO: 36570 - RNA, 19 nt, Homo sapiens
  misc_RNA (1)...(19): siRNA sense strand
gaagagaccaagcaaguuu

SEQ ID NO: 36571 - RNA, 19 nt, Homo sapiens
  misc_RNA (1)...(19): siRNA sense strand
gcaaguacuuacaucaauu

SEQ ID NO: 36572 - RNA, 19 nt, Homo sapiens
  misc_RNA (1)...(19): siRNA sense strand
caaauguucucuuggauga

SEQ ID NO: 36573 - RNA, 19 nt, Homo sapiens
  misc_RNA (1)...(19): siRNA sense strand
ggaaggaugugcaaaauaa

SEQ ID NO: 36574 - RNA, 19 nt, Homo sapiens
  misc_RNA (1)...(19): siRNA sense strand
gcaguuagcaguuauaaau

SEQ ID NO: 36575 - RNA, 19 nt, Homo sapiens
  misc_RNA (1)...(19): siRNA sense strand
ccacaaugcucucaagcua

SEQ ID NO: 36576 - RNA, 19 nt, Homo sapiens
  misc_RNA (1)...(19): siRNA sense strand
ucauaaagcuguuggaaga

SEQ ID NO: 36577 - RNA, 19 nt, Homo sapiens
  misc_RNA (1)...(19): siRNA sense strand
gaacauaugcggccuuuca

SEQ ID NO: 36578 - RNA, 19 nt, Homo sapiens
  misc_RNA (1)...(19): siRNA sense strand
caacaugacuggcuuccuu

SEQ ID NO: 36579 - RNA, 19 nt, Homo sapiens
  misc_RNA (1)...(19): siRNA sense strand
gcaacaaagcuaauccuua

SEQ ID NO: 36580 - RNA, 19 nt, Homo sapiens
  misc_RNA (1)...(19): siRNA sense strand
cgaaauauguuuggugaaa

SEQ ID NO: 36581 - RNA, 19 nt, Homo sapiens
  misc_RNA (1)...(19): siRNA sense strand
caaauacggaccaauguua

SEQ ID NO: 36582 - RNA, 19 nt, Homo sapiens
  misc_RNA (1)...(19): siRNA sense strand
caacaacacccucuuuauu

SEQ ID NO: 36583 - RNA, 19 nt, Homo sapiens
  misc_RNA (1)...(19): siRNA sense strand
gcugauauaccaugucuua

SEQ ID NO: 36584 - RNA, 19 nt, Homo sapiens
  misc_RNA (1)...(19): siRNA sense strand
gcacauagagcaugaacaa

SEQ ID NO: 36585 - RNA, 19 nt, Homo sapiens
  misc_RNA (1)...(19): siRNA sense strand
gcaaagccauaugaaauug

SEQ ID NO: 36586 - RNA, 19 nt, Homo sapiens
  misc_RNA (1)...(19): siRNA sense strand
cuacaaaucauucuccuua

SEQ ID NO: 36587 - RNA, 19 nt, Homo sapiens
  misc_RNA (1)...(19): siRNA sense strand
gaacacacauaccaaaguc

SEQ ID NO: 36588 - RNA, 19 nt, Homo sapiens
  misc_RNA (1)...(19): siRNA sense strand
aaacgaaacugugucaauu

SEQ ID NO: 36589 - RNA, 19 nt, Homo sapiens
  misc_RNA (1)...(19): siRNA sense strand
ugaagaacuugcuagauaa

SEQ ID NO: 36590 - RNA, 19 nt, Homo sapiens
  misc_RNA (1)...(19): siRNA sense strand
gaacaagcaacaaagcuaa

SEQ ID NO: 36591 - RNA, 19 nt, Homo sapiens
  misc_RNA (1)...(19): siRNA sense strand
gccaagagaugaaauuuag

SEQ ID NO: 36592 - RNA, 19 nt, Homo sapiens
  misc_RNA (1)...(19): siRNA sense strand
aaacacaaauuccagacua

SEQ ID NO: 36593 - RNA, 19 nt, Homo sapiens
  misc_RNA (1)...(19): siRNA sense strand
ccaaacaucuuaccugcaa

SEQ ID NO: 36594 - RNA, 19 nt, Homo sapiens
  misc_RNA (1)...(19): siRNA sense strand
caacugcucuggaacaugu

SEQ ID NO: 36595 - RNA, 19 nt, Homo sapiens
  misc_RNA (1)...(19): siRNA sense strand
uaucuuguguccagaaaua

SEQ ID NO: 36596 - RNA, 19 nt, Homo sapiens
  misc_RNA (1)...(19): siRNA sense strand
caaggaaugucuaaucaau

SEQ ID NO: 36597 - RNA, 19 nt, Homo sapiens
  misc_RNA (1)...(19): siRNA sense strand
gacagaaagugcugcaauu

SEQ ID NO: 36598 - RNA, 19 nt, Homo sapiens
  misc_RNA (1)...(19): siRNA sense strand
uuacagaucugcuugaugu

SEQ ID NO: 36599 - RNA, 19 nt, Homo sapiens
  misc_RNA (1)...(19): siRNA sense strand
gcaagaaauuaacuaguca

SEQ ID NO: 36600 - RNA, 19 nt, Homo sapiens
  misc_RNA (1)...(19): siRNA sense strand
gaaacuaauucaugcagau

SEQ ID NO: 36601 - RNA, 19 nt, Homo sapiens
  misc_RNA (1)...(19): siRNA sense strand
augaagaacuugcuagaua

SEQ ID NO: 36602 - RNA, 19 nt, Homo sapiens
  misc_RNA (1)...(19): siRNA sense strand
gaucggcuguuguccuuaa

SEQ ID NO: 36603 - RNA, 19 nt, Homo sapiens
  misc_RNA (1)...(19): siRNA sense strand
gacauucuguuucaaggua

SEQ ID NO: 36604 - RNA, 19 nt, Homo sapiens
  misc_RNA (1)...(19): siRNA sense strand
gaaggcagcucugaacauc

SEQ ID NO: 36605 - RNA, 19 nt, Homo sapiens
  misc_RNA (1)...(19): siRNA sense strand
gaaauggaaucagggauca

SEQ ID NO: 36606 - RNA, 19 nt, Homo sapiens
  misc_RNA (1)...(19): siRNA sense strand
gaacagcaucggugcagua

SEQ ID NO: 36607 - RNA, 19 nt, Homo sapiens
  misc_RNA (1)...(19): siRNA sense strand
ggaacuggguagaaaauua

SEQ ID NO: 36608 - RNA, 19 nt, Homo sapiens
  misc_RNA (1)...(19): siRNA sense strand
uaacaaugaccaucaauga

SEQ ID NO: 36609 - RNA, 19 nt, Homo sapiens
  misc_RNA (1)...(19): siRNA sense strand
ugucaaaucuaguucguuu

SEQ ID NO: 36610 - RNA, 19 nt, Homo sapiens
  misc_RNA (1)...(19): siRNA sense strand
caugaagaauuacuacgua

SEQ ID NO: 36611 - RNA, 19 nt, Homo sapiens
  misc_RNA (1)...(19): siRNA sense strand
gaugugauauuccuucuag

SEQ ID NO: 36612 - RNA, 19 nt, Homo sapiens
  misc_RNA (1)...(19): siRNA sense strand
uaagauugaugcuguguau

SEQ ID NO: 36613 - RNA, 19 nt, Homo sapiens
  misc_RNA (1)...(19): siRNA sense strand
gcugaaagcaccaaacgua

SEQ ID NO: 36614 - RNA, 19 nt, Homo sapiens
  misc_RNA (1)...(19): siRNA sense strand
cguaaggguucuaugauuu

SEQ ID NO: 36615 - RNA, 19 nt, Homo sapiens
  misc_RNA (1)...(19): siRNA sense strand
ugaaucaaauguucucuug

SEQ ID NO: 36616 - RNA, 19 nt, Homo sapiens
  misc_RNA (1)...(19): siRNA sense strand
ggacucaauuucaacucua

SEQ ID NO: 36617 - RNA, 19 nt, Homo sapiens
  misc_RNA (1)...(19): siRNA sense strand
ggacuggucauuaauauca

SEQ ID NO: 36618 - RNA, 19 nt, Homo sapiens
  misc_RNA (1)...(19): siRNA sense strand
caacagggaucauaaagcu

SEQ ID NO: 36619 - RNA, 19 nt, Homo sapiens
  misc_RNA (1)...(19): siRNA sense strand
aaagaagguugcgcaguua

SEQ ID NO: 36620 - RNA, 19 nt, Homo sapiens
  misc_RNA (1)...(19): siRNA sense strand
gaacaaaaccugcauacuu

SEQ ID NO: 36621 - RNA, 19 nt, Homo sapiens
  misc_RNA (1)...(19): siRNA sense strand
ccacguuguuacuuucuua

SEQ ID NO: 36622 - RNA, 19 nt, Homo sapiens
  misc_RNA (1)...(19): siRNA sense strand
gcacagaauuugacacacu

SEQ ID NO: 36623 - RNA, 19 nt, Homo sapiens
  misc_RNA (1)...(19): siRNA sense strand
gaacaucuagggcaagcua

SEQ ID NO: 36624 - RNA, 19 nt, Homo sapiens
  misc_RNA (1)...(19): siRNA sense strand
agaaggagaugguguggaa

SEQ ID NO: 36625 - RNA, 19 nt, Homo sapiens
  misc_RNA (1)...(19): siRNA sense strand
cacauggacuggucauuaa

SEQ ID NO: 36626 - RNA, 19 nt, Homo sapiens
  misc_RNA (1)...(19): siRNA sense strand
guacugagcacaacaagga

SEQ ID NO: 36627 - RNA, 19 nt, Homo sapiens
  misc_RNA (1)...(19): siRNA sense strand
cgacaaagaguuacugcua

SEQ ID NO: 36628 - RNA, 19 nt, Homo sapiens
  misc_RNA (1)...(19): siRNA sense strand
gcaaucagucuuucuaaau

SEQ ID NO: 36629 - RNA, 19 nt, Homo sapiens
  misc_RNA (1)...(19): siRNA sense strand
gcaacagcuuggccaguaa

SEQ ID NO: 36630 - RNA, 19 nt, Homo sapiens
  misc_RNA (1)...(19): siRNA sense strand
gaagccaaaucacaguuau

SEQ ID NO: 36631 - RNA, 19 nt, Homo sapiens
  misc_RNA (1)...(19): siRNA sense strand
gacaagaagcuauaaguau

SEQ ID NO: 36632 - RNA, 19 nt, Homo sapiens
  misc_RNA (1)...(19): siRNA sense strand
uaaagcagauaauccguau

SEQ ID NO: 36633 - RNA, 19 nt, Homo sapiens
  misc_RNA (1)...(19): siRNA sense strand
gacaaagaguuacugcuau

SEQ ID NO: 36634 - RNA, 19 nt, Homo sapiens
  misc_RNA (1)...(19): siRNA sense strand
gaguguauuucuggauuua

SEQ ID NO: 36635 - RNA, 19 nt, Homo sapiens
  misc_RNA (1)...(19): siRNA sense strand
caaucagucuuucuaaaug

SEQ ID NO: 36636 - RNA, 19 nt, Homo sapiens
  misc_RNA (1)...(19): siRNA sense strand
gaaauuguaguggaccuua

SEQ ID NO: 36637 - RNA, 19 nt, Homo sapiens
  misc_RNA (1)...(19): siRNA sense strand
ggcaacagcuuggccagua

SEQ ID NO: 36638 - RNA, 19 nt, Homo sapiens
  misc_RNA (1)...(19): siRNA sense strand
ccacaaggaucuccagaca

SEQ ID NO: 36639 - RNA, 19 nt, Homo sapiens
  misc_RNA (1)...(19): siRNA sense strand
ggaccaauguuaaggaucu

SEQ ID NO: 36640 - RNA, 19 nt, Homo sapiens
  misc_RNA (1)...(19): siRNA sense strand
caaagcuaauccuuaacua

SEQ ID NO: 36641 - RNA, 19 nt, Homo sapiens
  misc_RNA (1)...(19): siRNA sense strand
uagcagaaacugauuauga

SEQ ID NO: 36642 - RNA, 19 nt, Homo sapiens
  misc_RNA (1)...(19): siRNA sense strand
gauccuuuauuacgaauug

SEQ ID NO: 36643 - RNA, 19 nt, Homo sapiens
  misc_RNA (1)...(19): siRNA sense strand
ggaagcaacccaagacguu

SEQ ID NO: 36644 - RNA, 19 nt, Homo sapiens
  misc_RNA (1)...(19): siRNA sense strand
agaagcagauuuuagauga

SEQ ID NO: 36645 - RNA, 19 nt, Homo sapiens
  misc_RNA (1)...(19): siRNA sense strand
gaagcagauuuuagaugaa

SEQ ID NO: 36646 - RNA, 19 nt, Homo sapiens
  misc_RNA (1)...(19): siRNA sense strand
caccauggacgccgagaug

SEQ ID NO: 36647 - RNA, 19 nt, Homo sapiens
  misc_RNA (1)...(19): siRNA sense strand
acgccgagauggaguucaa

SEQ ID NO: 36648 - RNA, 19 nt, Homo sapiens
  misc_RNA (1)...(19): siRNA sense strand
gccaucgcuucccgcauga

SEQ ID NO: 36649 - RNA, 19 nt, Homo sapiens
  misc_RNA (1)...(19): siRNA sense strand
gccgagauggaguucaauu

SEQ ID NO: 36650 - RNA, 19 nt, Homo sapiens
  misc_RNA (1)...(19): siRNA sense strand
cgagauggaguucaauugc

SEQ ID NO: 36651 - RNA, 19 nt, Homo sapiens
  misc_RNA (1)...(19): siRNA sense strand
ugaggaucgucaccaugga

SEQ ID NO: 36652 - RNA, 19 nt, Homo sapiens
  misc_RNA (1)...(19): siRNA sense strand
ccgagauggaguucaauug

SEQ ID NO: 36653 - RNA, 19 nt, Homo sapiens
  misc_RNA (1)...(19): siRNA sense strand
ggaagcaacccaagacguu

SEQ ID NO: 36654 - RNA, 19 nt, Homo sapiens
  misc_RNA (1)...(19): siRNA sense strand
agaagcagauuuuagauga

SEQ ID NO: 36655 - RNA, 19 nt, Homo sapiens
  misc_RNA (1)...(19): siRNA sense strand
gaagcagauuuuagaugaa

SEQ ID NO: 36656 - RNA, 19 nt, Homo sapiens
  misc_RNA (1)...(19): siRNA sense strand
caccauggacgccgagaug

SEQ ID NO: 36657 - RNA, 19 nt, Homo sapiens
  misc_RNA (1)...(19): siRNA sense strand
acgccgagauggaguucaa

SEQ ID NO: 36658 - RNA, 19 nt, Homo sapiens
  misc_RNA (1)...(19): siRNA sense strand
gccaucgcuucccgcauga

SEQ ID NO: 36659 - RNA, 19 nt, Homo sapiens
  misc_RNA (1)...(19): siRNA sense strand
gccgagauggaguucaauu

SEQ ID NO: 36660 - RNA, 19 nt, Homo sapiens
  misc_RNA (1)...(19): siRNA sense strand
cgagauggaguucaauugc

SEQ ID NO: 36661 - RNA, 19 nt, Homo sapiens
  misc_RNA (1)...(19): siRNA sense strand
ugaggaucgucaccaugga

SEQ ID NO: 36662 - RNA, 19 nt, Homo sapiens
  misc_RNA (1)...(19): siRNA sense strand
ccgagauggaguucaauug

SEQ ID NO: 36663 - RNA, 19 nt, Homo sapiens
  misc_RNA (1)...(19): siRNA sense strand
ggaagcaacccaagacguu

SEQ ID NO: 36664 - RNA, 19 nt, Homo sapiens
  misc_RNA (1)...(19): siRNA sense strand
agaagcagauuuuagauga

SEQ ID NO: 36665 - RNA, 19 nt, Homo sapiens
  misc_RNA (1)...(19): siRNA sense strand
gaagcagauuuuagaugaa

SEQ ID NO: 36666 - RNA, 19 nt, Homo sapiens
  misc_RNA (1)...(19): siRNA sense strand
caccauggacgccgagaug

SEQ ID NO: 36667 - RNA, 19 nt, Homo sapiens
  misc_RNA (1)...(19): siRNA sense strand
acgccgagauggaguucaa

SEQ ID NO: 36668 - RNA, 19 nt, Homo sapiens
  misc_RNA (1)...(19): siRNA sense strand
gccaucgcuucccgcauga

SEQ ID NO: 36669 - RNA, 19 nt, Homo sapiens
  misc_RNA (1)...(19): siRNA sense strand
gccgagauggaguucaauu

SEQ ID NO: 36670 - RNA, 19 nt, Homo sapiens
  misc_RNA (1)...(19): siRNA sense strand
cgagauggaguucaauugc

SEQ ID NO: 36671 - RNA, 19 nt, Homo sapiens
  misc_RNA (1)...(19): siRNA sense strand
ugaggaucgucaccaugga

SEQ ID NO: 36672 - RNA, 19 nt, Homo sapiens
  misc_RNA (1)...(19): siRNA sense strand
ccgagauggaguucaauug

SEQ ID NO: 36673 - RNA, 19 nt, Homo sapiens
  misc_RNA (1)...(19): siRNA sense strand
ggaagcaacccaagacguu

SEQ ID NO: 36674 - RNA, 19 nt, Homo sapiens
  misc_RNA (1)...(19): siRNA sense strand
caccauggacgccgagaug

SEQ ID NO: 36675 - RNA, 19 nt, Homo sapiens
  misc_RNA (1)...(19): siRNA sense strand
acgccgagauggaguucaa

SEQ ID NO: 36676 - RNA, 19 nt, Homo sapiens
  misc_RNA (1)...(19): siRNA sense strand
gccaucgcuucccgcauga

SEQ ID NO: 36677 - RNA, 19 nt, Homo sapiens
  misc_RNA (1)...(19): siRNA sense strand
gccgagauggaguucaauu

SEQ ID NO: 36678 - RNA, 19 nt, Homo sapiens
  misc_RNA (1)...(19): siRNA sense strand
cgagauggaguucaauugc

SEQ ID NO: 36679 - RNA, 19 nt, Homo sapiens
  misc_RNA (1)...(19): siRNA sense strand
ugaggaucgucaccaugga

SEQ ID NO: 36680 - RNA, 19 nt, Homo sapiens
  misc_RNA (1)...(19): siRNA sense strand
ccgagauggaguucaauug

SEQ ID NO: 36681 - RNA, 19 nt, Homo sapiens
  misc_RNA (1)...(19): siRNA sense strand
ggaagcaacccaagacguu

SEQ ID NO: 36682 - RNA, 19 nt, Homo sapiens
  misc_RNA (1)...(19): siRNA sense strand
caccauggacgccgagaug

SEQ ID NO: 36683 - RNA, 19 nt, Homo sapiens
  misc_RNA (1)...(19): siRNA sense strand
acgccgagauggaguucaa

SEQ ID NO: 36684 - RNA, 19 nt, Homo sapiens
  misc_RNA (1)...(19): siRNA sense strand
gccaucgcuucccgcauga

SEQ ID NO: 36685 - RNA, 19 nt, Homo sapiens
  misc_RNA (1)...(19): siRNA sense strand
gccgagauggaguucaauu

SEQ ID NO: 36686 - RNA, 19 nt, Homo sapiens
  misc_RNA (1)...(19): siRNA sense strand
cgagauggaguucaauugc

SEQ ID NO: 36687 - RNA, 19 nt, Homo sapiens
  misc_RNA (1)...(19): siRNA sense strand
ugaggaucgucaccaugga

SEQ ID NO: 36688 - RNA, 19 nt, Homo sapiens
  misc_RNA (1)...(19): siRNA sense strand
ccgagauggaguucaauug

SEQ ID NO: 36689 - RNA, 19 nt, Homo sapiens
  misc_RNA (1)...(19): siRNA sense strand
ggaagcaacccaagacguu

SEQ ID NO: 36690 - RNA, 19 nt, Homo sapiens
  misc_RNA (1)...(19): siRNA sense strand
agaagcagauuuuagauga

SEQ ID NO: 36691 - RNA, 19 nt, Homo sapiens
  misc_RNA (1)...(19): siRNA sense strand
gaagcagauuuuagaugaa

SEQ ID NO: 36692 - RNA, 19 nt, Homo sapiens
  misc_RNA (1)...(19): siRNA sense strand
caccauggacgccgagaug

SEQ ID NO: 36693 - RNA, 19 nt, Homo sapiens
  misc_RNA (1)...(19): siRNA sense strand
acgccgagauggaguucaa

SEQ ID NO: 36694 - RNA, 19 nt, Homo sapiens
  misc_RNA (1)...(19): siRNA sense strand
gccaucgcuucccgcauga

SEQ ID NO: 36695 - RNA, 19 nt, Homo sapiens
  misc_RNA (1)...(19): siRNA sense strand
gccgagauggaguucaauu

SEQ ID NO: 36696 - RNA, 19 nt, Homo sapiens
  misc_RNA (1)...(19): siRNA sense strand
cgagauggaguucaauugc

SEQ ID NO: 36697 - RNA, 19 nt, Homo sapiens
  misc_RNA (1)...(19): siRNA sense strand
ugaggaucgucaccaugga

SEQ ID NO: 36698 - RNA, 19 nt, Homo sapiens
  misc_RNA (1)...(19): siRNA sense strand
ccgagauggaguucaauug

SEQ ID NO: 36699 - RNA, 19 nt, Homo sapiens
  misc_RNA (1)...(19): siRNA sense strand
ggaagcaacccaagacguu

SEQ ID NO: 36700 - RNA, 19 nt, Homo sapiens
  misc_RNA (1)...(19): siRNA sense strand
agaagcagauuuuagauga

SEQ ID NO: 36701 - RNA, 19 nt, Homo sapiens
  misc_RNA (1)...(19): siRNA sense strand
gaagcagauuuuagaugaa

SEQ ID NO: 36702 - RNA, 19 nt, Homo sapiens
  misc_RNA (1)...(19): siRNA sense strand
caccauggacgccgagaug

SEQ ID NO: 36703 - RNA, 19 nt, Homo sapiens
  misc_RNA (1)...(19): siRNA sense strand
acgccgagauggaguucaa

SEQ ID NO: 36704 - RNA, 19 nt, Homo sapiens
  misc_RNA (1)...(19): siRNA sense strand
gccaucgcuucccgcauga

SEQ ID NO: 36705 - RNA, 19 nt, Homo sapiens
  misc_RNA (1)...(19): siRNA sense strand
gccgagauggaguucaauu

SEQ ID NO: 36706 - RNA, 19 nt, Homo sapiens
  misc_RNA (1)...(19): siRNA sense strand
cgagauggaguucaauugc

SEQ ID NO: 36707 - RNA, 19 nt, Homo sapiens
  misc_RNA (1)...(19): siRNA sense strand
ugaggaucgucaccaugga

SEQ ID NO: 36708 - RNA, 19 nt, Homo sapiens
  misc_RNA (1)...(19): siRNA sense strand
ccgagauggaguucaauug

SEQ ID NO: 36709 - RNA, 19 nt, Homo sapiens
  misc_RNA (1)...(19): siRNA sense strand
ggaagcaacccaagacguu

SEQ ID NO: 36710 - RNA, 19 nt, Homo sapiens
  misc_RNA (1)...(19): siRNA sense strand
agaagcagauuuuagauga

SEQ ID NO: 36711 - RNA, 19 nt, Homo sapiens
  misc_RNA (1)...(19): siRNA sense strand
gaagcagauuuuagaugaa

SEQ ID NO: 36712 - RNA, 19 nt, Homo sapiens
  misc_RNA (1)...(19): siRNA sense strand
caccauggacgccgagaug

SEQ ID NO: 36713 - RNA, 19 nt, Homo sapiens
  misc_RNA (1)...(19): siRNA sense strand
acgccgagauggaguucaa

SEQ ID NO: 36714 - RNA, 19 nt, Homo sapiens
  misc_RNA (1)...(19): siRNA sense strand
gccaucgcuucccgcauga

SEQ ID NO: 36715 - RNA, 19 nt, Homo sapiens
  misc_RNA (1)...(19): siRNA sense strand
gccgagauggaguucaauu

SEQ ID NO: 36716 - RNA, 19 nt, Homo sapiens
  misc_RNA (1)...(19): siRNA sense strand
cgagauggaguucaauugc

SEQ ID NO: 36717 - RNA, 19 nt, Homo sapiens
  misc_RNA (1)...(19): siRNA sense strand
ugaggaucgucaccaugga

SEQ ID NO: 36718 - RNA, 19 nt, Homo sapiens
  misc_RNA (1)...(19): siRNA sense strand
ccgagauggaguucaauug

SEQ ID NO: 36719 - RNA, 19 nt, Homo sapiens
  misc_RNA (1)...(19): siRNA sense strand
ggaagcaacccaagacguu

SEQ ID NO: 36720 - RNA, 19 nt, Homo sapiens
  misc_RNA (1)...(19): siRNA sense strand
agaagcagauuuuagauga

SEQ ID NO: 36721 - RNA, 19 nt, Homo sapiens
  misc_RNA (1)...(19): siRNA sense strand
gaagcagauuuuagaugaa

SEQ ID NO: 36722 - RNA, 19 nt, Homo sapiens
  misc_RNA (1)...(19): siRNA sense strand
caccauggacgccgagaug

SEQ ID NO: 36723 - RNA, 19 nt, Homo sapiens
  misc_RNA (1)...(19): siRNA sense strand
acgccgagauggaguucaa

SEQ ID NO: 36724 - RNA, 19 nt, Homo sapiens
  misc_RNA (1)...(19): siRNA sense strand
gccaucgcuucccgcauga

SEQ ID NO: 36725 - RNA, 19 nt, Homo sapiens
  misc_RNA (1)...(19): siRNA sense strand
gccgagauggaguucaauu

SEQ ID NO: 36726 - RNA, 19 nt, Homo sapiens
  misc_RNA (1)...(19): siRNA sense strand
cgagauggaguucaauugc

SEQ ID NO: 36727 - RNA, 19 nt, Homo sapiens
  misc_RNA (1)...(19): siRNA sense strand
ugaggaucgucaccaugga

SEQ ID NO: 36728 - RNA, 19 nt, Homo sapiens
  misc_RNA (1)...(19): siRNA sense strand
ccgagauggaguucaauug

SEQ ID NO: 36729 - RNA, 19 nt, Homo sapiens
  misc_RNA (1)...(19): siRNA sense strand
ggaagcaacccaagacguu

SEQ ID NO: 36730 - RNA, 19 nt, Homo sapiens
  misc_RNA (1)...(19): siRNA sense strand
agaagcagauuuuagauga

SEQ ID NO: 36731 - RNA, 19 nt, Homo sapiens
  misc_RNA (1)...(19): siRNA sense strand
gaagcagauuuuagaugaa

SEQ ID NO: 36732 - RNA, 19 nt, Homo sapiens
  misc_RNA (1)...(19): siRNA sense strand
caccauggacgccgagaug

SEQ ID NO: 36733 - RNA, 19 nt, Homo sapiens
  misc_RNA (1)...(19): siRNA sense strand
acgccgagauggaguucaa

SEQ ID NO: 36734 - RNA, 19 nt, Homo sapiens
  misc_RNA (1)...(19): siRNA sense strand
gccaucgcuucccgcauga

SEQ ID NO: 36735 - RNA, 19 nt, Homo sapiens
  misc_RNA (1)...(19): siRNA sense strand
gccgagauggaguucaauu

SEQ ID NO: 36736 - RNA, 19 nt, Homo sapiens
  misc_RNA (1)...(19): siRNA sense strand
cgagauggaguucaauugc

SEQ ID NO: 36737 - RNA, 19 nt, Homo sapiens
  misc_RNA (1)...(19): siRNA sense strand
ugaggaucgucaccaugga

SEQ ID NO: 36738 - RNA, 19 nt, Homo sapiens
  misc_RNA (1)...(19): siRNA sense strand
ccgagauggaguucaauug

SEQ ID NO: 36739 - RNA, 19 nt, Homo sapiens
  misc_RNA (1)...(19): siRNA sense strand
ggaagcaacccaagacguu

SEQ ID NO: 36740 - RNA, 19 nt, Homo sapiens
  misc_RNA (1)...(19): siRNA sense strand
agaagcagauuuuagauga

SEQ ID NO: 36741 - RNA, 19 nt, Homo sapiens
  misc_RNA (1)...(19): siRNA sense strand
gaagcagauuuuagaugaa

SEQ ID NO: 36742 - RNA, 19 nt, Homo sapiens
  misc_RNA (1)...(19): siRNA sense strand
caccauggacgccgagaug

SEQ ID NO: 36743 - RNA, 19 nt, Homo sapiens
  misc_RNA (1)...(19): siRNA sense strand
acgccgagauggaguucaa

SEQ ID NO: 36744 - RNA, 19 nt, Homo sapiens
  misc_RNA (1)...(19): siRNA sense strand
gccaucgcuucccgcauga

SEQ ID NO: 36745 - RNA, 19 nt, Homo sapiens
  misc_RNA (1)...(19): siRNA sense strand
gccgagauggaguucaauu

SEQ ID NO: 36746 - RNA, 19 nt, Homo sapiens
  misc_RNA (1)...(19): siRNA sense strand
cgagauggaguucaauugc

SEQ ID NO: 36747 - RNA, 19 nt, Homo sapiens
  misc_RNA (1)...(19): siRNA sense strand
ugaggaucgucaccaugga

SEQ ID NO: 36748 - RNA, 19 nt, Homo sapiens
  misc_RNA (1)...(19): siRNA sense strand
ccgagauggaguucaauug

SEQ ID NO: 36749 - RNA, 19 nt, Homo sapiens
  misc_RNA (1)...(19): siRNA sense strand
ggaagcaacccaagacguu

SEQ ID NO: 36750 - RNA, 19 nt, Homo sapiens
  misc_RNA (1)...(19): siRNA sense strand
agaagcagauuuuagauga

SEQ ID NO: 36751 - RNA, 19 nt, Homo sapiens
  misc_RNA (1)...(19): siRNA sense strand
gaagcagauuuuagaugaa

SEQ ID NO: 36752 - RNA, 19 nt, Homo sapiens
  misc_RNA (1)...(19): siRNA sense strand
caccauggacgccgagaug

SEQ ID NO: 36753 - RNA, 19 nt, Homo sapiens
  misc_RNA (1)...(19): siRNA sense strand
acgccgagauggaguucaa

SEQ ID NO: 36754 - RNA, 19 nt, Homo sapiens
  misc_RNA (1)...(19): siRNA sense strand
gccaucgcuucccgcauga

SEQ ID NO: 36755 - RNA, 19 nt, Homo sapiens
  misc_RNA (1)...(19): siRNA sense strand
gccgagauggaguucaauu

SEQ ID NO: 36756 - RNA, 19 nt, Homo sapiens
  misc_RNA (1)...(19): siRNA sense strand
cgagauggaguucaauugc

SEQ ID NO: 36757 - RNA, 19 nt, Homo sapiens
  misc_RNA (1)...(19): siRNA sense strand
ugaggaucgucaccaugga

SEQ ID NO: 36758 - RNA, 19 nt, Homo sapiens
  misc_RNA (1)...(19): siRNA sense strand
ccgagauggaguucaauug

SEQ ID NO: 36759 - RNA, 19 nt, Homo sapiens
  misc_RNA (1)...(19): siRNA sense strand
ggaagcaacccaagacguu

SEQ ID NO: 36760 - RNA, 19 nt, Homo sapiens
  misc_RNA (1)...(19): siRNA sense strand
agaagcagauuuuagauga

SEQ ID NO: 36761 - RNA, 19 nt, Homo sapiens
  misc_RNA (1)...(19): siRNA sense strand
gaagcagauuuuagaugaa

SEQ ID NO: 36762 - RNA, 19 nt, Homo sapiens
  misc_RNA (1)...(19): siRNA sense strand
caccauggacgccgagaug

SEQ ID NO: 36763 - RNA, 19 nt, Homo sapiens
  misc_RNA (1)...(19): siRNA sense strand
acgccgagauggaguucaa

SEQ ID NO: 36764 - RNA, 19 nt, Homo sapiens
  misc_RNA (1)...(19): siRNA sense strand
gccaucgcuucccgcauga

SEQ ID NO: 36765 - RNA, 19 nt, Homo sapiens
  misc_RNA (1)...(19): siRNA sense strand
gccgagauggaguucaauu

SEQ ID NO: 36766 - RNA, 19 nt, Homo sapiens
  misc_RNA (1)...(19): siRNA sense strand
cgagauggaguucaauugc

SEQ ID NO: 36767 - RNA, 19 nt, Homo sapiens
  misc_RNA (1)...(19): siRNA sense strand
ugaggaucgucaccaugga

SEQ ID NO: 36768 - RNA, 19 nt, Homo sapiens
  misc_RNA (1)...(19): siRNA sense strand
ccgagauggaguucaauug

SEQ ID NO: 36769 - RNA, 19 nt, Homo sapiens
  misc_RNA (1)...(19): siRNA sense strand
caaguuggcaggaacauua

SEQ ID NO: 36770 - RNA, 19 nt, Homo sapiens
  misc_RNA (1)...(19): siRNA sense strand
gcucagaacuggaucuaug

SEQ ID NO: 36771 - RNA, 19 nt, Homo sapiens
  misc_RNA (1)...(19): siRNA sense strand
cugaggaacugguagauua

SEQ ID NO: 36772 - RNA, 19 nt, Homo sapiens
  misc_RNA (1)...(19): siRNA sense strand
gaacuggaucuaugaauga

SEQ ID NO: 36773 - RNA, 19 nt, Homo sapiens
  misc_RNA (1)...(19): siRNA sense strand
gagagauuaucaagcguuu

SEQ ID NO: 36774 - RNA, 19 nt, Homo sapiens
  misc_RNA (1)...(19): siRNA sense strand
gagaucggcuugugguuuc

SEQ ID NO: 36775 - RNA, 19 nt, Homo sapiens
  misc_RNA (1)...(19): siRNA sense strand
gaccauccguggagacuuc

SEQ ID NO: 36776 - RNA, 19 nt, Homo sapiens
  misc_RNA (1)...(19): siRNA sense strand
ggagaucggcuugugguuu

SEQ ID NO: 36777 - RNA, 19 nt, Homo sapiens
  misc_RNA (1)...(19): siRNA sense strand
ggagacuucugcauacaag

SEQ ID NO: 36778 - RNA, 19 nt, Homo sapiens
  misc_RNA (1)...(19): siRNA sense strand
gcauacaaguuggcaggaa

SEQ ID NO: 36779 - RNA, 19 nt, Homo sapiens
  misc_RNA (1)...(19): siRNA sense strand
agaacuggaucuaugaaug

SEQ ID NO: 36780 - RNA, 19 nt, Homo sapiens
  misc_RNA (1)...(19): siRNA sense strand
ggcaggaacauuauacaug

SEQ ID NO: 36781 - RNA, 19 nt, Homo sapiens
  misc_RNA (1)...(19): siRNA sense strand
agaaggagaucggcuugug

SEQ ID NO: 36782 - RNA, 19 nt, Homo sapiens
  misc_RNA (1)...(19): siRNA sense strand
ggucuugugggagagauua

SEQ ID NO: 36783 - RNA, 19 nt, Homo sapiens
  misc_RNA (1)...(19): siRNA sense strand
cauuauacauggcagugau

SEQ ID NO: 36784 - RNA, 19 nt, Homo sapiens
  misc_RNA (1)...(19): siRNA sense strand
guaccuucauugcgaucaa

SEQ ID NO: 36785 - RNA, 19 nt, Homo sapiens
  misc_RNA (1)...(19): siRNA sense strand
acacuacguugaccugaag

SEQ ID NO: 36786 - RNA, 19 nt, Homo sapiens
  misc_RNA (1)...(19): siRNA sense strand
ccguggagacuucugcaua

SEQ ID NO: 36787 - RNA, 19 nt, Homo sapiens
  misc_RNA (1)...(19): siRNA sense strand
cguggagacuucugcauac

SEQ ID NO: 36788 - RNA, 19 nt, Homo sapiens
  misc_RNA (1)...(19): siRNA sense strand
gagauuaucaagcguuuug

SEQ ID NO: 36789 - RNA, 19 nt, Homo sapiens
  misc_RNA (1)...(19): siRNA sense strand
ucucaaggaacacuacguu

SEQ ID NO: 36790 - RNA, 19 nt, Homo sapiens
  misc_RNA (1)...(19): siRNA sense strand
caaggaacacuacguugac

SEQ ID NO: 36791 - RNA, 19 nt, Homo sapiens
  misc_RNA (1)...(19): siRNA sense strand
ggugaaauacaugcacuca

SEQ ID NO: 36792 - RNA, 19 nt, Homo sapiens
  misc_RNA (1)...(19): siRNA sense strand
ccgccuuguuggucugaaa

SEQ ID NO: 36793 - RNA, 19 nt, Homo sapiens
  misc_RNA (1)...(19): siRNA sense strand
guggagacuucugcauaca

SEQ ID NO: 36794 - RNA, 19 nt, Homo sapiens
  misc_RNA (1)...(19): siRNA sense strand
aacacuacguugaccugaa

SEQ ID NO: 36795 - RNA, 19 nt, Homo sapiens
  misc_RNA (1)...(19): siRNA sense strand
aagaucuucucaaggaaca

SEQ ID NO: 36796 - RNA, 19 nt, Homo sapiens
  misc_RNA (1)...(19): siRNA sense strand
caaguuggcaggaacauua

SEQ ID NO: 36797 - RNA, 19 nt, Homo sapiens
  misc_RNA (1)...(19): siRNA sense strand
gcucagaacuggaucuaug

SEQ ID NO: 36798 - RNA, 19 nt, Homo sapiens
  misc_RNA (1)...(19): siRNA sense strand
cugaggaacugguagauua

SEQ ID NO: 36799 - RNA, 19 nt, Homo sapiens
  misc_RNA (1)...(19): siRNA sense strand
gaacuggaucuaugaauga

SEQ ID NO: 36800 - RNA, 19 nt, Homo sapiens
  misc_RNA (1)...(19): siRNA sense strand
gagagauuaucaagcguuu

SEQ ID NO: 36801 - RNA, 19 nt, Homo sapiens
  misc_RNA (1)...(19): siRNA sense strand
gagaucggcuugugguuuc

SEQ ID NO: 36802 - RNA, 19 nt, Homo sapiens
  misc_RNA (1)...(19): siRNA sense strand
gaccauccguggagacuuc

SEQ ID NO: 36803 - RNA, 19 nt, Homo sapiens
  misc_RNA (1)...(19): siRNA sense strand
gaaccauggccaacuguga

SEQ ID NO: 36804 - RNA, 19 nt, Homo sapiens
  misc_RNA (1)...(19): siRNA sense strand
ggagaucggcuugugguuu

SEQ ID NO: 36805 - RNA, 19 nt, Homo sapiens
  misc_RNA (1)...(19): siRNA sense strand
ggagacuucugcauacaag

SEQ ID NO: 36806 - RNA, 19 nt, Homo sapiens
  misc_RNA (1)...(19): siRNA sense strand
gcauacaaguuggcaggaa

SEQ ID NO: 36807 - RNA, 19 nt, Homo sapiens
  misc_RNA (1)...(19): siRNA sense strand
agaacuggaucuaugaaug

SEQ ID NO: 36808 - RNA, 19 nt, Homo sapiens
  misc_RNA (1)...(19): siRNA sense strand
ggcaggaacauuauacaug

SEQ ID NO: 36809 - RNA, 19 nt, Homo sapiens
  misc_RNA (1)...(19): siRNA sense strand
agaaggagaucggcuugug

SEQ ID NO: 36810 - RNA, 19 nt, Homo sapiens
  misc_RNA (1)...(19): siRNA sense strand
ggucuugugggagagauua

SEQ ID NO: 36811 - RNA, 19 nt, Homo sapiens
  misc_RNA (1)...(19): siRNA sense strand
cauuauacauggcagugau

SEQ ID NO: 36812 - RNA, 19 nt, Homo sapiens
  misc_RNA (1)...(19): siRNA sense strand
guaccuucauugcgaucaa

SEQ ID NO: 36813 - RNA, 19 nt, Homo sapiens
  misc_RNA (1)...(19): siRNA sense strand
acacuacguugaccugaag

SEQ ID NO: 36814 - RNA, 19 nt, Homo sapiens
  misc_RNA (1)...(19): siRNA sense strand
ccguggagacuucugcaua

SEQ ID NO: 36815 - RNA, 19 nt, Homo sapiens
  misc_RNA (1)...(19): siRNA sense strand
cguggagacuucugcauac

SEQ ID NO: 36816 - RNA, 19 nt, Homo sapiens
  misc_RNA (1)...(19): siRNA sense strand
gagauuaucaagcguuuug

SEQ ID NO: 36817 - RNA, 19 nt, Homo sapiens
  misc_RNA (1)...(19): siRNA sense strand
ucucaaggaacacuacguu

SEQ ID NO: 36818 - RNA, 19 nt, Homo sapiens
  misc_RNA (1)...(19): siRNA sense strand
caaggaacacuacguugac

SEQ ID NO: 36819 - RNA, 19 nt, Homo sapiens
  misc_RNA (1)...(19): siRNA sense strand
ggugaaauacaugcacuca

SEQ ID NO: 36820 - RNA, 19 nt, Homo sapiens
  misc_RNA (1)...(19): siRNA sense strand
ccgccuuguuggucugaaa

SEQ ID NO: 36821 - RNA, 19 nt, Homo sapiens
  misc_RNA (1)...(19): siRNA sense strand
guggagacuucugcauaca

SEQ ID NO: 36822 - RNA, 19 nt, Homo sapiens
  misc_RNA (1)...(19): siRNA sense strand
aacacuacguugaccugaa

SEQ ID NO: 36823 - RNA, 19 nt, Homo sapiens
  misc_RNA (1)...(19): siRNA sense strand
aagaucuucucaaggaaca

SEQ ID NO: 36824 - RNA, 19 nt, Homo sapiens
  misc_RNA (1)...(19): siRNA sense strand
gaagacagcucccacuacu

SEQ ID NO: 36825 - RNA, 19 nt, Homo sapiens
  misc_RNA (1)...(19): siRNA sense strand
guacugcgccgaccacuuu

SEQ ID NO: 36826 - RNA, 19 nt, Homo sapiens
  misc_RNA (1)...(19): siRNA sense strand
gcaccuggcugcccguuau

SEQ ID NO: 36827 - RNA, 19 nt, Homo sapiens
  misc_RNA (1)...(19): siRNA sense strand
ccacuucccuugucuguuc

SEQ ID NO: 36828 - RNA, 19 nt, Homo sapiens
  misc_RNA (1)...(19): siRNA sense strand
ggacguagcccaggagaga

SEQ ID NO: 36829 - RNA, 19 nt, Homo sapiens
  misc_RNA (1)...(19): siRNA sense strand
ggucagaauugugaaguga

SEQ ID NO: 36830 - RNA, 19 nt, Homo sapiens
  misc_RNA (1)...(19): siRNA sense strand
ccacgaggaugcuaucugu

SEQ ID NO: 36831 - RNA, 19 nt, Homo sapiens
  misc_RNA (1)...(19): siRNA sense strand
ggugugaacugcgaaguga

SEQ ID NO: 36832 - RNA, 19 nt, Homo sapiens
  misc_RNA (1)...(19): siRNA sense strand
gcaccugccucgagagcuu

SEQ ID NO: 36833 - RNA, 19 nt, Homo sapiens
  misc_RNA (1)...(19): siRNA sense strand
gcagucagaauaucgauga

SEQ ID NO: 36834 - RNA, 19 nt, Homo sapiens
  misc_RNA (1)...(19): siRNA sense strand
gcaacccgguguacgagaa

SEQ ID NO: 36835 - RNA, 19 nt, Homo sapiens
  misc_RNA (1)...(19): siRNA sense strand
gaacugcgaagugaacauu

SEQ ID NO: 36836 - RNA, 19 nt, Homo sapiens
  misc_RNA (1)...(19): siRNA sense strand
cuacaauggugauaacugu

SEQ ID NO: 36837 - RNA, 19 nt, Homo sapiens
  misc_RNA (1)...(19): siRNA sense strand
gcuccugccucccugguuu

SEQ ID NO: 36838 - RNA, 19 nt, Homo sapiens
  misc_RNA (1)...(19): siRNA sense strand
cgaaaccgcucuacagacu

SEQ ID NO: 36839 - RNA, 19 nt, Homo sapiens
  misc_RNA (1)...(19): siRNA sense strand
cgaccucacuuacgacugu

SEQ ID NO: 36840 - RNA, 19 nt, Homo sapiens
  misc_RNA (1)...(19): siRNA sense strand
uaguaaugcuggagauuga

SEQ ID NO: 36841 - RNA, 19 nt, Homo sapiens
  misc_RNA (1)...(19): siRNA sense strand
gugaucggcucgguaguaa

SEQ ID NO: 36842 - RNA, 19 nt, Homo sapiens
  misc_RNA (1)...(19): siRNA sense strand
aaaccgcucuacagacuug

SEQ ID NO: 36843 - RNA, 19 nt, Homo sapiens
  misc_RNA (1)...(19): siRNA sense strand
gagagcugcagucagaaua

SEQ ID NO: 36844 - RNA, 19 nt, Homo sapiens
  misc_RNA (1)...(19): siRNA sense strand
gaucggcucgguaguaaug

SEQ ID NO: 36845 - RNA, 19 nt, Homo sapiens
  misc_RNA (1)...(19): siRNA sense strand
agacuggccuccuguguca

SEQ ID NO: 36846 - RNA, 19 nt, Homo sapiens
  misc_RNA (1)...(19): siRNA sense strand
ggaagcccgugugcaaaug

SEQ ID NO: 36847 - RNA, 19 nt, Homo sapiens
  misc_RNA (1)...(19): siRNA sense strand
ccaagcggcuaaagguaga

SEQ ID NO: 36848 - RNA, 19 nt, Homo sapiens
  misc_RNA (1)...(19): siRNA sense strand
ggagguuuccguugccuuu

SEQ ID NO: 36849 - RNA, 19 nt, Homo sapiens
  misc_RNA (1)...(19): siRNA sense strand
caguucaccuguaucugua

SEQ ID NO: 36850 - RNA, 19 nt, Homo sapiens
  misc_RNA (1)...(19): siRNA sense strand
uggaugagcuugggaaauc

SEQ ID NO: 36851 - RNA, 19 nt, Homo sapiens
  misc_RNA (1)...(19): siRNA sense strand
cagggugucuuccagauuc

SEQ ID NO: 36852 - RNA, 19 nt, Homo sapiens
  misc_RNA (1)...(19): siRNA sense strand
gcaggaauggcgccaaaug

SEQ ID NO: 36853 - RNA, 19 nt, Homo sapiens
  misc_RNA (1)...(19): siRNA sense strand
gcaaggaccgagucaaugg

SEQ ID NO: 36854 - RNA, 19 nt, Homo sapiens
  misc_RNA (1)...(19): siRNA sense strand
ggagcccacugccaacaug

SEQ ID NO: 36855 - RNA, 19 nt, Homo sapiens
  misc_RNA (1)...(19): siRNA sense strand
gaccugccguggcuauaug

SEQ ID NO: 36856 - RNA, 19 nt, Homo sapiens
  misc_RNA (1)...(19): siRNA sense strand
cagacuggauggacacaga

SEQ ID NO: 36857 - RNA, 19 nt, Homo sapiens
  misc_RNA (1)...(19): siRNA sense strand
ccgcguggcuucuuucuac

SEQ ID NO: 36858 - RNA, 19 nt, Homo sapiens
  misc_RNA (1)...(19): siRNA sense strand
auaaggacaugcaggauag

SEQ ID NO: 36859 - RNA, 19 nt, Homo sapiens
  misc_RNA (1)...(19): siRNA sense strand
gccuagaccugguggacaa

SEQ ID NO: 36860 - RNA, 19 nt, Homo sapiens
  misc_RNA (1)...(19): siRNA sense strand
ggcaguguguggaugaaga

SEQ ID NO: 36861 - RNA, 19 nt, Homo sapiens
  misc_RNA (1)...(19): siRNA sense strand
aauaaggacaugcaggaua

SEQ ID NO: 36862 - RNA, 19 nt, Homo sapiens
  misc_RNA (1)...(19): siRNA sense strand
uggcauggaugucaaugug

SEQ ID NO: 36863 - RNA, 19 nt, Homo sapiens
  misc_RNA (1)...(19): siRNA sense strand
gcacuugcaacccggugua

SEQ ID NO: 36864 - RNA, 19 nt, Homo sapiens
  misc_RNA (1)...(19): siRNA sense strand
gguuugagggucagaauug

SEQ ID NO: 36865 - RNA, 19 nt, Homo sapiens
  misc_RNA (1)...(19): siRNA sense strand
ggugaucggcucgguagua

SEQ ID NO: 36866 - RNA, 19 nt, Homo sapiens
  misc_RNA (1)...(19): siRNA sense strand
gcuggcgccucuucaacaa

SEQ ID NO: 36867 - RNA, 19 nt, Homo sapiens
  misc_RNA (1)...(19): siRNA sense strand
gcccaacgccugccacaau

SEQ ID NO: 36868 - RNA, 19 nt, Homo sapiens
  misc_RNA (1)...(19): siRNA sense strand
cacaucagcuagcaucauc

SEQ ID NO: 36869 - RNA, 19 nt, Homo sapiens
  misc_RNA (1)...(19): siRNA sense strand
guaguaaugcuggagauug

SEQ ID NO: 36870 - RNA, 19 nt, Homo sapiens
  misc_RNA (1)...(19): siRNA sense strand
gagcugcagucagaauauc

SEQ ID NO: 36871 - RNA, 19 nt, Homo sapiens
  misc_RNA (1)...(19): siRNA sense strand
guacugguagccacuguga

SEQ ID NO: 36872 - RNA, 19 nt, Homo sapiens
  misc_RNA (1)...(19): siRNA sense strand
ccaguucaccuguaucugu

SEQ ID NO: 36873 - RNA, 19 nt, Homo sapiens
  misc_RNA (1)...(19): siRNA sense strand
uagagggcaugguggaaga

SEQ ID NO: 36874 - RNA, 19 nt, Homo sapiens
  misc_RNA (1)...(19): siRNA sense strand
gaccuucaccugucacugu

SEQ ID NO: 36875 - RNA, 19 nt, Homo sapiens
  misc_RNA (1)...(19): siRNA sense strand
acacuggcccuuccuguga

SEQ ID NO: 36876 - RNA, 19 nt, Homo sapiens
  misc_RNA (1)...(19): siRNA sense strand
guaacguggagaucaauga

SEQ ID NO: 36877 - RNA, 19 nt, Homo sapiens
  misc_RNA (1)...(19): siRNA sense strand
guacuggcgagacugcuuu

SEQ ID NO: 36878 - RNA, 19 nt, Homo sapiens
  misc_RNA (1)...(19): siRNA sense strand
gcagucgccugagaaugau

SEQ ID NO: 36879 - RNA, 19 nt, Homo sapiens
  misc_RNA (1)...(19): siRNA sense strand
gcgaggcagacaucaauga

SEQ ID NO: 36880 - RNA, 19 nt, Homo sapiens
  misc_RNA (1)...(19): siRNA sense strand
gaucaggacaucaaugacu

SEQ ID NO: 36881 - RNA, 19 nt, Homo sapiens
  misc_RNA (1)...(19): siRNA sense strand
ucaguggacucaacaccau

SEQ ID NO: 36882 - RNA, 19 nt, Homo sapiens
  misc_RNA (1)...(19): siRNA sense strand
ggaugagcuugggaaauca

SEQ ID NO: 36883 - RNA, 19 nt, Homo sapiens
  misc_RNA (1)...(19): siRNA sense strand
cuacacagggccacuaugu

SEQ ID NO: 36884 - RNA, 19 nt, Homo sapiens
  misc_RNA (1)...(19): siRNA sense strand
ggaccugccguggcuauau

SEQ ID NO: 36885 - RNA, 19 nt, Homo sapiens
  misc_RNA (1)...(19): siRNA sense strand
gggcugcggcugugaacaa

SEQ ID NO: 36886 - RNA, 19 nt, Homo sapiens
  misc_RNA (1)...(19): siRNA sense strand
ggaugaggcagaugacaca

SEQ ID NO: 36887 - RNA, 19 nt, Homo sapiens
  misc_RNA (1)...(19): siRNA sense strand
ugaagaggaugaggcagau

SEQ ID NO: 36888 - RNA, 19 nt, Homo sapiens
  misc_RNA (1)...(19): siRNA sense strand
gcuucucacugcacaagga

SEQ ID NO: 36889 - RNA, 19 nt, Homo sapiens
  misc_RNA (1)...(19): siRNA sense strand
guggcgaccucacuuacga

SEQ ID NO: 36890 - RNA, 19 nt, Homo sapiens
  misc_RNA (1)...(19): siRNA sense strand
ugcagucgccugagaauga

SEQ ID NO: 36891 - RNA, 19 nt, Homo sapiens
  misc_RNA (1)...(19): siRNA sense strand
uagaccugguggacaagua

SEQ ID NO: 36892 - RNA, 19 nt, Homo sapiens
  misc_RNA (1)...(19): siRNA sense strand
ccagggacgucagugugaa

SEQ ID NO: 36893 - RNA, 19 nt, Homo sapiens
  misc_RNA (1)...(19): siRNA sense strand
aaugcuggcuuccuucugu

SEQ ID NO: 36894 - RNA, 19 nt, Homo sapiens
  misc_RNA (1)...(19): siRNA sense strand
uggauggcgucaacaccua

SEQ ID NO: 36895 - RNA, 19 nt, Homo sapiens
  misc_RNA (1)...(19): siRNA sense strand
ggacgacguggacgagugu

SEQ ID NO: 36896 - RNA, 19 nt, Homo sapiens
  misc_RNA (1)...(19): siRNA sense strand
gcgcugggcaugaagaaca

SEQ ID NO: 36897 - RNA, 19 nt, Homo sapiens
  misc_RNA (1)...(19): siRNA sense strand
gguggacauugacgagugu

SEQ ID NO: 36898 - RNA, 19 nt, Homo sapiens
  misc_RNA (1)...(19): siRNA sense strand
caaugugcguggcccagau

SEQ ID NO: 36899 - RNA, 19 nt, Homo sapiens
  misc_RNA (1)...(19): siRNA sense strand
ggggugcucugcgagauua

SEQ ID NO: 36900 - RNA, 19 nt, Homo sapiens
  misc_RNA (1)...(19): siRNA sense strand
gcagcgauggaauggguuu

SEQ ID NO: 36901 - RNA, 19 nt, Homo sapiens
  misc_RNA (1)...(19): siRNA sense strand
cugcaggaauggcgccaaa

SEQ ID NO: 36902 - RNA, 19 nt, Homo sapiens
  misc_RNA (1)...(19): siRNA sense strand
gcugugagaccgaugucaa

SEQ ID NO: 36903 - RNA, 19 nt, Homo sapiens
  misc_RNA (1)...(19): siRNA sense strand
cuuccucccuggccucaaa

SEQ ID NO: 36904 - RNA, 19 nt, Homo sapiens
  misc_RNA (1)...(19): siRNA sense strand
gagccaaugccaacugaag

SEQ ID NO: 36905 - RNA, 19 nt, Homo sapiens
  misc_RNA (1)...(19): siRNA sense strand
gcaccagccauggcacuga

SEQ ID NO: 36906 - RNA, 19 nt, Homo sapiens
  misc_RNA (1)...(19): siRNA sense strand
ggccaagcggcuaaaggua

SEQ ID NO: 36907 - RNA, 19 nt, Homo sapiens
  misc_RNA (1)...(19): siRNA sense strand
acaauggugauaacuguga

SEQ ID NO: 36908 - RNA, 19 nt, Homo sapiens
  misc_RNA (1)...(19): siRNA sense strand
caucaaccgcuacgacugu

SEQ ID NO: 36909 - RNA, 19 nt, Homo sapiens
  misc_RNA (1)...(19): siRNA sense strand
cccaacgccugccacaaug

SEQ ID NO: 36910 - RNA, 19 nt, Homo sapiens
  misc_RNA (1)...(19): siRNA sense strand
gcuaugaggcugccaagcu

SEQ ID NO: 36911 - RNA, 19 nt, Homo sapiens
  misc_RNA (1)...(19): siRNA sense strand
cugaggaggcuguggauug

SEQ ID NO: 36912 - RNA, 19 nt, Homo sapiens
  misc_RNA (1)...(19): siRNA sense strand
ccagaggccaagcggcuaa

SEQ ID NO: 36913 - RNA, 19 nt, Homo sapiens
  misc_RNA (1)...(19): siRNA sense strand
cuacaugugugagugucuu

SEQ ID NO: 36914 - RNA, 19 nt, Homo sapiens
  misc_RNA (1)...(19): siRNA sense strand
agagccagguggacgaaug

SEQ ID NO: 36915 - RNA, 19 nt, Homo sapiens
  misc_RNA (1)...(19): siRNA sense strand
acugcgaagugaacauuga

SEQ ID NO: 36916 - RNA, 19 nt, Homo sapiens
  misc_RNA (1)...(19): siRNA sense strand
gcugauggcauggauguca

SEQ ID NO: 36917 - RNA, 19 nt, Homo sapiens
  misc_RNA (1)...(19): siRNA sense strand
ggaggacguggaugagugu

SEQ ID NO: 36918 - RNA, 19 nt, Homo sapiens
  misc_RNA (1)...(19): siRNA sense strand
aggccauggucuucccuua

SEQ ID NO: 36919 - RNA, 19 nt, Homo sapiens
  misc_RNA (1)...(19): siRNA sense strand
guucaccuguaucuguaug

SEQ ID NO: 36920 - RNA, 19 nt, Homo sapiens
  misc_RNA (1)...(19): siRNA sense strand
ucagaauugugaagugaac

SEQ ID NO: 36921 - RNA, 19 nt, Homo sapiens
  misc_RNA (1)...(19): siRNA sense strand
gauggcgucaacaccuaua

SEQ ID NO: 36922 - RNA, 19 nt, Homo sapiens
  misc_RNA (1)...(19): siRNA sense strand
uggagccaaugccaacuga

SEQ ID NO: 36923 - RNA, 19 nt, Homo sapiens
  misc_RNA (1)...(19): siRNA sense strand
gcugggaugggcuggauug

SEQ ID NO: 36924 - RNA, 19 nt, Homo sapiens
  misc_RNA (1)...(19): siRNA sense strand
caaacaagcugcacagaaa

SEQ ID NO: 36925 - RNA, 19 nt, Homo sapiens
  misc_RNA (1)...(19): siRNA sense strand
caguuugucuccauucuua

SEQ ID NO: 36926 - RNA, 19 nt, Homo sapiens
  misc_RNA (1)...(19): siRNA sense strand
uaagaacacugcagaaugg

SEQ ID NO: 36927 - RNA, 19 nt, Homo sapiens
  misc_RNA (1)...(19): siRNA sense strand
gcacagaaauuggaacagu

SEQ ID NO: 36928 - RNA, 19 nt, Homo sapiens
  misc_RNA (1)...(19): siRNA sense strand
gcaauaaucugugguucug

SEQ ID NO: 36929 - RNA, 19 nt, Homo sapiens
  misc_RNA (1)...(19): siRNA sense strand
uaggaggucugacugauaa

SEQ ID NO: 36930 - RNA, 19 nt, Homo sapiens
  misc_RNA (1)...(19): siRNA sense strand
gaacggauacaccuaugaa

SEQ ID NO: 36931 - RNA, 19 nt, Homo sapiens
  misc_RNA (1)...(19): siRNA sense strand
gaugaaagguuuggagauc

SEQ ID NO: 36932 - RNA, 19 nt, Homo sapiens
  misc_RNA (1)...(19): siRNA sense strand
gcaccgaccucaaguugca

SEQ ID NO: 36933 - RNA, 19 nt, Homo sapiens
  misc_RNA (1)...(19): siRNA sense strand
gcaaacaagcugcacagaa

SEQ ID NO: 36934 - RNA, 19 nt, Homo sapiens
  misc_RNA (1)...(19): siRNA sense strand
acaaggucaucauggauua

SEQ ID NO: 36935 - RNA, 19 nt, Homo sapiens
  misc_RNA (1)...(19): siRNA sense strand
ggauacaccuaugaagauu

SEQ ID NO: 36936 - RNA, 19 nt, Homo sapiens
  misc_RNA (1)...(19): siRNA sense strand
ggaaggcaccuaugugaug

SEQ ID NO: 36937 - RNA, 19 nt, Homo sapiens
  misc_RNA (1)...(19): siRNA sense strand
gcacggcacuguggacuuc

SEQ ID NO: 36938 - RNA, 19 nt, Homo sapiens
  misc_RNA (1)...(19): siRNA sense strand
ggagaaggccaaccaugaa

SEQ ID NO: 36939 - RNA, 19 nt, Homo sapiens
  misc_RNA (1)...(19): siRNA sense strand
gcccaaugaugaaagguuu

SEQ ID NO: 36940 - RNA, 19 nt, Homo sapiens
  misc_RNA (1)...(19): siRNA sense strand
ucagagggcccaaugauga

SEQ ID NO: 36941 - RNA, 19 nt, Homo sapiens
  misc_RNA (1)...(19): siRNA sense strand
ggaacaguuugucuccauu

SEQ ID NO: 36942 - RNA, 19 nt, Homo sapiens
  misc_RNA (1)...(19): siRNA sense strand
gaauggcuucugucucaua

SEQ ID NO: 36943 - RNA, 19 nt, Homo sapiens
  misc_RNA (1)...(19): siRNA sense strand
gcuucucacucaucacuaa

SEQ ID NO: 36944 - RNA, 19 nt, Homo sapiens
  misc_RNA (1)...(19): siRNA sense strand
gaccucaaguugcaauaau

SEQ ID NO: 36945 - RNA, 19 nt, Homo sapiens
  misc_RNA (1)...(19): siRNA sense strand
cuaacaaggucaucaugga

SEQ ID NO: 36946 - RNA, 19 nt, Homo sapiens
  misc_RNA (1)...(19): siRNA sense strand
gagaacggauacaccuaug

SEQ ID NO: 36947 - RNA, 19 nt, Homo sapiens
  misc_RNA (1)...(19): siRNA sense strand
gaaggccaaccaugaagaa

SEQ ID NO: 36948 - RNA, 19 nt, Homo sapiens
  misc_RNA (1)...(19): siRNA sense strand
ggagaacggauacaccuau

SEQ ID NO: 36949 - RNA, 19 nt, Homo sapiens
  misc_RNA (1)...(19): siRNA sense strand
gcagguuccacauguauga

SEQ ID NO: 36950 - RNA, 19 nt, Homo sapiens
  misc_RNA (1)...(19): siRNA sense strand
cucaguaccuggaaacaaa

SEQ ID NO: 36951 - RNA, 19 nt, Homo sapiens
  misc_RNA (1)...(19): siRNA sense strand
aggucugacugauaaauua

SEQ ID NO: 36952 - RNA, 19 nt, Homo sapiens
  misc_RNA (1)...(19): siRNA sense strand
gauacaccuaugaagauua

SEQ ID NO: 36953 - RNA, 19 nt, Homo sapiens
  misc_RNA (1)...(19): siRNA sense strand
cuuagcagcuggcaaacaa

SEQ ID NO: 36954 - RNA, 19 nt, Homo sapiens
  misc_RNA (1)...(19): siRNA sense strand
gcauuccacucccugacaa

SEQ ID NO: 36955 - RNA, 19 nt, Homo sapiens
  misc_RNA (1)...(19): siRNA sense strand
uggcuucugucucauacua

SEQ ID NO: 36956 - RNA, 19 nt, Homo sapiens
  misc_RNA (1)...(19): siRNA sense strand
gcccagaucuuugacuaca

SEQ ID NO: 36957 - RNA, 19 nt, Homo sapiens
  misc_RNA (1)...(19): siRNA sense strand
cacagaaauuggaacaguu

SEQ ID NO: 36958 - RNA, 19 nt, Homo sapiens
  misc_RNA (1)...(19): siRNA sense strand
caggaaggcaccuauguga

SEQ ID NO: 36959 - RNA, 19 nt, Homo sapiens
  misc_RNA (1)...(19): siRNA sense strand
aaggugacauucccaguga

SEQ ID NO: 36960 - RNA, 19 nt, Homo sapiens
  misc_RNA (1)...(19): siRNA sense strand
gcugauccgugaccauauc

SEQ ID NO: 36961 - RNA, 19 nt, Homo sapiens
  misc_RNA (1)...(19): siRNA sense strand
gaacaguuugucuccauuc

SEQ ID NO: 36962 - RNA, 19 nt, Homo sapiens
  misc_RNA (1)...(19): siRNA sense strand
ggccaaccaugaagaaguc

SEQ ID NO: 36963 - RNA, 19 nt, Homo sapiens
  misc_RNA (1)...(19): siRNA sense strand
ccagaucuuugacuacagu

SEQ ID NO: 36964 - RNA, 19 nt, Homo sapiens
  misc_RNA (1)...(19): siRNA sense strand
gaggucugacugauaaauu

SEQ ID NO: 36965 - RNA, 19 nt, Homo sapiens
  misc_RNA (1)...(19): siRNA sense strand
acagaaauuggaacaguuu

SEQ ID NO: 36966 - RNA, 19 nt, Homo sapiens
  misc_RNA (1)...(19): siRNA sense strand
gaucuuugacuacagugaa

SEQ ID NO: 36967 - RNA, 19 nt, Homo sapiens
  misc_RNA (1)...(19): siRNA sense strand
uaacucaggcccagaucuu

SEQ ID NO: 36968 - RNA, 19 nt, Homo sapiens
  misc_RNA (1)...(19): siRNA sense strand
ggucugacugauaaauuaa

SEQ ID NO: 36969 - RNA, 19 nt, Homo sapiens
  misc_RNA (1)...(19): siRNA sense strand
cagggcagguuccacaugu

SEQ ID NO: 36970 - RNA, 19 nt, Homo sapiens
  misc_RNA (1)...(19): siRNA sense strand
gaaauuggaacaguuuguc

SEQ ID NO: 36971 - RNA, 19 nt, Homo sapiens
  misc_RNA (1)...(19): siRNA sense strand
uggagaaggccaaccauga

SEQ ID NO: 36972 - RNA, 19 nt, Homo sapiens
  misc_RNA (1)...(19): siRNA sense strand
guguuuggguuccugaaug

SEQ ID NO: 36973 - RNA, 19 nt, Homo sapiens
  misc_RNA (1)...(19): siRNA sense strand
gucuuuggcuucucacuca

SEQ ID NO: 36974 - RNA, 19 nt, Homo sapiens
  misc_RNA (1)...(19): siRNA sense strand
gggcagguuccacauguau

SEQ ID NO: 36975 - RNA, 19 nt, Homo sapiens
  misc_RNA (1)...(19): siRNA sense strand
gauuaggaggucugacuga

SEQ ID NO: 36976 - RNA, 19 nt, Homo sapiens
  misc_RNA (1)...(19): siRNA sense strand
uaacaaggucaucauggau

SEQ ID NO: 36977 - RNA, 19 nt, Homo sapiens
  misc_RNA (1)...(19): siRNA sense strand
uauaagaacacugcagaau

SEQ ID NO: 36978 - RNA, 19 nt, Homo sapiens
  misc_RNA (1)...(19): siRNA sense strand
uuaggaggucugacugaua

SEQ ID NO: 36979 - RNA, 19 nt, Homo sapiens
  misc_RNA (1)...(19): siRNA sense strand
gcugggagcagacgcuguu

SEQ ID NO: 36980 - RNA, 19 nt, Homo sapiens
  misc_RNA (1)...(19): siRNA sense strand
auaagaacacugcagaaug

SEQ ID NO: 36981 - RNA, 19 nt, Homo sapiens
  misc_RNA (1)...(19): siRNA sense strand
gagaaggccaaccaugaag

SEQ ID NO: 36982 - RNA, 19 nt, Homo sapiens
  misc_RNA (1)...(19): siRNA sense strand
cggauacaccuaugaagau

SEQ ID NO: 36983 - RNA, 19 nt, Homo sapiens
  misc_RNA (1)...(19): siRNA sense strand
gcaacgugagcuacaggaa

SEQ ID NO: 36984 - RNA, 19 nt, Homo sapiens
  misc_RNA (1)...(19): siRNA sense strand
aggcccagaucuuugacua

SEQ ID NO: 36985 - RNA, 19 nt, Homo sapiens
  misc_RNA (1)...(19): siRNA sense strand
agucuuagcagcuggcaaa

SEQ ID NO: 36986 - RNA, 19 nt, Homo sapiens
  misc_RNA (1)...(19): siRNA sense strand
cgaccucaaguugcaauaa

SEQ ID NO: 36987 - RNA, 19 nt, Homo sapiens
  misc_RNA (1)...(19): siRNA sense strand
gcagggcagguuccacaug

SEQ ID NO: 36988 - RNA, 19 nt, Homo sapiens
  misc_RNA (1)...(19): siRNA sense strand
ugaaagguuuggagaucgu

SEQ ID NO: 36989 - RNA, 19 nt, Homo sapiens
  misc_RNA (1)...(19): siRNA sense strand
uaugaaggguacccacucu

SEQ ID NO: 36990 - RNA, 19 nt, Homo sapiens
  misc_RNA (1)...(19): siRNA sense strand
ggaggucugacugauaaau

SEQ ID NO: 36991 - RNA, 19 nt, Homo sapiens
  misc_RNA (1)...(19): siRNA sense strand
ggagcaacgugagcuacag

SEQ ID NO: 36992 - RNA, 19 nt, Homo sapiens
  misc_RNA (1)...(19): siRNA sense strand
aagcaccgaccucaaguug

SEQ ID NO: 36993 - RNA, 19 nt, Homo sapiens
  misc_RNA (1)...(19): siRNA sense strand
ucaaguugcaauaaucugu

SEQ ID NO: 36994 - RNA, 19 nt, Homo sapiens
  misc_RNA (1)...(19): siRNA sense strand
aaacaagcugcacagaaau

SEQ ID NO: 36995 - RNA, 19 nt, Homo sapiens
  misc_RNA (1)...(19): siRNA sense strand
cagagggcccaaugaugaa

SEQ ID NO: 36996 - RNA, 19 nt, Homo sapiens
  misc_RNA (1)...(19): siRNA sense strand
gccuacgaccggacuauga

SEQ ID NO: 36997 - RNA, 19 nt, Homo sapiens
  misc_RNA (1)...(19): siRNA sense strand
ucucacucaucacuaacaa

SEQ ID NO: 36998 - RNA, 19 nt, Homo sapiens
  misc_RNA (1)...(19): siRNA sense strand
gggccugugugaugaugca

SEQ ID NO: 36999 - RNA, 19 nt, Homo sapiens
  misc_RNA (1)...(19): siRNA sense strand
gcuucugucucauacuaag

SEQ ID NO: 37000 - RNA, 19 nt, Homo sapiens
  misc_RNA (1)...(19): siRNA sense strand
aguuugagguuggagauau

SEQ ID NO: 37001 - RNA, 19 nt, Homo sapiens
  misc_RNA (1)...(19): siRNA sense strand
ucgagucuuuggcuucuca

SEQ ID NO: 37002 - RNA, 19 nt, Homo sapiens
  misc_RNA (1)...(19): siRNA sense strand
gaucguuucccugccaugu

SEQ ID NO: 37003 - RNA, 19 nt, Homo sapiens
  misc_RNA (1)...(19): siRNA sense strand
acggauacaccuaugaaga

SEQ ID NO: 37004 - RNA, 19 nt, Homo sapiens
  misc_RNA (1)...(19): siRNA sense strand
aacaagcugcacagaaauu

SEQ ID NO: 37005 - RNA, 19 nt, Homo sapiens
  misc_RNA (1)...(19): siRNA sense strand
aacaaggucaucauggauu

SEQ ID NO: 37006 - RNA, 19 nt, Homo sapiens
  misc_RNA (1)...(19): siRNA sense strand
uacaguaccagaaguuauc

SEQ ID NO: 37007 - RNA, 19 nt, Homo sapiens
  misc_RNA (1)...(19): siRNA sense strand
uugagacuguggcagaaug

SEQ ID NO: 37008 - RNA, 19 nt, Homo sapiens
  misc_RNA (1)...(19): siRNA sense strand
gaaagguuuggagaucguu

SEQ ID NO: 37009 - RNA, 19 nt, Homo sapiens
  misc_RNA (1)...(19): siRNA sense strand
gaagaaagcccgacuuaua

SEQ ID NO: 37010 - RNA, 19 nt, Homo sapiens
  misc_RNA (1)...(19): siRNA sense strand
gcgaacggcuucuaaauuu

SEQ ID NO: 37011 - RNA, 19 nt, Homo sapiens
  misc_RNA (1)...(19): siRNA sense strand
gcaccagguucuugacuua

SEQ ID NO: 37012 - RNA, 19 nt, Homo sapiens
  misc_RNA (1)...(19): siRNA sense strand
gaagagcgauacaaaggaa

SEQ ID NO: 37013 - RNA, 19 nt, Homo sapiens
  misc_RNA (1)...(19): siRNA sense strand
ucagagagcuguuuguuuc

SEQ ID NO: 37014 - RNA, 19 nt, Homo sapiens
  misc_RNA (1)...(19): siRNA sense strand
gcagcugccucuacaguuu

SEQ ID NO: 37015 - RNA, 19 nt, Homo sapiens
  misc_RNA (1)...(19): siRNA sense strand
gggagccacucacggauua

SEQ ID NO: 37016 - RNA, 19 nt, Homo sapiens
  misc_RNA (1)...(19): siRNA sense strand
guaauuagcuaugccauca

SEQ ID NO: 37017 - RNA, 19 nt, Homo sapiens
  misc_RNA (1)...(19): siRNA sense strand
gagguacaauugcgaauau

SEQ ID NO: 37018 - RNA, 19 nt, Homo sapiens
  misc_RNA (1)...(19): siRNA sense strand
caacauguuuggaguuaug

SEQ ID NO: 37019 - RNA, 19 nt, Homo sapiens
  misc_RNA (1)...(19): siRNA sense strand
gccaucauguuucuauaua

SEQ ID NO: 37020 - RNA, 19 nt, Homo sapiens
  misc_RNA (1)...(19): siRNA sense strand
gaauacauguucaauaagg

SEQ ID NO: 37021 - RNA, 19 nt, Homo sapiens
  misc_RNA (1)...(19): siRNA sense strand
gaugagaccaauugugaua

SEQ ID NO: 37022 - RNA, 19 nt, Homo sapiens
  misc_RNA (1)...(19): siRNA sense strand
ggauggauaugacuuagug

SEQ ID NO: 37023 - RNA, 19 nt, Homo sapiens
  misc_RNA (1)...(19): siRNA sense strand
gaacaguaccugaccauca

SEQ ID NO: 37024 - RNA, 19 nt, Homo sapiens
  misc_RNA (1)...(19): siRNA sense strand
guucuugacuuacaaauag

SEQ ID NO: 37025 - RNA, 19 nt, Homo sapiens
  misc_RNA (1)...(19): siRNA sense strand
uaccaucacuccuguguuu

SEQ ID NO: 37026 - RNA, 19 nt, Homo sapiens
  misc_RNA (1)...(19): siRNA sense strand
aaacauuacugccucuuau

SEQ ID NO: 37027 - RNA, 19 nt, Homo sapiens
  misc_RNA (1)...(19): siRNA sense strand
caugguggauuauuucaaa

SEQ ID NO: 37028 - RNA, 19 nt, Homo sapiens
  misc_RNA (1)...(19): siRNA sense strand
gugauuaccuucccuguca

SEQ ID NO: 37029 - RNA, 19 nt, Homo sapiens
  misc_RNA (1)...(19): siRNA sense strand
cauuaaacgucaagagaaa

SEQ ID NO: 37030 - RNA, 19 nt, Homo sapiens
  misc_RNA (1)...(19): siRNA sense strand
caacuggauugaauacaug

SEQ ID NO: 37031 - RNA, 19 nt, Homo sapiens
  misc_RNA (1)...(19): siRNA sense strand
ccacguacuucaugaccua

SEQ ID NO: 37032 - RNA, 19 nt, Homo sapiens
  misc_RNA (1)...(19): siRNA sense strand
ccagagagaugaacgucuu

SEQ ID NO: 37033 - RNA, 19 nt, Homo sapiens
  misc_RNA (1)...(19): siRNA sense strand
uuacagcuacugaagauua

SEQ ID NO: 37034 - RNA, 19 nt, Homo sapiens
  misc_RNA (1)...(19): siRNA sense strand
ucaaauccaucagucagua

SEQ ID NO: 37035 - RNA, 19 nt, Homo sapiens
  misc_RNA (1)...(19): siRNA sense strand
ggaacucuguccaggauuc

SEQ ID NO: 37036 - RNA, 19 nt, Homo sapiens
  misc_RNA (1)...(19): siRNA sense strand
gcaguguggugcuacagaa

SEQ ID NO: 37037 - RNA, 19 nt, Homo sapiens
  misc_RNA (1)...(19): siRNA sense strand
ggcaugggcugcaacaaug

SEQ ID NO: 37038 - RNA, 19 nt, Homo sapiens
  misc_RNA (1)...(19): siRNA sense strand
ggauugugguguuggcuuu

SEQ ID NO: 37039 - RNA, 19 nt, Homo sapiens
  misc_RNA (1)...(19): siRNA sense strand
gaccucugcugacuuuauu

SEQ ID NO: 37040 - RNA, 19 nt, Homo sapiens
  misc_RNA (1)...(19): siRNA sense strand
gccuauaguucugcaguua

SEQ ID NO: 37041 - RNA, 19 nt, Homo sapiens
  misc_RNA (1)...(19): siRNA sense strand
gucaacauguuuggaguua

SEQ ID NO: 37042 - RNA, 19 nt, Homo sapiens
  misc_RNA (1)...(19): siRNA sense strand
ugaacuaaaucgugaaagu

SEQ ID NO: 37043 - RNA, 19 nt, Homo sapiens
  misc_RNA (1)...(19): siRNA sense strand
ccauguuccuuucggauaa

SEQ ID NO: 37044 - RNA, 19 nt, Homo sapiens
  misc_RNA (1)...(19): siRNA sense strand
gcacaccuucucucucuuu

SEQ ID NO: 37045 - RNA, 19 nt, Homo sapiens
  misc_RNA (1)...(19): siRNA sense strand
ugccaagacugcucuauug

SEQ ID NO: 37046 - RNA, 19 nt, Homo sapiens
  misc_RNA (1)...(19): siRNA sense strand
gauuggcagucuucauuga

SEQ ID NO: 37047 - RNA, 19 nt, Homo sapiens
  misc_RNA (1)...(19): siRNA sense strand
agaaguggcucccaguaug

SEQ ID NO: 37048 - RNA, 19 nt, Homo sapiens
  misc_RNA (1)...(19): siRNA sense strand
gaacuaaaucgugaaagug

SEQ ID NO: 37049 - RNA, 19 nt, Homo sapiens
  misc_RNA (1)...(19): siRNA sense strand
gaacgaaguauugaagaug

SEQ ID NO: 37050 - RNA, 19 nt, Homo sapiens
  misc_RNA (1)...(19): siRNA sense strand
ccacugcccuugugauuac

SEQ ID NO: 37051 - RNA, 19 nt, Homo sapiens
  misc_RNA (1)...(19): siRNA sense strand
ucacugacaaacacauuua

SEQ ID NO: 37052 - RNA, 19 nt, Homo sapiens
  misc_RNA (1)...(19): siRNA sense strand
acuccuacaugguggauua

SEQ ID NO: 37053 - RNA, 19 nt, Homo sapiens
  misc_RNA (1)...(19): siRNA sense strand
uuacauagggccaucagua

SEQ ID NO: 37054 - RNA, 19 nt, Homo sapiens
  misc_RNA (1)...(19): siRNA sense strand
gggauuggcagucuucauu

SEQ ID NO: 37055 - RNA, 19 nt, Homo sapiens
  misc_RNA (1)...(19): siRNA sense strand
gcucuggucugcagucauc

SEQ ID NO: 37056 - RNA, 19 nt, Homo sapiens
  misc_RNA (1)...(19): siRNA sense strand
gaccaguucugcaaugcuu

SEQ ID NO: 37057 - RNA, 19 nt, Homo sapiens
  misc_RNA (1)...(19): siRNA sense strand
ccaacuggauugaauacau

SEQ ID NO: 37058 - RNA, 19 nt, Homo sapiens
  misc_RNA (1)...(19): siRNA sense strand
ccuacaugguggauuauuu

SEQ ID NO: 37059 - RNA, 19 nt, Homo sapiens
  misc_RNA (1)...(19): siRNA sense strand
uaaauuacuuccagaacag

SEQ ID NO: 37060 - RNA, 19 nt, Homo sapiens
  misc_RNA (1)...(19): siRNA sense strand
aacacgaacugcaccauuu

SEQ ID NO: 37061 - RNA, 19 nt, Homo sapiens
  misc_RNA (1)...(19): siRNA sense strand
ucccaucgauagcaauaua

SEQ ID NO: 37062 - RNA, 19 nt, Homo sapiens
  misc_RNA (1)...(19): siRNA sense strand
caugaacaaugccaccaaa

SEQ ID NO: 37063 - RNA, 19 nt, Homo sapiens
  misc_RNA (1)...(19): siRNA sense strand
ccaaugcaauguacaaugc

SEQ ID NO: 37064 - RNA, 19 nt, Homo sapiens
  misc_RNA (1)...(19): siRNA sense strand
ggacaugcugccuauaguu

SEQ ID NO: 37065 - RNA, 19 nt, Homo sapiens
  misc_RNA (1)...(19): siRNA sense strand
gacauuaaacgucaagaga

SEQ ID NO: 37066 - RNA, 19 nt, Homo sapiens
  misc_RNA (1)...(19): siRNA sense strand
ggacgacuucuuuguguau

SEQ ID NO: 37067 - RNA, 19 nt, Homo sapiens
  misc_RNA (1)...(19): siRNA sense strand
gaccuccgcuugacauaca

SEQ ID NO: 37068 - RNA, 19 nt, Homo sapiens
  misc_RNA (1)...(19): siRNA sense strand
caaaggcugugacgagucu

SEQ ID NO: 37069 - RNA, 19 nt, Homo sapiens
  misc_RNA (1)...(19): siRNA sense strand
gagcugauguacccuuugg

SEQ ID NO: 37070 - RNA, 19 nt, Homo sapiens
  misc_RNA (1)...(19): siRNA sense strand
ggaguucugcagccacaua

SEQ ID NO: 37071 - RNA, 19 nt, Homo sapiens
  misc_RNA (1)...(19): siRNA sense strand
cgacuuauagccaguaaug

SEQ ID NO: 37072 - RNA, 19 nt, Homo sapiens
  misc_RNA (1)...(19): siRNA sense strand
ggagccacguacuucauga

SEQ ID NO: 37073 - RNA, 19 nt, Homo sapiens
  misc_RNA (1)...(19): siRNA sense strand
gggacaagagguacaauug

SEQ ID NO: 37074 - RNA, 19 nt, Homo sapiens
  misc_RNA (1)...(19): siRNA sense strand
gcuccugccucucugaaug

SEQ ID NO: 37075 - RNA, 19 nt, Homo sapiens
  misc_RNA (1)...(19): siRNA sense strand
gggacgacuucuuugugua

SEQ ID NO: 37076 - RNA, 19 nt, Homo sapiens
  misc_RNA (1)...(19): siRNA sense strand
cgucaggccugguguuugu

SEQ ID NO: 37077 - RNA, 19 nt, Homo sapiens
  misc_RNA (1)...(19): siRNA sense strand
ugagauuccugcccauguu

SEQ ID NO: 37078 - RNA, 19 nt, Homo sapiens
  misc_RNA (1)...(19): siRNA sense strand
gagaaguggcucccaguau

SEQ ID NO: 37079 - RNA, 19 nt, Homo sapiens
  misc_RNA (1)...(19): siRNA sense strand
ccauguagcugccaagacu

SEQ ID NO: 37080 - RNA, 19 nt, Homo sapiens
  misc_RNA (1)...(19): siRNA sense strand
guauuuggccauggucuua

SEQ ID NO: 37081 - RNA, 19 nt, Homo sapiens
  misc_RNA (1)...(19): siRNA sense strand
gugcacaccuucucucucu

SEQ ID NO: 37082 - RNA, 19 nt, Homo sapiens
  misc_RNA (1)...(19): siRNA sense strand
gcaggcuucugguggauuc

SEQ ID NO: 37083 - RNA, 19 nt, Homo sapiens
  misc_RNA (1)...(19): siRNA sense strand
uaaugcaagugacaaagga

SEQ ID NO: 37084 - RNA, 19 nt, Homo sapiens
  misc_RNA (1)...(19): siRNA sense strand
ggacagaguuuugccaaug

SEQ ID NO: 37085 - RNA, 19 nt, Homo sapiens
  misc_RNA (1)...(19): siRNA sense strand
ccgaaaccaugggcauuaa

SEQ ID NO: 37086 - RNA, 19 nt, Homo sapiens
  misc_RNA (1)...(19): siRNA sense strand
cagaggugcugaagaugga

SEQ ID NO: 37087 - RNA, 19 nt, Homo sapiens
  misc_RNA (1)...(19): siRNA sense strand
uaacgccacugcccuugug

SEQ ID NO: 37088 - RNA, 19 nt, Homo sapiens
  misc_RNA (1)...(19): siRNA sense strand
auacaaguuugcuccauga

SEQ ID NO: 37089 - RNA, 19 nt, Homo sapiens
  misc_RNA (1)...(19): siRNA sense strand
aaaggauggauaugacuua

SEQ ID NO: 37090 - RNA, 19 nt, Homo sapiens
  misc_RNA (1)...(19): siRNA sense strand
ggacgauccuuggcuugga

SEQ ID NO: 37091 - RNA, 19 nt, Homo sapiens
  misc_RNA (1)...(19): siRNA sense strand
gaacggcuucuaaauuucu

SEQ ID NO: 37092 - RNA, 19 nt, Homo sapiens
  misc_RNA (1)...(19): siRNA sense strand
ugaacgaaguauugaagau

SEQ ID NO: 37093 - RNA, 19 nt, Homo sapiens
  misc_RNA (1)...(19): siRNA sense strand
caggaacucuguccaggau

SEQ ID NO: 37094 - RNA, 19 nt, Homo sapiens
  misc_RNA (1)...(19): siRNA sense strand
gggagcugauguacccuuu

SEQ ID NO: 37095 - RNA, 19 nt, Homo sapiens
  misc_RNA (1)...(19): siRNA sense strand
gucagucucuguugugaug

SEQ ID NO: 37096 - RNA, 19 nt, Homo sapiens
  misc_RNA (1)...(19): siRNA sense strand
ggucugcagucaucaugug

SEQ ID NO: 37097 - RNA, 19 nt, Homo sapiens
  misc_RNA (1)...(19): siRNA sense strand
cugcaaugcuucagugguu

SEQ ID NO: 37098 - RNA, 19 nt, Homo sapiens
  misc_RNA (1)...(19): siRNA sense strand
gaaguggcucccaguaugu

SEQ ID NO: 37099 - RNA, 19 nt, Homo sapiens
  misc_RNA (1)...(19): siRNA sense strand
gcuaugccaucauguuucu

SEQ ID NO: 37100 - RNA, 19 nt, Homo sapiens
  misc_RNA (1)...(19): siRNA sense strand
guauggagaguguggaauu

SEQ ID NO: 37101 - RNA, 19 nt, Homo sapiens
  misc_RNA (1)...(19): siRNA sense strand
ggucacaaccaauccaguu

SEQ ID NO: 37102 - RNA, 19 nt, Homo sapiens
  misc_RNA (1)...(19): siRNA sense strand
uuugugagcugacauguag

SEQ ID NO: 37103 - RNA, 19 nt, Homo sapiens
  misc_RNA (1)...(19): siRNA sense strand
cugaagaaagcccgacuua

SEQ ID NO: 37104 - RNA, 19 nt, Homo sapiens
  misc_RNA (1)...(19): siRNA sense strand
uggaugagaccaauuguga

SEQ ID NO: 37105 - RNA, 19 nt, Homo sapiens
  misc_RNA (1)...(19): siRNA sense strand
cuacaagaaucccaaucug

SEQ ID NO: 37106 - RNA, 19 nt, Homo sapiens
  misc_RNA (1)...(19): siRNA sense strand
gaaaacaaaugugaaagag

SEQ ID NO: 37107 - RNA, 19 nt, Homo sapiens
  misc_RNA (1)...(19): siRNA sense strand
ccaguaaugucaccgaaac

SEQ ID NO: 37108 - RNA, 19 nt, Homo sapiens
  misc_RNA (1)...(19): siRNA sense strand
uaauauuucucccugucuu

SEQ ID NO: 37109 - RNA, 19 nt, Homo sapiens
  misc_RNA (1)...(19): siRNA sense strand
gaaccuaccuagagccuua

SEQ ID NO: 37110 - RNA, 19 nt, Homo sapiens
  misc_RNA (1)...(19): siRNA sense strand
ggacguauauuucugguuu

SEQ ID NO: 37111 - RNA, 19 nt, Homo sapiens
  misc_RNA (1)...(19): siRNA sense strand
ucaaagauguauccaguua

SEQ ID NO: 37112 - RNA, 19 nt, Homo sapiens
  misc_RNA (1)...(19): siRNA sense strand
gaaauaggauggagacugu

SEQ ID NO: 37113 - RNA, 19 nt, Homo sapiens
  misc_RNA (1)...(19): siRNA sense strand
gagcagaggacguauauuu

SEQ ID NO: 37114 - RNA, 19 nt, Homo sapiens
  misc_RNA (1)...(19): siRNA sense strand
ggaagaaagugaaagugaa

SEQ ID NO: 37115 - RNA, 19 nt, Homo sapiens
  misc_RNA (1)...(19): siRNA sense strand
gagaaagaaugcaguguga

SEQ ID NO: 37116 - RNA, 19 nt, Homo sapiens
  misc_RNA (1)...(19): siRNA sense strand
guaauaagguucugagcaa

SEQ ID NO: 37117 - RNA, 19 nt, Homo sapiens
  misc_RNA (1)...(19): siRNA sense strand
ccagaaacauuaauuggaa

SEQ ID NO: 37118 - RNA, 19 nt, Homo sapiens
  misc_RNA (1)...(19): siRNA sense strand
gagaugugcuccugaaaga

SEQ ID NO: 37119 - RNA, 19 nt, Homo sapiens
  misc_RNA (1)...(19): siRNA sense strand
aggaugagcuugcaaagua

SEQ ID NO: 37120 - RNA, 19 nt, Homo sapiens
  misc_RNA (1)...(19): siRNA sense strand
gaacagaagaucaagaaau

SEQ ID NO: 37121 - RNA, 19 nt, Homo sapiens
  misc_RNA (1)...(19): siRNA sense strand
gagcagaaguuaagcaaag

SEQ ID NO: 37122 - RNA, 19 nt, Homo sapiens
  misc_RNA (1)...(19): siRNA sense strand
ccacguuucuccugguuua

SEQ ID NO: 37123 - RNA, 19 nt, Homo sapiens
  misc_RNA (1)...(19): siRNA sense strand
gaagagagacaaagaguuc

SEQ ID NO: 37124 - RNA, 19 nt, Homo sapiens
  misc_RNA (1)...(19): siRNA sense strand
aagcaaagcugaugaaucu

SEQ ID NO: 37125 - RNA, 19 nt, Homo sapiens
  misc_RNA (1)...(19): siRNA sense strand
ccagguuacucgcaucuua

SEQ ID NO: 37126 - RNA, 19 nt, Homo sapiens
  misc_RNA (1)...(19): siRNA sense strand
gcaaauuacuucuuacaac

SEQ ID NO: 37127 - RNA, 19 nt, Homo sapiens
  misc_RNA (1)...(19): siRNA sense strand
aaacugagauccuugaaca

SEQ ID NO: 37128 - RNA, 19 nt, Homo sapiens
  misc_RNA (1)...(19): siRNA sense strand
gcagaccuaugacuucuug

SEQ ID NO: 37129 - RNA, 19 nt, Homo sapiens
  misc_RNA (1)...(19): siRNA sense strand
ggaggaagggaaucaauuu

SEQ ID NO: 37130 - RNA, 19 nt, Homo sapiens
  misc_RNA (1)...(19): siRNA sense strand
guacgccucugucuauuug

SEQ ID NO: 37131 - RNA, 19 nt, Homo sapiens
  misc_RNA (1)...(19): siRNA sense strand
caaaggaaaugaaggucuu

SEQ ID NO: 37132 - RNA, 19 nt, Homo sapiens
  misc_RNA (1)...(19): siRNA sense strand
gguggaaaguuaucacuga

SEQ ID NO: 37133 - RNA, 19 nt, Homo sapiens
  misc_RNA (1)...(19): siRNA sense strand
caacuggccuucagagauc

SEQ ID NO: 37134 - RNA, 19 nt, Homo sapiens
  misc_RNA (1)...(19): siRNA sense strand
guacagagcagaggacgua

SEQ ID NO: 37135 - RNA, 19 nt, Homo sapiens
  misc_RNA (1)...(19): siRNA sense strand
ucgagcaaauuacuucuua

SEQ ID NO: 37136 - RNA, 19 nt, Homo sapiens
  misc_RNA (1)...(19): siRNA sense strand
gaaagugaaagugaagaua

SEQ ID NO: 37137 - RNA, 19 nt, Homo sapiens
  misc_RNA (1)...(19): siRNA sense strand
gaugugggaugcuacagaa

SEQ ID NO: 37138 - RNA, 19 nt, Homo sapiens
  misc_RNA (1)...(19): siRNA sense strand
gcagauggagcagaaguua

SEQ ID NO: 37139 - RNA, 19 nt, Homo sapiens
  misc_RNA (1)...(19): siRNA sense strand
ggaggaagaggaagagaaa

SEQ ID NO: 37140 - RNA, 19 nt, Homo sapiens
  misc_RNA (1)...(19): siRNA sense strand
gcucaugccuucacaacug

SEQ ID NO: 37141 - RNA, 19 nt, Homo sapiens
  misc_RNA (1)...(19): siRNA sense strand
ggaagggaaucaauuucga

SEQ ID NO: 37142 - RNA, 19 nt, Homo sapiens
  misc_RNA (1)...(19): siRNA sense strand
caagaaauguacuaagucu

SEQ ID NO: 37143 - RNA, 19 nt, Homo sapiens
  misc_RNA (1)...(19): siRNA sense strand
gaucugaugugggaugcua

SEQ ID NO: 37144 - RNA, 19 nt, Homo sapiens
  misc_RNA (1)...(19): siRNA sense strand
ggacaagcuuacccaacaa

SEQ ID NO: 37145 - RNA, 19 nt, Homo sapiens
  misc_RNA (1)...(19): siRNA sense strand
aaaugaaucucacaaaugg

SEQ ID NO: 37146 - RNA, 19 nt, Homo sapiens
  misc_RNA (1)...(19): siRNA sense strand
ggcaucuucugucuuguua

SEQ ID NO: 37147 - RNA, 19 nt, Homo sapiens
  misc_RNA (1)...(19): siRNA sense strand
gggaaucaauuucgagcaa

SEQ ID NO: 37148 - RNA, 19 nt, Homo sapiens
  misc_RNA (1)...(19): siRNA sense strand
ggagcagccugaugugaug

SEQ ID NO: 37149 - RNA, 19 nt, Homo sapiens
  misc_RNA (1)...(19): siRNA sense strand
gcgggcaucuucugucuug

SEQ ID NO: 37150 - RNA, 19 nt, Homo sapiens
  misc_RNA (1)...(19): siRNA sense strand
acaaagaguuccugaaguc

SEQ ID NO: 37151 - RNA, 19 nt, Homo sapiens
  misc_RNA (1)...(19): siRNA sense strand
aacagaagaucaagaaaug

SEQ ID NO: 37152 - RNA, 19 nt, Homo sapiens
  misc_RNA (1)...(19): siRNA sense strand
caacauucauacagucaga

SEQ ID NO: 37153 - RNA, 19 nt, Homo sapiens
  misc_RNA (1)...(19): siRNA sense strand
guucugagcaacauucaua

SEQ ID NO: 37154 - RNA, 19 nt, Homo sapiens
  misc_RNA (1)...(19): siRNA sense strand
uaauaguucugaugcgaaa

SEQ ID NO: 37155 - RNA, 19 nt, Homo sapiens
  misc_RNA (1)...(19): siRNA sense strand
cagaagaucaagaaaugua

SEQ ID NO: 37156 - RNA, 19 nt, Homo sapiens
  misc_RNA (1)...(19): siRNA sense strand
gaagaggaagaaagugaaa

SEQ ID NO: 37157 - RNA, 19 nt, Homo sapiens
  misc_RNA (1)...(19): siRNA sense strand
gaccaagucguauuucauu

SEQ ID NO: 37158 - RNA, 19 nt, Homo sapiens
  misc_RNA (1)...(19): siRNA sense strand
ggaaucaauuucgagcaaa

SEQ ID NO: 37159 - RNA, 19 nt, Homo sapiens
  misc_RNA (1)...(19): siRNA sense strand
ggaaaugaaggucuuguuc

SEQ ID NO: 37160 - RNA, 19 nt, Homo sapiens
  misc_RNA (1)...(19): siRNA sense strand
gggaaauucuccuuguaau

SEQ ID NO: 37161 - RNA, 19 nt, Homo sapiens
  misc_RNA (1)...(19): siRNA sense strand
gaugguugguggauagcua

SEQ ID NO: 37162 - RNA, 19 nt, Homo sapiens
  misc_RNA (1)...(19): siRNA sense strand
auacaucgcuguuggagau

SEQ ID NO: 37163 - RNA, 19 nt, Homo sapiens
  misc_RNA (1)...(19): siRNA sense strand
gaagaaggccaagaaucaa

SEQ ID NO: 37164 - RNA, 19 nt, Homo sapiens
  misc_RNA (1)...(19): siRNA sense strand
gacaaagaguuccugaagu

SEQ ID NO: 37165 - RNA, 19 nt, Homo sapiens
  misc_RNA (1)...(19): siRNA sense strand
gagaccaagucguauuuca

SEQ ID NO: 37166 - RNA, 19 nt, Homo sapiens
  misc_RNA (1)...(19): siRNA sense strand
uaacuacgaugggagcuau

SEQ ID NO: 37167 - RNA, 19 nt, Homo sapiens
  misc_RNA (1)...(19): siRNA sense strand
gggccuugcugugacaaua

SEQ ID NO: 37168 - RNA, 19 nt, Homo sapiens
  misc_RNA (1)...(19): siRNA sense strand
caacuucuagugaaacuga

SEQ ID NO: 37169 - RNA, 19 nt, Homo sapiens
  misc_RNA (1)...(19): siRNA sense strand
ggauggagacuguggaaga

SEQ ID NO: 37170 - RNA, 19 nt, Homo sapiens
  misc_RNA (1)...(19): siRNA sense strand
agaagaaggccaagaauca

SEQ ID NO: 37171 - RNA, 19 nt, Homo sapiens
  misc_RNA (1)...(19): siRNA sense strand
gaagaagaaggccaagaau

SEQ ID NO: 37172 - RNA, 19 nt, Homo sapiens
  misc_RNA (1)...(19): siRNA sense strand
uaaagcaggcaauagauga

SEQ ID NO: 37173 - RNA, 19 nt, Homo sapiens
  misc_RNA (1)...(19): siRNA sense strand
ggucaaccggugaagaaua

SEQ ID NO: 37174 - RNA, 19 nt, Homo sapiens
  misc_RNA (1)...(19): siRNA sense strand
caucuucugucuuguuaau

SEQ ID NO: 37175 - RNA, 19 nt, Homo sapiens
  misc_RNA (1)...(19): siRNA sense strand
gcuacagaaggcacuauua

SEQ ID NO: 37176 - RNA, 19 nt, Homo sapiens
  misc_RNA (1)...(19): siRNA sense strand
gaagaaagugaaagugaag

SEQ ID NO: 37177 - RNA, 19 nt, Homo sapiens
  misc_RNA (1)...(19): siRNA sense strand
ugaugaaucugcaccuguu

SEQ ID NO: 37178 - RNA, 19 nt, Homo sapiens
  misc_RNA (1)...(19): siRNA sense strand
aguuggagaucuuacauuu

SEQ ID NO: 37179 - RNA, 19 nt, Homo sapiens
  misc_RNA (1)...(19): siRNA sense strand
gaauggugguacuccuuau

SEQ ID NO: 37180 - RNA, 19 nt, Homo sapiens
  misc_RNA (1)...(19): siRNA sense strand
gagcagaccuaugacuucu

SEQ ID NO: 37181 - RNA, 19 nt, Homo sapiens
  misc_RNA (1)...(19): siRNA sense strand
uuucagagcagaccuauga

SEQ ID NO: 37182 - RNA, 19 nt, Homo sapiens
  misc_RNA (1)...(19): siRNA sense strand
gacaaauucuuggagaugu

SEQ ID NO: 37183 - RNA, 19 nt, Homo sapiens
  misc_RNA (1)...(19): siRNA sense strand
gaagaauacaucgcuguug

SEQ ID NO: 37184 - RNA, 19 nt, Homo sapiens
  misc_RNA (1)...(19): siRNA sense strand
ccuagagccuuauagugaa

SEQ ID NO: 37185 - RNA, 19 nt, Homo sapiens
  misc_RNA (1)...(19): siRNA sense strand
guugcaaacuauaaucaga

SEQ ID NO: 37186 - RNA, 19 nt, Homo sapiens
  misc_RNA (1)...(19): siRNA sense strand
ucacugacuuccuuaagca

SEQ ID NO: 37187 - RNA, 19 nt, Homo sapiens
  misc_RNA (1)...(19): siRNA sense strand
gcagaggacguauauuucu

SEQ ID NO: 37188 - RNA, 19 nt, Homo sapiens
  misc_RNA (1)...(19): siRNA sense strand
agaagaagaaggccaagaa

SEQ ID NO: 37189 - RNA, 19 nt, Homo sapiens
  misc_RNA (1)...(19): siRNA sense strand
gagaagagagacaaagagu

SEQ ID NO: 37190 - RNA, 19 nt, Homo sapiens
  misc_RNA (1)...(19): siRNA sense strand
guugauaguuugcuuucug

SEQ ID NO: 37191 - RNA, 19 nt, Homo sapiens
  misc_RNA (1)...(19): siRNA sense strand
caagucguauuucauugau

SEQ ID NO: 37192 - RNA, 19 nt, Homo sapiens
  misc_RNA (1)...(19): siRNA sense strand
gaagcucuagaacccaaua

SEQ ID NO: 37193 - RNA, 19 nt, Homo sapiens
  misc_RNA (1)...(19): siRNA sense strand
gaagagggcagugaagaag

SEQ ID NO: 37194 - RNA, 19 nt, Homo sapiens
  misc_RNA (1)...(19): siRNA sense strand
uggacaagcuuacccaaca

SEQ ID NO: 37195 - RNA, 19 nt, Homo sapiens
  misc_RNA (1)...(19): siRNA sense strand
gaucagagaagagagacaa

SEQ ID NO: 37196 - RNA, 19 nt, Homo sapiens
  misc_RNA (1)...(19): siRNA sense strand
ggaaaagaaagcacauuaa

SEQ ID NO: 37197 - RNA, 19 nt, Homo sapiens
  misc_RNA (1)...(19): siRNA sense strand
ugaauggugguacuccuua

SEQ ID NO: 37198 - RNA, 19 nt, Homo sapiens
  misc_RNA (1)...(19): siRNA sense strand
uuauggagcuguaaaauga

SEQ ID NO: 37199 - RNA, 19 nt, Homo sapiens
  misc_RNA (1)...(19): siRNA sense strand
cguauuucauugauucuga

SEQ ID NO: 37200 - RNA, 19 nt, Homo sapiens
  misc_RNA (1)...(19): siRNA sense strand
ggagugcuguucagaaagc

SEQ ID NO: 37201 - RNA, 19 nt, Homo sapiens
  misc_RNA (1)...(19): siRNA sense strand
ugaagaagaggaagaaagu

SEQ ID NO: 37202 - RNA, 19 nt, Homo sapiens
  misc_RNA (1)...(19): siRNA sense strand
cuggagugcuguucagaaa

SEQ ID NO: 37203 - RNA, 19 nt, Homo sapiens
  misc_RNA (1)...(19): siRNA sense strand
gcuugauggugauugcuuu

SEQ ID NO: 37204 - RNA, 19 nt, Homo sapiens
  misc_RNA (1)...(19): siRNA sense strand
cauguacgccucugucuau

SEQ ID NO: 37205 - RNA, 19 nt, Homo sapiens
  misc_RNA (1)...(19): siRNA sense strand
gagcaaauuacuucuuaca

SEQ ID NO: 37206 - RNA, 19 nt, Homo sapiens
  misc_RNA (1)...(19): siRNA sense strand
guugauguguuaacuacga

SEQ ID NO: 37207 - RNA, 19 nt, Homo sapiens
  misc_RNA (1)...(19): siRNA sense strand
cuugcaaaguacugauuua

SEQ ID NO: 37208 - RNA, 19 nt, Homo sapiens
  misc_RNA (1)...(19): siRNA sense strand
ggugaaaugagaaagaaug

SEQ ID NO: 37209 - RNA, 19 nt, Homo sapiens
  misc_RNA (1)...(19): siRNA sense strand
gcaguggccucuuuacuua

SEQ ID NO: 37210 - RNA, 19 nt, Homo sapiens
  misc_RNA (1)...(19): siRNA sense strand
gcaaacagauaucaaugga

SEQ ID NO: 37211 - RNA, 19 nt, Homo sapiens
  misc_RNA (1)...(19): siRNA sense strand
caauggagguucuuugaaa

SEQ ID NO: 37212 - RNA, 19 nt, Homo sapiens
  misc_RNA (1)...(19): siRNA sense strand
gcuaugcaguggaugcuua

SEQ ID NO: 37213 - RNA, 19 nt, Homo sapiens
  misc_RNA (1)...(19): siRNA sense strand
gcaagugaauccugcaaca

SEQ ID NO: 37214 - RNA, 19 nt, Homo sapiens
  misc_RNA (1)...(19): siRNA sense strand
gcaccauccugcuguauca

SEQ ID NO: 37215 - RNA, 19 nt, Homo sapiens
  misc_RNA (1)...(19): siRNA sense strand
gguuaggauucccaaauuu

SEQ ID NO: 37216 - RNA, 19 nt, Homo sapiens
  misc_RNA (1)...(19): siRNA sense strand
ugacugcaguggccucuuu

SEQ ID NO: 37217 - RNA, 19 nt, Homo sapiens
  misc_RNA (1)...(19): siRNA sense strand
gauaugaaccacacggaaa

SEQ ID NO: 37218 - RNA, 19 nt, Homo sapiens
  misc_RNA (1)...(19): siRNA sense strand
ggauuucucuugucuuugg

SEQ ID NO: 37219 - RNA, 19 nt, Homo sapiens
  misc_RNA (1)...(19): siRNA sense strand
gacagcgucucggauauga

SEQ ID NO: 37220 - RNA, 19 nt, Homo sapiens
  misc_RNA (1)...(19): siRNA sense strand
gcccagggauuucucuugu

SEQ ID NO: 37221 - RNA, 19 nt, Homo sapiens
  misc_RNA (1)...(19): siRNA sense strand
uaaaggaagacaaggcauu

SEQ ID NO: 37222 - RNA, 19 nt, Homo sapiens
  misc_RNA (1)...(19): siRNA sense strand
gaugccagcacaauugaaa

SEQ ID NO: 37223 - RNA, 19 nt, Homo sapiens
  misc_RNA (1)...(19): siRNA sense strand
aaauuuggccugcugcuuu

SEQ ID NO: 37224 - RNA, 19 nt, Homo sapiens
  misc_RNA (1)...(19): siRNA sense strand
gaaccacacggaaauuugg

SEQ ID NO: 37225 - RNA, 19 nt, Homo sapiens
  misc_RNA (1)...(19): siRNA sense strand
guugacagcgucucggaua

SEQ ID NO: 37226 - RNA, 19 nt, Homo sapiens
  misc_RNA (1)...(19): siRNA sense strand
agggauuucucuugucuuu

SEQ ID NO: 37227 - RNA, 19 nt, Homo sapiens
  misc_RNA (1)...(19): siRNA sense strand
gaugcaaacagauaucaau

SEQ ID NO: 37228 - RNA, 19 nt, Homo sapiens
  misc_RNA (1)...(19): siRNA sense strand
ugguuaggauucccaaauu

SEQ ID NO: 37229 - RNA, 19 nt, Homo sapiens
  misc_RNA (1)...(19): siRNA sense strand
cccacuaugucaccaugua

SEQ ID NO: 37230 - RNA, 19 nt, Homo sapiens
  misc_RNA (1)...(19): siRNA sense strand
gcauuuacacggagaacga

SEQ ID NO: 37231 - RNA, 19 nt, Homo sapiens
  misc_RNA (1)...(19): siRNA sense strand
ggaagacaaggcauuuaca

SEQ ID NO: 37232 - RNA, 19 nt, Homo sapiens
  misc_RNA (1)...(19): siRNA sense strand
aaaggaagacaaggcauuu

SEQ ID NO: 37233 - RNA, 19 nt, Homo sapiens
  misc_RNA (1)...(19): siRNA sense strand
cgauguggauccagcuguu

SEQ ID NO: 37234 - RNA, 19 nt, Homo sapiens
  misc_RNA (1)...(19): siRNA sense strand
ccagggauuucucuugucu

SEQ ID NO: 37235 - RNA, 19 nt, Homo sapiens
  misc_RNA (1)...(19): siRNA sense strand
gaaauuuggccugcugcuu

SEQ ID NO: 37236 - RNA, 19 nt, Homo sapiens
  misc_RNA (1)...(19): siRNA sense strand
gaugggagccgugaucaag

SEQ ID NO: 37237 - RNA, 19 nt, Homo sapiens
  misc_RNA (1)...(19): siRNA sense strand
ccgggaaggugucucaagu

SEQ ID NO: 37238 - RNA, 19 nt, Homo sapiens
  misc_RNA (1)...(19): siRNA sense strand
ggagauccagugggaauca

SEQ ID NO: 37239 - RNA, 19 nt, Homo sapiens
  misc_RNA (1)...(19): siRNA sense strand
gaagacaaggcauuuacac

SEQ ID NO: 37240 - RNA, 19 nt, Homo sapiens
  misc_RNA (1)...(19): siRNA sense strand
cuugagaugcaaacagaua

SEQ ID NO: 37241 - RNA, 19 nt, Homo sapiens
  misc_RNA (1)...(19): siRNA sense strand
uuuguugguugucgaauau

SEQ ID NO: 37242 - RNA, 19 nt, Homo sapiens
  misc_RNA (1)...(19): siRNA sense strand
aagugaauccugcaacaaa

SEQ ID NO: 37243 - RNA, 19 nt, Homo sapiens
  misc_RNA (1)...(19): siRNA sense strand
ggagugcgauguggaucca

SEQ ID NO: 37244 - RNA, 19 nt, Homo sapiens
  misc_RNA (1)...(19): siRNA sense strand
gagaugcaaacagauauca

SEQ ID NO: 37245 - RNA, 19 nt, Homo sapiens
  misc_RNA (1)...(19): siRNA sense strand
ugaaccacacggaaauuug

SEQ ID NO: 37246 - RNA, 19 nt, Homo sapiens
  misc_RNA (1)...(19): siRNA sense strand
uuugaaaccugucagaacu

SEQ ID NO: 37247 - RNA, 19 nt, Homo sapiens
  misc_RNA (1)...(19): siRNA sense strand
ucugaugccagcacaauug

SEQ ID NO: 37248 - RNA, 19 nt, Homo sapiens
  misc_RNA (1)...(19): siRNA sense strand
caagugaauccugcaacaa

SEQ ID NO: 37249 - RNA, 19 nt, Homo sapiens
  misc_RNA (1)...(19): siRNA sense strand
gaggaugggagccgugauc

SEQ ID NO: 37250 - RNA, 19 nt, Homo sapiens
  misc_RNA (1)...(19): siRNA sense strand
caugguuuauuaugggaau

SEQ ID NO: 37251 - RNA, 19 nt, Homo sapiens
  misc_RNA (1)...(19): siRNA sense strand
ugggagccgugaucaagau

SEQ ID NO: 37252 - RNA, 19 nt, Homo sapiens
  misc_RNA (1)...(19): siRNA sense strand
cccaacccauggagaccua

SEQ ID NO: 37253 - RNA, 19 nt, Homo sapiens
  misc_RNA (1)...(19): siRNA sense strand
gugguuaggauucccaaau

SEQ ID NO: 37254 - RNA, 19 nt, Homo sapiens
  misc_RNA (1)...(19): siRNA sense strand
uaucaauggagguucuuug

SEQ ID NO: 37255 - RNA, 19 nt, Homo sapiens
  misc_RNA (1)...(19): siRNA sense strand
ugcaguggccucuuuacuu

SEQ ID NO: 37256 - RNA, 19 nt, Homo sapiens
  misc_RNA (1)...(19): siRNA sense strand
ccacugaugccccaugaaa

SEQ ID NO: 37257 - RNA, 19 nt, Homo sapiens
  misc_RNA (1)...(19): siRNA sense strand
ggaugggagccgugaucaa

SEQ ID NO: 37258 - RNA, 19 nt, Homo sapiens
  misc_RNA (1)...(19): siRNA sense strand
aaggaagacaaggcauuua

SEQ ID NO: 37259 - RNA, 19 nt, Homo sapiens
  misc_RNA (1)...(19): siRNA sense strand
ccugcuguaucacaucaug

SEQ ID NO: 37260 - RNA, 19 nt, Homo sapiens
  misc_RNA (1)...(19): siRNA sense strand
ugacagcgucucggauaug

SEQ ID NO: 37261 - RNA, 19 nt, Homo sapiens
  misc_RNA (1)...(19): siRNA sense strand
caugcugucugaagguucu

SEQ ID NO: 37262 - RNA, 19 nt, Homo sapiens
  misc_RNA (1)...(19): siRNA sense strand
gagcaugcugucugaaggu

SEQ ID NO: 37263 - RNA, 19 nt, Homo sapiens
  misc_RNA (1)...(19): siRNA sense strand
gcucacccauccccacuga

SEQ ID NO: 37264 - RNA, 19 nt, Homo sapiens
  misc_RNA (1)...(19): siRNA sense strand
agauaucaauggagguucu

SEQ ID NO: 37265 - RNA, 19 nt, Homo sapiens
  misc_RNA (1)...(19): siRNA sense strand
uuacuuaaaggaagacaag

SEQ ID NO: 37266 - RNA, 19 nt, Homo sapiens
  misc_RNA (1)...(19): siRNA sense strand
gacugcaguggccucuuua

SEQ ID NO: 37267 - RNA, 19 nt, Homo sapiens
  misc_RNA (1)...(19): siRNA sense strand
uggccacccugcucugugu

SEQ ID NO: 37268 - RNA, 19 nt, Homo sapiens
  misc_RNA (1)...(19): siRNA sense strand
gcagacaaauugggcauua

SEQ ID NO: 37269 - RNA, 19 nt, Homo sapiens
  misc_RNA (1)...(19): siRNA sense strand
guagauggcuggcuguuga

SEQ ID NO: 37270 - RNA, 19 nt, Homo sapiens
  misc_RNA (1)...(19): siRNA sense strand
ccacagacccaaccaguua

SEQ ID NO: 37271 - RNA, 19 nt, Homo sapiens
  misc_RNA (1)...(19): siRNA sense strand
uaacguacuuggugaauau

SEQ ID NO: 37272 - RNA, 19 nt, Homo sapiens
  misc_RNA (1)...(19): siRNA sense strand
cuacaucuguugcaacuaa

SEQ ID NO: 37273 - RNA, 19 nt, Homo sapiens
  misc_RNA (1)...(19): siRNA sense strand
gcacacaacuaccauccuu

SEQ ID NO: 37274 - RNA, 19 nt, Homo sapiens
  misc_RNA (1)...(19): siRNA sense strand
gagaguccauugaaauuau

SEQ ID NO: 37275 - RNA, 19 nt, Homo sapiens
  misc_RNA (1)...(19): siRNA sense strand
gaaagggaauauaaguaug

SEQ ID NO: 37276 - RNA, 19 nt, Homo sapiens
  misc_RNA (1)...(19): siRNA sense strand
ccacaaaguucuuccuaug

SEQ ID NO: 37277 - RNA, 19 nt, Homo sapiens
  misc_RNA (1)...(19): siRNA sense strand
gcaccagguucucuuuauu

SEQ ID NO: 37278 - RNA, 19 nt, Homo sapiens
  misc_RNA (1)...(19): siRNA sense strand
gguaggacguugucugcua

SEQ ID NO: 37279 - RNA, 19 nt, Homo sapiens
  misc_RNA (1)...(19): siRNA sense strand
gaaggugugucuacgacuu

SEQ ID NO: 37280 - RNA, 19 nt, Homo sapiens
  misc_RNA (1)...(19): siRNA sense strand
gcagagguuugcuguacuu

SEQ ID NO: 37281 - RNA, 19 nt, Homo sapiens
  misc_RNA (1)...(19): siRNA sense strand
acaaaguucuuccuaugaa

SEQ ID NO: 37282 - RNA, 19 nt, Homo sapiens
  misc_RNA (1)...(19): siRNA sense strand
gacaucaugcugaccauua

SEQ ID NO: 37283 - RNA, 19 nt, Homo sapiens
  misc_RNA (1)...(19): siRNA sense strand
gagacugccuguaaacuag

SEQ ID NO: 37284 - RNA, 19 nt, Homo sapiens
  misc_RNA (1)...(19): siRNA sense strand
gauauaguccuccuuggaa

SEQ ID NO: 37285 - RNA, 19 nt, Homo sapiens
  misc_RNA (1)...(19): siRNA sense strand
caaauugggcauuaucuug

SEQ ID NO: 37286 - RNA, 19 nt, Homo sapiens
  misc_RNA (1)...(19): siRNA sense strand
cgacaucauucccuauaau

SEQ ID NO: 37287 - RNA, 19 nt, Homo sapiens
  misc_RNA (1)...(19): siRNA sense strand
acacaacuaccauccuuua

SEQ ID NO: 37288 - RNA, 19 nt, Homo sapiens
  misc_RNA (1)...(19): siRNA sense strand
guggacaaauugaccuuaa

SEQ ID NO: 37289 - RNA, 19 nt, Homo sapiens
  misc_RNA (1)...(19): siRNA sense strand
agagucaaguggacaaauu

SEQ ID NO: 37290 - RNA, 19 nt, Homo sapiens
  misc_RNA (1)...(19): siRNA sense strand
gagguuugcuguacuuagu

SEQ ID NO: 37291 - RNA, 19 nt, Homo sapiens
  misc_RNA (1)...(19): siRNA sense strand
caaauugaccuuaacaucu

SEQ ID NO: 37292 - RNA, 19 nt, Homo sapiens
  misc_RNA (1)...(19): siRNA sense strand
gaagaaaaccuugcugaaa

SEQ ID NO: 37293 - RNA, 19 nt, Homo sapiens
  misc_RNA (1)...(19): siRNA sense strand
guaggacguugucugcuau

SEQ ID NO: 37294 - RNA, 19 nt, Homo sapiens
  misc_RNA (1)...(19): siRNA sense strand
cgagaguccauugaaauua

SEQ ID NO: 37295 - RNA, 19 nt, Homo sapiens
  misc_RNA (1)...(19): siRNA sense strand
caaaguucuuccuaugaau

SEQ ID NO: 37296 - RNA, 19 nt, Homo sapiens
  misc_RNA (1)...(19): siRNA sense strand
aagaaaaccuugcugaaaa

SEQ ID NO: 37297 - RNA, 19 nt, Homo sapiens
  misc_RNA (1)...(19): siRNA sense strand
ggacaaauugaccuuaaca

SEQ ID NO: 37298 - RNA, 19 nt, Homo sapiens
  misc_RNA (1)...(19): siRNA sense strand
gaccauuuaugccgggauu

SEQ ID NO: 37299 - RNA, 19 nt, Homo sapiens
  misc_RNA (1)...(19): siRNA sense strand
gaagggcauucagaaauac

SEQ ID NO: 37300 - RNA, 19 nt, Homo sapiens
  misc_RNA (1)...(19): siRNA sense strand
gcagugcugugugaugaug

SEQ ID NO: 37301 - RNA, 19 nt, Homo sapiens
  misc_RNA (1)...(19): siRNA sense strand
gagcauggguccacauacg

SEQ ID NO: 37302 - RNA, 19 nt, Homo sapiens
  misc_RNA (1)...(19): siRNA sense strand
gauggcuggcuguugauua

SEQ ID NO: 37303 - RNA, 19 nt, Homo sapiens
  misc_RNA (1)...(19): siRNA sense strand
gcuaccuucugauguugua

SEQ ID NO: 37304 - RNA, 19 nt, Homo sapiens
  misc_RNA (1)...(19): siRNA sense strand
ggcaccagguucucuuuau

SEQ ID NO: 37305 - RNA, 19 nt, Homo sapiens
  misc_RNA (1)...(19): siRNA sense strand
gaucaaggaggaugagcuu

SEQ ID NO: 37306 - RNA, 19 nt, Homo sapiens
  misc_RNA (1)...(19): siRNA sense strand
uguuguaacugccguaaga

SEQ ID NO: 37307 - RNA, 19 nt, Homo sapiens
  misc_RNA (1)...(19): siRNA sense strand
ugaaauacagacaggauug

SEQ ID NO: 37308 - RNA, 19 nt, Homo sapiens
  misc_RNA (1)...(19): siRNA sense strand
uuuccaaacuagcacauuu

SEQ ID NO: 37309 - RNA, 19 nt, Homo sapiens
  misc_RNA (1)...(19): siRNA sense strand
uggagagacugccuguaaa

SEQ ID NO: 37310 - RNA, 19 nt, Homo sapiens
  misc_RNA (1)...(19): siRNA sense strand
acaucaugcugaccauuaa

SEQ ID NO: 37311 - RNA, 19 nt, Homo sapiens
  misc_RNA (1)...(19): siRNA sense strand
caacuaccauccuuuaccu

SEQ ID NO: 37312 - RNA, 19 nt, Homo sapiens
  misc_RNA (1)...(19): siRNA sense strand
ugucuacgacuucgagaua

SEQ ID NO: 37313 - RNA, 19 nt, Homo sapiens
  misc_RNA (1)...(19): siRNA sense strand
caucgcagcccuugagguu

SEQ ID NO: 37314 - RNA, 19 nt, Homo sapiens
  misc_RNA (1)...(19): siRNA sense strand
uagcacauuugcagagguu

SEQ ID NO: 37315 - RNA, 19 nt, Homo sapiens
  misc_RNA (1)...(19): siRNA sense strand
cuaccauccuuuaccugua

SEQ ID NO: 37316 - RNA, 19 nt, Homo sapiens
  misc_RNA (1)...(19): siRNA sense strand
uccaaccucugaugacauu

SEQ ID NO: 37317 - RNA, 19 nt, Homo sapiens
  misc_RNA (1)...(19): siRNA sense strand
ggcuggcuguugauuauga

SEQ ID NO: 37318 - RNA, 19 nt, Homo sapiens
  misc_RNA (1)...(19): siRNA sense strand
aaauguggcugcguucaug

SEQ ID NO: 37319 - RNA, 19 nt, Homo sapiens
  misc_RNA (1)...(19): siRNA sense strand
gcacauuugcagagguuug

SEQ ID NO: 37320 - RNA, 19 nt, Homo sapiens
  misc_RNA (1)...(19): siRNA sense strand
gaugaaauacagacaggau

SEQ ID NO: 37321 - RNA, 19 nt, Homo sapiens
  misc_RNA (1)...(19): siRNA sense strand
ugaagcaggcguuguuguu

SEQ ID NO: 37322 - RNA, 19 nt, Homo sapiens
  misc_RNA (1)...(19): siRNA sense strand
cuggagagacugccuguaa

SEQ ID NO: 37323 - RNA, 19 nt, Homo sapiens
  misc_RNA (1)...(19): siRNA sense strand
uuacuuaugggauguagaa

SEQ ID NO: 37324 - RNA, 19 nt, Homo sapiens
  misc_RNA (1)...(19): siRNA sense strand
cuucgagaguccauugaaa

SEQ ID NO: 37325 - RNA, 19 nt, Homo sapiens
  misc_RNA (1)...(19): siRNA sense strand
gagcuucgagaguccauug

SEQ ID NO: 37326 - RNA, 19 nt, Homo sapiens
  misc_RNA (1)...(19): siRNA sense strand
uaacugccguaagaggaaa

SEQ ID NO: 37327 - RNA, 19 nt, Homo sapiens
  misc_RNA (1)...(19): siRNA sense strand
gaacucaugaagcuaccuu

SEQ ID NO: 37328 - RNA, 19 nt, Homo sapiens
  misc_RNA (1)...(19): siRNA sense strand
gggagcauggguccacaua

SEQ ID NO: 37329 - RNA, 19 nt, Homo sapiens
  misc_RNA (1)...(19): siRNA sense strand
gaagcaggcguuguuguuc

SEQ ID NO: 37330 - RNA, 19 nt, Homo sapiens
  misc_RNA (1)...(19): siRNA sense strand
guagaaggcagaaaauauu

SEQ ID NO: 37331 - RNA, 19 nt, Homo sapiens
  misc_RNA (1)...(19): siRNA sense strand
ugucugcagugcuguguga

SEQ ID NO: 37332 - RNA, 19 nt, Homo sapiens
  misc_RNA (1)...(19): siRNA sense strand
cacaaaguucuuccuauga

SEQ ID NO: 37333 - RNA, 19 nt, Homo sapiens
  misc_RNA (1)...(19): siRNA sense strand
gauugugaaugcucugaag

SEQ ID NO: 37334 - RNA, 19 nt, Homo sapiens
  misc_RNA (1)...(19): siRNA sense strand
gaagagucaaguggacaaa

SEQ ID NO: 37335 - RNA, 19 nt, Homo sapiens
  misc_RNA (1)...(19): siRNA sense strand
caaggaggaugagcuucga

SEQ ID NO: 37336 - RNA, 19 nt, Homo sapiens
  misc_RNA (1)...(19): siRNA sense strand
guaacugccguaagaggaa

SEQ ID NO: 37337 - RNA, 19 nt, Homo sapiens
  misc_RNA (1)...(19): siRNA sense strand
aaauugggcauuaucuuga

SEQ ID NO: 37338 - RNA, 19 nt, Homo sapiens
  misc_RNA (1)...(19): siRNA sense strand
ucgacaucauucccuauaa

SEQ ID NO: 37339 - RNA, 19 nt, Homo sapiens
  misc_RNA (1)...(19): siRNA sense strand
agagacugccuguaaacua

SEQ ID NO: 37340 - RNA, 19 nt, Homo sapiens
  misc_RNA (1)...(19): siRNA sense strand
cuuaacaucuagagcuuuc

SEQ ID NO: 37341 - RNA, 19 nt, Homo sapiens
  misc_RNA (1)...(19): siRNA sense strand
cugcagugcugugugauga

SEQ ID NO: 37342 - RNA, 19 nt, Homo sapiens
  misc_RNA (1)...(19): siRNA sense strand
guacuuagucgcggaguuc

SEQ ID NO: 37343 - RNA, 19 nt, Homo sapiens
  misc_RNA (1)...(19): siRNA sense strand
auaacguacuuggugaaua

SEQ ID NO: 37344 - RNA, 19 nt, Homo sapiens
  misc_RNA (1)...(19): siRNA sense strand
ucgcggaguucauucuuca

SEQ ID NO: 37345 - RNA, 19 nt, Homo sapiens
  misc_RNA (1)...(19): siRNA sense strand
gagucaaguggacaaauug

SEQ ID NO: 37346 - RNA, 19 nt, Homo sapiens
  misc_RNA (1)...(19): siRNA sense strand
uaaguauggugcacacaac

SEQ ID NO: 37347 - RNA, 19 nt, Homo sapiens
  misc_RNA (1)...(19): siRNA sense strand
caccagguucucuuuauug

SEQ ID NO: 37348 - RNA, 19 nt, Homo sapiens
  misc_RNA (1)...(19): siRNA sense strand
acaaauugaccuuaacauc

SEQ ID NO: 37349 - RNA, 19 nt, Homo sapiens
  misc_RNA (1)...(19): siRNA sense strand
ucgagaguccauugaaauu

SEQ ID NO: 37350 - RNA, 19 nt, Homo sapiens
  misc_RNA (1)...(19): siRNA sense strand
cagacaaauugggcauuau

SEQ ID NO: 37351 - RNA, 19 nt, Homo sapiens
  misc_RNA (1)...(19): siRNA sense strand
ugucugcuaucuccaguuc

SEQ ID NO: 37352 - RNA, 19 nt, Homo sapiens
  misc_RNA (1)...(19): siRNA sense strand
ggagagacugccuguaaac

SEQ ID NO: 37353 - RNA, 19 nt, Homo sapiens
  misc_RNA (1)...(19): siRNA sense strand
gggugaagcaggcguuguu

SEQ ID NO: 37354 - RNA, 19 nt, Homo sapiens
  misc_RNA (1)...(19): siRNA sense strand
gaaauacagacaggauugg

SEQ ID NO: 37355 - RNA, 19 nt, Homo sapiens
  misc_RNA (1)...(19): siRNA sense strand
ucagaaauacaaagcaaag

SEQ ID NO: 37356 - RNA, 19 nt, Homo sapiens
  misc_RNA (1)...(19): siRNA sense strand
gaggaugagcuucgagagu

SEQ ID NO: 37357 - RNA, 19 nt, Homo sapiens
  misc_RNA (1)...(19): siRNA sense strand
caacccauggcgacauuau

SEQ ID NO: 37358 - RNA, 19 nt, Homo sapiens
  misc_RNA (1)...(19): siRNA sense strand
ugaaaaugcagacaaauug

SEQ ID NO: 37359 - RNA, 19 nt, Homo sapiens
  misc_RNA (1)...(19): siRNA sense strand
gggcuuauacccugugucu

SEQ ID NO: 37360 - RNA, 19 nt, Homo sapiens
  misc_RNA (1)...(19): siRNA sense strand
cagacaggauuggccagaa

SEQ ID NO: 37361 - RNA, 19 nt, Homo sapiens
  misc_RNA (1)...(19): siRNA sense strand
auauaguccuccuuggaaa

SEQ ID NO: 37362 - RNA, 19 nt, Homo sapiens
  misc_RNA (1)...(19): siRNA sense strand
uaccauccuuuaccuguag

SEQ ID NO: 37363 - RNA, 19 nt, Homo sapiens
  misc_RNA (1)...(19): siRNA sense strand
ugauauaguccuccuugga

SEQ ID NO: 37364 - RNA, 19 nt, Homo sapiens
  misc_RNA (1)...(19): siRNA sense strand
cguaagaggaaaaggauua

SEQ ID NO: 37365 - RNA, 19 nt, Homo sapiens
  misc_RNA (1)...(19): siRNA sense strand
gcuggcuguugauuaugaa

SEQ ID NO: 37366 - RNA, 19 nt, Homo sapiens
  misc_RNA (1)...(19): siRNA sense strand
gucuacgacuucgagauaa

SEQ ID NO: 37367 - RNA, 19 nt, Homo sapiens
  misc_RNA (1)...(19): siRNA sense strand
guauuuacuuaugggaugu

SEQ ID NO: 37368 - RNA, 19 nt, Homo sapiens
  misc_RNA (1)...(19): siRNA sense strand
gagcgaagauaccugcuaa

SEQ ID NO: 37369 - RNA, 19 nt, Homo sapiens
  misc_RNA (1)...(19): siRNA sense strand
gaucuuggauggauugcua

SEQ ID NO: 37370 - RNA, 19 nt, Homo sapiens
  misc_RNA (1)...(19): siRNA sense strand
gaucuuaguagccauauuu

SEQ ID NO: 37371 - RNA, 19 nt, Homo sapiens
  misc_RNA (1)...(19): siRNA sense strand
uaucaccgcuggagaacua

SEQ ID NO: 37372 - RNA, 19 nt, Homo sapiens
  misc_RNA (1)...(19): siRNA sense strand
gcacaucuccacuuaauag

SEQ ID NO: 37373 - RNA, 19 nt, Homo sapiens
  misc_RNA (1)...(19): siRNA sense strand
gaagaugggccuggacuuu

SEQ ID NO: 37374 - RNA, 19 nt, Homo sapiens
  misc_RNA (1)...(19): siRNA sense strand
uaggauaucugacgggauu

SEQ ID NO: 37375 - RNA, 19 nt, Homo sapiens
  misc_RNA (1)...(19): siRNA sense strand
ggaacagaaagcuuuauaa

SEQ ID NO: 37376 - RNA, 19 nt, Homo sapiens
  misc_RNA (1)...(19): siRNA sense strand
ggauauggguucuccuuca

SEQ ID NO: 37377 - RNA, 19 nt, Homo sapiens
  misc_RNA (1)...(19): siRNA sense strand
gaacagaaagcuuuauaac

SEQ ID NO: 37378 - RNA, 19 nt, Homo sapiens
  misc_RNA (1)...(19): siRNA sense strand
ggagaccaauauccaagaa

SEQ ID NO: 37379 - RNA, 19 nt, Homo sapiens
  misc_RNA (1)...(19): siRNA sense strand
caacuggacgguguauuua

SEQ ID NO: 37380 - RNA, 19 nt, Homo sapiens
  misc_RNA (1)...(19): siRNA sense strand
ugagauaauucuacacaga

SEQ ID NO: 37381 - RNA, 19 nt, Homo sapiens
  misc_RNA (1)...(19): siRNA sense strand
ggaggucucacucuucuuu

SEQ ID NO: 37382 - RNA, 19 nt, Homo sapiens
  misc_RNA (1)...(19): siRNA sense strand
gccaggaguuugcuucauu

SEQ ID NO: 37383 - RNA, 19 nt, Homo sapiens
  misc_RNA (1)...(19): siRNA sense strand
gugcauaccuguuuaccau

SEQ ID NO: 37384 - RNA, 19 nt, Homo sapiens
  misc_RNA (1)...(19): siRNA sense strand
gaaagggucacggugcaua

SEQ ID NO: 37385 - RNA, 19 nt, Homo sapiens
  misc_RNA (1)...(19): siRNA sense strand
gcacuguugggauguguua

SEQ ID NO: 37386 - RNA, 19 nt, Homo sapiens
  misc_RNA (1)...(19): siRNA sense strand
guggugcuguguucuauuu

SEQ ID NO: 37387 - RNA, 19 nt, Homo sapiens
  misc_RNA (1)...(19): siRNA sense strand
gaaagucaugggccuguuu

SEQ ID NO: 37388 - RNA, 19 nt, Homo sapiens
  misc_RNA (1)...(19): siRNA sense strand
ggaggugucuggucugucu

SEQ ID NO: 37389 - RNA, 19 nt, Homo sapiens
  misc_RNA (1)...(19): siRNA sense strand
gcagcgcucuuuguucuga

SEQ ID NO: 37390 - RNA, 19 nt, Homo sapiens
  misc_RNA (1)...(19): siRNA sense strand
caaggaacccagugagauu

SEQ ID NO: 37391 - RNA, 19 nt, Homo sapiens
  misc_RNA (1)...(19): siRNA sense strand
ggauucugcucgccaaaug

SEQ ID NO: 37392 - RNA, 19 nt, Homo sapiens
  misc_RNA (1)...(19): siRNA sense strand
gccaucugguugcuaauuu

SEQ ID NO: 37393 - RNA, 19 nt, Homo sapiens
  misc_RNA (1)...(19): siRNA sense strand
caucuccacuuaauagaau

SEQ ID NO: 37394 - RNA, 19 nt, Homo sapiens
  misc_RNA (1)...(19): siRNA sense strand
ccagugagauuguugaacu

SEQ ID NO: 37395 - RNA, 19 nt, Homo sapiens
  misc_RNA (1)...(19): siRNA sense strand
ggugccaucugguugcuaa

SEQ ID NO: 37396 - RNA, 19 nt, Homo sapiens
  misc_RNA (1)...(19): siRNA sense strand
gaacuacuccgugaaccuu

SEQ ID NO: 37397 - RNA, 19 nt, Homo sapiens
  misc_RNA (1)...(19): siRNA sense strand
gcgcugaucauauuugaga

SEQ ID NO: 37398 - RNA, 19 nt, Homo sapiens
  misc_RNA (1)...(19): siRNA sense strand
aaagggaggucucacucuu

SEQ ID NO: 37399 - RNA, 19 nt, Homo sapiens
  misc_RNA (1)...(19): siRNA sense strand
uggcacaucuccacuuaau

SEQ ID NO: 37400 - RNA, 19 nt, Homo sapiens
  misc_RNA (1)...(19): siRNA sense strand
caagacaaguccugauugc

SEQ ID NO: 37401 - RNA, 19 nt, Homo sapiens
  misc_RNA (1)...(19): siRNA sense strand
guucacugcuaccaugauu

SEQ ID NO: 37402 - RNA, 19 nt, Homo sapiens
  misc_RNA (1)...(19): siRNA sense strand
cggauucacugcacacaug

SEQ ID NO: 37403 - RNA, 19 nt, Homo sapiens
  misc_RNA (1)...(19): siRNA sense strand
gauauggguucuccuucau

SEQ ID NO: 37404 - RNA, 19 nt, Homo sapiens
  misc_RNA (1)...(19): siRNA sense strand
ggaggcaacgggacacuga

SEQ ID NO: 37405 - RNA, 19 nt, Homo sapiens
  misc_RNA (1)...(19): siRNA sense strand
gaacugaagcacgagauuc

SEQ ID NO: 37406 - RNA, 19 nt, Homo sapiens
  misc_RNA (1)...(19): siRNA sense strand
acaacuggacgguguauuu

SEQ ID NO: 37407 - RNA, 19 nt, Homo sapiens
  misc_RNA (1)...(19): siRNA sense strand
gauuccugcuuuacagaaa

SEQ ID NO: 37408 - RNA, 19 nt, Homo sapiens
  misc_RNA (1)...(19): siRNA sense strand
cagaaagcuuuauaacaag

SEQ ID NO: 37409 - RNA, 19 nt, Homo sapiens
  misc_RNA (1)...(19): siRNA sense strand
ucacggugcauaccuguuu

SEQ ID NO: 37410 - RNA, 19 nt, Homo sapiens
  misc_RNA (1)...(19): siRNA sense strand
ucagacuccuuuacuggaa

SEQ ID NO: 37411 - RNA, 19 nt, Homo sapiens
  misc_RNA (1)...(19): siRNA sense strand
gugaugagcaggaccuuug

SEQ ID NO: 37412 - RNA, 19 nt, Homo sapiens
  misc_RNA (1)...(19): siRNA sense strand
gaugaucuuaguagccaua

SEQ ID NO: 37413 - RNA, 19 nt, Homo sapiens
  misc_RNA (1)...(19): siRNA sense strand
caucacugcugaagagucu

SEQ ID NO: 37414 - RNA, 19 nt, Homo sapiens
  misc_RNA (1)...(19): siRNA sense strand
gugguggaguggauugauu

SEQ ID NO: 37415 - RNA, 19 nt, Homo sapiens
  misc_RNA (1)...(19): siRNA sense strand
gacccagccugacccaugu

SEQ ID NO: 37416 - RNA, 19 nt, Homo sapiens
  misc_RNA (1)...(19): siRNA sense strand
gagagacgguguccaucag

SEQ ID NO: 37417 - RNA, 19 nt, Homo sapiens
  misc_RNA (1)...(19): siRNA sense strand
ccaggaguuugcuucauuc

SEQ ID NO: 37418 - RNA, 19 nt, Homo sapiens
  misc_RNA (1)...(19): siRNA sense strand
gaacccagugagauuguug

SEQ ID NO: 37419 - RNA, 19 nt, Homo sapiens
  misc_RNA (1)...(19): siRNA sense strand
acuggacgguguauuuaaa

SEQ ID NO: 37420 - RNA, 19 nt, Homo sapiens
  misc_RNA (1)...(19): siRNA sense strand
ggacuuugccggauucacu

SEQ ID NO: 37421 - RNA, 19 nt, Homo sapiens
  misc_RNA (1)...(19): siRNA sense strand
gacccaggcugucccucuu

SEQ ID NO: 37422 - RNA, 19 nt, Homo sapiens
  misc_RNA (1)...(19): siRNA sense strand
gggauuuguuaucuucaug

SEQ ID NO: 37423 - RNA, 19 nt, Homo sapiens
  misc_RNA (1)...(19): siRNA sense strand
gauguguuaucuccuugug

SEQ ID NO: 37424 - RNA, 19 nt, Homo sapiens
  misc_RNA (1)...(19): siRNA sense strand
guuguguccugcacuguug

SEQ ID NO: 37425 - RNA, 19 nt, Homo sapiens
  misc_RNA (1)...(19): siRNA sense strand
ggagcgaagauaccugcua

SEQ ID NO: 37426 - RNA, 19 nt, Homo sapiens
  misc_RNA (1)...(19): siRNA sense strand
ggaacccagugagauuguu

SEQ ID NO: 37427 - RNA, 19 nt, Homo sapiens
  misc_RNA (1)...(19): siRNA sense strand
ccaagacaaguccugauug

SEQ ID NO: 37428 - RNA, 19 nt, Homo sapiens
  misc_RNA (1)...(19): siRNA sense strand
cacagcaggucacucacaa

SEQ ID NO: 37429 - RNA, 19 nt, Homo sapiens
  misc_RNA (1)...(19): siRNA sense strand
accaagagcugaggaagau

SEQ ID NO: 37430 - RNA, 19 nt, Homo sapiens
  misc_RNA (1)...(19): siRNA sense strand
uugcagaacagcauggaua

SEQ ID NO: 37431 - RNA, 19 nt, Homo sapiens
  misc_RNA (1)...(19): siRNA sense strand
cacggugcauaccuguuua

SEQ ID NO: 37432 - RNA, 19 nt, Homo sapiens
  misc_RNA (1)...(19): siRNA sense strand
cggacucgcugaacuugug

SEQ ID NO: 37433 - RNA, 19 nt, Homo sapiens
  misc_RNA (1)...(19): siRNA sense strand
uggaacagaaagcuuuaua

SEQ ID NO: 37434 - RNA, 19 nt, Homo sapiens
  misc_RNA (1)...(19): siRNA sense strand
gaucuucacaaacauugga

SEQ ID NO: 37435 - RNA, 19 nt, Homo sapiens
  misc_RNA (1)...(19): siRNA sense strand
ggccacagcaggucacuca

SEQ ID NO: 37436 - RNA, 19 nt, Homo sapiens
  misc_RNA (1)...(19): siRNA sense strand
auuggcacaucuccacuua

SEQ ID NO: 37437 - RNA, 19 nt, Homo sapiens
  misc_RNA (1)...(19): siRNA sense strand
ggaaugggcaacccuucug

SEQ ID NO: 37438 - RNA, 19 nt, Homo sapiens
  misc_RNA (1)...(19): siRNA sense strand
ugagauuguugaacugaag

SEQ ID NO: 37439 - RNA, 19 nt, Homo sapiens
  misc_RNA (1)...(19): siRNA sense strand
ccagagagacgguguccau

SEQ ID NO: 37440 - RNA, 19 nt, Homo sapiens
  misc_RNA (1)...(19): siRNA sense strand
gagccacgacccugagguu

SEQ ID NO: 37441 - RNA, 19 nt, Homo sapiens
  misc_RNA (1)...(19): siRNA sense strand
cgucgugugugcagggauu

SEQ ID NO: 37442 - RNA, 19 nt, Homo sapiens
  misc_RNA (1)...(19): siRNA sense strand
gcacauccgacuccgucuu

SEQ ID NO: 37443 - RNA, 19 nt, Homo sapiens
  misc_RNA (1)...(19): siRNA sense strand
ggucuaaagauuccugcuu

SEQ ID NO: 37444 - RNA, 19 nt, Homo sapiens
  misc_RNA (1)...(19): siRNA sense strand
gcccugcuguuuggcauga

SEQ ID NO: 37445 - RNA, 19 nt, Homo sapiens
  misc_RNA (1)...(19): siRNA sense strand
gaggagaagcgagcacuca

SEQ ID NO: 37446 - RNA, 19 nt, Homo sapiens
  misc_RNA (1)...(19): siRNA sense strand
gaaagcuuuauaacaagga

SEQ ID NO: 37447 - RNA, 19 nt, Homo sapiens
  misc_RNA (1)...(19): siRNA sense strand
agaccaauauccaagaacu

SEQ ID NO: 37448 - RNA, 19 nt, Homo sapiens
  misc_RNA (1)...(19): siRNA sense strand
gugagauuguugaacugaa

SEQ ID NO: 37449 - RNA, 19 nt, Homo sapiens
  misc_RNA (1)...(19): siRNA sense strand
guaccuccgcggaagugua

SEQ ID NO: 37450 - RNA, 19 nt, Homo sapiens
  misc_RNA (1)...(19): siRNA sense strand
cagaacagcauggauaugg

SEQ ID NO: 37451 - RNA, 19 nt, Homo sapiens
  misc_RNA (1)...(19): siRNA sense strand
uugcagcgcucuuuguucu

SEQ ID NO: 37452 - RNA, 19 nt, Homo sapiens
  misc_RNA (1)...(19): siRNA sense strand
cgauuauugugcuguaaag

SEQ ID NO: 37453 - RNA, 19 nt, Homo sapiens
  misc_RNA (1)...(19): siRNA sense strand
ggaagaugggccuggacuu

SEQ ID NO: 37454 - RNA, 19 nt, Homo sapiens
  misc_RNA (1)...(19): siRNA sense strand
ggagaagcgagcacucagu

SEQ ID NO: 37455 - RNA, 19 nt, Homo sapiens
  misc_RNA (1)...(19): siRNA sense strand
ugggauguguuaucuccuu

SEQ ID NO: 37456 - RNA, 19 nt, Homo sapiens
  misc_RNA (1)...(19): siRNA sense strand
gcagaacagcauggauaug

SEQ ID NO: 37457 - RNA, 19 nt, Homo sapiens
  misc_RNA (1)...(19): siRNA sense strand
gaaugggcaacccuucugu

SEQ ID NO: 37458 - RNA, 19 nt, Homo sapiens
  misc_RNA (1)...(19): siRNA sense strand
gaucucacaggaggacaaa

SEQ ID NO: 37459 - RNA, 19 nt, Homo sapiens
  misc_RNA (1)...(19): siRNA sense strand
cauuauuguuuccaaccaa

SEQ ID NO: 37460 - RNA, 19 nt, Homo sapiens
  misc_RNA (1)...(19): siRNA sense strand
cacauccgacuccgucuuu

SEQ ID NO: 37461 - RNA, 19 nt, Homo sapiens
  misc_RNA (1)...(19): siRNA sense strand
caauauccaagaacuccaa

SEQ ID NO: 37462 - RNA, 19 nt, Homo sapiens
  misc_RNA (1)...(19): siRNA sense strand
gggagaccaauauccaaga

SEQ ID NO: 37463 - RNA, 19 nt, Homo sapiens
  misc_RNA (1)...(19): siRNA sense strand
cugcacacauguucauugg

SEQ ID NO: 37464 - RNA, 19 nt, Homo sapiens
  misc_RNA (1)...(19): siRNA sense strand
gguggugggauggaauuaa

SEQ ID NO: 37465 - RNA, 19 nt, Homo sapiens
  misc_RNA (1)...(19): siRNA sense strand
gguucuccuucauggaauu

SEQ ID NO: 37466 - RNA, 19 nt, Homo sapiens
  misc_RNA (1)...(19): siRNA sense strand
gcaacgggacacugauugg

SEQ ID NO: 37467 - RNA, 19 nt, Homo sapiens
  misc_RNA (1)...(19): siRNA sense strand
uggcauucaucuugaucuu

SEQ ID NO: 37468 - RNA, 19 nt, Homo sapiens
  misc_RNA (1)...(19): siRNA sense strand
gaaauuaccucccaaguug

SEQ ID NO: 37469 - RNA, 19 nt, Homo sapiens
  misc_RNA (1)...(19): siRNA sense strand
ugacauagcuucuaacagu

SEQ ID NO: 37470 - RNA, 19 nt, Homo sapiens
  misc_RNA (1)...(19): siRNA sense strand
ggagggaguuuguguuuga

SEQ ID NO: 37471 - RNA, 19 nt, Homo sapiens
  misc_RNA (1)...(19): siRNA sense strand
gaacgggcaauaugaguua

SEQ ID NO: 37472 - RNA, 19 nt, Homo sapiens
  misc_RNA (1)...(19): siRNA sense strand
ggaugaugcuucuuauauu

SEQ ID NO: 37473 - RNA, 19 nt, Homo sapiens
  misc_RNA (1)...(19): siRNA sense strand
gaacgaagguaccggaaag

SEQ ID NO: 37474 - RNA, 19 nt, Homo sapiens
  misc_RNA (1)...(19): siRNA sense strand
ugaaaucccugaugaggaa

SEQ ID NO: 37475 - RNA, 19 nt, Homo sapiens
  misc_RNA (1)...(19): siRNA sense strand
gaaaggaucagugucgaua

SEQ ID NO: 37476 - RNA, 19 nt, Homo sapiens
  misc_RNA (1)...(19): siRNA sense strand
ggaaauuaccucccaaguu

SEQ ID NO: 37477 - RNA, 19 nt, Homo sapiens
  misc_RNA (1)...(19): siRNA sense strand
gaaaaugacuuccuuccuu

SEQ ID NO: 37478 - RNA, 19 nt, Homo sapiens
  misc_RNA (1)...(19): siRNA sense strand
ucaaacauauccuggcaaa

SEQ ID NO: 37479 - RNA, 19 nt, Homo sapiens
  misc_RNA (1)...(19): siRNA sense strand
gaagauaguguacgcauca

SEQ ID NO: 37480 - RNA, 19 nt, Homo sapiens
  misc_RNA (1)...(19): siRNA sense strand
uaagaaagaccuucagaga

SEQ ID NO: 37481 - RNA, 19 nt, Homo sapiens
  misc_RNA (1)...(19): siRNA sense strand
gaaauucgaccagcuaaau

SEQ ID NO: 37482 - RNA, 19 nt, Homo sapiens
  misc_RNA (1)...(19): siRNA sense strand
caagacagacuccaaguga

SEQ ID NO: 37483 - RNA, 19 nt, Homo sapiens
  misc_RNA (1)...(19): siRNA sense strand
ugacuuccuuccuuccuua

SEQ ID NO: 37484 - RNA, 19 nt, Homo sapiens
  misc_RNA (1)...(19): siRNA sense strand
ggagaucuggcuucuagua

SEQ ID NO: 37485 - RNA, 19 nt, Homo sapiens
  misc_RNA (1)...(19): siRNA sense strand
gagaagauaagauugaaga

SEQ ID NO: 37486 - RNA, 19 nt, Homo sapiens
  misc_RNA (1)...(19): siRNA sense strand
gaacuuggaaugugaaugg

SEQ ID NO: 37487 - RNA, 19 nt, Homo sapiens
  misc_RNA (1)...(19): siRNA sense strand
gggagggucucaucaaaca

SEQ ID NO: 37488 - RNA, 19 nt, Homo sapiens
  misc_RNA (1)...(19): siRNA sense strand
gggugaagguuguggauga

SEQ ID NO: 37489 - RNA, 19 nt, Homo sapiens
  misc_RNA (1)...(19): siRNA sense strand
gggaugaugcuucuuauau

SEQ ID NO: 37490 - RNA, 19 nt, Homo sapiens
  misc_RNA (1)...(19): siRNA sense strand
ccugauaucuacugcauug

SEQ ID NO: 37491 - RNA, 19 nt, Homo sapiens
  misc_RNA (1)...(19): siRNA sense strand
cuucagauguguucaagaa

SEQ ID NO: 37492 - RNA, 19 nt, Homo sapiens
  misc_RNA (1)...(19): siRNA sense strand
guccauggcuguagagaga

SEQ ID NO: 37493 - RNA, 19 nt, Homo sapiens
  misc_RNA (1)...(19): siRNA sense strand
ggagucacauggaacugaa

SEQ ID NO: 37494 - RNA, 19 nt, Homo sapiens
  misc_RNA (1)...(19): siRNA sense strand
gaagagcuccagcagauca

SEQ ID NO: 37495 - RNA, 19 nt, Homo sapiens
  misc_RNA (1)...(19): siRNA sense strand
guagaucaccuauucaaau

SEQ ID NO: 37496 - RNA, 19 nt, Homo sapiens
  misc_RNA (1)...(19): siRNA sense strand
gcuuugaaaucccugauga

SEQ ID NO: 37497 - RNA, 19 nt, Homo sapiens
  misc_RNA (1)...(19): siRNA sense strand
caugaucgcuacucucuuc

SEQ ID NO: 37498 - RNA, 19 nt, Homo sapiens
  misc_RNA (1)...(19): siRNA sense strand
gagaugccauagaaauguu

SEQ ID NO: 37499 - RNA, 19 nt, Homo sapiens
  misc_RNA (1)...(19): siRNA sense strand
agaaagaccuucagagacu

SEQ ID NO: 37500 - RNA, 19 nt, Homo sapiens
  misc_RNA (1)...(19): siRNA sense strand
gagggucucaucaaacaua

SEQ ID NO: 37501 - RNA, 19 nt, Homo sapiens
  misc_RNA (1)...(19): siRNA sense strand
gcgggagggucucaucaaa

SEQ ID NO: 37502 - RNA, 19 nt, Homo sapiens
  misc_RNA (1)...(19): siRNA sense strand
gaaaucccuucugcaaaug

SEQ ID NO: 37503 - RNA, 19 nt, Homo sapiens
  misc_RNA (1)...(19): siRNA sense strand
gcugugagauuuguauuuc

SEQ ID NO: 37504 - RNA, 19 nt, Homo sapiens
  misc_RNA (1)...(19): siRNA sense strand
guagagagagguuugcauu

SEQ ID NO: 37505 - RNA, 19 nt, Homo sapiens
  misc_RNA (1)...(19): siRNA sense strand
ugauugacauagcuucuaa

SEQ ID NO: 37506 - RNA, 19 nt, Homo sapiens
  misc_RNA (1)...(19): siRNA sense strand
gauuacuucuugacuauca

SEQ ID NO: 37507 - RNA, 19 nt, Homo sapiens
  misc_RNA (1)...(19): siRNA sense strand
gggagaagauaagauugaa

SEQ ID NO: 37508 - RNA, 19 nt, Homo sapiens
  misc_RNA (1)...(19): siRNA sense strand
cagcaacaauggacagguu

SEQ ID NO: 37509 - RNA, 19 nt, Homo sapiens
  misc_RNA (1)...(19): siRNA sense strand
ggaucagugucgauacauu

SEQ ID NO: 37510 - RNA, 19 nt, Homo sapiens
  misc_RNA (1)...(19): siRNA sense strand
uuucagggcuucuuggauu

SEQ ID NO: 37511 - RNA, 19 nt, Homo sapiens
  misc_RNA (1)...(19): siRNA sense strand
aaggagaucuggcuucuag

SEQ ID NO: 37512 - RNA, 19 nt, Homo sapiens
  misc_RNA (1)...(19): siRNA sense strand
uuaccaaacucauagacuu

SEQ ID NO: 37513 - RNA, 19 nt, Homo sapiens
  misc_RNA (1)...(19): siRNA sense strand
gaggcucugugccguauga

SEQ ID NO: 37514 - RNA, 19 nt, Homo sapiens
  misc_RNA (1)...(19): siRNA sense strand
gaagguaccggaaagucuu

SEQ ID NO: 37515 - RNA, 19 nt, Homo sapiens
  misc_RNA (1)...(19): siRNA sense strand
cgaauucuuuggagaggaa

SEQ ID NO: 37516 - RNA, 19 nt, Homo sapiens
  misc_RNA (1)...(19): siRNA sense strand
aaccuuggcugaacuguga

SEQ ID NO: 37517 - RNA, 19 nt, Homo sapiens
  misc_RNA (1)...(19): siRNA sense strand
cauucagacuuucagauuu

SEQ ID NO: 37518 - RNA, 19 nt, Homo sapiens
  misc_RNA (1)...(19): siRNA sense strand
gcaaagcgagagaaagaau

SEQ ID NO: 37519 - RNA, 19 nt, Homo sapiens
  misc_RNA (1)...(19): siRNA sense strand
aggaagagcuccagcagau

SEQ ID NO: 37520 - RNA, 19 nt, Homo sapiens
  misc_RNA (1)...(19): siRNA sense strand
guugggagauuugaauuau

SEQ ID NO: 37521 - RNA, 19 nt, Homo sapiens
  misc_RNA (1)...(19): siRNA sense strand
caaagcgagagaaagaaua

SEQ ID NO: 37522 - RNA, 19 nt, Homo sapiens
  misc_RNA (1)...(19): siRNA sense strand
agaaguuccuguuaccaaa

SEQ ID NO: 37523 - RNA, 19 nt, Homo sapiens
  misc_RNA (1)...(19): siRNA sense strand
ccaaagccaaguauaagaa

SEQ ID NO: 37524 - RNA, 19 nt, Homo sapiens
  misc_RNA (1)...(19): siRNA sense strand
gaaugugaauggccagucu

SEQ ID NO: 37525 - RNA, 19 nt, Homo sapiens
  misc_RNA (1)...(19): siRNA sense strand
gcaguugaacaucaugaaa

SEQ ID NO: 37526 - RNA, 19 nt, Homo sapiens
  misc_RNA (1)...(19): siRNA sense strand
gcuacucucuucacuaguc

SEQ ID NO: 37527 - RNA, 19 nt, Homo sapiens
  misc_RNA (1)...(19): siRNA sense strand
gcaaagacucuguaaccau

SEQ ID NO: 37528 - RNA, 19 nt, Homo sapiens
  misc_RNA (1)...(19): siRNA sense strand
uaccagaaauuagacacua

SEQ ID NO: 37529 - RNA, 19 nt, Homo sapiens
  misc_RNA (1)...(19): siRNA sense strand
gagaaguuccuguuaccaa

SEQ ID NO: 37530 - RNA, 19 nt, Homo sapiens
  misc_RNA (1)...(19): siRNA sense strand
ucaccuggaucgaggcaaa

SEQ ID NO: 37531 - RNA, 19 nt, Homo sapiens
  misc_RNA (1)...(19): siRNA sense strand
uaaauagccacuucagaug

SEQ ID NO: 37532 - RNA, 19 nt, Homo sapiens
  misc_RNA (1)...(19): siRNA sense strand
gauaucuacugcauuggau

SEQ ID NO: 37533 - RNA, 19 nt, Homo sapiens
  misc_RNA (1)...(19): siRNA sense strand
guuggaacuuggaauguga

SEQ ID NO: 37534 - RNA, 19 nt, Homo sapiens
  misc_RNA (1)...(19): siRNA sense strand
gagaaagaauaugucaaca

SEQ ID NO: 37535 - RNA, 19 nt, Homo sapiens
  misc_RNA (1)...(19): siRNA sense strand
cgggcaauaugaguuaaua

SEQ ID NO: 37536 - RNA, 19 nt, Homo sapiens
  misc_RNA (1)...(19): siRNA sense strand
aaggagaaguuccagauca

SEQ ID NO: 37537 - RNA, 19 nt, Homo sapiens
  misc_RNA (1)...(19): siRNA sense strand
cuaugaauuuggacaagaa

SEQ ID NO: 37538 - RNA, 19 nt, Homo sapiens
  misc_RNA (1)...(19): siRNA sense strand
ugaauacaauagcgucaau

SEQ ID NO: 37539 - RNA, 19 nt, Homo sapiens
  misc_RNA (1)...(19): siRNA sense strand
gauaccagcauuccugaga

SEQ ID NO: 37540 - RNA, 19 nt, Homo sapiens
  misc_RNA (1)...(19): siRNA sense strand
gaaaagaccaauccgagaa

SEQ ID NO: 37541 - RNA, 19 nt, Homo sapiens
  misc_RNA (1)...(19): siRNA sense strand
gaggugaaaagucuuauua

SEQ ID NO: 37542 - RNA, 19 nt, Homo sapiens
  misc_RNA (1)...(19): siRNA sense strand
ugggagauuugaauuauag

SEQ ID NO: 37543 - RNA, 19 nt, Homo sapiens
  misc_RNA (1)...(19): siRNA sense strand
ugauauugcuacagaaaca

SEQ ID NO: 37544 - RNA, 19 nt, Homo sapiens
  misc_RNA (1)...(19): siRNA sense strand
ccaauccuccugauaucua

SEQ ID NO: 37545 - RNA, 19 nt, Homo sapiens
  misc_RNA (1)...(19): siRNA sense strand
ucaagaagcagaagaaacu

SEQ ID NO: 37546 - RNA, 19 nt, Homo sapiens
  misc_RNA (1)...(19): siRNA sense strand
gcugaacugugaucccaau

SEQ ID NO: 37547 - RNA, 19 nt, Homo sapiens
  misc_RNA (1)...(19): siRNA sense strand
cuuccgagaugccauagaa

SEQ ID NO: 37548 - RNA, 19 nt, Homo sapiens
  misc_RNA (1)...(19): siRNA sense strand
ggaacgggcaauaugaguu

SEQ ID NO: 37549 - RNA, 19 nt, Homo sapiens
  misc_RNA (1)...(19): siRNA sense strand
gguugggagauuugaauua

SEQ ID NO: 37550 - RNA, 19 nt, Homo sapiens
  misc_RNA (1)...(19): siRNA sense strand
guugggaugaugcuucuua

SEQ ID NO: 37551 - RNA, 19 nt, Homo sapiens
  misc_RNA (1)...(19): siRNA sense strand
caaagccaaguauaagaaa

SEQ ID NO: 37552 - RNA, 19 nt, Homo sapiens
  misc_RNA (1)...(19): siRNA sense strand
gaacugugaucccaauccu

SEQ ID NO: 37553 - RNA, 19 nt, Homo sapiens
  misc_RNA (1)...(19): siRNA sense strand
caguggacauuucucuuga

SEQ ID NO: 37554 - RNA, 19 nt, Homo sapiens
  misc_RNA (1)...(19): siRNA sense strand
gaucagugucgauacauuc

SEQ ID NO: 37555 - RNA, 19 nt, Homo sapiens
  misc_RNA (1)...(19): siRNA sense strand
caggagggaguuuguguuu

SEQ ID NO: 37556 - RNA, 19 nt, Homo sapiens
  misc_RNA (1)...(19): siRNA sense strand
gaucccaauccuccugaua

SEQ ID NO: 37557 - RNA, 19 nt, Homo sapiens
  misc_RNA (1)...(19): siRNA sense strand
gcaagacagacuccaagug

SEQ ID NO: 37558 - RNA, 19 nt, Homo sapiens
  misc_RNA (1)...(19): siRNA sense strand
uaucagcgaugucuugacu

SEQ ID NO: 37559 - RNA, 19 nt, Homo sapiens
  misc_RNA (1)...(19): siRNA sense strand
caaaugagacaguggacau

SEQ ID NO: 37560 - RNA, 19 nt, Homo sapiens
  misc_RNA (1)...(19): siRNA sense strand
auaaauagccacuucagau

SEQ ID NO: 37561 - RNA, 19 nt, Homo sapiens
  misc_RNA (1)...(19): siRNA sense strand
guggaggacuuugagagaa

SEQ ID NO: 37562 - RNA, 19 nt, Homo sapiens
  misc_RNA (1)...(19): siRNA sense strand
ccaaguauaagaaaguuca

SEQ ID NO: 37563 - RNA, 19 nt, Homo sapiens
  misc_RNA (1)...(19): siRNA sense strand
ucgcuacucucuucacuag

SEQ ID NO: 37564 - RNA, 19 nt, Homo sapiens
  misc_RNA (1)...(19): siRNA sense strand
uagcgucaaugccaacaug

SEQ ID NO: 37565 - RNA, 19 nt, Homo sapiens
  misc_RNA (1)...(19): siRNA sense strand
ccaaggagaucuggcuucu

SEQ ID NO: 37566 - RNA, 19 nt, Homo sapiens
  misc_RNA (1)...(19): siRNA sense strand
gaacucgggagaagauaag

SEQ ID NO: 37567 - RNA, 19 nt, Homo sapiens
  misc_RNA (1)...(19): siRNA sense strand
ggugaagguuguggaugaa

SEQ ID NO: 37568 - RNA, 19 nt, Homo sapiens
  misc_RNA (1)...(19): siRNA sense strand
gaaauuaccucccaaguug

SEQ ID NO: 37569 - RNA, 19 nt, Homo sapiens
  misc_RNA (1)...(19): siRNA sense strand
ugacauagcuucuaacagu

SEQ ID NO: 37570 - RNA, 19 nt, Homo sapiens
  misc_RNA (1)...(19): siRNA sense strand
ggagggaguuuguguuuga

SEQ ID NO: 37571 - RNA, 19 nt, Homo sapiens
  misc_RNA (1)...(19): siRNA sense strand
gaacgggcaauaugaguua

SEQ ID NO: 37572 - RNA, 19 nt, Homo sapiens
  misc_RNA (1)...(19): siRNA sense strand
ggaugaugcuucuuauauu

SEQ ID NO: 37573 - RNA, 19 nt, Homo sapiens
  misc_RNA (1)...(19): siRNA sense strand
gaacgaagguaccggaaag

SEQ ID NO: 37574 - RNA, 19 nt, Homo sapiens
  misc_RNA (1)...(19): siRNA sense strand
ugaaaucccugaugaggaa

SEQ ID NO: 37575 - RNA, 19 nt, Homo sapiens
  misc_RNA (1)...(19): siRNA sense strand
gaaaggaucagugucgaua

SEQ ID NO: 37576 - RNA, 19 nt, Homo sapiens
  misc_RNA (1)...(19): siRNA sense strand
ggaaauuaccucccaaguu

SEQ ID NO: 37577 - RNA, 19 nt, Homo sapiens
  misc_RNA (1)...(19): siRNA sense strand
gaaaaugacuuccuuccuu

SEQ ID NO: 37578 - RNA, 19 nt, Homo sapiens
  misc_RNA (1)...(19): siRNA sense strand
ucaaacauauccuggcaaa

SEQ ID NO: 37579 - RNA, 19 nt, Homo sapiens
  misc_RNA (1)...(19): siRNA sense strand
gaagauaguguacgcauca

SEQ ID NO: 37580 - RNA, 19 nt, Homo sapiens
  misc_RNA (1)...(19): siRNA sense strand
uaagaaagaccuucagaga

SEQ ID NO: 37581 - RNA, 19 nt, Homo sapiens
  misc_RNA (1)...(19): siRNA sense strand
gaaauucgaccagcuaaau

SEQ ID NO: 37582 - RNA, 19 nt, Homo sapiens
  misc_RNA (1)...(19): siRNA sense strand
caagacagacuccaaguga

SEQ ID NO: 37583 - RNA, 19 nt, Homo sapiens
  misc_RNA (1)...(19): siRNA sense strand
ugacuuccuuccuuccuua

SEQ ID NO: 37584 - RNA, 19 nt, Homo sapiens
  misc_RNA (1)...(19): siRNA sense strand
ggagaucuggcuucuagua

SEQ ID NO: 37585 - RNA, 19 nt, Homo sapiens
  misc_RNA (1)...(19): siRNA sense strand
gagaagauaagauugaaga

SEQ ID NO: 37586 - RNA, 19 nt, Homo sapiens
  misc_RNA (1)...(19): siRNA sense strand
gaacuuggaaugugaaugg

SEQ ID NO: 37587 - RNA, 19 nt, Homo sapiens
  misc_RNA (1)...(19): siRNA sense strand
gggagggucucaucaaaca

SEQ ID NO: 37588 - RNA, 19 nt, Homo sapiens
  misc_RNA (1)...(19): siRNA sense strand
gggugaagguuguggauga

SEQ ID NO: 37589 - RNA, 19 nt, Homo sapiens
  misc_RNA (1)...(19): siRNA sense strand
gggaugaugcuucuuauau

SEQ ID NO: 37590 - RNA, 19 nt, Homo sapiens
  misc_RNA (1)...(19): siRNA sense strand
ccugauaucuacugcauug

SEQ ID NO: 37591 - RNA, 19 nt, Homo sapiens
  misc_RNA (1)...(19): siRNA sense strand
cuucagauguguucaagaa

SEQ ID NO: 37592 - RNA, 19 nt, Homo sapiens
  misc_RNA (1)...(19): siRNA sense strand
guccauggcuguagagaga

SEQ ID NO: 37593 - RNA, 19 nt, Homo sapiens
  misc_RNA (1)...(19): siRNA sense strand
ggagucacauggaacugaa

SEQ ID NO: 37594 - RNA, 19 nt, Homo sapiens
  misc_RNA (1)...(19): siRNA sense strand
gaagagcuccagcagauca

SEQ ID NO: 37595 - RNA, 19 nt, Homo sapiens
  misc_RNA (1)...(19): siRNA sense strand
guagaucaccuauucaaau

SEQ ID NO: 37596 - RNA, 19 nt, Homo sapiens
  misc_RNA (1)...(19): siRNA sense strand
gcuuugaaaucccugauga

SEQ ID NO: 37597 - RNA, 19 nt, Homo sapiens
  misc_RNA (1)...(19): siRNA sense strand
caugaucgcuacucucuuc

SEQ ID NO: 37598 - RNA, 19 nt, Homo sapiens
  misc_RNA (1)...(19): siRNA sense strand
gagaugccauagaaauguu

SEQ ID NO: 37599 - RNA, 19 nt, Homo sapiens
  misc_RNA (1)...(19): siRNA sense strand
agaaagaccuucagagacu

SEQ ID NO: 37600 - RNA, 19 nt, Homo sapiens
  misc_RNA (1)...(19): siRNA sense strand
gagggucucaucaaacaua

SEQ ID NO: 37601 - RNA, 19 nt, Homo sapiens
  misc_RNA (1)...(19): siRNA sense strand
gcgggagggucucaucaaa

SEQ ID NO: 37602 - RNA, 19 nt, Homo sapiens
  misc_RNA (1)...(19): siRNA sense strand
gaaaucccuucugcaaaug

SEQ ID NO: 37603 - RNA, 19 nt, Homo sapiens
  misc_RNA (1)...(19): siRNA sense strand
gcugugagauuuguauuuc

SEQ ID NO: 37604 - RNA, 19 nt, Homo sapiens
  misc_RNA (1)...(19): siRNA sense strand
guagagagagguuugcauu

SEQ ID NO: 37605 - RNA, 19 nt, Homo sapiens
  misc_RNA (1)...(19): siRNA sense strand
ugauugacauagcuucuaa

SEQ ID NO: 37606 - RNA, 19 nt, Homo sapiens
  misc_RNA (1)...(19): siRNA sense strand
gauuacuucuugacuauca

SEQ ID NO: 37607 - RNA, 19 nt, Homo sapiens
  misc_RNA (1)...(19): siRNA sense strand
gggagaagauaagauugaa

SEQ ID NO: 37608 - RNA, 19 nt, Homo sapiens
  misc_RNA (1)...(19): siRNA sense strand
cagcaacaauggacagguu

SEQ ID NO: 37609 - RNA, 19 nt, Homo sapiens
  misc_RNA (1)...(19): siRNA sense strand
ggaucagugucgauacauu

SEQ ID NO: 37610 - RNA, 19 nt, Homo sapiens
  misc_RNA (1)...(19): siRNA sense strand
uuucagggcuucuuggauu

SEQ ID NO: 37611 - RNA, 19 nt, Homo sapiens
  misc_RNA (1)...(19): siRNA sense strand
aaggagaucuggcuucuag

SEQ ID NO: 37612 - RNA, 19 nt, Homo sapiens
  misc_RNA (1)...(19): siRNA sense strand
uuaccaaacucauagacuu

SEQ ID NO: 37613 - RNA, 19 nt, Homo sapiens
  misc_RNA (1)...(19): siRNA sense strand
gaggcucugugccguauga

SEQ ID NO: 37614 - RNA, 19 nt, Homo sapiens
  misc_RNA (1)...(19): siRNA sense strand
gaagguaccggaaagucuu

SEQ ID NO: 37615 - RNA, 19 nt, Homo sapiens
  misc_RNA (1)...(19): siRNA sense strand
cgaauucuuuggagaggaa

SEQ ID NO: 37616 - RNA, 19 nt, Homo sapiens
  misc_RNA (1)...(19): siRNA sense strand
aaccuuggcugaacuguga

SEQ ID NO: 37617 - RNA, 19 nt, Homo sapiens
  misc_RNA (1)...(19): siRNA sense strand
cauucagacuuucagauuu

SEQ ID NO: 37618 - RNA, 19 nt, Homo sapiens
  misc_RNA (1)...(19): siRNA sense strand
gcaaagcgagagaaagaau

SEQ ID NO: 37619 - RNA, 19 nt, Homo sapiens
  misc_RNA (1)...(19): siRNA sense strand
aggaagagcuccagcagau

SEQ ID NO: 37620 - RNA, 19 nt, Homo sapiens
  misc_RNA (1)...(19): siRNA sense strand
guugggagauuugaauuau

SEQ ID NO: 37621 - RNA, 19 nt, Homo sapiens
  misc_RNA (1)...(19): siRNA sense strand
caaagcgagagaaagaaua

SEQ ID NO: 37622 - RNA, 19 nt, Homo sapiens
  misc_RNA (1)...(19): siRNA sense strand
agaaguuccuguuaccaaa

SEQ ID NO: 37623 - RNA, 19 nt, Homo sapiens
  misc_RNA (1)...(19): siRNA sense strand
ccaaagccaaguauaagaa

SEQ ID NO: 37624 - RNA, 19 nt, Homo sapiens
  misc_RNA (1)...(19): siRNA sense strand
gaaugugaauggccagucu

SEQ ID NO: 37625 - RNA, 19 nt, Homo sapiens
  misc_RNA (1)...(19): siRNA sense strand
gcaguugaacaucaugaaa

SEQ ID NO: 37626 - RNA, 19 nt, Homo sapiens
  misc_RNA (1)...(19): siRNA sense strand
gcuacucucuucacuaguc

SEQ ID NO: 37627 - RNA, 19 nt, Homo sapiens
  misc_RNA (1)...(19): siRNA sense strand
gcaaagacucuguaaccau

SEQ ID NO: 37628 - RNA, 19 nt, Homo sapiens
  misc_RNA (1)...(19): siRNA sense strand
uaccagaaauuagacacua

SEQ ID NO: 37629 - RNA, 19 nt, Homo sapiens
  misc_RNA (1)...(19): siRNA sense strand
gagaaguuccuguuaccaa

SEQ ID NO: 37630 - RNA, 19 nt, Homo sapiens
  misc_RNA (1)...(19): siRNA sense strand
ucaccuggaucgaggcaaa

SEQ ID NO: 37631 - RNA, 19 nt, Homo sapiens
  misc_RNA (1)...(19): siRNA sense strand
uaaauagccacuucagaug

SEQ ID NO: 37632 - RNA, 19 nt, Homo sapiens
  misc_RNA (1)...(19): siRNA sense strand
gauaucuacugcauuggau

SEQ ID NO: 37633 - RNA, 19 nt, Homo sapiens
  misc_RNA (1)...(19): siRNA sense strand
guuggaacuuggaauguga

SEQ ID NO: 37634 - RNA, 19 nt, Homo sapiens
  misc_RNA (1)...(19): siRNA sense strand
gagaaagaauaugucaaca

SEQ ID NO: 37635 - RNA, 19 nt, Homo sapiens
  misc_RNA (1)...(19): siRNA sense strand
cgggcaauaugaguuaaua

SEQ ID NO: 37636 - RNA, 19 nt, Homo sapiens
  misc_RNA (1)...(19): siRNA sense strand
aaggagaaguuccagauca

SEQ ID NO: 37637 - RNA, 19 nt, Homo sapiens
  misc_RNA (1)...(19): siRNA sense strand
cuaugaauuuggacaagaa

SEQ ID NO: 37638 - RNA, 19 nt, Homo sapiens
  misc_RNA (1)...(19): siRNA sense strand
ugaauacaauagcgucaau

SEQ ID NO: 37639 - RNA, 19 nt, Homo sapiens
  misc_RNA (1)...(19): siRNA sense strand
gauaccagcauuccugaga

SEQ ID NO: 37640 - RNA, 19 nt, Homo sapiens
  misc_RNA (1)...(19): siRNA sense strand
gaaaagaccaauccgagaa

SEQ ID NO: 37641 - RNA, 19 nt, Homo sapiens
  misc_RNA (1)...(19): siRNA sense strand
gaggugaaaagucuuauua

SEQ ID NO: 37642 - RNA, 19 nt, Homo sapiens
  misc_RNA (1)...(19): siRNA sense strand
ugggagauuugaauuauag

SEQ ID NO: 37643 - RNA, 19 nt, Homo sapiens
  misc_RNA (1)...(19): siRNA sense strand
ugauauugcuacagaaaca

SEQ ID NO: 37644 - RNA, 19 nt, Homo sapiens
  misc_RNA (1)...(19): siRNA sense strand
ccaauccuccugauaucua

SEQ ID NO: 37645 - RNA, 19 nt, Homo sapiens
  misc_RNA (1)...(19): siRNA sense strand
ucaagaagcagaagaaacu

SEQ ID NO: 37646 - RNA, 19 nt, Homo sapiens
  misc_RNA (1)...(19): siRNA sense strand
gcugaacugugaucccaau

SEQ ID NO: 37647 - RNA, 19 nt, Homo sapiens
  misc_RNA (1)...(19): siRNA sense strand
cuuccgagaugccauagaa

SEQ ID NO: 37648 - RNA, 19 nt, Homo sapiens
  misc_RNA (1)...(19): siRNA sense strand
ggaacgggcaauaugaguu

SEQ ID NO: 37649 - RNA, 19 nt, Homo sapiens
  misc_RNA (1)...(19): siRNA sense strand
gguugggagauuugaauua

SEQ ID NO: 37650 - RNA, 19 nt, Homo sapiens
  misc_RNA (1)...(19): siRNA sense strand
guugggaugaugcuucuua

SEQ ID NO: 37651 - RNA, 19 nt, Homo sapiens
  misc_RNA (1)...(19): siRNA sense strand
caaagccaaguauaagaaa

SEQ ID NO: 37652 - RNA, 19 nt, Homo sapiens
  misc_RNA (1)...(19): siRNA sense strand
gaacugugaucccaauccu

SEQ ID NO: 37653 - RNA, 19 nt, Homo sapiens
  misc_RNA (1)...(19): siRNA sense strand
caguggacauuucucuuga

SEQ ID NO: 37654 - RNA, 19 nt, Homo sapiens
  misc_RNA (1)...(19): siRNA sense strand
gaucagugucgauacauuc

SEQ ID NO: 37655 - RNA, 19 nt, Homo sapiens
  misc_RNA (1)...(19): siRNA sense strand
caggagggaguuuguguuu

SEQ ID NO: 37656 - RNA, 19 nt, Homo sapiens
  misc_RNA (1)...(19): siRNA sense strand
gaucccaauccuccugaua

SEQ ID NO: 37657 - RNA, 19 nt, Homo sapiens
  misc_RNA (1)...(19): siRNA sense strand
gcaagacagacuccaagug

SEQ ID NO: 37658 - RNA, 19 nt, Homo sapiens
  misc_RNA (1)...(19): siRNA sense strand
uaucagcgaugucuugacu

SEQ ID NO: 37659 - RNA, 19 nt, Homo sapiens
  misc_RNA (1)...(19): siRNA sense strand
caaaugagacaguggacau

SEQ ID NO: 37660 - RNA, 19 nt, Homo sapiens
  misc_RNA (1)...(19): siRNA sense strand
auaaauagccacuucagau

SEQ ID NO: 37661 - RNA, 19 nt, Homo sapiens
  misc_RNA (1)...(19): siRNA sense strand
guggaggacuuugagagaa

SEQ ID NO: 37662 - RNA, 19 nt, Homo sapiens
  misc_RNA (1)...(19): siRNA sense strand
ccaaguauaagaaaguuca

SEQ ID NO: 37663 - RNA, 19 nt, Homo sapiens
  misc_RNA (1)...(19): siRNA sense strand
ucgcuacucucuucacuag

SEQ ID NO: 37664 - RNA, 19 nt, Homo sapiens
  misc_RNA (1)...(19): siRNA sense strand
uagcgucaaugccaacaug

SEQ ID NO: 37665 - RNA, 19 nt, Homo sapiens
  misc_RNA (1)...(19): siRNA sense strand
ccaaggagaucuggcuucu

SEQ ID NO: 37666 - RNA, 19 nt, Homo sapiens
  misc_RNA (1)...(19): siRNA sense strand
gaacucgggagaagauaag

SEQ ID NO: 37667 - RNA, 19 nt, Homo sapiens
  misc_RNA (1)...(19): siRNA sense strand
ggugaagguuguggaugaa

SEQ ID NO: 37668 - RNA, 19 nt, Homo sapiens
  misc_RNA (1)...(19): siRNA sense strand
guacuuaucuggugaauua

SEQ ID NO: 37669 - RNA, 19 nt, Homo sapiens
  misc_RNA (1)...(19): siRNA sense strand
gaggaucgcccaucaaaua

SEQ ID NO: 37670 - RNA, 19 nt, Homo sapiens
  misc_RNA (1)...(19): siRNA sense strand
gaaggaggaucgcccauca

SEQ ID NO: 37671 - RNA, 19 nt, Homo sapiens
  misc_RNA (1)...(19): siRNA sense strand
cgaugcagguuuccaaaua

SEQ ID NO: 37672 - RNA, 19 nt, Homo sapiens
  misc_RNA (1)...(19): siRNA sense strand
gguagagguugaagaaauu

SEQ ID NO: 37673 - RNA, 19 nt, Homo sapiens
  misc_RNA (1)...(19): siRNA sense strand
gaaaagaauugagcguuua

SEQ ID NO: 37674 - RNA, 19 nt, Homo sapiens
  misc_RNA (1)...(19): siRNA sense strand
ggaaacaguuacuauucuu

SEQ ID NO: 37675 - RNA, 19 nt, Homo sapiens
  misc_RNA (1)...(19): siRNA sense strand
gaugauaccugggaagaug

SEQ ID NO: 37676 - RNA, 19 nt, Homo sapiens
  misc_RNA (1)...(19): siRNA sense strand
aaagggaaaugcacauaaa

SEQ ID NO: 37677 - RNA, 19 nt, Homo sapiens
  misc_RNA (1)...(19): siRNA sense strand
caagagaggugagggaguu

SEQ ID NO: 37678 - RNA, 19 nt, Homo sapiens
  misc_RNA (1)...(19): siRNA sense strand
gaagaaauuguggauauug

SEQ ID NO: 37679 - RNA, 19 nt, Homo sapiens
  misc_RNA (1)...(19): siRNA sense strand
aagaaaggguugacucuga

SEQ ID NO: 37680 - RNA, 19 nt, Homo sapiens
  misc_RNA (1)...(19): siRNA sense strand
ggaagauggugaaaggaau

SEQ ID NO: 37681 - RNA, 19 nt, Homo sapiens
  misc_RNA (1)...(19): siRNA sense strand
gcaaggaaacaguuacuau

SEQ ID NO: 37682 - RNA, 19 nt, Homo sapiens
  misc_RNA (1)...(19): siRNA sense strand
gggaggugcuauggauuua

SEQ ID NO: 37683 - RNA, 19 nt, Homo sapiens
  misc_RNA (1)...(19): siRNA sense strand
gacaguggaugacguacaa

SEQ ID NO: 37684 - RNA, 19 nt, Homo sapiens
  misc_RNA (1)...(19): siRNA sense strand
gaacgacaguacuuaucug

SEQ ID NO: 37685 - RNA, 19 nt, Homo sapiens
  misc_RNA (1)...(19): siRNA sense strand
gaugcagguuuccaaauau

SEQ ID NO: 37686 - RNA, 19 nt, Homo sapiens
  misc_RNA (1)...(19): siRNA sense strand
caaggaaacaguuacuauu

SEQ ID NO: 37687 - RNA, 19 nt, Homo sapiens
  misc_RNA (1)...(19): siRNA sense strand
gcaaagggaaaugcacaua

SEQ ID NO: 37688 - RNA, 19 nt, Homo sapiens
  misc_RNA (1)...(19): siRNA sense strand
caaagggaaaugcacauaa

SEQ ID NO: 37689 - RNA, 19 nt, Homo sapiens
  misc_RNA (1)...(19): siRNA sense strand
uuauguacaucgccuuaua

SEQ ID NO: 37690 - RNA, 19 nt, Homo sapiens
  misc_RNA (1)...(19): siRNA sense strand
gaucgcccaucaaauacaa

SEQ ID NO: 37691 - RNA, 19 nt, Homo sapiens
  misc_RNA (1)...(19): siRNA sense strand
uuauacagauccaguagaa

SEQ ID NO: 37692 - RNA, 19 nt, Homo sapiens
  misc_RNA (1)...(19): siRNA sense strand
gggauguguuuguuccuuu

SEQ ID NO: 37693 - RNA, 19 nt, Homo sapiens
  misc_RNA (1)...(19): siRNA sense strand
ugugucaaccgcauuauua

SEQ ID NO: 37694 - RNA, 19 nt, Homo sapiens
  misc_RNA (1)...(19): siRNA sense strand
gcaggcaaggaaacaguua

SEQ ID NO: 37695 - RNA, 19 nt, Homo sapiens
  misc_RNA (1)...(19): siRNA sense strand
guucaauggucagcacuuu

SEQ ID NO: 37696 - RNA, 19 nt, Homo sapiens
  misc_RNA (1)...(19): siRNA sense strand
gcccaaauauaacuguuca

SEQ ID NO: 37697 - RNA, 19 nt, Homo sapiens
  misc_RNA (1)...(19): siRNA sense strand
ccagaagacauccauauuc

SEQ ID NO: 37698 - RNA, 19 nt, Homo sapiens
  misc_RNA (1)...(19): siRNA sense strand
acaugaagcugaugcagau

SEQ ID NO: 37699 - RNA, 19 nt, Homo sapiens
  misc_RNA (1)...(19): siRNA sense strand
gggcuggaguuccugcauu

SEQ ID NO: 37700 - RNA, 19 nt, Homo sapiens
  misc_RNA (1)...(19): siRNA sense strand
uaacugcagucagcaacaa

SEQ ID NO: 37701 - RNA, 19 nt, Homo sapiens
  misc_RNA (1)...(19): siRNA sense strand
cauggucucuucauaugug

SEQ ID NO: 37702 - RNA, 19 nt, Homo sapiens
  misc_RNA (1)...(19): siRNA sense strand
gaggugcuauggauuuagu

SEQ ID NO: 37703 - RNA, 19 nt, Homo sapiens
  misc_RNA (1)...(19): siRNA sense strand
gaagauggugaaaggaaug

SEQ ID NO: 37704 - RNA, 19 nt, Homo sapiens
  misc_RNA (1)...(19): siRNA sense strand
gggaagauggugaaaggaa

SEQ ID NO: 37705 - RNA, 19 nt, Homo sapiens
  misc_RNA (1)...(19): siRNA sense strand
ggcuggaguuccugcauuu

SEQ ID NO: 37706 - RNA, 19 nt, Homo sapiens
  misc_RNA (1)...(19): siRNA sense strand
guaagggaacgaaucauca

SEQ ID NO: 37707 - RNA, 19 nt, Homo sapiens
  misc_RNA (1)...(19): siRNA sense strand
ugcagcagaucgcaaauug

SEQ ID NO: 37708 - RNA, 19 nt, Homo sapiens
  misc_RNA (1)...(19): siRNA sense strand
ucaaccgcauuauuacuga

SEQ ID NO: 37709 - RNA, 19 nt, Homo sapiens
  misc_RNA (1)...(19): siRNA sense strand
ucuuauagaugcuuuacug

SEQ ID NO: 37710 - RNA, 19 nt, Homo sapiens
  misc_RNA (1)...(19): siRNA sense strand
gaaaggguugacucugauu

SEQ ID NO: 37711 - RNA, 19 nt, Homo sapiens
  misc_RNA (1)...(19): siRNA sense strand
ccauauuccucagauuuau

SEQ ID NO: 37712 - RNA, 19 nt, Homo sapiens
  misc_RNA (1)...(19): siRNA sense strand
ugguagagguugaagaaau

SEQ ID NO: 37713 - RNA, 19 nt, Homo sapiens
  misc_RNA (1)...(19): siRNA sense strand
cagaagacauccauauucc

SEQ ID NO: 37714 - RNA, 19 nt, Homo sapiens
  misc_RNA (1)...(19): siRNA sense strand
ccauggagcauucugcaaa

SEQ ID NO: 37715 - RNA, 19 nt, Homo sapiens
  misc_RNA (1)...(19): siRNA sense strand
gaaacaguuacuauucuuc

SEQ ID NO: 37716 - RNA, 19 nt, Homo sapiens
  misc_RNA (1)...(19): siRNA sense strand
gggaacgaaucaucaagag

SEQ ID NO: 37717 - RNA, 19 nt, Homo sapiens
  misc_RNA (1)...(19): siRNA sense strand
ucaauggucagcacuuuau

SEQ ID NO: 37718 - RNA, 19 nt, Homo sapiens
  misc_RNA (1)...(19): siRNA sense strand
gaagccaaaucugcuaaac

SEQ ID NO: 37719 - RNA, 19 nt, Homo sapiens
  misc_RNA (1)...(19): siRNA sense strand
caaugcagcagaucgcaaa

SEQ ID NO: 37720 - RNA, 19 nt, Homo sapiens
  misc_RNA (1)...(19): siRNA sense strand
gcucaucgccauaccaagu

SEQ ID NO: 37721 - RNA, 19 nt, Homo sapiens
  misc_RNA (1)...(19): siRNA sense strand
guuugaggauggcauguau

SEQ ID NO: 37722 - RNA, 19 nt, Homo sapiens
  misc_RNA (1)...(19): siRNA sense strand
acugaaaacuggaguaaaa

SEQ ID NO: 37723 - RNA, 19 nt, Homo sapiens
  misc_RNA (1)...(19): siRNA sense strand
uaggagcgaugcagguuuc

SEQ ID NO: 37724 - RNA, 19 nt, Homo sapiens
  misc_RNA (1)...(19): siRNA sense strand
acacgucgaucugacaaug

SEQ ID NO: 37725 - RNA, 19 nt, Homo sapiens
  misc_RNA (1)...(19): siRNA sense strand
aauuucaacuugccaaugu

SEQ ID NO: 37726 - RNA, 19 nt, Homo sapiens
  misc_RNA (1)...(19): siRNA sense strand
guguugccauugccaguaa

SEQ ID NO: 37727 - RNA, 19 nt, Homo sapiens
  misc_RNA (1)...(19): siRNA sense strand
cgcauggucucuucauaug

SEQ ID NO: 37728 - RNA, 19 nt, Homo sapiens
  misc_RNA (1)...(19): siRNA sense strand
agaaaagaauugagcguuu

SEQ ID NO: 37729 - RNA, 19 nt, Homo sapiens
  misc_RNA (1)...(19): siRNA sense strand
agaaaggguugacucugau

SEQ ID NO: 37730 - RNA, 19 nt, Homo sapiens
  misc_RNA (1)...(19): siRNA sense strand
gcccaucaaauacaacaaa

SEQ ID NO: 37731 - RNA, 19 nt, Homo sapiens
  misc_RNA (1)...(19): siRNA sense strand
uguuugauguggacaagaa

SEQ ID NO: 37732 - RNA, 19 nt, Homo sapiens
  misc_RNA (1)...(19): siRNA sense strand
augcagaucucaucaaugc

SEQ ID NO: 37733 - RNA, 19 nt, Homo sapiens
  misc_RNA (1)...(19): siRNA sense strand
ggaagccaaaucugcuaaa

SEQ ID NO: 37734 - RNA, 19 nt, Homo sapiens
  misc_RNA (1)...(19): siRNA sense strand
gugcaaggaauuucaacuu

SEQ ID NO: 37735 - RNA, 19 nt, Homo sapiens
  misc_RNA (1)...(19): siRNA sense strand
ggucagcacuuuauuuugg

SEQ ID NO: 37736 - RNA, 19 nt, Homo sapiens
  misc_RNA (1)...(19): siRNA sense strand
caaccgcauuauuacugaa

SEQ ID NO: 37737 - RNA, 19 nt, Homo sapiens
  misc_RNA (1)...(19): siRNA sense strand
caucaaugcaggcaaggaa

SEQ ID NO: 37738 - RNA, 19 nt, Homo sapiens
  misc_RNA (1)...(19): siRNA sense strand
gaauuucaacuugccaaug

SEQ ID NO: 37739 - RNA, 19 nt, Homo sapiens
  misc_RNA (1)...(19): siRNA sense strand
ggaaaugcacauaaaauca

SEQ ID NO: 37740 - RNA, 19 nt, Homo sapiens
  misc_RNA (1)...(19): siRNA sense strand
aaugggaggugcuauggau

SEQ ID NO: 37741 - RNA, 19 nt, Homo sapiens
  misc_RNA (1)...(19): siRNA sense strand
ggacacgucgaucugacaa

SEQ ID NO: 37742 - RNA, 19 nt, Homo sapiens
  misc_RNA (1)...(19): siRNA sense strand
aaaauggaguucuggguuu

SEQ ID NO: 37743 - RNA, 19 nt, Homo sapiens
  misc_RNA (1)...(19): siRNA sense strand
cuguucaucuucaaaguga

SEQ ID NO: 37744 - RNA, 19 nt, Homo sapiens
  misc_RNA (1)...(19): siRNA sense strand
ccaaauauaacuguucauc

SEQ ID NO: 37745 - RNA, 19 nt, Homo sapiens
  misc_RNA (1)...(19): siRNA sense strand
uccauauuccucagauuua

SEQ ID NO: 37746 - RNA, 19 nt, Homo sapiens
  misc_RNA (1)...(19): siRNA sense strand
gaggugagggaguucaaug

SEQ ID NO: 37747 - RNA, 19 nt, Homo sapiens
  misc_RNA (1)...(19): siRNA sense strand
gcagcagaucgcaaauuga

SEQ ID NO: 37748 - RNA, 19 nt, Homo sapiens
  misc_RNA (1)...(19): siRNA sense strand
acauuaccauugacuggaa

SEQ ID NO: 37749 - RNA, 19 nt, Homo sapiens
  misc_RNA (1)...(19): siRNA sense strand
gagcgaugcagguuuccaa

SEQ ID NO: 37750 - RNA, 19 nt, Homo sapiens
  misc_RNA (1)...(19): siRNA sense strand
aaauggaguucuggguuug

SEQ ID NO: 37751 - RNA, 19 nt, Homo sapiens
  misc_RNA (1)...(19): siRNA sense strand
uaagggaacgaaucaucaa

SEQ ID NO: 37752 - RNA, 19 nt, Homo sapiens
  misc_RNA (1)...(19): siRNA sense strand
uauguacaucgccuuauaa

SEQ ID NO: 37753 - RNA, 19 nt, Homo sapiens
  misc_RNA (1)...(19): siRNA sense strand
ggaaaagugcaaggaauuu

SEQ ID NO: 37754 - RNA, 19 nt, Homo sapiens
  misc_RNA (1)...(19): siRNA sense strand
aaggaaacaguuacuauuc

SEQ ID NO: 37755 - RNA, 19 nt, Homo sapiens
  misc_RNA (1)...(19): siRNA sense strand
gggaagccaaaucugcuaa

SEQ ID NO: 37756 - RNA, 19 nt, Homo sapiens
  misc_RNA (1)...(19): siRNA sense strand
guuuaucaauccggaaaga

SEQ ID NO: 37757 - RNA, 19 nt, Homo sapiens
  misc_RNA (1)...(19): siRNA sense strand
cuuaucuggugaauuagaa

SEQ ID NO: 37758 - RNA, 19 nt, Homo sapiens
  misc_RNA (1)...(19): siRNA sense strand
ggaaugggaggugcuaugg

SEQ ID NO: 37759 - RNA, 19 nt, Homo sapiens
  misc_RNA (1)...(19): siRNA sense strand
gacguaagggaacgaauca

SEQ ID NO: 37760 - RNA, 19 nt, Homo sapiens
  misc_RNA (1)...(19): siRNA sense strand
ggauuuugcuuuggugaaa

SEQ ID NO: 37761 - RNA, 19 nt, Homo sapiens
  misc_RNA (1)...(19): siRNA sense strand
aggaaacaguuacuauucu

SEQ ID NO: 37762 - RNA, 19 nt, Homo sapiens
  misc_RNA (1)...(19): siRNA sense strand
uaaaacgcauggucucuuc

SEQ ID NO: 37763 - RNA, 19 nt, Homo sapiens
  misc_RNA (1)...(19): siRNA sense strand
caccaaaacucaugccaau

SEQ ID NO: 37764 - RNA, 19 nt, Homo sapiens
  misc_RNA (1)...(19): siRNA sense strand
cauggagcauucugcaaag

SEQ ID NO: 37765 - RNA, 19 nt, Homo sapiens
  misc_RNA (1)...(19): siRNA sense strand
aagaaauuguggauauugg

SEQ ID NO: 37766 - RNA, 19 nt, Homo sapiens
  misc_RNA (1)...(19): siRNA sense strand
ccauauccacgacaacaug

SEQ ID NO: 37767 - RNA, 19 nt, Homo sapiens
  misc_RNA (1)...(19): siRNA sense strand
ucaucgccauaccaaguuu

SEQ ID NO: 37768 - RNA, 19 nt, Homo sapiens
  misc_RNA (1)...(19): siRNA sense strand
gaacuuugcugccacaaua

SEQ ID NO: 37769 - RNA, 19 nt, Homo sapiens
  misc_RNA (1)...(19): siRNA sense strand
gaagacaacugcaaucaaa

SEQ ID NO: 37770 - RNA, 19 nt, Homo sapiens
  misc_RNA (1)...(19): siRNA sense strand
gaaacaagcuauauugaag

SEQ ID NO: 37771 - RNA, 19 nt, Homo sapiens
  misc_RNA (1)...(19): siRNA sense strand
gcaggaaacucucugacuu

SEQ ID NO: 37772 - RNA, 19 nt, Homo sapiens
  misc_RNA (1)...(19): siRNA sense strand
gaaacucucugacuuugga

SEQ ID NO: 37773 - RNA, 19 nt, Homo sapiens
  misc_RNA (1)...(19): siRNA sense strand
ucacugaucuucucacuca

SEQ ID NO: 37774 - RNA, 19 nt, Homo sapiens
  misc_RNA (1)...(19): siRNA sense strand
ugacaaacaucaucaagau

SEQ ID NO: 37775 - RNA, 19 nt, Homo sapiens
  misc_RNA (1)...(19): siRNA sense strand
ggaaacaagcuauauugaa

SEQ ID NO: 37776 - RNA, 19 nt, Homo sapiens
  misc_RNA (1)...(19): siRNA sense strand
gacaauacccagcagcuua

SEQ ID NO: 37777 - RNA, 19 nt, Homo sapiens
  misc_RNA (1)...(19): siRNA sense strand
caaaguauugcgcuuauuu

SEQ ID NO: 37778 - RNA, 19 nt, Homo sapiens
  misc_RNA (1)...(19): siRNA sense strand
ggauugaggucuuggacaa

SEQ ID NO: 37779 - RNA, 19 nt, Homo sapiens
  misc_RNA (1)...(19): siRNA sense strand
ggacaggaaacaagcuaua

SEQ ID NO: 37780 - RNA, 19 nt, Homo sapiens
  misc_RNA (1)...(19): siRNA sense strand
caagcuauauugaagacaa

SEQ ID NO: 37781 - RNA, 19 nt, Homo sapiens
  misc_RNA (1)...(19): siRNA sense strand
ugaauuacaguacugcuua

SEQ ID NO: 37782 - RNA, 19 nt, Homo sapiens
  misc_RNA (1)...(19): siRNA sense strand
gauccaagcccauguauac

SEQ ID NO: 37783 - RNA, 19 nt, Homo sapiens
  misc_RNA (1)...(19): siRNA sense strand
caugagcuuucacgagaua

SEQ ID NO: 37784 - RNA, 19 nt, Homo sapiens
  misc_RNA (1)...(19): siRNA sense strand
agacagccauccaaaauua

SEQ ID NO: 37785 - RNA, 19 nt, Homo sapiens
  misc_RNA (1)...(19): siRNA sense strand
uucaagagcuggacagauu

SEQ ID NO: 37786 - RNA, 19 nt, Homo sapiens
  misc_RNA (1)...(19): siRNA sense strand
gaauuacaguacugcuuau

SEQ ID NO: 37787 - RNA, 19 nt, Homo sapiens
  misc_RNA (1)...(19): siRNA sense strand
gagacuccauaaaggcaua

SEQ ID NO: 37788 - RNA, 19 nt, Homo sapiens
  misc_RNA (1)...(19): siRNA sense strand
gcccaucccucgaguggaa

SEQ ID NO: 37789 - RNA, 19 nt, Homo sapiens
  misc_RNA (1)...(19): siRNA sense strand
uggaauacauggaggaaga

SEQ ID NO: 37790 - RNA, 19 nt, Homo sapiens
  misc_RNA (1)...(19): siRNA sense strand
gagaagacagccauccaaa

SEQ ID NO: 37791 - RNA, 19 nt, Homo sapiens
  misc_RNA (1)...(19): siRNA sense strand
gaaauuggaauccuuugca

SEQ ID NO: 37792 - RNA, 19 nt, Homo sapiens
  misc_RNA (1)...(19): siRNA sense strand
gccaaaguauugcgcuuau

SEQ ID NO: 37793 - RNA, 19 nt, Homo sapiens
  misc_RNA (1)...(19): siRNA sense strand
gucauccuuuggugaauua

SEQ ID NO: 37794 - RNA, 19 nt, Homo sapiens
  misc_RNA (1)...(19): siRNA sense strand
ccaaaggauugaggucuug

SEQ ID NO: 37795 - RNA, 19 nt, Homo sapiens
  misc_RNA (1)...(19): siRNA sense strand
caggaaacaagcuauauug

SEQ ID NO: 37796 - RNA, 19 nt, Homo sapiens
  misc_RNA (1)...(19): siRNA sense strand
gccacaauuuacugguuua

SEQ ID NO: 37797 - RNA, 19 nt, Homo sapiens
  misc_RNA (1)...(19): siRNA sense strand
gugcugggcuccugucauc

SEQ ID NO: 37798 - RNA, 19 nt, Homo sapiens
  misc_RNA (1)...(19): siRNA sense strand
ggagaagacagccauccaa

SEQ ID NO: 37799 - RNA, 19 nt, Homo sapiens
  misc_RNA (1)...(19): siRNA sense strand
gaagacagccauccaaaau

SEQ ID NO: 37800 - RNA, 19 nt, Homo sapiens
  misc_RNA (1)...(19): siRNA sense strand
caggaaacucucugacuuu

SEQ ID NO: 37801 - RNA, 19 nt, Homo sapiens
  misc_RNA (1)...(19): siRNA sense strand
acaauuuacugguuuacug

SEQ ID NO: 37802 - RNA, 19 nt, Homo sapiens
  misc_RNA (1)...(19): siRNA sense strand
ccugaugaauacauugaaa

SEQ ID NO: 37803 - RNA, 19 nt, Homo sapiens
  misc_RNA (1)...(19): siRNA sense strand
caaacaucaucaagaucuu

SEQ ID NO: 37804 - RNA, 19 nt, Homo sapiens
  misc_RNA (1)...(19): siRNA sense strand
gcagugcccuccagaaaau

SEQ ID NO: 37805 - RNA, 19 nt, Homo sapiens
  misc_RNA (1)...(19): siRNA sense strand
gcacacaguacaucagaca

SEQ ID NO: 37806 - RNA, 19 nt, Homo sapiens
  misc_RNA (1)...(19): siRNA sense strand
gaucuugaggcaugacauu

SEQ ID NO: 37807 - RNA, 19 nt, Homo sapiens
  misc_RNA (1)...(19): siRNA sense strand
cugauuccauuaacaguga

SEQ ID NO: 37808 - RNA, 19 nt, Homo sapiens
  misc_RNA (1)...(19): siRNA sense strand
ccaaaguauugcgcuuauu

SEQ ID NO: 37809 - RNA, 19 nt, Homo sapiens
  misc_RNA (1)...(19): siRNA sense strand
gcgcuuauuugaggagaau

SEQ ID NO: 37810 - RNA, 19 nt, Homo sapiens
  misc_RNA (1)...(19): siRNA sense strand
cauuaacagugaaauugga

SEQ ID NO: 37811 - RNA, 19 nt, Homo sapiens
  misc_RNA (1)...(19): siRNA sense strand
gauuuuggcugauuccauu

SEQ ID NO: 37812 - RNA, 19 nt, Homo sapiens
  misc_RNA (1)...(19): siRNA sense strand
gggugcaccugaugaauac

SEQ ID NO: 37813 - RNA, 19 nt, Homo sapiens
  misc_RNA (1)...(19): siRNA sense strand
ugacauugccuacaacuac

SEQ ID NO: 37814 - RNA, 19 nt, Homo sapiens
  misc_RNA (1)...(19): siRNA sense strand
guacuguggcuuccaugaa

SEQ ID NO: 37815 - RNA, 19 nt, Homo sapiens
  misc_RNA (1)...(19): siRNA sense strand
ggccaaaguauugcgcuua

SEQ ID NO: 37816 - RNA, 19 nt, Homo sapiens
  misc_RNA (1)...(19): siRNA sense strand
gggcuccugucauccuuug

SEQ ID NO: 37817 - RNA, 19 nt, Homo sapiens
  misc_RNA (1)...(19): siRNA sense strand
cgccacaauuuacugguuu

SEQ ID NO: 37818 - RNA, 19 nt, Homo sapiens
  misc_RNA (1)...(19): siRNA sense strand
guaaaccugacccacauug

SEQ ID NO: 37819 - RNA, 19 nt, Homo sapiens
  misc_RNA (1)...(19): siRNA sense strand
ugaggagaaugauguaaac

SEQ ID NO: 37820 - RNA, 19 nt, Homo sapiens
  misc_RNA (1)...(19): siRNA sense strand
acaauacccagcagcuuaa

SEQ ID NO: 37821 - RNA, 19 nt, Homo sapiens
  misc_RNA (1)...(19): siRNA sense strand
ccacugcgguccuggaaaa

SEQ ID NO: 37822 - RNA, 19 nt, Homo sapiens
  misc_RNA (1)...(19): siRNA sense strand
uuaaugaugccaaggagaa

SEQ ID NO: 37823 - RNA, 19 nt, Homo sapiens
  misc_RNA (1)...(19): siRNA sense strand
ggacaugugcccuuguuuu

SEQ ID NO: 37824 - RNA, 19 nt, Homo sapiens
  misc_RNA (1)...(19): siRNA sense strand
caucugccaugagcuguug

SEQ ID NO: 37825 - RNA, 19 nt, Homo sapiens
  misc_RNA (1)...(19): siRNA sense strand
aaaccugacccacauugaa

SEQ ID NO: 37826 - RNA, 19 nt, Homo sapiens
  misc_RNA (1)...(19): siRNA sense strand
ccauacacccaaaggauug

SEQ ID NO: 37827 - RNA, 19 nt, Homo sapiens
  misc_RNA (1)...(19): siRNA sense strand
ggacaauacccagcagcuu

SEQ ID NO: 37828 - RNA, 19 nt, Homo sapiens
  misc_RNA (1)...(19): siRNA sense strand
ggauccaagcccauguaua

SEQ ID NO: 37829 - RNA, 19 nt, Homo sapiens
  misc_RNA (1)...(19): siRNA sense strand
caagagcuggacagauuug

SEQ ID NO: 37830 - RNA, 19 nt, Homo sapiens
  misc_RNA (1)...(19): siRNA sense strand
cccagcagcuuaagauuuu

SEQ ID NO: 37831 - RNA, 19 nt, Homo sapiens
  misc_RNA (1)...(19): siRNA sense strand
aggaaacucucugacuuug

SEQ ID NO: 37832 - RNA, 19 nt, Homo sapiens
  misc_RNA (1)...(19): siRNA sense strand
gacaggaaacaagcuauau

SEQ ID NO: 37833 - RNA, 19 nt, Homo sapiens
  misc_RNA (1)...(19): siRNA sense strand
uugcugacauugccuacaa

SEQ ID NO: 37834 - RNA, 19 nt, Homo sapiens
  misc_RNA (1)...(19): siRNA sense strand
gauccuguguaccgugcaa

SEQ ID NO: 37835 - RNA, 19 nt, Homo sapiens
  misc_RNA (1)...(19): siRNA sense strand
acaggaaacaagcuauauu

SEQ ID NO: 37836 - RNA, 19 nt, Homo sapiens
  misc_RNA (1)...(19): siRNA sense strand
ugggugcaccugaugaaua

SEQ ID NO: 37837 - RNA, 19 nt, Homo sapiens
  misc_RNA (1)...(19): siRNA sense strand
aaauuggccuugccucucu

SEQ ID NO: 37838 - RNA, 19 nt, Homo sapiens
  misc_RNA (1)...(19): siRNA sense strand
acaaacaucaucaagaucu

SEQ ID NO: 37839 - RNA, 19 nt, Homo sapiens
  misc_RNA (1)...(19): siRNA sense strand
cccaaaggauugaggucuu

SEQ ID NO: 37840 - RNA, 19 nt, Homo sapiens
  misc_RNA (1)...(19): siRNA sense strand
gaauacauggaggaagaaa

SEQ ID NO: 37841 - RNA, 19 nt, Homo sapiens
  misc_RNA (1)...(19): siRNA sense strand
ggaauacauggaggaagaa

SEQ ID NO: 37842 - RNA, 19 nt, Homo sapiens
  misc_RNA (1)...(19): siRNA sense strand
cacgagauaagaagaaaga

SEQ ID NO: 37843 - RNA, 19 nt, Homo sapiens
  misc_RNA (1)...(19): siRNA sense strand
ucaagagcuggacagauuu

SEQ ID NO: 37844 - RNA, 19 nt, Homo sapiens
  misc_RNA (1)...(19): siRNA sense strand
ugaagacaacugcaaucaa

SEQ ID NO: 37845 - RNA, 19 nt, Homo sapiens
  misc_RNA (1)...(19): siRNA sense strand
aaaguacuguggcuuccau

SEQ ID NO: 37846 - RNA, 19 nt, Homo sapiens
  misc_RNA (1)...(19): siRNA sense strand
ugucauccuuuggugaauu

SEQ ID NO: 37847 - RNA, 19 nt, Homo sapiens
  misc_RNA (1)...(19): siRNA sense strand
cagugaaauuggaauccuu

SEQ ID NO: 37848 - RNA, 19 nt, Homo sapiens
  misc_RNA (1)...(19): siRNA sense strand
gcucugacaaacaucauca

SEQ ID NO: 37849 - RNA, 19 nt, Homo sapiens
  misc_RNA (1)...(19): siRNA sense strand
aaaguauugcgcuuauuug

SEQ ID NO: 37850 - RNA, 19 nt, Homo sapiens
  misc_RNA (1)...(19): siRNA sense strand
ugggacaugugcccuuguu

SEQ ID NO: 37851 - RNA, 19 nt, Homo sapiens
  misc_RNA (1)...(19): siRNA sense strand
aaccugacaucugccauga

SEQ ID NO: 37852 - RNA, 19 nt, Homo sapiens
  misc_RNA (1)...(19): siRNA sense strand
uagccugccugcucugaca

SEQ ID NO: 37853 - RNA, 19 nt, Homo sapiens
  misc_RNA (1)...(19): siRNA sense strand
uaacagugaaauuggaauc

SEQ ID NO: 37854 - RNA, 19 nt, Homo sapiens
  misc_RNA (1)...(19): siRNA sense strand
ggaacuuugcugccacaau

SEQ ID NO: 37855 - RNA, 19 nt, Homo sapiens
  misc_RNA (1)...(19): siRNA sense strand
caauuuacugguuuacugu

SEQ ID NO: 37856 - RNA, 19 nt, Homo sapiens
  misc_RNA (1)...(19): siRNA sense strand
cgagauaagaagaaagaca

SEQ ID NO: 37857 - RNA, 19 nt, Homo sapiens
  misc_RNA (1)...(19): siRNA sense strand
gagcuuucacgagauaaga

SEQ ID NO: 37858 - RNA, 19 nt, Homo sapiens
  misc_RNA (1)...(19): siRNA sense strand
uaaaccugacccacauuga

SEQ ID NO: 37859 - RNA, 19 nt, Homo sapiens
  misc_RNA (1)...(19): siRNA sense strand
gguuuacuguggaguuugg

SEQ ID NO: 37860 - RNA, 19 nt, Homo sapiens
  misc_RNA (1)...(19): siRNA sense strand
gcaccugaugaauacauug

SEQ ID NO: 37861 - RNA, 19 nt, Homo sapiens
  misc_RNA (1)...(19): siRNA sense strand
acacaguacaucagacaug

SEQ ID NO: 37862 - RNA, 19 nt, Homo sapiens
  misc_RNA (1)...(19): siRNA sense strand
ucgccacaauuuacugguu

SEQ ID NO: 37863 - RNA, 19 nt, Homo sapiens
  misc_RNA (1)...(19): siRNA sense strand
gcuuauuugaggagaauga

SEQ ID NO: 37864 - RNA, 19 nt, Homo sapiens
  misc_RNA (1)...(19): siRNA sense strand
caacugcaaucaaaauggu

SEQ ID NO: 37865 - RNA, 19 nt, Homo sapiens
  misc_RNA (1)...(19): siRNA sense strand
uccauuaacagugaaauug

SEQ ID NO: 37866 - RNA, 19 nt, Homo sapiens
  misc_RNA (1)...(19): siRNA sense strand
aggaaacaagcuauauuga

SEQ ID NO: 37867 - RNA, 19 nt, Homo sapiens
  misc_RNA (1)...(19): siRNA sense strand
uugcagugcccuccagaaa

SEQ ID NO: 37868 - RNA, 19 nt, Homo sapiens
  misc_RNA (1)...(19): siRNA sense strand
caacacaccuagucauauu

SEQ ID NO: 37869 - RNA, 19 nt, Homo sapiens
  misc_RNA (1)...(19): siRNA sense strand
gaacauccuuuacccaaga

SEQ ID NO: 37870 - RNA, 19 nt, Homo sapiens
  misc_RNA (1)...(19): siRNA sense strand
caaauaaccugccuaugca

SEQ ID NO: 37871 - RNA, 19 nt, Homo sapiens
  misc_RNA (1)...(19): siRNA sense strand
gcaaauaaccugccuaugc

SEQ ID NO: 37872 - RNA, 19 nt, Homo sapiens
  misc_RNA (1)...(19): siRNA sense strand
gcagaagauuguagagcua

SEQ ID NO: 37873 - RNA, 19 nt, Homo sapiens
  misc_RNA (1)...(19): siRNA sense strand
ccaagcgugucaucaauaa

SEQ ID NO: 37874 - RNA, 19 nt, Homo sapiens
  misc_RNA (1)...(19): siRNA sense strand
ggagaaagaguuugagaga

SEQ ID NO: 37875 - RNA, 19 nt, Homo sapiens
  misc_RNA (1)...(19): siRNA sense strand
caaaauagaucuaccugaa

SEQ ID NO: 37876 - RNA, 19 nt, Homo sapiens
  misc_RNA (1)...(19): siRNA sense strand
caacggaugugugaguaaa

SEQ ID NO: 37877 - RNA, 19 nt, Homo sapiens
  misc_RNA (1)...(19): siRNA sense strand
gagaaagaguuugagagaa

SEQ ID NO: 37878 - RNA, 19 nt, Homo sapiens
  misc_RNA (1)...(19): siRNA sense strand
gaagugaaccugauauguc

SEQ ID NO: 37879 - RNA, 19 nt, Homo sapiens
  misc_RNA (1)...(19): siRNA sense strand
ggcaaucggugguaguaaa

SEQ ID NO: 37880 - RNA, 19 nt, Homo sapiens
  misc_RNA (1)...(19): siRNA sense strand
aaccugauaugucucaaua

SEQ ID NO: 37881 - RNA, 19 nt, Homo sapiens
  misc_RNA (1)...(19): siRNA sense strand
ggagugcccguccaucuuu

SEQ ID NO: 37882 - RNA, 19 nt, Homo sapiens
  misc_RNA (1)...(19): siRNA sense strand
gagaauaccaacuccauca

SEQ ID NO: 37883 - RNA, 19 nt, Homo sapiens
  misc_RNA (1)...(19): siRNA sense strand
agacacacaugaacaguca

SEQ ID NO: 37884 - RNA, 19 nt, Homo sapiens
  misc_RNA (1)...(19): siRNA sense strand
gagaacccauuauccagau

SEQ ID NO: 37885 - RNA, 19 nt, Homo sapiens
  misc_RNA (1)...(19): siRNA sense strand
ucaauacuggccaagauua

SEQ ID NO: 37886 - RNA, 19 nt, Homo sapiens
  misc_RNA (1)...(19): siRNA sense strand
gauaaacuaaggauguuga

SEQ ID NO: 37887 - RNA, 19 nt, Homo sapiens
  misc_RNA (1)...(19): siRNA sense strand
uaacauaccaagcguguca

SEQ ID NO: 37888 - RNA, 19 nt, Homo sapiens
  misc_RNA (1)...(19): siRNA sense strand
ucagcucgguggugucuuu

SEQ ID NO: 37889 - RNA, 19 nt, Homo sapiens
  misc_RNA (1)...(19): siRNA sense strand
ccacaccgguuuccuccuu

SEQ ID NO: 37890 - RNA, 19 nt, Homo sapiens
  misc_RNA (1)...(19): siRNA sense strand
agaaagaguuugagagaac

SEQ ID NO: 37891 - RNA, 19 nt, Homo sapiens
  misc_RNA (1)...(19): siRNA sense strand
gaaauagaacauccuuuac

SEQ ID NO: 37892 - RNA, 19 nt, Homo sapiens
  misc_RNA (1)...(19): siRNA sense strand
gcuucaccauggcaaauaa

SEQ ID NO: 37893 - RNA, 19 nt, Homo sapiens
  misc_RNA (1)...(19): siRNA sense strand
gcaacacaccuagucauau

SEQ ID NO: 37894 - RNA, 19 nt, Homo sapiens
  misc_RNA (1)...(19): siRNA sense strand
gcaaaauagcccaguauaa

SEQ ID NO: 37895 - RNA, 19 nt, Homo sapiens
  misc_RNA (1)...(19): siRNA sense strand
ggaagugaaccugauaugu

SEQ ID NO: 37896 - RNA, 19 nt, Homo sapiens
  misc_RNA (1)...(19): siRNA sense strand
agcggaagcugcaaagaaa

SEQ ID NO: 37897 - RNA, 19 nt, Homo sapiens
  misc_RNA (1)...(19): siRNA sense strand
cggaagcugcaaagaaaua

SEQ ID NO: 37898 - RNA, 19 nt, Homo sapiens
  misc_RNA (1)...(19): siRNA sense strand
caucuuugcuugggaaauc

SEQ ID NO: 37899 - RNA, 19 nt, Homo sapiens
  misc_RNA (1)...(19): siRNA sense strand
ugaaugggcggaguuauga

SEQ ID NO: 37900 - RNA, 19 nt, Homo sapiens
  misc_RNA (1)...(19): siRNA sense strand
gguaguaaaccgagaguag

SEQ ID NO: 37901 - RNA, 19 nt, Homo sapiens
  misc_RNA (1)...(19): siRNA sense strand
agaucuaccugaagcaaga

SEQ ID NO: 37902 - RNA, 19 nt, Homo sapiens
  misc_RNA (1)...(19): siRNA sense strand
gggcagguauuacgagacu

SEQ ID NO: 37903 - RNA, 19 nt, Homo sapiens
  misc_RNA (1)...(19): siRNA sense strand
ccagccagaccuccucaua

SEQ ID NO: 37904 - RNA, 19 nt, Homo sapiens
  misc_RNA (1)...(19): siRNA sense strand
caaauggagaagagaagaa

SEQ ID NO: 37905 - RNA, 19 nt, Homo sapiens
  misc_RNA (1)...(19): siRNA sense strand
gugcgacauuucccgaauu

SEQ ID NO: 37906 - RNA, 19 nt, Homo sapiens
  misc_RNA (1)...(19): siRNA sense strand
uccagaaguuguaagcaaa

SEQ ID NO: 37907 - RNA, 19 nt, Homo sapiens
  misc_RNA (1)...(19): siRNA sense strand
gagagaauaccaacuccau

SEQ ID NO: 37908 - RNA, 19 nt, Homo sapiens
  misc_RNA (1)...(19): siRNA sense strand
ucaauaaacagaguucuuc

SEQ ID NO: 37909 - RNA, 19 nt, Homo sapiens
  misc_RNA (1)...(19): siRNA sense strand
ucucaauacuggccaagau

SEQ ID NO: 37910 - RNA, 19 nt, Homo sapiens
  misc_RNA (1)...(19): siRNA sense strand
ccacauaugcagacacaca

SEQ ID NO: 37911 - RNA, 19 nt, Homo sapiens
  misc_RNA (1)...(19): siRNA sense strand
guaaaauucugggcaggua

SEQ ID NO: 37912 - RNA, 19 nt, Homo sapiens
  misc_RNA (1)...(19): siRNA sense strand
uaccaagcgugucaucaau

SEQ ID NO: 37913 - RNA, 19 nt, Homo sapiens
  misc_RNA (1)...(19): siRNA sense strand
gugaaugggcggaguuaug

SEQ ID NO: 37914 - RNA, 19 nt, Homo sapiens
  misc_RNA (1)...(19): siRNA sense strand
uugaggcccuggagaaaga

SEQ ID NO: 37915 - RNA, 19 nt, Homo sapiens
  misc_RNA (1)...(19): siRNA sense strand
acacagcccucacaaacac

SEQ ID NO: 37916 - RNA, 19 nt, Homo sapiens
  misc_RNA (1)...(19): siRNA sense strand
cagcaccagugucuaccaa

SEQ ID NO: 37917 - RNA, 19 nt, Homo sapiens
  misc_RNA (1)...(19): siRNA sense strand
caaaauagcccaguauaag

SEQ ID NO: 37918 - RNA, 19 nt, Homo sapiens
  misc_RNA (1)...(19): siRNA sense strand
ccugauaugucucaauacu

SEQ ID NO: 37919 - RNA, 19 nt, Homo sapiens
  misc_RNA (1)...(19): siRNA sense strand
gaaccugauaugucucaau

SEQ ID NO: 37920 - RNA, 19 nt, Homo sapiens
  misc_RNA (1)...(19): siRNA sense strand
aaauugaggcccuggagaa

SEQ ID NO: 37921 - RNA, 19 nt, Homo sapiens
  misc_RNA (1)...(19): siRNA sense strand
gaauaccaacuccaucagu

SEQ ID NO: 37922 - RNA, 19 nt, Homo sapiens
  misc_RNA (1)...(19): siRNA sense strand
aguagcgacuccagaaguu

SEQ ID NO: 37923 - RNA, 19 nt, Homo sapiens
  misc_RNA (1)...(19): siRNA sense strand
caugaacagucagccaaug

SEQ ID NO: 37924 - RNA, 19 nt, Homo sapiens
  misc_RNA (1)...(19): siRNA sense strand
agacacagcccucacaaac

SEQ ID NO: 37925 - RNA, 19 nt, Homo sapiens
  misc_RNA (1)...(19): siRNA sense strand
gaacccauuauccagaugu

SEQ ID NO: 37926 - RNA, 19 nt, Homo sapiens
  misc_RNA (1)...(19): siRNA sense strand
ugagagaacccauuaucca

SEQ ID NO: 37927 - RNA, 19 nt, Homo sapiens
  misc_RNA (1)...(19): siRNA sense strand
cuccagaaguuguaagcaa

SEQ ID NO: 37928 - RNA, 19 nt, Homo sapiens
  misc_RNA (1)...(19): siRNA sense strand
aagcggaagcugcaaagaa

SEQ ID NO: 37929 - RNA, 19 nt, Homo sapiens
  misc_RNA (1)...(19): siRNA sense strand
ccuaucagcaguaguuuca

SEQ ID NO: 37930 - RNA, 19 nt, Homo sapiens
  misc_RNA (1)...(19): siRNA sense strand
gcucgguggugucuuuguc

SEQ ID NO: 37931 - RNA, 19 nt, Homo sapiens
  misc_RNA (1)...(19): siRNA sense strand
aagugaaccugauaugucu

SEQ ID NO: 37932 - RNA, 19 nt, Homo sapiens
  misc_RNA (1)...(19): siRNA sense strand
cgacauuucccgaauucug

SEQ ID NO: 37933 - RNA, 19 nt, Homo sapiens
  misc_RNA (1)...(19): siRNA sense strand
gaagcugcaaagaaauaga

SEQ ID NO: 37934 - RNA, 19 nt, Homo sapiens
  misc_RNA (1)...(19): siRNA sense strand
cauaugcagacacacauga

SEQ ID NO: 37935 - RNA, 19 nt, Homo sapiens
  misc_RNA (1)...(19): siRNA sense strand
gggagugcccguccaucuu

SEQ ID NO: 37936 - RNA, 19 nt, Homo sapiens
  misc_RNA (1)...(19): siRNA sense strand
gacacagcccucacaaaca

SEQ ID NO: 37937 - RNA, 19 nt, Homo sapiens
  misc_RNA (1)...(19): siRNA sense strand
ugaagcaagaauacaggua

SEQ ID NO: 37938 - RNA, 19 nt, Homo sapiens
  misc_RNA (1)...(19): siRNA sense strand
agaaagacuagcagccaaa

SEQ ID NO: 37939 - RNA, 19 nt, Homo sapiens
  misc_RNA (1)...(19): siRNA sense strand
ccauuauccagauguguuu

SEQ ID NO: 37940 - RNA, 19 nt, Homo sapiens
  misc_RNA (1)...(19): siRNA sense strand
ugucaucaauaaacagagu

SEQ ID NO: 37941 - RNA, 19 nt, Homo sapiens
  misc_RNA (1)...(19): siRNA sense strand
gagugcccguccaucuuug

SEQ ID NO: 37942 - RNA, 19 nt, Homo sapiens
  misc_RNA (1)...(19): siRNA sense strand
cgaagggccaaauggagaa

SEQ ID NO: 37943 - RNA, 19 nt, Homo sapiens
  misc_RNA (1)...(19): siRNA sense strand
gcauguaugauaaacuaag

SEQ ID NO: 37944 - RNA, 19 nt, Homo sapiens
  misc_RNA (1)...(19): siRNA sense strand
caaccuggcuagcgaaaag

SEQ ID NO: 37945 - RNA, 19 nt, Homo sapiens
  misc_RNA (1)...(19): siRNA sense strand
uaccaacgauaacauacca

SEQ ID NO: 37946 - RNA, 19 nt, Homo sapiens
  misc_RNA (1)...(19): siRNA sense strand
uaagcaaaauagcccagua

SEQ ID NO: 37947 - RNA, 19 nt, Homo sapiens
  misc_RNA (1)...(19): siRNA sense strand
aaugggcggaguuaugaua

SEQ ID NO: 37948 - RNA, 19 nt, Homo sapiens
  misc_RNA (1)...(19): siRNA sense strand
cauauuccuaucagcagua

SEQ ID NO: 37949 - RNA, 19 nt, Homo sapiens
  misc_RNA (1)...(19): siRNA sense strand
aaauggagaagagaagaaa

SEQ ID NO: 37950 - RNA, 19 nt, Homo sapiens
  misc_RNA (1)...(19): siRNA sense strand
ccaaauggagaagagaaga

SEQ ID NO: 37951 - RNA, 19 nt, Homo sapiens
  misc_RNA (1)...(19): siRNA sense strand
cagggcaaccuacgcaaga

SEQ ID NO: 37952 - RNA, 19 nt, Homo sapiens
  misc_RNA (1)...(19): siRNA sense strand
gaagacaggccagcaacac

SEQ ID NO: 37953 - RNA, 19 nt, Homo sapiens
  misc_RNA (1)...(19): siRNA sense strand
ggccaaauggagaagagaa

SEQ ID NO: 37954 - RNA, 19 nt, Homo sapiens
  misc_RNA (1)...(19): siRNA sense strand
gaaguuguaagcaaaauag

SEQ ID NO: 37955 - RNA, 19 nt, Homo sapiens
  misc_RNA (1)...(19): siRNA sense strand
uccaacggaugugugagua

SEQ ID NO: 37956 - RNA, 19 nt, Homo sapiens
  misc_RNA (1)...(19): siRNA sense strand
caucaguuccaacggagaa

SEQ ID NO: 37957 - RNA, 19 nt, Homo sapiens
  misc_RNA (1)...(19): siRNA sense strand
cauguaugauaaacuaagg

SEQ ID NO: 37958 - RNA, 19 nt, Homo sapiens
  misc_RNA (1)...(19): siRNA sense strand
ggaguuaugauaccuacac

SEQ ID NO: 37959 - RNA, 19 nt, Homo sapiens
  misc_RNA (1)...(19): siRNA sense strand
ccaacggaugugugaguaa

SEQ ID NO: 37960 - RNA, 19 nt, Homo sapiens
  misc_RNA (1)...(19): siRNA sense strand
acagcgcucugccgccuau

SEQ ID NO: 37961 - RNA, 19 nt, Homo sapiens
  misc_RNA (1)...(19): siRNA sense strand
acaccuagucauauuccua

SEQ ID NO: 37962 - RNA, 19 nt, Homo sapiens
  misc_RNA (1)...(19): siRNA sense strand
agcaacacaccuagucaua

SEQ ID NO: 37963 - RNA, 19 nt, Homo sapiens
  misc_RNA (1)...(19): siRNA sense strand
aagacuagcagccaaaaua

SEQ ID NO: 37964 - RNA, 19 nt, Homo sapiens
  misc_RNA (1)...(19): siRNA sense strand
gaagcggaagcugcaaaga

SEQ ID NO: 37965 - RNA, 19 nt, Homo sapiens
  misc_RNA (1)...(19): siRNA sense strand
ggaagcugcaaagaaauag

SEQ ID NO: 37966 - RNA, 19 nt, Homo sapiens
  misc_RNA (1)...(19): siRNA sense strand
gcaaucggugguaguaaac

SEQ ID NO: 37967 - RNA, 19 nt, Homo sapiens
  misc_RNA (1)...(19): siRNA sense strand
caccuagucauauuccuau

SEQ ID NO: 37968 - RNA, 19 nt, Homo sapiens
  misc_RNA (1)...(19): siRNA sense strand
caacacaccuagucauauu

SEQ ID NO: 37969 - RNA, 19 nt, Homo sapiens
  misc_RNA (1)...(19): siRNA sense strand
gaacauccuuuacccaaga

SEQ ID NO: 37970 - RNA, 19 nt, Homo sapiens
  misc_RNA (1)...(19): siRNA sense strand
caaauaaccugccuaugca

SEQ ID NO: 37971 - RNA, 19 nt, Homo sapiens
  misc_RNA (1)...(19): siRNA sense strand
gcaaauaaccugccuaugc

SEQ ID NO: 37972 - RNA, 19 nt, Homo sapiens
  misc_RNA (1)...(19): siRNA sense strand
gcagaagauuguagagcua

SEQ ID NO: 37973 - RNA, 19 nt, Homo sapiens
  misc_RNA (1)...(19): siRNA sense strand
ccaagcgugucaucaauaa

SEQ ID NO: 37974 - RNA, 19 nt, Homo sapiens
  misc_RNA (1)...(19): siRNA sense strand
ggagaaagaguuugagaga

SEQ ID NO: 37975 - RNA, 19 nt, Homo sapiens
  misc_RNA (1)...(19): siRNA sense strand
caaaauagaucuaccugaa

SEQ ID NO: 37976 - RNA, 19 nt, Homo sapiens
  misc_RNA (1)...(19): siRNA sense strand
caacggaugugugaguaaa

SEQ ID NO: 37977 - RNA, 19 nt, Homo sapiens
  misc_RNA (1)...(19): siRNA sense strand
gagaaagaguuugagagaa

SEQ ID NO: 37978 - RNA, 19 nt, Homo sapiens
  misc_RNA (1)...(19): siRNA sense strand
gaagugaaccugauauguc

SEQ ID NO: 37979 - RNA, 19 nt, Homo sapiens
  misc_RNA (1)...(19): siRNA sense strand
ggcaaucggugguaguaaa

SEQ ID NO: 37980 - RNA, 19 nt, Homo sapiens
  misc_RNA (1)...(19): siRNA sense strand
aaccugauaugucucaaua

SEQ ID NO: 37981 - RNA, 19 nt, Homo sapiens
  misc_RNA (1)...(19): siRNA sense strand
ggagugcccguccaucuuu

SEQ ID NO: 37982 - RNA, 19 nt, Homo sapiens
  misc_RNA (1)...(19): siRNA sense strand
gagaauaccaacuccauca

SEQ ID NO: 37983 - RNA, 19 nt, Homo sapiens
  misc_RNA (1)...(19): siRNA sense strand
agacacacaugaacaguca

SEQ ID NO: 37984 - RNA, 19 nt, Homo sapiens
  misc_RNA (1)...(19): siRNA sense strand
gagaacccauuauccagau

SEQ ID NO: 37985 - RNA, 19 nt, Homo sapiens
  misc_RNA (1)...(19): siRNA sense strand
ucaauacuggccaagauua

SEQ ID NO: 37986 - RNA, 19 nt, Homo sapiens
  misc_RNA (1)...(19): siRNA sense strand
gauaaacuaaggauguuga

SEQ ID NO: 37987 - RNA, 19 nt, Homo sapiens
  misc_RNA (1)...(19): siRNA sense strand
uaacauaccaagcguguca

SEQ ID NO: 37988 - RNA, 19 nt, Homo sapiens
  misc_RNA (1)...(19): siRNA sense strand
ucagcucgguggugucuuu

SEQ ID NO: 37989 - RNA, 19 nt, Homo sapiens
  misc_RNA (1)...(19): siRNA sense strand
ccacaccgguuuccuccuu

SEQ ID NO: 37990 - RNA, 19 nt, Homo sapiens
  misc_RNA (1)...(19): siRNA sense strand
agaaagaguuugagagaac

SEQ ID NO: 37991 - RNA, 19 nt, Homo sapiens
  misc_RNA (1)...(19): siRNA sense strand
gaaauagaacauccuuuac

SEQ ID NO: 37992 - RNA, 19 nt, Homo sapiens
  misc_RNA (1)...(19): siRNA sense strand
gcuucaccauggcaaauaa

SEQ ID NO: 37993 - RNA, 19 nt, Homo sapiens
  misc_RNA (1)...(19): siRNA sense strand
gcaacacaccuagucauau

SEQ ID NO: 37994 - RNA, 19 nt, Homo sapiens
  misc_RNA (1)...(19): siRNA sense strand
gcaaaauagcccaguauaa

SEQ ID NO: 37995 - RNA, 19 nt, Homo sapiens
  misc_RNA (1)...(19): siRNA sense strand
ggaagugaaccugauaugu

SEQ ID NO: 37996 - RNA, 19 nt, Homo sapiens
  misc_RNA (1)...(19): siRNA sense strand
agcggaagcugcaaagaaa

SEQ ID NO: 37997 - RNA, 19 nt, Homo sapiens
  misc_RNA (1)...(19): siRNA sense strand
cggaagcugcaaagaaaua

SEQ ID NO: 37998 - RNA, 19 nt, Homo sapiens
  misc_RNA (1)...(19): siRNA sense strand
caucuuugcuugggaaauc

SEQ ID NO: 37999 - RNA, 19 nt, Homo sapiens
  misc_RNA (1)...(19): siRNA sense strand
ugaaugggcggaguuauga

SEQ ID NO: 38000 - RNA, 19 nt, Homo sapiens
  misc_RNA (1)...(19): siRNA sense strand
gguaguaaaccgagaguag

SEQ ID NO: 38001 - RNA, 19 nt, Homo sapiens
  misc_RNA (1)...(19): siRNA sense strand
agaucuaccugaagcaaga

SEQ ID NO: 38002 - RNA, 19 nt, Homo sapiens
  misc_RNA (1)...(19): siRNA sense strand
gggcagguauuacgagacu

SEQ ID NO: 38003 - RNA, 19 nt, Homo sapiens
  misc_RNA (1)...(19): siRNA sense strand
ccagccagaccuccucaua

SEQ ID NO: 38004 - RNA, 19 nt, Homo sapiens
  misc_RNA (1)...(19): siRNA sense strand
caaauggagaagagaagaa

SEQ ID NO: 38005 - RNA, 19 nt, Homo sapiens
  misc_RNA (1)...(19): siRNA sense strand
gugcgacauuucccgaauu

SEQ ID NO: 38006 - RNA, 19 nt, Homo sapiens
  misc_RNA (1)...(19): siRNA sense strand
uccagaaguuguaagcaaa

SEQ ID NO: 38007 - RNA, 19 nt, Homo sapiens
  misc_RNA (1)...(19): siRNA sense strand
gagagaauaccaacuccau

SEQ ID NO: 38008 - RNA, 19 nt, Homo sapiens
  misc_RNA (1)...(19): siRNA sense strand
ucaauaaacagaguucuuc

SEQ ID NO: 38009 - RNA, 19 nt, Homo sapiens
  misc_RNA (1)...(19): siRNA sense strand
ucucaauacuggccaagau

SEQ ID NO: 38010 - RNA, 19 nt, Homo sapiens
  misc_RNA (1)...(19): siRNA sense strand
ccacauaugcagacacaca

SEQ ID NO: 38011 - RNA, 19 nt, Homo sapiens
  misc_RNA (1)...(19): siRNA sense strand
guaaaauucugggcaggua

SEQ ID NO: 38012 - RNA, 19 nt, Homo sapiens
  misc_RNA (1)...(19): siRNA sense strand
uaccaagcgugucaucaau

SEQ ID NO: 38013 - RNA, 19 nt, Homo sapiens
  misc_RNA (1)...(19): siRNA sense strand
gugaaugggcggaguuaug

SEQ ID NO: 38014 - RNA, 19 nt, Homo sapiens
  misc_RNA (1)...(19): siRNA sense strand
uugaggcccuggagaaaga

SEQ ID NO: 38015 - RNA, 19 nt, Homo sapiens
  misc_RNA (1)...(19): siRNA sense strand
acacagcccucacaaacac

SEQ ID NO: 38016 - RNA, 19 nt, Homo sapiens
  misc_RNA (1)...(19): siRNA sense strand
cagcaccagugucuaccaa

SEQ ID NO: 38017 - RNA, 19 nt, Homo sapiens
  misc_RNA (1)...(19): siRNA sense strand
caaaauagcccaguauaag

SEQ ID NO: 38018 - RNA, 19 nt, Homo sapiens
  misc_RNA (1)...(19): siRNA sense strand
ccugauaugucucaauacu

SEQ ID NO: 38019 - RNA, 19 nt, Homo sapiens
  misc_RNA (1)...(19): siRNA sense strand
gaaccugauaugucucaau

SEQ ID NO: 38020 - RNA, 19 nt, Homo sapiens
  misc_RNA (1)...(19): siRNA sense strand
aaauugaggcccuggagaa

SEQ ID NO: 38021 - RNA, 19 nt, Homo sapiens
  misc_RNA (1)...(19): siRNA sense strand
gaauaccaacuccaucagu

SEQ ID NO: 38022 - RNA, 19 nt, Homo sapiens
  misc_RNA (1)...(19): siRNA sense strand
aguagcgacuccagaaguu

SEQ ID NO: 38023 - RNA, 19 nt, Homo sapiens
  misc_RNA (1)...(19): siRNA sense strand
caugaacagucagccaaug

SEQ ID NO: 38024 - RNA, 19 nt, Homo sapiens
  misc_RNA (1)...(19): siRNA sense strand
agacacagcccucacaaac

SEQ ID NO: 38025 - RNA, 19 nt, Homo sapiens
  misc_RNA (1)...(19): siRNA sense strand
gaacccauuauccagaugu

SEQ ID NO: 38026 - RNA, 19 nt, Homo sapiens
  misc_RNA (1)...(19): siRNA sense strand
ugagagaacccauuaucca

SEQ ID NO: 38027 - RNA, 19 nt, Homo sapiens
  misc_RNA (1)...(19): siRNA sense strand
cuccagaaguuguaagcaa

SEQ ID NO: 38028 - RNA, 19 nt, Homo sapiens
  misc_RNA (1)...(19): siRNA sense strand
aagcggaagcugcaaagaa

SEQ ID NO: 38029 - RNA, 19 nt, Homo sapiens
  misc_RNA (1)...(19): siRNA sense strand
ccuaucagcaguaguuuca

SEQ ID NO: 38030 - RNA, 19 nt, Homo sapiens
  misc_RNA (1)...(19): siRNA sense strand
gcucgguggugucuuuguc

SEQ ID NO: 38031 - RNA, 19 nt, Homo sapiens
  misc_RNA (1)...(19): siRNA sense strand
aagugaaccugauaugucu

SEQ ID NO: 38032 - RNA, 19 nt, Homo sapiens
  misc_RNA (1)...(19): siRNA sense strand
cgacauuucccgaauucug

SEQ ID NO: 38033 - RNA, 19 nt, Homo sapiens
  misc_RNA (1)...(19): siRNA sense strand
gaagcugcaaagaaauaga

SEQ ID NO: 38034 - RNA, 19 nt, Homo sapiens
  misc_RNA (1)...(19): siRNA sense strand
cauaugcagacacacauga

SEQ ID NO: 38035 - RNA, 19 nt, Homo sapiens
  misc_RNA (1)...(19): siRNA sense strand
gggagugcccguccaucuu

SEQ ID NO: 38036 - RNA, 19 nt, Homo sapiens
  misc_RNA (1)...(19): siRNA sense strand
gacacagcccucacaaaca

SEQ ID NO: 38037 - RNA, 19 nt, Homo sapiens
  misc_RNA (1)...(19): siRNA sense strand
ugaagcaagaauacaggua

SEQ ID NO: 38038 - RNA, 19 nt, Homo sapiens
  misc_RNA (1)...(19): siRNA sense strand
agaaagacuagcagccaaa

SEQ ID NO: 38039 - RNA, 19 nt, Homo sapiens
  misc_RNA (1)...(19): siRNA sense strand
ccauuauccagauguguuu

SEQ ID NO: 38040 - RNA, 19 nt, Homo sapiens
  misc_RNA (1)...(19): siRNA sense strand
ugucaucaauaaacagagu

SEQ ID NO: 38041 - RNA, 19 nt, Homo sapiens
  misc_RNA (1)...(19): siRNA sense strand
gagugcccguccaucuuug

SEQ ID NO: 38042 - RNA, 19 nt, Homo sapiens
  misc_RNA (1)...(19): siRNA sense strand
cgaagggccaaauggagaa

SEQ ID NO: 38043 - RNA, 19 nt, Homo sapiens
  misc_RNA (1)...(19): siRNA sense strand
gcauguaugauaaacuaag

SEQ ID NO: 38044 - RNA, 19 nt, Homo sapiens
  misc_RNA (1)...(19): siRNA sense strand
caaccuggcuagcgaaaag

SEQ ID NO: 38045 - RNA, 19 nt, Homo sapiens
  misc_RNA (1)...(19): siRNA sense strand
uaccaacgauaacauacca

SEQ ID NO: 38046 - RNA, 19 nt, Homo sapiens
  misc_RNA (1)...(19): siRNA sense strand
uaagcaaaauagcccagua

SEQ ID NO: 38047 - RNA, 19 nt, Homo sapiens
  misc_RNA (1)...(19): siRNA sense strand
aaugggcggaguuaugaua

SEQ ID NO: 38048 - RNA, 19 nt, Homo sapiens
  misc_RNA (1)...(19): siRNA sense strand
cauauuccuaucagcagua

SEQ ID NO: 38049 - RNA, 19 nt, Homo sapiens
  misc_RNA (1)...(19): siRNA sense strand
aaauggagaagagaagaaa

SEQ ID NO: 38050 - RNA, 19 nt, Homo sapiens
  misc_RNA (1)...(19): siRNA sense strand
ccaaauggagaagagaaga

SEQ ID NO: 38051 - RNA, 19 nt, Homo sapiens
  misc_RNA (1)...(19): siRNA sense strand
cagggcaaccuacgcaaga

SEQ ID NO: 38052 - RNA, 19 nt, Homo sapiens
  misc_RNA (1)...(19): siRNA sense strand
gaagacaggccagcaacac

SEQ ID NO: 38053 - RNA, 19 nt, Homo sapiens
  misc_RNA (1)...(19): siRNA sense strand
ggccaaauggagaagagaa

SEQ ID NO: 38054 - RNA, 19 nt, Homo sapiens
  misc_RNA (1)...(19): siRNA sense strand
gaaguuguaagcaaaauag

SEQ ID NO: 38055 - RNA, 19 nt, Homo sapiens
  misc_RNA (1)...(19): siRNA sense strand
uccaacggaugugugagua

SEQ ID NO: 38056 - RNA, 19 nt, Homo sapiens
  misc_RNA (1)...(19): siRNA sense strand
caucaguuccaacggagaa

SEQ ID NO: 38057 - RNA, 19 nt, Homo sapiens
  misc_RNA (1)...(19): siRNA sense strand
cauguaugauaaacuaagg

SEQ ID NO: 38058 - RNA, 19 nt, Homo sapiens
  misc_RNA (1)...(19): siRNA sense strand
ggaguuaugauaccuacac

SEQ ID NO: 38059 - RNA, 19 nt, Homo sapiens
  misc_RNA (1)...(19): siRNA sense strand
ccaacggaugugugaguaa

SEQ ID NO: 38060 - RNA, 19 nt, Homo sapiens
  misc_RNA (1)...(19): siRNA sense strand
acagcgcucugccgccuau

SEQ ID NO: 38061 - RNA, 19 nt, Homo sapiens
  misc_RNA (1)...(19): siRNA sense strand
acaccuagucauauuccua

SEQ ID NO: 38062 - RNA, 19 nt, Homo sapiens
  misc_RNA (1)...(19): siRNA sense strand
agcaacacaccuagucaua

SEQ ID NO: 38063 - RNA, 19 nt, Homo sapiens
  misc_RNA (1)...(19): siRNA sense strand
aagacuagcagccaaaaua

SEQ ID NO: 38064 - RNA, 19 nt, Homo sapiens
  misc_RNA (1)...(19): siRNA sense strand
gaagcggaagcugcaaaga

SEQ ID NO: 38065 - RNA, 19 nt, Homo sapiens
  misc_RNA (1)...(19): siRNA sense strand
ggaagcugcaaagaaauag

SEQ ID NO: 38066 - RNA, 19 nt, Homo sapiens
  misc_RNA (1)...(19): siRNA sense strand
gcaaucggugguaguaaac

SEQ ID NO: 38067 - RNA, 19 nt, Homo sapiens
  misc_RNA (1)...(19): siRNA sense strand
caccuagucauauuccuau

SEQ ID NO: 38068 - RNA, 19 nt, Homo sapiens
  misc_RNA (1)...(19): siRNA sense strand
caagcaguuucauuucaaa

SEQ ID NO: 38069 - RNA, 19 nt, Homo sapiens
  misc_RNA (1)...(19): siRNA sense strand
ucaagcaguuucauuucaa

SEQ ID NO: 38070 - RNA, 19 nt, Homo sapiens
  misc_RNA (1)...(19): siRNA sense strand
gguuuaacguguacaacaa

SEQ ID NO: 38071 - RNA, 19 nt, Homo sapiens
  misc_RNA (1)...(19): siRNA sense strand
acauaaaccuggccagcuu

SEQ ID NO: 38072 - RNA, 19 nt, Homo sapiens
  misc_RNA (1)...(19): siRNA sense strand
cugaaugguuuaacgugua

SEQ ID NO: 38073 - RNA, 19 nt, Homo sapiens
  misc_RNA (1)...(19): siRNA sense strand
gcaguuucauuucaaagac

SEQ ID NO: 38074 - RNA, 19 nt, Homo sapiens
  misc_RNA (1)...(19): siRNA sense strand
cagcuucaucgaacaagua

SEQ ID NO: 38075 - RNA, 19 nt, Homo sapiens
  misc_RNA (1)...(19): siRNA sense strand
caaguagcaguguccauga

SEQ ID NO: 38076 - RNA, 19 nt, Homo sapiens
  misc_RNA (1)...(19): siRNA sense strand
gcugagcacccaugagugu

SEQ ID NO: 38077 - RNA, 19 nt, Homo sapiens
  misc_RNA (1)...(19): siRNA sense strand
guacaacaagguccacauc

SEQ ID NO: 38078 - RNA, 19 nt, Homo sapiens
  misc_RNA (1)...(19): siRNA sense strand
uuucagaacgggacauaaa

SEQ ID NO: 38079 - RNA, 19 nt, Homo sapiens
  misc_RNA (1)...(19): siRNA sense strand
gccuuuggguucaugacaa

SEQ ID NO: 38080 - RNA, 19 nt, Homo sapiens
  misc_RNA (1)...(19): siRNA sense strand
ucuucaagcaguuucauuu

SEQ ID NO: 38081 - RNA, 19 nt, Homo sapiens
  misc_RNA (1)...(19): siRNA sense strand
ugaaugguuuaacguguac

SEQ ID NO: 38082 - RNA, 19 nt, Homo sapiens
  misc_RNA (1)...(19): siRNA sense strand
uucaagcaguuucauuuca

SEQ ID NO: 38083 - RNA, 19 nt, Homo sapiens
  misc_RNA (1)...(19): siRNA sense strand
gagcuggaaggccgugaug

SEQ ID NO: 38084 - RNA, 19 nt, Homo sapiens
  misc_RNA (1)...(19): siRNA sense strand
gaaacuggaccaccauccu

SEQ ID NO: 38085 - RNA, 19 nt, Homo sapiens
  misc_RNA (1)...(19): siRNA sense strand
aaaccuggccagcuucauc

SEQ ID NO: 38086 - RNA, 19 nt, Homo sapiens
  misc_RNA (1)...(19): siRNA sense strand
acaacaagguccacaucac

SEQ ID NO: 38087 - RNA, 19 nt, Homo sapiens
  misc_RNA (1)...(19): siRNA sense strand
cauccugaaugguuuaacg

SEQ ID NO: 38088 - RNA, 19 nt, Homo sapiens
  misc_RNA (1)...(19): siRNA sense strand
gaaauugcaugucggguua

SEQ ID NO: 38089 - RNA, 19 nt, Homo sapiens
  misc_RNA (1)...(19): siRNA sense strand
gcaagaagaugggcauuaa

SEQ ID NO: 38090 - RNA, 19 nt, Homo sapiens
  misc_RNA (1)...(19): siRNA sense strand
gaaauuggcuacccuguca

SEQ ID NO: 38091 - RNA, 19 nt, Homo sapiens
  misc_RNA (1)...(19): siRNA sense strand
gaaagagagugcucaauuc

SEQ ID NO: 38092 - RNA, 19 nt, Homo sapiens
  misc_RNA (1)...(19): siRNA sense strand
gaaccuggcuucgcccuua

SEQ ID NO: 38093 - RNA, 19 nt, Homo sapiens
  misc_RNA (1)...(19): siRNA sense strand
agaagaagcugucagaauu

SEQ ID NO: 38094 - RNA, 19 nt, Homo sapiens
  misc_RNA (1)...(19): siRNA sense strand
caagaaugccuguuauuaa

SEQ ID NO: 38095 - RNA, 19 nt, Homo sapiens
  misc_RNA (1)...(19): siRNA sense strand
gaaaugauccguguugcua

SEQ ID NO: 38096 - RNA, 19 nt, Homo sapiens
  misc_RNA (1)...(19): siRNA sense strand
gaacaaauuuaugcuggaa

SEQ ID NO: 38097 - RNA, 19 nt, Homo sapiens
  misc_RNA (1)...(19): siRNA sense strand
gaugauagacuacuaauag

SEQ ID NO: 38098 - RNA, 19 nt, Homo sapiens
  misc_RNA (1)...(19): siRNA sense strand
gggaaugcuuuauggcuua

SEQ ID NO: 38099 - RNA, 19 nt, Homo sapiens
  misc_RNA (1)...(19): siRNA sense strand
gcacaaacaagcugauauu

SEQ ID NO: 38100 - RNA, 19 nt, Homo sapiens
  misc_RNA (1)...(19): siRNA sense strand
gcaguugaaugucggguuu

SEQ ID NO: 38101 - RNA, 19 nt, Homo sapiens
  misc_RNA (1)...(19): siRNA sense strand
cagaugcacuggauaacua

SEQ ID NO: 38102 - RNA, 19 nt, Homo sapiens
  misc_RNA (1)...(19): siRNA sense strand
guugaugggucgaaacuaa

SEQ ID NO: 38103 - RNA, 19 nt, Homo sapiens
  misc_RNA (1)...(19): siRNA sense strand
caagaaauuugugugauug

SEQ ID NO: 38104 - RNA, 19 nt, Homo sapiens
  misc_RNA (1)...(19): siRNA sense strand
aagcagagguuaauacaau

SEQ ID NO: 38105 - RNA, 19 nt, Homo sapiens
  misc_RNA (1)...(19): siRNA sense strand
ucaagaaugccuguuauua

SEQ ID NO: 38106 - RNA, 19 nt, Homo sapiens
  misc_RNA (1)...(19): siRNA sense strand
ugaagcauguucuguacua

SEQ ID NO: 38107 - RNA, 19 nt, Homo sapiens
  misc_RNA (1)...(19): siRNA sense strand
guacaaggugaauaucuua

SEQ ID NO: 38108 - RNA, 19 nt, Homo sapiens
  misc_RNA (1)...(19): siRNA sense strand
ggaugaggcugucuguguu

SEQ ID NO: 38109 - RNA, 19 nt, Homo sapiens
  misc_RNA (1)...(19): siRNA sense strand
gauaaucaacucacgcuuu

SEQ ID NO: 38110 - RNA, 19 nt, Homo sapiens
  misc_RNA (1)...(19): siRNA sense strand
gaagagcgaugggagaaca

SEQ ID NO: 38111 - RNA, 19 nt, Homo sapiens
  misc_RNA (1)...(19): siRNA sense strand
ugauaauccucgucauaua

SEQ ID NO: 38112 - RNA, 19 nt, Homo sapiens
  misc_RNA (1)...(19): siRNA sense strand
cgacaagauugaaagcaaa

SEQ ID NO: 38113 - RNA, 19 nt, Homo sapiens
  misc_RNA (1)...(19): siRNA sense strand
ggaggaagcaccaagcauu

SEQ ID NO: 38114 - RNA, 19 nt, Homo sapiens
  misc_RNA (1)...(19): siRNA sense strand
ugaaagagagugcucaauu

SEQ ID NO: 38115 - RNA, 19 nt, Homo sapiens
  misc_RNA (1)...(19): siRNA sense strand
uaaaguucauaccguagua

SEQ ID NO: 38116 - RNA, 19 nt, Homo sapiens
  misc_RNA (1)...(19): siRNA sense strand
ggacacaugcuaaccaaga

SEQ ID NO: 38117 - RNA, 19 nt, Homo sapiens
  misc_RNA (1)...(19): siRNA sense strand
cuacaagucuuuugguuua

SEQ ID NO: 38118 - RNA, 19 nt, Homo sapiens
  misc_RNA (1)...(19): siRNA sense strand
gcgacaagauugaaagcaa

SEQ ID NO: 38119 - RNA, 19 nt, Homo sapiens
  misc_RNA (1)...(19): siRNA sense strand
ugaaaucugugcacuguca

SEQ ID NO: 38120 - RNA, 19 nt, Homo sapiens
  misc_RNA (1)...(19): siRNA sense strand
ggagacaucagcacuaaau

SEQ ID NO: 38121 - RNA, 19 nt, Homo sapiens
  misc_RNA (1)...(19): siRNA sense strand
gaagaagcugucagaauug

SEQ ID NO: 38122 - RNA, 19 nt, Homo sapiens
  misc_RNA (1)...(19): siRNA sense strand
gcuaauagaggagaaauug

SEQ ID NO: 38123 - RNA, 19 nt, Homo sapiens
  misc_RNA (1)...(19): siRNA sense strand
guaguagcaucaaacaaug

SEQ ID NO: 38124 - RNA, 19 nt, Homo sapiens
  misc_RNA (1)...(19): siRNA sense strand
gaaagcagagguuaauaca

SEQ ID NO: 38125 - RNA, 19 nt, Homo sapiens
  misc_RNA (1)...(19): siRNA sense strand
caagaaccguuacaucuac

SEQ ID NO: 38126 - RNA, 19 nt, Homo sapiens
  misc_RNA (1)...(19): siRNA sense strand
ggugaaaucugugcacugu

SEQ ID NO: 38127 - RNA, 19 nt, Homo sapiens
  misc_RNA (1)...(19): siRNA sense strand
caaccaggaagugauauua

SEQ ID NO: 38128 - RNA, 19 nt, Homo sapiens
  misc_RNA (1)...(19): siRNA sense strand
ugacacacaugcuauucaa

SEQ ID NO: 38129 - RNA, 19 nt, Homo sapiens
  misc_RNA (1)...(19): siRNA sense strand
gaacugaggcacugaagag

SEQ ID NO: 38130 - RNA, 19 nt, Homo sapiens
  misc_RNA (1)...(19): siRNA sense strand
ggaagugauauuagcauuu

SEQ ID NO: 38131 - RNA, 19 nt, Homo sapiens
  misc_RNA (1)...(19): siRNA sense strand
ccaagaaccguuacaucua

SEQ ID NO: 38132 - RNA, 19 nt, Homo sapiens
  misc_RNA (1)...(19): siRNA sense strand
agagagugcucaauucaga

SEQ ID NO: 38133 - RNA, 19 nt, Homo sapiens
  misc_RNA (1)...(19): siRNA sense strand
ggaaguugaugggucgaaa

SEQ ID NO: 38134 - RNA, 19 nt, Homo sapiens
  misc_RNA (1)...(19): siRNA sense strand
cuaaauuucucuccgaugu

SEQ ID NO: 38135 - RNA, 19 nt, Homo sapiens
  misc_RNA (1)...(19): siRNA sense strand
auacaagacuccagguuga

SEQ ID NO: 38136 - RNA, 19 nt, Homo sapiens
  misc_RNA (1)...(19): siRNA sense strand
gaggaagcaccaagcauuu

SEQ ID NO: 38137 - RNA, 19 nt, Homo sapiens
  misc_RNA (1)...(19): siRNA sense strand
gaagaugggcauuaagaca

SEQ ID NO: 38138 - RNA, 19 nt, Homo sapiens
  misc_RNA (1)...(19): siRNA sense strand
gagaagaaccaguuauugg

SEQ ID NO: 38139 - RNA, 19 nt, Homo sapiens
  misc_RNA (1)...(19): siRNA sense strand
gggaaaggcaugcgcauug

SEQ ID NO: 38140 - RNA, 19 nt, Homo sapiens
  misc_RNA (1)...(19): siRNA sense strand
gcagaaggucaagaaauuu

SEQ ID NO: 38141 - RNA, 19 nt, Homo sapiens
  misc_RNA (1)...(19): siRNA sense strand
agucaaggaugcagaagaa

SEQ ID NO: 38142 - RNA, 19 nt, Homo sapiens
  misc_RNA (1)...(19): siRNA sense strand
agcagaaggucaagaaauu

SEQ ID NO: 38143 - RNA, 19 nt, Homo sapiens
  misc_RNA (1)...(19): siRNA sense strand
agaagcagguggaaacaug

SEQ ID NO: 38144 - RNA, 19 nt, Homo sapiens
  misc_RNA (1)...(19): siRNA sense strand
uaaccaagagugagaagaa

SEQ ID NO: 38145 - RNA, 19 nt, Homo sapiens
  misc_RNA (1)...(19): siRNA sense strand
acauauggcucugauagaa

SEQ ID NO: 38146 - RNA, 19 nt, Homo sapiens
  misc_RNA (1)...(19): siRNA sense strand
aaagcuaccucaacaugga

SEQ ID NO: 38147 - RNA, 19 nt, Homo sapiens
  misc_RNA (1)...(19): siRNA sense strand
ggaaugcuuuauggcuuaa

SEQ ID NO: 38148 - RNA, 19 nt, Homo sapiens
  misc_RNA (1)...(19): siRNA sense strand
gcuaagaaagcagagguua

SEQ ID NO: 38149 - RNA, 19 nt, Homo sapiens
  misc_RNA (1)...(19): siRNA sense strand
gauaauccucgucauauag

SEQ ID NO: 38150 - RNA, 19 nt, Homo sapiens
  misc_RNA (1)...(19): siRNA sense strand
agacaucagcacuaaauuu

SEQ ID NO: 38151 - RNA, 19 nt, Homo sapiens
  misc_RNA (1)...(19): siRNA sense strand
uauuagaacuugcaagaag

SEQ ID NO: 38152 - RNA, 19 nt, Homo sapiens
  misc_RNA (1)...(19): siRNA sense strand
auaaucaacucacgcuuug

SEQ ID NO: 38153 - RNA, 19 nt, Homo sapiens
  misc_RNA (1)...(19): siRNA sense strand
uaagaaagcagagguuaau

SEQ ID NO: 38154 - RNA, 19 nt, Homo sapiens
  misc_RNA (1)...(19): siRNA sense strand
ucaagacagugcuuaaugg

SEQ ID NO: 38155 - RNA, 19 nt, Homo sapiens
  misc_RNA (1)...(19): siRNA sense strand
gcccagcucccaccaguaa

SEQ ID NO: 38156 - RNA, 19 nt, Homo sapiens
  misc_RNA (1)...(19): siRNA sense strand
caucauuguuuguggcauu

SEQ ID NO: 38157 - RNA, 19 nt, Homo sapiens
  misc_RNA (1)...(19): siRNA sense strand
gcuuaauggugucccguaa

SEQ ID NO: 38158 - RNA, 19 nt, Homo sapiens
  misc_RNA (1)...(19): siRNA sense strand
gacaucagcacuaaauuuc

SEQ ID NO: 38159 - RNA, 19 nt, Homo sapiens
  misc_RNA (1)...(19): siRNA sense strand
gaugggagaacaagcugua

SEQ ID NO: 38160 - RNA, 19 nt, Homo sapiens
  misc_RNA (1)...(19): siRNA sense strand
ggucaagaaauuuguguga

SEQ ID NO: 38161 - RNA, 19 nt, Homo sapiens
  misc_RNA (1)...(19): siRNA sense strand
gaagaugucguuuucauug

SEQ ID NO: 38162 - RNA, 19 nt, Homo sapiens
  misc_RNA (1)...(19): siRNA sense strand
aaggagacaucagcacuaa

SEQ ID NO: 38163 - RNA, 19 nt, Homo sapiens
  misc_RNA (1)...(19): siRNA sense strand
ggaccugacacacaugcua

SEQ ID NO: 38164 - RNA, 19 nt, Homo sapiens
  misc_RNA (1)...(19): siRNA sense strand
gaaacaugagcauucaguu

SEQ ID NO: 38165 - RNA, 19 nt, Homo sapiens
  misc_RNA (1)...(19): siRNA sense strand
gcaugucggguuauuagaa

SEQ ID NO: 38166 - RNA, 19 nt, Homo sapiens
  misc_RNA (1)...(19): siRNA sense strand
cagaagaagcugucagaau

SEQ ID NO: 38167 - RNA, 19 nt, Homo sapiens
  misc_RNA (1)...(19): siRNA sense strand
ggaaacaugagcauucagu

SEQ ID NO: 38168 - RNA, 19 nt, Homo sapiens
  misc_RNA (1)...(19): siRNA sense strand
gugagaagaaccaguuauu

SEQ ID NO: 38169 - RNA, 19 nt, Homo sapiens
  misc_RNA (1)...(19): siRNA sense strand
gaagcauguucuguacuau

SEQ ID NO: 38170 - RNA, 19 nt, Homo sapiens
  misc_RNA (1)...(19): siRNA sense strand
gaauacaagacuccagguu

SEQ ID NO: 38171 - RNA, 19 nt, Homo sapiens
  misc_RNA (1)...(19): siRNA sense strand
guuauuagaacuugcaaga

SEQ ID NO: 38172 - RNA, 19 nt, Homo sapiens
  misc_RNA (1)...(19): siRNA sense strand
guuaagagcacaacauuuu

SEQ ID NO: 38173 - RNA, 19 nt, Homo sapiens
  misc_RNA (1)...(19): siRNA sense strand
guuuguggcauuccaguua

SEQ ID NO: 38174 - RNA, 19 nt, Homo sapiens
  misc_RNA (1)...(19): siRNA sense strand
gaugcuaguucuguucaug

SEQ ID NO: 38175 - RNA, 19 nt, Homo sapiens
  misc_RNA (1)...(19): siRNA sense strand
gaagcagguggaaacauga

SEQ ID NO: 38176 - RNA, 19 nt, Homo sapiens
  misc_RNA (1)...(19): siRNA sense strand
cguaguagcaucaaacaau

SEQ ID NO: 38177 - RNA, 19 nt, Homo sapiens
  misc_RNA (1)...(19): siRNA sense strand
ggaaaggcaugcgcauugc

SEQ ID NO: 38178 - RNA, 19 nt, Homo sapiens
  misc_RNA (1)...(19): siRNA sense strand
gaagcugucagaauugcaa

SEQ ID NO: 38179 - RNA, 19 nt, Homo sapiens
  misc_RNA (1)...(19): siRNA sense strand
gguagcagaaggucaagaa

SEQ ID NO: 38180 - RNA, 19 nt, Homo sapiens
  misc_RNA (1)...(19): siRNA sense strand
uguacaaggugaauaucuu

SEQ ID NO: 38181 - RNA, 19 nt, Homo sapiens
  misc_RNA (1)...(19): siRNA sense strand
gcgcauugcuugggaugau

SEQ ID NO: 38182 - RNA, 19 nt, Homo sapiens
  misc_RNA (1)...(19): siRNA sense strand
guuauggauuccuuucaga

SEQ ID NO: 38183 - RNA, 19 nt, Homo sapiens
  misc_RNA (1)...(19): siRNA sense strand
caucagcacuaaauuucuc

SEQ ID NO: 38184 - RNA, 19 nt, Homo sapiens
  misc_RNA (1)...(19): siRNA sense strand
aaucaacucacgcuuugua

SEQ ID NO: 38185 - RNA, 19 nt, Homo sapiens
  misc_RNA (1)...(19): siRNA sense strand
ucacauauggcucugauag

SEQ ID NO: 38186 - RNA, 19 nt, Homo sapiens
  misc_RNA (1)...(19): siRNA sense strand
uuaauggugucccguaauc

SEQ ID NO: 38187 - RNA, 19 nt, Homo sapiens
  misc_RNA (1)...(19): siRNA sense strand
uacaaucccuggcuuugau

SEQ ID NO: 38188 - RNA, 19 nt, Homo sapiens
  misc_RNA (1)...(19): siRNA sense strand
caagagagaugaagagauu

SEQ ID NO: 38189 - RNA, 19 nt, Homo sapiens
  misc_RNA (1)...(19): siRNA sense strand
ggaaggcgcuugcugauga

SEQ ID NO: 38190 - RNA, 19 nt, Homo sapiens
  misc_RNA (1)...(19): siRNA sense strand
gaacaagaaggaagaaauu

SEQ ID NO: 38191 - RNA, 19 nt, Homo sapiens
  misc_RNA (1)...(19): siRNA sense strand
ucaaagugguggauaaauu

SEQ ID NO: 38192 - RNA, 19 nt, Homo sapiens
  misc_RNA (1)...(19): siRNA sense strand
gaacaggaguggacacagu

SEQ ID NO: 38193 - RNA, 19 nt, Homo sapiens
  misc_RNA (1)...(19): siRNA sense strand
ccaauaaccucuaccagau

SEQ ID NO: 38194 - RNA, 19 nt, Homo sapiens
  misc_RNA (1)...(19): siRNA sense strand
gcaaagaggacaucaaagu

SEQ ID NO: 38195 - RNA, 19 nt, Homo sapiens
  misc_RNA (1)...(19): siRNA sense strand
gagucuggauggaugauua

SEQ ID NO: 38196 - RNA, 19 nt, Homo sapiens
  misc_RNA (1)...(19): siRNA sense strand
gaaagaaccucuggaugag

SEQ ID NO: 38197 - RNA, 19 nt, Homo sapiens
  misc_RNA (1)...(19): siRNA sense strand
cagaggagguggagaaguu

SEQ ID NO: 38198 - RNA, 19 nt, Homo sapiens
  misc_RNA (1)...(19): siRNA sense strand
gggcuggucugucuuaaau

SEQ ID NO: 38199 - RNA, 19 nt, Homo sapiens
  misc_RNA (1)...(19): siRNA sense strand
gggaagcccuuugaugaaa

SEQ ID NO: 38200 - RNA, 19 nt, Homo sapiens
  misc_RNA (1)...(19): siRNA sense strand
gcugguggcugcugaauuc

SEQ ID NO: 38201 - RNA, 19 nt, Homo sapiens
  misc_RNA (1)...(19): siRNA sense strand
caaagugguggauaaauuu

SEQ ID NO: 38202 - RNA, 19 nt, Homo sapiens
  misc_RNA (1)...(19): siRNA sense strand
agaaagaaccucuggauga

SEQ ID NO: 38203 - RNA, 19 nt, Homo sapiens
  misc_RNA (1)...(19): siRNA sense strand
agaaaugcaucuucaaugu

SEQ ID NO: 38204 - RNA, 19 nt, Homo sapiens
  misc_RNA (1)...(19): siRNA sense strand
aaucauggcugugaauaaa

SEQ ID NO: 38205 - RNA, 19 nt, Homo sapiens
  misc_RNA (1)...(19): siRNA sense strand
ggacucgaauauuggcuuu

SEQ ID NO: 38206 - RNA, 19 nt, Homo sapiens
  misc_RNA (1)...(19): siRNA sense strand
gcaaaacacugcucagaga

SEQ ID NO: 38207 - RNA, 19 nt, Homo sapiens
  misc_RNA (1)...(19): siRNA sense strand
guggauaaauuucacauuc

SEQ ID NO: 38208 - RNA, 19 nt, Homo sapiens
  misc_RNA (1)...(19): siRNA sense strand
ggagagcgaaaucaucuuu

SEQ ID NO: 38209 - RNA, 19 nt, Homo sapiens
  misc_RNA (1)...(19): siRNA sense strand
gagcagacacggaaggaaa

SEQ ID NO: 38210 - RNA, 19 nt, Homo sapiens
  misc_RNA (1)...(19): siRNA sense strand
gagcauuucugugacuuug

SEQ ID NO: 38211 - RNA, 19 nt, Homo sapiens
  misc_RNA (1)...(19): siRNA sense strand
gacgagagccugaauaucu

SEQ ID NO: 38212 - RNA, 19 nt, Homo sapiens
  misc_RNA (1)...(19): siRNA sense strand
gauggacauugcaaucauu

SEQ ID NO: 38213 - RNA, 19 nt, Homo sapiens
  misc_RNA (1)...(19): siRNA sense strand
gagaaaugcaucuucaaug

SEQ ID NO: 38214 - RNA, 19 nt, Homo sapiens
  misc_RNA (1)...(19): siRNA sense strand
gaccacagaggcaccaaua

SEQ ID NO: 38215 - RNA, 19 nt, Homo sapiens
  misc_RNA (1)...(19): siRNA sense strand
acaaggaauucucccguuu

SEQ ID NO: 38216 - RNA, 19 nt, Homo sapiens
  misc_RNA (1)...(19): siRNA sense strand
cuaagaagauugcuaacgu

SEQ ID NO: 38217 - RNA, 19 nt, Homo sapiens
  misc_RNA (1)...(19): siRNA sense strand
aaacaaagcagaugaacuc

SEQ ID NO: 38218 - RNA, 19 nt, Homo sapiens
  misc_RNA (1)...(19): siRNA sense strand
ggacagaaacaaagcagau

SEQ ID NO: 38219 - RNA, 19 nt, Homo sapiens
  misc_RNA (1)...(19): siRNA sense strand
caagaaggaagaaauuguu

SEQ ID NO: 38220 - RNA, 19 nt, Homo sapiens
  misc_RNA (1)...(19): siRNA sense strand
aaaugcaucuucaauguca

SEQ ID NO: 38221 - RNA, 19 nt, Homo sapiens
  misc_RNA (1)...(19): siRNA sense strand
gagacgagagccugaauau

SEQ ID NO: 38222 - RNA, 19 nt, Homo sapiens
  misc_RNA (1)...(19): siRNA sense strand
gaagugugacaaugaagaa

SEQ ID NO: 38223 - RNA, 19 nt, Homo sapiens
  misc_RNA (1)...(19): siRNA sense strand
gaaggaagaaauuguugga

SEQ ID NO: 38224 - RNA, 19 nt, Homo sapiens
  misc_RNA (1)...(19): siRNA sense strand
acagagaaaugcaucuuca

SEQ ID NO: 38225 - RNA, 19 nt, Homo sapiens
  misc_RNA (1)...(19): siRNA sense strand
gaagcccuuugaugaaaug

SEQ ID NO: 38226 - RNA, 19 nt, Homo sapiens
  misc_RNA (1)...(19): siRNA sense strand
ggaagcccuuugaugaaau

SEQ ID NO: 38227 - RNA, 19 nt, Homo sapiens
  misc_RNA (1)...(19): siRNA sense strand
agaauggccugauuugcaa

SEQ ID NO: 38228 - RNA, 19 nt, Homo sapiens
  misc_RNA (1)...(19): siRNA sense strand
caaaucuaaucaugaagug

SEQ ID NO: 38229 - RNA, 19 nt, Homo sapiens
  misc_RNA (1)...(19): siRNA sense strand
gaauuuacagacagagaaa

SEQ ID NO: 38230 - RNA, 19 nt, Homo sapiens
  misc_RNA (1)...(19): siRNA sense strand
ugaguacgaugccaagaug

SEQ ID NO: 38231 - RNA, 19 nt, Homo sapiens
  misc_RNA (1)...(19): siRNA sense strand
aagaggagcuggcugagau

SEQ ID NO: 38232 - RNA, 19 nt, Homo sapiens
  misc_RNA (1)...(19): siRNA sense strand
aauaucaugugaaguguga

SEQ ID NO: 38233 - RNA, 19 nt, Homo sapiens
  misc_RNA (1)...(19): siRNA sense strand
ugaccaagcagaaggaauu

SEQ ID NO: 38234 - RNA, 19 nt, Homo sapiens
  misc_RNA (1)...(19): siRNA sense strand
ccacaaagcccuguacaca

SEQ ID NO: 38235 - RNA, 19 nt, Homo sapiens
  misc_RNA (1)...(19): siRNA sense strand
gcaaaucuaaucaugaagu

SEQ ID NO: 38236 - RNA, 19 nt, Homo sapiens
  misc_RNA (1)...(19): siRNA sense strand
cagaggaggaugagcauuu

SEQ ID NO: 38237 - RNA, 19 nt, Homo sapiens
  misc_RNA (1)...(19): siRNA sense strand
gagaucgucuucccuuugg

SEQ ID NO: 38238 - RNA, 19 nt, Homo sapiens
  misc_RNA (1)...(19): siRNA sense strand
ggauaaauuucacauucca

SEQ ID NO: 38239 - RNA, 19 nt, Homo sapiens
  misc_RNA (1)...(19): siRNA sense strand
gugcuuuccucaacuguga

SEQ ID NO: 38240 - RNA, 19 nt, Homo sapiens
  misc_RNA (1)...(19): siRNA sense strand
gcauuucugugacuuugug

SEQ ID NO: 38241 - RNA, 19 nt, Homo sapiens
  misc_RNA (1)...(19): siRNA sense strand
ccuaugagucaaugaauaa

SEQ ID NO: 38242 - RNA, 19 nt, Homo sapiens
  misc_RNA (1)...(19): siRNA sense strand
agagcgaaaucaucuuuga

SEQ ID NO: 38243 - RNA, 19 nt, Homo sapiens
  misc_RNA (1)...(19): siRNA sense strand
cagaugaacucccuaagcu

SEQ ID NO: 38244 - RNA, 19 nt, Homo sapiens
  misc_RNA (1)...(19): siRNA sense strand
ggacuuucaggagaauuua

SEQ ID NO: 38245 - RNA, 19 nt, Homo sapiens
  misc_RNA (1)...(19): siRNA sense strand
gaccauugggcuuuaguaa

SEQ ID NO: 38246 - RNA, 19 nt, Homo sapiens
  misc_RNA (1)...(19): siRNA sense strand
uaagacauaugagagugaa

SEQ ID NO: 38247 - RNA, 19 nt, Homo sapiens
  misc_RNA (1)...(19): siRNA sense strand
aauaaccucuaccagauga

SEQ ID NO: 38248 - RNA, 19 nt, Homo sapiens
  misc_RNA (1)...(19): siRNA sense strand
ccgcuuauguugcccagaa

SEQ ID NO: 38249 - RNA, 19 nt, Homo sapiens
  misc_RNA (1)...(19): siRNA sense strand
gugugacaaugaagaaauu

SEQ ID NO: 38250 - RNA, 19 nt, Homo sapiens
  misc_RNA (1)...(19): siRNA sense strand
gaaaugcaucuucaauguc

SEQ ID NO: 38251 - RNA, 19 nt, Homo sapiens
  misc_RNA (1)...(19): siRNA sense strand
ucaagaagaggacgauguu

SEQ ID NO: 38252 - RNA, 19 nt, Homo sapiens
  misc_RNA (1)...(19): siRNA sense strand
agaaguuccuggacucgaa

SEQ ID NO: 38253 - RNA, 19 nt, Homo sapiens
  misc_RNA (1)...(19): siRNA sense strand
gauguauuaugagcucaaa

SEQ ID NO: 38254 - RNA, 19 nt, Homo sapiens
  misc_RNA (1)...(19): siRNA sense strand
ggaucccacuucaccaaga

SEQ ID NO: 38255 - RNA, 19 nt, Homo sapiens
  misc_RNA (1)...(19): siRNA sense strand
gaggagagcgaaaucaucu

SEQ ID NO: 38256 - RNA, 19 nt, Homo sapiens
  misc_RNA (1)...(19): siRNA sense strand
gaauccaccuccugaccau

SEQ ID NO: 38257 - RNA, 19 nt, Homo sapiens
  misc_RNA (1)...(19): siRNA sense strand
uggcaaagaggacaucaaa

SEQ ID NO: 38258 - RNA, 19 nt, Homo sapiens
  misc_RNA (1)...(19): siRNA sense strand
aguaagggcuaccgcaaga

SEQ ID NO: 38259 - RNA, 19 nt, Homo sapiens
  misc_RNA (1)...(19): siRNA sense strand
gaagaggagcuggcugaga

SEQ ID NO: 38260 - RNA, 19 nt, Homo sapiens
  misc_RNA (1)...(19): siRNA sense strand
gaugggaagcccuuugaug

SEQ ID NO: 38261 - RNA, 19 nt, Homo sapiens
  misc_RNA (1)...(19): siRNA sense strand
cagcagaggagguggagaa

SEQ ID NO: 38262 - RNA, 19 nt, Homo sapiens
  misc_RNA (1)...(19): siRNA sense strand
gcucaucuccgaccuccuu

SEQ ID NO: 38263 - RNA, 19 nt, Homo sapiens
  misc_RNA (1)...(19): siRNA sense strand
cagaauggccugauuugca

SEQ ID NO: 38264 - RNA, 19 nt, Homo sapiens
  misc_RNA (1)...(19): siRNA sense strand
caaagaggacaucaaaguc

SEQ ID NO: 38265 - RNA, 19 nt, Homo sapiens
  misc_RNA (1)...(19): siRNA sense strand
ucaggagaauuuacagaca

SEQ ID NO: 38266 - RNA, 19 nt, Homo sapiens
  misc_RNA (1)...(19): siRNA sense strand
caugauggacagaaacaaa

SEQ ID NO: 38267 - RNA, 19 nt, Homo sapiens
  misc_RNA (1)...(19): siRNA sense strand
cauggucacugcugcuuuc

SEQ ID NO: 38268 - RNA, 19 nt, Homo sapiens
  misc_RNA (1)...(19): siRNA sense strand
caagaucaccuaccacaac

SEQ ID NO: 38269 - RNA, 19 nt, Homo sapiens
  misc_RNA (1)...(19): siRNA sense strand
gcucaaagugguggauaaa

SEQ ID NO: 38270 - RNA, 19 nt, Homo sapiens
  misc_RNA (1)...(19): siRNA sense strand
ugccagaugcagauaaaua

SEQ ID NO: 38271 - RNA, 19 nt, Homo sapiens
  misc_RNA (1)...(19): siRNA sense strand
cagaaaaucuugaaaacca

SEQ ID NO: 38272 - RNA, 19 nt, Homo sapiens
  misc_RNA (1)...(19): siRNA sense strand
uaaauccugacaccuauga

SEQ ID NO: 38273 - RNA, 19 nt, Homo sapiens
  misc_RNA (1)...(19): siRNA sense strand
aaagaggacaucaaaguca

SEQ ID NO: 38274 - RNA, 19 nt, Homo sapiens
  misc_RNA (1)...(19): siRNA sense strand
guacacaguccgugcuuuc

SEQ ID NO: 38275 - RNA, 19 nt, Homo sapiens
  misc_RNA (1)...(19): siRNA sense strand
aggaugagcauuucuguga

SEQ ID NO: 38276 - RNA, 19 nt, Homo sapiens
  misc_RNA (1)...(19): siRNA sense strand
agacaccacuuggaguuug

SEQ ID NO: 38277 - RNA, 19 nt, Homo sapiens
  misc_RNA (1)...(19): siRNA sense strand
ccggauggaagagaaauua

SEQ ID NO: 38278 - RNA, 19 nt, Homo sapiens
  misc_RNA (1)...(19): siRNA sense strand
uugaagaacuuacggacau

SEQ ID NO: 38279 - RNA, 19 nt, Homo sapiens
  misc_RNA (1)...(19): siRNA sense strand
cagaguacaagaccaagaa

SEQ ID NO: 38280 - RNA, 19 nt, Homo sapiens
  misc_RNA (1)...(19): siRNA sense strand
uuccuggacucgaauauug

SEQ ID NO: 38281 - RNA, 19 nt, Homo sapiens
  misc_RNA (1)...(19): siRNA sense strand
ggagaucaccccaauguug

SEQ ID NO: 38282 - RNA, 19 nt, Homo sapiens
  misc_RNA (1)...(19): siRNA sense strand
gaaacaaagcagaugaacu

SEQ ID NO: 38283 - RNA, 19 nt, Homo sapiens
  misc_RNA (1)...(19): siRNA sense strand
acacggaaggaaaucguua

SEQ ID NO: 38284 - RNA, 19 nt, Homo sapiens
  misc_RNA (1)...(19): siRNA sense strand
aaagacaccacuuggaguu

SEQ ID NO: 38285 - RNA, 19 nt, Homo sapiens
  misc_RNA (1)...(19): siRNA sense strand
ugugaagugugacaaugaa

SEQ ID NO: 38286 - RNA, 19 nt, Homo sapiens
  misc_RNA (1)...(19): siRNA sense strand
caugugaagugugacaaug

SEQ ID NO: 38287 - RNA, 19 nt, Homo sapiens
  misc_RNA (1)...(19): siRNA sense strand
cuuaaauccugacaccuau

SEQ ID NO: 38288 - RNA, 19 nt, Homo sapiens
  misc_RNA (1)...(19): siRNA sense strand
ggaauuaaaugaucgguuu

SEQ ID NO: 38289 - RNA, 19 nt, Homo sapiens
  misc_RNA (1)...(19): siRNA sense strand
aaacagagcugacggaaga

SEQ ID NO: 38290 - RNA, 19 nt, Homo sapiens
  misc_RNA (1)...(19): siRNA sense strand
gaauugaugugaaugugua

SEQ ID NO: 38291 - RNA, 19 nt, Homo sapiens
  misc_RNA (1)...(19): siRNA sense strand
ggaguucucucuauuaucu

SEQ ID NO: 38292 - RNA, 19 nt, Homo sapiens
  misc_RNA (1)...(19): siRNA sense strand
guaaagauacccuugaauu

SEQ ID NO: 38293 - RNA, 19 nt, Homo sapiens
  misc_RNA (1)...(19): siRNA sense strand
gauaauugcuacugccauu

SEQ ID NO: 38294 - RNA, 19 nt, Homo sapiens
  misc_RNA (1)...(19): siRNA sense strand
gcuguuaucuggguguuua

SEQ ID NO: 38295 - RNA, 19 nt, Homo sapiens
  misc_RNA (1)...(19): siRNA sense strand
uugcaucacuucaagauua

SEQ ID NO: 38296 - RNA, 19 nt, Homo sapiens
  misc_RNA (1)...(19): siRNA sense strand
ccaaagaauugaugugaau

SEQ ID NO: 38297 - RNA, 19 nt, Homo sapiens
  misc_RNA (1)...(19): siRNA sense strand
cagauuggauucauaguga

SEQ ID NO: 38298 - RNA, 19 nt, Homo sapiens
  misc_RNA (1)...(19): siRNA sense strand
gaaguaauugugacgauaa

SEQ ID NO: 38299 - RNA, 19 nt, Homo sapiens
  misc_RNA (1)...(19): siRNA sense strand
gcaauggaacuguauuaaa

SEQ ID NO: 38300 - RNA, 19 nt, Homo sapiens
  misc_RNA (1)...(19): siRNA sense strand
ggaaauagagauucaagug

SEQ ID NO: 38301 - RNA, 19 nt, Homo sapiens
  misc_RNA (1)...(19): siRNA sense strand
gauagacacugcagcuaga

SEQ ID NO: 38302 - RNA, 19 nt, Homo sapiens
  misc_RNA (1)...(19): siRNA sense strand
ggagagcacuggaggaaag

SEQ ID NO: 38303 - RNA, 19 nt, Homo sapiens
  misc_RNA (1)...(19): siRNA sense strand
caucaucucugcugcgauu

SEQ ID NO: 38304 - RNA, 19 nt, Homo sapiens
  misc_RNA (1)...(19): siRNA sense strand
gaaacgaucacucucauuc

SEQ ID NO: 38305 - RNA, 19 nt, Homo sapiens
  misc_RNA (1)...(19): siRNA sense strand
ggagacagaauaagauuga

SEQ ID NO: 38306 - RNA, 19 nt, Homo sapiens
  misc_RNA (1)...(19): siRNA sense strand
gaauaagauugaugcuguu

SEQ ID NO: 38307 - RNA, 19 nt, Homo sapiens
  misc_RNA (1)...(19): siRNA sense strand
uagcacagauaucuacaaa

SEQ ID NO: 38308 - RNA, 19 nt, Homo sapiens
  misc_RNA (1)...(19): siRNA sense strand
uuuacuagcuggccuuaua

SEQ ID NO: 38309 - RNA, 19 nt, Homo sapiens
  misc_RNA (1)...(19): siRNA sense strand
aggaauggcugcuuaguga

SEQ ID NO: 38310 - RNA, 19 nt, Homo sapiens
  misc_RNA (1)...(19): siRNA sense strand
gcuauacucuaucuacaga

SEQ ID NO: 38311 - RNA, 19 nt, Homo sapiens
  misc_RNA (1)...(19): siRNA sense strand
gcacagauaucuacaaaag

SEQ ID NO: 38312 - RNA, 19 nt, Homo sapiens
  misc_RNA (1)...(19): siRNA sense strand
caauggaguucucucuauu

SEQ ID NO: 38313 - RNA, 19 nt, Homo sapiens
  misc_RNA (1)...(19): siRNA sense strand
ccaaggaaauagagauuca

SEQ ID NO: 38314 - RNA, 19 nt, Homo sapiens
  misc_RNA (1)...(19): siRNA sense strand
gucaaggaauggcugcuua

SEQ ID NO: 38315 - RNA, 19 nt, Homo sapiens
  misc_RNA (1)...(19): siRNA sense strand
cagcagcaauggaacugua

SEQ ID NO: 38316 - RNA, 19 nt, Homo sapiens
  misc_RNA (1)...(19): siRNA sense strand
ugacauacuuuaucuuugg

SEQ ID NO: 38317 - RNA, 19 nt, Homo sapiens
  misc_RNA (1)...(19): siRNA sense strand
ggacguuguuggagugaga

SEQ ID NO: 38318 - RNA, 19 nt, Homo sapiens
  misc_RNA (1)...(19): siRNA sense strand
agaauggcaucauaaguga

SEQ ID NO: 38319 - RNA, 19 nt, Homo sapiens
  misc_RNA (1)...(19): siRNA sense strand
aacaaagaauggcaucaua

SEQ ID NO: 38320 - RNA, 19 nt, Homo sapiens
  misc_RNA (1)...(19): siRNA sense strand
ugaaagggauguuuaugca

SEQ ID NO: 38321 - RNA, 19 nt, Homo sapiens
  misc_RNA (1)...(19): siRNA sense strand
gucaaagaauuccaaagaa

SEQ ID NO: 38322 - RNA, 19 nt, Homo sapiens
  misc_RNA (1)...(19): siRNA sense strand
uaagauugaugcuguuauc

SEQ ID NO: 38323 - RNA, 19 nt, Homo sapiens
  misc_RNA (1)...(19): siRNA sense strand
gccaagugcugcaguuguu

SEQ ID NO: 38324 - RNA, 19 nt, Homo sapiens
  misc_RNA (1)...(19): siRNA sense strand
cauaagugaugcuguuuca

SEQ ID NO: 38325 - RNA, 19 nt, Homo sapiens
  misc_RNA (1)...(19): siRNA sense strand
guauggcaguuaaggaauu

SEQ ID NO: 38326 - RNA, 19 nt, Homo sapiens
  misc_RNA (1)...(19): siRNA sense strand
caauuaagagcaacaaaga

SEQ ID NO: 38327 - RNA, 19 nt, Homo sapiens
  misc_RNA (1)...(19): siRNA sense strand
cuuggcagcuguuguaauu

SEQ ID NO: 38328 - RNA, 19 nt, Homo sapiens
  misc_RNA (1)...(19): siRNA sense strand
gaguucaguuuccuucuug

SEQ ID NO: 38329 - RNA, 19 nt, Homo sapiens
  misc_RNA (1)...(19): siRNA sense strand
gacgguccaugaugcuaua

SEQ ID NO: 38330 - RNA, 19 nt, Homo sapiens
  misc_RNA (1)...(19): siRNA sense strand
guacuuggcagauccuuug

SEQ ID NO: 38331 - RNA, 19 nt, Homo sapiens
  misc_RNA (1)...(19): siRNA sense strand
ggucuuggcagcuguugua

SEQ ID NO: 38332 - RNA, 19 nt, Homo sapiens
  misc_RNA (1)...(19): siRNA sense strand
ugauuucacugcuggauug

SEQ ID NO: 38333 - RNA, 19 nt, Homo sapiens
  misc_RNA (1)...(19): siRNA sense strand
acaauggaguucucucuau

SEQ ID NO: 38334 - RNA, 19 nt, Homo sapiens
  misc_RNA (1)...(19): siRNA sense strand
ucucacagcuaaagauugu

SEQ ID NO: 38335 - RNA, 19 nt, Homo sapiens
  misc_RNA (1)...(19): siRNA sense strand
ggaagaagaacuugauguc

SEQ ID NO: 38336 - RNA, 19 nt, Homo sapiens
  misc_RNA (1)...(19): siRNA sense strand
agaaguaauugugacgaua

SEQ ID NO: 38337 - RNA, 19 nt, Homo sapiens
  misc_RNA (1)...(19): siRNA sense strand
uagaaaagcuggagcaaug

SEQ ID NO: 38338 - RNA, 19 nt, Homo sapiens
  misc_RNA (1)...(19): siRNA sense strand
ggugggaucuguuguucug

SEQ ID NO: 38339 - RNA, 19 nt, Homo sapiens
  misc_RNA (1)...(19): siRNA sense strand
caaagugaacguucccaaa

SEQ ID NO: 38340 - RNA, 19 nt, Homo sapiens
  misc_RNA (1)...(19): siRNA sense strand
ccaaauaccgagucaagga

SEQ ID NO: 38341 - RNA, 19 nt, Homo sapiens
  misc_RNA (1)...(19): siRNA sense strand
cagcaauggaacuguauua

SEQ ID NO: 38342 - RNA, 19 nt, Homo sapiens
  misc_RNA (1)...(19): siRNA sense strand
uuuggaacaucaagacaua

SEQ ID NO: 38343 - RNA, 19 nt, Homo sapiens
  misc_RNA (1)...(19): siRNA sense strand
acaaagaauggcaucauaa

SEQ ID NO: 38344 - RNA, 19 nt, Homo sapiens
  misc_RNA (1)...(19): siRNA sense strand
ggaauggccuuggaagcau

SEQ ID NO: 38345 - RNA, 19 nt, Homo sapiens
  misc_RNA (1)...(19): siRNA sense strand
caacaucuucucaggauuc

SEQ ID NO: 38346 - RNA, 19 nt, Homo sapiens
  misc_RNA (1)...(19): siRNA sense strand
gagcaaugcggguucuuug

SEQ ID NO: 38347 - RNA, 19 nt, Homo sapiens
  misc_RNA (1)...(19): siRNA sense strand
uauggcaguuaaggaauua

SEQ ID NO: 38348 - RNA, 19 nt, Homo sapiens
  misc_RNA (1)...(19): siRNA sense strand
ugucaaagaauuccaaaga

SEQ ID NO: 38349 - RNA, 19 nt, Homo sapiens
  misc_RNA (1)...(19): siRNA sense strand
cgagcucgcuuuccagcaa

SEQ ID NO: 38350 - RNA, 19 nt, Homo sapiens
  misc_RNA (1)...(19): siRNA sense strand
ugugguggcuuaugcuauu

SEQ ID NO: 38351 - RNA, 19 nt, Homo sapiens
  misc_RNA (1)...(19): siRNA sense strand
ccaugaugcuauacucuau

SEQ ID NO: 38352 - RNA, 19 nt, Homo sapiens
  misc_RNA (1)...(19): siRNA sense strand
gcuugacuguggagcuaua

SEQ ID NO: 38353 - RNA, 19 nt, Homo sapiens
  misc_RNA (1)...(19): siRNA sense strand
ucaggauucuucucuuguu

SEQ ID NO: 38354 - RNA, 19 nt, Homo sapiens
  misc_RNA (1)...(19): siRNA sense strand
ucuauacgcugguugagau

SEQ ID NO: 38355 - RNA, 19 nt, Homo sapiens
  misc_RNA (1)...(19): siRNA sense strand
gacgucauuucgggaguua

SEQ ID NO: 38356 - RNA, 19 nt, Homo sapiens
  misc_RNA (1)...(19): siRNA sense strand
gaucuggaggaacuugaua

SEQ ID NO: 38357 - RNA, 19 nt, Homo sapiens
  misc_RNA (1)...(19): siRNA sense strand
caggauucuucucuuguuu

SEQ ID NO: 38358 - RNA, 19 nt, Homo sapiens
  misc_RNA (1)...(19): siRNA sense strand
gcagauuggauucauagug

SEQ ID NO: 38359 - RNA, 19 nt, Homo sapiens
  misc_RNA (1)...(19): siRNA sense strand
gcgggugauugucaaagaa

SEQ ID NO: 38360 - RNA, 19 nt, Homo sapiens
  misc_RNA (1)...(19): siRNA sense strand
gugcugcaguuguucaaga

SEQ ID NO: 38361 - RNA, 19 nt, Homo sapiens
  misc_RNA (1)...(19): siRNA sense strand
gagagccuuuggugugcua

SEQ ID NO: 38362 - RNA, 19 nt, Homo sapiens
  misc_RNA (1)...(19): siRNA sense strand
uagcuggccuuauauuugg

SEQ ID NO: 38363 - RNA, 19 nt, Homo sapiens
  misc_RNA (1)...(19): siRNA sense strand
gugaugaucgccauucuug

SEQ ID NO: 38364 - RNA, 19 nt, Homo sapiens
  misc_RNA (1)...(19): siRNA sense strand
gcaacaucuucucaggauu

SEQ ID NO: 38365 - RNA, 19 nt, Homo sapiens
  misc_RNA (1)...(19): siRNA sense strand
gaucagcaacaucuucuca

SEQ ID NO: 38366 - RNA, 19 nt, Homo sapiens
  misc_RNA (1)...(19): siRNA sense strand
gagcuuccagucaaaguga

SEQ ID NO: 38367 - RNA, 19 nt, Homo sapiens
  misc_RNA (1)...(19): siRNA sense strand
acucugagcuuccagucaa

SEQ ID NO: 38368 - RNA, 19 nt, Homo sapiens
  misc_RNA (1)...(19): siRNA sense strand
caaagaauggcaucauaag

SEQ ID NO: 38369 - RNA, 19 nt, Homo sapiens
  misc_RNA (1)...(19): siRNA sense strand
ccuuauauuuggacuguug

SEQ ID NO: 38370 - RNA, 19 nt, Homo sapiens
  misc_RNA (1)...(19): siRNA sense strand
ccugacauacuuuaucuuu

SEQ ID NO: 38371 - RNA, 19 nt, Homo sapiens
  misc_RNA (1)...(19): siRNA sense strand
uguaucaaguccacaguug

SEQ ID NO: 38372 - RNA, 19 nt, Homo sapiens
  misc_RNA (1)...(19): siRNA sense strand
ccucaauguuucaaccaaa

SEQ ID NO: 38373 - RNA, 19 nt, Homo sapiens
  misc_RNA (1)...(19): siRNA sense strand
aaugaucgguuuagacaca

SEQ ID NO: 38374 - RNA, 19 nt, Homo sapiens
  misc_RNA (1)...(19): siRNA sense strand
gggucaagguuccauuuua

SEQ ID NO: 38375 - RNA, 19 nt, Homo sapiens
  misc_RNA (1)...(19): siRNA sense strand
ggagcaaugcggguucuuu

SEQ ID NO: 38376 - RNA, 19 nt, Homo sapiens
  misc_RNA (1)...(19): siRNA sense strand
gugcuugacuguggagcua

SEQ ID NO: 38377 - RNA, 19 nt, Homo sapiens
  misc_RNA (1)...(19): siRNA sense strand
ccaaagugccaauccauag

SEQ ID NO: 38378 - RNA, 19 nt, Homo sapiens
  misc_RNA (1)...(19): siRNA sense strand
caaauaccgagucaaggaa

SEQ ID NO: 38379 - RNA, 19 nt, Homo sapiens
  misc_RNA (1)...(19): siRNA sense strand
gcugaaagcgcugaggaaa

SEQ ID NO: 38380 - RNA, 19 nt, Homo sapiens
  misc_RNA (1)...(19): siRNA sense strand
caaugucgaugguuuuaaa

SEQ ID NO: 38381 - RNA, 19 nt, Homo sapiens
  misc_RNA (1)...(19): siRNA sense strand
ucucaggauucuucucuug

SEQ ID NO: 38382 - RNA, 19 nt, Homo sapiens
  misc_RNA (1)...(19): siRNA sense strand
uauaugccaccaaguauga

SEQ ID NO: 38383 - RNA, 19 nt, Homo sapiens
  misc_RNA (1)...(19): siRNA sense strand
ccaucgcugugguggcuua

SEQ ID NO: 38384 - RNA, 19 nt, Homo sapiens
  misc_RNA (1)...(19): siRNA sense strand
ggccuuauauuuggacugu

SEQ ID NO: 38385 - RNA, 19 nt, Homo sapiens
  misc_RNA (1)...(19): siRNA sense strand
gagggucaagguuccauuu

SEQ ID NO: 38386 - RNA, 19 nt, Homo sapiens
  misc_RNA (1)...(19): siRNA sense strand
gaauguguauuuugcauca

SEQ ID NO: 38387 - RNA, 19 nt, Homo sapiens
  misc_RNA (1)...(19): siRNA sense strand
aagaauggcaucauaagug

SEQ ID NO: 38388 - RNA, 19 nt, Homo sapiens
  misc_RNA (1)...(19): siRNA sense strand
gaaagaauauggguuggaa

SEQ ID NO: 38389 - RNA, 19 nt, Homo sapiens
  misc_RNA (1)...(19): siRNA sense strand
guucugcgcuauaccaaua

SEQ ID NO: 38390 - RNA, 19 nt, Homo sapiens
  misc_RNA (1)...(19): siRNA sense strand
cgacaucaccugcuccuuu

SEQ ID NO: 38391 - RNA, 19 nt, Homo sapiens
  misc_RNA (1)...(19): siRNA sense strand
ccaaggagcacuucaagga

SEQ ID NO: 38392 - RNA, 19 nt, Homo sapiens
  misc_RNA (1)...(19): siRNA sense strand
ggaagucgacccuguuugu

SEQ ID NO: 38393 - RNA, 19 nt, Homo sapiens
  misc_RNA (1)...(19): siRNA sense strand
gaaagauccauuccaagga

SEQ ID NO: 38394 - RNA, 19 nt, Homo sapiens
  misc_RNA (1)...(19): siRNA sense strand
ggaaugaaacccugaaggu

SEQ ID NO: 38395 - RNA, 19 nt, Homo sapiens
  misc_RNA (1)...(19): siRNA sense strand
gacaucaccugcuccuuuc

SEQ ID NO: 38396 - RNA, 19 nt, Homo sapiens
  misc_RNA (1)...(19): siRNA sense strand
cgacaugggcggugaguau

SEQ ID NO: 38397 - RNA, 19 nt, Homo sapiens
  misc_RNA (1)...(19): siRNA sense strand
gcuauggugucaucgaugu

SEQ ID NO: 38398 - RNA, 19 nt, Homo sapiens
  misc_RNA (1)...(19): siRNA sense strand
gaagucaacaauaccauuc

SEQ ID NO: 38399 - RNA, 19 nt, Homo sapiens
  misc_RNA (1)...(19): siRNA sense strand
ccucuguccuccucacuuu

SEQ ID NO: 38400 - RNA, 19 nt, Homo sapiens
  misc_RNA (1)...(19): siRNA sense strand
aagugggaaugaaagaaua

SEQ ID NO: 38401 - RNA, 19 nt, Homo sapiens
  misc_RNA (1)...(19): siRNA sense strand
caaguucgaagucaacaau

SEQ ID NO: 38402 - RNA, 19 nt, Homo sapiens
  misc_RNA (1)...(19): siRNA sense strand
ggugaucgacagcggcaua

SEQ ID NO: 38403 - RNA, 19 nt, Homo sapiens
  misc_RNA (1)...(19): siRNA sense strand
gcacuguggaagagauuga

SEQ ID NO: 38404 - RNA, 19 nt, Homo sapiens
  misc_RNA (1)...(19): siRNA sense strand
gugagcggcugcggaagaa

SEQ ID NO: 38405 - RNA, 19 nt, Homo sapiens
  misc_RNA (1)...(19): siRNA sense strand
gaacucagccgugcuacac

SEQ ID NO: 38406 - RNA, 19 nt, Homo sapiens
  misc_RNA (1)...(19): siRNA sense strand
uggaggagcuggcccacau

SEQ ID NO: 38407 - RNA, 19 nt, Homo sapiens
  misc_RNA (1)...(19): siRNA sense strand
ccaccuggaugggaaagau

SEQ ID NO: 38408 - RNA, 19 nt, Homo sapiens
  misc_RNA (1)...(19): siRNA sense strand
ucgaccaccuccuggauga

SEQ ID NO: 38409 - RNA, 19 nt, Homo sapiens
  misc_RNA (1)...(19): siRNA sense strand
ccagaaggccgucuaugag

SEQ ID NO: 38410 - RNA, 19 nt, Homo sapiens
  misc_RNA (1)...(19): siRNA sense strand
acucagccgugcuacacua

SEQ ID NO: 38411 - RNA, 19 nt, Homo sapiens
  misc_RNA (1)...(19): siRNA sense strand
cgaagucaacaauaccauu

SEQ ID NO: 38412 - RNA, 19 nt, Homo sapiens
  misc_RNA (1)...(19): siRNA sense strand
ucagcaaguucgaagucaa

SEQ ID NO: 38413 - RNA, 19 nt, Homo sapiens
  misc_RNA (1)...(19): siRNA sense strand
ucacgggcuuggccacuuc

SEQ ID NO: 38414 - RNA, 19 nt, Homo sapiens
  misc_RNA (1)...(19): siRNA sense strand
ucaacaauaccauucuuca

SEQ ID NO: 38415 - RNA, 19 nt, Homo sapiens
  misc_RNA (1)...(19): siRNA sense strand
gaccgaacgauccagaaug

SEQ ID NO: 38416 - RNA, 19 nt, Homo sapiens
  misc_RNA (1)...(19): siRNA sense strand
gaagucgacccuguuugug

SEQ ID NO: 38417 - RNA, 19 nt, Homo sapiens
  misc_RNA (1)...(19): siRNA sense strand
aaagugggaaugaaagaau

SEQ ID NO: 38418 - RNA, 19 nt, Homo sapiens
  misc_RNA (1)...(19): siRNA sense strand
aaugaaggcuguaaaagug

SEQ ID NO: 38419 - RNA, 19 nt, Homo sapiens
  misc_RNA (1)...(19): siRNA sense strand
ccaguacguagaugagauu

SEQ ID NO: 38420 - RNA, 19 nt, Homo sapiens
  misc_RNA (1)...(19): siRNA sense strand
gagguaaugaaggcuguaa

SEQ ID NO: 38421 - RNA, 19 nt, Homo sapiens
  misc_RNA (1)...(19): siRNA sense strand
acaugggcggugaguauua

SEQ ID NO: 38422 - RNA, 19 nt, Homo sapiens
  misc_RNA (1)...(19): siRNA sense strand
ggauauggagcuggagguu

SEQ ID NO: 38423 - RNA, 19 nt, Homo sapiens
  misc_RNA (1)...(19): siRNA sense strand
gaucgacagcggcauagag

SEQ ID NO: 38424 - RNA, 19 nt, Homo sapiens
  misc_RNA (1)...(19): siRNA sense strand
accagaaggccgucuauga

SEQ ID NO: 38425 - RNA, 19 nt, Homo sapiens
  misc_RNA (1)...(19): siRNA sense strand
gacaugggcggugaguauu

SEQ ID NO: 38426 - RNA, 19 nt, Homo sapiens
  misc_RNA (1)...(19): siRNA sense strand
auauggagcuggagguucu

SEQ ID NO: 38427 - RNA, 19 nt, Homo sapiens
  misc_RNA (1)...(19): siRNA sense strand
gcaaguucgaagucaacaa

SEQ ID NO: 38428 - RNA, 19 nt, Homo sapiens
  misc_RNA (1)...(19): siRNA sense strand
agucaacaauaccauucuu

SEQ ID NO: 38429 - RNA, 19 nt, Homo sapiens
  misc_RNA (1)...(19): siRNA sense strand
gguaaugaaggcuguaaaa

SEQ ID NO: 38430 - RNA, 19 nt, Homo sapiens
  misc_RNA (1)...(19): siRNA sense strand
cgaccgaacgauccagaau

SEQ ID NO: 38431 - RNA, 19 nt, Homo sapiens
  misc_RNA (1)...(19): siRNA sense strand
gcuggagguucugcgcuau

SEQ ID NO: 38432 - RNA, 19 nt, Homo sapiens
  misc_RNA (1)...(19): siRNA sense strand
caucagcaaguucgaaguc

SEQ ID NO: 38433 - RNA, 19 nt, Homo sapiens
  misc_RNA (1)...(19): siRNA sense strand
aagaauauggguuggaaag

SEQ ID NO: 38434 - RNA, 19 nt, Homo sapiens
  misc_RNA (1)...(19): siRNA sense strand
acaaagagcuggaaaggua

SEQ ID NO: 38435 - RNA, 19 nt, Homo sapiens
  misc_RNA (1)...(19): siRNA sense strand
gaauauagcuaaccuugga

SEQ ID NO: 38436 - RNA, 19 nt, Homo sapiens
  misc_RNA (1)...(19): siRNA sense strand
gcugaagccugauaaauuu

SEQ ID NO: 38437 - RNA, 19 nt, Homo sapiens
  misc_RNA (1)...(19): siRNA sense strand
gaaauaggaugguuugaca

SEQ ID NO: 38438 - RNA, 19 nt, Homo sapiens
  misc_RNA (1)...(19): siRNA sense strand
acaaagaacuagcugcuua

SEQ ID NO: 38439 - RNA, 19 nt, Homo sapiens
  misc_RNA (1)...(19): siRNA sense strand
ccacaaauaugaaacaaga

SEQ ID NO: 38440 - RNA, 19 nt, Homo sapiens
  misc_RNA (1)...(19): siRNA sense strand
agagaugacugacaaauuu

SEQ ID NO: 38441 - RNA, 19 nt, Homo sapiens
  misc_RNA (1)...(19): siRNA sense strand
gacaugagcugguuugaug

SEQ ID NO: 38442 - RNA, 19 nt, Homo sapiens
  misc_RNA (1)...(19): siRNA sense strand
caacauacauccuuucauc

SEQ ID NO: 38443 - RNA, 19 nt, Homo sapiens
  misc_RNA (1)...(19): siRNA sense strand
gaacugguauuaucauauc

SEQ ID NO: 38444 - RNA, 19 nt, Homo sapiens
  misc_RNA (1)...(19): siRNA sense strand
ggaaaccgauggacuugaa

SEQ ID NO: 38445 - RNA, 19 nt, Homo sapiens
  misc_RNA (1)...(19): siRNA sense strand
cagcauaugugaucuuuga

SEQ ID NO: 38446 - RNA, 19 nt, Homo sapiens
  misc_RNA (1)...(19): siRNA sense strand
aaagaaagcugucaaagag

SEQ ID NO: 38447 - RNA, 19 nt, Homo sapiens
  misc_RNA (1)...(19): siRNA sense strand
ggaagcugcuggaaagauu

SEQ ID NO: 38448 - RNA, 19 nt, Homo sapiens
  misc_RNA (1)...(19): siRNA sense strand
ggccauagcucacggauca

SEQ ID NO: 38449 - RNA, 19 nt, Homo sapiens
  misc_RNA (1)...(19): siRNA sense strand
gguauugccuuccuguuaa

SEQ ID NO: 38450 - RNA, 19 nt, Homo sapiens
  misc_RNA (1)...(19): siRNA sense strand
gcaguuaacccuauugcua

SEQ ID NO: 38451 - RNA, 19 nt, Homo sapiens
  misc_RNA (1)...(19): siRNA sense strand
gaagagccuugauguggaa

SEQ ID NO: 38452 - RNA, 19 nt, Homo sapiens
  misc_RNA (1)...(19): siRNA sense strand
gauggaagcucacccuugu

SEQ ID NO: 38453 - RNA, 19 nt, Homo sapiens
  misc_RNA (1)...(19): siRNA sense strand
agccaaagcugccaacaua

SEQ ID NO: 38454 - RNA, 19 nt, Homo sapiens
  misc_RNA (1)...(19): siRNA sense strand
cagcagaagugcaacauau

SEQ ID NO: 38455 - RNA, 19 nt, Homo sapiens
  misc_RNA (1)...(19): siRNA sense strand
ggaaaugcaaugacaguuu

SEQ ID NO: 38456 - RNA, 19 nt, Homo sapiens
  misc_RNA (1)...(19): siRNA sense strand
gaagaaaugacuagauaug

SEQ ID NO: 38457 - RNA, 19 nt, Homo sapiens
  misc_RNA (1)...(19): siRNA sense strand
gaagaaaggccagacacua

SEQ ID NO: 38458 - RNA, 19 nt, Homo sapiens
  misc_RNA (1)...(19): siRNA sense strand
guucaaugauguucacuuu

SEQ ID NO: 38459 - RNA, 19 nt, Homo sapiens
  misc_RNA (1)...(19): siRNA sense strand
gcacuggccuucugguaug

SEQ ID NO: 38460 - RNA, 19 nt, Homo sapiens
  misc_RNA (1)...(19): siRNA sense strand
gauaguauuuggagagaug

SEQ ID NO: 38461 - RNA, 19 nt, Homo sapiens
  misc_RNA (1)...(19): siRNA sense strand
ggacaugccaguucauuug

SEQ ID NO: 38462 - RNA, 19 nt, Homo sapiens
  misc_RNA (1)...(19): siRNA sense strand
gaagccagauccagucaga

SEQ ID NO: 38463 - RNA, 19 nt, Homo sapiens
  misc_RNA (1)...(19): siRNA sense strand
gaaacaagagugggagaua

SEQ ID NO: 38464 - RNA, 19 nt, Homo sapiens
  misc_RNA (1)...(19): siRNA sense strand
caaagauacucucggcauu

SEQ ID NO: 38465 - RNA, 19 nt, Homo sapiens
  misc_RNA (1)...(19): siRNA sense strand
gagcuaacgucaagaucuu

SEQ ID NO: 38466 - RNA, 19 nt, Homo sapiens
  misc_RNA (1)...(19): siRNA sense strand
gcacaacgguccagcugau

SEQ ID NO: 38467 - RNA, 19 nt, Homo sapiens
  misc_RNA (1)...(19): siRNA sense strand
ccagaaugcagacuuaaua

SEQ ID NO: 38468 - RNA, 19 nt, Homo sapiens
  misc_RNA (1)...(19): siRNA sense strand
aaacaagagugggagauaa

SEQ ID NO: 38469 - RNA, 19 nt, Homo sapiens
  misc_RNA (1)...(19): siRNA sense strand
gaaaugcaaugacaguuuu

SEQ ID NO: 38470 - RNA, 19 nt, Homo sapiens
  misc_RNA (1)...(19): siRNA sense strand
gcacagaaaggcaucuauu

SEQ ID NO: 38471 - RNA, 19 nt, Homo sapiens
  misc_RNA (1)...(19): siRNA sense strand
uaaagaaagcugucaaaga

SEQ ID NO: 38472 - RNA, 19 nt, Homo sapiens
  misc_RNA (1)...(19): siRNA sense strand
cgacagaucaggaaaauua

SEQ ID NO: 38473 - RNA, 19 nt, Homo sapiens
  misc_RNA (1)...(19): siRNA sense strand
cauccagaaugcagacuua

SEQ ID NO: 38474 - RNA, 19 nt, Homo sapiens
  misc_RNA (1)...(19): siRNA sense strand
ccaaauggcuggaaaucuc

SEQ ID NO: 38475 - RNA, 19 nt, Homo sapiens
  misc_RNA (1)...(19): siRNA sense strand
gaaauguaaccauggauga

SEQ ID NO: 38476 - RNA, 19 nt, Homo sapiens
  misc_RNA (1)...(19): siRNA sense strand
ggccaacgccuaugaguuu

SEQ ID NO: 38477 - RNA, 19 nt, Homo sapiens
  misc_RNA (1)...(19): siRNA sense strand
ugacaagguuggaauguuc

SEQ ID NO: 38478 - RNA, 19 nt, Homo sapiens
  misc_RNA (1)...(19): siRNA sense strand
ggaauuuggaguucaauga

SEQ ID NO: 38479 - RNA, 19 nt, Homo sapiens
  misc_RNA (1)...(19): siRNA sense strand
ggaaagguaucagaaacau

SEQ ID NO: 38480 - RNA, 19 nt, Homo sapiens
  misc_RNA (1)...(19): siRNA sense strand
aagauacucucggcauuua

SEQ ID NO: 38481 - RNA, 19 nt, Homo sapiens
  misc_RNA (1)...(19): siRNA sense strand
gauccagucagaagaauuu

SEQ ID NO: 38482 - RNA, 19 nt, Homo sapiens
  misc_RNA (1)...(19): siRNA sense strand
uaaacuaucugagggaaau

SEQ ID NO: 38483 - RNA, 19 nt, Homo sapiens
  misc_RNA (1)...(19): siRNA sense strand
gcauaugugaucuuugaua

SEQ ID NO: 38484 - RNA, 19 nt, Homo sapiens
  misc_RNA (1)...(19): siRNA sense strand
gagagaugacugacaaauu

SEQ ID NO: 38485 - RNA, 19 nt, Homo sapiens
  misc_RNA (1)...(19): siRNA sense strand
gaaugcagacuuaauagug

SEQ ID NO: 38486 - RNA, 19 nt, Homo sapiens
  misc_RNA (1)...(19): siRNA sense strand
ccaagaagcccuggacaaa

SEQ ID NO: 38487 - RNA, 19 nt, Homo sapiens
  misc_RNA (1)...(19): siRNA sense strand
gauaaagaaagcugucaaa

SEQ ID NO: 38488 - RNA, 19 nt, Homo sapiens
  misc_RNA (1)...(19): siRNA sense strand
caaaaucagugaaggaauu

SEQ ID NO: 38489 - RNA, 19 nt, Homo sapiens
  misc_RNA (1)...(19): siRNA sense strand
ugacaccacugaacucaau

SEQ ID NO: 38490 - RNA, 19 nt, Homo sapiens
  misc_RNA (1)...(19): siRNA sense strand
gaagaagaaaugacuagau

SEQ ID NO: 38491 - RNA, 19 nt, Homo sapiens
  misc_RNA (1)...(19): siRNA sense strand
acagcgaacugaugaagaa

SEQ ID NO: 38492 - RNA, 19 nt, Homo sapiens
  misc_RNA (1)...(19): siRNA sense strand
ggguauugccuuccuguua

SEQ ID NO: 38493 - RNA, 19 nt, Homo sapiens
  misc_RNA (1)...(19): siRNA sense strand
gaacaaagagcuggaaagg

SEQ ID NO: 38494 - RNA, 19 nt, Homo sapiens
  misc_RNA (1)...(19): siRNA sense strand
aaacagaggauugcuauug

SEQ ID NO: 38495 - RNA, 19 nt, Homo sapiens
  misc_RNA (1)...(19): siRNA sense strand
gaugagggcacaauuaaca

SEQ ID NO: 38496 - RNA, 19 nt, Homo sapiens
  misc_RNA (1)...(19): siRNA sense strand
uaauagugguguuucagaa

SEQ ID NO: 38497 - RNA, 19 nt, Homo sapiens
  misc_RNA (1)...(19): siRNA sense strand
aaacaguacuggugcacuu

SEQ ID NO: 38498 - RNA, 19 nt, Homo sapiens
  misc_RNA (1)...(19): siRNA sense strand
ggaacaguaugugccauug

SEQ ID NO: 38499 - RNA, 19 nt, Homo sapiens
  misc_RNA (1)...(19): siRNA sense strand
gcaaaugugccaccagugu

SEQ ID NO: 38500 - RNA, 19 nt, Homo sapiens
  misc_RNA (1)...(19): siRNA sense strand
ggccgcaccugcauuguga

SEQ ID NO: 38501 - RNA, 19 nt, Homo sapiens
  misc_RNA (1)...(19): siRNA sense strand
uggauccacucuagucaua

SEQ ID NO: 38502 - RNA, 19 nt, Homo sapiens
  misc_RNA (1)...(19): siRNA sense strand
ugaaauuguuggcuggaaa

SEQ ID NO: 38503 - RNA, 19 nt, Homo sapiens
  misc_RNA (1)...(19): siRNA sense strand
agaacuagcugcuuaugca

SEQ ID NO: 38504 - RNA, 19 nt, Homo sapiens
  misc_RNA (1)...(19): siRNA sense strand
gaaggccgcaccugcauug

SEQ ID NO: 38505 - RNA, 19 nt, Homo sapiens
  misc_RNA (1)...(19): siRNA sense strand
gcagaagugcaacauauuc

SEQ ID NO: 38506 - RNA, 19 nt, Homo sapiens
  misc_RNA (1)...(19): siRNA sense strand
cagaauggcccuacuuugu

SEQ ID NO: 38507 - RNA, 19 nt, Homo sapiens
  misc_RNA (1)...(19): siRNA sense strand
ccaccaguguccuuucuga

SEQ ID NO: 38508 - RNA, 19 nt, Homo sapiens
  misc_RNA (1)...(19): siRNA sense strand
guuugaggauggaguaauu

SEQ ID NO: 38509 - RNA, 19 nt, Homo sapiens
  misc_RNA (1)...(19): siRNA sense strand
ugaagggccucaaccugaa

SEQ ID NO: 38510 - RNA, 19 nt, Homo sapiens
  misc_RNA (1)...(19): siRNA sense strand
ucaggacugugauagcuuu

SEQ ID NO: 38511 - RNA, 19 nt, Homo sapiens
  misc_RNA (1)...(19): siRNA sense strand
gaacucaauacgcggcuaa

SEQ ID NO: 38512 - RNA, 19 nt, Homo sapiens
  misc_RNA (1)...(19): siRNA sense strand
gaagucguguucaacuauc

SEQ ID NO: 38513 - RNA, 19 nt, Homo sapiens
  misc_RNA (1)...(19): siRNA sense strand
cuggaaagauugcaacaga

SEQ ID NO: 38514 - RNA, 19 nt, Homo sapiens
  misc_RNA (1)...(19): siRNA sense strand
ccgauggacuugaagcaaa

SEQ ID NO: 38515 - RNA, 19 nt, Homo sapiens
  misc_RNA (1)...(19): siRNA sense strand
gaaauuugacacccugguu

SEQ ID NO: 38516 - RNA, 19 nt, Homo sapiens
  misc_RNA (1)...(19): siRNA sense strand
guacaggcagcucuggaua

SEQ ID NO: 38517 - RNA, 19 nt, Homo sapiens
  misc_RNA (1)...(19): siRNA sense strand
gcgaacugaugaagaagga

SEQ ID NO: 38518 - RNA, 19 nt, Homo sapiens
  misc_RNA (1)...(19): siRNA sense strand
ugggaaagcuggcgagauc

SEQ ID NO: 38519 - RNA, 19 nt, Homo sapiens
  misc_RNA (1)...(19): siRNA sense strand
cuauuugacugcagcauug

SEQ ID NO: 38520 - RNA, 19 nt, Homo sapiens
  misc_RNA (1)...(19): siRNA sense strand
gauccacucuagucauauc

SEQ ID NO: 38521 - RNA, 19 nt, Homo sapiens
  misc_RNA (1)...(19): siRNA sense strand
gaagccugauaaauuugaa

SEQ ID NO: 38522 - RNA, 19 nt, Homo sapiens
  misc_RNA (1)...(19): siRNA sense strand
ucagagaucauagcgauuu

SEQ ID NO: 38523 - RNA, 19 nt, Homo sapiens
  misc_RNA (1)...(19): siRNA sense strand
ccacucuagucauaucaaa

SEQ ID NO: 38524 - RNA, 19 nt, Homo sapiens
  misc_RNA (1)...(19): siRNA sense strand
agaaaugacuagauaugca

SEQ ID NO: 38525 - RNA, 19 nt, Homo sapiens
  misc_RNA (1)...(19): siRNA sense strand
gaaaauauuaggacaguug

SEQ ID NO: 38526 - RNA, 19 nt, Homo sapiens
  misc_RNA (1)...(19): siRNA sense strand
uagcaguuguuccaauuau

SEQ ID NO: 38527 - RNA, 19 nt, Homo sapiens
  misc_RNA (1)...(19): siRNA sense strand
gcugcuaaauccaggcaaa

SEQ ID NO: 38528 - RNA, 19 nt, Homo sapiens
  misc_RNA (1)...(19): siRNA sense strand
cagguuggcuuuaauugca

SEQ ID NO: 38529 - RNA, 19 nt, Homo sapiens
  misc_RNA (1)...(19): siRNA sense strand
ccagaagacugcggucaau

SEQ ID NO: 38530 - RNA, 19 nt, Homo sapiens
  misc_RNA (1)...(19): siRNA sense strand
gcauauuacuacucaggau

SEQ ID NO: 38531 - RNA, 19 nt, Homo sapiens
  misc_RNA (1)...(19): siRNA sense strand
ggaaaugccaaaagagaua

SEQ ID NO: 38532 - RNA, 19 nt, Homo sapiens
  misc_RNA (1)...(19): siRNA sense strand
ccgagaauauugccuaugg

SEQ ID NO: 38533 - RNA, 19 nt, Homo sapiens
  misc_RNA (1)...(19): siRNA sense strand
caacagaggcaauagaaaa

SEQ ID NO: 38534 - RNA, 19 nt, Homo sapiens
  misc_RNA (1)...(19): siRNA sense strand
acaaagagcuggaaaggua

SEQ ID NO: 38535 - RNA, 19 nt, Homo sapiens
  misc_RNA (1)...(19): siRNA sense strand
gaauauagcuaaccuugga

SEQ ID NO: 38536 - RNA, 19 nt, Homo sapiens
  misc_RNA (1)...(19): siRNA sense strand
gcugaagccugauaaauuu

SEQ ID NO: 38537 - RNA, 19 nt, Homo sapiens
  misc_RNA (1)...(19): siRNA sense strand
gaaauaggaugguuugaca

SEQ ID NO: 38538 - RNA, 19 nt, Homo sapiens
  misc_RNA (1)...(19): siRNA sense strand
acaaagaacuagcugcuua

SEQ ID NO: 38539 - RNA, 19 nt, Homo sapiens
  misc_RNA (1)...(19): siRNA sense strand
ccacaaauaugaaacaaga

SEQ ID NO: 38540 - RNA, 19 nt, Homo sapiens
  misc_RNA (1)...(19): siRNA sense strand
agagaugacugacaaauuu

SEQ ID NO: 38541 - RNA, 19 nt, Homo sapiens
  misc_RNA (1)...(19): siRNA sense strand
gacaugagcugguuugaug

SEQ ID NO: 38542 - RNA, 19 nt, Homo sapiens
  misc_RNA (1)...(19): siRNA sense strand
caacauacauccuuucauc

SEQ ID NO: 38543 - RNA, 19 nt, Homo sapiens
  misc_RNA (1)...(19): siRNA sense strand
gaacugguauuaucauauc

SEQ ID NO: 38544 - RNA, 19 nt, Homo sapiens
  misc_RNA (1)...(19): siRNA sense strand
ggaaaccgauggacuugaa

SEQ ID NO: 38545 - RNA, 19 nt, Homo sapiens
  misc_RNA (1)...(19): siRNA sense strand
cagcauaugugaucuuuga

SEQ ID NO: 38546 - RNA, 19 nt, Homo sapiens
  misc_RNA (1)...(19): siRNA sense strand
aaagaaagcugucaaagag

SEQ ID NO: 38547 - RNA, 19 nt, Homo sapiens
  misc_RNA (1)...(19): siRNA sense strand
ggaagcugcuggaaagauu

SEQ ID NO: 38548 - RNA, 19 nt, Homo sapiens
  misc_RNA (1)...(19): siRNA sense strand
ggccauagcucacggauca

SEQ ID NO: 38549 - RNA, 19 nt, Homo sapiens
  misc_RNA (1)...(19): siRNA sense strand
gguauugccuuccuguuaa

SEQ ID NO: 38550 - RNA, 19 nt, Homo sapiens
  misc_RNA (1)...(19): siRNA sense strand
gcaguuaacccuauugcua

SEQ ID NO: 38551 - RNA, 19 nt, Homo sapiens
  misc_RNA (1)...(19): siRNA sense strand
gaagagccuugauguggaa

SEQ ID NO: 38552 - RNA, 19 nt, Homo sapiens
  misc_RNA (1)...(19): siRNA sense strand
gauggaagcucacccuugu

SEQ ID NO: 38553 - RNA, 19 nt, Homo sapiens
  misc_RNA (1)...(19): siRNA sense strand
agccaaagcugccaacaua

SEQ ID NO: 38554 - RNA, 19 nt, Homo sapiens
  misc_RNA (1)...(19): siRNA sense strand
cagcagaagugcaacauau

SEQ ID NO: 38555 - RNA, 19 nt, Homo sapiens
  misc_RNA (1)...(19): siRNA sense strand
ggaaaugcaaugacaguuu

SEQ ID NO: 38556 - RNA, 19 nt, Homo sapiens
  misc_RNA (1)...(19): siRNA sense strand
gaagaaaugacuagauaug

SEQ ID NO: 38557 - RNA, 19 nt, Homo sapiens
  misc_RNA (1)...(19): siRNA sense strand
gaagaaaggccagacacua

SEQ ID NO: 38558 - RNA, 19 nt, Homo sapiens
  misc_RNA (1)...(19): siRNA sense strand
guucaaugauguucacuuu

SEQ ID NO: 38559 - RNA, 19 nt, Homo sapiens
  misc_RNA (1)...(19): siRNA sense strand
gcacuggccuucugguaug

SEQ ID NO: 38560 - RNA, 19 nt, Homo sapiens
  misc_RNA (1)...(19): siRNA sense strand
gauaguauuuggagagaug

SEQ ID NO: 38561 - RNA, 19 nt, Homo sapiens
  misc_RNA (1)...(19): siRNA sense strand
ggacaugccaguucauuug

SEQ ID NO: 38562 - RNA, 19 nt, Homo sapiens
  misc_RNA (1)...(19): siRNA sense strand
gaagccagauccagucaga

SEQ ID NO: 38563 - RNA, 19 nt, Homo sapiens
  misc_RNA (1)...(19): siRNA sense strand
gaaacaagagugggagaua

SEQ ID NO: 38564 - RNA, 19 nt, Homo sapiens
  misc_RNA (1)...(19): siRNA sense strand
caaagauacucucggcauu

SEQ ID NO: 38565 - RNA, 19 nt, Homo sapiens
  misc_RNA (1)...(19): siRNA sense strand
gagcuaacgucaagaucuu

SEQ ID NO: 38566 - RNA, 19 nt, Homo sapiens
  misc_RNA (1)...(19): siRNA sense strand
gcacaacgguccagcugau

SEQ ID NO: 38567 - RNA, 19 nt, Homo sapiens
  misc_RNA (1)...(19): siRNA sense strand
ccagaaugcagacuuaaua

SEQ ID NO: 38568 - RNA, 19 nt, Homo sapiens
  misc_RNA (1)...(19): siRNA sense strand
aaacaagagugggagauaa

SEQ ID NO: 38569 - RNA, 19 nt, Homo sapiens
  misc_RNA (1)...(19): siRNA sense strand
gaaaugcaaugacaguuuu

SEQ ID NO: 38570 - RNA, 19 nt, Homo sapiens
  misc_RNA (1)...(19): siRNA sense strand
gcacagaaaggcaucuauu

SEQ ID NO: 38571 - RNA, 19 nt, Homo sapiens
  misc_RNA (1)...(19): siRNA sense strand
uaaagaaagcugucaaaga

SEQ ID NO: 38572 - RNA, 19 nt, Homo sapiens
  misc_RNA (1)...(19): siRNA sense strand
cgacagaucaggaaaauua

SEQ ID NO: 38573 - RNA, 19 nt, Homo sapiens
  misc_RNA (1)...(19): siRNA sense strand
cauccagaaugcagacuua

SEQ ID NO: 38574 - RNA, 19 nt, Homo sapiens
  misc_RNA (1)...(19): siRNA sense strand
ccaaauggcuggaaaucuc

SEQ ID NO: 38575 - RNA, 19 nt, Homo sapiens
  misc_RNA (1)...(19): siRNA sense strand
gaaauguaaccauggauga

SEQ ID NO: 38576 - RNA, 19 nt, Homo sapiens
  misc_RNA (1)...(19): siRNA sense strand
ggccaacgccuaugaguuu

SEQ ID NO: 38577 - RNA, 19 nt, Homo sapiens
  misc_RNA (1)...(19): siRNA sense strand
ugacaagguuggaauguuc

SEQ ID NO: 38578 - RNA, 19 nt, Homo sapiens
  misc_RNA (1)...(19): siRNA sense strand
ggaauuuggaguucaauga

SEQ ID NO: 38579 - RNA, 19 nt, Homo sapiens
  misc_RNA (1)...(19): siRNA sense strand
ggaaagguaucagaaacau

SEQ ID NO: 38580 - RNA, 19 nt, Homo sapiens
  misc_RNA (1)...(19): siRNA sense strand
aagauacucucggcauuua

SEQ ID NO: 38581 - RNA, 19 nt, Homo sapiens
  misc_RNA (1)...(19): siRNA sense strand
gauccagucagaagaauuu

SEQ ID NO: 38582 - RNA, 19 nt, Homo sapiens
  misc_RNA (1)...(19): siRNA sense strand
uaaacuaucugagggaaau

SEQ ID NO: 38583 - RNA, 19 nt, Homo sapiens
  misc_RNA (1)...(19): siRNA sense strand
gcauaugugaucuuugaua

SEQ ID NO: 38584 - RNA, 19 nt, Homo sapiens
  misc_RNA (1)...(19): siRNA sense strand
gagagaugacugacaaauu

SEQ ID NO: 38585 - RNA, 19 nt, Homo sapiens
  misc_RNA (1)...(19): siRNA sense strand
gaaugcagacuuaauagug

SEQ ID NO: 38586 - RNA, 19 nt, Homo sapiens
  misc_RNA (1)...(19): siRNA sense strand
ccaagaagcccuggacaaa

SEQ ID NO: 38587 - RNA, 19 nt, Homo sapiens
  misc_RNA (1)...(19): siRNA sense strand
gauaaagaaagcugucaaa

SEQ ID NO: 38588 - RNA, 19 nt, Homo sapiens
  misc_RNA (1)...(19): siRNA sense strand
caaaaucagugaaggaauu

SEQ ID NO: 38589 - RNA, 19 nt, Homo sapiens
  misc_RNA (1)...(19): siRNA sense strand
ugacaccacugaacucaau

SEQ ID NO: 38590 - RNA, 19 nt, Homo sapiens
  misc_RNA (1)...(19): siRNA sense strand
gaagaagaaaugacuagau

SEQ ID NO: 38591 - RNA, 19 nt, Homo sapiens
  misc_RNA (1)...(19): siRNA sense strand
acagcgaacugaugaagaa

SEQ ID NO: 38592 - RNA, 19 nt, Homo sapiens
  misc_RNA (1)...(19): siRNA sense strand
ggguauugccuuccuguua

SEQ ID NO: 38593 - RNA, 19 nt, Homo sapiens
  misc_RNA (1)...(19): siRNA sense strand
gaacaaagagcuggaaagg

SEQ ID NO: 38594 - RNA, 19 nt, Homo sapiens
  misc_RNA (1)...(19): siRNA sense strand
aaacagaggauugcuauug

SEQ ID NO: 38595 - RNA, 19 nt, Homo sapiens
  misc_RNA (1)...(19): siRNA sense strand
gaugagggcacaauuaaca

SEQ ID NO: 38596 - RNA, 19 nt, Homo sapiens
  misc_RNA (1)...(19): siRNA sense strand
uaauagugguguuucagaa

SEQ ID NO: 38597 - RNA, 19 nt, Homo sapiens
  misc_RNA (1)...(19): siRNA sense strand
aaacaguacuggugcacuu

SEQ ID NO: 38598 - RNA, 19 nt, Homo sapiens
  misc_RNA (1)...(19): siRNA sense strand
ggaacaguaugugccauug

SEQ ID NO: 38599 - RNA, 19 nt, Homo sapiens
  misc_RNA (1)...(19): siRNA sense strand
gcaaaugugccaccagugu

SEQ ID NO: 38600 - RNA, 19 nt, Homo sapiens
  misc_RNA (1)...(19): siRNA sense strand
ggccgcaccugcauuguga

SEQ ID NO: 38601 - RNA, 19 nt, Homo sapiens
  misc_RNA (1)...(19): siRNA sense strand
uggauccacucuagucaua

SEQ ID NO: 38602 - RNA, 19 nt, Homo sapiens
  misc_RNA (1)...(19): siRNA sense strand
ugaaauuguuggcuggaaa

SEQ ID NO: 38603 - RNA, 19 nt, Homo sapiens
  misc_RNA (1)...(19): siRNA sense strand
agaacuagcugcuuaugca

SEQ ID NO: 38604 - RNA, 19 nt, Homo sapiens
  misc_RNA (1)...(19): siRNA sense strand
gaaggccgcaccugcauug

SEQ ID NO: 38605 - RNA, 19 nt, Homo sapiens
  misc_RNA (1)...(19): siRNA sense strand
gcagaagugcaacauauuc

SEQ ID NO: 38606 - RNA, 19 nt, Homo sapiens
  misc_RNA (1)...(19): siRNA sense strand
cagaauggcccuacuuugu

SEQ ID NO: 38607 - RNA, 19 nt, Homo sapiens
  misc_RNA (1)...(19): siRNA sense strand
ccaccaguguccuuucuga

SEQ ID NO: 38608 - RNA, 19 nt, Homo sapiens
  misc_RNA (1)...(19): siRNA sense strand
guuugaggauggaguaauu

SEQ ID NO: 38609 - RNA, 19 nt, Homo sapiens
  misc_RNA (1)...(19): siRNA sense strand
ugaagggccucaaccugaa

SEQ ID NO: 38610 - RNA, 19 nt, Homo sapiens
  misc_RNA (1)...(19): siRNA sense strand
ucaggacugugauagcuuu

SEQ ID NO: 38611 - RNA, 19 nt, Homo sapiens
  misc_RNA (1)...(19): siRNA sense strand
gaacucaauacgcggcuaa

SEQ ID NO: 38612 - RNA, 19 nt, Homo sapiens
  misc_RNA (1)...(19): siRNA sense strand
gaagucguguucaacuauc

SEQ ID NO: 38613 - RNA, 19 nt, Homo sapiens
  misc_RNA (1)...(19): siRNA sense strand
cuggaaagauugcaacaga

SEQ ID NO: 38614 - RNA, 19 nt, Homo sapiens
  misc_RNA (1)...(19): siRNA sense strand
ccgauggacuugaagcaaa

SEQ ID NO: 38615 - RNA, 19 nt, Homo sapiens
  misc_RNA (1)...(19): siRNA sense strand
gaaauuugacacccugguu

SEQ ID NO: 38616 - RNA, 19 nt, Homo sapiens
  misc_RNA (1)...(19): siRNA sense strand
guacaggcagcucuggaua

SEQ ID NO: 38617 - RNA, 19 nt, Homo sapiens
  misc_RNA (1)...(19): siRNA sense strand
gcgaacugaugaagaagga

SEQ ID NO: 38618 - RNA, 19 nt, Homo sapiens
  misc_RNA (1)...(19): siRNA sense strand
ugggaaagcuggcgagauc

SEQ ID NO: 38619 - RNA, 19 nt, Homo sapiens
  misc_RNA (1)...(19): siRNA sense strand
cuauuugacugcagcauug

SEQ ID NO: 38620 - RNA, 19 nt, Homo sapiens
  misc_RNA (1)...(19): siRNA sense strand
gauccacucuagucauauc

SEQ ID NO: 38621 - RNA, 19 nt, Homo sapiens
  misc_RNA (1)...(19): siRNA sense strand
gaagccugauaaauuugaa

SEQ ID NO: 38622 - RNA, 19 nt, Homo sapiens
  misc_RNA (1)...(19): siRNA sense strand
ucagagaucauagcgauuu

SEQ ID NO: 38623 - RNA, 19 nt, Homo sapiens
  misc_RNA (1)...(19): siRNA sense strand
ccacucuagucauaucaaa

SEQ ID NO: 38624 - RNA, 19 nt, Homo sapiens
  misc_RNA (1)...(19): siRNA sense strand
agaaaugacuagauaugca

SEQ ID NO: 38625 - RNA, 19 nt, Homo sapiens
  misc_RNA (1)...(19): siRNA sense strand
gaaaauauuaggacaguug

SEQ ID NO: 38626 - RNA, 19 nt, Homo sapiens
  misc_RNA (1)...(19): siRNA sense strand
uagcaguuguuccaauuau

SEQ ID NO: 38627 - RNA, 19 nt, Homo sapiens
  misc_RNA (1)...(19): siRNA sense strand
gcugcuaaauccaggcaaa

SEQ ID NO: 38628 - RNA, 19 nt, Homo sapiens
  misc_RNA (1)...(19): siRNA sense strand
cagguuggcuuuaauugca

SEQ ID NO: 38629 - RNA, 19 nt, Homo sapiens
  misc_RNA (1)...(19): siRNA sense strand
ccagaagacugcggucaau

SEQ ID NO: 38630 - RNA, 19 nt, Homo sapiens
  misc_RNA (1)...(19): siRNA sense strand
gcauauuacuacucaggau

SEQ ID NO: 38631 - RNA, 19 nt, Homo sapiens
  misc_RNA (1)...(19): siRNA sense strand
ggaaaugccaaaagagaua

SEQ ID NO: 38632 - RNA, 19 nt, Homo sapiens
  misc_RNA (1)...(19): siRNA sense strand
ccgagaauauugccuaugg

SEQ ID NO: 38633 - RNA, 19 nt, Homo sapiens
  misc_RNA (1)...(19): siRNA sense strand
caacagaggcaauagaaaa

SEQ ID NO: 38634 - RNA, 19 nt, Homo sapiens
  misc_RNA (1)...(19): siRNA sense strand
acaaagagcuggaaaggua

SEQ ID NO: 38635 - RNA, 19 nt, Homo sapiens
  misc_RNA (1)...(19): siRNA sense strand
gaauauagcuaaccuugga

SEQ ID NO: 38636 - RNA, 19 nt, Homo sapiens
  misc_RNA (1)...(19): siRNA sense strand
gcugaagccugauaaauuu

SEQ ID NO: 38637 - RNA, 19 nt, Homo sapiens
  misc_RNA (1)...(19): siRNA sense strand
gaaauaggaugguuugaca

SEQ ID NO: 38638 - RNA, 19 nt, Homo sapiens
  misc_RNA (1)...(19): siRNA sense strand
acaaagaacuagcugcuua

SEQ ID NO: 38639 - RNA, 19 nt, Homo sapiens
  misc_RNA (1)...(19): siRNA sense strand
ccacaaauaugaaacaaga

SEQ ID NO: 38640 - RNA, 19 nt, Homo sapiens
  misc_RNA (1)...(19): siRNA sense strand
agagaugacugacaaauuu

SEQ ID NO: 38641 - RNA, 19 nt, Homo sapiens
  misc_RNA (1)...(19): siRNA sense strand
gacaugagcugguuugaug

SEQ ID NO: 38642 - RNA, 19 nt, Homo sapiens
  misc_RNA (1)...(19): siRNA sense strand
caacauacauccuuucauc

SEQ ID NO: 38643 - RNA, 19 nt, Homo sapiens
  misc_RNA (1)...(19): siRNA sense strand
gaacugguauuaucauauc

SEQ ID NO: 38644 - RNA, 19 nt, Homo sapiens
  misc_RNA (1)...(19): siRNA sense strand
ggaaaccgauggacuugaa

SEQ ID NO: 38645 - RNA, 19 nt, Homo sapiens
  misc_RNA (1)...(19): siRNA sense strand
cagcauaugugaucuuuga

SEQ ID NO: 38646 - RNA, 19 nt, Homo sapiens
  misc_RNA (1)...(19): siRNA sense strand
aaagaaagcugucaaagag

SEQ ID NO: 38647 - RNA, 19 nt, Homo sapiens
  misc_RNA (1)...(19): siRNA sense strand
ggaagcugcuggaaagauu

SEQ ID NO: 38648 - RNA, 19 nt, Homo sapiens
  misc_RNA (1)...(19): siRNA sense strand
ggccauagcucacggauca

SEQ ID NO: 38649 - RNA, 19 nt, Homo sapiens
  misc_RNA (1)...(19): siRNA sense strand
gguauugccuuccuguuaa

SEQ ID NO: 38650 - RNA, 19 nt, Homo sapiens
  misc_RNA (1)...(19): siRNA sense strand
gcaguuaacccuauugcua

SEQ ID NO: 38651 - RNA, 19 nt, Homo sapiens
  misc_RNA (1)...(19): siRNA sense strand
gaagagccuugauguggaa

SEQ ID NO: 38652 - RNA, 19 nt, Homo sapiens
  misc_RNA (1)...(19): siRNA sense strand
gauggaagcucacccuugu

SEQ ID NO: 38653 - RNA, 19 nt, Homo sapiens
  misc_RNA (1)...(19): siRNA sense strand
agccaaagcugccaacaua

SEQ ID NO: 38654 - RNA, 19 nt, Homo sapiens
  misc_RNA (1)...(19): siRNA sense strand
cagcagaagugcaacauau

SEQ ID NO: 38655 - RNA, 19 nt, Homo sapiens
  misc_RNA (1)...(19): siRNA sense strand
ggaaaugcaaugacaguuu

SEQ ID NO: 38656 - RNA, 19 nt, Homo sapiens
  misc_RNA (1)...(19): siRNA sense strand
gaagaaaugacuagauaug

SEQ ID NO: 38657 - RNA, 19 nt, Homo sapiens
  misc_RNA (1)...(19): siRNA sense strand
gaagaaaggccagacacua

SEQ ID NO: 38658 - RNA, 19 nt, Homo sapiens
  misc_RNA (1)...(19): siRNA sense strand
guucaaugauguucacuuu

SEQ ID NO: 38659 - RNA, 19 nt, Homo sapiens
  misc_RNA (1)...(19): siRNA sense strand
gcacuggccuucugguaug

SEQ ID NO: 38660 - RNA, 19 nt, Homo sapiens
  misc_RNA (1)...(19): siRNA sense strand
gauaguauuuggagagaug

SEQ ID NO: 38661 - RNA, 19 nt, Homo sapiens
  misc_RNA (1)...(19): siRNA sense strand
ggacaugccaguucauuug

SEQ ID NO: 38662 - RNA, 19 nt, Homo sapiens
  misc_RNA (1)...(19): siRNA sense strand
gaagccagauccagucaga

SEQ ID NO: 38663 - RNA, 19 nt, Homo sapiens
  misc_RNA (1)...(19): siRNA sense strand
gaaacaagagugggagaua

SEQ ID NO: 38664 - RNA, 19 nt, Homo sapiens
  misc_RNA (1)...(19): siRNA sense strand
caaagauacucucggcauu

SEQ ID NO: 38665 - RNA, 19 nt, Homo sapiens
  misc_RNA (1)...(19): siRNA sense strand
gagcuaacgucaagaucuu

SEQ ID NO: 38666 - RNA, 19 nt, Homo sapiens
  misc_RNA (1)...(19): siRNA sense strand
gcacaacgguccagcugau

SEQ ID NO: 38667 - RNA, 19 nt, Homo sapiens
  misc_RNA (1)...(19): siRNA sense strand
ccagaaugcagacuuaaua

SEQ ID NO: 38668 - RNA, 19 nt, Homo sapiens
  misc_RNA (1)...(19): siRNA sense strand
aaacaagagugggagauaa

SEQ ID NO: 38669 - RNA, 19 nt, Homo sapiens
  misc_RNA (1)...(19): siRNA sense strand
gaaaugcaaugacaguuuu

SEQ ID NO: 38670 - RNA, 19 nt, Homo sapiens
  misc_RNA (1)...(19): siRNA sense strand
gcacagaaaggcaucuauu

SEQ ID NO: 38671 - RNA, 19 nt, Homo sapiens
  misc_RNA (1)...(19): siRNA sense strand
uaaagaaagcugucaaaga

SEQ ID NO: 38672 - RNA, 19 nt, Homo sapiens
  misc_RNA (1)...(19): siRNA sense strand
cgacagaucaggaaaauua

SEQ ID NO: 38673 - RNA, 19 nt, Homo sapiens
  misc_RNA (1)...(19): siRNA sense strand
cauccagaaugcagacuua

SEQ ID NO: 38674 - RNA, 19 nt, Homo sapiens
  misc_RNA (1)...(19): siRNA sense strand
ccaaauggcuggaaaucuc

SEQ ID NO: 38675 - RNA, 19 nt, Homo sapiens
  misc_RNA (1)...(19): siRNA sense strand
gaaauguaaccauggauga

SEQ ID NO: 38676 - RNA, 19 nt, Homo sapiens
  misc_RNA (1)...(19): siRNA sense strand
ggccaacgccuaugaguuu

SEQ ID NO: 38677 - RNA, 19 nt, Homo sapiens
  misc_RNA (1)...(19): siRNA sense strand
ugacaagguuggaauguuc

SEQ ID NO: 38678 - RNA, 19 nt, Homo sapiens
  misc_RNA (1)...(19): siRNA sense strand
ggaauuuggaguucaauga

SEQ ID NO: 38679 - RNA, 19 nt, Homo sapiens
  misc_RNA (1)...(19): siRNA sense strand
ggaaagguaucagaaacau

SEQ ID NO: 38680 - RNA, 19 nt, Homo sapiens
  misc_RNA (1)...(19): siRNA sense strand
aagauacucucggcauuua

SEQ ID NO: 38681 - RNA, 19 nt, Homo sapiens
  misc_RNA (1)...(19): siRNA sense strand
gauccagucagaagaauuu

SEQ ID NO: 38682 - RNA, 19 nt, Homo sapiens
  misc_RNA (1)...(19): siRNA sense strand
uaaacuaucugagggaaau

SEQ ID NO: 38683 - RNA, 19 nt, Homo sapiens
  misc_RNA (1)...(19): siRNA sense strand
gcauaugugaucuuugaua

SEQ ID NO: 38684 - RNA, 19 nt, Homo sapiens
  misc_RNA (1)...(19): siRNA sense strand
gagagaugacugacaaauu

SEQ ID NO: 38685 - RNA, 19 nt, Homo sapiens
  misc_RNA (1)...(19): siRNA sense strand
gaaugcagacuuaauagug

SEQ ID NO: 38686 - RNA, 19 nt, Homo sapiens
  misc_RNA (1)...(19): siRNA sense strand
ccaagaagcccuggacaaa

SEQ ID NO: 38687 - RNA, 19 nt, Homo sapiens
  misc_RNA (1)...(19): siRNA sense strand
gauaaagaaagcugucaaa

SEQ ID NO: 38688 - RNA, 19 nt, Homo sapiens
  misc_RNA (1)...(19): siRNA sense strand
caaaaucagugaaggaauu

SEQ ID NO: 38689 - RNA, 19 nt, Homo sapiens
  misc_RNA (1)...(19): siRNA sense strand
ugacaccacugaacucaau

SEQ ID NO: 38690 - RNA, 19 nt, Homo sapiens
  misc_RNA (1)...(19): siRNA sense strand
gaagaagaaaugacuagau

SEQ ID NO: 38691 - RNA, 19 nt, Homo sapiens
  misc_RNA (1)...(19): siRNA sense strand
acagcgaacugaugaagaa

SEQ ID NO: 38692 - RNA, 19 nt, Homo sapiens
  misc_RNA (1)...(19): siRNA sense strand
ggguauugccuuccuguua

SEQ ID NO: 38693 - RNA, 19 nt, Homo sapiens
  misc_RNA (1)...(19): siRNA sense strand
gaacaaagagcuggaaagg

SEQ ID NO: 38694 - RNA, 19 nt, Homo sapiens
  misc_RNA (1)...(19): siRNA sense strand
aaacagaggauugcuauug

SEQ ID NO: 38695 - RNA, 19 nt, Homo sapiens
  misc_RNA (1)...(19): siRNA sense strand
gaugagggcacaauuaaca

SEQ ID NO: 38696 - RNA, 19 nt, Homo sapiens
  misc_RNA (1)...(19): siRNA sense strand
uaauagugguguuucagaa

SEQ ID NO: 38697 - RNA, 19 nt, Homo sapiens
  misc_RNA (1)...(19): siRNA sense strand
aaacaguacuggugcacuu

SEQ ID NO: 38698 - RNA, 19 nt, Homo sapiens
  misc_RNA (1)...(19): siRNA sense strand
ggaacaguaugugccauug

SEQ ID NO: 38699 - RNA, 19 nt, Homo sapiens
  misc_RNA (1)...(19): siRNA sense strand
gcaaaugugccaccagugu

SEQ ID NO: 38700 - RNA, 19 nt, Homo sapiens
  misc_RNA (1)...(19): siRNA sense strand
ggccgcaccugcauuguga

SEQ ID NO: 38701 - RNA, 19 nt, Homo sapiens
  misc_RNA (1)...(19): siRNA sense strand
uggauccacucuagucaua

SEQ ID NO: 38702 - RNA, 19 nt, Homo sapiens
  misc_RNA (1)...(19): siRNA sense strand
ugaaauuguuggcuggaaa

SEQ ID NO: 38703 - RNA, 19 nt, Homo sapiens
  misc_RNA (1)...(19): siRNA sense strand
agaacuagcugcuuaugca

SEQ ID NO: 38704 - RNA, 19 nt, Homo sapiens
  misc_RNA (1)...(19): siRNA sense strand
gaaggccgcaccugcauug

SEQ ID NO: 38705 - RNA, 19 nt, Homo sapiens
  misc_RNA (1)...(19): siRNA sense strand
gcagaagugcaacauauuc

SEQ ID NO: 38706 - RNA, 19 nt, Homo sapiens
  misc_RNA (1)...(19): siRNA sense strand
cagaauggcccuacuuugu

SEQ ID NO: 38707 - RNA, 19 nt, Homo sapiens
  misc_RNA (1)...(19): siRNA sense strand
ccaccaguguccuuucuga

SEQ ID NO: 38708 - RNA, 19 nt, Homo sapiens
  misc_RNA (1)...(19): siRNA sense strand
guuugaggauggaguaauu

SEQ ID NO: 38709 - RNA, 19 nt, Homo sapiens
  misc_RNA (1)...(19): siRNA sense strand
ugaagggccucaaccugaa

SEQ ID NO: 38710 - RNA, 19 nt, Homo sapiens
  misc_RNA (1)...(19): siRNA sense strand
ucaggacugugauagcuuu

SEQ ID NO: 38711 - RNA, 19 nt, Homo sapiens
  misc_RNA (1)...(19): siRNA sense strand
gaacucaauacgcggcuaa

SEQ ID NO: 38712 - RNA, 19 nt, Homo sapiens
  misc_RNA (1)...(19): siRNA sense strand
gaagucguguucaacuauc

SEQ ID NO: 38713 - RNA, 19 nt, Homo sapiens
  misc_RNA (1)...(19): siRNA sense strand
cuggaaagauugcaacaga

SEQ ID NO: 38714 - RNA, 19 nt, Homo sapiens
  misc_RNA (1)...(19): siRNA sense strand
ccgauggacuugaagcaaa

SEQ ID NO: 38715 - RNA, 19 nt, Homo sapiens
  misc_RNA (1)...(19): siRNA sense strand
gaaauuugacacccugguu

SEQ ID NO: 38716 - RNA, 19 nt, Homo sapiens
  misc_RNA (1)...(19): siRNA sense strand
guacaggcagcucuggaua

SEQ ID NO: 38717 - RNA, 19 nt, Homo sapiens
  misc_RNA (1)...(19): siRNA sense strand
gcgaacugaugaagaagga

SEQ ID NO: 38718 - RNA, 19 nt, Homo sapiens
  misc_RNA (1)...(19): siRNA sense strand
ugggaaagcuggcgagauc

SEQ ID NO: 38719 - RNA, 19 nt, Homo sapiens
  misc_RNA (1)...(19): siRNA sense strand
cuauuugacugcagcauug

SEQ ID NO: 38720 - RNA, 19 nt, Homo sapiens
  misc_RNA (1)...(19): siRNA sense strand
gauccacucuagucauauc

SEQ ID NO: 38721 - RNA, 19 nt, Homo sapiens
  misc_RNA (1)...(19): siRNA sense strand
gaagccugauaaauuugaa

SEQ ID NO: 38722 - RNA, 19 nt, Homo sapiens
  misc_RNA (1)...(19): siRNA sense strand
ucagagaucauagcgauuu

SEQ ID NO: 38723 - RNA, 19 nt, Homo sapiens
  misc_RNA (1)...(19): siRNA sense strand
ccacucuagucauaucaaa

SEQ ID NO: 38724 - RNA, 19 nt, Homo sapiens
  misc_RNA (1)...(19): siRNA sense strand
agaaaugacuagauaugca

SEQ ID NO: 38725 - RNA, 19 nt, Homo sapiens
  misc_RNA (1)...(19): siRNA sense strand
gaaaauauuaggacaguug

SEQ ID NO: 38726 - RNA, 19 nt, Homo sapiens
  misc_RNA (1)...(19): siRNA sense strand
uagcaguuguuccaauuau

SEQ ID NO: 38727 - RNA, 19 nt, Homo sapiens
  misc_RNA (1)...(19): siRNA sense strand
gcugcuaaauccaggcaaa

SEQ ID NO: 38728 - RNA, 19 nt, Homo sapiens
  misc_RNA (1)...(19): siRNA sense strand
cagguuggcuuuaauugca

SEQ ID NO: 38729 - RNA, 19 nt, Homo sapiens
  misc_RNA (1)...(19): siRNA sense strand
ccagaagacugcggucaau

SEQ ID NO: 38730 - RNA, 19 nt, Homo sapiens
  misc_RNA (1)...(19): siRNA sense strand
gcauauuacuacucaggau

SEQ ID NO: 38731 - RNA, 19 nt, Homo sapiens
  misc_RNA (1)...(19): siRNA sense strand
ggaaaugccaaaagagaua

SEQ ID NO: 38732 - RNA, 19 nt, Homo sapiens
  misc_RNA (1)...(19): siRNA sense strand
ccgagaauauugccuaugg

SEQ ID NO: 38733 - RNA, 19 nt, Homo sapiens
  misc_RNA (1)...(19): siRNA sense strand
caacagaggcaauagaaaa

SEQ ID NO: 38734 - RNA, 19 nt, Homo sapiens
  misc_RNA (1)...(19): siRNA sense strand
caacaagauuucuacguua

SEQ ID NO: 38735 - RNA, 19 nt, Homo sapiens
  misc_RNA (1)...(19): siRNA sense strand
gaugaagagugacuuguuu

SEQ ID NO: 38736 - RNA, 19 nt, Homo sapiens
  misc_RNA (1)...(19): siRNA sense strand
gaacagggcgcauuacuuc

SEQ ID NO: 38737 - RNA, 19 nt, Homo sapiens
  misc_RNA (1)...(19): siRNA sense strand
gaagaaggaauauuugcua

SEQ ID NO: 38738 - RNA, 19 nt, Homo sapiens
  misc_RNA (1)...(19): siRNA sense strand
caacaucucugcugccaau

SEQ ID NO: 38739 - RNA, 19 nt, Homo sapiens
  misc_RNA (1)...(19): siRNA sense strand
gcacguacguucagcaaca

SEQ ID NO: 38740 - RNA, 19 nt, Homo sapiens
  misc_RNA (1)...(19): siRNA sense strand
gcacuacugcuuuguguuu

SEQ ID NO: 38741 - RNA, 19 nt, Homo sapiens
  misc_RNA (1)...(19): siRNA sense strand
gauauaagcaacaacaaga

SEQ ID NO: 38742 - RNA, 19 nt, Homo sapiens
  misc_RNA (1)...(19): siRNA sense strand
gaacccagcugccgucaac

SEQ ID NO: 38743 - RNA, 19 nt, Homo sapiens
  misc_RNA (1)...(19): siRNA sense strand
gacccaggcuccuaucuug

SEQ ID NO: 38744 - RNA, 19 nt, Homo sapiens
  misc_RNA (1)...(19): siRNA sense strand
gcagugaugugcgcuauuc

SEQ ID NO: 38745 - RNA, 19 nt, Homo sapiens
  misc_RNA (1)...(19): siRNA sense strand
acaacaagauuucuacguu

SEQ ID NO: 38746 - RNA, 19 nt, Homo sapiens
  misc_RNA (1)...(19): siRNA sense strand
gcaacagccuggacaucuu

SEQ ID NO: 38747 - RNA, 19 nt, Homo sapiens
  misc_RNA (1)...(19): siRNA sense strand
gaucacagcgcaacuacuu

SEQ ID NO: 38748 - RNA, 19 nt, Homo sapiens
  misc_RNA (1)...(19): siRNA sense strand
gcacaucuggcucuccaua

SEQ ID NO: 38749 - RNA, 19 nt, Homo sapiens
  misc_RNA (1)...(19): siRNA sense strand
uggcagagcuggauauaag

SEQ ID NO: 38750 - RNA, 19 nt, Homo sapiens
  misc_RNA (1)...(19): siRNA sense strand
ugaccgugcuggcaucuaa

SEQ ID NO: 38751 - RNA, 19 nt, Homo sapiens
  misc_RNA (1)...(19): siRNA sense strand
gaggagcucuggccaugga

SEQ ID NO: 38752 - RNA, 19 nt, Homo sapiens
  misc_RNA (1)...(19): siRNA sense strand
ggaacccguuugaguguga

SEQ ID NO: 38753 - RNA, 19 nt, Homo sapiens
  misc_RNA (1)...(19): siRNA sense strand
gaccaacgauacccuguuc

SEQ ID NO: 38754 - RNA, 19 nt, Homo sapiens
  misc_RNA (1)...(19): siRNA sense strand
cagcguggcuucuuugaca

SEQ ID NO: 38755 - RNA, 19 nt, Homo sapiens
  misc_RNA (1)...(19): siRNA sense strand
cgacagcggauguaaacua

SEQ ID NO: 38756 - RNA, 19 nt, Homo sapiens
  misc_RNA (1)...(19): siRNA sense strand
ucaccgugcugaacgagua

SEQ ID NO: 38757 - RNA, 19 nt, Homo sapiens
  misc_RNA (1)...(19): siRNA sense strand
gcuccuaucuugugacagu

SEQ ID NO: 38758 - RNA, 19 nt, Homo sapiens
  misc_RNA (1)...(19): siRNA sense strand
ccgggcagcugguccauuu

SEQ ID NO: 38759 - RNA, 19 nt, Homo sapiens
  misc_RNA (1)...(19): siRNA sense strand
ggacagcaucuucgucuau

SEQ ID NO: 38760 - RNA, 19 nt, Homo sapiens
  misc_RNA (1)...(19): siRNA sense strand
ggaguucugugucuacaag

SEQ ID NO: 38761 - RNA, 19 nt, Homo sapiens
  misc_RNA (1)...(19): siRNA sense strand
ggacucagcguggacauga

SEQ ID NO: 38762 - RNA, 19 nt, Homo sapiens
  misc_RNA (1)...(19): siRNA sense strand
ggagacagcauccucaaca

SEQ ID NO: 38763 - RNA, 19 nt, Homo sapiens
  misc_RNA (1)...(19): siRNA sense strand
caacagcacaggugacuuc

SEQ ID NO: 38764 - RNA, 19 nt, Homo sapiens
  misc_RNA (1)...(19): siRNA sense strand
caaccucuccugcagcuuu

SEQ ID NO: 38765 - RNA, 19 nt, Homo sapiens
  misc_RNA (1)...(19): siRNA sense strand
ucagcaaggucaaggaguu

SEQ ID NO: 38766 - RNA, 19 nt, Homo sapiens
  misc_RNA (1)...(19): siRNA sense strand
caccagcgauuacgacguu

SEQ ID NO: 38767 - RNA, 19 nt, Homo sapiens
  misc_RNA (1)...(19): siRNA sense strand
gugggcaccuucaauauca

SEQ ID NO: 38768 - RNA, 19 nt, Homo sapiens
  misc_RNA (1)...(19): siRNA sense strand
ggugugcgcugaacuuugg

SEQ ID NO: 38769 - RNA, 19 nt, Homo sapiens
  misc_RNA (1)...(19): siRNA sense strand
gcaaggcacaggccgugua

SEQ ID NO: 38770 - RNA, 19 nt, Homo sapiens
  misc_RNA (1)...(19): siRNA sense strand
gcaccaacgucuccuacag

SEQ ID NO: 38771 - RNA, 19 nt, Homo sapiens
  misc_RNA (1)...(19): siRNA sense strand
gagcagcacggucaccauu

SEQ ID NO: 38772 - RNA, 19 nt, Homo sapiens
  misc_RNA (1)...(19): siRNA sense strand
caagacacccacauggaaa

SEQ ID NO: 38773 - RNA, 19 nt, Homo sapiens
  misc_RNA (1)...(19): siRNA sense strand
gcaaggaggaggccaccaa

SEQ ID NO: 38774 - RNA, 19 nt, Homo sapiens
  misc_RNA (1)...(19): siRNA sense strand
gaacguggucuucaauguc

SEQ ID NO: 38775 - RNA, 19 nt, Homo sapiens
  misc_RNA (1)...(19): siRNA sense strand
ucgcugcucuuccugcuuu

SEQ ID NO: 38776 - RNA, 19 nt, Homo sapiens
  misc_RNA (1)...(19): siRNA sense strand
ccaagacacccacauggaa

SEQ ID NO: 38777 - RNA, 19 nt, Homo sapiens
  misc_RNA (1)...(19): siRNA sense strand
caacaguggagcaugugua

SEQ ID NO: 38778 - RNA, 19 nt, Homo sapiens
  misc_RNA (1)...(19): siRNA sense strand
acacgucccugugccagua

SEQ ID NO: 38779 - RNA, 19 nt, Homo sapiens
  misc_RNA (1)...(19): siRNA sense strand
gaaccucuccagccacuuc

SEQ ID NO: 38780 - RNA, 19 nt, Homo sapiens
  misc_RNA (1)...(19): siRNA sense strand
cccuacaccuucuucauuu

SEQ ID NO: 38781 - RNA, 19 nt, Homo sapiens
  misc_RNA (1)...(19): siRNA sense strand
gggcacuacugcuuugugu

SEQ ID NO: 38782 - RNA, 19 nt, Homo sapiens
  misc_RNA (1)...(19): siRNA sense strand
gcuccuacguguacuugga

SEQ ID NO: 38783 - RNA, 19 nt, Homo sapiens
  misc_RNA (1)...(19): siRNA sense strand
ucaccuaccagacugagua

SEQ ID NO: 38784 - RNA, 19 nt, Homo sapiens
  misc_RNA (1)...(19): siRNA sense strand
gcgaggaguucugugucua

SEQ ID NO: 38785 - RNA, 19 nt, Homo sapiens
  misc_RNA (1)...(19): siRNA sense strand
gacagcauccucaacauca

SEQ ID NO: 38786 - RNA, 19 nt, Homo sapiens
  misc_RNA (1)...(19): siRNA sense strand
gcugcagcguggcuucuuu

SEQ ID NO: 38787 - RNA, 19 nt, Homo sapiens
  misc_RNA (1)...(19): siRNA sense strand
gcuagcagccuuccacauc

SEQ ID NO: 38788 - RNA, 19 nt, Homo sapiens
  misc_RNA (1)...(19): siRNA sense strand
ccacggcuuugcacucuuc

SEQ ID NO: 38789 - RNA, 19 nt, Homo sapiens
  misc_RNA (1)...(19): siRNA sense strand
gcccuacaccuucuucauu

SEQ ID NO: 38790 - RNA, 19 nt, Homo sapiens
  misc_RNA (1)...(19): siRNA sense strand
gaccagacgccgcucaguu

SEQ ID NO: 38791 - RNA, 19 nt, Homo sapiens
  misc_RNA (1)...(19): siRNA sense strand
gacagcaucuucgucuaug

SEQ ID NO: 38792 - RNA, 19 nt, Homo sapiens
  misc_RNA (1)...(19): siRNA sense strand
caucuaaugccuucgagaa

SEQ ID NO: 38793 - RNA, 19 nt, Homo sapiens
  misc_RNA (1)...(19): siRNA sense strand
gagcccagauacgcaagaa

SEQ ID NO: 38794 - RNA, 19 nt, Homo sapiens
  misc_RNA (1)...(19): siRNA sense strand
uuggacagaugaagaguga

SEQ ID NO: 38795 - RNA, 19 nt, Homo sapiens
  misc_RNA (1)...(19): siRNA sense strand
gacagcggauguaaacuac

SEQ ID NO: 38796 - RNA, 19 nt, Homo sapiens
  misc_RNA (1)...(19): siRNA sense strand
caucugcagcucaacuaua

SEQ ID NO: 38797 - RNA, 19 nt, Homo sapiens
  misc_RNA (1)...(19): siRNA sense strand
uccaaucccuuucccuuug

SEQ ID NO: 38798 - RNA, 19 nt, Homo sapiens
  misc_RNA (1)...(19): siRNA sense strand
gagacagcauccucaacau

SEQ ID NO: 38799 - RNA, 19 nt, Homo sapiens
  misc_RNA (1)...(19): siRNA sense strand
gcaacaacaagauuucuac

SEQ ID NO: 38800 - RNA, 19 nt, Homo sapiens
  misc_RNA (1)...(19): siRNA sense strand
acaaugucaugcacaccua

SEQ ID NO: 38801 - RNA, 19 nt, Homo sapiens
  misc_RNA (1)...(19): siRNA sense strand
ggauauaagcaacaacaag

SEQ ID NO: 38802 - RNA, 19 nt, Homo sapiens
  misc_RNA (1)...(19): siRNA sense strand
uacguuagaagaaggaaua

SEQ ID NO: 38803 - RNA, 19 nt, Homo sapiens
  misc_RNA (1)...(19): siRNA sense strand
gcccugaggugacguucau

SEQ ID NO: 38804 - RNA, 19 nt, Homo sapiens
  misc_RNA (1)...(19): siRNA sense strand
gcccgacggugacacacaa

SEQ ID NO: 38805 - RNA, 19 nt, Homo sapiens
  misc_RNA (1)...(19): siRNA sense strand
gggcuccugugccguguau

SEQ ID NO: 38806 - RNA, 19 nt, Homo sapiens
  misc_RNA (1)...(19): siRNA sense strand
gaugacacccugguagaga

SEQ ID NO: 38807 - RNA, 19 nt, Homo sapiens
  misc_RNA (1)...(19): siRNA sense strand
uaaacuacaucgucaugcu

SEQ ID NO: 38808 - RNA, 19 nt, Homo sapiens
  misc_RNA (1)...(19): siRNA sense strand
gguggaccaucaacgacaa

SEQ ID NO: 38809 - RNA, 19 nt, Homo sapiens
  misc_RNA (1)...(19): siRNA sense strand
ucaaggaguuccgccacaa

SEQ ID NO: 38810 - RNA, 19 nt, Homo sapiens
  misc_RNA (1)...(19): siRNA sense strand
gggagaguccucacaaugg

SEQ ID NO: 38811 - RNA, 19 nt, Homo sapiens
  misc_RNA (1)...(19): siRNA sense strand
ucagugacccguccauugu

SEQ ID NO: 38812 - RNA, 19 nt, Homo sapiens
  misc_RNA (1)...(19): siRNA sense strand
cguccucggugcagaguga

SEQ ID NO: 38813 - RNA, 19 nt, Homo sapiens
  misc_RNA (1)...(19): siRNA sense strand
ccuccaaccuggugagcuu

SEQ ID NO: 38814 - RNA, 19 nt, Homo sapiens
  misc_RNA (1)...(19): siRNA sense strand
gcgugaacagggcgcauua

SEQ ID NO: 38815 - RNA, 19 nt, Homo sapiens
  misc_RNA (1)...(19): siRNA sense strand
agaacguggucuucaaugu

SEQ ID NO: 38816 - RNA, 19 nt, Homo sapiens
  misc_RNA (1)...(19): siRNA sense strand
ccguggaggucaugguauu

SEQ ID NO: 38817 - RNA, 19 nt, Homo sapiens
  misc_RNA (1)...(19): siRNA sense strand
gcagacgggcgacaacauc

SEQ ID NO: 38818 - RNA, 19 nt, Homo sapiens
  misc_RNA (1)...(19): siRNA sense strand
ggacuuuggcaccgaggaa

SEQ ID NO: 38819 - RNA, 19 nt, Homo sapiens
  misc_RNA (1)...(19): siRNA sense strand
ccacagaggacgucuacca

SEQ ID NO: 38820 - RNA, 19 nt, Homo sapiens
  misc_RNA (1)...(19): siRNA sense strand
acuacgagaugguggaguu

SEQ ID NO: 38821 - RNA, 19 nt, Homo sapiens
  misc_RNA (1)...(19): siRNA sense strand
gggagccacugaaggucuu

SEQ ID NO: 38822 - RNA, 19 nt, Homo sapiens
  misc_RNA (1)...(19): siRNA sense strand
acaucuggcucuccauaug

SEQ ID NO: 38823 - RNA, 19 nt, Homo sapiens
  misc_RNA (1)...(19): siRNA sense strand
ccucaccacggccgaauuu

SEQ ID NO: 38824 - RNA, 19 nt, Homo sapiens
  misc_RNA (1)...(19): siRNA sense strand
acaacuggcuggacaacag

SEQ ID NO: 38825 - RNA, 19 nt, Homo sapiens
  misc_RNA (1)...(19): siRNA sense strand
gccaaauccuucucagcau

SEQ ID NO: 38826 - RNA, 19 nt, Homo sapiens
  misc_RNA (1)...(19): siRNA sense strand
caacagccuggacaucuuc

SEQ ID NO: 38827 - RNA, 19 nt, Homo sapiens
  misc_RNA (1)...(19): siRNA sense strand
ccgugaaggugcccaacaa

SEQ ID NO: 38828 - RNA, 19 nt, Homo sapiens
  misc_RNA (1)...(19): siRNA sense strand
gcagcaccgagcccagaua

SEQ ID NO: 38829 - RNA, 19 nt, Homo sapiens
  misc_RNA (1)...(19): siRNA sense strand
cccagcacgucaucgagua

SEQ ID NO: 38830 - RNA, 19 nt, Homo sapiens
  misc_RNA (1)...(19): siRNA sense strand
ccaaggugcacuucgaaug

SEQ ID NO: 38831 - RNA, 19 nt, Homo sapiens
  misc_RNA (1)...(19): siRNA sense strand
gcgagggaacgcucaguug

SEQ ID NO: 38832 - RNA, 19 nt, Homo sapiens
  misc_RNA (1)...(19): siRNA sense strand
caaggaguuccgccacaaa

SEQ ID NO: 38833 - RNA, 19 nt, Homo sapiens
  misc_RNA (1)...(19): siRNA sense strand
gcuccugugccguguauga

SEQ ID NO: 38834 - RNA, 19 nt, Homo sapiens
  misc_RNA (1)...(19): siRNA sense strand
ggacauagcuccagaagga

SEQ ID NO: 38835 - RNA, 19 nt, Homo sapiens
  misc_RNA (1)...(19): siRNA sense strand
ggaaacagcugcacaaguu

SEQ ID NO: 38836 - RNA, 19 nt, Homo sapiens
  misc_RNA (1)...(19): siRNA sense strand
gcagaaagcugaaauggaa

SEQ ID NO: 38837 - RNA, 19 nt, Homo sapiens
  misc_RNA (1)...(19): siRNA sense strand
ggauuaagcucuucaaauu

SEQ ID NO: 38838 - RNA, 19 nt, Homo sapiens
  misc_RNA (1)...(19): siRNA sense strand
gaagagauauuggaaauuc

SEQ ID NO: 38839 - RNA, 19 nt, Homo sapiens
  misc_RNA (1)...(19): siRNA sense strand
gcaaggaggaggcaaguua

SEQ ID NO: 38840 - RNA, 19 nt, Homo sapiens
  misc_RNA (1)...(19): siRNA sense strand
gcacuaaccgagagaaaua

SEQ ID NO: 38841 - RNA, 19 nt, Homo sapiens
  misc_RNA (1)...(19): siRNA sense strand
caauauagcugcugucaca

SEQ ID NO: 38842 - RNA, 19 nt, Homo sapiens
  misc_RNA (1)...(19): siRNA sense strand
ucucagaucuuaucagaaa

SEQ ID NO: 38843 - RNA, 19 nt, Homo sapiens
  misc_RNA (1)...(19): siRNA sense strand
ccagaucagucaugguuua

SEQ ID NO: 38844 - RNA, 19 nt, Homo sapiens
  misc_RNA (1)...(19): siRNA sense strand
ggaauugucuggauguugu

SEQ ID NO: 38845 - RNA, 19 nt, Homo sapiens
  misc_RNA (1)...(19): siRNA sense strand
cagauacaguucaacaaua

SEQ ID NO: 38846 - RNA, 19 nt, Homo sapiens
  misc_RNA (1)...(19): siRNA sense strand
gcacucaggucgaugacuu

SEQ ID NO: 38847 - RNA, 19 nt, Homo sapiens
  misc_RNA (1)...(19): siRNA sense strand
gaaaugggaguucuaaugu

SEQ ID NO: 38848 - RNA, 19 nt, Homo sapiens
  misc_RNA (1)...(19): siRNA sense strand
gcuaguacgugaagaguug

SEQ ID NO: 38849 - RNA, 19 nt, Homo sapiens
  misc_RNA (1)...(19): siRNA sense strand
ggaaaugggaguucuaaug

SEQ ID NO: 38850 - RNA, 19 nt, Homo sapiens
  misc_RNA (1)...(19): siRNA sense strand
gcuccaauguguacuacua

SEQ ID NO: 38851 - RNA, 19 nt, Homo sapiens
  misc_RNA (1)...(19): siRNA sense strand
gcuauuaucuggauuuguc

SEQ ID NO: 38852 - RNA, 19 nt, Homo sapiens
  misc_RNA (1)...(19): siRNA sense strand
gauaucaacuuugcagaga

SEQ ID NO: 38853 - RNA, 19 nt, Homo sapiens
  misc_RNA (1)...(19): siRNA sense strand
ggaccaauuuauuucacua

SEQ ID NO: 38854 - RNA, 19 nt, Homo sapiens
  misc_RNA (1)...(19): siRNA sense strand
cuuuaaagcugauccgaua

SEQ ID NO: 38855 - RNA, 19 nt, Homo sapiens
  misc_RNA (1)...(19): siRNA sense strand
ugaggaagcuaaucgaguu

SEQ ID NO: 38856 - RNA, 19 nt, Homo sapiens
  misc_RNA (1)...(19): siRNA sense strand
gcuaugaugucuacucugu

SEQ ID NO: 38857 - RNA, 19 nt, Homo sapiens
  misc_RNA (1)...(19): siRNA sense strand
gaagauagcggacauagcu

SEQ ID NO: 38858 - RNA, 19 nt, Homo sapiens
  misc_RNA (1)...(19): siRNA sense strand
gggaggaccuggauuugga

SEQ ID NO: 38859 - RNA, 19 nt, Homo sapiens
  misc_RNA (1)...(19): siRNA sense strand
ggacuugagagaugaaauu

SEQ ID NO: 38860 - RNA, 19 nt, Homo sapiens
  misc_RNA (1)...(19): siRNA sense strand
ucacagcucuuccuagaca

SEQ ID NO: 38861 - RNA, 19 nt, Homo sapiens
  misc_RNA (1)...(19): siRNA sense strand
agaaagggcuaccauaaag

SEQ ID NO: 38862 - RNA, 19 nt, Homo sapiens
  misc_RNA (1)...(19): siRNA sense strand
gaaauucgcauucacaaac

SEQ ID NO: 38863 - RNA, 19 nt, Homo sapiens
  misc_RNA (1)...(19): siRNA sense strand
ggaaucauugcaacuuaua

SEQ ID NO: 38864 - RNA, 19 nt, Homo sapiens
  misc_RNA (1)...(19): siRNA sense strand
agaaauggauccugcucua

SEQ ID NO: 38865 - RNA, 19 nt, Homo sapiens
  misc_RNA (1)...(19): siRNA sense strand
uacgggaacuggucacaua

SEQ ID NO: 38866 - RNA, 19 nt, Homo sapiens
  misc_RNA (1)...(19): siRNA sense strand
gagacgacuuggagaaaga

SEQ ID NO: 38867 - RNA, 19 nt, Homo sapiens
  misc_RNA (1)...(19): siRNA sense strand
ucagaaagggcuaccauaa

SEQ ID NO: 38868 - RNA, 19 nt, Homo sapiens
  misc_RNA (1)...(19): siRNA sense strand
ucaaugauacuuacucuga

SEQ ID NO: 38869 - RNA, 19 nt, Homo sapiens
  misc_RNA (1)...(19): siRNA sense strand
uaguggagcuggcuauuau

SEQ ID NO: 38870 - RNA, 19 nt, Homo sapiens
  misc_RNA (1)...(19): siRNA sense strand
cgaccaagauggagaccaa

SEQ ID NO: 38871 - RNA, 19 nt, Homo sapiens
  misc_RNA (1)...(19): siRNA sense strand
gaaauggaacucucagauc

SEQ ID NO: 38872 - RNA, 19 nt, Homo sapiens
  misc_RNA (1)...(19): siRNA sense strand
gcagauacaguucaacaau

SEQ ID NO: 38873 - RNA, 19 nt, Homo sapiens
  misc_RNA (1)...(19): siRNA sense strand
gaggcaauauucacaaagu

SEQ ID NO: 38874 - RNA, 19 nt, Homo sapiens
  misc_RNA (1)...(19): siRNA sense strand
gaaauuaaagagugcuaug

SEQ ID NO: 38875 - RNA, 19 nt, Homo sapiens
  misc_RNA (1)...(19): siRNA sense strand
gggaaucauugcaacuuau

SEQ ID NO: 38876 - RNA, 19 nt, Homo sapiens
  misc_RNA (1)...(19): siRNA sense strand
ugucacagcucuuccuaga

SEQ ID NO: 38877 - RNA, 19 nt, Homo sapiens
  misc_RNA (1)...(19): siRNA sense strand
cagaaagggcuaccauaaa

SEQ ID NO: 38878 - RNA, 19 nt, Homo sapiens
  misc_RNA (1)...(19): siRNA sense strand
uaucaacuuugcagagauu

SEQ ID NO: 38879 - RNA, 19 nt, Homo sapiens
  misc_RNA (1)...(19): siRNA sense strand
uggaagagauauuggaaau

SEQ ID NO: 38880 - RNA, 19 nt, Homo sapiens
  misc_RNA (1)...(19): siRNA sense strand
ggaaauucgcauucacaaa

SEQ ID NO: 38881 - RNA, 19 nt, Homo sapiens
  misc_RNA (1)...(19): siRNA sense strand
cuguuuggcuuugcuauua

SEQ ID NO: 38882 - RNA, 19 nt, Homo sapiens
  misc_RNA (1)...(19): siRNA sense strand
gaaauggaaccgcuuggau

SEQ ID NO: 38883 - RNA, 19 nt, Homo sapiens
  misc_RNA (1)...(19): siRNA sense strand
ugaggaggaugacgaugaa

SEQ ID NO: 38884 - RNA, 19 nt, Homo sapiens
  misc_RNA (1)...(19): siRNA sense strand
uggcauaccuugucuuugg

SEQ ID NO: 38885 - RNA, 19 nt, Homo sapiens
  misc_RNA (1)...(19): siRNA sense strand
uccgauaugucacaacuuu

SEQ ID NO: 38886 - RNA, 19 nt, Homo sapiens
  misc_RNA (1)...(19): siRNA sense strand
uggaugggcuguacuggaa

SEQ ID NO: 38887 - RNA, 19 nt, Homo sapiens
  misc_RNA (1)...(19): siRNA sense strand
guuaaacuuugacgaacuu

SEQ ID NO: 38888 - RNA, 19 nt, Homo sapiens
  misc_RNA (1)...(19): siRNA sense strand
acucugaagugaaaucuga

SEQ ID NO: 38889 - RNA, 19 nt, Homo sapiens
  misc_RNA (1)...(19): siRNA sense strand
gaauggugguggagaugga

SEQ ID NO: 38890 - RNA, 19 nt, Homo sapiens
  misc_RNA (1)...(19): siRNA sense strand
agugguagcuauaggaauu

SEQ ID NO: 38891 - RNA, 19 nt, Homo sapiens
  misc_RNA (1)...(19): siRNA sense strand
acauuaaccuguucugugu

SEQ ID NO: 38892 - RNA, 19 nt, Homo sapiens
  misc_RNA (1)...(19): siRNA sense strand
caaugauacuuacucugaa

SEQ ID NO: 38893 - RNA, 19 nt, Homo sapiens
  misc_RNA (1)...(19): siRNA sense strand
guucuaauguccacguaug

SEQ ID NO: 38894 - RNA, 19 nt, Homo sapiens
  misc_RNA (1)...(19): siRNA sense strand
cgagagaaauaccuuaaaa

SEQ ID NO: 38895 - RNA, 19 nt, Homo sapiens
  misc_RNA (1)...(19): siRNA sense strand
aaauggaacucucagaucu

SEQ ID NO: 38896 - RNA, 19 nt, Homo sapiens
  misc_RNA (1)...(19): siRNA sense strand
uugagcaucuggcauauug

SEQ ID NO: 38897 - RNA, 19 nt, Homo sapiens
  misc_RNA (1)...(19): siRNA sense strand
gcagaugagagacgacuug

SEQ ID NO: 38898 - RNA, 19 nt, Homo sapiens
  misc_RNA (1)...(19): siRNA sense strand
gaacuucgacaagaucuca

SEQ ID NO: 38899 - RNA, 19 nt, Homo sapiens
  misc_RNA (1)...(19): siRNA sense strand
uaucuggauuugucaagaa

SEQ ID NO: 38900 - RNA, 19 nt, Homo sapiens
  misc_RNA (1)...(19): siRNA sense strand
cagcauaguguccaagauu

SEQ ID NO: 38901 - RNA, 19 nt, Homo sapiens
  misc_RNA (1)...(19): siRNA sense strand
ggauuuggaucacaguucu

SEQ ID NO: 38902 - RNA, 19 nt, Homo sapiens
  misc_RNA (1)...(19): siRNA sense strand
gaacugaccgaacaugaac

SEQ ID NO: 38903 - RNA, 19 nt, Homo sapiens
  misc_RNA (1)...(19): siRNA sense strand
gggaagggccauacugaug

SEQ ID NO: 38904 - RNA, 19 nt, Homo sapiens
  misc_RNA (1)...(19): siRNA sense strand
uaugaugucuacucuguca

SEQ ID NO: 38905 - RNA, 19 nt, Homo sapiens
  misc_RNA (1)...(19): siRNA sense strand
caaggaggaggcaaguuaa

SEQ ID NO: 38906 - RNA, 19 nt, Homo sapiens
  misc_RNA (1)...(19): siRNA sense strand
gucgaugacuucaguacuu

SEQ ID NO: 38907 - RNA, 19 nt, Homo sapiens
  misc_RNA (1)...(19): siRNA sense strand
gauccgauaugucacaacu

SEQ ID NO: 38908 - RNA, 19 nt, Homo sapiens
  misc_RNA (1)...(19): siRNA sense strand
augaugagcuccaaugugu

SEQ ID NO: 38909 - RNA, 19 nt, Homo sapiens
  misc_RNA (1)...(19): siRNA sense strand
ggaaggugcagguggaaau

SEQ ID NO: 38910 - RNA, 19 nt, Homo sapiens
  misc_RNA (1)...(19): siRNA sense strand
gagagacgacuuggagaaa

SEQ ID NO: 38911 - RNA, 19 nt, Homo sapiens
  misc_RNA (1)...(19): siRNA sense strand
cauauuggcagauacaguu

SEQ ID NO: 38912 - RNA, 19 nt, Homo sapiens
  misc_RNA (1)...(19): siRNA sense strand
guacaacgccaacauuaac

SEQ ID NO: 38913 - RNA, 19 nt, Homo sapiens
  misc_RNA (1)...(19): siRNA sense strand
gaggaaccagggcaacuuu

SEQ ID NO: 38914 - RNA, 19 nt, Homo sapiens
  misc_RNA (1)...(19): siRNA sense strand
gcugacaaccgaaguuuca

SEQ ID NO: 38915 - RNA, 19 nt, Homo sapiens
  misc_RNA (1)...(19): siRNA sense strand
gaucgugaagcuagagauu

SEQ ID NO: 38916 - RNA, 19 nt, Homo sapiens
  misc_RNA (1)...(19): siRNA sense strand
ucacaaaguacgaccaaga

SEQ ID NO: 38917 - RNA, 19 nt, Homo sapiens
  misc_RNA (1)...(19): siRNA sense strand
gaagggccauacugaugca

SEQ ID NO: 38918 - RNA, 19 nt, Homo sapiens
  misc_RNA (1)...(19): siRNA sense strand
gggcuaccauaaagcuuug

SEQ ID NO: 38919 - RNA, 19 nt, Homo sapiens
  misc_RNA (1)...(19): siRNA sense strand
guguacaacgccaacauua

SEQ ID NO: 38920 - RNA, 19 nt, Homo sapiens
  misc_RNA (1)...(19): siRNA sense strand
gaaauggauccugcucuau

SEQ ID NO: 38921 - RNA, 19 nt, Homo sapiens
  misc_RNA (1)...(19): siRNA sense strand
ccauacugaugcagagauu

SEQ ID NO: 38922 - RNA, 19 nt, Homo sapiens
  misc_RNA (1)...(19): siRNA sense strand
gaugggcuguacuggaaga

SEQ ID NO: 38923 - RNA, 19 nt, Homo sapiens
  misc_RNA (1)...(19): siRNA sense strand
gcacgccagugggacuaaa

SEQ ID NO: 38924 - RNA, 19 nt, Homo sapiens
  misc_RNA (1)...(19): siRNA sense strand
ugaugcagcuucccagauc

SEQ ID NO: 38925 - RNA, 19 nt, Homo sapiens
  misc_RNA (1)...(19): siRNA sense strand
ucgugaagcuagagauuau

SEQ ID NO: 38926 - RNA, 19 nt, Homo sapiens
  misc_RNA (1)...(19): siRNA sense strand
gaggaugacgaugaagaua

SEQ ID NO: 38927 - RNA, 19 nt, Homo sapiens
  misc_RNA (1)...(19): siRNA sense strand
acucucagaucuuaucaga

SEQ ID NO: 38928 - RNA, 19 nt, Homo sapiens
  misc_RNA (1)...(19): siRNA sense strand
auggaacucucagaucuua

SEQ ID NO: 38929 - RNA, 19 nt, Homo sapiens
  misc_RNA (1)...(19): siRNA sense strand
ucacuacauuuguguucuu

SEQ ID NO: 38930 - RNA, 19 nt, Homo sapiens
  misc_RNA (1)...(19): siRNA sense strand
gauauuggaaauucgcauu

SEQ ID NO: 38931 - RNA, 19 nt, Homo sapiens
  misc_RNA (1)...(19): siRNA sense strand
ggaagagauauuggaaauu

SEQ ID NO: 38932 - RNA, 19 nt, Homo sapiens
  misc_RNA (1)...(19): siRNA sense strand
ucaggucgaugacuucagu

SEQ ID NO: 38933 - RNA, 19 nt, Homo sapiens
  misc_RNA (1)...(19): siRNA sense strand
gcauaguguccaagauuga

SEQ ID NO: 38934 - RNA, 19 nt, Homo sapiens
  misc_RNA (1)...(19): siRNA sense strand
gaagaaagcucuggagaag

SEQ ID NO: 38935 - RNA, 19 nt, Homo sapiens
  misc_RNA (1)...(19): siRNA sense strand
cgaggaaccuggccuauga

SEQ ID NO: 38936 - RNA, 19 nt, Homo sapiens
  misc_RNA (1)...(19): siRNA sense strand
acaaauuccugcuggagua

SEQ ID NO: 38937 - RNA, 19 nt, Homo sapiens
  misc_RNA (1)...(19): siRNA sense strand
ggaaugugcccuauauuuc

SEQ ID NO: 38938 - RNA, 19 nt, Homo sapiens
  misc_RNA (1)...(19): siRNA sense strand
gaacagcccacgccguuug

SEQ ID NO: 38939 - RNA, 19 nt, Homo sapiens
  misc_RNA (1)...(19): siRNA sense strand
caaggaggaucuggucauu

SEQ ID NO: 38940 - RNA, 19 nt, Homo sapiens
  misc_RNA (1)...(19): siRNA sense strand
agaaguacauccaccagaa

SEQ ID NO: 38941 - RNA, 19 nt, Homo sapiens
  misc_RNA (1)...(19): siRNA sense strand
gaaugugcccuauauuuca

SEQ ID NO: 38942 - RNA, 19 nt, Homo sapiens
  misc_RNA (1)...(19): siRNA sense strand
ugaacuaccugggcaacua

SEQ ID NO: 38943 - RNA, 19 nt, Homo sapiens
  misc_RNA (1)...(19): siRNA sense strand
agaaagcucuggagaagca

SEQ ID NO: 38944 - RNA, 19 nt, Homo sapiens
  misc_RNA (1)...(19): siRNA sense strand
gaccaccgcugccguaucu

SEQ ID NO: 38945 - RNA, 19 nt, Homo sapiens
  misc_RNA (1)...(19): siRNA sense strand
gcgcucagcucaguucuuc

SEQ ID NO: 38946 - RNA, 19 nt, Homo sapiens
  misc_RNA (1)...(19): siRNA sense strand
cagaaacacaugcgacuuu

SEQ ID NO: 38947 - RNA, 19 nt, Homo sapiens
  misc_RNA (1)...(19): siRNA sense strand
gagcgggaguggcacaaau

SEQ ID NO: 38948 - RNA, 19 nt, Homo sapiens
  misc_RNA (1)...(19): siRNA sense strand
gcccggaugucuauugguu

SEQ ID NO: 38949 - RNA, 19 nt, Homo sapiens
  misc_RNA (1)...(19): siRNA sense strand
gagaacgugccgacuauug

SEQ ID NO: 38950 - RNA, 19 nt, Homo sapiens
  misc_RNA (1)...(19): siRNA sense strand
agagggagcagaucaauau

SEQ ID NO: 38951 - RNA, 19 nt, Homo sapiens
  misc_RNA (1)...(19): siRNA sense strand
cuggacgacucacgcauua

SEQ ID NO: 38952 - RNA, 19 nt, Homo sapiens
  misc_RNA (1)...(19): siRNA sense strand
cccgggagcuccugaagaa

SEQ ID NO: 38953 - RNA, 19 nt, Homo sapiens
  misc_RNA (1)...(19): siRNA sense strand
gagcugcaguccucagauc

SEQ ID NO: 38954 - RNA, 19 nt, Homo sapiens
  misc_RNA (1)...(19): siRNA sense strand
gagaagagggagcagauca

SEQ ID NO: 38955 - RNA, 19 nt, Homo sapiens
  misc_RNA (1)...(19): siRNA sense strand
caucugcucucccuagaca

SEQ ID NO: 38956 - RNA, 19 nt, Homo sapiens
  misc_RNA (1)...(19): siRNA sense strand
caugaugccuccaccuuca

SEQ ID NO: 38957 - RNA, 19 nt, Homo sapiens
  misc_RNA (1)...(19): siRNA sense strand
gggagcuccugaagaaguu

SEQ ID NO: 38958 - RNA, 19 nt, Homo sapiens
  misc_RNA (1)...(19): siRNA sense strand
caccagaacuacaccaaag

SEQ ID NO: 38959 - RNA, 19 nt, Homo sapiens
  misc_RNA (1)...(19): siRNA sense strand
gcagcaggauguguucaug

SEQ ID NO: 38960 - RNA, 19 nt, Homo sapiens
  misc_RNA (1)...(19): siRNA sense strand
uggaaugugcccuauauuu

SEQ ID NO: 38961 - RNA, 19 nt, Homo sapiens
  misc_RNA (1)...(19): siRNA sense strand
ucuggaaugugcccuauau

SEQ ID NO: 38962 - RNA, 19 nt, Homo sapiens
  misc_RNA (1)...(19): siRNA sense strand
ggacuggaauguggagaag

SEQ ID NO: 38963 - RNA, 19 nt, Homo sapiens
  misc_RNA (1)...(19): siRNA sense strand
ugaagaaagcucuggagaa

SEQ ID NO: 38964 - RNA, 19 nt, Homo sapiens
  misc_RNA (1)...(19): siRNA sense strand
gcuaugacgugcuguuugc

SEQ ID NO: 38965 - RNA, 19 nt, Homo sapiens
  misc_RNA (1)...(19): siRNA sense strand
cuauugacauccacaugaa

SEQ ID NO: 38966 - RNA, 19 nt, Homo sapiens
  misc_RNA (1)...(19): siRNA sense strand
gaagagggagcagaucaau

SEQ ID NO: 38967 - RNA, 19 nt, Homo sapiens
  misc_RNA (1)...(19): siRNA sense strand
ccacccaccugcacaacga

SEQ ID NO: 38968 - RNA, 19 nt, Homo sapiens
  misc_RNA (1)...(19): siRNA sense strand
cuaaggagaccgagggauu

SEQ ID NO: 38969 - RNA, 19 nt, Homo sapiens
  misc_RNA (1)...(19): siRNA sense strand
ugaaccagaucggcuuuga

SEQ ID NO: 38970 - RNA, 19 nt, Homo sapiens
  misc_RNA (1)...(19): siRNA sense strand
cagugcagauggcuacuau

SEQ ID NO: 38971 - RNA, 19 nt, Homo sapiens
  misc_RNA (1)...(19): siRNA sense strand
uggaggagauggagcacuu

SEQ ID NO: 38972 - RNA, 19 nt, Homo sapiens
  misc_RNA (1)...(19): siRNA sense strand
ggaaggagaaguacaucca

SEQ ID NO: 38973 - RNA, 19 nt, Homo sapiens
  misc_RNA (1)...(19): siRNA sense strand
ggagguggccugugaugag

SEQ ID NO: 38974 - RNA, 19 nt, Homo sapiens
  misc_RNA (1)...(19): siRNA sense strand
gggauuccgucgcuucaag

SEQ ID NO: 38975 - RNA, 19 nt, Homo sapiens
  misc_RNA (1)...(19): siRNA sense strand
gcacacccuuggccaucug

SEQ ID NO: 38976 - RNA, 19 nt, Homo sapiens
  misc_RNA (1)...(19): siRNA sense strand
gcgaguaccagucugugaa

SEQ ID NO: 38977 - RNA, 19 nt, Homo sapiens
  misc_RNA (1)...(19): siRNA sense strand
gcucagcucaguucuucaa

SEQ ID NO: 38978 - RNA, 19 nt, Homo sapiens
  misc_RNA (1)...(19): siRNA sense strand
ggagaagcacgcagacaag

SEQ ID NO: 38979 - RNA, 19 nt, Homo sapiens
  misc_RNA (1)...(19): siRNA sense strand
gaccgcagcugcaccuacu

SEQ ID NO: 38980 - RNA, 19 nt, Homo sapiens
  misc_RNA (1)...(19): siRNA sense strand
cagcugcaccuacuacuuc

SEQ ID NO: 38981 - RNA, 19 nt, Homo sapiens
  misc_RNA (1)...(19): siRNA sense strand
acgagaacgugccgacuau

SEQ ID NO: 38982 - RNA, 19 nt, Homo sapiens
  misc_RNA (1)...(19): siRNA sense strand
ggacuacguggacauugug

SEQ ID NO: 38983 - RNA, 19 nt, Homo sapiens
  misc_RNA (1)...(19): siRNA sense strand
aggaggaucuggucauucu

SEQ ID NO: 38984 - RNA, 19 nt, Homo sapiens
  misc_RNA (1)...(19): siRNA sense strand
ucugggagguguucagcaa

SEQ ID NO: 38985 - RNA, 19 nt, Homo sapiens
  misc_RNA (1)...(19): siRNA sense strand
gcaguccucagaucucuuc

SEQ ID NO: 38986 - RNA, 19 nt, Homo sapiens
  misc_RNA (1)...(19): siRNA sense strand
cuggaggcuucaucgguua

SEQ ID NO: 38987 - RNA, 19 nt, Homo sapiens
  misc_RNA (1)...(19): siRNA sense strand
gcaggcuggagaccaagua

SEQ ID NO: 38988 - RNA, 19 nt, Homo sapiens
  misc_RNA (1)...(19): siRNA sense strand
ggagccagguggucuucuc

SEQ ID NO: 38989 - RNA, 19 nt, Homo sapiens
  misc_RNA (1)...(19): siRNA sense strand
gggagcagaucaauaucac

SEQ ID NO: 38990 - RNA, 19 nt, Homo sapiens
  misc_RNA (1)...(19): siRNA sense strand
gaggagauggagcacuuug

SEQ ID NO: 38991 - RNA, 19 nt, Homo sapiens
  misc_RNA (1)...(19): siRNA sense strand
aggcucagguggaagaguu

SEQ ID NO: 38992 - RNA, 19 nt, Homo sapiens
  misc_RNA (1)...(19): siRNA sense strand
gaacuaccugggcaacuac

SEQ ID NO: 38993 - RNA, 19 nt, Homo sapiens
  misc_RNA (1)...(19): siRNA sense strand
ggccuucugugccaacauc

SEQ ID NO: 38994 - RNA, 19 nt, Homo sapiens
  misc_RNA (1)...(19): siRNA sense strand
gcagcugcaccuacuacuu

SEQ ID NO: 38995 - RNA, 19 nt, Homo sapiens
  misc_RNA (1)...(19): siRNA sense strand
gccaucugcucucccuaga

SEQ ID NO: 38996 - RNA, 19 nt, Homo sapiens
  misc_RNA (1)...(19): siRNA sense strand
ccaucaacaucgcccugaa

SEQ ID NO: 38997 - RNA, 19 nt, Homo sapiens
  misc_RNA (1)...(19): siRNA sense strand
agaacgugccgacuauuga

SEQ ID NO: 38998 - RNA, 19 nt, Homo sapiens
  misc_RNA (1)...(19): siRNA sense strand
gcaccacccaccugcacaa

SEQ ID NO: 38999 - RNA, 19 nt, Homo sapiens
  misc_RNA (1)...(19): siRNA sense strand
aaugugcccuauauuucaa

SEQ ID NO: 39000 - RNA, 19 nt, Homo sapiens
  misc_RNA (1)...(19): siRNA sense strand
ccaccagaacuacaccaaa

SEQ ID NO: 39001 - RNA, 19 nt, Homo sapiens
  misc_RNA (1)...(19): siRNA sense strand
ggauggagccuuggaugag

SEQ ID NO: 39002 - RNA, 19 nt, Homo sapiens
  misc_RNA (1)...(19): siRNA sense strand
agcaggauguguucauguu

SEQ ID NO: 39003 - RNA, 19 nt, Homo sapiens
  misc_RNA (1)...(19): siRNA sense strand
ggacagcgacagcgaucag

SEQ ID NO: 39004 - RNA, 19 nt, Homo sapiens
  misc_RNA (1)...(19): siRNA sense strand
gaacgugccgacuauugac

SEQ ID NO: 39005 - RNA, 19 nt, Homo sapiens
  misc_RNA (1)...(19): siRNA sense strand
gaaguacauccaccagaac

SEQ ID NO: 39006 - RNA, 19 nt, Homo sapiens
  misc_RNA (1)...(19): siRNA sense strand
cgaaugcagaugccaggaa

SEQ ID NO: 39007 - RNA, 19 nt, Homo sapiens
  misc_RNA (1)...(19): siRNA sense strand
gcagcgaguaccagucugu

SEQ ID NO: 39008 - RNA, 19 nt, Homo sapiens
  misc_RNA (1)...(19): siRNA sense strand
gcgaggaaccuggccuaug

SEQ ID NO: 39009 - RNA, 19 nt, Homo sapiens
  misc_RNA (1)...(19): siRNA sense strand
guacauccaccagaacuac

SEQ ID NO: 39010 - RNA, 19 nt, Homo sapiens
  misc_RNA (1)...(19): siRNA sense strand
gggaggcuguggucgaacu

SEQ ID NO: 39011 - RNA, 19 nt, Homo sapiens
  misc_RNA (1)...(19): siRNA sense strand
aagagggagcagaucaaua

SEQ ID NO: 39012 - RNA, 19 nt, Homo sapiens
  misc_RNA (1)...(19): siRNA sense strand
aguuugaccuggccuuugu

SEQ ID NO: 39013 - RNA, 19 nt, Homo sapiens
  misc_RNA (1)...(19): siRNA sense strand
acaccagggcccaguuuga

SEQ ID NO: 39014 - RNA, 19 nt, Homo sapiens
  misc_RNA (1)...(19): siRNA sense strand
uacgagaacgugccgacua

SEQ ID NO: 39015 - RNA, 19 nt, Homo sapiens
  misc_RNA (1)...(19): siRNA sense strand
uaaggagaccgagggauuc

SEQ ID NO: 39016 - RNA, 19 nt, Homo sapiens
  misc_RNA (1)...(19): siRNA sense strand
uggagaagcacgcagacaa

SEQ ID NO: 39017 - RNA, 19 nt, Homo sapiens
  misc_RNA (1)...(19): siRNA sense strand
gcaggauguguucauguuc

SEQ ID NO: 39018 - RNA, 19 nt, Homo sapiens
  misc_RNA (1)...(19): siRNA sense strand
acaaggcucagguggaaga

SEQ ID NO: 39019 - RNA, 19 nt, Homo sapiens
  misc_RNA (1)...(19): siRNA sense strand
gcaacgggccaaccaagcu

SEQ ID NO: 39020 - RNA, 19 nt, Homo sapiens
  misc_RNA (1)...(19): siRNA sense strand
gcugccguaucuuccagaa

SEQ ID NO: 39021 - RNA, 19 nt, Homo sapiens
  misc_RNA (1)...(19): siRNA sense strand
gacucacgcauuaccauga

SEQ ID NO: 39022 - RNA, 19 nt, Homo sapiens
  misc_RNA (1)...(19): siRNA sense strand
cuacaccagggcccaguuu

SEQ ID NO: 39023 - RNA, 19 nt, Homo sapiens
  misc_RNA (1)...(19): siRNA sense strand
ggaggagauggagcacuuu

SEQ ID NO: 39024 - RNA, 19 nt, Homo sapiens
  misc_RNA (1)...(19): siRNA sense strand
caagcgcucagcucaguuc

SEQ ID NO: 39025 - RNA, 19 nt, Homo sapiens
  misc_RNA (1)...(19): siRNA sense strand
gaggaucuggucauucucu

SEQ ID NO: 39026 - RNA, 19 nt, Homo sapiens
  misc_RNA (1)...(19): siRNA sense strand
ucacgguggccacuaagga

SEQ ID NO: 39027 - RNA, 19 nt, Homo sapiens
  misc_RNA (1)...(19): siRNA sense strand
acuauugacauccacauga

SEQ ID NO: 39028 - RNA, 19 nt, Homo sapiens
  misc_RNA (1)...(19): siRNA sense strand
ggucggcguguucaucgaa

SEQ ID NO: 39029 - RNA, 19 nt, Homo sapiens
  misc_RNA (1)...(19): siRNA sense strand
gaaccagaucggcuuugag

SEQ ID NO: 39030 - RNA, 19 nt, Homo sapiens
  misc_RNA (1)...(19): siRNA sense strand
gucauucucuucgcagaca

SEQ ID NO: 39031 - RNA, 19 nt, Homo sapiens
  misc_RNA (1)...(19): siRNA sense strand
gcccugcccggaugucuau

SEQ ID NO: 39032 - RNA, 19 nt, Homo sapiens
  misc_RNA (1)...(19): siRNA sense strand
gcccuauauuucaaacauc

SEQ ID NO: 39033 - RNA, 19 nt, Homo sapiens
  misc_RNA (1)...(19): siRNA sense strand
aggacuacguggacauugu

SEQ ID NO: 39034 - RNA, 19 nt, Homo sapiens
  misc_RNA (1)...(19): siRNA sense strand
ggaaagaguuugcuggaaa

SEQ ID NO: 39035 - RNA, 19 nt, Homo sapiens
  misc_RNA (1)...(19): siRNA sense strand
gaaaugggauguuaaacgu

SEQ ID NO: 39036 - RNA, 19 nt, Homo sapiens
  misc_RNA (1)...(19): siRNA sense strand
gaaaugaugugguugaaaa

SEQ ID NO: 39037 - RNA, 19 nt, Homo sapiens
  misc_RNA (1)...(19): siRNA sense strand
ccaaagaaauggaugacuu

SEQ ID NO: 39038 - RNA, 19 nt, Homo sapiens
  misc_RNA (1)...(19): siRNA sense strand
agaaauggaugacuuccua

SEQ ID NO: 39039 - RNA, 19 nt, Homo sapiens
  misc_RNA (1)...(19): siRNA sense strand
aaauuaaacucccgaagaa

SEQ ID NO: 39040 - RNA, 19 nt, Homo sapiens
  misc_RNA (1)...(19): siRNA sense strand
gacagaauauucaaaguca

SEQ ID NO: 39041 - RNA, 19 nt, Homo sapiens
  misc_RNA (1)...(19): siRNA sense strand
gcaaugaccaugagaucuu

SEQ ID NO: 39042 - RNA, 19 nt, Homo sapiens
  misc_RNA (1)...(19): siRNA sense strand
gaagagggguacuuucauu

SEQ ID NO: 39043 - RNA, 19 nt, Homo sapiens
  misc_RNA (1)...(19): siRNA sense strand
gaaaaugacgguuauaaga

SEQ ID NO: 39044 - RNA, 19 nt, Homo sapiens
  misc_RNA (1)...(19): siRNA sense strand
uuaaucaacuacugucuga

SEQ ID NO: 39045 - RNA, 19 nt, Homo sapiens
  misc_RNA (1)...(19): siRNA sense strand
gggaaacucuuguguagac

SEQ ID NO: 39046 - RNA, 19 nt, Homo sapiens
  misc_RNA (1)...(19): siRNA sense strand
uagcagaucuacggaaaga

SEQ ID NO: 39047 - RNA, 19 nt, Homo sapiens
  misc_RNA (1)...(19): siRNA sense strand
gaaagaguuugcuggaaaa

SEQ ID NO: 39048 - RNA, 19 nt, Homo sapiens
  misc_RNA (1)...(19): siRNA sense strand
gaugggaaacucuugugua

SEQ ID NO: 39049 - RNA, 19 nt, Homo sapiens
  misc_RNA (1)...(19): siRNA sense strand
gaccauuuauuucuuugga

SEQ ID NO: 39050 - RNA, 19 nt, Homo sapiens
  misc_RNA (1)...(19): siRNA sense strand
gaaaauggcuugguagcau

SEQ ID NO: 39051 - RNA, 19 nt, Homo sapiens
  misc_RNA (1)...(19): siRNA sense strand
gcagaaaauuaccaaagaa

SEQ ID NO: 39052 - RNA, 19 nt, Homo sapiens
  misc_RNA (1)...(19): siRNA sense strand
gggaaaugaugugguugaa

SEQ ID NO: 39053 - RNA, 19 nt, Homo sapiens
  misc_RNA (1)...(19): siRNA sense strand
caaagaaauggaugacuuc

SEQ ID NO: 39054 - RNA, 19 nt, Homo sapiens
  misc_RNA (1)...(19): siRNA sense strand
gagcaacugggaaaugaug

SEQ ID NO: 39055 - RNA, 19 nt, Homo sapiens
  misc_RNA (1)...(19): siRNA sense strand
gaggccagaucagcuuuga

SEQ ID NO: 39056 - RNA, 19 nt, Homo sapiens
  misc_RNA (1)...(19): siRNA sense strand
gcagaucuacggaaagagu

SEQ ID NO: 39057 - RNA, 19 nt, Homo sapiens
  misc_RNA (1)...(19): siRNA sense strand
ggaaaugaugugguugaaa

SEQ ID NO: 39058 - RNA, 19 nt, Homo sapiens
  misc_RNA (1)...(19): siRNA sense strand
gugaggcccuaauccaaga

SEQ ID NO: 39059 - RNA, 19 nt, Homo sapiens
  misc_RNA (1)...(19): siRNA sense strand
aagaagaacgcauugaguu

SEQ ID NO: 39060 - RNA, 19 nt, Homo sapiens
  misc_RNA (1)...(19): siRNA sense strand
guagacagaauauucaaag

SEQ ID NO: 39061 - RNA, 19 nt, Homo sapiens
  misc_RNA (1)...(19): siRNA sense strand
auggaugacuuccuacaaa

SEQ ID NO: 39062 - RNA, 19 nt, Homo sapiens
  misc_RNA (1)...(19): siRNA sense strand
accaugagaucuucacaga

SEQ ID NO: 39063 - RNA, 19 nt, Homo sapiens
  misc_RNA (1)...(19): siRNA sense strand
caagaagaacgcauugagu

SEQ ID NO: 39064 - RNA, 19 nt, Homo sapiens
  misc_RNA (1)...(19): siRNA sense strand
auacaaagaugggaaacuc

SEQ ID NO: 39065 - RNA, 19 nt, Homo sapiens
  misc_RNA (1)...(19): siRNA sense strand
uuugaugucuuuccugaug

SEQ ID NO: 39066 - RNA, 19 nt, Homo sapiens
  misc_RNA (1)...(19): siRNA sense strand
aggagcaacugggaaauga

SEQ ID NO: 39067 - RNA, 19 nt, Homo sapiens
  misc_RNA (1)...(19): siRNA sense strand
ggcagaaaauuaccaaaga

SEQ ID NO: 39068 - RNA, 19 nt, Homo sapiens
  misc_RNA (1)...(19): siRNA sense strand
aaacucuuguguagacaga

SEQ ID NO: 39069 - RNA, 19 nt, Homo sapiens
  misc_RNA (1)...(19): siRNA sense strand
gaucaaaaucggaguggua

SEQ ID NO: 39070 - RNA, 19 nt, Homo sapiens
  misc_RNA (1)...(19): siRNA sense strand
caaugaccaugagaucuuc

SEQ ID NO: 39071 - RNA, 19 nt, Homo sapiens
  misc_RNA (1)...(19): siRNA sense strand
cggaaagaguuugcuggaa

SEQ ID NO: 39072 - RNA, 19 nt, Homo sapiens
  misc_RNA (1)...(19): siRNA sense strand
gaagcugcagccaagaaga

SEQ ID NO: 39073 - RNA, 19 nt, Homo sapiens
  misc_RNA (1)...(19): siRNA sense strand
gcggaucggacuuugagaa

SEQ ID NO: 39074 - RNA, 19 nt, Homo sapiens
  misc_RNA (1)...(19): siRNA sense strand
guaggcggaucggacuuug

SEQ ID NO: 39075 - RNA, 19 nt, Homo sapiens
  misc_RNA (1)...(19): siRNA sense strand
acgguuauaagaccauuua

SEQ ID NO: 39076 - RNA, 19 nt, Homo sapiens
  misc_RNA (1)...(19): siRNA sense strand
ccugauggaugggacaaga

SEQ ID NO: 39077 - RNA, 19 nt, Homo sapiens
  misc_RNA (1)...(19): siRNA sense strand
auuccgaaaugggauguua

SEQ ID NO: 39078 - RNA, 19 nt, Homo sapiens
  misc_RNA (1)...(19): siRNA sense strand
ccaagaagaacgcauugag

SEQ ID NO: 39079 - RNA, 19 nt, Homo sapiens
  misc_RNA (1)...(19): siRNA sense strand
acugggaaaugaugugguu

SEQ ID NO: 39080 - RNA, 19 nt, Homo sapiens
  misc_RNA (1)...(19): siRNA sense strand
aaaauggcuugguagcaua

SEQ ID NO: 39081 - RNA, 19 nt, Homo sapiens
  misc_RNA (1)...(19): siRNA sense strand
cgaaaugggauguuaaacg

SEQ ID NO: 39082 - RNA, 19 nt, Homo sapiens
  misc_RNA (1)...(19): siRNA sense strand
ggaaacucuuguguagaca

SEQ ID NO: 39083 - RNA, 19 nt, Homo sapiens
  misc_RNA (1)...(19): siRNA sense strand
aaauugaggcagaagauca

SEQ ID NO: 39084 - RNA, 19 nt, Homo sapiens
  misc_RNA (1)...(19): siRNA sense strand
gaaagugcaggagcaacug

SEQ ID NO: 39085 - RNA, 19 nt, Homo sapiens
  misc_RNA (1)...(19): siRNA sense strand
cagaauauucaaagucauc

SEQ ID NO: 39086 - RNA, 19 nt, Homo sapiens
  misc_RNA (1)...(19): siRNA sense strand
augggaaacucuuguguag

SEQ ID NO: 39087 - RNA, 19 nt, Homo sapiens
  misc_RNA (1)...(19): siRNA sense strand
cagccaagaagaacgcauu

SEQ ID NO: 39088 - RNA, 19 nt, Homo sapiens
  misc_RNA (1)...(19): siRNA sense strand
gaagaagcugcagccaaga

SEQ ID NO: 39089 - RNA, 19 nt, Homo sapiens
  misc_RNA (1)...(19): siRNA sense strand
gguaggcggaucggacuuu

SEQ ID NO: 39090 - RNA, 19 nt, Homo sapiens
  misc_RNA (1)...(19): siRNA sense strand
agacagaauauucaaaguc

SEQ ID NO: 39091 - RNA, 19 nt, Homo sapiens
  misc_RNA (1)...(19): siRNA sense strand
gagcuacauugcgaaaauu

SEQ ID NO: 39092 - RNA, 19 nt, Homo sapiens
  misc_RNA (1)...(19): siRNA sense strand
cggaucggacuuugagaaa

SEQ ID NO: 39093 - RNA, 19 nt, Homo sapiens
  misc_RNA (1)...(19): siRNA sense strand
gcaacugggaaaugaugug

SEQ ID NO: 39094 - RNA, 19 nt, Homo sapiens
  misc_RNA (1)...(19): siRNA sense strand
gggugaggcccuaauccaa

SEQ ID NO: 39095 - RNA, 19 nt, Homo sapiens
  misc_RNA (1)...(19): siRNA sense strand
cuugguagcauacaaagau

SEQ ID NO: 39096 - RNA, 19 nt, Homo sapiens
  misc_RNA (1)...(19): siRNA sense strand
aaaauuaaacucccgaaga

SEQ ID NO: 39097 - RNA, 19 nt, Homo sapiens
  misc_RNA (1)...(19): siRNA sense strand
ccagaaccaugggcuacuc

SEQ ID NO: 39098 - RNA, 19 nt, Homo sapiens
  misc_RNA (1)...(19): siRNA sense strand
ggaaaaugacgguuauaag

SEQ ID NO: 39099 - RNA, 19 nt, Homo sapiens
  misc_RNA (1)...(19): siRNA sense strand
uuaaacguguccccuauug

SEQ ID NO: 39100 - RNA, 19 nt, Homo sapiens
  misc_RNA (1)...(19): siRNA sense strand
auuaaacucccgaagaaga

SEQ ID NO: 39101 - RNA, 19 nt, Homo sapiens
  misc_RNA (1)...(19): siRNA sense strand
gaggacacgcgcaggaucu

SEQ ID NO: 39102 - RNA, 19 nt, Homo sapiens
  misc_RNA (1)...(19): siRNA sense strand
gaucuacggaaagaguuug

SEQ ID NO: 39103 - RNA, 19 nt, Homo sapiens
  misc_RNA (1)...(19): siRNA sense strand
aagcugcagccaagaagaa

SEQ ID NO: 39104 - RNA, 19 nt, Homo sapiens
  misc_RNA (1)...(19): siRNA sense strand
ucaacuacugucugagcua

SEQ ID NO: 39105 - RNA, 19 nt, Homo sapiens
  misc_RNA (1)...(19): siRNA sense strand
gcgcaggaucugugaacug

SEQ ID NO: 39106 - RNA, 19 nt, Homo sapiens
  misc_RNA (1)...(19): siRNA sense strand
gaaauguccaccacuguuu

SEQ ID NO: 39107 - RNA, 19 nt, Homo sapiens
  misc_RNA (1)...(19): siRNA sense strand
uuacaucacuggaaucuuc

SEQ ID NO: 39108 - RNA, 19 nt, Homo sapiens
  misc_RNA (1)...(19): siRNA sense strand
gcaauggacacgcaacuga

SEQ ID NO: 39109 - RNA, 19 nt, Homo sapiens
  misc_RNA (1)...(19): siRNA sense strand
ggaaauguccaccacuguu

SEQ ID NO: 39110 - RNA, 19 nt, Homo sapiens
  misc_RNA (1)...(19): siRNA sense strand
ucucagcggugucaucuau

SEQ ID NO: 39111 - RNA, 19 nt, Homo sapiens
  misc_RNA (1)...(19): siRNA sense strand
acgaauggcugcagucugu

SEQ ID NO: 39112 - RNA, 19 nt, Homo sapiens
  misc_RNA (1)...(19): siRNA sense strand
ccaccacuguuucucauca

SEQ ID NO: 39113 - RNA, 19 nt, Homo sapiens
  misc_RNA (1)...(19): siRNA sense strand
ucgaucaucuucagcauuc

SEQ ID NO: 39114 - RNA, 19 nt, Homo sapiens
  misc_RNA (1)...(19): siRNA sense strand
caucaucaccaaacgaaug

SEQ ID NO: 39115 - RNA, 19 nt, Homo sapiens
  misc_RNA (1)...(19): siRNA sense strand
ggauuacuccuacgguuuc

SEQ ID NO: 39116 - RNA, 19 nt, Homo sapiens
  misc_RNA (1)...(19): siRNA sense strand
uaugugaucuugcggaaac

SEQ ID NO: 39117 - RNA, 19 nt, Homo sapiens
  misc_RNA (1)...(19): siRNA sense strand
ugucaucuaugugaucuug

SEQ ID NO: 39118 - RNA, 19 nt, Homo sapiens
  misc_RNA (1)...(19): siRNA sense strand
ucagcggugucaucuaugu

SEQ ID NO: 39119 - RNA, 19 nt, Homo sapiens
  misc_RNA (1)...(19): siRNA sense strand
gcuggucugugcgugauga

SEQ ID NO: 39120 - RNA, 19 nt, Homo sapiens
  misc_RNA (1)...(19): siRNA sense strand
ccaccaugauccugucgau

SEQ ID NO: 39121 - RNA, 19 nt, Homo sapiens
  misc_RNA (1)...(19): siRNA sense strand
ucaacucggauuacuccua

SEQ ID NO: 39122 - RNA, 19 nt, Homo sapiens
  misc_RNA (1)...(19): siRNA sense strand
cggauuacuccuacgguuu

SEQ ID NO: 39123 - RNA, 19 nt, Homo sapiens
  misc_RNA (1)...(19): siRNA sense strand
ucagcauucugucucuguu

SEQ ID NO: 39124 - RNA, 19 nt, Homo sapiens
  misc_RNA (1)...(19): siRNA sense strand
caucucaacucggauuacu

SEQ ID NO: 39125 - RNA, 19 nt, Homo sapiens
  misc_RNA (1)...(19): siRNA sense strand
ccacgaucgucagccaaug

SEQ ID NO: 39126 - RNA, 19 nt, Homo sapiens
  misc_RNA (1)...(19): siRNA sense strand
caauggaucgugggcaaug

SEQ ID NO: 39127 - RNA, 19 nt, Homo sapiens
  misc_RNA (1)...(19): siRNA sense strand
ggugucaucuaugugaucu

SEQ ID NO: 39128 - RNA, 19 nt, Homo sapiens
  misc_RNA (1)...(19): siRNA sense strand
guucuucugccaacucuuc

SEQ ID NO: 39129 - RNA, 19 nt, Homo sapiens
  misc_RNA (1)...(19): siRNA sense strand
caauggacacgcaacugau

SEQ ID NO: 39130 - RNA, 19 nt, Homo sapiens
  misc_RNA (1)...(19): siRNA sense strand
gaucaucuucagcauucug

SEQ ID NO: 39131 - RNA, 19 nt, Homo sapiens
  misc_RNA (1)...(19): siRNA sense strand
gaaauguccaccacuguuu

SEQ ID NO: 39132 - RNA, 19 nt, Homo sapiens
  misc_RNA (1)...(19): siRNA sense strand
uuacaucacuggaaucuuc

SEQ ID NO: 39133 - RNA, 19 nt, Homo sapiens
  misc_RNA (1)...(19): siRNA sense strand
gcaauggacacgcaacuga

SEQ ID NO: 39134 - RNA, 19 nt, Homo sapiens
  misc_RNA (1)...(19): siRNA sense strand
ggaaauguccaccacuguu

SEQ ID NO: 39135 - RNA, 19 nt, Homo sapiens
  misc_RNA (1)...(19): siRNA sense strand
ucucagcggugucaucuau

SEQ ID NO: 39136 - RNA, 19 nt, Homo sapiens
  misc_RNA (1)...(19): siRNA sense strand
acgaauggcugcagucugu

SEQ ID NO: 39137 - RNA, 19 nt, Homo sapiens
  misc_RNA (1)...(19): siRNA sense strand
ccaccacuguuucucauca

SEQ ID NO: 39138 - RNA, 19 nt, Homo sapiens
  misc_RNA (1)...(19): siRNA sense strand
ucgaucaucuucagcauuc

SEQ ID NO: 39139 - RNA, 19 nt, Homo sapiens
  misc_RNA (1)...(19): siRNA sense strand
caucaucaccaaacgaaug

SEQ ID NO: 39140 - RNA, 19 nt, Homo sapiens
  misc_RNA (1)...(19): siRNA sense strand
ggauuacuccuacgguuuc

SEQ ID NO: 39141 - RNA, 19 nt, Homo sapiens
  misc_RNA (1)...(19): siRNA sense strand
uaugugaucuugcggaaac

SEQ ID NO: 39142 - RNA, 19 nt, Homo sapiens
  misc_RNA (1)...(19): siRNA sense strand
ugucaucuaugugaucuug

SEQ ID NO: 39143 - RNA, 19 nt, Homo sapiens
  misc_RNA (1)...(19): siRNA sense strand
ucagcggugucaucuaugu

SEQ ID NO: 39144 - RNA, 19 nt, Homo sapiens
  misc_RNA (1)...(19): siRNA sense strand
gcuggucugugcgugauga

SEQ ID NO: 39145 - RNA, 19 nt, Homo sapiens
  misc_RNA (1)...(19): siRNA sense strand
ccaccaugauccugucgau

SEQ ID NO: 39146 - RNA, 19 nt, Homo sapiens
  misc_RNA (1)...(19): siRNA sense strand
ucaacucggauuacuccua

SEQ ID NO: 39147 - RNA, 19 nt, Homo sapiens
  misc_RNA (1)...(19): siRNA sense strand
cggauuacuccuacgguuu

SEQ ID NO: 39148 - RNA, 19 nt, Homo sapiens
  misc_RNA (1)...(19): siRNA sense strand
ucagcauucugucucuguu

SEQ ID NO: 39149 - RNA, 19 nt, Homo sapiens
  misc_RNA (1)...(19): siRNA sense strand
caucucaacucggauuacu

SEQ ID NO: 39150 - RNA, 19 nt, Homo sapiens
  misc_RNA (1)...(19): siRNA sense strand
ccacgaucgucagccaaug

SEQ ID NO: 39151 - RNA, 19 nt, Homo sapiens
  misc_RNA (1)...(19): siRNA sense strand
caauggaucgugggcaaug

SEQ ID NO: 39152 - RNA, 19 nt, Homo sapiens
  misc_RNA (1)...(19): siRNA sense strand
ggugucaucuaugugaucu

SEQ ID NO: 39153 - RNA, 19 nt, Homo sapiens
  misc_RNA (1)...(19): siRNA sense strand
guucuucugccaacucuuc

SEQ ID NO: 39154 - RNA, 19 nt, Homo sapiens
  misc_RNA (1)...(19): siRNA sense strand
caauggacacgcaacugau

SEQ ID NO: 39155 - RNA, 19 nt, Homo sapiens
  misc_RNA (1)...(19): siRNA sense strand
gaucaucuucagcauucug

SEQ ID NO: 39156 - RNA, 19 nt, Homo sapiens
  misc_RNA (1)...(19): siRNA sense strand
gaaauguccaccacuguuu

SEQ ID NO: 39157 - RNA, 19 nt, Homo sapiens
  misc_RNA (1)...(19): siRNA sense strand
uuacaucacuggaaucuuc

SEQ ID NO: 39158 - RNA, 19 nt, Homo sapiens
  misc_RNA (1)...(19): siRNA sense strand
gcaauggacacgcaacuga

SEQ ID NO: 39159 - RNA, 19 nt, Homo sapiens
  misc_RNA (1)...(19): siRNA sense strand
ggaaauguccaccacuguu

SEQ ID NO: 39160 - RNA, 19 nt, Homo sapiens
  misc_RNA (1)...(19): siRNA sense strand
ucucagcggugucaucuau

SEQ ID NO: 39161 - RNA, 19 nt, Homo sapiens
  misc_RNA (1)...(19): siRNA sense strand
acgaauggcugcagucugu

SEQ ID NO: 39162 - RNA, 19 nt, Homo sapiens
  misc_RNA (1)...(19): siRNA sense strand
ccaccacuguuucucauca

SEQ ID NO: 39163 - RNA, 19 nt, Homo sapiens
  misc_RNA (1)...(19): siRNA sense strand
ucgaucaucuucagcauuc

SEQ ID NO: 39164 - RNA, 19 nt, Homo sapiens
  misc_RNA (1)...(19): siRNA sense strand
caucaucaccaaacgaaug

SEQ ID NO: 39165 - RNA, 19 nt, Homo sapiens
  misc_RNA (1)...(19): siRNA sense strand
ggauuacuccuacgguuuc

SEQ ID NO: 39166 - RNA, 19 nt, Homo sapiens
  misc_RNA (1)...(19): siRNA sense strand
uaugugaucuugcggaaac

SEQ ID NO: 39167 - RNA, 19 nt, Homo sapiens
  misc_RNA (1)...(19): siRNA sense strand
ugucaucuaugugaucuug

SEQ ID NO: 39168 - RNA, 19 nt, Homo sapiens
  misc_RNA (1)...(19): siRNA sense strand
ucagcggugucaucuaugu

SEQ ID NO: 39169 - RNA, 19 nt, Homo sapiens
  misc_RNA (1)...(19): siRNA sense strand
gcuggucugugcgugauga

SEQ ID NO: 39170 - RNA, 19 nt, Homo sapiens
  misc_RNA (1)...(19): siRNA sense strand
ccaccaugauccugucgau

SEQ ID NO: 39171 - RNA, 19 nt, Homo sapiens
  misc_RNA (1)...(19): siRNA sense strand
ucaacucggauuacuccua

SEQ ID NO: 39172 - RNA, 19 nt, Homo sapiens
  misc_RNA (1)...(19): siRNA sense strand
cggauuacuccuacgguuu

SEQ ID NO: 39173 - RNA, 19 nt, Homo sapiens
  misc_RNA (1)...(19): siRNA sense strand
ucagcauucugucucuguu

SEQ ID NO: 39174 - RNA, 19 nt, Homo sapiens
  misc_RNA (1)...(19): siRNA sense strand
caucucaacucggauuacu

SEQ ID NO: 39175 - RNA, 19 nt, Homo sapiens
  misc_RNA (1)...(19): siRNA sense strand
ccacgaucgucagccaaug

SEQ ID NO: 39176 - RNA, 19 nt, Homo sapiens
  misc_RNA (1)...(19): siRNA sense strand
caauggaucgugggcaaug

SEQ ID NO: 39177 - RNA, 19 nt, Homo sapiens
  misc_RNA (1)...(19): siRNA sense strand
ggugucaucuaugugaucu

SEQ ID NO: 39178 - RNA, 19 nt, Homo sapiens
  misc_RNA (1)...(19): siRNA sense strand
guucuucugccaacucuuc

SEQ ID NO: 39179 - RNA, 19 nt, Homo sapiens
  misc_RNA (1)...(19): siRNA sense strand
caauggacacgcaacugau

SEQ ID NO: 39180 - RNA, 19 nt, Homo sapiens
  misc_RNA (1)...(19): siRNA sense strand
gaucaucuucagcauucug

SEQ ID NO: 39181 - RNA, 19 nt, Homo sapiens
  misc_RNA (1)...(19): siRNA sense strand
gaagaagcccugcuauuua

SEQ ID NO: 39182 - RNA, 19 nt, Homo sapiens
  misc_RNA (1)...(19): siRNA sense strand
gaacaggagucacaaaugu

SEQ ID NO: 39183 - RNA, 19 nt, Homo sapiens
  misc_RNA (1)...(19): siRNA sense strand
ggaaucaucuggaaagaau

SEQ ID NO: 39184 - RNA, 19 nt, Homo sapiens
  misc_RNA (1)...(19): siRNA sense strand
caagauggcucucauguca

SEQ ID NO: 39185 - RNA, 19 nt, Homo sapiens
  misc_RNA (1)...(19): siRNA sense strand
caaaggaaguuuaugaaug

SEQ ID NO: 39186 - RNA, 19 nt, Homo sapiens
  misc_RNA (1)...(19): siRNA sense strand
gaacggcugcugauaauuu

SEQ ID NO: 39187 - RNA, 19 nt, Homo sapiens
  misc_RNA (1)...(19): siRNA sense strand
gcgaaugguuucaagauaa

SEQ ID NO: 39188 - RNA, 19 nt, Homo sapiens
  misc_RNA (1)...(19): siRNA sense strand
aaacagaaaugcaaaggaa

SEQ ID NO: 39189 - RNA, 19 nt, Homo sapiens
  misc_RNA (1)...(19): siRNA sense strand
gaaaugcaaaggaaguuua

SEQ ID NO: 39190 - RNA, 19 nt, Homo sapiens
  misc_RNA (1)...(19): siRNA sense strand
gcagaccacucuuucacua

SEQ ID NO: 39191 - RNA, 19 nt, Homo sapiens
  misc_RNA (1)...(19): siRNA sense strand
ccaauuauguuaacagaga

SEQ ID NO: 39192 - RNA, 19 nt, Homo sapiens
  misc_RNA (1)...(19): siRNA sense strand
cuaaagacuuggaacgaua

SEQ ID NO: 39193 - RNA, 19 nt, Homo sapiens
  misc_RNA (1)...(19): siRNA sense strand
aagaagcccugcuauuuaa

SEQ ID NO: 39194 - RNA, 19 nt, Homo sapiens
  misc_RNA (1)...(19): siRNA sense strand
ggaaucuacucguuuguau

SEQ ID NO: 39195 - RNA, 19 nt, Homo sapiens
  misc_RNA (1)...(19): siRNA sense strand
caagaacggcugcugauaa

SEQ ID NO: 39196 - RNA, 19 nt, Homo sapiens
  misc_RNA (1)...(19): siRNA sense strand
cauaaacagucgaccagua

SEQ ID NO: 39197 - RNA, 19 nt, Homo sapiens
  misc_RNA (1)...(19): siRNA sense strand
gaaucuaccuguaagaaag

SEQ ID NO: 39198 - RNA, 19 nt, Homo sapiens
  misc_RNA (1)...(19): siRNA sense strand
ucagaaaccuucacaucuu

SEQ ID NO: 39199 - RNA, 19 nt, Homo sapiens
  misc_RNA (1)...(19): siRNA sense strand
ggaugaaccuugcuugauc

SEQ ID NO: 39200 - RNA, 19 nt, Homo sapiens
  misc_RNA (1)...(19): siRNA sense strand
gacagcagaugaccaaaga

SEQ ID NO: 39201 - RNA, 19 nt, Homo sapiens
  misc_RNA (1)...(19): siRNA sense strand
ggagaacuauggauuugau

SEQ ID NO: 39202 - RNA, 19 nt, Homo sapiens
  misc_RNA (1)...(19): siRNA sense strand
uagaaggaauggcuaauug

SEQ ID NO: 39203 - RNA, 19 nt, Homo sapiens
  misc_RNA (1)...(19): siRNA sense strand
ugacaucguucuuaguaaa

SEQ ID NO: 39204 - RNA, 19 nt, Homo sapiens
  misc_RNA (1)...(19): siRNA sense strand
aaaccugacuuaaggauug

SEQ ID NO: 39205 - RNA, 19 nt, Homo sapiens
  misc_RNA (1)...(19): siRNA sense strand
cuaauugucucccauucua

SEQ ID NO: 39206 - RNA, 19 nt, Homo sapiens
  misc_RNA (1)...(19): siRNA sense strand
gaagaacuguggaagacau

SEQ ID NO: 39207 - RNA, 19 nt, Homo sapiens
  misc_RNA (1)...(19): siRNA sense strand
ccacaagcguagauguuaa

SEQ ID NO: 39208 - RNA, 19 nt, Homo sapiens
  misc_RNA (1)...(19): siRNA sense strand
gcaaucgaguaaucaagaa

SEQ ID NO: 39209 - RNA, 19 nt, Homo sapiens
  misc_RNA (1)...(19): siRNA sense strand
ggaaauuucugcagaugag

SEQ ID NO: 39210 - RNA, 19 nt, Homo sapiens
  misc_RNA (1)...(19): siRNA sense strand
gaagagagccauugaacag

SEQ ID NO: 39211 - RNA, 19 nt, Homo sapiens
  misc_RNA (1)...(19): siRNA sense strand
cagcugauguugauguaaa

SEQ ID NO: 39212 - RNA, 19 nt, Homo sapiens
  misc_RNA (1)...(19): siRNA sense strand
ggaaguuuaugaauguaga

SEQ ID NO: 39213 - RNA, 19 nt, Homo sapiens
  misc_RNA (1)...(19): siRNA sense strand
cgaaugguuucaagauaaa

SEQ ID NO: 39214 - RNA, 19 nt, Homo sapiens
  misc_RNA (1)...(19): siRNA sense strand
agaagaagcccugcuauuu

SEQ ID NO: 39215 - RNA, 19 nt, Homo sapiens
  misc_RNA (1)...(19): siRNA sense strand
gcaauaaagaccauauaga

SEQ ID NO: 39216 - RNA, 19 nt, Homo sapiens
  misc_RNA (1)...(19): siRNA sense strand
gaagagaaggcuacuaaag

SEQ ID NO: 39217 - RNA, 19 nt, Homo sapiens
  misc_RNA (1)...(19): siRNA sense strand
gaaauuaaagaguguguuc

SEQ ID NO: 39218 - RNA, 19 nt, Homo sapiens
  misc_RNA (1)...(19): siRNA sense strand
gaccaaagauacaguggau

SEQ ID NO: 39219 - RNA, 19 nt, Homo sapiens
  misc_RNA (1)...(19): siRNA sense strand
gauccacaaucucagguuu

SEQ ID NO: 39220 - RNA, 19 nt, Homo sapiens
  misc_RNA (1)...(19): siRNA sense strand
gagcuuugguauccuuaaa

SEQ ID NO: 39221 - RNA, 19 nt, Homo sapiens
  misc_RNA (1)...(19): siRNA sense strand
gaaggcuacuaaagacuug

SEQ ID NO: 39222 - RNA, 19 nt, Homo sapiens
  misc_RNA (1)...(19): siRNA sense strand
aaaggaaucuacucguuug

SEQ ID NO: 39223 - RNA, 19 nt, Homo sapiens
  misc_RNA (1)...(19): siRNA sense strand
cgacaucauuacaaucuga

SEQ ID NO: 39224 - RNA, 19 nt, Homo sapiens
  misc_RNA (1)...(19): siRNA sense strand
gaugacgacuuguuaugga

SEQ ID NO: 39225 - RNA, 19 nt, Homo sapiens
  misc_RNA (1)...(19): siRNA sense strand
cuaaaggaaucuacucguu

SEQ ID NO: 39226 - RNA, 19 nt, Homo sapiens
  misc_RNA (1)...(19): siRNA sense strand
aaauugaggugcgagauaa

SEQ ID NO: 39227 - RNA, 19 nt, Homo sapiens
  misc_RNA (1)...(19): siRNA sense strand
guaccacucugaagaaucu

SEQ ID NO: 39228 - RNA, 19 nt, Homo sapiens
  misc_RNA (1)...(19): siRNA sense strand
uaauggcaaugaaguacua

SEQ ID NO: 39229 - RNA, 19 nt, Homo sapiens
  misc_RNA (1)...(19): siRNA sense strand
ugaaaugccuaaaggaauc

SEQ ID NO: 39230 - RNA, 19 nt, Homo sapiens
  misc_RNA (1)...(19): siRNA sense strand
uaaccuaucuuccagaaac

SEQ ID NO: 39231 - RNA, 19 nt, Homo sapiens
  misc_RNA (1)...(19): siRNA sense strand
gcaaaggaaguuuaugaau

SEQ ID NO: 39232 - RNA, 19 nt, Homo sapiens
  misc_RNA (1)...(19): siRNA sense strand
gcugacaucguucuuagua

SEQ ID NO: 39233 - RNA, 19 nt, Homo sapiens
  misc_RNA (1)...(19): siRNA sense strand
gaaaaucgauguuccuaca

SEQ ID NO: 39234 - RNA, 19 nt, Homo sapiens
  misc_RNA (1)...(19): siRNA sense strand
gaacgauacaauagucaaa

SEQ ID NO: 39235 - RNA, 19 nt, Homo sapiens
  misc_RNA (1)...(19): siRNA sense strand
gaggacauccaagacauua

SEQ ID NO: 39236 - RNA, 19 nt, Homo sapiens
  misc_RNA (1)...(19): siRNA sense strand
cagcagaugaccaaagaua

SEQ ID NO: 39237 - RNA, 19 nt, Homo sapiens
  misc_RNA (1)...(19): siRNA sense strand
cagaaaccuucacaucuug

SEQ ID NO: 39238 - RNA, 19 nt, Homo sapiens
  misc_RNA (1)...(19): siRNA sense strand
gcaccaguuuggaaaugaa

SEQ ID NO: 39239 - RNA, 19 nt, Homo sapiens
  misc_RNA (1)...(19): siRNA sense strand
ggaaaagccaauuauguua

SEQ ID NO: 39240 - RNA, 19 nt, Homo sapiens
  misc_RNA (1)...(19): siRNA sense strand
gacauugagugaagaggaa

SEQ ID NO: 39241 - RNA, 19 nt, Homo sapiens
  misc_RNA (1)...(19): siRNA sense strand
uaaaggaaucuacucguuu

SEQ ID NO: 39242 - RNA, 19 nt, Homo sapiens
  misc_RNA (1)...(19): siRNA sense strand
gaacaauauggaauccuuu

SEQ ID NO: 39243 - RNA, 19 nt, Homo sapiens
  misc_RNA (1)...(19): siRNA sense strand
ggauugucuuuguacauaa

SEQ ID NO: 39244 - RNA, 19 nt, Homo sapiens
  misc_RNA (1)...(19): siRNA sense strand
gaauauugaaccugugaaa

SEQ ID NO: 39245 - RNA, 19 nt, Homo sapiens
  misc_RNA (1)...(19): siRNA sense strand
acaauuacccauguacuua

SEQ ID NO: 39246 - RNA, 19 nt, Homo sapiens
  misc_RNA (1)...(19): siRNA sense strand
guucucagaucaucacuuc

SEQ ID NO: 39247 - RNA, 19 nt, Homo sapiens
  misc_RNA (1)...(19): siRNA sense strand
ggaugcaacacuacaaauu

SEQ ID NO: 39248 - RNA, 19 nt, Homo sapiens
  misc_RNA (1)...(19): siRNA sense strand
gaugcaacacuacaaauug

SEQ ID NO: 39249 - RNA, 19 nt, Homo sapiens
  misc_RNA (1)...(19): siRNA sense strand
gaaugaagcaccaguuugg

SEQ ID NO: 39250 - RNA, 19 nt, Homo sapiens
  misc_RNA (1)...(19): siRNA sense strand
ggaagacauugagugaaga

SEQ ID NO: 39251 - RNA, 19 nt, Homo sapiens
  misc_RNA (1)...(19): siRNA sense strand
ccugaugcauggcuaauga

SEQ ID NO: 39252 - RNA, 19 nt, Homo sapiens
  misc_RNA (1)...(19): siRNA sense strand
ugaacaauauggaauccuu

SEQ ID NO: 39253 - RNA, 19 nt, Homo sapiens
  misc_RNA (1)...(19): siRNA sense strand
gaauguagaccucgcaaag

SEQ ID NO: 39254 - RNA, 19 nt, Homo sapiens
  misc_RNA (1)...(19): siRNA sense strand
aagcguagauguuaaacug

SEQ ID NO: 39255 - RNA, 19 nt, Homo sapiens
  misc_RNA (1)...(19): siRNA sense strand
aaaguggaaucaucuggaa

SEQ ID NO: 39256 - RNA, 19 nt, Homo sapiens
  misc_RNA (1)...(19): siRNA sense strand
ccagacaauuacccaugua

SEQ ID NO: 39257 - RNA, 19 nt, Homo sapiens
  misc_RNA (1)...(19): siRNA sense strand
aagaacggcugcugauaau

SEQ ID NO: 39258 - RNA, 19 nt, Homo sapiens
  misc_RNA (1)...(19): siRNA sense strand
uccaaucccugaacaaaug

SEQ ID NO: 39259 - RNA, 19 nt, Homo sapiens
  misc_RNA (1)...(19): siRNA sense strand
aggauugucuuuguacaua

SEQ ID NO: 39260 - RNA, 19 nt, Homo sapiens
  misc_RNA (1)...(19): siRNA sense strand
gaacuguggaagacauuga

SEQ ID NO: 39261 - RNA, 19 nt, Homo sapiens
  misc_RNA (1)...(19): siRNA sense strand
gcaguuauuuggcagaaaa

SEQ ID NO: 39262 - RNA, 19 nt, Homo sapiens
  misc_RNA (1)...(19): siRNA sense strand
ccaaagauacaguggauca

SEQ ID NO: 39263 - RNA, 19 nt, Homo sapiens
  misc_RNA (1)...(19): siRNA sense strand
gcagaugaccaaagauaca

SEQ ID NO: 39264 - RNA, 19 nt, Homo sapiens
  misc_RNA (1)...(19): siRNA sense strand
gagaauauugaaccuguga

SEQ ID NO: 39265 - RNA, 19 nt, Homo sapiens
  misc_RNA (1)...(19): siRNA sense strand
gcagcugacaucguucuua

SEQ ID NO: 39266 - RNA, 19 nt, Homo sapiens
  misc_RNA (1)...(19): siRNA sense strand
uaaagaguguguucauggu

SEQ ID NO: 39267 - RNA, 19 nt, Homo sapiens
  misc_RNA (1)...(19): siRNA sense strand
ggacauccaagacauuauc

SEQ ID NO: 39268 - RNA, 19 nt, Homo sapiens
  misc_RNA (1)...(19): siRNA sense strand
guacagauccccuuuucua

SEQ ID NO: 39269 - RNA, 19 nt, Homo sapiens
  misc_RNA (1)...(19): siRNA sense strand
aagagaaggcuacuaaaga

SEQ ID NO: 39270 - RNA, 19 nt, Homo sapiens
  misc_RNA (1)...(19): siRNA sense strand
gccacaagcguagauguua

SEQ ID NO: 39271 - RNA, 19 nt, Homo sapiens
  misc_RNA (1)...(19): siRNA sense strand
cagcugacaucguucuuag

SEQ ID NO: 39272 - RNA, 19 nt, Homo sapiens
  misc_RNA (1)...(19): siRNA sense strand
cuuaaggauugucuuugua

SEQ ID NO: 39273 - RNA, 19 nt, Homo sapiens
  misc_RNA (1)...(19): siRNA sense strand
ugaaaacucuucggaaauu

SEQ ID NO: 39274 - RNA, 19 nt, Homo sapiens
  misc_RNA (1)...(19): siRNA sense strand
ggcaguggccacauacuuu

SEQ ID NO: 39275 - RNA, 19 nt, Homo sapiens
  misc_RNA (1)...(19): siRNA sense strand
ccaagacauuaucuacaga

SEQ ID NO: 39276 - RNA, 19 nt, Homo sapiens
  misc_RNA (1)...(19): siRNA sense strand
gacaauuacccauguacuu

SEQ ID NO: 39277 - RNA, 19 nt, Homo sapiens
  misc_RNA (1)...(19): siRNA sense strand
ggagaagcagugcgucuau

SEQ ID NO: 39278 - RNA, 19 nt, Homo sapiens
  misc_RNA (1)...(19): siRNA sense strand
gauaccaggaguuucaauu

SEQ ID NO: 39279 - RNA, 19 nt, Homo sapiens
  misc_RNA (1)...(19): siRNA sense strand
gauacaguggaucaacuua

SEQ ID NO: 39280 - RNA, 19 nt, Homo sapiens
  misc_RNA (1)...(19): siRNA sense strand
ugacuuaaggauugucuuu

SEQ ID NO: 39281 - RNA, 19 nt, Homo sapiens
  misc_RNA (1)...(19): siRNA sense strand
uaaugaagcuguucugaua

SEQ ID NO: 39282 - RNA, 19 nt, Homo sapiens
  misc_RNA (1)...(19): siRNA sense strand
gaacucgacugauguuuga

SEQ ID NO: 39283 - RNA, 19 nt, Homo sapiens
  misc_RNA (1)...(19): siRNA sense strand
ggaaaucauuggucaguuu

SEQ ID NO: 39284 - RNA, 19 nt, Homo sapiens
  misc_RNA (1)...(19): siRNA sense strand
ggauguaaauuucgaguuu

SEQ ID NO: 39285 - RNA, 19 nt, Homo sapiens
  misc_RNA (1)...(19): siRNA sense strand
gaagauaccggauguaaau

SEQ ID NO: 39286 - RNA, 19 nt, Homo sapiens
  misc_RNA (1)...(19): siRNA sense strand
gaauaaagcaguuacauca

SEQ ID NO: 39287 - RNA, 19 nt, Homo sapiens
  misc_RNA (1)...(19): siRNA sense strand
ugaaagggcuaaacugauu

SEQ ID NO: 39288 - RNA, 19 nt, Homo sapiens
  misc_RNA (1)...(19): siRNA sense strand
gcacuuccguggauucuga

SEQ ID NO: 39289 - RNA, 19 nt, Homo sapiens
  misc_RNA (1)...(19): siRNA sense strand
gaacagaauuacaggaagu

SEQ ID NO: 39290 - RNA, 19 nt, Homo sapiens
  misc_RNA (1)...(19): siRNA sense strand
ggaaggaguucaacagaca

SEQ ID NO: 39291 - RNA, 19 nt, Homo sapiens
  misc_RNA (1)...(19): siRNA sense strand
gagcggagguggagaagga

SEQ ID NO: 39292 - RNA, 19 nt, Homo sapiens
  misc_RNA (1)...(19): siRNA sense strand
gggcuaaacugauuuccuu

SEQ ID NO: 39293 - RNA, 19 nt, Homo sapiens
  misc_RNA (1)...(19): siRNA sense strand
ggacgucgaugaacugauc

SEQ ID NO: 39294 - RNA, 19 nt, Homo sapiens
  misc_RNA (1)...(19): siRNA sense strand
gaaaucauuggucaguuua

SEQ ID NO: 39295 - RNA, 19 nt, Homo sapiens
  misc_RNA (1)...(19): siRNA sense strand
gcaguuacaucaugaagca

SEQ ID NO: 39296 - RNA, 19 nt, Homo sapiens
  misc_RNA (1)...(19): siRNA sense strand
ggaagucggugaugauugg

SEQ ID NO: 39297 - RNA, 19 nt, Homo sapiens
  misc_RNA (1)...(19): siRNA sense strand
cauaaggaauuucaaagga

SEQ ID NO: 39298 - RNA, 19 nt, Homo sapiens
  misc_RNA (1)...(19): siRNA sense strand
uaaagcaguuacaucauga

SEQ ID NO: 39299 - RNA, 19 nt, Homo sapiens
  misc_RNA (1)...(19): siRNA sense strand
ggucuuacaugcauacugu

SEQ ID NO: 39300 - RNA, 19 nt, Homo sapiens
  misc_RNA (1)...(19): siRNA sense strand
ggaagucaguccaucagau

SEQ ID NO: 39301 - RNA, 19 nt, Homo sapiens
  misc_RNA (1)...(19): siRNA sense strand
gaagucaguccaucagauu

SEQ ID NO: 39302 - RNA, 19 nt, Homo sapiens
  misc_RNA (1)...(19): siRNA sense strand
caauguuacuccagauaaa

SEQ ID NO: 39303 - RNA, 19 nt, Homo sapiens
  misc_RNA (1)...(19): siRNA sense strand
gcugagagcucgaguacag

SEQ ID NO: 39304 - RNA, 19 nt, Homo sapiens
  misc_RNA (1)...(19): siRNA sense strand
gcuuaacucugaaacauca

SEQ ID NO: 39305 - RNA, 19 nt, Homo sapiens
  misc_RNA (1)...(19): siRNA sense strand
caucucagguuucauuuca

SEQ ID NO: 39306 - RNA, 19 nt, Homo sapiens
  misc_RNA (1)...(19): siRNA sense strand
ccacggacgagaaguauaa

SEQ ID NO: 39307 - RNA, 19 nt, Homo sapiens
  misc_RNA (1)...(19): siRNA sense strand
gauguggacugccauucaa

SEQ ID NO: 39308 - RNA, 19 nt, Homo sapiens
  misc_RNA (1)...(19): siRNA sense strand
gauaccggauguaaauuuc

SEQ ID NO: 39309 - RNA, 19 nt, Homo sapiens
  misc_RNA (1)...(19): siRNA sense strand
caagcgagaugaagaaacu

SEQ ID NO: 39310 - RNA, 19 nt, Homo sapiens
  misc_RNA (1)...(19): siRNA sense strand
ugaaugaggucuaccacau

SEQ ID NO: 39311 - RNA, 19 nt, Homo sapiens
  misc_RNA (1)...(19): siRNA sense strand
ggaagauaccggauguaaa

SEQ ID NO: 39312 - RNA, 19 nt, Homo sapiens
  misc_RNA (1)...(19): siRNA sense strand
gguuggaacucgacugaug

SEQ ID NO: 39313 - RNA, 19 nt, Homo sapiens
  misc_RNA (1)...(19): siRNA sense strand
ggauguugaagguaacuua

SEQ ID NO: 39314 - RNA, 19 nt, Homo sapiens
  misc_RNA (1)...(19): siRNA sense strand
ggaacucgacugauguuug

SEQ ID NO: 39315 - RNA, 19 nt, Homo sapiens
  misc_RNA (1)...(19): siRNA sense strand
gaaagggcuaaacugauuu

SEQ ID NO: 39316 - RNA, 19 nt, Homo sapiens
  misc_RNA (1)...(19): siRNA sense strand
cagaauuacaggaaguuua

SEQ ID NO: 39317 - RNA, 19 nt, Homo sapiens
  misc_RNA (1)...(19): siRNA sense strand
ccaggaagauaccggaugu

SEQ ID NO: 39318 - RNA, 19 nt, Homo sapiens
  misc_RNA (1)...(19): siRNA sense strand
gaaaauaucggcucugugu

SEQ ID NO: 39319 - RNA, 19 nt, Homo sapiens
  misc_RNA (1)...(19): siRNA sense strand
ggaauauuaagaaggagua

SEQ ID NO: 39320 - RNA, 19 nt, Homo sapiens
  misc_RNA (1)...(19): siRNA sense strand
gaaggaguaugccaaaaug

SEQ ID NO: 39321 - RNA, 19 nt, Homo sapiens
  misc_RNA (1)...(19): siRNA sense strand
ucaagcagccgaagaugaa

SEQ ID NO: 39322 - RNA, 19 nt, Homo sapiens
  misc_RNA (1)...(19): siRNA sense strand
cgacaccaguauccauuug

SEQ ID NO: 39323 - RNA, 19 nt, Homo sapiens
  misc_RNA (1)...(19): siRNA sense strand
aaauaucggcucuguguuu

SEQ ID NO: 39324 - RNA, 19 nt, Homo sapiens
  misc_RNA (1)...(19): siRNA sense strand
auaaagcaguuacaucaug

SEQ ID NO: 39325 - RNA, 19 nt, Homo sapiens
  misc_RNA (1)...(19): siRNA sense strand
gcuaaggccaucaaaccua

SEQ ID NO: 39326 - RNA, 19 nt, Homo sapiens
  misc_RNA (1)...(19): siRNA sense strand
uaagaaggaguaugccaaa

SEQ ID NO: 39327 - RNA, 19 nt, Homo sapiens
  misc_RNA (1)...(19): siRNA sense strand
aaagauuuguccuggagaa

SEQ ID NO: 39328 - RNA, 19 nt, Homo sapiens
  misc_RNA (1)...(19): siRNA sense strand
gggaacagaauuacaggaa

SEQ ID NO: 39329 - RNA, 19 nt, Homo sapiens
  misc_RNA (1)...(19): siRNA sense strand
auuaaggacuggagaagaa

SEQ ID NO: 39330 - RNA, 19 nt, Homo sapiens
  misc_RNA (1)...(19): siRNA sense strand
ugauaggaauguuugauag

SEQ ID NO: 39331 - RNA, 19 nt, Homo sapiens
  misc_RNA (1)...(19): siRNA sense strand
caguuuaaccugggauuua

SEQ ID NO: 39332 - RNA, 19 nt, Homo sapiens
  misc_RNA (1)...(19): siRNA sense strand
cuaaggccaucaaaccuau

SEQ ID NO: 39333 - RNA, 19 nt, Homo sapiens
  misc_RNA (1)...(19): siRNA sense strand
ucaagaguuugccgaccua

SEQ ID NO: 39334 - RNA, 19 nt, Homo sapiens
  misc_RNA (1)...(19): siRNA sense strand
agccgaagaugaacuaaga

SEQ ID NO: 39335 - RNA, 19 nt, Homo sapiens
  misc_RNA (1)...(19): siRNA sense strand
gaaguuuagggcaaagauu

SEQ ID NO: 39336 - RNA, 19 nt, Homo sapiens
  misc_RNA (1)...(19): siRNA sense strand
gcaggaacauguggacucu

SEQ ID NO: 39337 - RNA, 19 nt, Homo sapiens
  misc_RNA (1)...(19): siRNA sense strand
gcaugcagcggauuuggaa

SEQ ID NO: 39338 - RNA, 19 nt, Homo sapiens
  misc_RNA (1)...(19): siRNA sense strand
uaggaauguuugauaguga

SEQ ID NO: 39339 - RNA, 19 nt, Homo sapiens
  misc_RNA (1)...(19): siRNA sense strand
uuacaucucagguuucauu

SEQ ID NO: 39340 - RNA, 19 nt, Homo sapiens
  misc_RNA (1)...(19): siRNA sense strand
gcaggcauccguguaaguu

SEQ ID NO: 39341 - RNA, 19 nt, Homo sapiens
  misc_RNA (1)...(19): siRNA sense strand
gcaguuauuuuccacacua

SEQ ID NO: 39342 - RNA, 19 nt, Homo sapiens
  misc_RNA (1)...(19): siRNA sense strand
gaucacaaugggaaaauua

SEQ ID NO: 39343 - RNA, 19 nt, Homo sapiens
  misc_RNA (1)...(19): siRNA sense strand
cuaaacgaauaaagcaguu

SEQ ID NO: 39344 - RNA, 19 nt, Homo sapiens
  misc_RNA (1)...(19): siRNA sense strand
gauguugaagguaacuuaa

SEQ ID NO: 39345 - RNA, 19 nt, Homo sapiens
  misc_RNA (1)...(19): siRNA sense strand
gaaugaggucuaccacaug

SEQ ID NO: 39346 - RNA, 19 nt, Homo sapiens
  misc_RNA (1)...(19): siRNA sense strand
uucgaaggcuuaacucuga

SEQ ID NO: 39347 - RNA, 19 nt, Homo sapiens
  misc_RNA (1)...(19): siRNA sense strand
gcucauagcaccucagacu

SEQ ID NO: 39348 - RNA, 19 nt, Homo sapiens
  misc_RNA (1)...(19): siRNA sense strand
agaaagaggcagugaguuc

SEQ ID NO: 39349 - RNA, 19 nt, Homo sapiens
  misc_RNA (1)...(19): siRNA sense strand
ucaauguuacuccagauaa

SEQ ID NO: 39350 - RNA, 19 nt, Homo sapiens
  misc_RNA (1)...(19): siRNA sense strand
ugagcgaugucaccauuuc

SEQ ID NO: 39351 - RNA, 19 nt, Homo sapiens
  misc_RNA (1)...(19): siRNA sense strand
gauguuugcagaaauggaa

SEQ ID NO: 39352 - RNA, 19 nt, Homo sapiens
  misc_RNA (1)...(19): siRNA sense strand
gggcagaagcaguugcaaa

SEQ ID NO: 39353 - RNA, 19 nt, Homo sapiens
  misc_RNA (1)...(19): siRNA sense strand
gguugaaacuuuuggcuuu

SEQ ID NO: 39354 - RNA, 19 nt, Homo sapiens
  misc_RNA (1)...(19): siRNA sense strand
cugauuuccuugccaacua

SEQ ID NO: 39355 - RNA, 19 nt, Homo sapiens
  misc_RNA (1)...(19): siRNA sense strand
ucugcagacucgugaauga

SEQ ID NO: 39356 - RNA, 19 nt, Homo sapiens
  misc_RNA (1)...(19): siRNA sense strand
gagaugaagaaacugauca

SEQ ID NO: 39357 - RNA, 19 nt, Homo sapiens
  misc_RNA (1)...(19): siRNA sense strand
ccucagacucucaacuuaa

SEQ ID NO: 39358 - RNA, 19 nt, Homo sapiens
  misc_RNA (1)...(19): siRNA sense strand
caaacugaaugaggauauc

SEQ ID NO: 39359 - RNA, 19 nt, Homo sapiens
  misc_RNA (1)...(19): siRNA sense strand
ugauguagcugugaaaauu

SEQ ID NO: 39360 - RNA, 19 nt, Homo sapiens
  misc_RNA (1)...(19): siRNA sense strand
ccaagaaggagcccucuag

SEQ ID NO: 39361 - RNA, 19 nt, Homo sapiens
  misc_RNA (1)...(19): siRNA sense strand
gaucaauccccuucauuaa

SEQ ID NO: 39362 - RNA, 19 nt, Homo sapiens
  misc_RNA (1)...(19): siRNA sense strand
gaugucaacaagcuaaaug

SEQ ID NO: 39363 - RNA, 19 nt, Homo sapiens
  misc_RNA (1)...(19): siRNA sense strand
acaccaguauccauuuguu

SEQ ID NO: 39364 - RNA, 19 nt, Homo sapiens
  misc_RNA (1)...(19): siRNA sense strand
ggaguuggaaggaguucaa

SEQ ID NO: 39365 - RNA, 19 nt, Homo sapiens
  misc_RNA (1)...(19): siRNA sense strand
caaaaugguccaggucuua

SEQ ID NO: 39366 - RNA, 19 nt, Homo sapiens
  misc_RNA (1)...(19): siRNA sense strand
cgaauaaagcaguuacauc

SEQ ID NO: 39367 - RNA, 19 nt, Homo sapiens
  misc_RNA (1)...(19): siRNA sense strand
caugucagccucucagguu

SEQ ID NO: 39368 - RNA, 19 nt, Homo sapiens
  misc_RNA (1)...(19): siRNA sense strand
gaaaagcccaugguagaaa

SEQ ID NO: 39369 - RNA, 19 nt, Homo sapiens
  misc_RNA (1)...(19): siRNA sense strand
ccagauaaaaggcaaauuu

SEQ ID NO: 39370 - RNA, 19 nt, Homo sapiens
  misc_RNA (1)...(19): siRNA sense strand
ggaaaauuauccagaaaac

SEQ ID NO: 39371 - RNA, 19 nt, Homo sapiens
  misc_RNA (1)...(19): siRNA sense strand
gaagaugaacuaagaaaag

SEQ ID NO: 39372 - RNA, 19 nt, Homo sapiens
  misc_RNA (1)...(19): siRNA sense strand
acaggaaguuuagggcaaa

SEQ ID NO: 39373 - RNA, 19 nt, Homo sapiens
  misc_RNA (1)...(19): siRNA sense strand
uugcaaagccucauuccuu

SEQ ID NO: 39374 - RNA, 19 nt, Homo sapiens
  misc_RNA (1)...(19): siRNA sense strand
guccaggucuuacaugcau

SEQ ID NO: 39375 - RNA, 19 nt, Homo sapiens
  misc_RNA (1)...(19): siRNA sense strand
acugagcgaugucaccauu

SEQ ID NO: 39376 - RNA, 19 nt, Homo sapiens
  misc_RNA (1)...(19): siRNA sense strand
aaugaggucuaccacaugu

SEQ ID NO: 39377 - RNA, 19 nt, Homo sapiens
  misc_RNA (1)...(19): siRNA sense strand
gaguacgguuugagcuguu

SEQ ID NO: 39378 - RNA, 19 nt, Homo sapiens
  misc_RNA (1)...(19): siRNA sense strand
gguggaagccccagcauaa

SEQ ID NO: 39379 - RNA, 19 nt, Homo sapiens
  misc_RNA (1)...(19): siRNA sense strand
ucagcaggcauccguguaa

SEQ ID NO: 39380 - RNA, 19 nt, Homo sapiens
  misc_RNA (1)...(19): siRNA sense strand
acacaagcgagaugaagaa

SEQ ID NO: 39381 - RNA, 19 nt, Homo sapiens
  misc_RNA (1)...(19): siRNA sense strand
gcaauggacucuccuccua

SEQ ID NO: 39382 - RNA, 19 nt, Homo sapiens
  misc_RNA (1)...(19): siRNA sense strand
gaacaagcagccauacuga

SEQ ID NO: 39383 - RNA, 19 nt, Homo sapiens
  misc_RNA (1)...(19): siRNA sense strand
gcaacuuucugguaaacuu

SEQ ID NO: 39384 - RNA, 19 nt, Homo sapiens
  misc_RNA (1)...(19): siRNA sense strand
ggaacaggcuuuggucuuc

SEQ ID NO: 39385 - RNA, 19 nt, Homo sapiens
  misc_RNA (1)...(19): siRNA sense strand
cuacuccgaugacaaguuu

SEQ ID NO: 39386 - RNA, 19 nt, Homo sapiens
  misc_RNA (1)...(19): siRNA sense strand
gacauggccugcaauuuca

SEQ ID NO: 39387 - RNA, 19 nt, Homo sapiens
  misc_RNA (1)...(19): siRNA sense strand
uagaugggcuccucacaga

SEQ ID NO: 39388 - RNA, 19 nt, Homo sapiens
  misc_RNA (1)...(19): siRNA sense strand
cugcuuagcucacagaaau

SEQ ID NO: 39389 - RNA, 19 nt, Homo sapiens
  misc_RNA (1)...(19): siRNA sense strand
caacaucuacaaucucuau

SEQ ID NO: 39390 - RNA, 19 nt, Homo sapiens
  misc_RNA (1)...(19): siRNA sense strand
ccaagcaccuccacuacug

SEQ ID NO: 39391 - RNA, 19 nt, Homo sapiens
  misc_RNA (1)...(19): siRNA sense strand
caacagcugcuuccaccua

SEQ ID NO: 39392 - RNA, 19 nt, Homo sapiens
  misc_RNA (1)...(19): siRNA sense strand
agacauggccugcaauuuc

SEQ ID NO: 39393 - RNA, 19 nt, Homo sapiens
  misc_RNA (1)...(19): siRNA sense strand
cggagcagcugccacaaug

SEQ ID NO: 39394 - RNA, 19 nt, Homo sapiens
  misc_RNA (1)...(19): siRNA sense strand
caacuuucugguaaacuua

SEQ ID NO: 39395 - RNA, 19 nt, Homo sapiens
  misc_RNA (1)...(19): siRNA sense strand
caacaaagaccuggaaugc

SEQ ID NO: 39396 - RNA, 19 nt, Homo sapiens
  misc_RNA (1)...(19): siRNA sense strand
guacaagaacaacaaacuu

SEQ ID NO: 39397 - RNA, 19 nt, Homo sapiens
  misc_RNA (1)...(19): siRNA sense strand
gaugagugguuuguggauu

SEQ ID NO: 39398 - RNA, 19 nt, Homo sapiens
  misc_RNA (1)...(19): siRNA sense strand
gcaccuccacuacugguuu

SEQ ID NO: 39399 - RNA, 19 nt, Homo sapiens
  misc_RNA (1)...(19): siRNA sense strand
gggcaacucuggccucaac

SEQ ID NO: 39400 - RNA, 19 nt, Homo sapiens
  misc_RNA (1)...(19): siRNA sense strand
gaacaggcuuuggucuucu

SEQ ID NO: 39401 - RNA, 19 nt, Homo sapiens
  misc_RNA (1)...(19): siRNA sense strand
guacuccggcuaccucaaa

SEQ ID NO: 39402 - RNA, 19 nt, Homo sapiens
  misc_RNA (1)...(19): siRNA sense strand
gcuccaagcaccuccacua

SEQ ID NO: 39403 - RNA, 19 nt, Homo sapiens
  misc_RNA (1)...(19): siRNA sense strand
uggauucccucaaccagaa

SEQ ID NO: 39404 - RNA, 19 nt, Homo sapiens
  misc_RNA (1)...(19): siRNA sense strand
acaacucccuggucuacuu

SEQ ID NO: 39405 - RNA, 19 nt, Homo sapiens
  misc_RNA (1)...(19): siRNA sense strand
ccagaaggaucccgagaac

SEQ ID NO: 39406 - RNA, 19 nt, Homo sapiens
  misc_RNA (1)...(19): siRNA sense strand
gguaugagaaggacacugu

SEQ ID NO: 39407 - RNA, 19 nt, Homo sapiens
  misc_RNA (1)...(19): siRNA sense strand
gaagcaugaacucccagua

SEQ ID NO: 39408 - RNA, 19 nt, Homo sapiens
  misc_RNA (1)...(19): siRNA sense strand
gggauaaagugcgcaugga

SEQ ID NO: 39409 - RNA, 19 nt, Homo sapiens
  misc_RNA (1)...(19): siRNA sense strand
ggcugcagcucacuagaug

SEQ ID NO: 39410 - RNA, 19 nt, Homo sapiens
  misc_RNA (1)...(19): siRNA sense strand
guagacauggccugcaauu

SEQ ID NO: 39411 - RNA, 19 nt, Homo sapiens
  misc_RNA (1)...(19): siRNA sense strand
acucuggccucaacaucua

SEQ ID NO: 39412 - RNA, 19 nt, Homo sapiens
  misc_RNA (1)...(19): siRNA sense strand
ggaguacaagaacaacaaa

SEQ ID NO: 39413 - RNA, 19 nt, Homo sapiens
  misc_RNA (1)...(19): siRNA sense strand
gcggaaggcccucaacauc

SEQ ID NO: 39414 - RNA, 19 nt, Homo sapiens
  misc_RNA (1)...(19): siRNA sense strand
ccuaugagcagaaugacaa

SEQ ID NO: 39415 - RNA, 19 nt, Homo sapiens
  misc_RNA (1)...(19): siRNA sense strand
ggcccugguuagugaagua

SEQ ID NO: 39416 - RNA, 19 nt, Homo sapiens
  misc_RNA (1)...(19): siRNA sense strand
ggacaugugcaacuuucug

SEQ ID NO: 39417 - RNA, 19 nt, Homo sapiens
  misc_RNA (1)...(19): siRNA sense strand
gaugacaaguuuuaugcaa

SEQ ID NO: 39418 - RNA, 19 nt, Homo sapiens
  misc_RNA (1)...(19): siRNA sense strand
ugaacaagcagccauacug

SEQ ID NO: 39419 - RNA, 19 nt, Homo sapiens
  misc_RNA (1)...(19): siRNA sense strand
gggaacaggcuuuggucuu

SEQ ID NO: 39420 - RNA, 19 nt, Homo sapiens
  misc_RNA (1)...(19): siRNA sense strand
ggucuacuuugccuacuac

SEQ ID NO: 39421 - RNA, 19 nt, Homo sapiens
  misc_RNA (1)...(19): siRNA sense strand
ugacaacaaagaccuggaa

SEQ ID NO: 39422 - RNA, 19 nt, Homo sapiens
  misc_RNA (1)...(19): siRNA sense strand
caugugcaacuuucuggua

SEQ ID NO: 39423 - RNA, 19 nt, Homo sapiens
  misc_RNA (1)...(19): siRNA sense strand
ggauuugggcaacaucuuc

SEQ ID NO: 39424 - RNA, 19 nt, Homo sapiens
  misc_RNA (1)...(19): siRNA sense strand
uggaaugcgugaccaaucu

SEQ ID NO: 39425 - RNA, 19 nt, Homo sapiens
  misc_RNA (1)...(19): siRNA sense strand
gaacucccaguaucugaag

SEQ ID NO: 39426 - RNA, 19 nt, Homo sapiens
  misc_RNA (1)...(19): siRNA sense strand
caacucccuggucuacuuu

SEQ ID NO: 39427 - RNA, 19 nt, Homo sapiens
  misc_RNA (1)...(19): siRNA sense strand
ucacucgccugccacucaa

SEQ ID NO: 39428 - RNA, 19 nt, Homo sapiens
  misc_RNA (1)...(19): siRNA sense strand
uggccaagcagccgucuuu

SEQ ID NO: 39429 - RNA, 19 nt, Homo sapiens
  misc_RNA (1)...(19): siRNA sense strand
acagaaauaccagauccua

SEQ ID NO: 39430 - RNA, 19 nt, Homo sapiens
  misc_RNA (1)...(19): siRNA sense strand
aauggacucuccuccuaug

SEQ ID NO: 39431 - RNA, 19 nt, Homo sapiens
  misc_RNA (1)...(19): siRNA sense strand
gcaugaacucccaguaucu

SEQ ID NO: 39432 - RNA, 19 nt, Homo sapiens
  misc_RNA (1)...(19): siRNA sense strand
cgugaccaaucuucaggaa

SEQ ID NO: 39433 - RNA, 19 nt, Homo sapiens
  misc_RNA (1)...(19): siRNA sense strand
cuacuaccauggccuucug

SEQ ID NO: 39434 - RNA, 19 nt, Homo sapiens
  misc_RNA (1)...(19): siRNA sense strand
aagcaugaacucccaguau

SEQ ID NO: 39435 - RNA, 19 nt, Homo sapiens
  misc_RNA (1)...(19): siRNA sense strand
cagaaauaccagauccuau

SEQ ID NO: 39436 - RNA, 19 nt, Homo sapiens
  misc_RNA (1)...(19): siRNA sense strand
ggaaugcgugaccaaucuu

SEQ ID NO: 39437 - RNA, 19 nt, Homo sapiens
  misc_RNA (1)...(19): siRNA sense strand
gaggucgcccagagcaauu

SEQ ID NO: 39438 - RNA, 19 nt, Homo sapiens
  misc_RNA (1)...(19): siRNA sense strand
gcucacagaaauaccagau

SEQ ID NO: 39439 - RNA, 19 nt, Homo sapiens
  misc_RNA (1)...(19): siRNA sense strand
acccacugcugcucucaaa

SEQ ID NO: 39440 - RNA, 19 nt, Homo sapiens
  misc_RNA (1)...(19): siRNA sense strand
agaaggaucccgagaacag

SEQ ID NO: 39441 - RNA, 19 nt, Homo sapiens
  misc_RNA (1)...(19): siRNA sense strand
caauggacucuccuccuau

SEQ ID NO: 39442 - RNA, 19 nt, Homo sapiens
  misc_RNA (1)...(19): siRNA sense strand
ccuccuaugagcagaauga

SEQ ID NO: 39443 - RNA, 19 nt, Homo sapiens
  misc_RNA (1)...(19): siRNA sense strand
caccuccacuacugguuug

SEQ ID NO: 39444 - RNA, 19 nt, Homo sapiens
  misc_RNA (1)...(19): siRNA sense strand
ugggacaugugcaacuuuc

SEQ ID NO: 39445 - RNA, 19 nt, Homo sapiens
  misc_RNA (1)...(19): siRNA sense strand
cggaguacaagaacaacaa

SEQ ID NO: 39446 - RNA, 19 nt, Homo sapiens
  misc_RNA (1)...(19): siRNA sense strand
aaugggacaugugcaacuu

SEQ ID NO: 39447 - RNA, 19 nt, Homo sapiens
  misc_RNA (1)...(19): siRNA sense strand
gaaugcgugaccaaucuuc

SEQ ID NO: 39448 - RNA, 19 nt, Homo sapiens
  misc_RNA (1)...(19): siRNA sense strand
ugacaacucccuggucuac

SEQ ID NO: 39449 - RNA, 19 nt, Homo sapiens
  misc_RNA (1)...(19): siRNA sense strand
agcaugaacucccaguauc

SEQ ID NO: 39450 - RNA, 19 nt, Homo sapiens
  misc_RNA (1)...(19): siRNA sense strand
gugucacccuggaguacaa

SEQ ID NO: 39451 - RNA, 19 nt, Homo sapiens
  misc_RNA (1)...(19): siRNA sense strand
ugagaaggacacuguugug

SEQ ID NO: 39452 - RNA, 19 nt, Homo sapiens
  misc_RNA (1)...(19): siRNA sense strand
uaugagaaggacacuguug

SEQ ID NO: 39453 - RNA, 19 nt, Homo sapiens
  misc_RNA (1)...(19): siRNA sense strand
gccucaacaucuacaaucu

SEQ ID NO: 39454 - RNA, 19 nt, Homo sapiens
  misc_RNA (1)...(19): siRNA sense strand
caacucuggccucaacauc

SEQ ID NO: 39455 - RNA, 19 nt, Homo sapiens
  misc_RNA (1)...(19): siRNA sense strand
guggugcuuuggcucaaug

SEQ ID NO: 39456 - RNA, 19 nt, Homo sapiens
  misc_RNA (1)...(19): siRNA sense strand
ugaggcccuucaagauuuc

SEQ ID NO: 39457 - RNA, 19 nt, Homo sapiens
  misc_RNA (1)...(19): siRNA sense strand
augugcaacuuucugguaa

SEQ ID NO: 39458 - RNA, 19 nt, Homo sapiens
  misc_RNA (1)...(19): siRNA sense strand
aguguaacuucuaugacaa

SEQ ID NO: 39459 - RNA, 19 nt, Homo sapiens
  misc_RNA (1)...(19): siRNA sense strand
cuacuuugccuacuaccau

SEQ ID NO: 39460 - RNA, 19 nt, Homo sapiens
  misc_RNA (1)...(19): siRNA sense strand
ugugcaacuuucugguaaa

SEQ ID NO: 39461 - RNA, 19 nt, Homo sapiens
  misc_RNA (1)...(19): siRNA sense strand
gauuugggcaacaucuuca

SEQ ID NO: 39462 - RNA, 19 nt, Homo sapiens
  misc_RNA (1)...(19): siRNA sense strand
cucaacaucuacaaucucu

SEQ ID NO: 39463 - RNA, 19 nt, Homo sapiens
  misc_RNA (1)...(19): siRNA sense strand
gcaacucuggccucaacau

SEQ ID NO: 39464 - RNA, 19 nt, Homo sapiens
  misc_RNA (1)...(19): siRNA sense strand
gcaggcccaucauacauuu

SEQ ID NO: 39465 - RNA, 19 nt, Homo sapiens
  misc_RNA (1)...(19): siRNA sense strand
gugaaaacaugcaccguua

SEQ ID NO: 39466 - RNA, 19 nt, Homo sapiens
  misc_RNA (1)...(19): siRNA sense strand
gugcacgacugcgucaaua

SEQ ID NO: 39467 - RNA, 19 nt, Homo sapiens
  misc_RNA (1)...(19): siRNA sense strand
gaccguuacuaucgugaaa

SEQ ID NO: 39468 - RNA, 19 nt, Homo sapiens
  misc_RNA (1)...(19): siRNA sense strand
gaccugggccucugcaaga

SEQ ID NO: 39469 - RNA, 19 nt, Homo sapiens
  misc_RNA (1)...(19): siRNA sense strand
gaucgagcaugguccucuu

SEQ ID NO: 39470 - RNA, 19 nt, Homo sapiens
  misc_RNA (1)...(19): siRNA sense strand
ucaccgagaccgacguuaa

SEQ ID NO: 39471 - RNA, 19 nt, Homo sapiens
  misc_RNA (1)...(19): siRNA sense strand
ccugaucucuuuccucauc

SEQ ID NO: 39472 - RNA, 19 nt, Homo sapiens
  misc_RNA (1)...(19): siRNA sense strand
gcacgacugcgucaauauc

SEQ ID NO: 39473 - RNA, 19 nt, Homo sapiens
  misc_RNA (1)...(19): siRNA sense strand
aaaccaacaugaagcacau

SEQ ID NO: 39474 - RNA, 19 nt, Homo sapiens
  misc_RNA (1)...(19): siRNA sense strand
agauguguaucacccagua

SEQ ID NO: 39475 - RNA, 19 nt, Homo sapiens
  misc_RNA (1)...(19): siRNA sense strand
gagcaggcccaucauacau

SEQ ID NO: 39476 - RNA, 19 nt, Homo sapiens
  misc_RNA (1)...(19): siRNA sense strand
gaugauggagcgcgugguu

SEQ ID NO: 39477 - RNA, 19 nt, Homo sapiens
  misc_RNA (1)...(19): siRNA sense strand
ggaugcugguucucuuugu

SEQ ID NO: 39478 - RNA, 19 nt, Homo sapiens
  misc_RNA (1)...(19): siRNA sense strand
gaugcugguucucuuugug

SEQ ID NO: 39479 - RNA, 19 nt, Homo sapiens
  misc_RNA (1)...(19): siRNA sense strand
gcuggaugcugguucucuu

SEQ ID NO: 39480 - RNA, 19 nt, Homo sapiens
  misc_RNA (1)...(19): siRNA sense strand
gccaugagcaggcccauca

SEQ ID NO: 39481 - RNA, 19 nt, Homo sapiens
  misc_RNA (1)...(19): siRNA sense strand
agaccgacguuaagaugau

SEQ ID NO: 39482 - RNA, 19 nt, Homo sapiens
  misc_RNA (1)...(19): siRNA sense strand
gcgucaauaucacaaucaa

SEQ ID NO: 39483 - RNA, 19 nt, Homo sapiens
  misc_RNA (1)...(19): siRNA sense strand
acaggcccauggaugagua

SEQ ID NO: 39484 - RNA, 19 nt, Homo sapiens
  misc_RNA (1)...(19): siRNA sense strand
gagaccgacguuaagauga

SEQ ID NO: 39485 - RNA, 19 nt, Homo sapiens
  misc_RNA (1)...(19): siRNA sense strand
cgagaccgacguuaagaug

SEQ ID NO: 39486 - RNA, 19 nt, Homo sapiens
  misc_RNA (1)...(19): siRNA sense strand
cagcaaccagaacaacuuu

SEQ ID NO: 39487 - RNA, 19 nt, Homo sapiens
  misc_RNA (1)...(19): siRNA sense strand
gugacuaugaggaccguua

SEQ ID NO: 39488 - RNA, 19 nt, Homo sapiens
  misc_RNA (1)...(19): siRNA sense strand
gcgcgugguugagcagaug

SEQ ID NO: 39489 - RNA, 19 nt, Homo sapiens
  misc_RNA (1)...(19): siRNA sense strand
ugauggagcgcgugguuga

SEQ ID NO: 39490 - RNA, 19 nt, Homo sapiens
  misc_RNA (1)...(19): siRNA sense strand
ucauacauuucggcaguga

SEQ ID NO: 39491 - RNA, 19 nt, Homo sapiens
  misc_RNA (1)...(19): siRNA sense strand
gaccgacguuaagaugaug

SEQ ID NO: 39492 - RNA, 19 nt, Homo sapiens
  misc_RNA (1)...(19): siRNA sense strand
gaguacagcaaccagaaca

SEQ ID NO: 39493 - RNA, 19 nt, Homo sapiens
  misc_RNA (1)...(19): siRNA sense strand
ggaccguuacuaucgugaa

SEQ ID NO: 39494 - RNA, 19 nt, Homo sapiens
  misc_RNA (1)...(19): siRNA sense strand
cuaugaggaccguuacuau

SEQ ID NO: 39495 - RNA, 19 nt, Homo sapiens
  misc_RNA (1)...(19): siRNA sense strand
guugagcagauguguauca

SEQ ID NO: 39496 - RNA, 19 nt, Homo sapiens
  misc_RNA (1)...(19): siRNA sense strand
acuacaggcccauggauga

SEQ ID NO: 39497 - RNA, 19 nt, Homo sapiens
  misc_RNA (1)...(19): siRNA sense strand
uuccucaucuuccugauag

SEQ ID NO: 39498 - RNA, 19 nt, Homo sapiens
  misc_RNA (1)...(19): siRNA sense strand
ugguugagcagauguguau

SEQ ID NO: 39499 - RNA, 19 nt, Homo sapiens
  misc_RNA (1)...(19): siRNA sense strand
uaugaggaccguuacuauc

SEQ ID NO: 39500 - RNA, 19 nt, Homo sapiens
  misc_RNA (1)...(19): siRNA sense strand
ugagcaggcccaucauaca

SEQ ID NO: 39501 - RNA, 19 nt, Homo sapiens
  misc_RNA (1)...(19): siRNA sense strand
acagcaaccagaacaacuu

SEQ ID NO: 39502 - RNA, 19 nt, Homo sapiens
  misc_RNA (1)...(19): siRNA sense strand
guacuacaggcccauggau

SEQ ID NO: 39503 - RNA, 19 nt, Homo sapiens
  misc_RNA (1)...(19): siRNA sense strand
gcaggcccaucauacauuu

SEQ ID NO: 39504 - RNA, 19 nt, Homo sapiens
  misc_RNA (1)...(19): siRNA sense strand
gugaaaacaugcaccguua

SEQ ID NO: 39505 - RNA, 19 nt, Homo sapiens
  misc_RNA (1)...(19): siRNA sense strand
gugcacgacugcgucaaua

SEQ ID NO: 39506 - RNA, 19 nt, Homo sapiens
  misc_RNA (1)...(19): siRNA sense strand
gaccguuacuaucgugaaa

SEQ ID NO: 39507 - RNA, 19 nt, Homo sapiens
  misc_RNA (1)...(19): siRNA sense strand
gaccugggccucugcaaga

SEQ ID NO: 39508 - RNA, 19 nt, Homo sapiens
  misc_RNA (1)...(19): siRNA sense strand
gaucgagcaugguccucuu

SEQ ID NO: 39509 - RNA, 19 nt, Homo sapiens
  misc_RNA (1)...(19): siRNA sense strand
ucaccgagaccgacguuaa

SEQ ID NO: 39510 - RNA, 19 nt, Homo sapiens
  misc_RNA (1)...(19): siRNA sense strand
ccugaucucuuuccucauc

SEQ ID NO: 39511 - RNA, 19 nt, Homo sapiens
  misc_RNA (1)...(19): siRNA sense strand
gcacgacugcgucaauauc

SEQ ID NO: 39512 - RNA, 19 nt, Homo sapiens
  misc_RNA (1)...(19): siRNA sense strand
aaaccaacaugaagcacau

SEQ ID NO: 39513 - RNA, 19 nt, Homo sapiens
  misc_RNA (1)...(19): siRNA sense strand
agauguguaucacccagua

SEQ ID NO: 39514 - RNA, 19 nt, Homo sapiens
  misc_RNA (1)...(19): siRNA sense strand
gagcaggcccaucauacau

SEQ ID NO: 39515 - RNA, 19 nt, Homo sapiens
  misc_RNA (1)...(19): siRNA sense strand
gaugauggagcgcgugguu

SEQ ID NO: 39516 - RNA, 19 nt, Homo sapiens
  misc_RNA (1)...(19): siRNA sense strand
ggaugcugguucucuuugu

SEQ ID NO: 39517 - RNA, 19 nt, Homo sapiens
  misc_RNA (1)...(19): siRNA sense strand
gaugcugguucucuuugug

SEQ ID NO: 39518 - RNA, 19 nt, Homo sapiens
  misc_RNA (1)...(19): siRNA sense strand
gcuggaugcugguucucuu

SEQ ID NO: 39519 - RNA, 19 nt, Homo sapiens
  misc_RNA (1)...(19): siRNA sense strand
gccaugagcaggcccauca

SEQ ID NO: 39520 - RNA, 19 nt, Homo sapiens
  misc_RNA (1)...(19): siRNA sense strand
agaccgacguuaagaugau

SEQ ID NO: 39521 - RNA, 19 nt, Homo sapiens
  misc_RNA (1)...(19): siRNA sense strand
gcgucaauaucacaaucaa

SEQ ID NO: 39522 - RNA, 19 nt, Homo sapiens
  misc_RNA (1)...(19): siRNA sense strand
acaggcccauggaugagua

SEQ ID NO: 39523 - RNA, 19 nt, Homo sapiens
  misc_RNA (1)...(19): siRNA sense strand
gagaccgacguuaagauga

SEQ ID NO: 39524 - RNA, 19 nt, Homo sapiens
  misc_RNA (1)...(19): siRNA sense strand
cgagaccgacguuaagaug

SEQ ID NO: 39525 - RNA, 19 nt, Homo sapiens
  misc_RNA (1)...(19): siRNA sense strand
cagcaaccagaacaacuuu

SEQ ID NO: 39526 - RNA, 19 nt, Homo sapiens
  misc_RNA (1)...(19): siRNA sense strand
gugacuaugaggaccguua

SEQ ID NO: 39527 - RNA, 19 nt, Homo sapiens
  misc_RNA (1)...(19): siRNA sense strand
gcgcgugguugagcagaug

SEQ ID NO: 39528 - RNA, 19 nt, Homo sapiens
  misc_RNA (1)...(19): siRNA sense strand
ugauggagcgcgugguuga

SEQ ID NO: 39529 - RNA, 19 nt, Homo sapiens
  misc_RNA (1)...(19): siRNA sense strand
ucauacauuucggcaguga

SEQ ID NO: 39530 - RNA, 19 nt, Homo sapiens
  misc_RNA (1)...(19): siRNA sense strand
gaccgacguuaagaugaug

SEQ ID NO: 39531 - RNA, 19 nt, Homo sapiens
  misc_RNA (1)...(19): siRNA sense strand
gaguacagcaaccagaaca

SEQ ID NO: 39532 - RNA, 19 nt, Homo sapiens
  misc_RNA (1)...(19): siRNA sense strand
ggaccguuacuaucgugaa

SEQ ID NO: 39533 - RNA, 19 nt, Homo sapiens
  misc_RNA (1)...(19): siRNA sense strand
cuaugaggaccguuacuau

SEQ ID NO: 39534 - RNA, 19 nt, Homo sapiens
  misc_RNA (1)...(19): siRNA sense strand
guugagcagauguguauca

SEQ ID NO: 39535 - RNA, 19 nt, Homo sapiens
  misc_RNA (1)...(19): siRNA sense strand
acuacaggcccauggauga

SEQ ID NO: 39536 - RNA, 19 nt, Homo sapiens
  misc_RNA (1)...(19): siRNA sense strand
uuccucaucuuccugauag

SEQ ID NO: 39537 - RNA, 19 nt, Homo sapiens
  misc_RNA (1)...(19): siRNA sense strand
ugguugagcagauguguau

SEQ ID NO: 39538 - RNA, 19 nt, Homo sapiens
  misc_RNA (1)...(19): siRNA sense strand
uaugaggaccguuacuauc

SEQ ID NO: 39539 - RNA, 19 nt, Homo sapiens
  misc_RNA (1)...(19): siRNA sense strand
ugagcaggcccaucauaca

SEQ ID NO: 39540 - RNA, 19 nt, Homo sapiens
  misc_RNA (1)...(19): siRNA sense strand
acagcaaccagaacaacuu

SEQ ID NO: 39541 - RNA, 19 nt, Homo sapiens
  misc_RNA (1)...(19): siRNA sense strand
guacuacaggcccauggau

SEQ ID NO: 39542 - RNA, 19 nt, Homo sapiens
  misc_RNA (1)...(19): siRNA sense strand
gagcugacauugaaauaug

SEQ ID NO: 39543 - RNA, 19 nt, Homo sapiens
  misc_RNA (1)...(19): siRNA sense strand
cagcaggcauaucucauua

SEQ ID NO: 39544 - RNA, 19 nt, Homo sapiens
  misc_RNA (1)...(19): siRNA sense strand
gaaagggagucacaagaca

SEQ ID NO: 39545 - RNA, 19 nt, Homo sapiens
  misc_RNA (1)...(19): siRNA sense strand
ucaaguaccucccugaaug

SEQ ID NO: 39546 - RNA, 19 nt, Homo sapiens
  misc_RNA (1)...(19): siRNA sense strand
ggagcaagaugaggaagaa

SEQ ID NO: 39547 - RNA, 19 nt, Homo sapiens
  misc_RNA (1)...(19): siRNA sense strand
uuaauugguuugugccuua

SEQ ID NO: 39548 - RNA, 19 nt, Homo sapiens
  misc_RNA (1)...(19): siRNA sense strand
ugaaacagcucaggagaga

SEQ ID NO: 39549 - RNA, 19 nt, Homo sapiens
  misc_RNA (1)...(19): siRNA sense strand
gcccugcacucaauucuga

SEQ ID NO: 39550 - RNA, 19 nt, Homo sapiens
  misc_RNA (1)...(19): siRNA sense strand
gacaaccaccugagcaaua

SEQ ID NO: 39551 - RNA, 19 nt, Homo sapiens
  misc_RNA (1)...(19): siRNA sense strand
aaacuuggauugggagauu

SEQ ID NO: 39552 - RNA, 19 nt, Homo sapiens
  misc_RNA (1)...(19): siRNA sense strand
ccaauuagcauuccaucaa

SEQ ID NO: 39553 - RNA, 19 nt, Homo sapiens
  misc_RNA (1)...(19): siRNA sense strand
auccaugccuggcuuauua

SEQ ID NO: 39554 - RNA, 19 nt, Homo sapiens
  misc_RNA (1)...(19): siRNA sense strand
aaacagcucaggagagaaa

SEQ ID NO: 39555 - RNA, 19 nt, Homo sapiens
  misc_RNA (1)...(19): siRNA sense strand
gcacagaaagggagucaca

SEQ ID NO: 39556 - RNA, 19 nt, Homo sapiens
  misc_RNA (1)...(19): siRNA sense strand
caauuagcauuccaucaau

SEQ ID NO: 39557 - RNA, 19 nt, Homo sapiens
  misc_RNA (1)...(19): siRNA sense strand
guagccauauuaauugguu

SEQ ID NO: 39558 - RNA, 19 nt, Homo sapiens
  misc_RNA (1)...(19): siRNA sense strand
gaugaggagcugacauuga

SEQ ID NO: 39559 - RNA, 19 nt, Homo sapiens
  misc_RNA (1)...(19): siRNA sense strand
guuugugccuuacauuauu

SEQ ID NO: 39560 - RNA, 19 nt, Homo sapiens
  misc_RNA (1)...(19): siRNA sense strand
ggucguggcuaccauuaag

SEQ ID NO: 39561 - RNA, 19 nt, Homo sapiens
  misc_RNA (1)...(19): siRNA sense strand
augaggagcugacauugaa

SEQ ID NO: 39562 - RNA, 19 nt, Homo sapiens
  misc_RNA (1)...(19): siRNA sense strand
agagagcccugcacucaau

SEQ ID NO: 39563 - RNA, 19 nt, Homo sapiens
  misc_RNA (1)...(19): siRNA sense strand
gaugggcagcuaaucuaua

SEQ ID NO: 39564 - RNA, 19 nt, Homo sapiens
  misc_RNA (1)...(19): siRNA sense strand
aaauacaggugcuauaagg

SEQ ID NO: 39565 - RNA, 19 nt, Homo sapiens
  misc_RNA (1)...(19): siRNA sense strand
ccucaacaauggugugguu

SEQ ID NO: 39566 - RNA, 19 nt, Homo sapiens
  misc_RNA (1)...(19): siRNA sense strand
acaguguucugguugguaa

SEQ ID NO: 39567 - RNA, 19 nt, Homo sapiens
  misc_RNA (1)...(19): siRNA sense strand
uggugguucuguauaaaua

SEQ ID NO: 39568 - RNA, 19 nt, Homo sapiens
  misc_RNA (1)...(19): siRNA sense strand
ggauugggagauuucauuu

SEQ ID NO: 39569 - RNA, 19 nt, Homo sapiens
  misc_RNA (1)...(19): siRNA sense strand
ucauggcccugguguuuau

SEQ ID NO: 39570 - RNA, 19 nt, Homo sapiens
  misc_RNA (1)...(19): siRNA sense strand
ccagagagcccugcacuca

SEQ ID NO: 39571 - RNA, 19 nt, Homo sapiens
  misc_RNA (1)...(19): siRNA sense strand
gcucaggagagaaaugaaa

SEQ ID NO: 39572 - RNA, 19 nt, Homo sapiens
  misc_RNA (1)...(19): siRNA sense strand
gaaagguccacuucguaug

SEQ ID NO: 39573 - RNA, 19 nt, Homo sapiens
  misc_RNA (1)...(19): siRNA sense strand
cagaagauaccgagacugu

SEQ ID NO: 39574 - RNA, 19 nt, Homo sapiens
  misc_RNA (1)...(19): siRNA sense strand
uaacguugcuguggacuac

SEQ ID NO: 39575 - RNA, 19 nt, Homo sapiens
  misc_RNA (1)...(19): siRNA sense strand
gaaaggggaguaaaacuug

SEQ ID NO: 39576 - RNA, 19 nt, Homo sapiens
  misc_RNA (1)...(19): siRNA sense strand
gcaagaugaggaagaagau

SEQ ID NO: 39577 - RNA, 19 nt, Homo sapiens
  misc_RNA (1)...(19): siRNA sense strand
ccucauggcccugguguuu

SEQ ID NO: 39578 - RNA, 19 nt, Homo sapiens
  misc_RNA (1)...(19): siRNA sense strand
ggacuacauuacuguugca

SEQ ID NO: 39579 - RNA, 19 nt, Homo sapiens
  misc_RNA (1)...(19): siRNA sense strand
ggaaggaugggcagcuaau

SEQ ID NO: 39580 - RNA, 19 nt, Homo sapiens
  misc_RNA (1)...(19): siRNA sense strand
gaaauauggcgccaagcau

SEQ ID NO: 39581 - RNA, 19 nt, Homo sapiens
  misc_RNA (1)...(19): siRNA sense strand
ucugaaugcugccaucaug

SEQ ID NO: 39582 - RNA, 19 nt, Homo sapiens
  misc_RNA (1)...(19): siRNA sense strand
caaaggagaguauccaaaa

SEQ ID NO: 39583 - RNA, 19 nt, Homo sapiens
  misc_RNA (1)...(19): siRNA sense strand
gaagcucaaaggagaguau

SEQ ID NO: 39584 - RNA, 19 nt, Homo sapiens
  misc_RNA (1)...(19): siRNA sense strand
gcacuccugaucuggaauu

SEQ ID NO: 39585 - RNA, 19 nt, Homo sapiens
  misc_RNA (1)...(19): siRNA sense strand
gcuguggacuacauuacug

SEQ ID NO: 39586 - RNA, 19 nt, Homo sapiens
  misc_RNA (1)...(19): siRNA sense strand
gagaacggcaggagcacaa

SEQ ID NO: 39587 - RNA, 19 nt, Homo sapiens
  misc_RNA (1)...(19): siRNA sense strand
gagagaaaugaaacgcuuu

SEQ ID NO: 39588 - RNA, 19 nt, Homo sapiens
  misc_RNA (1)...(19): siRNA sense strand
gguaaagccucagcaacag

SEQ ID NO: 39589 - RNA, 19 nt, Homo sapiens
  misc_RNA (1)...(19): siRNA sense strand
ggagcugacauugaaauau

SEQ ID NO: 39590 - RNA, 19 nt, Homo sapiens
  misc_RNA (1)...(19): siRNA sense strand
ccagcaggcauaucucauu

SEQ ID NO: 39591 - RNA, 19 nt, Homo sapiens
  misc_RNA (1)...(19): siRNA sense strand
gagcugcuguccaggaacu

SEQ ID NO: 39592 - RNA, 19 nt, Homo sapiens
  misc_RNA (1)...(19): siRNA sense strand
ccagagggacagucaucua

SEQ ID NO: 39593 - RNA, 19 nt, Homo sapiens
  misc_RNA (1)...(19): siRNA sense strand
cagaaagggagucacaaga

SEQ ID NO: 39594 - RNA, 19 nt, Homo sapiens
  misc_RNA (1)...(19): siRNA sense strand
ucaaaggagaguauccaaa

SEQ ID NO: 39595 - RNA, 19 nt, Homo sapiens
  misc_RNA (1)...(19): siRNA sense strand
acccugagccauuaucuaa

SEQ ID NO: 39596 - RNA, 19 nt, Homo sapiens
  misc_RNA (1)...(19): siRNA sense strand
aagaugaggagcugacauu

SEQ ID NO: 39597 - RNA, 19 nt, Homo sapiens
  misc_RNA (1)...(19): siRNA sense strand
uggcucaucuuggcuguga

SEQ ID NO: 39598 - RNA, 19 nt, Homo sapiens
  misc_RNA (1)...(19): siRNA sense strand
gcccugguguuuaucaagu

SEQ ID NO: 39599 - RNA, 19 nt, Homo sapiens
  misc_RNA (1)...(19): siRNA sense strand
ggacaaccaccugagcaau

SEQ ID NO: 39600 - RNA, 19 nt, Homo sapiens
  misc_RNA (1)...(19): siRNA sense strand
cauuaagucagucagcuuu

SEQ ID NO: 39601 - RNA, 19 nt, Homo sapiens
  misc_RNA (1)...(19): siRNA sense strand
cuacuuugccacagauuau

SEQ ID NO: 39602 - RNA, 19 nt, Homo sapiens
  misc_RNA (1)...(19): siRNA sense strand
ugaaauauggcgccaagca

SEQ ID NO: 39603 - RNA, 19 nt, Homo sapiens
  misc_RNA (1)...(19): siRNA sense strand
gguuugugccuuacauuau

SEQ ID NO: 39604 - RNA, 19 nt, Homo sapiens
  misc_RNA (1)...(19): siRNA sense strand
ggcaggugguggagcaaga

SEQ ID NO: 39605 - RNA, 19 nt, Homo sapiens
  misc_RNA (1)...(19): siRNA sense strand
ggaaaggggaguaaaacuu

SEQ ID NO: 39606 - RNA, 19 nt, Homo sapiens
  misc_RNA (1)...(19): siRNA sense strand
gaggagcugacauugaaau

SEQ ID NO: 39607 - RNA, 19 nt, Homo sapiens
  misc_RNA (1)...(19): siRNA sense strand
uaucaucucuauuguugcu

SEQ ID NO: 39608 - RNA, 19 nt, Homo sapiens
  misc_RNA (1)...(19): siRNA sense strand
gaacuuuccagcaguaucc

SEQ ID NO: 39609 - RNA, 19 nt, Homo sapiens
  misc_RNA (1)...(19): siRNA sense strand
gcucaucuuggcugugauu

SEQ ID NO: 39610 - RNA, 19 nt, Homo sapiens
  misc_RNA (1)...(19): siRNA sense strand
gguguggugggaaugauuu

SEQ ID NO: 39611 - RNA, 19 nt, Homo sapiens
  misc_RNA (1)...(19): siRNA sense strand
ggacugcguggcucaucuu

SEQ ID NO: 39612 - RNA, 19 nt, Homo sapiens
  misc_RNA (1)...(19): siRNA sense strand
ggaugggcagcuaaucuau

SEQ ID NO: 39613 - RNA, 19 nt, Homo sapiens
  misc_RNA (1)...(19): siRNA sense strand
gaaagcauugccagcucuu

SEQ ID NO: 39614 - RNA, 19 nt, Homo sapiens
  misc_RNA (1)...(19): siRNA sense strand
gugaagacccagaggaaag

SEQ ID NO: 39615 - RNA, 19 nt, Homo sapiens
  misc_RNA (1)...(19): siRNA sense strand
ggugaagacccagaggaaa

SEQ ID NO: 39616 - RNA, 19 nt, Homo sapiens
  misc_RNA (1)...(19): siRNA sense strand
uauccucgcuggugaagac

SEQ ID NO: 39617 - RNA, 19 nt, Homo sapiens
  misc_RNA (1)...(19): siRNA sense strand
gcaggagcacaacgacaga

SEQ ID NO: 39618 - RNA, 19 nt, Homo sapiens
  misc_RNA (1)...(19): siRNA sense strand
ccggaaggaugggcagcua

SEQ ID NO: 39619 - RNA, 19 nt, Homo sapiens
  misc_RNA (1)...(19): siRNA sense strand
agacuggaacacaaccaua

SEQ ID NO: 39620 - RNA, 19 nt, Homo sapiens
  misc_RNA (1)...(19): siRNA sense strand
agacacuguugcagagaau

SEQ ID NO: 39621 - RNA, 19 nt, Homo sapiens
  misc_RNA (1)...(19): siRNA sense strand
ggagucacaagacacuguu

SEQ ID NO: 39622 - RNA, 19 nt, Homo sapiens
  misc_RNA (1)...(19): siRNA sense strand
uaaauacaggugcuauaag

SEQ ID NO: 39623 - RNA, 19 nt, Homo sapiens
  misc_RNA (1)...(19): siRNA sense strand
aagaugaggaagaagauga

SEQ ID NO: 39624 - RNA, 19 nt, Homo sapiens
  misc_RNA (1)...(19): siRNA sense strand
cagcucaggagagaaauga

SEQ ID NO: 39625 - RNA, 19 nt, Homo sapiens
  misc_RNA (1)...(19): siRNA sense strand
aagacacuguugcagagaa

SEQ ID NO: 39626 - RNA, 19 nt, Homo sapiens
  misc_RNA (1)...(19): siRNA sense strand
cacagaagauaccgagacu

SEQ ID NO: 39627 - RNA, 19 nt, Homo sapiens
  misc_RNA (1)...(19): siRNA sense strand
caaucuccaucaccuuugg

SEQ ID NO: 39628 - RNA, 19 nt, Homo sapiens
  misc_RNA (1)...(19): siRNA sense strand
uuaagucagucagcuuuua

SEQ ID NO: 39629 - RNA, 19 nt, Homo sapiens
  misc_RNA (1)...(19): siRNA sense strand
uuucuacaguguucugguu

SEQ ID NO: 39630 - RNA, 19 nt, Homo sapiens
  misc_RNA (1)...(19): siRNA sense strand
acaaccaccugagcaauac

SEQ ID NO: 39631 - RNA, 19 nt, Homo sapiens
  misc_RNA (1)...(19): siRNA sense strand
ccuggugguucuguauaaa

SEQ ID NO: 39632 - RNA, 19 nt, Homo sapiens
  misc_RNA (1)...(19): siRNA sense strand
uggugugguuggugaauau

SEQ ID NO: 39633 - RNA, 19 nt, Homo sapiens
  misc_RNA (1)...(19): siRNA sense strand
uaucaaguaccucccugaa

SEQ ID NO: 39634 - RNA, 19 nt, Homo sapiens
  misc_RNA (1)...(19): siRNA sense strand
gaagaugaggagcugacau

SEQ ID NO: 39635 - RNA, 19 nt, Homo sapiens
  misc_RNA (1)...(19): siRNA sense strand
uggcuaccauuaagucagu

SEQ ID NO: 39636 - RNA, 19 nt, Homo sapiens
  misc_RNA (1)...(19): siRNA sense strand
gcucuuccaaucuccauca

SEQ ID NO: 39637 - RNA, 19 nt, Homo sapiens
  misc_RNA (1)...(19): siRNA sense strand
ugguuugugccuuacauua

SEQ ID NO: 39638 - RNA, 19 nt, Homo sapiens
  misc_RNA (1)...(19): siRNA sense strand
ugguaaagccucagcaaca

SEQ ID NO: 39639 - RNA, 19 nt, Homo sapiens
  misc_RNA (1)...(19): siRNA sense strand
uggauugggagauuucauu

SEQ ID NO: 39640 - RNA, 19 nt, Homo sapiens
  misc_RNA (1)...(19): siRNA sense strand
gcucucauuuacuccucaa

SEQ ID NO: 39641 - RNA, 19 nt, Homo sapiens
  misc_RNA (1)...(19): siRNA sense strand
gcgccaagcaugugaucau

SEQ ID NO: 39642 - RNA, 19 nt, Homo sapiens
  misc_RNA (1)...(19): siRNA sense strand
gagcugacauugaaauaug

SEQ ID NO: 39643 - RNA, 19 nt, Homo sapiens
  misc_RNA (1)...(19): siRNA sense strand
cagcaggcauaucucauua

SEQ ID NO: 39644 - RNA, 19 nt, Homo sapiens
  misc_RNA (1)...(19): siRNA sense strand
gaaagggagucacaagaca

SEQ ID NO: 39645 - RNA, 19 nt, Homo sapiens
  misc_RNA (1)...(19): siRNA sense strand
ucaaguaccucccugaaug

SEQ ID NO: 39646 - RNA, 19 nt, Homo sapiens
  misc_RNA (1)...(19): siRNA sense strand
ggagcaagaugaggaagaa

SEQ ID NO: 39647 - RNA, 19 nt, Homo sapiens
  misc_RNA (1)...(19): siRNA sense strand
uuaauugguuugugccuua

SEQ ID NO: 39648 - RNA, 19 nt, Homo sapiens
  misc_RNA (1)...(19): siRNA sense strand
ugaaacagcucaggagaga

SEQ ID NO: 39649 - RNA, 19 nt, Homo sapiens
  misc_RNA (1)...(19): siRNA sense strand
gcccugcacucaauucuga

SEQ ID NO: 39650 - RNA, 19 nt, Homo sapiens
  misc_RNA (1)...(19): siRNA sense strand
gacaaccaccugagcaaua

SEQ ID NO: 39651 - RNA, 19 nt, Homo sapiens
  misc_RNA (1)...(19): siRNA sense strand
aaacuuggauugggagauu

SEQ ID NO: 39652 - RNA, 19 nt, Homo sapiens
  misc_RNA (1)...(19): siRNA sense strand
ccaauuagcauuccaucaa

SEQ ID NO: 39653 - RNA, 19 nt, Homo sapiens
  misc_RNA (1)...(19): siRNA sense strand
auccaugccuggcuuauua

SEQ ID NO: 39654 - RNA, 19 nt, Homo sapiens
  misc_RNA (1)...(19): siRNA sense strand
aaacagcucaggagagaaa

SEQ ID NO: 39655 - RNA, 19 nt, Homo sapiens
  misc_RNA (1)...(19): siRNA sense strand
gcacagaaagggagucaca

SEQ ID NO: 39656 - RNA, 19 nt, Homo sapiens
  misc_RNA (1)...(19): siRNA sense strand
caauuagcauuccaucaau

SEQ ID NO: 39657 - RNA, 19 nt, Homo sapiens
  misc_RNA (1)...(19): siRNA sense strand
guagccauauuaauugguu

SEQ ID NO: 39658 - RNA, 19 nt, Homo sapiens
  misc_RNA (1)...(19): siRNA sense strand
gaugaggagcugacauuga

SEQ ID NO: 39659 - RNA, 19 nt, Homo sapiens
  misc_RNA (1)...(19): siRNA sense strand
guuugugccuuacauuauu

SEQ ID NO: 39660 - RNA, 19 nt, Homo sapiens
  misc_RNA (1)...(19): siRNA sense strand
ggucguggcuaccauuaag

SEQ ID NO: 39661 - RNA, 19 nt, Homo sapiens
  misc_RNA (1)...(19): siRNA sense strand
augaggagcugacauugaa

SEQ ID NO: 39662 - RNA, 19 nt, Homo sapiens
  misc_RNA (1)...(19): siRNA sense strand
agagagcccugcacucaau

SEQ ID NO: 39663 - RNA, 19 nt, Homo sapiens
  misc_RNA (1)...(19): siRNA sense strand
gaugggcagcuaaucuaua

SEQ ID NO: 39664 - RNA, 19 nt, Homo sapiens
  misc_RNA (1)...(19): siRNA sense strand
aaauacaggugcuauaagg

SEQ ID NO: 39665 - RNA, 19 nt, Homo sapiens
  misc_RNA (1)...(19): siRNA sense strand
ccucaacaauggugugguu

SEQ ID NO: 39666 - RNA, 19 nt, Homo sapiens
  misc_RNA (1)...(19): siRNA sense strand
acaguguucugguugguaa

SEQ ID NO: 39667 - RNA, 19 nt, Homo sapiens
  misc_RNA (1)...(19): siRNA sense strand
uggugguucuguauaaaua

SEQ ID NO: 39668 - RNA, 19 nt, Homo sapiens
  misc_RNA (1)...(19): siRNA sense strand
ggauugggagauuucauuu

SEQ ID NO: 39669 - RNA, 19 nt, Homo sapiens
  misc_RNA (1)...(19): siRNA sense strand
ucauggcccugguguuuau

SEQ ID NO: 39670 - RNA, 19 nt, Homo sapiens
  misc_RNA (1)...(19): siRNA sense strand
ccagagagcccugcacuca

SEQ ID NO: 39671 - RNA, 19 nt, Homo sapiens
  misc_RNA (1)...(19): siRNA sense strand
gcucaggagagaaaugaaa

SEQ ID NO: 39672 - RNA, 19 nt, Homo sapiens
  misc_RNA (1)...(19): siRNA sense strand
gaaagguccacuucguaug

SEQ ID NO: 39673 - RNA, 19 nt, Homo sapiens
  misc_RNA (1)...(19): siRNA sense strand
cagaagauaccgagacugu

SEQ ID NO: 39674 - RNA, 19 nt, Homo sapiens
  misc_RNA (1)...(19): siRNA sense strand
uaacguugcuguggacuac

SEQ ID NO: 39675 - RNA, 19 nt, Homo sapiens
  misc_RNA (1)...(19): siRNA sense strand
gaaaggggaguaaaacuug

SEQ ID NO: 39676 - RNA, 19 nt, Homo sapiens
  misc_RNA (1)...(19): siRNA sense strand
gcaagaugaggaagaagau

SEQ ID NO: 39677 - RNA, 19 nt, Homo sapiens
  misc_RNA (1)...(19): siRNA sense strand
ccucauggcccugguguuu

SEQ ID NO: 39678 - RNA, 19 nt, Homo sapiens
  misc_RNA (1)...(19): siRNA sense strand
ggacuacauuacuguugca

SEQ ID NO: 39679 - RNA, 19 nt, Homo sapiens
  misc_RNA (1)...(19): siRNA sense strand
ggaaggaugggcagcuaau

SEQ ID NO: 39680 - RNA, 19 nt, Homo sapiens
  misc_RNA (1)...(19): siRNA sense strand
gaaauauggcgccaagcau

SEQ ID NO: 39681 - RNA, 19 nt, Homo sapiens
  misc_RNA (1)...(19): siRNA sense strand
ucugaaugcugccaucaug

SEQ ID NO: 39682 - RNA, 19 nt, Homo sapiens
  misc_RNA (1)...(19): siRNA sense strand
caaaggagaguauccaaaa

SEQ ID NO: 39683 - RNA, 19 nt, Homo sapiens
  misc_RNA (1)...(19): siRNA sense strand
gaagcucaaaggagaguau

SEQ ID NO: 39684 - RNA, 19 nt, Homo sapiens
  misc_RNA (1)...(19): siRNA sense strand
gcacuccugaucuggaauu

SEQ ID NO: 39685 - RNA, 19 nt, Homo sapiens
  misc_RNA (1)...(19): siRNA sense strand
gcuguggacuacauuacug

SEQ ID NO: 39686 - RNA, 19 nt, Homo sapiens
  misc_RNA (1)...(19): siRNA sense strand
gagaacggcaggagcacaa

SEQ ID NO: 39687 - RNA, 19 nt, Homo sapiens
  misc_RNA (1)...(19): siRNA sense strand
gagagaaaugaaacgcuuu

SEQ ID NO: 39688 - RNA, 19 nt, Homo sapiens
  misc_RNA (1)...(19): siRNA sense strand
gguaaagccucagcaacag

SEQ ID NO: 39689 - RNA, 19 nt, Homo sapiens
  misc_RNA (1)...(19): siRNA sense strand
ggagcugacauugaaauau

SEQ ID NO: 39690 - RNA, 19 nt, Homo sapiens
  misc_RNA (1)...(19): siRNA sense strand
ccagcaggcauaucucauu

SEQ ID NO: 39691 - RNA, 19 nt, Homo sapiens
  misc_RNA (1)...(19): siRNA sense strand
gagcugcuguccaggaacu

SEQ ID NO: 39692 - RNA, 19 nt, Homo sapiens
  misc_RNA (1)...(19): siRNA sense strand
ccagagggacagucaucua

SEQ ID NO: 39693 - RNA, 19 nt, Homo sapiens
  misc_RNA (1)...(19): siRNA sense strand
cagaaagggagucacaaga

SEQ ID NO: 39694 - RNA, 19 nt, Homo sapiens
  misc_RNA (1)...(19): siRNA sense strand
ucaaaggagaguauccaaa

SEQ ID NO: 39695 - RNA, 19 nt, Homo sapiens
  misc_RNA (1)...(19): siRNA sense strand
acccugagccauuaucuaa

SEQ ID NO: 39696 - RNA, 19 nt, Homo sapiens
  misc_RNA (1)...(19): siRNA sense strand
aagaugaggagcugacauu

SEQ ID NO: 39697 - RNA, 19 nt, Homo sapiens
  misc_RNA (1)...(19): siRNA sense strand
uggcucaucuuggcuguga

SEQ ID NO: 39698 - RNA, 19 nt, Homo sapiens
  misc_RNA (1)...(19): siRNA sense strand
gcccugguguuuaucaagu

SEQ ID NO: 39699 - RNA, 19 nt, Homo sapiens
  misc_RNA (1)...(19): siRNA sense strand
ggacaaccaccugagcaau

SEQ ID NO: 39700 - RNA, 19 nt, Homo sapiens
  misc_RNA (1)...(19): siRNA sense strand
cauuaagucagucagcuuu

SEQ ID NO: 39701 - RNA, 19 nt, Homo sapiens
  misc_RNA (1)...(19): siRNA sense strand
cuacuuugccacagauuau

SEQ ID NO: 39702 - RNA, 19 nt, Homo sapiens
  misc_RNA (1)...(19): siRNA sense strand
ugaaauauggcgccaagca

SEQ ID NO: 39703 - RNA, 19 nt, Homo sapiens
  misc_RNA (1)...(19): siRNA sense strand
gguuugugccuuacauuau

SEQ ID NO: 39704 - RNA, 19 nt, Homo sapiens
  misc_RNA (1)...(19): siRNA sense strand
ggcaggugguggagcaaga

SEQ ID NO: 39705 - RNA, 19 nt, Homo sapiens
  misc_RNA (1)...(19): siRNA sense strand
ggaaaggggaguaaaacuu

SEQ ID NO: 39706 - RNA, 19 nt, Homo sapiens
  misc_RNA (1)...(19): siRNA sense strand
gaggagcugacauugaaau

SEQ ID NO: 39707 - RNA, 19 nt, Homo sapiens
  misc_RNA (1)...(19): siRNA sense strand
uaucaucucuauuguugcu

SEQ ID NO: 39708 - RNA, 19 nt, Homo sapiens
  misc_RNA (1)...(19): siRNA sense strand
gaacuuuccagcaguaucc

SEQ ID NO: 39709 - RNA, 19 nt, Homo sapiens
  misc_RNA (1)...(19): siRNA sense strand
gcucaucuuggcugugauu

SEQ ID NO: 39710 - RNA, 19 nt, Homo sapiens
  misc_RNA (1)...(19): siRNA sense strand
gguguggugggaaugauuu

SEQ ID NO: 39711 - RNA, 19 nt, Homo sapiens
  misc_RNA (1)...(19): siRNA sense strand
ggacugcguggcucaucuu

SEQ ID NO: 39712 - RNA, 19 nt, Homo sapiens
  misc_RNA (1)...(19): siRNA sense strand
ggaugggcagcuaaucuau

SEQ ID NO: 39713 - RNA, 19 nt, Homo sapiens
  misc_RNA (1)...(19): siRNA sense strand
gaaagcauugccagcucuu

SEQ ID NO: 39714 - RNA, 19 nt, Homo sapiens
  misc_RNA (1)...(19): siRNA sense strand
gugaagacccagaggaaag

SEQ ID NO: 39715 - RNA, 19 nt, Homo sapiens
  misc_RNA (1)...(19): siRNA sense strand
ggugaagacccagaggaaa

SEQ ID NO: 39716 - RNA, 19 nt, Homo sapiens
  misc_RNA (1)...(19): siRNA sense strand
uauccucgcuggugaagac

SEQ ID NO: 39717 - RNA, 19 nt, Homo sapiens
  misc_RNA (1)...(19): siRNA sense strand
gcaggagcacaacgacaga

SEQ ID NO: 39718 - RNA, 19 nt, Homo sapiens
  misc_RNA (1)...(19): siRNA sense strand
ccggaaggaugggcagcua

SEQ ID NO: 39719 - RNA, 19 nt, Homo sapiens
  misc_RNA (1)...(19): siRNA sense strand
agacuggaacacaaccaua

SEQ ID NO: 39720 - RNA, 19 nt, Homo sapiens
  misc_RNA (1)...(19): siRNA sense strand
agacacuguugcagagaau

SEQ ID NO: 39721 - RNA, 19 nt, Homo sapiens
  misc_RNA (1)...(19): siRNA sense strand
ggagucacaagacacuguu

SEQ ID NO: 39722 - RNA, 19 nt, Homo sapiens
  misc_RNA (1)...(19): siRNA sense strand
uaaauacaggugcuauaag

SEQ ID NO: 39723 - RNA, 19 nt, Homo sapiens
  misc_RNA (1)...(19): siRNA sense strand
aagaugaggaagaagauga

SEQ ID NO: 39724 - RNA, 19 nt, Homo sapiens
  misc_RNA (1)...(19): siRNA sense strand
cagcucaggagagaaauga

SEQ ID NO: 39725 - RNA, 19 nt, Homo sapiens
  misc_RNA (1)...(19): siRNA sense strand
aagacacuguugcagagaa

SEQ ID NO: 39726 - RNA, 19 nt, Homo sapiens
  misc_RNA (1)...(19): siRNA sense strand
cacagaagauaccgagacu

SEQ ID NO: 39727 - RNA, 19 nt, Homo sapiens
  misc_RNA (1)...(19): siRNA sense strand
caaucuccaucaccuuugg

SEQ ID NO: 39728 - RNA, 19 nt, Homo sapiens
  misc_RNA (1)...(19): siRNA sense strand
uuaagucagucagcuuuua

SEQ ID NO: 39729 - RNA, 19 nt, Homo sapiens
  misc_RNA (1)...(19): siRNA sense strand
uuucuacaguguucugguu

SEQ ID NO: 39730 - RNA, 19 nt, Homo sapiens
  misc_RNA (1)...(19): siRNA sense strand
acaaccaccugagcaauac

SEQ ID NO: 39731 - RNA, 19 nt, Homo sapiens
  misc_RNA (1)...(19): siRNA sense strand
ccuggugguucuguauaaa

SEQ ID NO: 39732 - RNA, 19 nt, Homo sapiens
  misc_RNA (1)...(19): siRNA sense strand
uggugugguuggugaauau

SEQ ID NO: 39733 - RNA, 19 nt, Homo sapiens
  misc_RNA (1)...(19): siRNA sense strand
uaucaaguaccucccugaa

SEQ ID NO: 39734 - RNA, 19 nt, Homo sapiens
  misc_RNA (1)...(19): siRNA sense strand
gaagaugaggagcugacau

SEQ ID NO: 39735 - RNA, 19 nt, Homo sapiens
  misc_RNA (1)...(19): siRNA sense strand
uggcuaccauuaagucagu

SEQ ID NO: 39736 - RNA, 19 nt, Homo sapiens
  misc_RNA (1)...(19): siRNA sense strand
gcucuuccaaucuccauca

SEQ ID NO: 39737 - RNA, 19 nt, Homo sapiens
  misc_RNA (1)...(19): siRNA sense strand
ugguuugugccuuacauua

SEQ ID NO: 39738 - RNA, 19 nt, Homo sapiens
  misc_RNA (1)...(19): siRNA sense strand
ugguaaagccucagcaaca

SEQ ID NO: 39739 - RNA, 19 nt, Homo sapiens
  misc_RNA (1)...(19): siRNA sense strand
uggauugggagauuucauu

SEQ ID NO: 39740 - RNA, 19 nt, Homo sapiens
  misc_RNA (1)...(19): siRNA sense strand
gcucucauuuacuccucaa

SEQ ID NO: 39741 - RNA, 19 nt, Homo sapiens
  misc_RNA (1)...(19): siRNA sense strand
gcgccaagcaugugaucau

SEQ ID NO: 39742 - RNA, 19 nt, Homo sapiens
  misc_RNA (1)...(19): siRNA sense strand
gagcugacauugaaauaug

SEQ ID NO: 39743 - RNA, 19 nt, Homo sapiens
  misc_RNA (1)...(19): siRNA sense strand
cagcaggcauaucucauua

SEQ ID NO: 39744 - RNA, 19 nt, Homo sapiens
  misc_RNA (1)...(19): siRNA sense strand
gaaagggagucacaagaca

SEQ ID NO: 39745 - RNA, 19 nt, Homo sapiens
  misc_RNA (1)...(19): siRNA sense strand
ucaaguaccucccugaaug

SEQ ID NO: 39746 - RNA, 19 nt, Homo sapiens
  misc_RNA (1)...(19): siRNA sense strand
ggagcaagaugaggaagaa

SEQ ID NO: 39747 - RNA, 19 nt, Homo sapiens
  misc_RNA (1)...(19): siRNA sense strand
ugaaacagcucaggagaga

SEQ ID NO: 39748 - RNA, 19 nt, Homo sapiens
  misc_RNA (1)...(19): siRNA sense strand
gcccugcacucaauucuga

SEQ ID NO: 39749 - RNA, 19 nt, Homo sapiens
  misc_RNA (1)...(19): siRNA sense strand
gacaaccaccugagcaaua

SEQ ID NO: 39750 - RNA, 19 nt, Homo sapiens
  misc_RNA (1)...(19): siRNA sense strand
auccaugccuggcuuauua

SEQ ID NO: 39751 - RNA, 19 nt, Homo sapiens
  misc_RNA (1)...(19): siRNA sense strand
aaacagcucaggagagaaa

SEQ ID NO: 39752 - RNA, 19 nt, Homo sapiens
  misc_RNA (1)...(19): siRNA sense strand
gcacagaaagggagucaca

SEQ ID NO: 39753 - RNA, 19 nt, Homo sapiens
  misc_RNA (1)...(19): siRNA sense strand
gaugaggagcugacauuga

SEQ ID NO: 39754 - RNA, 19 nt, Homo sapiens
  misc_RNA (1)...(19): siRNA sense strand
ggucguggcuaccauuaag

SEQ ID NO: 39755 - RNA, 19 nt, Homo sapiens
  misc_RNA (1)...(19): siRNA sense strand
augaggagcugacauugaa

SEQ ID NO: 39756 - RNA, 19 nt, Homo sapiens
  misc_RNA (1)...(19): siRNA sense strand
agagagcccugcacucaau

SEQ ID NO: 39757 - RNA, 19 nt, Homo sapiens
  misc_RNA (1)...(19): siRNA sense strand
gaugggcagcuaaucuaua

SEQ ID NO: 39758 - RNA, 19 nt, Homo sapiens
  misc_RNA (1)...(19): siRNA sense strand
aaauacaggugcuauaagg

SEQ ID NO: 39759 - RNA, 19 nt, Homo sapiens
  misc_RNA (1)...(19): siRNA sense strand
ccucaacaauggugugguu

SEQ ID NO: 39760 - RNA, 19 nt, Homo sapiens
  misc_RNA (1)...(19): siRNA sense strand
uggugguucuguauaaaua

SEQ ID NO: 39761 - RNA, 19 nt, Homo sapiens
  misc_RNA (1)...(19): siRNA sense strand
ucauggcccugguguuuau

SEQ ID NO: 39762 - RNA, 19 nt, Homo sapiens
  misc_RNA (1)...(19): siRNA sense strand
ccagagagcccugcacuca

SEQ ID NO: 39763 - RNA, 19 nt, Homo sapiens
  misc_RNA (1)...(19): siRNA sense strand
gcucaggagagaaaugaaa

SEQ ID NO: 39764 - RNA, 19 nt, Homo sapiens
  misc_RNA (1)...(19): siRNA sense strand
gaaagguccacuucguaug

SEQ ID NO: 39765 - RNA, 19 nt, Homo sapiens
  misc_RNA (1)...(19): siRNA sense strand
cagaagauaccgagacugu

SEQ ID NO: 39766 - RNA, 19 nt, Homo sapiens
  misc_RNA (1)...(19): siRNA sense strand
uaacguugcuguggacuac

SEQ ID NO: 39767 - RNA, 19 nt, Homo sapiens
  misc_RNA (1)...(19): siRNA sense strand
gcaagaugaggaagaagau

SEQ ID NO: 39768 - RNA, 19 nt, Homo sapiens
  misc_RNA (1)...(19): siRNA sense strand
ccucauggcccugguguuu

SEQ ID NO: 39769 - RNA, 19 nt, Homo sapiens
  misc_RNA (1)...(19): siRNA sense strand
ggacuacauuacuguugca

SEQ ID NO: 39770 - RNA, 19 nt, Homo sapiens
  misc_RNA (1)...(19): siRNA sense strand
ggaaggaugggcagcuaau

SEQ ID NO: 39771 - RNA, 19 nt, Homo sapiens
  misc_RNA (1)...(19): siRNA sense strand
gaaauauggcgccaagcau

SEQ ID NO: 39772 - RNA, 19 nt, Homo sapiens
  misc_RNA (1)...(19): siRNA sense strand
gagaacggcaggagcacaa

SEQ ID NO: 39773 - RNA, 19 nt, Homo sapiens
  misc_RNA (1)...(19): siRNA sense strand
caaaggagaguauccaaaa

SEQ ID NO: 39774 - RNA, 19 nt, Homo sapiens
  misc_RNA (1)...(19): siRNA sense strand
gaagcucaaaggagaguau

SEQ ID NO: 39775 - RNA, 19 nt, Homo sapiens
  misc_RNA (1)...(19): siRNA sense strand
gcacuccugaucuggaauu

SEQ ID NO: 39776 - RNA, 19 nt, Homo sapiens
  misc_RNA (1)...(19): siRNA sense strand
gcuguggacuacauuacug

SEQ ID NO: 39777 - RNA, 19 nt, Homo sapiens
  misc_RNA (1)...(19): siRNA sense strand
ucugaaugcugccaucaug

SEQ ID NO: 39778 - RNA, 19 nt, Homo sapiens
  misc_RNA (1)...(19): siRNA sense strand
gagagaaaugaaacgcuuu

SEQ ID NO: 39779 - RNA, 19 nt, Homo sapiens
  misc_RNA (1)...(19): siRNA sense strand
ggagcugacauugaaauau

SEQ ID NO: 39780 - RNA, 19 nt, Homo sapiens
  misc_RNA (1)...(19): siRNA sense strand
ccagcaggcauaucucauu

SEQ ID NO: 39781 - RNA, 19 nt, Homo sapiens
  misc_RNA (1)...(19): siRNA sense strand
ccagagggacagucaucua

SEQ ID NO: 39782 - RNA, 19 nt, Homo sapiens
  misc_RNA (1)...(19): siRNA sense strand
cagaaagggagucacaaga

SEQ ID NO: 39783 - RNA, 19 nt, Homo sapiens
  misc_RNA (1)...(19): siRNA sense strand
ucaaaggagaguauccaaa

SEQ ID NO: 39784 - RNA, 19 nt, Homo sapiens
  misc_RNA (1)...(19): siRNA sense strand
ccaaguauaaugcagaaag

SEQ ID NO: 39785 - RNA, 19 nt, Homo sapiens
  misc_RNA (1)...(19): siRNA sense strand
aagaugaggagcugacauu

SEQ ID NO: 39786 - RNA, 19 nt, Homo sapiens
  misc_RNA (1)...(19): siRNA sense strand
acccugagccauuaucuaa

SEQ ID NO: 39787 - RNA, 19 nt, Homo sapiens
  misc_RNA (1)...(19): siRNA sense strand
uggcucaucuuggcuguga

SEQ ID NO: 39788 - RNA, 19 nt, Homo sapiens
  misc_RNA (1)...(19): siRNA sense strand
gcccugguguuuaucaagu

SEQ ID NO: 39789 - RNA, 19 nt, Homo sapiens
  misc_RNA (1)...(19): siRNA sense strand
ggacaaccaccugagcaau

SEQ ID NO: 39790 - RNA, 19 nt, Homo sapiens
  misc_RNA (1)...(19): siRNA sense strand
gaggagcugacauugaaau

SEQ ID NO: 39791 - RNA, 19 nt, Homo sapiens
  misc_RNA (1)...(19): siRNA sense strand
ggcaggugguggagcaaga

SEQ ID NO: 39792 - RNA, 19 nt, Homo sapiens
  misc_RNA (1)...(19): siRNA sense strand
cauuaagucagucagcuuu

SEQ ID NO: 39793 - RNA, 19 nt, Homo sapiens
  misc_RNA (1)...(19): siRNA sense strand
ugaaauauggcgccaagca

SEQ ID NO: 39794 - RNA, 19 nt, Homo sapiens
  misc_RNA (1)...(19): siRNA sense strand
uaucaucucuauuguugcu

SEQ ID NO: 39795 - RNA, 19 nt, Homo sapiens
  misc_RNA (1)...(19): siRNA sense strand
gcucaucuuggcugugauu

SEQ ID NO: 39796 - RNA, 19 nt, Homo sapiens
  misc_RNA (1)...(19): siRNA sense strand
gguguggugggaaugauuu

SEQ ID NO: 39797 - RNA, 19 nt, Homo sapiens
  misc_RNA (1)...(19): siRNA sense strand
ggacugcguggcucaucuu

SEQ ID NO: 39798 - RNA, 19 nt, Homo sapiens
  misc_RNA (1)...(19): siRNA sense strand
ggaugggcagcuaaucuau

SEQ ID NO: 39799 - RNA, 19 nt, Homo sapiens
  misc_RNA (1)...(19): siRNA sense strand
gcaggagcacaacgacaga

SEQ ID NO: 39800 - RNA, 19 nt, Homo sapiens
  misc_RNA (1)...(19): siRNA sense strand
ccggaaggaugggcagcua

SEQ ID NO: 39801 - RNA, 19 nt, Homo sapiens
  misc_RNA (1)...(19): siRNA sense strand
agacacuguugcagagaau

SEQ ID NO: 39802 - RNA, 19 nt, Homo sapiens
  misc_RNA (1)...(19): siRNA sense strand
ggagucacaagacacuguu

SEQ ID NO: 39803 - RNA, 19 nt, Homo sapiens
  misc_RNA (1)...(19): siRNA sense strand
aagaugaggaagaagauga

SEQ ID NO: 39804 - RNA, 19 nt, Homo sapiens
  misc_RNA (1)...(19): siRNA sense strand
uaaauacaggugcuauaag

SEQ ID NO: 39805 - RNA, 19 nt, Homo sapiens
  misc_RNA (1)...(19): siRNA sense strand
cagcucaggagagaaauga

SEQ ID NO: 39806 - RNA, 19 nt, Homo sapiens
  misc_RNA (1)...(19): siRNA sense strand
aagacacuguugcagagaa

SEQ ID NO: 39807 - RNA, 19 nt, Homo sapiens
  misc_RNA (1)...(19): siRNA sense strand
uuaagucagucagcuuuua

SEQ ID NO: 39808 - RNA, 19 nt, Homo sapiens
  misc_RNA (1)...(19): siRNA sense strand
acaaccaccugagcaauac

SEQ ID NO: 39809 - RNA, 19 nt, Homo sapiens
  misc_RNA (1)...(19): siRNA sense strand
cacagaagauaccgagacu

SEQ ID NO: 39810 - RNA, 19 nt, Homo sapiens
  misc_RNA (1)...(19): siRNA sense strand
ccuggugguucuguauaaa

SEQ ID NO: 39811 - RNA, 19 nt, Homo sapiens
  misc_RNA (1)...(19): siRNA sense strand
uggugugguuggugaauau

SEQ ID NO: 39812 - RNA, 19 nt, Homo sapiens
  misc_RNA (1)...(19): siRNA sense strand
uaucaaguaccucccugaa

SEQ ID NO: 39813 - RNA, 19 nt, Homo sapiens
  misc_RNA (1)...(19): siRNA sense strand
gaagaugaggagcugacau

SEQ ID NO: 39814 - RNA, 19 nt, Homo sapiens
  misc_RNA (1)...(19): siRNA sense strand
uggcuaccauuaagucagu

SEQ ID NO: 39815 - RNA, 19 nt, Homo sapiens
  misc_RNA (1)...(19): siRNA sense strand
gcucucauuuacuccucaa

SEQ ID NO: 39816 - RNA, 19 nt, Homo sapiens
  misc_RNA (1)...(19): siRNA sense strand
gcgccaagcaugugaucau

SEQ ID NO: 39817 - RNA, 19 nt, Homo sapiens
  misc_RNA (1)...(19): siRNA sense strand
gcuaaucuauaccccauuc

SEQ ID NO: 39818 - RNA, 19 nt, Homo sapiens
  misc_RNA (1)...(19): siRNA sense strand
gaaggaugggcagcuaauc

SEQ ID NO: 39819 - RNA, 19 nt, Homo sapiens
  misc_RNA (1)...(19): siRNA sense strand
cagagggacagucaucuag

SEQ ID NO: 39820 - RNA, 19 nt, Homo sapiens
  misc_RNA (1)...(19): siRNA sense strand
uccuggugguucuguauaa

SEQ ID NO: 39821 - RNA, 19 nt, Homo sapiens
  misc_RNA (1)...(19): siRNA sense strand
gaaugcugccaucaugauc

SEQ ID NO: 39822 - RNA, 19 nt, Homo sapiens
  misc_RNA (1)...(19): siRNA sense strand
ugaaugcugccaucaugau

SEQ ID NO: 39823 - RNA, 19 nt, Homo sapiens
  misc_RNA (1)...(19): siRNA sense strand
cucauuuacuccucaacaa

SEQ ID NO: 39824 - RNA, 19 nt, Homo sapiens
  misc_RNA (1)...(19): siRNA sense strand
caaguaccucccugaaugg

SEQ ID NO: 39825 - RNA, 19 nt, Homo sapiens
  misc_RNA (1)...(19): siRNA sense strand
uaccugcaccguuguccua

SEQ ID NO: 39826 - RNA, 19 nt, Homo sapiens
  misc_RNA (1)...(19): siRNA sense strand
augccuggcuuauuauauc

SEQ ID NO: 39827 - RNA, 19 nt, Homo sapiens
  misc_RNA (1)...(19): siRNA sense strand
cagugucauuguugucaug

SEQ ID NO: 39828 - RNA, 19 nt, Homo sapiens
  misc_RNA (1)...(19): siRNA sense strand
cugcaccguuguccuacuu

SEQ ID NO: 39829 - RNA, 19 nt, Homo sapiens
  misc_RNA (1)...(19): siRNA sense strand
aggaugggcagcuaaucua

SEQ ID NO: 39830 - RNA, 19 nt, Homo sapiens
  misc_RNA (1)...(19): siRNA sense strand
gggagucacaagacacugu

SEQ ID NO: 39831 - RNA, 19 nt, Homo sapiens
  misc_RNA (1)...(19): siRNA sense strand
ccaugccuggcuuauuaua

SEQ ID NO: 39832 - RNA, 19 nt, Homo sapiens
  misc_RNA (1)...(19): siRNA sense strand
ggagagaaaugagcccaua

SEQ ID NO: 39833 - RNA, 19 nt, Homo sapiens
  misc_RNA (1)...(19): siRNA sense strand
gggaggagcuggaggaaga

SEQ ID NO: 39834 - RNA, 19 nt, Homo sapiens
  misc_RNA (1)...(19): siRNA sense strand
cauauucccugcccugaua

SEQ ID NO: 39835 - RNA, 19 nt, Homo sapiens
  misc_RNA (1)...(19): siRNA sense strand
gggaagugcucaagaccua

SEQ ID NO: 39836 - RNA, 19 nt, Homo sapiens
  misc_RNA (1)...(19): siRNA sense strand
gagcggacgucccuaaugu

SEQ ID NO: 39837 - RNA, 19 nt, Homo sapiens
  misc_RNA (1)...(19): siRNA sense strand
ggaggacccugaccgcuau

SEQ ID NO: 39838 - RNA, 19 nt, Homo sapiens
  misc_RNA (1)...(19): siRNA sense strand
ccaaagggccucugagaau

SEQ ID NO: 39839 - RNA, 19 nt, Homo sapiens
  misc_RNA (1)...(19): siRNA sense strand
caaagggccucugagaaug

SEQ ID NO: 39840 - RNA, 19 nt, Homo sapiens
  misc_RNA (1)...(19): siRNA sense strand
gcucauggcccuaguguuc

SEQ ID NO: 39841 - RNA, 19 nt, Homo sapiens
  misc_RNA (1)...(19): siRNA sense strand
ucacauucauggccucuga

SEQ ID NO: 39842 - RNA, 19 nt, Homo sapiens
  misc_RNA (1)...(19): siRNA sense strand
cagcaggccuaccucauca

SEQ ID NO: 39843 - RNA, 19 nt, Homo sapiens
  misc_RNA (1)...(19): siRNA sense strand
gagaaaugagcccauauuc

SEQ ID NO: 39844 - RNA, 19 nt, Homo sapiens
  misc_RNA (1)...(19): siRNA sense strand
aggaagagcugacccucaa

SEQ ID NO: 39845 - RNA, 19 nt, Homo sapiens
  misc_RNA (1)...(19): siRNA sense strand
gaagacuccuaugacaguu

SEQ ID NO: 39846 - RNA, 19 nt, Homo sapiens
  misc_RNA (1)...(19): siRNA sense strand
gaagagcugacccucaaau

SEQ ID NO: 39847 - RNA, 19 nt, Homo sapiens
  misc_RNA (1)...(19): siRNA sense strand
gcucaagaccuacaaugug

SEQ ID NO: 39848 - RNA, 19 nt, Homo sapiens
  misc_RNA (1)...(19): siRNA sense strand
cucauuggcuugugucuga

SEQ ID NO: 39849 - RNA, 19 nt, Homo sapiens
  misc_RNA (1)...(19): siRNA sense strand
gaugagcggacgucccuaa

SEQ ID NO: 39850 - RNA, 19 nt, Homo sapiens
  misc_RNA (1)...(19): siRNA sense strand
ugagaaugcugguagaaac

SEQ ID NO: 39851 - RNA, 19 nt, Homo sapiens
  misc_RNA (1)...(19): siRNA sense strand
ggagaagccaggagaacga

SEQ ID NO: 39852 - RNA, 19 nt, Homo sapiens
  misc_RNA (1)...(19): siRNA sense strand
gcugguugaucaugucuuc

SEQ ID NO: 39853 - RNA, 19 nt, Homo sapiens
  misc_RNA (1)...(19): siRNA sense strand
gcugaacacccucaucaug

SEQ ID NO: 39854 - RNA, 19 nt, Homo sapiens
  misc_RNA (1)...(19): siRNA sense strand
gagcgaagcacgugaucau

SEQ ID NO: 39855 - RNA, 19 nt, Homo sapiens
  misc_RNA (1)...(19): siRNA sense strand
aaacugcccaggagagaaa

SEQ ID NO: 39856 - RNA, 19 nt, Homo sapiens
  misc_RNA (1)...(19): siRNA sense strand
gacauucacugaggacaca

SEQ ID NO: 39857 - RNA, 19 nt, Homo sapiens
  misc_RNA (1)...(19): siRNA sense strand
aggaagaagugugugauga

SEQ ID NO: 39858 - RNA, 19 nt, Homo sapiens
  misc_RNA (1)...(19): siRNA sense strand
ucaagucugugcgcuucua

SEQ ID NO: 39859 - RNA, 19 nt, Homo sapiens
  misc_RNA (1)...(19): siRNA sense strand
gcagcaggccuaccucauc

SEQ ID NO: 39860 - RNA, 19 nt, Homo sapiens
  misc_RNA (1)...(19): siRNA sense strand
ugguggugcucuacaagua

SEQ ID NO: 39861 - RNA, 19 nt, Homo sapiens
  misc_RNA (1)...(19): siRNA sense strand
gaucagcgucaucgugguu

SEQ ID NO: 39862 - RNA, 19 nt, Homo sapiens
  misc_RNA (1)...(19): siRNA sense strand
ggaagaagugugugaugag

SEQ ID NO: 39863 - RNA, 19 nt, Homo sapiens
  misc_RNA (1)...(19): siRNA sense strand
ugacagcgaggaagaagug

SEQ ID NO: 39864 - RNA, 19 nt, Homo sapiens
  misc_RNA (1)...(19): siRNA sense strand
ggacuucaucuucuacagu

SEQ ID NO: 39865 - RNA, 19 nt, Homo sapiens
  misc_RNA (1)...(19): siRNA sense strand
agagaaaugagcccauauu

SEQ ID NO: 39866 - RNA, 19 nt, Homo sapiens
  misc_RNA (1)...(19): siRNA sense strand
gguuaugaccaucuucuug

SEQ ID NO: 39867 - RNA, 19 nt, Homo sapiens
  misc_RNA (1)...(19): siRNA sense strand
gaaacugcccaggagagaa

SEQ ID NO: 39868 - RNA, 19 nt, Homo sapiens
  misc_RNA (1)...(19): siRNA sense strand
gagcugacccucaaauacg

SEQ ID NO: 39869 - RNA, 19 nt, Homo sapiens
  misc_RNA (1)...(19): siRNA sense strand
gaggaagaagugugugaug

SEQ ID NO: 39870 - RNA, 19 nt, Homo sapiens
  misc_RNA (1)...(19): siRNA sense strand
uugaucaugucuucacuga

SEQ ID NO: 39871 - RNA, 19 nt, Homo sapiens
  misc_RNA (1)...(19): siRNA sense strand
gaauggacagcucaucuac

SEQ ID NO: 39872 - RNA, 19 nt, Homo sapiens
  misc_RNA (1)...(19): siRNA sense strand
gcccuaguguucaucaagu

SEQ ID NO: 39873 - RNA, 19 nt, Homo sapiens
  misc_RNA (1)...(19): siRNA sense strand
gcacgugaucaugcuguuu

SEQ ID NO: 39874 - RNA, 19 nt, Homo sapiens
  misc_RNA (1)...(19): siRNA sense strand
agaauggacagcucaucua

SEQ ID NO: 39875 - RNA, 19 nt, Homo sapiens
  misc_RNA (1)...(19): siRNA sense strand
gugcugaacacccucauca

SEQ ID NO: 39876 - RNA, 19 nt, Homo sapiens
  misc_RNA (1)...(19): siRNA sense strand
cccaucagcucuacaucug

SEQ ID NO: 39877 - RNA, 19 nt, Homo sapiens
  misc_RNA (1)...(19): siRNA sense strand
gagagaaaugagcccauau

SEQ ID NO: 39878 - RNA, 19 nt, Homo sapiens
  misc_RNA (1)...(19): siRNA sense strand
auccauggcugguugauca

SEQ ID NO: 39879 - RNA, 19 nt, Homo sapiens
  misc_RNA (1)...(19): siRNA sense strand
cagcucaucuacacgacau

SEQ ID NO: 39880 - RNA, 19 nt, Homo sapiens
  misc_RNA (1)...(19): siRNA sense strand
gcgaggaagaaguguguga

SEQ ID NO: 39881 - RNA, 19 nt, Homo sapiens
  misc_RNA (1)...(19): siRNA sense strand
gaagugcucaagaccuaca

SEQ ID NO: 39882 - RNA, 19 nt, Homo sapiens
  misc_RNA (1)...(19): siRNA sense strand
auaccacgcuggccugcuu

SEQ ID NO: 39883 - RNA, 19 nt, Homo sapiens
  misc_RNA (1)...(19): siRNA sense strand
gcccugauauacucaucug

SEQ ID NO: 39884 - RNA, 19 nt, Homo sapiens
  misc_RNA (1)...(19): siRNA sense strand
ggaagagcugacccucaaa

SEQ ID NO: 39885 - RNA, 19 nt, Homo sapiens
  misc_RNA (1)...(19): siRNA sense strand
gcugugcugugucccaaag

SEQ ID NO: 39886 - RNA, 19 nt, Homo sapiens
  misc_RNA (1)...(19): siRNA sense strand
ccuacaauguggccaugga

SEQ ID NO: 39887 - RNA, 19 nt, Homo sapiens
  misc_RNA (1)...(19): siRNA sense strand
guaccgcugcuacaaguuc

SEQ ID NO: 39888 - RNA, 19 nt, Homo sapiens
  misc_RNA (1)...(19): siRNA sense strand
ucucguggcugugcugugu

SEQ ID NO: 39889 - RNA, 19 nt, Homo sapiens
  misc_RNA (1)...(19): siRNA sense strand
gcaggccuaccucaucaug

SEQ ID NO: 39890 - RNA, 19 nt, Homo sapiens
  misc_RNA (1)...(19): siRNA sense strand
gaagaauggacagcucauc

SEQ ID NO: 39891 - RNA, 19 nt, Homo sapiens
  misc_RNA (1)...(19): siRNA sense strand
aagagcugacccucaaaua

SEQ ID NO: 39892 - RNA, 19 nt, Homo sapiens
  misc_RNA (1)...(19): siRNA sense strand
uagccaccaucaagucugu

SEQ ID NO: 39893 - RNA, 19 nt, Homo sapiens
  misc_RNA (1)...(19): siRNA sense strand
cccuaguguucaucaagua

SEQ ID NO: 39894 - RNA, 19 nt, Homo sapiens
  misc_RNA (1)...(19): siRNA sense strand
acaauguggccauggacua

SEQ ID NO: 39895 - RNA, 19 nt, Homo sapiens
  misc_RNA (1)...(19): siRNA sense strand
ggaggaagaggaggaaagg

SEQ ID NO: 39896 - RNA, 19 nt, Homo sapiens
  misc_RNA (1)...(19): siRNA sense strand
ccugaccgcuaugucugua

SEQ ID NO: 39897 - RNA, 19 nt, Homo sapiens
  misc_RNA (1)...(19): siRNA sense strand
caaguaccgcugcuacaag

SEQ ID NO: 39898 - RNA, 19 nt, Homo sapiens
  misc_RNA (1)...(19): siRNA sense strand
cauccucauuggcuugugu

SEQ ID NO: 39899 - RNA, 19 nt, Homo sapiens
  misc_RNA (1)...(19): siRNA sense strand
acaaguaccgcugcuacaa

SEQ ID NO: 39900 - RNA, 19 nt, Homo sapiens
  misc_RNA (1)...(19): siRNA sense strand
cguucgggcucaucuuuua

SEQ ID NO: 39901 - RNA, 19 nt, Homo sapiens
  misc_RNA (1)...(19): siRNA sense strand
gagaaugcugguagaaacu

SEQ ID NO: 39902 - RNA, 19 nt, Homo sapiens
  misc_RNA (1)...(19): siRNA sense strand
ccucuucaccuauaucuac

SEQ ID NO: 39903 - RNA, 19 nt, Homo sapiens
  misc_RNA (1)...(19): siRNA sense strand
cuguuccucuucaccuaua

SEQ ID NO: 39904 - RNA, 19 nt, Homo sapiens
  misc_RNA (1)...(19): siRNA sense strand
gcccagaggauggagagaa

SEQ ID NO: 39905 - RNA, 19 nt, Homo sapiens
  misc_RNA (1)...(19): siRNA sense strand
aaguaccgcugcuacaagu

SEQ ID NO: 39906 - RNA, 19 nt, Homo sapiens
  misc_RNA (1)...(19): siRNA sense strand
ucaaauacggagcgaagca

SEQ ID NO: 39907 - RNA, 19 nt, Homo sapiens
  misc_RNA (1)...(19): siRNA sense strand
ugaccgcuaugucuguagu

SEQ ID NO: 39908 - RNA, 19 nt, Homo sapiens
  misc_RNA (1)...(19): siRNA sense strand
cgccaucucuguguaugau

SEQ ID NO: 39909 - RNA, 19 nt, Homo sapiens
  misc_RNA (1)...(19): siRNA sense strand
cacgugaucaugcuguuug

SEQ ID NO: 39910 - RNA, 19 nt, Homo sapiens
  misc_RNA (1)...(19): siRNA sense strand
cuucguggccauccucauu

SEQ ID NO: 39911 - RNA, 19 nt, Homo sapiens
  misc_RNA (1)...(19): siRNA sense strand
cagcgaggaagaagugugu

SEQ ID NO: 39912 - RNA, 19 nt, Homo sapiens
  misc_RNA (1)...(19): siRNA sense strand
cccaaagggccucugagaa

SEQ ID NO: 39913 - RNA, 19 nt, Homo sapiens
  misc_RNA (1)...(19): siRNA sense strand
ggacuaccccacccucuug

SEQ ID NO: 39914 - RNA, 19 nt, Homo sapiens
  misc_RNA (1)...(19): siRNA sense strand
cacguucgggcucaucuuu

SEQ ID NO: 39915 - RNA, 19 nt, Homo sapiens
  misc_RNA (1)...(19): siRNA sense strand
ggagagaaaugagcccaua

SEQ ID NO: 39916 - RNA, 19 nt, Homo sapiens
  misc_RNA (1)...(19): siRNA sense strand
gggaggagcuggaggaaga

SEQ ID NO: 39917 - RNA, 19 nt, Homo sapiens
  misc_RNA (1)...(19): siRNA sense strand
cauauucccugcccugaua

SEQ ID NO: 39918 - RNA, 19 nt, Homo sapiens
  misc_RNA (1)...(19): siRNA sense strand
gggaagugcucaagaccua

SEQ ID NO: 39919 - RNA, 19 nt, Homo sapiens
  misc_RNA (1)...(19): siRNA sense strand
gagcggacgucccuaaugu

SEQ ID NO: 39920 - RNA, 19 nt, Homo sapiens
  misc_RNA (1)...(19): siRNA sense strand
ggaggacccugaccgcuau

SEQ ID NO: 39921 - RNA, 19 nt, Homo sapiens
  misc_RNA (1)...(19): siRNA sense strand
ccaaagggccucugagaau

SEQ ID NO: 39922 - RNA, 19 nt, Homo sapiens
  misc_RNA (1)...(19): siRNA sense strand
caaagggccucugagaaug

SEQ ID NO: 39923 - RNA, 19 nt, Homo sapiens
  misc_RNA (1)...(19): siRNA sense strand
gcucauggcccuaguguuc

SEQ ID NO: 39924 - RNA, 19 nt, Homo sapiens
  misc_RNA (1)...(19): siRNA sense strand
ucacauucauggccucuga

SEQ ID NO: 39925 - RNA, 19 nt, Homo sapiens
  misc_RNA (1)...(19): siRNA sense strand
cagcaggccuaccucauca

SEQ ID NO: 39926 - RNA, 19 nt, Homo sapiens
  misc_RNA (1)...(19): siRNA sense strand
gagaaaugagcccauauuc

SEQ ID NO: 39927 - RNA, 19 nt, Homo sapiens
  misc_RNA (1)...(19): siRNA sense strand
aggaagagcugacccucaa

SEQ ID NO: 39928 - RNA, 19 nt, Homo sapiens
  misc_RNA (1)...(19): siRNA sense strand
gaagacuccuaugacaguu

SEQ ID NO: 39929 - RNA, 19 nt, Homo sapiens
  misc_RNA (1)...(19): siRNA sense strand
gaagagcugacccucaaau

SEQ ID NO: 39930 - RNA, 19 nt, Homo sapiens
  misc_RNA (1)...(19): siRNA sense strand
gcucaagaccuacaaugug

SEQ ID NO: 39931 - RNA, 19 nt, Homo sapiens
  misc_RNA (1)...(19): siRNA sense strand
cucauuggcuugugucuga

SEQ ID NO: 39932 - RNA, 19 nt, Homo sapiens
  misc_RNA (1)...(19): siRNA sense strand
gaugagcggacgucccuaa

SEQ ID NO: 39933 - RNA, 19 nt, Homo sapiens
  misc_RNA (1)...(19): siRNA sense strand
ugagaaugcugguagaaac

SEQ ID NO: 39934 - RNA, 19 nt, Homo sapiens
  misc_RNA (1)...(19): siRNA sense strand
ggagaagccaggagaacga

SEQ ID NO: 39935 - RNA, 19 nt, Homo sapiens
  misc_RNA (1)...(19): siRNA sense strand
gcugguugaucaugucuuc

SEQ ID NO: 39936 - RNA, 19 nt, Homo sapiens
  misc_RNA (1)...(19): siRNA sense strand
gcugaacacccucaucaug

SEQ ID NO: 39937 - RNA, 19 nt, Homo sapiens
  misc_RNA (1)...(19): siRNA sense strand
gagcgaagcacgugaucau

SEQ ID NO: 39938 - RNA, 19 nt, Homo sapiens
  misc_RNA (1)...(19): siRNA sense strand
aaacugcccaggagagaaa

SEQ ID NO: 39939 - RNA, 19 nt, Homo sapiens
  misc_RNA (1)...(19): siRNA sense strand
gacauucacugaggacaca

SEQ ID NO: 39940 - RNA, 19 nt, Homo sapiens
  misc_RNA (1)...(19): siRNA sense strand
aggaagaagugugugauga

SEQ ID NO: 39941 - RNA, 19 nt, Homo sapiens
  misc_RNA (1)...(19): siRNA sense strand
ucaagucugugcgcuucua

SEQ ID NO: 39942 - RNA, 19 nt, Homo sapiens
  misc_RNA (1)...(19): siRNA sense strand
gcagcaggccuaccucauc

SEQ ID NO: 39943 - RNA, 19 nt, Homo sapiens
  misc_RNA (1)...(19): siRNA sense strand
ugguggugcucuacaagua

SEQ ID NO: 39944 - RNA, 19 nt, Homo sapiens
  misc_RNA (1)...(19): siRNA sense strand
gaucagcgucaucgugguu

SEQ ID NO: 39945 - RNA, 19 nt, Homo sapiens
  misc_RNA (1)...(19): siRNA sense strand
ggaagaagugugugaugag

SEQ ID NO: 39946 - RNA, 19 nt, Homo sapiens
  misc_RNA (1)...(19): siRNA sense strand
ugacagcgaggaagaagug

SEQ ID NO: 39947 - RNA, 19 nt, Homo sapiens
  misc_RNA (1)...(19): siRNA sense strand
ggacuucaucuucuacagu

SEQ ID NO: 39948 - RNA, 19 nt, Homo sapiens
  misc_RNA (1)...(19): siRNA sense strand
agagaaaugagcccauauu

SEQ ID NO: 39949 - RNA, 19 nt, Homo sapiens
  misc_RNA (1)...(19): siRNA sense strand
gguuaugaccaucuucuug

SEQ ID NO: 39950 - RNA, 19 nt, Homo sapiens
  misc_RNA (1)...(19): siRNA sense strand
gaaacugcccaggagagaa

SEQ ID NO: 39951 - RNA, 19 nt, Homo sapiens
  misc_RNA (1)...(19): siRNA sense strand
gagcugacccucaaauacg

SEQ ID NO: 39952 - RNA, 19 nt, Homo sapiens
  misc_RNA (1)...(19): siRNA sense strand
gaggaagaagugugugaug

SEQ ID NO: 39953 - RNA, 19 nt, Homo sapiens
  misc_RNA (1)...(19): siRNA sense strand
uugaucaugucuucacuga

SEQ ID NO: 39954 - RNA, 19 nt, Homo sapiens
  misc_RNA (1)...(19): siRNA sense strand
gaauggacagcucaucuac

SEQ ID NO: 39955 - RNA, 19 nt, Homo sapiens
  misc_RNA (1)...(19): siRNA sense strand
gcccuaguguucaucaagu

SEQ ID NO: 39956 - RNA, 19 nt, Homo sapiens
  misc_RNA (1)...(19): siRNA sense strand
gcacgugaucaugcuguuu

SEQ ID NO: 39957 - RNA, 19 nt, Homo sapiens
  misc_RNA (1)...(19): siRNA sense strand
agaauggacagcucaucua

SEQ ID NO: 39958 - RNA, 19 nt, Homo sapiens
  misc_RNA (1)...(19): siRNA sense strand
gugcugaacacccucauca

SEQ ID NO: 39959 - RNA, 19 nt, Homo sapiens
  misc_RNA (1)...(19): siRNA sense strand
cccaucagcucuacaucug

SEQ ID NO: 39960 - RNA, 19 nt, Homo sapiens
  misc_RNA (1)...(19): siRNA sense strand
gagagaaaugagcccauau

SEQ ID NO: 39961 - RNA, 19 nt, Homo sapiens
  misc_RNA (1)...(19): siRNA sense strand
auccauggcugguugauca

SEQ ID NO: 39962 - RNA, 19 nt, Homo sapiens
  misc_RNA (1)...(19): siRNA sense strand
cagcucaucuacacgacau

SEQ ID NO: 39963 - RNA, 19 nt, Homo sapiens
  misc_RNA (1)...(19): siRNA sense strand
gcgaggaagaaguguguga

SEQ ID NO: 39964 - RNA, 19 nt, Homo sapiens
  misc_RNA (1)...(19): siRNA sense strand
gaagugcucaagaccuaca

SEQ ID NO: 39965 - RNA, 19 nt, Homo sapiens
  misc_RNA (1)...(19): siRNA sense strand
auaccacgcuggccugcuu

SEQ ID NO: 39966 - RNA, 19 nt, Homo sapiens
  misc_RNA (1)...(19): siRNA sense strand
gcccugauauacucaucug

SEQ ID NO: 39967 - RNA, 19 nt, Homo sapiens
  misc_RNA (1)...(19): siRNA sense strand
ggaagagcugacccucaaa

SEQ ID NO: 39968 - RNA, 19 nt, Homo sapiens
  misc_RNA (1)...(19): siRNA sense strand
gcugugcugugucccaaag

SEQ ID NO: 39969 - RNA, 19 nt, Homo sapiens
  misc_RNA (1)...(19): siRNA sense strand
ccuacaauguggccaugga

SEQ ID NO: 39970 - RNA, 19 nt, Homo sapiens
  misc_RNA (1)...(19): siRNA sense strand
guaccgcugcuacaaguuc

SEQ ID NO: 39971 - RNA, 19 nt, Homo sapiens
  misc_RNA (1)...(19): siRNA sense strand
ucucguggcugugcugugu

SEQ ID NO: 39972 - RNA, 19 nt, Homo sapiens
  misc_RNA (1)...(19): siRNA sense strand
gcaggccuaccucaucaug

SEQ ID NO: 39973 - RNA, 19 nt, Homo sapiens
  misc_RNA (1)...(19): siRNA sense strand
gaagaauggacagcucauc

SEQ ID NO: 39974 - RNA, 19 nt, Homo sapiens
  misc_RNA (1)...(19): siRNA sense strand
aagagcugacccucaaaua

SEQ ID NO: 39975 - RNA, 19 nt, Homo sapiens
  misc_RNA (1)...(19): siRNA sense strand
uagccaccaucaagucugu

SEQ ID NO: 39976 - RNA, 19 nt, Homo sapiens
  misc_RNA (1)...(19): siRNA sense strand
cccuaguguucaucaagua

SEQ ID NO: 39977 - RNA, 19 nt, Homo sapiens
  misc_RNA (1)...(19): siRNA sense strand
acaauguggccauggacua

SEQ ID NO: 39978 - RNA, 19 nt, Homo sapiens
  misc_RNA (1)...(19): siRNA sense strand
ggaggaagaggaggaaagg

SEQ ID NO: 39979 - RNA, 19 nt, Homo sapiens
  misc_RNA (1)...(19): siRNA sense strand
ccugaccgcuaugucugua

SEQ ID NO: 39980 - RNA, 19 nt, Homo sapiens
  misc_RNA (1)...(19): siRNA sense strand
caaguaccgcugcuacaag

SEQ ID NO: 39981 - RNA, 19 nt, Homo sapiens
  misc_RNA (1)...(19): siRNA sense strand
cauccucauuggcuugugu

SEQ ID NO: 39982 - RNA, 19 nt, Homo sapiens
  misc_RNA (1)...(19): siRNA sense strand
acaaguaccgcugcuacaa

SEQ ID NO: 39983 - RNA, 19 nt, Homo sapiens
  misc_RNA (1)...(19): siRNA sense strand
cguucgggcucaucuuuua

SEQ ID NO: 39984 - RNA, 19 nt, Homo sapiens
  misc_RNA (1)...(19): siRNA sense strand
gagaaugcugguagaaacu

SEQ ID NO: 39985 - RNA, 19 nt, Homo sapiens
  misc_RNA (1)...(19): siRNA sense strand
ccucuucaccuauaucuac

SEQ ID NO: 39986 - RNA, 19 nt, Homo sapiens
  misc_RNA (1)...(19): siRNA sense strand
cuguuccucuucaccuaua

SEQ ID NO: 39987 - RNA, 19 nt, Homo sapiens
  misc_RNA (1)...(19): siRNA sense strand
gcccagaggauggagagaa

SEQ ID NO: 39988 - RNA, 19 nt, Homo sapiens
  misc_RNA (1)...(19): siRNA sense strand
aaguaccgcugcuacaagu

SEQ ID NO: 39989 - RNA, 19 nt, Homo sapiens
  misc_RNA (1)...(19): siRNA sense strand
ucaaauacggagcgaagca

SEQ ID NO: 39990 - RNA, 19 nt, Homo sapiens
  misc_RNA (1)...(19): siRNA sense strand
ugaccgcuaugucuguagu

SEQ ID NO: 39991 - RNA, 19 nt, Homo sapiens
  misc_RNA (1)...(19): siRNA sense strand
cgccaucucuguguaugau

SEQ ID NO: 39992 - RNA, 19 nt, Homo sapiens
  misc_RNA (1)...(19): siRNA sense strand
cacgugaucaugcuguuug

SEQ ID NO: 39993 - RNA, 19 nt, Homo sapiens
  misc_RNA (1)...(19): siRNA sense strand
cuucguggccauccucauu

SEQ ID NO: 39994 - RNA, 19 nt, Homo sapiens
  misc_RNA (1)...(19): siRNA sense strand
cagcgaggaagaagugugu

SEQ ID NO: 39995 - RNA, 19 nt, Homo sapiens
  misc_RNA (1)...(19): siRNA sense strand
cccaaagggccucugagaa

SEQ ID NO: 39996 - RNA, 19 nt, Homo sapiens
  misc_RNA (1)...(19): siRNA sense strand
ggacuaccccacccucuug

SEQ ID NO: 39997 - RNA, 19 nt, Homo sapiens
  misc_RNA (1)...(19): siRNA sense strand
cacguucgggcucaucuuu

SEQ ID NO: 39998 - RNA, 19 nt, Homo sapiens
  misc_RNA (1)...(19): siRNA sense strand
gaagguggaugcaauucuu

SEQ ID NO: 39999 - RNA, 19 nt, Homo sapiens
  misc_RNA (1)...(19): siRNA sense strand
gcgcuacgaucauuguuaa

SEQ ID NO: 40000 - RNA, 19 nt, Homo sapiens
  misc_RNA (1)...(19): siRNA sense strand
ggaaagcucuugggugaag

SEQ ID NO: 40001 - RNA, 19 nt, Homo sapiens
  misc_RNA (1)...(19): siRNA sense strand
uaagaacugugaccugaug

SEQ ID NO: 40002 - RNA, 19 nt, Homo sapiens
  misc_RNA (1)...(19): siRNA sense strand
ccaggugacugcugagguu

SEQ ID NO: 40003 - RNA, 19 nt, Homo sapiens
  misc_RNA (1)...(19): siRNA sense strand
gaccuuggcuggcgcaaag

SEQ ID NO: 40004 - RNA, 19 nt, Homo sapiens
  misc_RNA (1)...(19): siRNA sense strand
ggaugggacuccugguaug

SEQ ID NO: 40005 - RNA, 19 nt, Homo sapiens
  misc_RNA (1)...(19): siRNA sense strand
aaauccaagucucucuuua

SEQ ID NO: 40006 - RNA, 19 nt, Homo sapiens
  misc_RNA (1)...(19): siRNA sense strand
ggccagcgcuacgaucauu

SEQ ID NO: 40007 - RNA, 19 nt, Homo sapiens
  misc_RNA (1)...(19): siRNA sense strand
ugacagacucguucacuga

SEQ ID NO: 40008 - RNA, 19 nt, Homo sapiens
  misc_RNA (1)...(19): siRNA sense strand
caaauccaagucucucuuu

SEQ ID NO: 40009 - RNA, 19 nt, Homo sapiens
  misc_RNA (1)...(19): siRNA sense strand
aagagaagguggaugcaau

SEQ ID NO: 40010 - RNA, 19 nt, Homo sapiens
  misc_RNA (1)...(19): siRNA sense strand
gaaggaaggacggaacuca

SEQ ID NO: 40011 - RNA, 19 nt, Homo sapiens
  misc_RNA (1)...(19): siRNA sense strand
gcguugaugugguggagaa

SEQ ID NO: 40012 - RNA, 19 nt, Homo sapiens
  misc_RNA (1)...(19): siRNA sense strand
gaagagaagguggaugcaa

SEQ ID NO: 40013 - RNA, 19 nt, Homo sapiens
  misc_RNA (1)...(19): siRNA sense strand
uaccaagcaucucaaggaa

SEQ ID NO: 40014 - RNA, 19 nt, Homo sapiens
  misc_RNA (1)...(19): siRNA sense strand
acugugaccugauguggaa

SEQ ID NO: 40015 - RNA, 19 nt, Homo sapiens
  misc_RNA (1)...(19): siRNA sense strand
cuaccaagcaucucaagga

SEQ ID NO: 40016 - RNA, 19 nt, Homo sapiens
  misc_RNA (1)...(19): siRNA sense strand
cgcaaaggcugcccuggau

SEQ ID NO: 40017 - RNA, 19 nt, Homo sapiens
  misc_RNA (1)...(19): siRNA sense strand
aauccaagucucucuuuaa

SEQ ID NO: 40018 - RNA, 19 nt, Homo sapiens
  misc_RNA (1)...(19): siRNA sense strand
ccuuagaauuccuaguuga

SEQ ID NO: 40019 - RNA, 19 nt, Homo sapiens
  misc_RNA (1)...(19): siRNA sense strand
uugaugugguggagaauga

SEQ ID NO: 40020 - RNA, 19 nt, Homo sapiens
  misc_RNA (1)...(19): siRNA sense strand
cagagcauauggacaucga

SEQ ID NO: 40021 - RNA, 19 nt, Homo sapiens
  misc_RNA (1)...(19): siRNA sense strand
gaagaggccagcgcuacga

SEQ ID NO: 40022 - RNA, 19 nt, Homo sapiens
  misc_RNA (1)...(19): siRNA sense strand
gaugggacuccugguauga

SEQ ID NO: 40023 - RNA, 19 nt, Homo sapiens
  misc_RNA (1)...(19): siRNA sense strand
gaacucaccccagcauauu

SEQ ID NO: 40024 - RNA, 19 nt, Homo sapiens
  misc_RNA (1)...(19): siRNA sense strand
gaugaacaggaaaucaaug

SEQ ID NO: 40025 - RNA, 19 nt, Homo sapiens
  misc_RNA (1)...(19): siRNA sense strand
aagcagagcauauggacau

SEQ ID NO: 40026 - RNA, 19 nt, Homo sapiens
  misc_RNA (1)...(19): siRNA sense strand
ccuggacacccuuagaauu

SEQ ID NO: 40027 - RNA, 19 nt, Homo sapiens
  misc_RNA (1)...(19): siRNA sense strand
gagcucaggaagccuaauc

SEQ ID NO: 40028 - RNA, 19 nt, Homo sapiens
  misc_RNA (1)...(19): siRNA sense strand
uagaauuccuaguugaaac

SEQ ID NO: 40029 - RNA, 19 nt, Homo sapiens
  misc_RNA (1)...(19): siRNA sense strand
ccgaugaacaggaaaucaa

SEQ ID NO: 40030 - RNA, 19 nt, Homo sapiens
  misc_RNA (1)...(19): siRNA sense strand
gcaaugccaaauccaaguc

SEQ ID NO: 40031 - RNA, 19 nt, Homo sapiens
  misc_RNA (1)...(19): siRNA sense strand
gaggccagcgcuacgauca

SEQ ID NO: 40032 - RNA, 19 nt, Homo sapiens
  misc_RNA (1)...(19): siRNA sense strand
ggugacugcugagguugga

SEQ ID NO: 40033 - RNA, 19 nt, Homo sapiens
  misc_RNA (1)...(19): siRNA sense strand
cuggacacccuuagaauuc

SEQ ID NO: 40034 - RNA, 19 nt, Homo sapiens
  misc_RNA (1)...(19): siRNA sense strand
ccaaauccaagucucucuu

SEQ ID NO: 40035 - RNA, 19 nt, Homo sapiens
  misc_RNA (1)...(19): siRNA sense strand
agagaagguggaugcaauu

SEQ ID NO: 40036 - RNA, 19 nt, Homo sapiens
  misc_RNA (1)...(19): siRNA sense strand
gagaagguggaugcaauuc

SEQ ID NO: 40037 - RNA, 19 nt, Homo sapiens
  misc_RNA (1)...(19): siRNA sense strand
gauguggaagcagagcaua

SEQ ID NO: 40038 - RNA, 19 nt, Homo sapiens
  misc_RNA (1)...(19): siRNA sense strand
ggaacucaccccagcauau

SEQ ID NO: 40039 - RNA, 19 nt, Homo sapiens
  misc_RNA (1)...(19): siRNA sense strand
cgaugaacaggaaaucaau

SEQ ID NO: 40040 - RNA, 19 nt, Homo sapiens
  misc_RNA (1)...(19): siRNA sense strand
ugacugcugagguuggaaa

SEQ ID NO: 40041 - RNA, 19 nt, Homo sapiens
  misc_RNA (1)...(19): siRNA sense strand
gaccaucuccagccaucug

SEQ ID NO: 40042 - RNA, 19 nt, Homo sapiens
  misc_RNA (1)...(19): siRNA sense strand
ggccaagggugcuguucac

SEQ ID NO: 40043 - RNA, 19 nt, Homo sapiens
  misc_RNA (1)...(19): siRNA sense strand
cccuuagaauuccuaguug

SEQ ID NO: 40044 - RNA, 19 nt, Homo sapiens
  misc_RNA (1)...(19): siRNA sense strand
ccaaauaccuccagaaguu

SEQ ID NO: 40045 - RNA, 19 nt, Homo sapiens
  misc_RNA (1)...(19): siRNA sense strand
gcaaggaugucaugaagaa

SEQ ID NO: 40046 - RNA, 19 nt, Homo sapiens
  misc_RNA (1)...(19): siRNA sense strand
gaagagcagugaauuaaug

SEQ ID NO: 40047 - RNA, 19 nt, Homo sapiens
  misc_RNA (1)...(19): siRNA sense strand
gcaaagagguuccgcuaug

SEQ ID NO: 40048 - RNA, 19 nt, Homo sapiens
  misc_RNA (1)...(19): siRNA sense strand
gauggaagauguccugaaa

SEQ ID NO: 40049 - RNA, 19 nt, Homo sapiens
  misc_RNA (1)...(19): siRNA sense strand
ggaagaagaugaaccucaa

SEQ ID NO: 40050 - RNA, 19 nt, Homo sapiens
  misc_RNA (1)...(19): siRNA sense strand
ggaugcaguuugugaguua

SEQ ID NO: 40051 - RNA, 19 nt, Homo sapiens
  misc_RNA (1)...(19): siRNA sense strand
gcacccacauauuaaauuu

SEQ ID NO: 40052 - RNA, 19 nt, Homo sapiens
  misc_RNA (1)...(19): siRNA sense strand
gaggaugaauggcaacuuu

SEQ ID NO: 40053 - RNA, 19 nt, Homo sapiens
  misc_RNA (1)...(19): siRNA sense strand
gaaggagucuugugaugga

SEQ ID NO: 40054 - RNA, 19 nt, Homo sapiens
  misc_RNA (1)...(19): siRNA sense strand
gcaaugaggaggucaguuu

SEQ ID NO: 40055 - RNA, 19 nt, Homo sapiens
  misc_RNA (1)...(19): siRNA sense strand
gcacugauguuggcauuau

SEQ ID NO: 40056 - RNA, 19 nt, Homo sapiens
  misc_RNA (1)...(19): siRNA sense strand
gcuaugagauggaagaugu

SEQ ID NO: 40057 - RNA, 19 nt, Homo sapiens
  misc_RNA (1)...(19): siRNA sense strand
gaaauucagcacccacaua

SEQ ID NO: 40058 - RNA, 19 nt, Homo sapiens
  misc_RNA (1)...(19): siRNA sense strand
ccaggaagcucaugaccaa

SEQ ID NO: 40059 - RNA, 19 nt, Homo sapiens
  misc_RNA (1)...(19): siRNA sense strand
caaagaaauuucacgacaa

SEQ ID NO: 40060 - RNA, 19 nt, Homo sapiens
  misc_RNA (1)...(19): siRNA sense strand
caacucagccauuguuaaa

SEQ ID NO: 40061 - RNA, 19 nt, Homo sapiens
  misc_RNA (1)...(19): siRNA sense strand
ccacugaguucugccauaa

SEQ ID NO: 40062 - RNA, 19 nt, Homo sapiens
  misc_RNA (1)...(19): siRNA sense strand
ggaaaugagucugguaaca

SEQ ID NO: 40063 - RNA, 19 nt, Homo sapiens
  misc_RNA (1)...(19): siRNA sense strand
cugagaaccuggaacguua

SEQ ID NO: 40064 - RNA, 19 nt, Homo sapiens
  misc_RNA (1)...(19): siRNA sense strand
ccagugaaguccuuucuga

SEQ ID NO: 40065 - RNA, 19 nt, Homo sapiens
  misc_RNA (1)...(19): siRNA sense strand
gcccacagcucucagaaug

SEQ ID NO: 40066 - RNA, 19 nt, Homo sapiens
  misc_RNA (1)...(19): siRNA sense strand
caaagagguuccgcuauga

SEQ ID NO: 40067 - RNA, 19 nt, Homo sapiens
  misc_RNA (1)...(19): siRNA sense strand
cuacgaaguucaaguauag

SEQ ID NO: 40068 - RNA, 19 nt, Homo sapiens
  misc_RNA (1)...(19): siRNA sense strand
gcacuccacugugacauug

SEQ ID NO: 40069 - RNA, 19 nt, Homo sapiens
  misc_RNA (1)...(19): siRNA sense strand
gaaaugagucugguaacaa

SEQ ID NO: 40070 - RNA, 19 nt, Homo sapiens
  misc_RNA (1)...(19): siRNA sense strand
ugaagaagaucgccaacug

SEQ ID NO: 40071 - RNA, 19 nt, Homo sapiens
  misc_RNA (1)...(19): siRNA sense strand
cagcuaaaccuuucauuga

SEQ ID NO: 40072 - RNA, 19 nt, Homo sapiens
  misc_RNA (1)...(19): siRNA sense strand
gcagugaauuaaugcuuga

SEQ ID NO: 40073 - RNA, 19 nt, Homo sapiens
  misc_RNA (1)...(19): siRNA sense strand
aaaugagucugguaacaaa

SEQ ID NO: 40074 - RNA, 19 nt, Homo sapiens
  misc_RNA (1)...(19): siRNA sense strand
gcuaaaccuuucauugaga

SEQ ID NO: 40075 - RNA, 19 nt, Homo sapiens
  misc_RNA (1)...(19): siRNA sense strand
gacagucccuuccauagau

SEQ ID NO: 40076 - RNA, 19 nt, Homo sapiens
  misc_RNA (1)...(19): siRNA sense strand
uagaugcacuccacuguga

SEQ ID NO: 40077 - RNA, 19 nt, Homo sapiens
  misc_RNA (1)...(19): siRNA sense strand
ugaauucccugauggugaa

SEQ ID NO: 40078 - RNA, 19 nt, Homo sapiens
  misc_RNA (1)...(19): siRNA sense strand
caaaugcuaugagauggaa

SEQ ID NO: 40079 - RNA, 19 nt, Homo sapiens
  misc_RNA (1)...(19): siRNA sense strand
gcuaaagagugcccagaau

SEQ ID NO: 40080 - RNA, 19 nt, Homo sapiens
  misc_RNA (1)...(19): siRNA sense strand
ugaagaagcucaaaaggaa

SEQ ID NO: 40081 - RNA, 19 nt, Homo sapiens
  misc_RNA (1)...(19): siRNA sense strand
ggaagcucaugaccaaaga

SEQ ID NO: 40082 - RNA, 19 nt, Homo sapiens
  misc_RNA (1)...(19): siRNA sense strand
cgggugagauccuuugaaa

SEQ ID NO: 40083 - RNA, 19 nt, Homo sapiens
  misc_RNA (1)...(19): siRNA sense strand
ggucucagcuaaaccuuuc

SEQ ID NO: 40084 - RNA, 19 nt, Homo sapiens
  misc_RNA (1)...(19): siRNA sense strand
agaagaagguggagaugug

SEQ ID NO: 40085 - RNA, 19 nt, Homo sapiens
  misc_RNA (1)...(19): siRNA sense strand
cagcugaguucuacaagau

SEQ ID NO: 40086 - RNA, 19 nt, Homo sapiens
  misc_RNA (1)...(19): siRNA sense strand
gcaaugcagcugaguucua

SEQ ID NO: 40087 - RNA, 19 nt, Homo sapiens
  misc_RNA (1)...(19): siRNA sense strand
gcagcugaguucuacaaga

SEQ ID NO: 40088 - RNA, 19 nt, Homo sapiens
  misc_RNA (1)...(19): siRNA sense strand
ggaaagccaagauucaaug

SEQ ID NO: 40089 - RNA, 19 nt, Homo sapiens
  misc_RNA (1)...(19): siRNA sense strand
cagcaaggaugucaugaag

SEQ ID NO: 40090 - RNA, 19 nt, Homo sapiens
  misc_RNA (1)...(19): siRNA sense strand
caucaugcccugcuaaaga

SEQ ID NO: 40091 - RNA, 19 nt, Homo sapiens
  misc_RNA (1)...(19): siRNA sense strand
caugaagagcagugaauua

SEQ ID NO: 40092 - RNA, 19 nt, Homo sapiens
  misc_RNA (1)...(19): siRNA sense strand
ggacauggaagaagacauc

SEQ ID NO: 40093 - RNA, 19 nt, Homo sapiens
  misc_RNA (1)...(19): siRNA sense strand
ccagagcacuuugugaaau

SEQ ID NO: 40094 - RNA, 19 nt, Homo sapiens
  misc_RNA (1)...(19): siRNA sense strand
gguuguacaccuccaaaua

SEQ ID NO: 40095 - RNA, 19 nt, Homo sapiens
  misc_RNA (1)...(19): siRNA sense strand
ccaguacaguuucaauuca

SEQ ID NO: 40096 - RNA, 19 nt, Homo sapiens
  misc_RNA (1)...(19): siRNA sense strand
gauguuggcauuauugaug

SEQ ID NO: 40097 - RNA, 19 nt, Homo sapiens
  misc_RNA (1)...(19): siRNA sense strand
ccauguuccugaaauuauu

SEQ ID NO: 40098 - RNA, 19 nt, Homo sapiens
  misc_RNA (1)...(19): siRNA sense strand
gaagaugaaaccaguaugg

SEQ ID NO: 40099 - RNA, 19 nt, Homo sapiens
  misc_RNA (1)...(19): siRNA sense strand
aaaccuaacucugaacugu

SEQ ID NO: 40100 - RNA, 19 nt, Homo sapiens
  misc_RNA (1)...(19): siRNA sense strand
ggacuucccagagcacuuu

SEQ ID NO: 40101 - RNA, 19 nt, Homo sapiens
  misc_RNA (1)...(19): siRNA sense strand
uggaagauguccugaaaca

SEQ ID NO: 40102 - RNA, 19 nt, Homo sapiens
  misc_RNA (1)...(19): siRNA sense strand
gaaguucaaguauagguau

SEQ ID NO: 40103 - RNA, 19 nt, Homo sapiens
  misc_RNA (1)...(19): siRNA sense strand
ucuacgaaguucaaguaua

SEQ ID NO: 40104 - RNA, 19 nt, Homo sapiens
  misc_RNA (1)...(19): siRNA sense strand
gugaaggagucuugugaug

SEQ ID NO: 40105 - RNA, 19 nt, Homo sapiens
  misc_RNA (1)...(19): siRNA sense strand
cagcuuuggugucugcuuu

SEQ ID NO: 40106 - RNA, 19 nt, Homo sapiens
  misc_RNA (1)...(19): siRNA sense strand
auucagcacccacauauua

SEQ ID NO: 40107 - RNA, 19 nt, Homo sapiens
  misc_RNA (1)...(19): siRNA sense strand
caucucaagucacaaggaa

SEQ ID NO: 40108 - RNA, 19 nt, Homo sapiens
  misc_RNA (1)...(19): siRNA sense strand
cgagaaagcaagaggcaaa

SEQ ID NO: 40109 - RNA, 19 nt, Homo sapiens
  misc_RNA (1)...(19): siRNA sense strand
aagccaagauucaauggaa

SEQ ID NO: 40110 - RNA, 19 nt, Homo sapiens
  misc_RNA (1)...(19): siRNA sense strand
gaagagcucaggcaaggau

SEQ ID NO: 40111 - RNA, 19 nt, Homo sapiens
  misc_RNA (1)...(19): siRNA sense strand
caaagaagaagguggagau

SEQ ID NO: 40112 - RNA, 19 nt, Homo sapiens
  misc_RNA (1)...(19): siRNA sense strand
gaagaugaaccucaaacca

SEQ ID NO: 40113 - RNA, 19 nt, Homo sapiens
  misc_RNA (1)...(19): siRNA sense strand
caccacaucucaagucaca

SEQ ID NO: 40114 - RNA, 19 nt, Homo sapiens
  misc_RNA (1)...(19): siRNA sense strand
gaaacccucucuggagcaa

SEQ ID NO: 40115 - RNA, 19 nt, Homo sapiens
  misc_RNA (1)...(19): siRNA sense strand
acaagcaucuccggaagaa

SEQ ID NO: 40116 - RNA, 19 nt, Homo sapiens
  misc_RNA (1)...(19): siRNA sense strand
aaucuugucuuccacucua

SEQ ID NO: 40117 - RNA, 19 nt, Homo sapiens
  misc_RNA (1)...(19): siRNA sense strand
ugcaagccauugugccuua

SEQ ID NO: 40118 - RNA, 19 nt, Homo sapiens
  misc_RNA (1)...(19): siRNA sense strand
cgaggaacgugaccaugga

SEQ ID NO: 40119 - RNA, 19 nt, Homo sapiens
  misc_RNA (1)...(19): siRNA sense strand
caaagagacuguggaugca

SEQ ID NO: 40120 - RNA, 19 nt, Homo sapiens
  misc_RNA (1)...(19): siRNA sense strand
gaagaagaugaaccucaaa

SEQ ID NO: 40121 - RNA, 19 nt, Homo sapiens
  misc_RNA (1)...(19): siRNA sense strand
aaagacaccugaagaagcu

SEQ ID NO: 40122 - RNA, 19 nt, Homo sapiens
  misc_RNA (1)...(19): siRNA sense strand
gaagaagguggagauguga

SEQ ID NO: 40123 - RNA, 19 nt, Homo sapiens
  misc_RNA (1)...(19): siRNA sense strand
gaggaggucaguuuggaaa

SEQ ID NO: 40124 - RNA, 19 nt, Homo sapiens
  misc_RNA (1)...(19): siRNA sense strand
gaaucccaaugcuuccaaa

SEQ ID NO: 40125 - RNA, 19 nt, Homo sapiens
  misc_RNA (1)...(19): siRNA sense strand
ugauggacauggaagaaga

SEQ ID NO: 40126 - RNA, 19 nt, Homo sapiens
  misc_RNA (1)...(19): siRNA sense strand
gagcacaacaggagauauc

SEQ ID NO: 40127 - RNA, 19 nt, Homo sapiens
  misc_RNA (1)...(19): siRNA sense strand
gaaccucaaaccaaucaug

SEQ ID NO: 40128 - RNA, 19 nt, Homo sapiens
  misc_RNA (1)...(19): siRNA sense strand
aaagaaauuucacgacaac

SEQ ID NO: 40129 - RNA, 19 nt, Homo sapiens
  misc_RNA (1)...(19): siRNA sense strand
ugaaaggggucucagcuaa

SEQ ID NO: 40130 - RNA, 19 nt, Homo sapiens
  misc_RNA (1)...(19): siRNA sense strand
caacuguaagcaugucuuu

SEQ ID NO: 40131 - RNA, 19 nt, Homo sapiens
  misc_RNA (1)...(19): siRNA sense strand
gcagcaaggaugucaugaa

SEQ ID NO: 40132 - RNA, 19 nt, Homo sapiens
  misc_RNA (1)...(19): siRNA sense strand
ggugaaauguccagcaaaa

SEQ ID NO: 40133 - RNA, 19 nt, Homo sapiens
  misc_RNA (1)...(19): siRNA sense strand
ucaaaccaaucaugaggau

SEQ ID NO: 40134 - RNA, 19 nt, Homo sapiens
  misc_RNA (1)...(19): siRNA sense strand
gaagaagccaaaccuaacu

SEQ ID NO: 40135 - RNA, 19 nt, Homo sapiens
  misc_RNA (1)...(19): siRNA sense strand
gcccauguuccugaaauua

SEQ ID NO: 40136 - RNA, 19 nt, Homo sapiens
  misc_RNA (1)...(19): siRNA sense strand
agaugaaccucaaaccaau

SEQ ID NO: 40137 - RNA, 19 nt, Homo sapiens
  misc_RNA (1)...(19): siRNA sense strand
caaugcagcugaguucuac

SEQ ID NO: 40138 - RNA, 19 nt, Homo sapiens
  misc_RNA (1)...(19): siRNA sense strand
ccaugagucuguggaagaa

SEQ ID NO: 40139 - RNA, 19 nt, Homo sapiens
  misc_RNA (1)...(19): siRNA sense strand
guuccaacccuuaccauga

SEQ ID NO: 40140 - RNA, 19 nt, Homo sapiens
  misc_RNA (1)...(19): siRNA sense strand
ugagacagucccuuccaua

SEQ ID NO: 40141 - RNA, 19 nt, Homo sapiens
  misc_RNA (1)...(19): siRNA sense strand
cuccagaaguuuaugaaug

SEQ ID NO: 40142 - RNA, 19 nt, Homo sapiens
  misc_RNA (1)...(19): siRNA sense strand
caaauaccuccagaaguuu

SEQ ID NO: 40143 - RNA, 19 nt, Homo sapiens
  misc_RNA (1)...(19): siRNA sense strand
gaucaucaugcccugcuaa

SEQ ID NO: 40144 - RNA, 19 nt, Homo sapiens
  misc_RNA (1)...(19): siRNA sense strand
ggagcgaugugaugaauaa

SEQ ID NO: 40145 - RNA, 19 nt, Homo sapiens
  misc_RNA (1)...(19): siRNA sense strand
caagggcucuggcucauga

SEQ ID NO: 40146 - RNA, 19 nt, Homo sapiens
  misc_RNA (1)...(19): siRNA sense strand
gcagguguuucaugaagaa

SEQ ID NO: 40147 - RNA, 19 nt, Homo sapiens
  misc_RNA (1)...(19): siRNA sense strand
gaggugaccauuacaauug

SEQ ID NO: 40148 - RNA, 19 nt, Homo sapiens
  misc_RNA (1)...(19): siRNA sense strand
gaagaagaccaucgacaug

SEQ ID NO: 40149 - RNA, 19 nt, Homo sapiens
  misc_RNA (1)...(19): siRNA sense strand
ggacuguuccugaagauug

SEQ ID NO: 40150 - RNA, 19 nt, Homo sapiens
  misc_RNA (1)...(19): siRNA sense strand
gaagaagcgggucaaguug

SEQ ID NO: 40151 - RNA, 19 nt, Homo sapiens
  misc_RNA (1)...(19): siRNA sense strand
gggcugcgcuaccuacaga

SEQ ID NO: 40152 - RNA, 19 nt, Homo sapiens
  misc_RNA (1)...(19): siRNA sense strand
agaagaagcgggucaaguu

SEQ ID NO: 40153 - RNA, 19 nt, Homo sapiens
  misc_RNA (1)...(19): siRNA sense strand
ucaagaacggcaugaagua

SEQ ID NO: 40154 - RNA, 19 nt, Homo sapiens
  misc_RNA (1)...(19): siRNA sense strand
gaggagcgaugugaugaau

SEQ ID NO: 40155 - RNA, 19 nt, Homo sapiens
  misc_RNA (1)...(19): siRNA sense strand
agucaaagaucgaaucaag

SEQ ID NO: 40156 - RNA, 19 nt, Homo sapiens
  misc_RNA (1)...(19): siRNA sense strand
gguuugagauucaguggau

SEQ ID NO: 40157 - RNA, 19 nt, Homo sapiens
  misc_RNA (1)...(19): siRNA sense strand
cgaaagaggagcgauguga

SEQ ID NO: 40158 - RNA, 19 nt, Homo sapiens
  misc_RNA (1)...(19): siRNA sense strand
caacucagcacacuacagu

SEQ ID NO: 40159 - RNA, 19 nt, Homo sapiens
  misc_RNA (1)...(19): siRNA sense strand
agaacggcaugaaguacua

SEQ ID NO: 40160 - RNA, 19 nt, Homo sapiens
  misc_RNA (1)...(19): siRNA sense strand
gaagucaaagaucgaauca

SEQ ID NO: 40161 - RNA, 19 nt, Homo sapiens
  misc_RNA (1)...(19): siRNA sense strand
caacaacucagcacacuac

SEQ ID NO: 40162 - RNA, 19 nt, Homo sapiens
  misc_RNA (1)...(19): siRNA sense strand
gaaagaggagcgaugugau

SEQ ID NO: 40163 - RNA, 19 nt, Homo sapiens
  misc_RNA (1)...(19): siRNA sense strand
gcagaucgaguucaaaugc

SEQ ID NO: 40164 - RNA, 19 nt, Homo sapiens
  misc_RNA (1)...(19): siRNA sense strand
acucagcacacuacaguua

SEQ ID NO: 40165 - RNA, 19 nt, Homo sapiens
  misc_RNA (1)...(19): siRNA sense strand
gacuguuccugaagauuga

SEQ ID NO: 40166 - RNA, 19 nt, Homo sapiens
  misc_RNA (1)...(19): siRNA sense strand
gaagauugaacuccgaaag

SEQ ID NO: 40167 - RNA, 19 nt, Homo sapiens
  misc_RNA (1)...(19): siRNA sense strand
gggacugguuugagauuca

SEQ ID NO: 40168 - RNA, 19 nt, Homo sapiens
  misc_RNA (1)...(19): siRNA sense strand
gugcccaacucauugauag

SEQ ID NO: 40169 - RNA, 19 nt, Homo sapiens
  misc_RNA (1)...(19): siRNA sense strand
aguaucagaucaccaacaa

SEQ ID NO: 40170 - RNA, 19 nt, Homo sapiens
  misc_RNA (1)...(19): siRNA sense strand
caacaucauccucuuccuu

SEQ ID NO: 40171 - RNA, 19 nt, Homo sapiens
  misc_RNA (1)...(19): siRNA sense strand
cgaggugaccauuacaauu

SEQ ID NO: 40172 - RNA, 19 nt, Homo sapiens
  misc_RNA (1)...(19): siRNA sense strand
caaagaagucaaagaucga

SEQ ID NO: 40173 - RNA, 19 nt, Homo sapiens
  misc_RNA (1)...(19): siRNA sense strand
cguguuggcuggcaucauc

SEQ ID NO: 40174 - RNA, 19 nt, Homo sapiens
  misc_RNA (1)...(19): siRNA sense strand
ucaaagaucgaaucaagag

SEQ ID NO: 40175 - RNA, 19 nt, Homo sapiens
  misc_RNA (1)...(19): siRNA sense strand
ugaagaagaccaucgacau

SEQ ID NO: 40176 - RNA, 19 nt, Homo sapiens
  misc_RNA (1)...(19): siRNA sense strand
ggugcuauccugugucuuc

SEQ ID NO: 40177 - RNA, 19 nt, Homo sapiens
  misc_RNA (1)...(19): siRNA sense strand
gcuacugaaagucaaguuu

SEQ ID NO: 40178 - RNA, 19 nt, Homo sapiens
  misc_RNA (1)...(19): siRNA sense strand
cuacugaaagucaaguuug

SEQ ID NO: 40179 - RNA, 19 nt, Homo sapiens
  misc_RNA (1)...(19): siRNA sense strand
ccaaguaugccagauggaa

SEQ ID NO: 40180 - RNA, 19 nt, Homo sapiens
  misc_RNA (1)...(19): siRNA sense strand
ucagaucaccaacaacuca

SEQ ID NO: 40181 - RNA, 19 nt, Homo sapiens
  misc_RNA (1)...(19): siRNA sense strand
aaagaggagcgaugugaug

SEQ ID NO: 40182 - RNA, 19 nt, Homo sapiens
  misc_RNA (1)...(19): siRNA sense strand
ggcccugcauccaguauca

SEQ ID NO: 40183 - RNA, 19 nt, Homo sapiens
  misc_RNA (1)...(19): siRNA sense strand
uuucgggacugguuugaga

SEQ ID NO: 40184 - RNA, 19 nt, Homo sapiens
  misc_RNA (1)...(19): siRNA sense strand
ggcagguguuucaugaaga

SEQ ID NO: 40185 - RNA, 19 nt, Homo sapiens
  misc_RNA (1)...(19): siRNA sense strand
ggcuaucuguguccucuuc

SEQ ID NO: 40186 - RNA, 19 nt, Homo sapiens
  misc_RNA (1)...(19): siRNA sense strand
gcucaagaacggcaugaag

SEQ ID NO: 40187 - RNA, 19 nt, Homo sapiens
  misc_RNA (1)...(19): siRNA sense strand
uggcagguguuucaugaag

SEQ ID NO: 40188 - RNA, 19 nt, Homo sapiens
  misc_RNA (1)...(19): siRNA sense strand
gaaguacuaccgggacaca

SEQ ID NO: 40189 - RNA, 19 nt, Homo sapiens
  misc_RNA (1)...(19): siRNA sense strand
uaucagaucaccaacaacu

SEQ ID NO: 40190 - RNA, 19 nt, Homo sapiens
  misc_RNA (1)...(19): siRNA sense strand
aagauugaacuccgaaaga

SEQ ID NO: 40191 - RNA, 19 nt, Homo sapiens
  misc_RNA (1)...(19): siRNA sense strand
gcuauccugugucuucaac

SEQ ID NO: 40192 - RNA, 19 nt, Homo sapiens
  misc_RNA (1)...(19): siRNA sense strand
ucgucacgcuccucauuug

SEQ ID NO: 40193 - RNA, 19 nt, Homo sapiens
  misc_RNA (1)...(19): siRNA sense strand
uguguccucuucaacauca

SEQ ID NO: 40194 - RNA, 19 nt, Homo sapiens
  misc_RNA (1)...(19): siRNA sense strand
agauugaacuccgaaagag

SEQ ID NO: 40195 - RNA, 19 nt, Homo sapiens
  misc_RNA (1)...(19): siRNA sense strand
gaaggccuuucuggagagu

SEQ ID NO: 40196 - RNA, 19 nt, Homo sapiens
  misc_RNA (1)...(19): siRNA sense strand
caaaugcugcggcaacaac

SEQ ID NO: 40197 - RNA, 19 nt, Homo sapiens
  misc_RNA (1)...(19): siRNA sense strand
ccaucgacaugcugcagau

SEQ ID NO: 40198 - RNA, 19 nt, Homo sapiens
  misc_RNA (1)...(19): siRNA sense strand
ggacugguuugagauucag

SEQ ID NO: 40199 - RNA, 19 nt, Homo sapiens
  misc_RNA (1)...(19): siRNA sense strand
gcuggcugcuggagaagag

SEQ ID NO: 40200 - RNA, 19 nt, Homo sapiens
  misc_RNA (1)...(19): siRNA sense strand
uggcuggcaucaucaucuu

SEQ ID NO: 40201 - RNA, 19 nt, Homo sapiens
  misc_RNA (1)...(19): siRNA sense strand
aagaucgaaucaagagcaa

SEQ ID NO: 40202 - RNA, 19 nt, Homo sapiens
  misc_RNA (1)...(19): siRNA sense strand
guggcucucugcugcuuuc

SEQ ID NO: 40203 - RNA, 19 nt, Homo sapiens
  misc_RNA (1)...(19): siRNA sense strand
ccaacaacucagcacacua

SEQ ID NO: 40204 - RNA, 19 nt, Homo sapiens
  misc_RNA (1)...(19): siRNA sense strand
ggcucuggcucaugaacug

SEQ ID NO: 40205 - RNA, 19 nt, Homo sapiens
  misc_RNA (1)...(19): siRNA sense strand
caagaacggcaugaaguac

SEQ ID NO: 40206 - RNA, 19 nt, Homo sapiens
  misc_RNA (1)...(19): siRNA sense strand
caauugggcugcgcuaccu

SEQ ID NO: 40207 - RNA, 19 nt, Homo sapiens
  misc_RNA (1)...(19): siRNA sense strand
aaagaagucaaagaucgaa

SEQ ID NO: 40208 - RNA, 19 nt, Homo sapiens
  misc_RNA (1)...(19): siRNA sense strand
gcuggcaucaucaucuuca

SEQ ID NO: 40209 - RNA, 19 nt, Homo sapiens
  misc_RNA (1)...(19): siRNA sense strand
aagaggagcgaugugauga

SEQ ID NO: 40210 - RNA, 19 nt, Homo sapiens
  misc_RNA (1)...(19): siRNA sense strand
agaagaggcuguuugauua

SEQ ID NO: 40211 - RNA, 19 nt, Homo sapiens
  misc_RNA (1)...(19): siRNA sense strand
gaacucacccuccgcuauu

SEQ ID NO: 40212 - RNA, 19 nt, Homo sapiens
  misc_RNA (1)...(19): siRNA sense strand
ggaacgagguguggacaug

SEQ ID NO: 40213 - RNA, 19 nt, Homo sapiens
  misc_RNA (1)...(19): siRNA sense strand
ccaagaagaggcuguuuga

SEQ ID NO: 40214 - RNA, 19 nt, Homo sapiens
  misc_RNA (1)...(19): siRNA sense strand
ccaguacuauggcgagauu

SEQ ID NO: 40215 - RNA, 19 nt, Homo sapiens
  misc_RNA (1)...(19): siRNA sense strand
aagaagaggcuguuugauu

SEQ ID NO: 40216 - RNA, 19 nt, Homo sapiens
  misc_RNA (1)...(19): siRNA sense strand
gaagaggcuguuugauuau

SEQ ID NO: 40217 - RNA, 19 nt, Homo sapiens
  misc_RNA (1)...(19): siRNA sense strand
caagcacaauggaacagaa

SEQ ID NO: 40218 - RNA, 19 nt, Homo sapiens
  misc_RNA (1)...(19): siRNA sense strand
gaggacgucuucucuuucu

SEQ ID NO: 40219 - RNA, 19 nt, Homo sapiens
  misc_RNA (1)...(19): siRNA sense strand
ucaagagaaugcccucaau

SEQ ID NO: 40220 - RNA, 19 nt, Homo sapiens
  misc_RNA (1)...(19): siRNA sense strand
gaguggagccaacccauga

SEQ ID NO: 40221 - RNA, 19 nt, Homo sapiens
  misc_RNA (1)...(19): siRNA sense strand
cgaaaguucuacacagagu

SEQ ID NO: 40222 - RNA, 19 nt, Homo sapiens
  misc_RNA (1)...(19): siRNA sense strand
gauuaugucgugaagugua

SEQ ID NO: 40223 - RNA, 19 nt, Homo sapiens
  misc_RNA (1)...(19): siRNA sense strand
cagcgcggacuauguauuu

SEQ ID NO: 40224 - RNA, 19 nt, Homo sapiens
  misc_RNA (1)...(19): siRNA sense strand
acagacaccaccaccuuua

SEQ ID NO: 40225 - RNA, 19 nt, Homo sapiens
  misc_RNA (1)...(19): siRNA sense strand
cgacagacaccaccaccuu

SEQ ID NO: 40226 - RNA, 19 nt, Homo sapiens
  misc_RNA (1)...(19): siRNA sense strand
cgucuucucuuucuacuac

SEQ ID NO: 40227 - RNA, 19 nt, Homo sapiens
  misc_RNA (1)...(19): siRNA sense strand
uauaucaaccucaucaaga

SEQ ID NO: 40228 - RNA, 19 nt, Homo sapiens
  misc_RNA (1)...(19): siRNA sense strand
caccagcgcggacuaugua

SEQ ID NO: 40229 - RNA, 19 nt, Homo sapiens
  misc_RNA (1)...(19): siRNA sense strand
gacuauguauuucaggaau

SEQ ID NO: 40230 - RNA, 19 nt, Homo sapiens
  misc_RNA (1)...(19): siRNA sense strand
gacacugguucguccaaug

SEQ ID NO: 40231 - RNA, 19 nt, Homo sapiens
  misc_RNA (1)...(19): siRNA sense strand
ggacuauguauuucaggaa

SEQ ID NO: 40232 - RNA, 19 nt, Homo sapiens
  misc_RNA (1)...(19): siRNA sense strand
uuaaacggaucuuccucaa

SEQ ID NO: 40233 - RNA, 19 nt, Homo sapiens
  misc_RNA (1)...(19): siRNA sense strand
ccaccuugcucugugaaga

SEQ ID NO: 40234 - RNA, 19 nt, Homo sapiens
  misc_RNA (1)...(19): siRNA sense strand
gacagacaccaccaccuuu

SEQ ID NO: 40235 - RNA, 19 nt, Homo sapiens
  misc_RNA (1)...(19): siRNA sense strand
uugauuaugucgugaagug

SEQ ID NO: 40236 - RNA, 19 nt, Homo sapiens
  misc_RNA (1)...(19): siRNA sense strand
aaaguucuacacagaguuu

SEQ ID NO: 40237 - RNA, 19 nt, Homo sapiens
  misc_RNA (1)...(19): siRNA sense strand
gaaaguucuacacagaguu

SEQ ID NO: 40238 - RNA, 19 nt, Homo sapiens
  misc_RNA (1)...(19): siRNA sense strand
uccgaaaguucuacacaga

SEQ ID NO: 40239 - RNA, 19 nt, Homo sapiens
  misc_RNA (1)...(19): siRNA sense strand
gaauuuccacuauaucaac

SEQ ID NO: 40240 - RNA, 19 nt, Homo sapiens
  misc_RNA (1)...(19): siRNA sense strand
gauccucaccaacuacaug

SEQ ID NO: 40241 - RNA, 19 nt, Homo sapiens
  misc_RNA (1)...(19): siRNA sense strand
ggacgucuucucuuucuac

SEQ ID NO: 40242 - RNA, 19 nt, Homo sapiens
  misc_RNA (1)...(19): siRNA sense strand
cauccaccuugcucuguga

SEQ ID NO: 40243 - RNA, 19 nt, Homo sapiens
  misc_RNA (1)...(19): siRNA sense strand
agacaccaccaccuuuaaa

SEQ ID NO: 40244 - RNA, 19 nt, Homo sapiens
  misc_RNA (1)...(19): siRNA sense strand
caagagaaugcccucaauc

SEQ ID NO: 40245 - RNA, 19 nt, Homo sapiens
  misc_RNA (1)...(19): siRNA sense strand
ggacauggccaggcuuggu

SEQ ID NO: 40246 - RNA, 19 nt, Homo sapiens
  misc_RNA (1)...(19): siRNA sense strand
cagacaccaccaccuuuaa

SEQ ID NO: 40247 - RNA, 19 nt, Homo sapiens
  misc_RNA (1)...(19): siRNA sense strand
gccaagaagaggcuguuug

SEQ ID NO: 40248 - RNA, 19 nt, Homo sapiens
  misc_RNA (1)...(19): siRNA sense strand
ggagccaacccaugaagag

SEQ ID NO: 40249 - RNA, 19 nt, Homo sapiens
  misc_RNA (1)...(19): siRNA sense strand
gggccaccuucauccgaaa

SEQ ID NO: 40250 - RNA, 19 nt, Homo sapiens
  misc_RNA (1)...(19): siRNA sense strand
ccaccugggaggcaaagaa

SEQ ID NO: 40251 - RNA, 19 nt, Homo sapiens
  misc_RNA (1)...(19): siRNA sense strand
gacagucaguggcuuucuc

SEQ ID NO: 40252 - RNA, 19 nt, Homo sapiens
  misc_RNA (1)...(19): siRNA sense strand
acauggacacccaguacua

SEQ ID NO: 40253 - RNA, 19 nt, Homo sapiens
  misc_RNA (1)...(19): siRNA sense strand
ccaccuucauccgaaaguu

SEQ ID NO: 40254 - RNA, 19 nt, Homo sapiens
  misc_RNA (1)...(19): siRNA sense strand
ccuuuggucucccgacaga

SEQ ID NO: 40255 - RNA, 19 nt, Homo sapiens
  misc_RNA (1)...(19): siRNA sense strand
uuggagaggucacggagau

SEQ ID NO: 40256 - RNA, 19 nt, Homo sapiens
  misc_RNA (1)...(19): siRNA sense strand
gugcagccgucucuacacu

SEQ ID NO: 40257 - RNA, 19 nt, Homo sapiens
  misc_RNA (1)...(19): siRNA sense strand
auuaugucgugaaguguaa

SEQ ID NO: 40258 - RNA, 19 nt, Homo sapiens
  misc_RNA (1)...(19): siRNA sense strand
gcacaauggaacagaacuc

SEQ ID NO: 40259 - RNA, 19 nt, Homo sapiens
  misc_RNA (1)...(19): siRNA sense strand
gcgcggacuauguauuuca

SEQ ID NO: 40260 - RNA, 19 nt, Homo sapiens
  misc_RNA (1)...(19): siRNA sense strand
aagaggcuguuugauuaug

SEQ ID NO: 40261 - RNA, 19 nt, Homo sapiens
  misc_RNA (1)...(19): siRNA sense strand
gaggcuguuugauuauguc

SEQ ID NO: 40262 - RNA, 19 nt, Homo sapiens
  misc_RNA (1)...(19): siRNA sense strand
gcauuacgaagggaauuuc

SEQ ID NO: 40263 - RNA, 19 nt, Homo sapiens
  misc_RNA (1)...(19): siRNA sense strand
cggcguaacaaccgcauug

SEQ ID NO: 40264 - RNA, 19 nt, Homo sapiens
  misc_RNA (1)...(19): siRNA sense strand
agaggcuguuugauuaugu

SEQ ID NO: 40265 - RNA, 19 nt, Homo sapiens
  misc_RNA (1)...(19): siRNA sense strand
acugguucguccaauguuu

SEQ ID NO: 40266 - RNA, 19 nt, Homo sapiens
  misc_RNA (1)...(19): siRNA sense strand
caagugcagccgucucuac

SEQ ID NO: 40267 - RNA, 19 nt, Homo sapiens
  misc_RNA (1)...(19): siRNA sense strand
ugacacugguucguccaau

SEQ ID NO: 40268 - RNA, 19 nt, Homo sapiens
  misc_RNA (1)...(19): siRNA sense strand
cuacauggacacccaguac

SEQ ID NO: 40269 - RNA, 19 nt, Homo sapiens
  misc_RNA (1)...(19): siRNA sense strand
gcaaagaccuggagaagau

SEQ ID NO: 40270 - RNA, 19 nt, Homo sapiens
  misc_RNA (1)...(19): siRNA sense strand
gcaaagggaucaccaggaa

SEQ ID NO: 40271 - RNA, 19 nt, Homo sapiens
  misc_RNA (1)...(19): siRNA sense strand
gcacacggcugcaugagaa

SEQ ID NO: 40272 - RNA, 19 nt, Homo sapiens
  misc_RNA (1)...(19): siRNA sense strand
gcaacggccuuccaucuga

SEQ ID NO: 40273 - RNA, 19 nt, Homo sapiens
  misc_RNA (1)...(19): siRNA sense strand
uuaaauggauggcaauuga

SEQ ID NO: 40274 - RNA, 19 nt, Homo sapiens
  misc_RNA (1)...(19): siRNA sense strand
caggagggcucgccgauuu

SEQ ID NO: 40275 - RNA, 19 nt, Homo sapiens
  misc_RNA (1)...(19): siRNA sense strand
agaugaagauuucggauuu

SEQ ID NO: 40276 - RNA, 19 nt, Homo sapiens
  misc_RNA (1)...(19): siRNA sense strand
ugaagaugcugaaagagaa

SEQ ID NO: 40277 - RNA, 19 nt, Homo sapiens
  misc_RNA (1)...(19): siRNA sense strand
uggagaagaugaugguuaa

SEQ ID NO: 40278 - RNA, 19 nt, Homo sapiens
  misc_RNA (1)...(19): siRNA sense strand
gggaaagucuguguggaaa

SEQ ID NO: 40279 - RNA, 19 nt, Homo sapiens
  misc_RNA (1)...(19): siRNA sense strand
agagacggcuggaguguga

SEQ ID NO: 40280 - RNA, 19 nt, Homo sapiens
  misc_RNA (1)...(19): siRNA sense strand
ggagaaggcgaauuuggaa

SEQ ID NO: 40281 - RNA, 19 nt, Homo sapiens
  misc_RNA (1)...(19): siRNA sense strand
cccaagacaucaacauuug

SEQ ID NO: 40282 - RNA, 19 nt, Homo sapiens
  misc_RNA (1)...(19): siRNA sense strand
gcgagcagcgggagaagua

SEQ ID NO: 40283 - RNA, 19 nt, Homo sapiens
  misc_RNA (1)...(19): siRNA sense strand
caucugacucccugauuua

SEQ ID NO: 40284 - RNA, 19 nt, Homo sapiens
  misc_RNA (1)...(19): siRNA sense strand
gcaucaacguccaguacaa

SEQ ID NO: 40285 - RNA, 19 nt, Homo sapiens
  misc_RNA (1)...(19): siRNA sense strand
ggcggaagaugaagauuuc

SEQ ID NO: 40286 - RNA, 19 nt, Homo sapiens
  misc_RNA (1)...(19): siRNA sense strand
ccacccacaugucaucaaa

SEQ ID NO: 40287 - RNA, 19 nt, Homo sapiens
  misc_RNA (1)...(19): siRNA sense strand
ccaucugacucccugauuu

SEQ ID NO: 40288 - RNA, 19 nt, Homo sapiens
  misc_RNA (1)...(19): siRNA sense strand
ccacugcuaccacaaguuu

SEQ ID NO: 40289 - RNA, 19 nt, Homo sapiens
  misc_RNA (1)...(19): siRNA sense strand
gagaagaugaugguuaaga

SEQ ID NO: 40290 - RNA, 19 nt, Homo sapiens
  misc_RNA (1)...(19): siRNA sense strand
ccacaugucaucaaauugu

SEQ ID NO: 40291 - RNA, 19 nt, Homo sapiens
  misc_RNA (1)...(19): siRNA sense strand
ccacauggauugaaaacaa

SEQ ID NO: 40292 - RNA, 19 nt, Homo sapiens
  misc_RNA (1)...(19): siRNA sense strand
gggcggaagaugaagauuu

SEQ ID NO: 40293 - RNA, 19 nt, Homo sapiens
  misc_RNA (1)...(19): siRNA sense strand
uggcggugcuggucaauga

SEQ ID NO: 40294 - RNA, 19 nt, Homo sapiens
  misc_RNA (1)...(19): siRNA sense strand
gcgaggagguggugauggu

SEQ ID NO: 40295 - RNA, 19 nt, Homo sapiens
  misc_RNA (1)...(19): siRNA sense strand
ggagauguaccgccugaug

SEQ ID NO: 40296 - RNA, 19 nt, Homo sapiens
  misc_RNA (1)...(19): siRNA sense strand
gagaccugcugucagaguu

SEQ ID NO: 40297 - RNA, 19 nt, Homo sapiens
  misc_RNA (1)...(19): siRNA sense strand
ccgugaagaugcugaaaga

SEQ ID NO: 40298 - RNA, 19 nt, Homo sapiens
  misc_RNA (1)...(19): siRNA sense strand
caacggccuuccaucugaa

SEQ ID NO: 40299 - RNA, 19 nt, Homo sapiens
  misc_RNA (1)...(19): siRNA sense strand
gugaagaugcugaaagaga

SEQ ID NO: 40300 - RNA, 19 nt, Homo sapiens
  misc_RNA (1)...(19): siRNA sense strand
cugacucccugauuuauga

SEQ ID NO: 40301 - RNA, 19 nt, Homo sapiens
  misc_RNA (1)...(19): siRNA sense strand
gaccguacaugacuauagg

SEQ ID NO: 40302 - RNA, 19 nt, Homo sapiens
  misc_RNA (1)...(19): siRNA sense strand
gucccgagauguuuaugaa

SEQ ID NO: 40303 - RNA, 19 nt, Homo sapiens
  misc_RNA (1)...(19): siRNA sense strand
ucuaggagaaggcgaauuu

SEQ ID NO: 40304 - RNA, 19 nt, Homo sapiens
  misc_RNA (1)...(19): siRNA sense strand
cacaugucaucaaauugua

SEQ ID NO: 40305 - RNA, 19 nt, Homo sapiens
  misc_RNA (1)...(19): siRNA sense strand
gaugaagauuucggauuuc

SEQ ID NO: 40306 - RNA, 19 nt, Homo sapiens
  misc_RNA (1)...(19): siRNA sense strand
gugccgaacuucacuacau

SEQ ID NO: 40307 - RNA, 19 nt, Homo sapiens
  misc_RNA (1)...(19): siRNA sense strand
cccgagauguuuaugaaga

SEQ ID NO: 40308 - RNA, 19 nt, Homo sapiens
  misc_RNA (1)...(19): siRNA sense strand
ccacaaguuugcccacaag

SEQ ID NO: 40309 - RNA, 19 nt, Homo sapiens
  misc_RNA (1)...(19): siRNA sense strand
gggcgaccguacaugacua

SEQ ID NO: 40310 - RNA, 19 nt, Homo sapiens
  misc_RNA (1)...(19): siRNA sense strand
acccacaugucaucaaauu

SEQ ID NO: 40311 - RNA, 19 nt, Homo sapiens
  misc_RNA (1)...(19): siRNA sense strand
gacccaagacaucaacauu

SEQ ID NO: 40312 - RNA, 19 nt, Homo sapiens
  misc_RNA (1)...(19): siRNA sense strand
cagggucggauuccaguua

SEQ ID NO: 40313 - RNA, 19 nt, Homo sapiens
  misc_RNA (1)...(19): siRNA sense strand
gcguauacuucuccuucuu

SEQ ID NO: 40314 - RNA, 19 nt, Homo sapiens
  misc_RNA (1)...(19): siRNA sense strand
cugguggacuguaauaaug

SEQ ID NO: 40315 - RNA, 19 nt, Homo sapiens
  misc_RNA (1)...(19): siRNA sense strand
uaagaggagagacuacuug

SEQ ID NO: 40316 - RNA, 19 nt, Homo sapiens
  misc_RNA (1)...(19): siRNA sense strand
ggauccuguuugugaauga

SEQ ID NO: 40317 - RNA, 19 nt, Homo sapiens
  misc_RNA (1)...(19): siRNA sense strand
guauacuucuccuucuuca

SEQ ID NO: 40318 - RNA, 19 nt, Homo sapiens
  misc_RNA (1)...(19): siRNA sense strand
ggaagcaggagccggacaa

SEQ ID NO: 40319 - RNA, 19 nt, Homo sapiens
  misc_RNA (1)...(19): siRNA sense strand
ugggcgaccucaucucauu

SEQ ID NO: 40320 - RNA, 19 nt, Homo sapiens
  misc_RNA (1)...(19): siRNA sense strand
ugcgagaccugcugucaga

SEQ ID NO: 40321 - RNA, 19 nt, Homo sapiens
  misc_RNA (1)...(19): siRNA sense strand
agaagaugaugguuaagag

SEQ ID NO: 40322 - RNA, 19 nt, Homo sapiens
  misc_RNA (1)...(19): siRNA sense strand
acuauaggcugguucucaa

SEQ ID NO: 40323 - RNA, 19 nt, Homo sapiens
  misc_RNA (1)...(19): siRNA sense strand
gagaaggcgaauuuggaaa

SEQ ID NO: 40324 - RNA, 19 nt, Homo sapiens
  misc_RNA (1)...(19): siRNA sense strand
gcuguccucuucuccuuca

SEQ ID NO: 40325 - RNA, 19 nt, Homo sapiens
  misc_RNA (1)...(19): siRNA sense strand
ggagauggcaaagggauca

SEQ ID NO: 40326 - RNA, 19 nt, Homo sapiens
  misc_RNA (1)...(19): siRNA sense strand
gaaccaggucuccguggau

SEQ ID NO: 40327 - RNA, 19 nt, Homo sapiens
  misc_RNA (1)...(19): siRNA sense strand
ggauggagaggccagacaa

SEQ ID NO: 40328 - RNA, 19 nt, Homo sapiens
  misc_RNA (1)...(19): siRNA sense strand
gcugguggacuguaauaau

SEQ ID NO: 40329 - RNA, 19 nt, Homo sapiens
  misc_RNA (1)...(19): siRNA sense strand
gaggcaaggagauggcaaa

SEQ ID NO: 40330 - RNA, 19 nt, Homo sapiens
  misc_RNA (1)...(19): siRNA sense strand
gcauugggccucuacuucu

SEQ ID NO: 40331 - RNA, 19 nt, Homo sapiens
  misc_RNA (1)...(19): siRNA sense strand
cugaggaggugcccagcuu

SEQ ID NO: 40332 - RNA, 19 nt, Homo sapiens
  misc_RNA (1)...(19): siRNA sense strand
cuggagaagaugaugguua

SEQ ID NO: 40333 - RNA, 19 nt, Homo sapiens
  misc_RNA (1)...(19): siRNA sense strand
gaagcaggagccggacaaa

SEQ ID NO: 40334 - RNA, 19 nt, Homo sapiens
  misc_RNA (1)...(19): siRNA sense strand
uaaauggauggcaauugaa

SEQ ID NO: 40335 - RNA, 19 nt, Homo sapiens
  misc_RNA (1)...(19): siRNA sense strand
gggauccuguuugugaaug

SEQ ID NO: 40336 - RNA, 19 nt, Homo sapiens
  misc_RNA (1)...(19): siRNA sense strand
gacggccacugcgauguug

SEQ ID NO: 40337 - RNA, 19 nt, Homo sapiens
  misc_RNA (1)...(19): siRNA sense strand
ggacaaaaggccgguguuu

SEQ ID NO: 40338 - RNA, 19 nt, Homo sapiens
  misc_RNA (1)...(19): siRNA sense strand
gcucguucaucgggacuug

SEQ ID NO: 40339 - RNA, 19 nt, Homo sapiens
  misc_RNA (1)...(19): siRNA sense strand
gugaggcgguacacaagca

SEQ ID NO: 40340 - RNA, 19 nt, Homo sapiens
  misc_RNA (1)...(19): siRNA sense strand
cagcaaagaccuggagaag

SEQ ID NO: 40341 - RNA, 19 nt, Homo sapiens
  misc_RNA (1)...(19): siRNA sense strand
caaccacccacaugucauc

SEQ ID NO: 40342 - RNA, 19 nt, Homo sapiens
  misc_RNA (1)...(19): siRNA sense strand
ggauuaaagcuggcuaugg

SEQ ID NO: 40343 - RNA, 19 nt, Homo sapiens
  misc_RNA (1)...(19): siRNA sense strand
cgacggccacugcgauguu

SEQ ID NO: 40344 - RNA, 19 nt, Homo sapiens
  misc_RNA (1)...(19): siRNA sense strand
gaaagucuguguggaaaac

SEQ ID NO: 40345 - RNA, 19 nt, Homo sapiens
  misc_RNA (1)...(19): siRNA sense strand
ggcauugggccucuacuuc

SEQ ID NO: 40346 - RNA, 19 nt, Homo sapiens
  misc_RNA (1)...(19): siRNA sense strand
cgggaaagucuguguggaa

SEQ ID NO: 40347 - RNA, 19 nt, Homo sapiens
  misc_RNA (1)...(19): siRNA sense strand
gcccagaucgggaaagucu

SEQ ID NO: 40348 - RNA, 19 nt, Homo sapiens
  misc_RNA (1)...(19): siRNA sense strand
gacuauaggcugguucuca

SEQ ID NO: 40349 - RNA, 19 nt, Homo sapiens
  misc_RNA (1)...(19): siRNA sense strand
gcacgcccuugcuguacgu

SEQ ID NO: 40350 - RNA, 19 nt, Homo sapiens
  misc_RNA (1)...(19): siRNA sense strand
ggucggauuccaguuaaau

SEQ ID NO: 40351 - RNA, 19 nt, Homo sapiens
  misc_RNA (1)...(19): siRNA sense strand
gcuugucccgagauguuua

SEQ ID NO: 40352 - RNA, 19 nt, Homo sapiens
  misc_RNA (1)...(19): siRNA sense strand
caucguggaguacgccaaa

SEQ ID NO: 40353 - RNA, 19 nt, Homo sapiens
  misc_RNA (1)...(19): siRNA sense strand
gaccugcugucagaguuca

SEQ ID NO: 40354 - RNA, 19 nt, Homo sapiens
  misc_RNA (1)...(19): siRNA sense strand
acccaagacaucaacauuu

SEQ ID NO: 40355 - RNA, 19 nt, Homo sapiens
  misc_RNA (1)...(19): siRNA sense strand
caacugcagcgaggagaug

SEQ ID NO: 40356 - RNA, 19 nt, Homo sapiens
  misc_RNA (1)...(19): siRNA sense strand
cacgcaaagugauguaugg

SEQ ID NO: 40357 - RNA, 19 nt, Homo sapiens
  misc_RNA (1)...(19): siRNA sense strand
gaggagccagggucggauu

SEQ ID NO: 40358 - RNA, 19 nt, Homo sapiens
  misc_RNA (1)...(19): siRNA sense strand
gggcgaccucaucucauuu

SEQ ID NO: 40359 - RNA, 19 nt, Homo sapiens
  misc_RNA (1)...(19): siRNA sense strand
aaccggagccuggaccaua

SEQ ID NO: 40360 - RNA, 19 nt, Homo sapiens
  misc_RNA (1)...(19): siRNA sense strand
caagagacggcuggagugu

SEQ ID NO: 40361 - RNA, 19 nt, Homo sapiens
  misc_RNA (1)...(19): siRNA sense strand
guuaaauggauggcaauug

SEQ ID NO: 40362 - RNA, 19 nt, Homo sapiens
  misc_RNA (1)...(19): siRNA sense strand
aagaugaagauuucggauu

SEQ ID NO: 40363 - RNA, 19 nt, Homo sapiens
  misc_RNA (1)...(19): siRNA sense strand
ccgcuguccucuucuccuu

SEQ ID NO: 40364 - RNA, 19 nt, Homo sapiens
  misc_RNA (1)...(19): siRNA sense strand
gcgccgugguggaguucaa

SEQ ID NO: 40365 - RNA, 19 nt, Homo sapiens
  misc_RNA (1)...(19): siRNA sense strand
ggcauucaguggcaucaac

SEQ ID NO: 40366 - RNA, 19 nt, Homo sapiens
  misc_RNA (1)...(19): siRNA sense strand
agggucggauuccaguuaa

SEQ ID NO: 40367 - RNA, 19 nt, Homo sapiens
  misc_RNA (1)...(19): siRNA sense strand
cggcuugucccgagauguu

SEQ ID NO: 40368 - RNA, 19 nt, Homo sapiens
  misc_RNA (1)...(19): siRNA sense strand
ccacgcaaagugauguaug

SEQ ID NO: 40369 - RNA, 19 nt, Homo sapiens
  misc_RNA (1)...(19): siRNA sense strand
gcaaagaccuggagaagau

SEQ ID NO: 40370 - RNA, 19 nt, Homo sapiens
  misc_RNA (1)...(19): siRNA sense strand
gcaaagggaucaccaggaa

SEQ ID NO: 40371 - RNA, 19 nt, Homo sapiens
  misc_RNA (1)...(19): siRNA sense strand
gcacacggcugcaugagaa

SEQ ID NO: 40372 - RNA, 19 nt, Homo sapiens
  misc_RNA (1)...(19): siRNA sense strand
gcaacggccuuccaucuga

SEQ ID NO: 40373 - RNA, 19 nt, Homo sapiens
  misc_RNA (1)...(19): siRNA sense strand
uuaaauggauggcaauuga

SEQ ID NO: 40374 - RNA, 19 nt, Homo sapiens
  misc_RNA (1)...(19): siRNA sense strand
caggagggcucgccgauuu

SEQ ID NO: 40375 - RNA, 19 nt, Homo sapiens
  misc_RNA (1)...(19): siRNA sense strand
agaugaagauuucggauuu

SEQ ID NO: 40376 - RNA, 19 nt, Homo sapiens
  misc_RNA (1)...(19): siRNA sense strand
caacacuccuccagucuug

SEQ ID NO: 40377 - RNA, 19 nt, Homo sapiens
  misc_RNA (1)...(19): siRNA sense strand
ugaagaugcugaaagagaa

SEQ ID NO: 40378 - RNA, 19 nt, Homo sapiens
  misc_RNA (1)...(19): siRNA sense strand
uggagaagaugaugguuaa

SEQ ID NO: 40379 - RNA, 19 nt, Homo sapiens
  misc_RNA (1)...(19): siRNA sense strand
gggaaagucuguguggaaa

SEQ ID NO: 40380 - RNA, 19 nt, Homo sapiens
  misc_RNA (1)...(19): siRNA sense strand
ugccugcucuucagacuua

SEQ ID NO: 40381 - RNA, 19 nt, Homo sapiens
  misc_RNA (1)...(19): siRNA sense strand
agagacggcuggaguguga

SEQ ID NO: 40382 - RNA, 19 nt, Homo sapiens
  misc_RNA (1)...(19): siRNA sense strand
ggagaaggcgaauuuggaa

SEQ ID NO: 40383 - RNA, 19 nt, Homo sapiens
  misc_RNA (1)...(19): siRNA sense strand
cccaagacaucaacauuug

SEQ ID NO: 40384 - RNA, 19 nt, Homo sapiens
  misc_RNA (1)...(19): siRNA sense strand
gcgagcagcgggagaagua

SEQ ID NO: 40385 - RNA, 19 nt, Homo sapiens
  misc_RNA (1)...(19): siRNA sense strand
caucugacucccugauuua

SEQ ID NO: 40386 - RNA, 19 nt, Homo sapiens
  misc_RNA (1)...(19): siRNA sense strand
gcaucaacguccaguacaa

SEQ ID NO: 40387 - RNA, 19 nt, Homo sapiens
  misc_RNA (1)...(19): siRNA sense strand
ggcggaagaugaagauuuc

SEQ ID NO: 40388 - RNA, 19 nt, Homo sapiens
  misc_RNA (1)...(19): siRNA sense strand
ccacccacaugucaucaaa

SEQ ID NO: 40389 - RNA, 19 nt, Homo sapiens
  misc_RNA (1)...(19): siRNA sense strand
ccaucugacucccugauuu

SEQ ID NO: 40390 - RNA, 19 nt, Homo sapiens
  misc_RNA (1)...(19): siRNA sense strand
ccacugcuaccacaaguuu

SEQ ID NO: 40391 - RNA, 19 nt, Homo sapiens
  misc_RNA (1)...(19): siRNA sense strand
gcagaaaagagucggauua

SEQ ID NO: 40392 - RNA, 19 nt, Homo sapiens
  misc_RNA (1)...(19): siRNA sense strand
gagaagaugaugguuaaga

SEQ ID NO: 40393 - RNA, 19 nt, Homo sapiens
  misc_RNA (1)...(19): siRNA sense strand
ccacaugucaucaaauugu

SEQ ID NO: 40394 - RNA, 19 nt, Homo sapiens
  misc_RNA (1)...(19): siRNA sense strand
ccacauggauugaaaacaa

SEQ ID NO: 40395 - RNA, 19 nt, Homo sapiens
  misc_RNA (1)...(19): siRNA sense strand
gggcggaagaugaagauuu

SEQ ID NO: 40396 - RNA, 19 nt, Homo sapiens
  misc_RNA (1)...(19): siRNA sense strand
uggcggugcuggucaauga

SEQ ID NO: 40397 - RNA, 19 nt, Homo sapiens
  misc_RNA (1)...(19): siRNA sense strand
gcgaggagguggugauggu

SEQ ID NO: 40398 - RNA, 19 nt, Homo sapiens
  misc_RNA (1)...(19): siRNA sense strand
ggagauguaccgccugaug

SEQ ID NO: 40399 - RNA, 19 nt, Homo sapiens
  misc_RNA (1)...(19): siRNA sense strand
gagaccugcugucagaguu

SEQ ID NO: 40400 - RNA, 19 nt, Homo sapiens
  misc_RNA (1)...(19): siRNA sense strand
ccgugaagaugcugaaaga

SEQ ID NO: 40401 - RNA, 19 nt, Homo sapiens
  misc_RNA (1)...(19): siRNA sense strand
caacggccuuccaucugaa

SEQ ID NO: 40402 - RNA, 19 nt, Homo sapiens
  misc_RNA (1)...(19): siRNA sense strand
gugaagaugcugaaagaga

SEQ ID NO: 40403 - RNA, 19 nt, Homo sapiens
  misc_RNA (1)...(19): siRNA sense strand
cugacucccugauuuauga

SEQ ID NO: 40404 - RNA, 19 nt, Homo sapiens
  misc_RNA (1)...(19): siRNA sense strand
gaccguacaugacuauagg

SEQ ID NO: 40405 - RNA, 19 nt, Homo sapiens
  misc_RNA (1)...(19): siRNA sense strand
gucccgagauguuuaugaa

SEQ ID NO: 40406 - RNA, 19 nt, Homo sapiens
  misc_RNA (1)...(19): siRNA sense strand
ucuaggagaaggcgaauuu

SEQ ID NO: 40407 - RNA, 19 nt, Homo sapiens
  misc_RNA (1)...(19): siRNA sense strand
cacaugucaucaaauugua

SEQ ID NO: 40408 - RNA, 19 nt, Homo sapiens
  misc_RNA (1)...(19): siRNA sense strand
gaugaagauuucggauuuc

SEQ ID NO: 40409 - RNA, 19 nt, Homo sapiens
  misc_RNA (1)...(19): siRNA sense strand
gugccgaacuucacuacau

SEQ ID NO: 40410 - RNA, 19 nt, Homo sapiens
  misc_RNA (1)...(19): siRNA sense strand
cccgagauguuuaugaaga

SEQ ID NO: 40411 - RNA, 19 nt, Homo sapiens
  misc_RNA (1)...(19): siRNA sense strand
ccacaaguuugcccacaag

SEQ ID NO: 40412 - RNA, 19 nt, Homo sapiens
  misc_RNA (1)...(19): siRNA sense strand
gggcgaccguacaugacua

SEQ ID NO: 40413 - RNA, 19 nt, Homo sapiens
  misc_RNA (1)...(19): siRNA sense strand
gcacuguaacuucgcagaa

SEQ ID NO: 40414 - RNA, 19 nt, Homo sapiens
  misc_RNA (1)...(19): siRNA sense strand
acccacaugucaucaaauu

SEQ ID NO: 40415 - RNA, 19 nt, Homo sapiens
  misc_RNA (1)...(19): siRNA sense strand
gacccaagacaucaacauu

SEQ ID NO: 40416 - RNA, 19 nt, Homo sapiens
  misc_RNA (1)...(19): siRNA sense strand
cagggucggauuccaguua

SEQ ID NO: 40417 - RNA, 19 nt, Homo sapiens
  misc_RNA (1)...(19): siRNA sense strand
gcguauacuucuccuucuu

SEQ ID NO: 40418 - RNA, 19 nt, Homo sapiens
  misc_RNA (1)...(19): siRNA sense strand
cugguggacuguaauaaug

SEQ ID NO: 40419 - RNA, 19 nt, Homo sapiens
  misc_RNA (1)...(19): siRNA sense strand
uaagaggagagacuacuug

SEQ ID NO: 40420 - RNA, 19 nt, Homo sapiens
  misc_RNA (1)...(19): siRNA sense strand
ggauccuguuugugaauga

SEQ ID NO: 40421 - RNA, 19 nt, Homo sapiens
  misc_RNA (1)...(19): siRNA sense strand
guauacuucuccuucuuca

SEQ ID NO: 40422 - RNA, 19 nt, Homo sapiens
  misc_RNA (1)...(19): siRNA sense strand
ggaagucucagcagcucuu

SEQ ID NO: 40423 - RNA, 19 nt, Homo sapiens
  misc_RNA (1)...(19): siRNA sense strand
ggaagcaggagccggacaa

SEQ ID NO: 40424 - RNA, 19 nt, Homo sapiens
  misc_RNA (1)...(19): siRNA sense strand
ugggcgaccucaucucauu

SEQ ID NO: 40425 - RNA, 19 nt, Homo sapiens
  misc_RNA (1)...(19): siRNA sense strand
ugcgagaccugcugucaga

SEQ ID NO: 40426 - RNA, 19 nt, Homo sapiens
  misc_RNA (1)...(19): siRNA sense strand
agaagaugaugguuaagag

SEQ ID NO: 40427 - RNA, 19 nt, Homo sapiens
  misc_RNA (1)...(19): siRNA sense strand
gaaaagagucggauuacca

SEQ ID NO: 40428 - RNA, 19 nt, Homo sapiens
  misc_RNA (1)...(19): siRNA sense strand
acuauaggcugguucucaa

SEQ ID NO: 40429 - RNA, 19 nt, Homo sapiens
  misc_RNA (1)...(19): siRNA sense strand
cacuguaacuucgcagaaa

SEQ ID NO: 40430 - RNA, 19 nt, Homo sapiens
  misc_RNA (1)...(19): siRNA sense strand
gagaaggcgaauuuggaaa

SEQ ID NO: 40431 - RNA, 19 nt, Homo sapiens
  misc_RNA (1)...(19): siRNA sense strand
gcuguccucuucuccuuca

SEQ ID NO: 40432 - RNA, 19 nt, Homo sapiens
  misc_RNA (1)...(19): siRNA sense strand
ggagauggcaaagggauca

SEQ ID NO: 40433 - RNA, 19 nt, Homo sapiens
  misc_RNA (1)...(19): siRNA sense strand
gaaccaggucuccguggau

SEQ ID NO: 40434 - RNA, 19 nt, Homo sapiens
  misc_RNA (1)...(19): siRNA sense strand
ggauggagaggccagacaa

SEQ ID NO: 40435 - RNA, 19 nt, Homo sapiens
  misc_RNA (1)...(19): siRNA sense strand
gcugguggacuguaauaau

SEQ ID NO: 40436 - RNA, 19 nt, Homo sapiens
  misc_RNA (1)...(19): siRNA sense strand
gcauugggccucuacuucu

SEQ ID NO: 40437 - RNA, 19 nt, Homo sapiens
  misc_RNA (1)...(19): siRNA sense strand
gaggcaaggagauggcaaa

SEQ ID NO: 40438 - RNA, 19 nt, Homo sapiens
  misc_RNA (1)...(19): siRNA sense strand
cugaggaggugcccagcuu

SEQ ID NO: 40439 - RNA, 19 nt, Homo sapiens
  misc_RNA (1)...(19): siRNA sense strand
aaacacugccugcucuuca

SEQ ID NO: 40440 - RNA, 19 nt, Homo sapiens
  misc_RNA (1)...(19): siRNA sense strand
cuggagaagaugaugguua

SEQ ID NO: 40441 - RNA, 19 nt, Homo sapiens
  misc_RNA (1)...(19): siRNA sense strand
gaagcaggagccggacaaa

SEQ ID NO: 40442 - RNA, 19 nt, Homo sapiens
  misc_RNA (1)...(19): siRNA sense strand
uaaauggauggcaauugaa

SEQ ID NO: 40443 - RNA, 19 nt, Homo sapiens
  misc_RNA (1)...(19): siRNA sense strand
gggauccuguuugugaaug

SEQ ID NO: 40444 - RNA, 19 nt, Homo sapiens
  misc_RNA (1)...(19): siRNA sense strand
gacggccacugcgauguug

SEQ ID NO: 40445 - RNA, 19 nt, Homo sapiens
  misc_RNA (1)...(19): siRNA sense strand
ggacaaaaggccgguguuu

SEQ ID NO: 40446 - RNA, 19 nt, Homo sapiens
  misc_RNA (1)...(19): siRNA sense strand
gcucguucaucgggacuug

SEQ ID NO: 40447 - RNA, 19 nt, Homo sapiens
  misc_RNA (1)...(19): siRNA sense strand
gugaggcgguacacaagca

SEQ ID NO: 40448 - RNA, 19 nt, Homo sapiens
  misc_RNA (1)...(19): siRNA sense strand
ggcauugggccucuacuuc

SEQ ID NO: 40449 - RNA, 19 nt, Homo sapiens
  misc_RNA (1)...(19): siRNA sense strand
cagcaaagaccuggagaag

SEQ ID NO: 40450 - RNA, 19 nt, Homo sapiens
  misc_RNA (1)...(19): siRNA sense strand
caaccacccacaugucauc

SEQ ID NO: 40451 - RNA, 19 nt, Homo sapiens
  misc_RNA (1)...(19): siRNA sense strand
ggauuaaagcuggcuaugg

SEQ ID NO: 40452 - RNA, 19 nt, Homo sapiens
  misc_RNA (1)...(19): siRNA sense strand
cgacggccacugcgauguu

SEQ ID NO: 40453 - RNA, 19 nt, Homo sapiens
  misc_RNA (1)...(19): siRNA sense strand
gaaagucuguguggaaaac

SEQ ID NO: 40454 - RNA, 19 nt, Homo sapiens
  misc_RNA (1)...(19): siRNA sense strand
cgggaaagucuguguggaa

SEQ ID NO: 40455 - RNA, 19 nt, Homo sapiens
  misc_RNA (1)...(19): siRNA sense strand
gcccagaucgggaaagucu

SEQ ID NO: 40456 - RNA, 19 nt, Homo sapiens
  misc_RNA (1)...(19): siRNA sense strand
gacuauaggcugguucuca

SEQ ID NO: 40457 - RNA, 19 nt, Homo sapiens
  misc_RNA (1)...(19): siRNA sense strand
ggucggauuccaguuaaau

SEQ ID NO: 40458 - RNA, 19 nt, Homo sapiens
  misc_RNA (1)...(19): siRNA sense strand
gcuugucccgagauguuua

SEQ ID NO: 40459 - RNA, 19 nt, Homo sapiens
  misc_RNA (1)...(19): siRNA sense strand
caucguggaguacgccaaa

SEQ ID NO: 40460 - RNA, 19 nt, Homo sapiens
  misc_RNA (1)...(19): siRNA sense strand
gcacgcccuugcuguacgu

SEQ ID NO: 40461 - RNA, 19 nt, Homo sapiens
  misc_RNA (1)...(19): siRNA sense strand
gaccugcugucagaguuca

SEQ ID NO: 40462 - RNA, 19 nt, Homo sapiens
  misc_RNA (1)...(19): siRNA sense strand
acccaagacaucaacauuu

SEQ ID NO: 40463 - RNA, 19 nt, Homo sapiens
  misc_RNA (1)...(19): siRNA sense strand
aaccggagccuggaccaua

SEQ ID NO: 40464 - RNA, 19 nt, Homo sapiens
  misc_RNA (1)...(19): siRNA sense strand
caacugcagcgaggagaug

SEQ ID NO: 40465 - RNA, 19 nt, Homo sapiens
  misc_RNA (1)...(19): siRNA sense strand
cacgcaaagugauguaugg

SEQ ID NO: 40466 - RNA, 19 nt, Homo sapiens
  misc_RNA (1)...(19): siRNA sense strand
gaggagccagggucggauu

SEQ ID NO: 40467 - RNA, 19 nt, Homo sapiens
  misc_RNA (1)...(19): siRNA sense strand
gggcgaccucaucucauuu

SEQ ID NO: 40468 - RNA, 19 nt, Homo sapiens
  misc_RNA (1)...(19): siRNA sense strand
gcgccgugguggaguucaa

SEQ ID NO: 40469 - RNA, 19 nt, Homo sapiens
  misc_RNA (1)...(19): siRNA sense strand
gcaaagaccuggagaagau

SEQ ID NO: 40470 - RNA, 19 nt, Homo sapiens
  misc_RNA (1)...(19): siRNA sense strand
gcaaagggaucaccaggaa

SEQ ID NO: 40471 - RNA, 19 nt, Homo sapiens
  misc_RNA (1)...(19): siRNA sense strand
gcacacggcugcaugagaa

SEQ ID NO: 40472 - RNA, 19 nt, Homo sapiens
  misc_RNA (1)...(19): siRNA sense strand
gcaacggccuuccaucuga

SEQ ID NO: 40473 - RNA, 19 nt, Homo sapiens
  misc_RNA (1)...(19): siRNA sense strand
uuaaauggauggcaauuga

SEQ ID NO: 40474 - RNA, 19 nt, Homo sapiens
  misc_RNA (1)...(19): siRNA sense strand
caggagggcucgccgauuu

SEQ ID NO: 40475 - RNA, 19 nt, Homo sapiens
  misc_RNA (1)...(19): siRNA sense strand
agaugaagauuucggauuu

SEQ ID NO: 40476 - RNA, 19 nt, Homo sapiens
  misc_RNA (1)...(19): siRNA sense strand
ugaagaugcugaaagagaa

SEQ ID NO: 40477 - RNA, 19 nt, Homo sapiens
  misc_RNA (1)...(19): siRNA sense strand
uggagaagaugaugguuaa

SEQ ID NO: 40478 - RNA, 19 nt, Homo sapiens
  misc_RNA (1)...(19): siRNA sense strand
gggaaagucuguguggaaa

SEQ ID NO: 40479 - RNA, 19 nt, Homo sapiens
  misc_RNA (1)...(19): siRNA sense strand
agagacggcuggaguguga

SEQ ID NO: 40480 - RNA, 19 nt, Homo sapiens
  misc_RNA (1)...(19): siRNA sense strand
ggagaaggcgaauuuggaa

SEQ ID NO: 40481 - RNA, 19 nt, Homo sapiens
  misc_RNA (1)...(19): siRNA sense strand
cccaagacaucaacauuug

SEQ ID NO: 40482 - RNA, 19 nt, Homo sapiens
  misc_RNA (1)...(19): siRNA sense strand
gcgagcagcgggagaagua

SEQ ID NO: 40483 - RNA, 19 nt, Homo sapiens
  misc_RNA (1)...(19): siRNA sense strand
caucugacucccugauuua

SEQ ID NO: 40484 - RNA, 19 nt, Homo sapiens
  misc_RNA (1)...(19): siRNA sense strand
gcaucaacguccaguacaa

SEQ ID NO: 40485 - RNA, 19 nt, Homo sapiens
  misc_RNA (1)...(19): siRNA sense strand
ggcggaagaugaagauuuc

SEQ ID NO: 40486 - RNA, 19 nt, Homo sapiens
  misc_RNA (1)...(19): siRNA sense strand
ccacccacaugucaucaaa

SEQ ID NO: 40487 - RNA, 19 nt, Homo sapiens
  misc_RNA (1)...(19): siRNA sense strand
ccaucugacucccugauuu

SEQ ID NO: 40488 - RNA, 19 nt, Homo sapiens
  misc_RNA (1)...(19): siRNA sense strand
ccacugcuaccacaaguuu

SEQ ID NO: 40489 - RNA, 19 nt, Homo sapiens
  misc_RNA (1)...(19): siRNA sense strand
gagaagaugaugguuaaga

SEQ ID NO: 40490 - RNA, 19 nt, Homo sapiens
  misc_RNA (1)...(19): siRNA sense strand
ccacaugucaucaaauugu

SEQ ID NO: 40491 - RNA, 19 nt, Homo sapiens
  misc_RNA (1)...(19): siRNA sense strand
ccacauggauugaaaacaa

SEQ ID NO: 40492 - RNA, 19 nt, Homo sapiens
  misc_RNA (1)...(19): siRNA sense strand
gggcggaagaugaagauuu

SEQ ID NO: 40493 - RNA, 19 nt, Homo sapiens
  misc_RNA (1)...(19): siRNA sense strand
uggcggugcuggucaauga

SEQ ID NO: 40494 - RNA, 19 nt, Homo sapiens
  misc_RNA (1)...(19): siRNA sense strand
gcgaggagguggugauggu

SEQ ID NO: 40495 - RNA, 19 nt, Homo sapiens
  misc_RNA (1)...(19): siRNA sense strand
ggagauguaccgccugaug

SEQ ID NO: 40496 - RNA, 19 nt, Homo sapiens
  misc_RNA (1)...(19): siRNA sense strand
gagaccugcugucagaguu

SEQ ID NO: 40497 - RNA, 19 nt, Homo sapiens
  misc_RNA (1)...(19): siRNA sense strand
ccgugaagaugcugaaaga

SEQ ID NO: 40498 - RNA, 19 nt, Homo sapiens
  misc_RNA (1)...(19): siRNA sense strand
caacggccuuccaucugaa

SEQ ID NO: 40499 - RNA, 19 nt, Homo sapiens
  misc_RNA (1)...(19): siRNA sense strand
gugaagaugcugaaagaga

SEQ ID NO: 40500 - RNA, 19 nt, Homo sapiens
  misc_RNA (1)...(19): siRNA sense strand
cugacucccugauuuauga

SEQ ID NO: 40501 - RNA, 19 nt, Homo sapiens
  misc_RNA (1)...(19): siRNA sense strand
gaccguacaugacuauagg

SEQ ID NO: 40502 - RNA, 19 nt, Homo sapiens
  misc_RNA (1)...(19): siRNA sense strand
gucccgagauguuuaugaa

SEQ ID NO: 40503 - RNA, 19 nt, Homo sapiens
  misc_RNA (1)...(19): siRNA sense strand
ucuaggagaaggcgaauuu

SEQ ID NO: 40504 - RNA, 19 nt, Homo sapiens
  misc_RNA (1)...(19): siRNA sense strand
cacaugucaucaaauugua

SEQ ID NO: 40505 - RNA, 19 nt, Homo sapiens
  misc_RNA (1)...(19): siRNA sense strand
gaugaagauuucggauuuc

SEQ ID NO: 40506 - RNA, 19 nt, Homo sapiens
  misc_RNA (1)...(19): siRNA sense strand
gugccgaacuucacuacau

SEQ ID NO: 40507 - RNA, 19 nt, Homo sapiens
  misc_RNA (1)...(19): siRNA sense strand
cccgagauguuuaugaaga

SEQ ID NO: 40508 - RNA, 19 nt, Homo sapiens
  misc_RNA (1)...(19): siRNA sense strand
ccacaaguuugcccacaag

SEQ ID NO: 40509 - RNA, 19 nt, Homo sapiens
  misc_RNA (1)...(19): siRNA sense strand
gggcgaccguacaugacua

SEQ ID NO: 40510 - RNA, 19 nt, Homo sapiens
  misc_RNA (1)...(19): siRNA sense strand
acccacaugucaucaaauu

SEQ ID NO: 40511 - RNA, 19 nt, Homo sapiens
  misc_RNA (1)...(19): siRNA sense strand
gacccaagacaucaacauu

SEQ ID NO: 40512 - RNA, 19 nt, Homo sapiens
  misc_RNA (1)...(19): siRNA sense strand
cagggucggauuccaguua

SEQ ID NO: 40513 - RNA, 19 nt, Homo sapiens
  misc_RNA (1)...(19): siRNA sense strand
gcguauacuucuccuucuu

SEQ ID NO: 40514 - RNA, 19 nt, Homo sapiens
  misc_RNA (1)...(19): siRNA sense strand
cugguggacuguaauaaug

SEQ ID NO: 40515 - RNA, 19 nt, Homo sapiens
  misc_RNA (1)...(19): siRNA sense strand
uaagaggagagacuacuug

SEQ ID NO: 40516 - RNA, 19 nt, Homo sapiens
  misc_RNA (1)...(19): siRNA sense strand
ggauccuguuugugaauga

SEQ ID NO: 40517 - RNA, 19 nt, Homo sapiens
  misc_RNA (1)...(19): siRNA sense strand
guauacuucuccuucuuca

SEQ ID NO: 40518 - RNA, 19 nt, Homo sapiens
  misc_RNA (1)...(19): siRNA sense strand
ggaagcaggagccggacaa

SEQ ID NO: 40519 - RNA, 19 nt, Homo sapiens
  misc_RNA (1)...(19): siRNA sense strand
ugggcgaccucaucucauu

SEQ ID NO: 40520 - RNA, 19 nt, Homo sapiens
  misc_RNA (1)...(19): siRNA sense strand
ugcgagaccugcugucaga

SEQ ID NO: 40521 - RNA, 19 nt, Homo sapiens
  misc_RNA (1)...(19): siRNA sense strand
agaagaugaugguuaagag

SEQ ID NO: 40522 - RNA, 19 nt, Homo sapiens
  misc_RNA (1)...(19): siRNA sense strand
acuauaggcugguucucaa

SEQ ID NO: 40523 - RNA, 19 nt, Homo sapiens
  misc_RNA (1)...(19): siRNA sense strand
gagaaggcgaauuuggaaa

SEQ ID NO: 40524 - RNA, 19 nt, Homo sapiens
  misc_RNA (1)...(19): siRNA sense strand
gcuguccucuucuccuuca

SEQ ID NO: 40525 - RNA, 19 nt, Homo sapiens
  misc_RNA (1)...(19): siRNA sense strand
ggagauggcaaagggauca

SEQ ID NO: 40526 - RNA, 19 nt, Homo sapiens
  misc_RNA (1)...(19): siRNA sense strand
gaaccaggucuccguggau

SEQ ID NO: 40527 - RNA, 19 nt, Homo sapiens
  misc_RNA (1)...(19): siRNA sense strand
ggauggagaggccagacaa

SEQ ID NO: 40528 - RNA, 19 nt, Homo sapiens
  misc_RNA (1)...(19): siRNA sense strand
gcugguggacuguaauaau

SEQ ID NO: 40529 - RNA, 19 nt, Homo sapiens
  misc_RNA (1)...(19): siRNA sense strand
gaggcaaggagauggcaaa

SEQ ID NO: 40530 - RNA, 19 nt, Homo sapiens
  misc_RNA (1)...(19): siRNA sense strand
gcauugggccucuacuucu

SEQ ID NO: 40531 - RNA, 19 nt, Homo sapiens
  misc_RNA (1)...(19): siRNA sense strand
cugaggaggugcccagcuu

SEQ ID NO: 40532 - RNA, 19 nt, Homo sapiens
  misc_RNA (1)...(19): siRNA sense strand
cuggagaagaugaugguua

SEQ ID NO: 40533 - RNA, 19 nt, Homo sapiens
  misc_RNA (1)...(19): siRNA sense strand
gaagcaggagccggacaaa

SEQ ID NO: 40534 - RNA, 19 nt, Homo sapiens
  misc_RNA (1)...(19): siRNA sense strand
uaaauggauggcaauugaa

SEQ ID NO: 40535 - RNA, 19 nt, Homo sapiens
  misc_RNA (1)...(19): siRNA sense strand
gggauccuguuugugaaug

SEQ ID NO: 40536 - RNA, 19 nt, Homo sapiens
  misc_RNA (1)...(19): siRNA sense strand
gacggccacugcgauguug

SEQ ID NO: 40537 - RNA, 19 nt, Homo sapiens
  misc_RNA (1)...(19): siRNA sense strand
ggacaaaaggccgguguuu

SEQ ID NO: 40538 - RNA, 19 nt, Homo sapiens
  misc_RNA (1)...(19): siRNA sense strand
gcucguucaucgggacuug

SEQ ID NO: 40539 - RNA, 19 nt, Homo sapiens
  misc_RNA (1)...(19): siRNA sense strand
gugaggcgguacacaagca

SEQ ID NO: 40540 - RNA, 19 nt, Homo sapiens
  misc_RNA (1)...(19): siRNA sense strand
cagcaaagaccuggagaag

SEQ ID NO: 40541 - RNA, 19 nt, Homo sapiens
  misc_RNA (1)...(19): siRNA sense strand
caaccacccacaugucauc

SEQ ID NO: 40542 - RNA, 19 nt, Homo sapiens
  misc_RNA (1)...(19): siRNA sense strand
ggauuaaagcuggcuaugg

SEQ ID NO: 40543 - RNA, 19 nt, Homo sapiens
  misc_RNA (1)...(19): siRNA sense strand
cgacggccacugcgauguu

SEQ ID NO: 40544 - RNA, 19 nt, Homo sapiens
  misc_RNA (1)...(19): siRNA sense strand
gaaagucuguguggaaaac

SEQ ID NO: 40545 - RNA, 19 nt, Homo sapiens
  misc_RNA (1)...(19): siRNA sense strand
ggcauugggccucuacuuc

SEQ ID NO: 40546 - RNA, 19 nt, Homo sapiens
  misc_RNA (1)...(19): siRNA sense strand
cgggaaagucuguguggaa

SEQ ID NO: 40547 - RNA, 19 nt, Homo sapiens
  misc_RNA (1)...(19): siRNA sense strand
gcccagaucgggaaagucu

SEQ ID NO: 40548 - RNA, 19 nt, Homo sapiens
  misc_RNA (1)...(19): siRNA sense strand
gacuauaggcugguucuca

SEQ ID NO: 40549 - RNA, 19 nt, Homo sapiens
  misc_RNA (1)...(19): siRNA sense strand
gcacgcccuugcuguacgu

SEQ ID NO: 40550 - RNA, 19 nt, Homo sapiens
  misc_RNA (1)...(19): siRNA sense strand
ggucggauuccaguuaaau

SEQ ID NO: 40551 - RNA, 19 nt, Homo sapiens
  misc_RNA (1)...(19): siRNA sense strand
gcuugucccgagauguuua

SEQ ID NO: 40552 - RNA, 19 nt, Homo sapiens
  misc_RNA (1)...(19): siRNA sense strand
caucguggaguacgccaaa

SEQ ID NO: 40553 - RNA, 19 nt, Homo sapiens
  misc_RNA (1)...(19): siRNA sense strand
gaccugcugucagaguuca

SEQ ID NO: 40554 - RNA, 19 nt, Homo sapiens
  misc_RNA (1)...(19): siRNA sense strand
acccaagacaucaacauuu

SEQ ID NO: 40555 - RNA, 19 nt, Homo sapiens
  misc_RNA (1)...(19): siRNA sense strand
caacugcagcgaggagaug

SEQ ID NO: 40556 - RNA, 19 nt, Homo sapiens
  misc_RNA (1)...(19): siRNA sense strand
cacgcaaagugauguaugg

SEQ ID NO: 40557 - RNA, 19 nt, Homo sapiens
  misc_RNA (1)...(19): siRNA sense strand
gaggagccagggucggauu

SEQ ID NO: 40558 - RNA, 19 nt, Homo sapiens
  misc_RNA (1)...(19): siRNA sense strand
gggcgaccucaucucauuu

SEQ ID NO: 40559 - RNA, 19 nt, Homo sapiens
  misc_RNA (1)...(19): siRNA sense strand
aaccggagccuggaccaua

SEQ ID NO: 40560 - RNA, 19 nt, Homo sapiens
  misc_RNA (1)...(19): siRNA sense strand
caagagacggcuggagugu

SEQ ID NO: 40561 - RNA, 19 nt, Homo sapiens
  misc_RNA (1)...(19): siRNA sense strand
guuaaauggauggcaauug

SEQ ID NO: 40562 - RNA, 19 nt, Homo sapiens
  misc_RNA (1)...(19): siRNA sense strand
aagaugaagauuucggauu

SEQ ID NO: 40563 - RNA, 19 nt, Homo sapiens
  misc_RNA (1)...(19): siRNA sense strand
ccgcuguccucuucuccuu

SEQ ID NO: 40564 - RNA, 19 nt, Homo sapiens
  misc_RNA (1)...(19): siRNA sense strand
gcgccgugguggaguucaa

SEQ ID NO: 40565 - RNA, 19 nt, Homo sapiens
  misc_RNA (1)...(19): siRNA sense strand
ggcauucaguggcaucaac

SEQ ID NO: 40566 - RNA, 19 nt, Homo sapiens
  misc_RNA (1)...(19): siRNA sense strand
agggucggauuccaguuaa

SEQ ID NO: 40567 - RNA, 19 nt, Homo sapiens
  misc_RNA (1)...(19): siRNA sense strand
cggcuugucccgagauguu

SEQ ID NO: 40568 - RNA, 19 nt, Homo sapiens
  misc_RNA (1)...(19): siRNA sense strand
ccacgcaaagugauguaug

SEQ ID NO: 40569 - RNA, 19 nt, Homo sapiens
  misc_RNA (1)...(19): siRNA sense strand
gcaaagaccuggagaagau

SEQ ID NO: 40570 - RNA, 19 nt, Homo sapiens
  misc_RNA (1)...(19): siRNA sense strand
gcaaagggaucaccaggaa

SEQ ID NO: 40571 - RNA, 19 nt, Homo sapiens
  misc_RNA (1)...(19): siRNA sense strand
gcacacggcugcaugagaa

SEQ ID NO: 40572 - RNA, 19 nt, Homo sapiens
  misc_RNA (1)...(19): siRNA sense strand
gcaacggccuuccaucuga

SEQ ID NO: 40573 - RNA, 19 nt, Homo sapiens
  misc_RNA (1)...(19): siRNA sense strand
uuaaauggauggcaauuga

SEQ ID NO: 40574 - RNA, 19 nt, Homo sapiens
  misc_RNA (1)...(19): siRNA sense strand
caggagggcucgccgauuu

SEQ ID NO: 40575 - RNA, 19 nt, Homo sapiens
  misc_RNA (1)...(19): siRNA sense strand
agaugaagauuucggauuu

SEQ ID NO: 40576 - RNA, 19 nt, Homo sapiens
  misc_RNA (1)...(19): siRNA sense strand
ugaagaugcugaaagagaa

SEQ ID NO: 40577 - RNA, 19 nt, Homo sapiens
  misc_RNA (1)...(19): siRNA sense strand
uggagaagaugaugguuaa

SEQ ID NO: 40578 - RNA, 19 nt, Homo sapiens
  misc_RNA (1)...(19): siRNA sense strand
gggaaagucuguguggaaa

SEQ ID NO: 40579 - RNA, 19 nt, Homo sapiens
  misc_RNA (1)...(19): siRNA sense strand
agagacggcuggaguguga

SEQ ID NO: 40580 - RNA, 19 nt, Homo sapiens
  misc_RNA (1)...(19): siRNA sense strand
ggagaaggcgaauuuggaa

SEQ ID NO: 40581 - RNA, 19 nt, Homo sapiens
  misc_RNA (1)...(19): siRNA sense strand
cccaagacaucaacauuug

SEQ ID NO: 40582 - RNA, 19 nt, Homo sapiens
  misc_RNA (1)...(19): siRNA sense strand
gcgagcagcgggagaagua

SEQ ID NO: 40583 - RNA, 19 nt, Homo sapiens
  misc_RNA (1)...(19): siRNA sense strand
caucugacucccugauuua

SEQ ID NO: 40584 - RNA, 19 nt, Homo sapiens
  misc_RNA (1)...(19): siRNA sense strand
gcaucaacguccaguacaa

SEQ ID NO: 40585 - RNA, 19 nt, Homo sapiens
  misc_RNA (1)...(19): siRNA sense strand
ggcggaagaugaagauuuc

SEQ ID NO: 40586 - RNA, 19 nt, Homo sapiens
  misc_RNA (1)...(19): siRNA sense strand
ccacccacaugucaucaaa

SEQ ID NO: 40587 - RNA, 19 nt, Homo sapiens
  misc_RNA (1)...(19): siRNA sense strand
ccaucugacucccugauuu

SEQ ID NO: 40588 - RNA, 19 nt, Homo sapiens
  misc_RNA (1)...(19): siRNA sense strand
ccacugcuaccacaaguuu

SEQ ID NO: 40589 - RNA, 19 nt, Homo sapiens
  misc_RNA (1)...(19): siRNA sense strand
gagaagaugaugguuaaga

SEQ ID NO: 40590 - RNA, 19 nt, Homo sapiens
  misc_RNA (1)...(19): siRNA sense strand
ccacaugucaucaaauugu

SEQ ID NO: 40591 - RNA, 19 nt, Homo sapiens
  misc_RNA (1)...(19): siRNA sense strand
ccacauggauugaaaacaa

SEQ ID NO: 40592 - RNA, 19 nt, Homo sapiens
  misc_RNA (1)...(19): siRNA sense strand
gggcggaagaugaagauuu

SEQ ID NO: 40593 - RNA, 19 nt, Homo sapiens
  misc_RNA (1)...(19): siRNA sense strand
uggcggugcuggucaauga

SEQ ID NO: 40594 - RNA, 19 nt, Homo sapiens
  misc_RNA (1)...(19): siRNA sense strand
gcgaggagguggugauggu

SEQ ID NO: 40595 - RNA, 19 nt, Homo sapiens
  misc_RNA (1)...(19): siRNA sense strand
ggagauguaccgccugaug

SEQ ID NO: 40596 - RNA, 19 nt, Homo sapiens
  misc_RNA (1)...(19): siRNA sense strand
gagaccugcugucagaguu

SEQ ID NO: 40597 - RNA, 19 nt, Homo sapiens
  misc_RNA (1)...(19): siRNA sense strand
ccgugaagaugcugaaaga

SEQ ID NO: 40598 - RNA, 19 nt, Homo sapiens
  misc_RNA (1)...(19): siRNA sense strand
caacggccuuccaucugaa

SEQ ID NO: 40599 - RNA, 19 nt, Homo sapiens
  misc_RNA (1)...(19): siRNA sense strand
gugaagaugcugaaagaga

SEQ ID NO: 40600 - RNA, 19 nt, Homo sapiens
  misc_RNA (1)...(19): siRNA sense strand
cugacucccugauuuauga

SEQ ID NO: 40601 - RNA, 19 nt, Homo sapiens
  misc_RNA (1)...(19): siRNA sense strand
gaccguacaugacuauagg

SEQ ID NO: 40602 - RNA, 19 nt, Homo sapiens
  misc_RNA (1)...(19): siRNA sense strand
gucccgagauguuuaugaa

SEQ ID NO: 40603 - RNA, 19 nt, Homo sapiens
  misc_RNA (1)...(19): siRNA sense strand
ucuaggagaaggcgaauuu

SEQ ID NO: 40604 - RNA, 19 nt, Homo sapiens
  misc_RNA (1)...(19): siRNA sense strand
cacaugucaucaaauugua

SEQ ID NO: 40605 - RNA, 19 nt, Homo sapiens
  misc_RNA (1)...(19): siRNA sense strand
gaugaagauuucggauuuc

SEQ ID NO: 40606 - RNA, 19 nt, Homo sapiens
  misc_RNA (1)...(19): siRNA sense strand
gugccgaacuucacuacau

SEQ ID NO: 40607 - RNA, 19 nt, Homo sapiens
  misc_RNA (1)...(19): siRNA sense strand
cccgagauguuuaugaaga

SEQ ID NO: 40608 - RNA, 19 nt, Homo sapiens
  misc_RNA (1)...(19): siRNA sense strand
ccacaaguuugcccacaag

SEQ ID NO: 40609 - RNA, 19 nt, Homo sapiens
  misc_RNA (1)...(19): siRNA sense strand
gggcgaccguacaugacua

SEQ ID NO: 40610 - RNA, 19 nt, Homo sapiens
  misc_RNA (1)...(19): siRNA sense strand
acccacaugucaucaaauu

SEQ ID NO: 40611 - RNA, 19 nt, Homo sapiens
  misc_RNA (1)...(19): siRNA sense strand
gacccaagacaucaacauu

SEQ ID NO: 40612 - RNA, 19 nt, Homo sapiens
  misc_RNA (1)...(19): siRNA sense strand
cagggucggauuccaguua

SEQ ID NO: 40613 - RNA, 19 nt, Homo sapiens
  misc_RNA (1)...(19): siRNA sense strand
gcguauacuucuccuucuu

SEQ ID NO: 40614 - RNA, 19 nt, Homo sapiens
  misc_RNA (1)...(19): siRNA sense strand
cugguggacuguaauaaug

SEQ ID NO: 40615 - RNA, 19 nt, Homo sapiens
  misc_RNA (1)...(19): siRNA sense strand
uaagaggagagacuacuug

SEQ ID NO: 40616 - RNA, 19 nt, Homo sapiens
  misc_RNA (1)...(19): siRNA sense strand
ggauccuguuugugaauga

SEQ ID NO: 40617 - RNA, 19 nt, Homo sapiens
  misc_RNA (1)...(19): siRNA sense strand
guauacuucuccuucuuca

SEQ ID NO: 40618 - RNA, 19 nt, Homo sapiens
  misc_RNA (1)...(19): siRNA sense strand
ggaagcaggagccggacaa

SEQ ID NO: 40619 - RNA, 19 nt, Homo sapiens
  misc_RNA (1)...(19): siRNA sense strand
ugggcgaccucaucucauu

SEQ ID NO: 40620 - RNA, 19 nt, Homo sapiens
  misc_RNA (1)...(19): siRNA sense strand
ugcgagaccugcugucaga

SEQ ID NO: 40621 - RNA, 19 nt, Homo sapiens
  misc_RNA (1)...(19): siRNA sense strand
agaagaugaugguuaagag

SEQ ID NO: 40622 - RNA, 19 nt, Homo sapiens
  misc_RNA (1)...(19): siRNA sense strand
acuauaggcugguucucaa

SEQ ID NO: 40623 - RNA, 19 nt, Homo sapiens
  misc_RNA (1)...(19): siRNA sense strand
gagaaggcgaauuuggaaa

SEQ ID NO: 40624 - RNA, 19 nt, Homo sapiens
  misc_RNA (1)...(19): siRNA sense strand
gcuguccucuucuccuuca

SEQ ID NO: 40625 - RNA, 19 nt, Homo sapiens
  misc_RNA (1)...(19): siRNA sense strand
ggagauggcaaagggauca

SEQ ID NO: 40626 - RNA, 19 nt, Homo sapiens
  misc_RNA (1)...(19): siRNA sense strand
gaaccaggucuccguggau

SEQ ID NO: 40627 - RNA, 19 nt, Homo sapiens
  misc_RNA (1)...(19): siRNA sense strand
ggauggagaggccagacaa

SEQ ID NO: 40628 - RNA, 19 nt, Homo sapiens
  misc_RNA (1)...(19): siRNA sense strand
gcugguggacuguaauaau

SEQ ID NO: 40629 - RNA, 19 nt, Homo sapiens
  misc_RNA (1)...(19): siRNA sense strand
gaggcaaggagauggcaaa

SEQ ID NO: 40630 - RNA, 19 nt, Homo sapiens
  misc_RNA (1)...(19): siRNA sense strand
gcauugggccucuacuucu

SEQ ID NO: 40631 - RNA, 19 nt, Homo sapiens
  misc_RNA (1)...(19): siRNA sense strand
cugaggaggugcccagcuu

SEQ ID NO: 40632 - RNA, 19 nt, Homo sapiens
  misc_RNA (1)...(19): siRNA sense strand
cuggagaagaugaugguua

SEQ ID NO: 40633 - RNA, 19 nt, Homo sapiens
  misc_RNA (1)...(19): siRNA sense strand
gaagcaggagccggacaaa

SEQ ID NO: 40634 - RNA, 19 nt, Homo sapiens
  misc_RNA (1)...(19): siRNA sense strand
uaaauggauggcaauugaa

SEQ ID NO: 40635 - RNA, 19 nt, Homo sapiens
  misc_RNA (1)...(19): siRNA sense strand
gggauccuguuugugaaug

SEQ ID NO: 40636 - RNA, 19 nt, Homo sapiens
  misc_RNA (1)...(19): siRNA sense strand
gacggccacugcgauguug

SEQ ID NO: 40637 - RNA, 19 nt, Homo sapiens
  misc_RNA (1)...(19): siRNA sense strand
ggacaaaaggccgguguuu

SEQ ID NO: 40638 - RNA, 19 nt, Homo sapiens
  misc_RNA (1)...(19): siRNA sense strand
gcucguucaucgggacuug

SEQ ID NO: 40639 - RNA, 19 nt, Homo sapiens
  misc_RNA (1)...(19): siRNA sense strand
gugaggcgguacacaagca

SEQ ID NO: 40640 - RNA, 19 nt, Homo sapiens
  misc_RNA (1)...(19): siRNA sense strand
cagcaaagaccuggagaag

SEQ ID NO: 40641 - RNA, 19 nt, Homo sapiens
  misc_RNA (1)...(19): siRNA sense strand
caaccacccacaugucauc

SEQ ID NO: 40642 - RNA, 19 nt, Homo sapiens
  misc_RNA (1)...(19): siRNA sense strand
ggauuaaagcuggcuaugg

SEQ ID NO: 40643 - RNA, 19 nt, Homo sapiens
  misc_RNA (1)...(19): siRNA sense strand
cgacggccacugcgauguu

SEQ ID NO: 40644 - RNA, 19 nt, Homo sapiens
  misc_RNA (1)...(19): siRNA sense strand
gaaagucuguguggaaaac

SEQ ID NO: 40645 - RNA, 19 nt, Homo sapiens
  misc_RNA (1)...(19): siRNA sense strand
ggcauugggccucuacuuc

SEQ ID NO: 40646 - RNA, 19 nt, Homo sapiens
  misc_RNA (1)...(19): siRNA sense strand
cgggaaagucuguguggaa

SEQ ID NO: 40647 - RNA, 19 nt, Homo sapiens
  misc_RNA (1)...(19): siRNA sense strand
gcccagaucgggaaagucu

SEQ ID NO: 40648 - RNA, 19 nt, Homo sapiens
  misc_RNA (1)...(19): siRNA sense strand
gacuauaggcugguucuca

SEQ ID NO: 40649 - RNA, 19 nt, Homo sapiens
  misc_RNA (1)...(19): siRNA sense strand
gcacgcccuugcuguacgu

SEQ ID NO: 40650 - RNA, 19 nt, Homo sapiens
  misc_RNA (1)...(19): siRNA sense strand
ggucggauuccaguuaaau

SEQ ID NO: 40651 - RNA, 19 nt, Homo sapiens
  misc_RNA (1)...(19): siRNA sense strand
gcuugucccgagauguuua

SEQ ID NO: 40652 - RNA, 19 nt, Homo sapiens
  misc_RNA (1)...(19): siRNA sense strand
caucguggaguacgccaaa

SEQ ID NO: 40653 - RNA, 19 nt, Homo sapiens
  misc_RNA (1)...(19): siRNA sense strand
gaccugcugucagaguuca

SEQ ID NO: 40654 - RNA, 19 nt, Homo sapiens
  misc_RNA (1)...(19): siRNA sense strand
acccaagacaucaacauuu

SEQ ID NO: 40655 - RNA, 19 nt, Homo sapiens
  misc_RNA (1)...(19): siRNA sense strand
caacugcagcgaggagaug

SEQ ID NO: 40656 - RNA, 19 nt, Homo sapiens
  misc_RNA (1)...(19): siRNA sense strand
cacgcaaagugauguaugg

SEQ ID NO: 40657 - RNA, 19 nt, Homo sapiens
  misc_RNA (1)...(19): siRNA sense strand
gaggagccagggucggauu

SEQ ID NO: 40658 - RNA, 19 nt, Homo sapiens
  misc_RNA (1)...(19): siRNA sense strand
gggcgaccucaucucauuu

SEQ ID NO: 40659 - RNA, 19 nt, Homo sapiens
  misc_RNA (1)...(19): siRNA sense strand
aaccggagccuggaccaua

SEQ ID NO: 40660 - RNA, 19 nt, Homo sapiens
  misc_RNA (1)...(19): siRNA sense strand
caagagacggcuggagugu

SEQ ID NO: 40661 - RNA, 19 nt, Homo sapiens
  misc_RNA (1)...(19): siRNA sense strand
guuaaauggauggcaauug

SEQ ID NO: 40662 - RNA, 19 nt, Homo sapiens
  misc_RNA (1)...(19): siRNA sense strand
aagaugaagauuucggauu

SEQ ID NO: 40663 - RNA, 19 nt, Homo sapiens
  misc_RNA (1)...(19): siRNA sense strand
ccgcuguccucuucuccuu

SEQ ID NO: 40664 - RNA, 19 nt, Homo sapiens
  misc_RNA (1)...(19): siRNA sense strand
gcgccgugguggaguucaa

SEQ ID NO: 40665 - RNA, 19 nt, Homo sapiens
  misc_RNA (1)...(19): siRNA sense strand
ggcauucaguggcaucaac

SEQ ID NO: 40666 - RNA, 19 nt, Homo sapiens
  misc_RNA (1)...(19): siRNA sense strand
agggucggauuccaguuaa

SEQ ID NO: 40667 - RNA, 19 nt, Homo sapiens
  misc_RNA (1)...(19): siRNA sense strand
cggcuugucccgagauguu

SEQ ID NO: 40668 - RNA, 19 nt, Homo sapiens
  misc_RNA (1)...(19): siRNA sense strand
ccacgcaaagugauguaug

SEQ ID NO: 40669 - RNA, 19 nt, Homo sapiens
  misc_RNA (1)...(19): siRNA sense strand
gaacagagagguaggcaua

SEQ ID NO: 40670 - RNA, 19 nt, Homo sapiens
  misc_RNA (1)...(19): siRNA sense strand
gaucuucccugacaucaaa

SEQ ID NO: 40671 - RNA, 19 nt, Homo sapiens
  misc_RNA (1)...(19): siRNA sense strand
caaagaagcagaagauaaa

SEQ ID NO: 40672 - RNA, 19 nt, Homo sapiens
  misc_RNA (1)...(19): siRNA sense strand
gaaaugggcccagaaguaa

SEQ ID NO: 40673 - RNA, 19 nt, Homo sapiens
  misc_RNA (1)...(19): siRNA sense strand
gcaaugaggaguacaugua

SEQ ID NO: 40674 - RNA, 19 nt, Homo sapiens
  misc_RNA (1)...(19): siRNA sense strand
caaguacacugagcaauga

SEQ ID NO: 40675 - RNA, 19 nt, Homo sapiens
  misc_RNA (1)...(19): siRNA sense strand
ggaagaagaguguaguuga

SEQ ID NO: 40676 - RNA, 19 nt, Homo sapiens
  misc_RNA (1)...(19): siRNA sense strand
gaagaagaguguaguugag

SEQ ID NO: 40677 - RNA, 19 nt, Homo sapiens
  misc_RNA (1)...(19): siRNA sense strand
ccaaagaagcagaagauaa

SEQ ID NO: 40678 - RNA, 19 nt, Homo sapiens
  misc_RNA (1)...(19): siRNA sense strand
gaacggucaucuaaaccaa

SEQ ID NO: 40679 - RNA, 19 nt, Homo sapiens
  misc_RNA (1)...(19): siRNA sense strand
caagaggacagcugaagua

SEQ ID NO: 40680 - RNA, 19 nt, Homo sapiens
  misc_RNA (1)...(19): siRNA sense strand
caaagcaaaguguuuauga

SEQ ID NO: 40681 - RNA, 19 nt, Homo sapiens
  misc_RNA (1)...(19): siRNA sense strand
gaaccuaccacccuucuuc

SEQ ID NO: 40682 - RNA, 19 nt, Homo sapiens
  misc_RNA (1)...(19): siRNA sense strand
cagcaaagcaggauauaga

SEQ ID NO: 40683 - RNA, 19 nt, Homo sapiens
  misc_RNA (1)...(19): siRNA sense strand
agaaaugggcccagaagua

SEQ ID NO: 40684 - RNA, 19 nt, Homo sapiens
  misc_RNA (1)...(19): siRNA sense strand
gugagagucuugccuguug

SEQ ID NO: 40685 - RNA, 19 nt, Homo sapiens
  misc_RNA (1)...(19): siRNA sense strand
caaagaaugguuuagagaa

SEQ ID NO: 40686 - RNA, 19 nt, Homo sapiens
  misc_RNA (1)...(19): siRNA sense strand
agagagaucuucccugaca

SEQ ID NO: 40687 - RNA, 19 nt, Homo sapiens
  misc_RNA (1)...(19): siRNA sense strand
aagaugagccugaugcuaa

SEQ ID NO: 40688 - RNA, 19 nt, Homo sapiens
  misc_RNA (1)...(19): siRNA sense strand
gcagcugugcccaucauua

SEQ ID NO: 40689 - RNA, 19 nt, Homo sapiens
  misc_RNA (1)...(19): siRNA sense strand
guacauguaugccuauagg

SEQ ID NO: 40690 - RNA, 19 nt, Homo sapiens
  misc_RNA (1)...(19): siRNA sense strand
ucagggagaugguacuguu

SEQ ID NO: 40691 - RNA, 19 nt, Homo sapiens
  misc_RNA (1)...(19): siRNA sense strand
gaggacagcugaaguaccu

SEQ ID NO: 40692 - RNA, 19 nt, Homo sapiens
  misc_RNA (1)...(19): siRNA sense strand
ccaaggccgugcagaacaa

SEQ ID NO: 40693 - RNA, 19 nt, Homo sapiens
  misc_RNA (1)...(19): siRNA sense strand
gaagaugagccugaugcua

SEQ ID NO: 40694 - RNA, 19 nt, Homo sapiens
  misc_RNA (1)...(19): siRNA sense strand
ugcaagauguacagaaauu

SEQ ID NO: 40695 - RNA, 19 nt, Homo sapiens
  misc_RNA (1)...(19): siRNA sense strand
ccugcaagauguacagaaa

SEQ ID NO: 40696 - RNA, 19 nt, Homo sapiens
  misc_RNA (1)...(19): siRNA sense strand
gggcagagcggauccugaa

SEQ ID NO: 40697 - RNA, 19 nt, Homo sapiens
  misc_RNA (1)...(19): siRNA sense strand
gcagguuaaugcccuagug

SEQ ID NO: 40698 - RNA, 19 nt, Homo sapiens
  misc_RNA (1)...(19): siRNA sense strand
cagcugugcccaucauuaa

SEQ ID NO: 40699 - RNA, 19 nt, Homo sapiens
  misc_RNA (1)...(19): siRNA sense strand
ccaaguacacugagcaaug

SEQ ID NO: 40700 - RNA, 19 nt, Homo sapiens
  misc_RNA (1)...(19): siRNA sense strand
uaccaacuguuccugcuuu

SEQ ID NO: 40701 - RNA, 19 nt, Homo sapiens
  misc_RNA (1)...(19): siRNA sense strand
gaaguacugugagagucuu

SEQ ID NO: 40702 - RNA, 19 nt, Homo sapiens
  misc_RNA (1)...(19): siRNA sense strand
acaggguaauaaagacuua

SEQ ID NO: 40703 - RNA, 19 nt, Homo sapiens
  misc_RNA (1)...(19): siRNA sense strand
guccaaauauugcuacagu

SEQ ID NO: 40704 - RNA, 19 nt, Homo sapiens
  misc_RNA (1)...(19): siRNA sense strand
gcaagauguacagaaauuu

SEQ ID NO: 40705 - RNA, 19 nt, Homo sapiens
  misc_RNA (1)...(19): siRNA sense strand
ccaaagaaugguuuagaga

SEQ ID NO: 40706 - RNA, 19 nt, Homo sapiens
  misc_RNA (1)...(19): siRNA sense strand
ccuaaaggguucugagagu

SEQ ID NO: 40707 - RNA, 19 nt, Homo sapiens
  misc_RNA (1)...(19): siRNA sense strand
ggcaagaucaucagagaga

SEQ ID NO: 40708 - RNA, 19 nt, Homo sapiens
  misc_RNA (1)...(19): siRNA sense strand
gaggauacagcaagugaug

SEQ ID NO: 40709 - RNA, 19 nt, Homo sapiens
  misc_RNA (1)...(19): siRNA sense strand
gaguacauguaugccuaua

SEQ ID NO: 40710 - RNA, 19 nt, Homo sapiens
  misc_RNA (1)...(19): siRNA sense strand
aacaugaucuuaccaacug

SEQ ID NO: 40711 - RNA, 19 nt, Homo sapiens
  misc_RNA (1)...(19): siRNA sense strand
uaucggaaguacugugaga

SEQ ID NO: 40712 - RNA, 19 nt, Homo sapiens
  misc_RNA (1)...(19): siRNA sense strand
caagcuguaucucuaccuu

SEQ ID NO: 40713 - RNA, 19 nt, Homo sapiens
  misc_RNA (1)...(19): siRNA sense strand
caucuaaaccaaagaaugg

SEQ ID NO: 40714 - RNA, 19 nt, Homo sapiens
  misc_RNA (1)...(19): siRNA sense strand
cuucagaggcuccgaggua

SEQ ID NO: 40715 - RNA, 19 nt, Homo sapiens
  misc_RNA (1)...(19): siRNA sense strand
aaagaaugguuuagagaac

SEQ ID NO: 40716 - RNA, 19 nt, Homo sapiens
  misc_RNA (1)...(19): siRNA sense strand
cgugugcccugaccuguga

SEQ ID NO: 40717 - RNA, 19 nt, Homo sapiens
  misc_RNA (1)...(19): siRNA sense strand
gagaugguacuguuuccaa

SEQ ID NO: 40718 - RNA, 19 nt, Homo sapiens
  misc_RNA (1)...(19): siRNA sense strand
gcaagaucaucagagagau

SEQ ID NO: 40719 - RNA, 19 nt, Homo sapiens
  misc_RNA (1)...(19): siRNA sense strand
gaccaaggaccacaugaca

SEQ ID NO: 40720 - RNA, 19 nt, Homo sapiens
  misc_RNA (1)...(19): siRNA sense strand
augacaagcuguaucucua

SEQ ID NO: 40721 - RNA, 19 nt, Homo sapiens
  misc_RNA (1)...(19): siRNA sense strand
caaugaggaguacauguau

SEQ ID NO: 40722 - RNA, 19 nt, Homo sapiens
  misc_RNA (1)...(19): siRNA sense strand
ggucaucuaaaccaaagaa

SEQ ID NO: 40723 - RNA, 19 nt, Homo sapiens
  misc_RNA (1)...(19): siRNA sense strand
caccacaggguaauaaaga

SEQ ID NO: 40724 - RNA, 19 nt, Homo sapiens
  misc_RNA (1)...(19): siRNA sense strand
ccaaggaccacaugacaag

SEQ ID NO: 40725 - RNA, 19 nt, Homo sapiens
  misc_RNA (1)...(19): siRNA sense strand
gaccuaaaggguucugaga

SEQ ID NO: 40726 - RNA, 19 nt, Homo sapiens
  misc_RNA (1)...(19): siRNA sense strand
cccagucucuccaccuauu

SEQ ID NO: 40727 - RNA, 19 nt, Homo sapiens
  misc_RNA (1)...(19): siRNA sense strand
gcacguggagagcggaaga

SEQ ID NO: 40728 - RNA, 19 nt, Homo sapiens
  misc_RNA (1)...(19): siRNA sense strand
ccacaagaagccagagaga

SEQ ID NO: 40729 - RNA, 19 nt, Homo sapiens
  misc_RNA (1)...(19): siRNA sense strand
ucucaucucugcccgaucu

SEQ ID NO: 40730 - RNA, 19 nt, Homo sapiens
  misc_RNA (1)...(19): siRNA sense strand
uauagaggauacagcaagu

SEQ ID NO: 40731 - RNA, 19 nt, Homo sapiens
  misc_RNA (1)...(19): siRNA sense strand
acaccugucugccaaagca

SEQ ID NO: 40732 - RNA, 19 nt, Homo sapiens
  misc_RNA (1)...(19): siRNA sense strand
gguaauaaagacuuaaagg

SEQ ID NO: 40733 - RNA, 19 nt, Homo sapiens
  misc_RNA (1)...(19): siRNA sense strand
uacagcaagugaugccaaa

SEQ ID NO: 40734 - RNA, 19 nt, Homo sapiens
  misc_RNA (1)...(19): siRNA sense strand
cgggaacggucaucuaaac

SEQ ID NO: 40735 - RNA, 19 nt, Homo sapiens
  misc_RNA (1)...(19): siRNA sense strand
cccagcaccucgagaugaa

SEQ ID NO: 40736 - RNA, 19 nt, Homo sapiens
  misc_RNA (1)...(19): siRNA sense strand
ggaaguacugugagagucu

SEQ ID NO: 40737 - RNA, 19 nt, Homo sapiens
  misc_RNA (1)...(19): siRNA sense strand
uaugaugccuaucggaagu

SEQ ID NO: 40738 - RNA, 19 nt, Homo sapiens
  misc_RNA (1)...(19): siRNA sense strand
aagcaaaguguuuaugaug

SEQ ID NO: 40739 - RNA, 19 nt, Homo sapiens
  misc_RNA (1)...(19): siRNA sense strand
ugccuggacuugaccuaaa

SEQ ID NO: 40740 - RNA, 19 nt, Homo sapiens
  misc_RNA (1)...(19): siRNA sense strand
acacugccucugucuagua

SEQ ID NO: 40741 - RNA, 19 nt, Homo sapiens
  misc_RNA (1)...(19): siRNA sense strand
guccuucaguuccaucguu

SEQ ID NO: 40742 - RNA, 19 nt, Homo sapiens
  misc_RNA (1)...(19): siRNA sense strand
uagaggauacagcaaguga

SEQ ID NO: 40743 - RNA, 19 nt, Homo sapiens
  misc_RNA (1)...(19): siRNA sense strand
guucccagcauaccaaaga

SEQ ID NO: 40744 - RNA, 19 nt, Homo sapiens
  misc_RNA (1)...(19): siRNA sense strand
agaugguacuguuuccaaa

SEQ ID NO: 40745 - RNA, 19 nt, Homo sapiens
  misc_RNA (1)...(19): siRNA sense strand
ugccaaagcaaaguguuua

SEQ ID NO: 40746 - RNA, 19 nt, Homo sapiens
  misc_RNA (1)...(19): siRNA sense strand
gcaccacaggguaauaaag

SEQ ID NO: 40747 - RNA, 19 nt, Homo sapiens
  misc_RNA (1)...(19): siRNA sense strand
acacugcaccacaggguaa

SEQ ID NO: 40748 - RNA, 19 nt, Homo sapiens
  misc_RNA (1)...(19): siRNA sense strand
uaccaaagaagcagaagau

SEQ ID NO: 40749 - RNA, 19 nt, Homo sapiens
  misc_RNA (1)...(19): siRNA sense strand
acucagcacagccaacuuu

SEQ ID NO: 40750 - RNA, 19 nt, Homo sapiens
  misc_RNA (1)...(19): siRNA sense strand
gcucacuaauuccgccaau

SEQ ID NO: 40751 - RNA, 19 nt, Homo sapiens
  misc_RNA (1)...(19): siRNA sense strand
guggagagcggaagaagag

SEQ ID NO: 40752 - RNA, 19 nt, Homo sapiens
  misc_RNA (1)...(19): siRNA sense strand
ggaacggucaucuaaacca

SEQ ID NO: 40753 - RNA, 19 nt, Homo sapiens
  misc_RNA (1)...(19): siRNA sense strand
gcagagcggauccugaaac

SEQ ID NO: 40754 - RNA, 19 nt, Homo sapiens
  misc_RNA (1)...(19): siRNA sense strand
acccaccacuggagacaaa

SEQ ID NO: 40755 - RNA, 19 nt, Homo sapiens
  misc_RNA (1)...(19): siRNA sense strand
aaagcaggauauagaggau

SEQ ID NO: 40756 - RNA, 19 nt, Homo sapiens
  misc_RNA (1)...(19): siRNA sense strand
ggcagaagaugagccugau

SEQ ID NO: 40757 - RNA, 19 nt, Homo sapiens
  misc_RNA (1)...(19): siRNA sense strand
aaacgguccuucaguucca

SEQ ID NO: 40758 - RNA, 19 nt, Homo sapiens
  misc_RNA (1)...(19): siRNA sense strand
ggaguacauguaugccuau

SEQ ID NO: 40759 - RNA, 19 nt, Homo sapiens
  misc_RNA (1)...(19): siRNA sense strand
gcauaccaaagaagcagaa

SEQ ID NO: 40760 - RNA, 19 nt, Homo sapiens
  misc_RNA (1)...(19): siRNA sense strand
uaacaugaucuuaccaacu

SEQ ID NO: 40761 - RNA, 19 nt, Homo sapiens
  misc_RNA (1)...(19): siRNA sense strand
gagcggaagaagaguguag

SEQ ID NO: 40762 - RNA, 19 nt, Homo sapiens
  misc_RNA (1)...(19): siRNA sense strand
ccaaagcaaaguguuuaug

SEQ ID NO: 40763 - RNA, 19 nt, Homo sapiens
  misc_RNA (1)...(19): siRNA sense strand
gauccgcaaccaccuggaa

SEQ ID NO: 40764 - RNA, 19 nt, Homo sapiens
  misc_RNA (1)...(19): siRNA sense strand
gagagcggaagaagagugu

SEQ ID NO: 40765 - RNA, 19 nt, Homo sapiens
  misc_RNA (1)...(19): siRNA sense strand
gcauaaagacccaaaagca

SEQ ID NO: 40766 - RNA, 19 nt, Homo sapiens
  misc_RNA (1)...(19): siRNA sense strand
gcaaagggagagguagaca

SEQ ID NO: 40767 - RNA, 19 nt, Homo sapiens
  misc_RNA (1)...(19): siRNA sense strand
gcugugcccaucauuaaca

SEQ ID NO: 40768 - RNA, 19 nt, Homo sapiens
  misc_RNA (1)...(19): siRNA sense strand
cuacacugccucugucuag

SEQ ID NO: 40769 - RNA, 19 nt, Homo sapiens
  misc_RNA (1)...(19): siRNA sense strand
gcaacaagauguacaagga

SEQ ID NO: 40770 - RNA, 19 nt, Homo sapiens
  misc_RNA (1)...(19): siRNA sense strand
ggaaagugcagauaacaua

SEQ ID NO: 40771 - RNA, 19 nt, Homo sapiens
  misc_RNA (1)...(19): siRNA sense strand
ggacgaggcggaccuguua

SEQ ID NO: 40772 - RNA, 19 nt, Homo sapiens
  misc_RNA (1)...(19): siRNA sense strand
acuaagaaguccagaagua

SEQ ID NO: 40773 - RNA, 19 nt, Homo sapiens
  misc_RNA (1)...(19): siRNA sense strand
gcuauuaaaucagcaaguu

SEQ ID NO: 40774 - RNA, 19 nt, Homo sapiens
  misc_RNA (1)...(19): siRNA sense strand
gauaacauacucuccauug

SEQ ID NO: 40775 - RNA, 19 nt, Homo sapiens
  misc_RNA (1)...(19): siRNA sense strand
gcaaagacaacagcaguuu

SEQ ID NO: 40776 - RNA, 19 nt, Homo sapiens
  misc_RNA (1)...(19): siRNA sense strand
gaaacagcaacagcuauua

SEQ ID NO: 40777 - RNA, 19 nt, Homo sapiens
  misc_RNA (1)...(19): siRNA sense strand
aaacagcaacagcuauuaa

SEQ ID NO: 40778 - RNA, 19 nt, Homo sapiens
  misc_RNA (1)...(19): siRNA sense strand
gcaagaaacaccgcaacaa

SEQ ID NO: 40779 - RNA, 19 nt, Homo sapiens
  misc_RNA (1)...(19): siRNA sense strand
guacaaggacaaguauaaa

SEQ ID NO: 40780 - RNA, 19 nt, Homo sapiens
  misc_RNA (1)...(19): siRNA sense strand
guccagaaguagugcaauu

SEQ ID NO: 40781 - RNA, 19 nt, Homo sapiens
  misc_RNA (1)...(19): siRNA sense strand
agcaacagcuauuaaauca

SEQ ID NO: 40782 - RNA, 19 nt, Homo sapiens
  misc_RNA (1)...(19): siRNA sense strand
caagaaacaccgcaacaag

SEQ ID NO: 40783 - RNA, 19 nt, Homo sapiens
  misc_RNA (1)...(19): siRNA sense strand
aaaagacugucguuacuaa

SEQ ID NO: 40784 - RNA, 19 nt, Homo sapiens
  misc_RNA (1)...(19): siRNA sense strand
agacugucguuacuaagaa

SEQ ID NO: 40785 - RNA, 19 nt, Homo sapiens
  misc_RNA (1)...(19): siRNA sense strand
uguacaaggacaaguauaa

SEQ ID NO: 40786 - RNA, 19 nt, Homo sapiens
  misc_RNA (1)...(19): siRNA sense strand
gaaacaccgcaacaagaug

SEQ ID NO: 40787 - RNA, 19 nt, Homo sapiens
  misc_RNA (1)...(19): siRNA sense strand
cagcaacagcuauuaaauc

SEQ ID NO: 40788 - RNA, 19 nt, Homo sapiens
  misc_RNA (1)...(19): siRNA sense strand
cgaggaaagugcagauaac

SEQ ID NO: 40789 - RNA, 19 nt, Homo sapiens
  misc_RNA (1)...(19): siRNA sense strand
gaaagugcagauaacauac

SEQ ID NO: 40790 - RNA, 19 nt, Homo sapiens
  misc_RNA (1)...(19): siRNA sense strand
agaaacagcaacagcuauu

SEQ ID NO: 40791 - RNA, 19 nt, Homo sapiens
  misc_RNA (1)...(19): siRNA sense strand
aagaaacaccgcaacaaga

SEQ ID NO: 40792 - RNA, 19 nt, Homo sapiens
  misc_RNA (1)...(19): siRNA sense strand
gauguacaaggacaaguau

SEQ ID NO: 40793 - RNA, 19 nt, Homo sapiens
  misc_RNA (1)...(19): siRNA sense strand
cagauaacauacucuccau

SEQ ID NO: 40794 - RNA, 19 nt, Homo sapiens
  misc_RNA (1)...(19): siRNA sense strand
agaaacaccgcaacaagau

SEQ ID NO: 40795 - RNA, 19 nt, Homo sapiens
  misc_RNA (1)...(19): siRNA sense strand
gcaaaccguggaugugcaa

SEQ ID NO: 40796 - RNA, 19 nt, Homo sapiens
  misc_RNA (1)...(19): siRNA sense strand
acagaaacagcaacagcua

SEQ ID NO: 40797 - RNA, 19 nt, Homo sapiens
  misc_RNA (1)...(19): siRNA sense strand
cauacucuccauuguuaaa

SEQ ID NO: 40798 - RNA, 19 nt, Homo sapiens
  misc_RNA (1)...(19): siRNA sense strand
aaacaccgcaacaagaugu

SEQ ID NO: 40799 - RNA, 19 nt, Homo sapiens
  misc_RNA (1)...(19): siRNA sense strand
caaagacaacagcaguuuc

SEQ ID NO: 40800 - RNA, 19 nt, Homo sapiens
  misc_RNA (1)...(19): siRNA sense strand
gaggaaagugcagauaaca

SEQ ID NO: 40801 - RNA, 19 nt, Homo sapiens
  misc_RNA (1)...(19): siRNA sense strand
ucgaggaaagugcagauaa

SEQ ID NO: 40802 - RNA, 19 nt, Homo sapiens
  misc_RNA (1)...(19): siRNA sense strand
agauguacaaggacaagua

SEQ ID NO: 40803 - RNA, 19 nt, Homo sapiens
  misc_RNA (1)...(19): siRNA sense strand
gaccuacucuuuuagaaca

SEQ ID NO: 40804 - RNA, 19 nt, Homo sapiens
  misc_RNA (1)...(19): siRNA sense strand
uaagaaguccagaaguagu

SEQ ID NO: 40805 - RNA, 19 nt, Homo sapiens
  misc_RNA (1)...(19): siRNA sense strand
aaacgucaaacucgaggaa

SEQ ID NO: 40806 - RNA, 19 nt, Homo sapiens
  misc_RNA (1)...(19): siRNA sense strand
ucaauucacccugcuagug

SEQ ID NO: 40807 - RNA, 19 nt, Homo sapiens
  misc_RNA (1)...(19): siRNA sense strand
auaacauacucuccauugu

SEQ ID NO: 40808 - RNA, 19 nt, Homo sapiens
  misc_RNA (1)...(19): siRNA sense strand
gaucguccugcaagaccua

SEQ ID NO: 40809 - RNA, 19 nt, Homo sapiens
  misc_RNA (1)...(19): siRNA sense strand
aaccguggaugugcaagaa

SEQ ID NO: 40810 - RNA, 19 nt, Homo sapiens
  misc_RNA (1)...(19): siRNA sense strand
cagaaacagcaacagcuau

SEQ ID NO: 40811 - RNA, 19 nt, Homo sapiens
  misc_RNA (1)...(19): siRNA sense strand
uuacuaagaaguccagaag

SEQ ID NO: 40812 - RNA, 19 nt, Homo sapiens
  misc_RNA (1)...(19): siRNA sense strand
caagaccugcaccuacgaa

SEQ ID NO: 40813 - RNA, 19 nt, Homo sapiens
  misc_RNA (1)...(19): siRNA sense strand
gcaagaccugcaccuacga

SEQ ID NO: 40814 - RNA, 19 nt, Homo sapiens
  misc_RNA (1)...(19): siRNA sense strand
cuaagaaguccagaaguag

SEQ ID NO: 40815 - RNA, 19 nt, Homo sapiens
  misc_RNA (1)...(19): siRNA sense strand
guuaaacaaagaacaggau

SEQ ID NO: 40816 - RNA, 19 nt, Homo sapiens
  misc_RNA (1)...(19): siRNA sense strand
aacagcaacagcuauuaaa

SEQ ID NO: 40817 - RNA, 19 nt, Homo sapiens
  misc_RNA (1)...(19): siRNA sense strand
gaggcggaccuguuagaca

SEQ ID NO: 40818 - RNA, 19 nt, Homo sapiens
  misc_RNA (1)...(19): siRNA sense strand
aagacugucguuacuaaga

SEQ ID NO: 40819 - RNA, 19 nt, Homo sapiens
  misc_RNA (1)...(19): siRNA sense strand
ggucaucgcuuuccugauc

SEQ ID NO: 40820 - RNA, 19 nt, Homo sapiens
  misc_RNA (1)...(19): siRNA sense strand
caacuucggucccaucuuc

SEQ ID NO: 40821 - RNA, 19 nt, Homo sapiens
  misc_RNA (1)...(19): siRNA sense strand
cuacaacccugucaucuau

SEQ ID NO: 40822 - RNA, 19 nt, Homo sapiens
  misc_RNA (1)...(19): siRNA sense strand
gcacagaaggcccuaacuu

SEQ ID NO: 40823 - RNA, 19 nt, Homo sapiens
  misc_RNA (1)...(19): siRNA sense strand
gcacgccucucaacuacau

SEQ ID NO: 40824 - RNA, 19 nt, Homo sapiens
  misc_RNA (1)...(19): siRNA sense strand
acaccucucugcauggaua

SEQ ID NO: 40825 - RNA, 19 nt, Homo sapiens
  misc_RNA (1)...(19): siRNA sense strand
gguacguggugguguguaa

SEQ ID NO: 40826 - RNA, 19 nt, Homo sapiens
  misc_RNA (1)...(19): siRNA sense strand
gcauggauacuucgucuuc

SEQ ID NO: 40827 - RNA, 19 nt, Homo sapiens
  misc_RNA (1)...(19): siRNA sense strand
caauuuggagggcuucuuu

SEQ ID NO: 40828 - RNA, 19 nt, Homo sapiens
  misc_RNA (1)...(19): siRNA sense strand
gcgcacgccucucaacuac

SEQ ID NO: 40829 - RNA, 19 nt, Homo sapiens
  misc_RNA (1)...(19): siRNA sense strand
ccacacagaaggcagagaa

SEQ ID NO: 40830 - RNA, 19 nt, Homo sapiens
  misc_RNA (1)...(19): siRNA sense strand
caacgagucuuuugucauc

SEQ ID NO: 40831 - RNA, 19 nt, Homo sapiens
  misc_RNA (1)...(19): siRNA sense strand
cguguggaaucgacuacua

SEQ ID NO: 40832 - RNA, 19 nt, Homo sapiens
  misc_RNA (1)...(19): siRNA sense strand
ucaacuacauccugcucaa

SEQ ID NO: 40833 - RNA, 19 nt, Homo sapiens
  misc_RNA (1)...(19): siRNA sense strand
cugcagugcucguguggaa

SEQ ID NO: 40834 - RNA, 19 nt, Homo sapiens
  misc_RNA (1)...(19): siRNA sense strand
acaacccugucaucuauau

SEQ ID NO: 40835 - RNA, 19 nt, Homo sapiens
  misc_RNA (1)...(19): siRNA sense strand
gaccaucccagcguucuuu

SEQ ID NO: 40836 - RNA, 19 nt, Homo sapiens
  misc_RNA (1)...(19): siRNA sense strand
ucaacuuccucacgcucua

SEQ ID NO: 40837 - RNA, 19 nt, Homo sapiens
  misc_RNA (1)...(19): siRNA sense strand
guaagcccaugagcaacuu

SEQ ID NO: 40838 - RNA, 19 nt, Homo sapiens
  misc_RNA (1)...(19): siRNA sense strand
gcccacaggaugcaauuug

SEQ ID NO: 40839 - RNA, 19 nt, Homo sapiens
  misc_RNA (1)...(19): siRNA sense strand
gcagugcucguguggaauc

SEQ ID NO: 40840 - RNA, 19 nt, Homo sapiens
  misc_RNA (1)...(19): siRNA sense strand
uggcugaccucuucauggu

SEQ ID NO: 40841 - RNA, 19 nt, Homo sapiens
  misc_RNA (1)...(19): siRNA sense strand
cuacaccucucugcaugga

SEQ ID NO: 40842 - RNA, 19 nt, Homo sapiens
  misc_RNA (1)...(19): siRNA sense strand
uacgugcccuucuccaaug

SEQ ID NO: 40843 - RNA, 19 nt, Homo sapiens
  misc_RNA (1)...(19): siRNA sense strand
ucuacaacccugucaucua

SEQ ID NO: 40844 - RNA, 19 nt, Homo sapiens
  misc_RNA (1)...(19): siRNA sense strand
uguguaagcccaugagcaa

SEQ ID NO: 40845 - RNA, 19 nt, Homo sapiens
  misc_RNA (1)...(19): siRNA sense strand
cagcguggcauucuacauc

SEQ ID NO: 40846 - RNA, 19 nt, Homo sapiens
  misc_RNA (1)...(19): siRNA sense strand
ucaucauggucaucgcuuu

SEQ ID NO: 40847 - RNA, 19 nt, Homo sapiens
  misc_RNA (1)...(19): siRNA sense strand
gcugagccauggcaguucu

SEQ ID NO: 40848 - RNA, 19 nt, Homo sapiens
  misc_RNA (1)...(19): siRNA sense strand
ccaccagggcuccaacuuc

SEQ ID NO: 40849 - RNA, 19 nt, Homo sapiens
  misc_RNA (1)...(19): siRNA sense strand
cuacauguuucugcugauc

SEQ ID NO: 40850 - RNA, 19 nt, Homo sapiens
  misc_RNA (1)...(19): siRNA sense strand
gggagaaccaugccaucau

SEQ ID NO: 40851 - RNA, 19 nt, Homo sapiens
  misc_RNA (1)...(19): siRNA sense strand
gcuaugggcagcucgucuu

SEQ ID NO: 40852 - RNA, 19 nt, Homo sapiens
  misc_RNA (1)...(19): siRNA sense strand
caaugcgacggguguggua

SEQ ID NO: 40853 - RNA, 19 nt, Homo sapiens
  misc_RNA (1)...(19): siRNA sense strand
cuacgugcccuucuccaau

SEQ ID NO: 40854 - RNA, 19 nt, Homo sapiens
  misc_RNA (1)...(19): siRNA sense strand
cacagaaggcagagaagga

SEQ ID NO: 40855 - RNA, 19 nt, Homo sapiens
  misc_RNA (1)...(19): siRNA sense strand
aaauugcccugugguccuu

SEQ ID NO: 40856 - RNA, 19 nt, Homo sapiens
  misc_RNA (1)...(19): siRNA sense strand
ccacaggaugcaauuugga

SEQ ID NO: 40857 - RNA, 19 nt, Homo sapiens
  misc_RNA (1)...(19): siRNA sense strand
gacgaugaggccucugcua

SEQ ID NO: 40858 - RNA, 19 nt, Homo sapiens
  misc_RNA (1)...(19): siRNA sense strand
agccggaggucaacaacga

SEQ ID NO: 40859 - RNA, 19 nt, Homo sapiens
  misc_RNA (1)...(19): siRNA sense strand
cuacauccugcucaaccua

SEQ ID NO: 40860 - RNA, 19 nt, Homo sapiens
  misc_RNA (1)...(19): siRNA sense strand
caucuacaacccugucauc

SEQ ID NO: 40861 - RNA, 19 nt, Homo sapiens
  misc_RNA (1)...(19): siRNA sense strand
gaagagcuccgugcgauua

SEQ ID NO: 40862 - RNA, 19 nt, Homo sapiens
  misc_RNA (1)...(19): siRNA sense strand
gaacagagacuacauagac

SEQ ID NO: 40863 - RNA, 19 nt, Homo sapiens
  misc_RNA (1)...(19): siRNA sense strand
gaagaagauuaaagcauuc

SEQ ID NO: 40864 - RNA, 19 nt, Homo sapiens
  misc_RNA (1)...(19): siRNA sense strand
ggaaagaaaguguauguca

SEQ ID NO: 40865 - RNA, 19 nt, Homo sapiens
  misc_RNA (1)...(19): siRNA sense strand
acaaaucggugaccaucua

SEQ ID NO: 40866 - RNA, 19 nt, Homo sapiens
  misc_RNA (1)...(19): siRNA sense strand
ggaguuugcucgccauaau

SEQ ID NO: 40867 - RNA, 19 nt, Homo sapiens
  misc_RNA (1)...(19): siRNA sense strand
gagaagaccgugaagaaga

SEQ ID NO: 40868 - RNA, 19 nt, Homo sapiens
  misc_RNA (1)...(19): siRNA sense strand
gcagccagcuccacaagau

SEQ ID NO: 40869 - RNA, 19 nt, Homo sapiens
  misc_RNA (1)...(19): siRNA sense strand
caacaaagagaucuauuuc

SEQ ID NO: 40870 - RNA, 19 nt, Homo sapiens
  misc_RNA (1)...(19): siRNA sense strand
gaagaucucccgggacaaa

SEQ ID NO: 40871 - RNA, 19 nt, Homo sapiens
  misc_RNA (1)...(19): siRNA sense strand
caagagagccugcuuaaaa

SEQ ID NO: 40872 - RNA, 19 nt, Homo sapiens
  misc_RNA (1)...(19): siRNA sense strand
gauuaaagcauucguggaa

SEQ ID NO: 40873 - RNA, 19 nt, Homo sapiens
  misc_RNA (1)...(19): siRNA sense strand
ggaagagagacaagaauga

SEQ ID NO: 40874 - RNA, 19 nt, Homo sapiens
  misc_RNA (1)...(19): siRNA sense strand
uaaggaaaguuaucaggau

SEQ ID NO: 40875 - RNA, 19 nt, Homo sapiens
  misc_RNA (1)...(19): siRNA sense strand
acaaagagaucuauuucca

SEQ ID NO: 40876 - RNA, 19 nt, Homo sapiens
  misc_RNA (1)...(19): siRNA sense strand
ugggaauccuggugucuua

SEQ ID NO: 40877 - RNA, 19 nt, Homo sapiens
  misc_RNA (1)...(19): siRNA sense strand
ucugaaagaugcaggagaa

SEQ ID NO: 40878 - RNA, 19 nt, Homo sapiens
  misc_RNA (1)...(19): siRNA sense strand
gaagggaaagaaaguguau

SEQ ID NO: 40879 - RNA, 19 nt, Homo sapiens
  misc_RNA (1)...(19): siRNA sense strand
cagagaagaccgugaagaa

SEQ ID NO: 40880 - RNA, 19 nt, Homo sapiens
  misc_RNA (1)...(19): siRNA sense strand
guuaucaggaugcaaauuu

SEQ ID NO: 40881 - RNA, 19 nt, Homo sapiens
  misc_RNA (1)...(19): siRNA sense strand
ggacccagcuaaggaaagu

SEQ ID NO: 40882 - RNA, 19 nt, Homo sapiens
  misc_RNA (1)...(19): siRNA sense strand
gacguuuccugacuacuug

SEQ ID NO: 40883 - RNA, 19 nt, Homo sapiens
  misc_RNA (1)...(19): siRNA sense strand
ucaaagcauucgccacaga

SEQ ID NO: 40884 - RNA, 19 nt, Homo sapiens
  misc_RNA (1)...(19): siRNA sense strand
uggaacagguggccaaugu

SEQ ID NO: 40885 - RNA, 19 nt, Homo sapiens
  misc_RNA (1)...(19): siRNA sense strand
aaaguuaucaggaugcaaa

SEQ ID NO: 40886 - RNA, 19 nt, Homo sapiens
  misc_RNA (1)...(19): siRNA sense strand
cgaaccauguuaucuucaa

SEQ ID NO: 40887 - RNA, 19 nt, Homo sapiens
  misc_RNA (1)...(19): siRNA sense strand
gcaagagagccugcuuaaa

SEQ ID NO: 40888 - RNA, 19 nt, Homo sapiens
  misc_RNA (1)...(19): siRNA sense strand
gaaccgaaccauguuaucu

SEQ ID NO: 40889 - RNA, 19 nt, Homo sapiens
  misc_RNA (1)...(19): siRNA sense strand
gaaccauguuaucuucaag

SEQ ID NO: 40890 - RNA, 19 nt, Homo sapiens
  misc_RNA (1)...(19): siRNA sense strand
gggaagagagacaagaaug

SEQ ID NO: 40891 - RNA, 19 nt, Homo sapiens
  misc_RNA (1)...(19): siRNA sense strand
agaagaccgugaagaagau

SEQ ID NO: 40892 - RNA, 19 nt, Homo sapiens
  misc_RNA (1)...(19): siRNA sense strand
ucuacucgagugauuauua

SEQ ID NO: 40893 - RNA, 19 nt, Homo sapiens
  misc_RNA (1)...(19): siRNA sense strand
gcacgaggacacaaaccuu

SEQ ID NO: 40894 - RNA, 19 nt, Homo sapiens
  misc_RNA (1)...(19): siRNA sense strand
ggaaaguuaucaggaugca

SEQ ID NO: 40895 - RNA, 19 nt, Homo sapiens
  misc_RNA (1)...(19): siRNA sense strand
gaccugcgccuuccgcuau

SEQ ID NO: 40896 - RNA, 19 nt, Homo sapiens
  misc_RNA (1)...(19): siRNA sense strand
gaaagaugcaggagaagcu

SEQ ID NO: 40897 - RNA, 19 nt, Homo sapiens
  misc_RNA (1)...(19): siRNA sense strand
guucucuacucgagugauu

SEQ ID NO: 40898 - RNA, 19 nt, Homo sapiens
  misc_RNA (1)...(19): siRNA sense strand
ccaaugugguucucuacuc

SEQ ID NO: 40899 - RNA, 19 nt, Homo sapiens
  misc_RNA (1)...(19): siRNA sense strand
ccagcaccaucauuaagga

SEQ ID NO: 40900 - RNA, 19 nt, Homo sapiens
  misc_RNA (1)...(19): siRNA sense strand
gcucacagugucaggcuuu

SEQ ID NO: 40901 - RNA, 19 nt, Homo sapiens
  misc_RNA (1)...(19): siRNA sense strand
cgagaaaggagaggcauug

SEQ ID NO: 40902 - RNA, 19 nt, Homo sapiens
  misc_RNA (1)...(19): siRNA sense strand
acacagagaagaccgugaa

SEQ ID NO: 40903 - RNA, 19 nt, Homo sapiens
  misc_RNA (1)...(19): siRNA sense strand
ggaacagagacuacauaga

SEQ ID NO: 40904 - RNA, 19 nt, Homo sapiens
  misc_RNA (1)...(19): siRNA sense strand
gacaaaauccccaagaaga

SEQ ID NO: 40905 - RNA, 19 nt, Homo sapiens
  misc_RNA (1)...(19): siRNA sense strand
uuaaagcauucguggaaca

SEQ ID NO: 40906 - RNA, 19 nt, Homo sapiens
  misc_RNA (1)...(19): siRNA sense strand
cagcaccgaugccgaagag

SEQ ID NO: 40907 - RNA, 19 nt, Homo sapiens
  misc_RNA (1)...(19): siRNA sense strand
gaagagagacaagaaugac

SEQ ID NO: 40908 - RNA, 19 nt, Homo sapiens
  misc_RNA (1)...(19): siRNA sense strand
ugaagggaaagaaagugua

SEQ ID NO: 40909 - RNA, 19 nt, Homo sapiens
  misc_RNA (1)...(19): siRNA sense strand
gcccguggcuauggaggaa

SEQ ID NO: 40910 - RNA, 19 nt, Homo sapiens
  misc_RNA (1)...(19): siRNA sense strand
ugcggucucucucaacaaa

SEQ ID NO: 40911 - RNA, 19 nt, Homo sapiens
  misc_RNA (1)...(19): siRNA sense strand
ccacaagauucagggaagu

SEQ ID NO: 40912 - RNA, 19 nt, Homo sapiens
  misc_RNA (1)...(19): siRNA sense strand
ugacguuuccugacuacuu

SEQ ID NO: 40913 - RNA, 19 nt, Homo sapiens
  misc_RNA (1)...(19): siRNA sense strand
gggaacagagacuacauag

SEQ ID NO: 40914 - RNA, 19 nt, Homo sapiens
  misc_RNA (1)...(19): siRNA sense strand
caggaugcaaauuuaguuu

SEQ ID NO: 40915 - RNA, 19 nt, Homo sapiens
  misc_RNA (1)...(19): siRNA sense strand
cuacucgagugauuauuac

SEQ ID NO: 40916 - RNA, 19 nt, Homo sapiens
  misc_RNA (1)...(19): siRNA sense strand
ggcaguucuucaugucuga

SEQ ID NO: 40917 - RNA, 19 nt, Homo sapiens
  misc_RNA (1)...(19): siRNA sense strand
uacuugcccuguucaguga

SEQ ID NO: 40918 - RNA, 19 nt, Homo sapiens
  misc_RNA (1)...(19): siRNA sense strand
aagaggacauugacgugau

SEQ ID NO: 40919 - RNA, 19 nt, Homo sapiens
  misc_RNA (1)...(19): siRNA sense strand
ugcaagagagccugcuuaa

SEQ ID NO: 40920 - RNA, 19 nt, Homo sapiens
  misc_RNA (1)...(19): siRNA sense strand
gccuccagcaccaucauua

SEQ ID NO: 40921 - RNA, 19 nt, Homo sapiens
  misc_RNA (1)...(19): siRNA sense strand
ucaagcacgaggacacaaa

SEQ ID NO: 40922 - RNA, 19 nt, Homo sapiens
  misc_RNA (1)...(19): siRNA sense strand
uggccaaugugguucucua

SEQ ID NO: 40923 - RNA, 19 nt, Homo sapiens
  misc_RNA (1)...(19): siRNA sense strand
ucaccaauaacacagagaa

SEQ ID NO: 40924 - RNA, 19 nt, Homo sapiens
  misc_RNA (1)...(19): siRNA sense strand
caaagagaucuauuuccau

SEQ ID NO: 40925 - RNA, 19 nt, Homo sapiens
  misc_RNA (1)...(19): siRNA sense strand
cggucucucucaacaaaga

SEQ ID NO: 40926 - RNA, 19 nt, Homo sapiens
  misc_RNA (1)...(19): siRNA sense strand
gagcaacacguaccccuuu

SEQ ID NO: 40927 - RNA, 19 nt, Homo sapiens
  misc_RNA (1)...(19): siRNA sense strand
gagugauuauuacgucaag

SEQ ID NO: 40928 - RNA, 19 nt, Homo sapiens
  misc_RNA (1)...(19): siRNA sense strand
gaagaccgugaagaagauu

SEQ ID NO: 40929 - RNA, 19 nt, Homo sapiens
  misc_RNA (1)...(19): siRNA sense strand
ucaggaugcaaauuuaguu

SEQ ID NO: 40930 - RNA, 19 nt, Homo sapiens
  misc_RNA (1)...(19): siRNA sense strand
gugaagaagauuaaagcau

SEQ ID NO: 40931 - RNA, 19 nt, Homo sapiens
  misc_RNA (1)...(19): siRNA sense strand
cagcuaaggaaaguuauca

SEQ ID NO: 40932 - RNA, 19 nt, Homo sapiens
  misc_RNA (1)...(19): siRNA sense strand
uguggauggugucguguug

SEQ ID NO: 40933 - RNA, 19 nt, Homo sapiens
  misc_RNA (1)...(19): siRNA sense strand
gauuacugauccgcaaagu

SEQ ID NO: 40934 - RNA, 19 nt, Homo sapiens
  misc_RNA (1)...(19): siRNA sense strand
cuuaccagaucaaggugaa

SEQ ID NO: 40935 - RNA, 19 nt, Homo sapiens
  misc_RNA (1)...(19): siRNA sense strand
gcuaacaaucgagaaagga

SEQ ID NO: 40936 - RNA, 19 nt, Homo sapiens
  misc_RNA (1)...(19): siRNA sense strand
ggcuaacaaucgagaaagg

SEQ ID NO: 40937 - RNA, 19 nt, Homo sapiens
  misc_RNA (1)...(19): siRNA sense strand
acagguggccaaugugguu

SEQ ID NO: 40938 - RNA, 19 nt, Homo sapiens
  misc_RNA (1)...(19): siRNA sense strand
ccaauaacacagagaagac

SEQ ID NO: 40939 - RNA, 19 nt, Homo sapiens
  misc_RNA (1)...(19): siRNA sense strand
cugcaagagagccugcuua

SEQ ID NO: 40940 - RNA, 19 nt, Homo sapiens
  misc_RNA (1)...(19): siRNA sense strand
acccagcuaaggaaaguua

SEQ ID NO: 40941 - RNA, 19 nt, Homo sapiens
  misc_RNA (1)...(19): siRNA sense strand
gaggacccagcuaaggaaa

SEQ ID NO: 40942 - RNA, 19 nt, Homo sapiens
  misc_RNA (1)...(19): siRNA sense strand
ugaggacccagcuaaggaa

SEQ ID NO: 40943 - RNA, 19 nt, Homo sapiens
  misc_RNA (1)...(19): siRNA sense strand
ccuccagcaccaucauuaa

SEQ ID NO: 40944 - RNA, 19 nt, Homo sapiens
  misc_RNA (1)...(19): siRNA sense strand
ggacaaaauccccaagaag

SEQ ID NO: 40945 - RNA, 19 nt, Homo sapiens
  misc_RNA (1)...(19): siRNA sense strand
gaggaguuugcucgccaua

SEQ ID NO: 40946 - RNA, 19 nt, Homo sapiens
  misc_RNA (1)...(19): siRNA sense strand
ggaacagguggccaaugug

SEQ ID NO: 40947 - RNA, 19 nt, Homo sapiens
  misc_RNA (1)...(19): siRNA sense strand
agaccgugaagaagauuaa

SEQ ID NO: 40948 - RNA, 19 nt, Homo sapiens
  misc_RNA (1)...(19): siRNA sense strand
gugaagggaaagaaagugu

SEQ ID NO: 40949 - RNA, 19 nt, Homo sapiens
  misc_RNA (1)...(19): siRNA sense strand
gggaauagguuuacacaaa

SEQ ID NO: 40950 - RNA, 19 nt, Homo sapiens
  misc_RNA (1)...(19): siRNA sense strand
gaagaacggcucuguuaaa

SEQ ID NO: 40951 - RNA, 19 nt, Homo sapiens
  misc_RNA (1)...(19): siRNA sense strand
uaaagaagguggaagacuu

SEQ ID NO: 40952 - RNA, 19 nt, Homo sapiens
  misc_RNA (1)...(19): siRNA sense strand
ccagccagcucuuugauuu

SEQ ID NO: 40953 - RNA, 19 nt, Homo sapiens
  misc_RNA (1)...(19): siRNA sense strand
ggaauagguuuacacaaag

SEQ ID NO: 40954 - RNA, 19 nt, Homo sapiens
  misc_RNA (1)...(19): siRNA sense strand
gcaacgaccugaagaucga

SEQ ID NO: 40955 - RNA, 19 nt, Homo sapiens
  misc_RNA (1)...(19): siRNA sense strand
gaaggccggucuaauguag

SEQ ID NO: 40956 - RNA, 19 nt, Homo sapiens
  misc_RNA (1)...(19): siRNA sense strand
ccacagggcuggacuacuc

SEQ ID NO: 40957 - RNA, 19 nt, Homo sapiens
  misc_RNA (1)...(19): siRNA sense strand
gaaccaccuuugacucuuc

SEQ ID NO: 40958 - RNA, 19 nt, Homo sapiens
  misc_RNA (1)...(19): siRNA sense strand
ggucuaauguaggcaagua

SEQ ID NO: 40959 - RNA, 19 nt, Homo sapiens
  misc_RNA (1)...(19): siRNA sense strand
ggacagggcuggucauccu

SEQ ID NO: 40960 - RNA, 19 nt, Homo sapiens
  misc_RNA (1)...(19): siRNA sense strand
gaagacgaaccaccuuuga

SEQ ID NO: 40961 - RNA, 19 nt, Homo sapiens
  misc_RNA (1)...(19): siRNA sense strand
ccaauacaguggaaccuau

SEQ ID NO: 40962 - RNA, 19 nt, Homo sapiens
  misc_RNA (1)...(19): siRNA sense strand
gaaccagccagcucuuuga

SEQ ID NO: 40963 - RNA, 19 nt, Homo sapiens
  misc_RNA (1)...(19): siRNA sense strand
gaaccaguacguccacauu

SEQ ID NO: 40964 - RNA, 19 nt, Homo sapiens
  misc_RNA (1)...(19): siRNA sense strand
ggagaagucagaagacgaa

SEQ ID NO: 40965 - RNA, 19 nt, Homo sapiens
  misc_RNA (1)...(19): siRNA sense strand
aaagaagguggaagacuua

SEQ ID NO: 40966 - RNA, 19 nt, Homo sapiens
  misc_RNA (1)...(19): siRNA sense strand
cauccagagugcagagaua

SEQ ID NO: 40967 - RNA, 19 nt, Homo sapiens
  misc_RNA (1)...(19): siRNA sense strand
cugaagaacggcucuguua

SEQ ID NO: 40968 - RNA, 19 nt, Homo sapiens
  misc_RNA (1)...(19): siRNA sense strand
cggcagcacugacauggaa

SEQ ID NO: 40969 - RNA, 19 nt, Homo sapiens
  misc_RNA (1)...(19): siRNA sense strand
guuaagauuugcauugaag

SEQ ID NO: 40970 - RNA, 19 nt, Homo sapiens
  misc_RNA (1)...(19): siRNA sense strand
gagguuaagauuugcauug

SEQ ID NO: 40971 - RNA, 19 nt, Homo sapiens
  misc_RNA (1)...(19): siRNA sense strand
gcaucucgcuuacccucaa

SEQ ID NO: 40972 - RNA, 19 nt, Homo sapiens
  misc_RNA (1)...(19): siRNA sense strand
ccuaagccuucucuaauuc

SEQ ID NO: 40973 - RNA, 19 nt, Homo sapiens
  misc_RNA (1)...(19): siRNA sense strand
cucaggagguuaagauuug

SEQ ID NO: 40974 - RNA, 19 nt, Homo sapiens
  misc_RNA (1)...(19): siRNA sense strand
ccgcacaccuuccaguuca

SEQ ID NO: 40975 - RNA, 19 nt, Homo sapiens
  misc_RNA (1)...(19): siRNA sense strand
gguuaagauuugcauugaa

SEQ ID NO: 40976 - RNA, 19 nt, Homo sapiens
  misc_RNA (1)...(19): siRNA sense strand
ugaagaacggcucuguuaa

SEQ ID NO: 40977 - RNA, 19 nt, Homo sapiens
  misc_RNA (1)...(19): siRNA sense strand
gagaauggcgaacugaagu

SEQ ID NO: 40978 - RNA, 19 nt, Homo sapiens
  misc_RNA (1)...(19): siRNA sense strand
gaagguggaagacuuaaaa

SEQ ID NO: 40979 - RNA, 19 nt, Homo sapiens
  misc_RNA (1)...(19): siRNA sense strand
gauaagcaacgaccugaag

SEQ ID NO: 40980 - RNA, 19 nt, Homo sapiens
  misc_RNA (1)...(19): siRNA sense strand
uccuaagccuucucuaauu

SEQ ID NO: 40981 - RNA, 19 nt, Homo sapiens
  misc_RNA (1)...(19): siRNA sense strand
gaauagguuuacacaaagc

SEQ ID NO: 40982 - RNA, 19 nt, Homo sapiens
  misc_RNA (1)...(19): siRNA sense strand
gcaaacuggagaagucaga

SEQ ID NO: 40983 - RNA, 19 nt, Homo sapiens
  misc_RNA (1)...(19): siRNA sense strand
gugcagagauaagcaacga

SEQ ID NO: 40984 - RNA, 19 nt, Homo sapiens
  misc_RNA (1)...(19): siRNA sense strand
gagcccaggucagcguuga

SEQ ID NO: 40985 - RNA, 19 nt, Homo sapiens
  misc_RNA (1)...(19): siRNA sense strand
ccacucugcuggccaacau

SEQ ID NO: 40986 - RNA, 19 nt, Homo sapiens
  misc_RNA (1)...(19): siRNA sense strand
gaagucagaagacgaacca

SEQ ID NO: 40987 - RNA, 19 nt, Homo sapiens
  misc_RNA (1)...(19): siRNA sense strand
ggucagcguugaaguuuug

SEQ ID NO: 40988 - RNA, 19 nt, Homo sapiens
  misc_RNA (1)...(19): siRNA sense strand
aaaguggccugcauuuagg

SEQ ID NO: 40989 - RNA, 19 nt, Homo sapiens
  misc_RNA (1)...(19): siRNA sense strand
gagaaccagccagcucuuu

SEQ ID NO: 40990 - RNA, 19 nt, Homo sapiens
  misc_RNA (1)...(19): siRNA sense strand
gguggagcuugguuuacaa

SEQ ID NO: 40991 - RNA, 19 nt, Homo sapiens
  misc_RNA (1)...(19): siRNA sense strand
ccacacacagugcuucaga

SEQ ID NO: 40992 - RNA, 19 nt, Homo sapiens
  misc_RNA (1)...(19): siRNA sense strand
gcacaccuuccaguucauu

SEQ ID NO: 40993 - RNA, 19 nt, Homo sapiens
  misc_RNA (1)...(19): siRNA sense strand
gcauugaaggccggucuaa

SEQ ID NO: 40994 - RNA, 19 nt, Homo sapiens
  misc_RNA (1)...(19): siRNA sense strand
ggagcuugguuuacaacag

SEQ ID NO: 40995 - RNA, 19 nt, Homo sapiens
  misc_RNA (1)...(19): siRNA sense strand
cagaagacgaaccaccuuu

SEQ ID NO: 40996 - RNA, 19 nt, Homo sapiens
  misc_RNA (1)...(19): siRNA sense strand
gccgcaaacuggagaaguc

SEQ ID NO: 40997 - RNA, 19 nt, Homo sapiens
  misc_RNA (1)...(19): siRNA sense strand
cagcccagcagaaccagua

SEQ ID NO: 40998 - RNA, 19 nt, Homo sapiens
  misc_RNA (1)...(19): siRNA sense strand
cuucuacccucaacgacaa

SEQ ID NO: 40999 - RNA, 19 nt, Homo sapiens
  misc_RNA (1)...(19): siRNA sense strand
ugaaggccggucuaaugua

SEQ ID NO: 41000 - RNA, 19 nt, Homo sapiens
  misc_RNA (1)...(19): siRNA sense strand
caagagcggagcaacgaau

SEQ ID NO: 41001 - RNA, 19 nt, Homo sapiens
  misc_RNA (1)...(19): siRNA sense strand
ccaggucagcguugaaguu

SEQ ID NO: 41002 - RNA, 19 nt, Homo sapiens
  misc_RNA (1)...(19): siRNA sense strand
guagagaggauugaagaca

SEQ ID NO: 41003 - RNA, 19 nt, Homo sapiens
  misc_RNA (1)...(19): siRNA sense strand
caaaaguggccugcauuua

SEQ ID NO: 41004 - RNA, 19 nt, Homo sapiens
  misc_RNA (1)...(19): siRNA sense strand
caacagggaauagguuuac

SEQ ID NO: 41005 - RNA, 19 nt, Homo sapiens
  misc_RNA (1)...(19): siRNA sense strand
cccaggucgucaugcaaua

SEQ ID NO: 41006 - RNA, 19 nt, Homo sapiens
  misc_RNA (1)...(19): siRNA sense strand
caggucagcguugaaguuu

SEQ ID NO: 41007 - RNA, 19 nt, Homo sapiens
  misc_RNA (1)...(19): siRNA sense strand
cgacuccggcagccacuuu

SEQ ID NO: 41008 - RNA, 19 nt, Homo sapiens
  misc_RNA (1)...(19): siRNA sense strand
gcguggccgugauacaguu

SEQ ID NO: 41009 - RNA, 19 nt, Homo sapiens
  misc_RNA (1)...(19): siRNA sense strand
cgaaccaccuuugacucuu

SEQ ID NO: 41010 - RNA, 19 nt, Homo sapiens
  misc_RNA (1)...(19): siRNA sense strand
gaaccuaugccagcuucau

SEQ ID NO: 41011 - RNA, 19 nt, Homo sapiens
  misc_RNA (1)...(19): siRNA sense strand
agguuaagauuugcauuga

SEQ ID NO: 41012 - RNA, 19 nt, Homo sapiens
  misc_RNA (1)...(19): siRNA sense strand
aaacagaagauuucaucca

SEQ ID NO: 41013 - RNA, 19 nt, Homo sapiens
  misc_RNA (1)...(19): siRNA sense strand
acaacagggaauagguuua

SEQ ID NO: 41014 - RNA, 19 nt, Homo sapiens
  misc_RNA (1)...(19): siRNA sense strand
gaaugccugccucccaaga

SEQ ID NO: 41015 - RNA, 19 nt, Homo sapiens
  misc_RNA (1)...(19): siRNA sense strand
gccaacaugggcagucuga

SEQ ID NO: 41016 - RNA, 19 nt, Homo sapiens
  misc_RNA (1)...(19): siRNA sense strand
aagaacggcucuguuaaaa

SEQ ID NO: 41017 - RNA, 19 nt, Homo sapiens
  misc_RNA (1)...(19): siRNA sense strand
uuacaacagggaauagguu

SEQ ID NO: 41018 - RNA, 19 nt, Homo sapiens
  misc_RNA (1)...(19): siRNA sense strand
cuuccuaagccuucucuaa

SEQ ID NO: 41019 - RNA, 19 nt, Homo sapiens
  misc_RNA (1)...(19): siRNA sense strand
caccuuugacucuuccuaa

SEQ ID NO: 41020 - RNA, 19 nt, Homo sapiens
  misc_RNA (1)...(19): siRNA sense strand
accaguacguccacauuuc

SEQ ID NO: 41021 - RNA, 19 nt, Homo sapiens
  misc_RNA (1)...(19): siRNA sense strand
agaagacgaaccaccuuug

SEQ ID NO: 41022 - RNA, 19 nt, Homo sapiens
  misc_RNA (1)...(19): siRNA sense strand
gggcagcagacacagguau

SEQ ID NO: 41023 - RNA, 19 nt, Homo sapiens
  misc_RNA (1)...(19): siRNA sense strand
cgguggagcuugguuuaca

SEQ ID NO: 41024 - RNA, 19 nt, Homo sapiens
  misc_RNA (1)...(19): siRNA sense strand
cgacaaaaguggccugcau

SEQ ID NO: 41025 - RNA, 19 nt, Homo sapiens
  misc_RNA (1)...(19): siRNA sense strand
caauacaguggaaccuaug

SEQ ID NO: 41026 - RNA, 19 nt, Homo sapiens
  misc_RNA (1)...(19): siRNA sense strand
cugccucccuacuucauga

SEQ ID NO: 41027 - RNA, 19 nt, Homo sapiens
  misc_RNA (1)...(19): siRNA sense strand
acggugagauggagaagag

SEQ ID NO: 41028 - RNA, 19 nt, Homo sapiens
  misc_RNA (1)...(19): siRNA sense strand
gcaacaggccacucaucgu

SEQ ID NO: 41029 - RNA, 19 nt, Homo sapiens
  misc_RNA (1)...(19): siRNA sense strand
uacaacagggaauagguuu

SEQ ID NO: 41030 - RNA, 19 nt, Homo sapiens
  misc_RNA (1)...(19): siRNA sense strand
aaaaguggccugcauuuag

SEQ ID NO: 41031 - RNA, 19 nt, Homo sapiens
  misc_RNA (1)...(19): siRNA sense strand
auugaaggccggucuaaug

SEQ ID NO: 41032 - RNA, 19 nt, Homo sapiens
  misc_RNA (1)...(19): siRNA sense strand
agaaccagccagcucuuug

SEQ ID NO: 41033 - RNA, 19 nt, Homo sapiens
  misc_RNA (1)...(19): siRNA sense strand
ccguagagaggauugaaga

SEQ ID NO: 41034 - RNA, 19 nt, Homo sapiens
  misc_RNA (1)...(19): siRNA sense strand
ccaagagcgagaacuucaa

SEQ ID NO: 41035 - RNA, 19 nt, Homo sapiens
  misc_RNA (1)...(19): siRNA sense strand
gugaugguccugcccaaca

SEQ ID NO: 41036 - RNA, 19 nt, Homo sapiens
  misc_RNA (1)...(19): siRNA sense strand
ggagguuaagauuugcauu

SEQ ID NO: 41037 - RNA, 19 nt, Homo sapiens
  misc_RNA (1)...(19): siRNA sense strand
uaagcaacgaccugaagau

SEQ ID NO: 41038 - RNA, 19 nt, Homo sapiens
  misc_RNA (1)...(19): siRNA sense strand
gggaagacaugccaauauu

SEQ ID NO: 41039 - RNA, 19 nt, Homo sapiens
  misc_RNA (1)...(19): siRNA sense strand
ccacaaagguugccaaagu

SEQ ID NO: 41040 - RNA, 19 nt, Homo sapiens
  misc_RNA (1)...(19): siRNA sense strand
aaagaaaccugaagacaau

SEQ ID NO: 41041 - RNA, 19 nt, Homo sapiens
  misc_RNA (1)...(19): siRNA sense strand
aaacuggacugucauuauu

SEQ ID NO: 41042 - RNA, 19 nt, Homo sapiens
  misc_RNA (1)...(19): siRNA sense strand
gaaaucacccaaagagaaa

SEQ ID NO: 41043 - RNA, 19 nt, Homo sapiens
  misc_RNA (1)...(19): siRNA sense strand
gaagacaugccaauauuug

SEQ ID NO: 41044 - RNA, 19 nt, Homo sapiens
  misc_RNA (1)...(19): siRNA sense strand
cgaaggcgaugacaaagaa

SEQ ID NO: 41045 - RNA, 19 nt, Homo sapiens
  misc_RNA (1)...(19): siRNA sense strand
ggacagaauuggacgaaag

SEQ ID NO: 41046 - RNA, 19 nt, Homo sapiens
  misc_RNA (1)...(19): siRNA sense strand
caggaaaccucagaaauug

SEQ ID NO: 41047 - RNA, 19 nt, Homo sapiens
  misc_RNA (1)...(19): siRNA sense strand
ugagccagcuucucgguua

SEQ ID NO: 41048 - RNA, 19 nt, Homo sapiens
  misc_RNA (1)...(19): siRNA sense strand
ccaggaaaccucagaaauu

SEQ ID NO: 41049 - RNA, 19 nt, Homo sapiens
  misc_RNA (1)...(19): siRNA sense strand
ucaacugugugacgaauaa

SEQ ID NO: 41050 - RNA, 19 nt, Homo sapiens
  misc_RNA (1)...(19): siRNA sense strand
gaacagcagugauucuacu

SEQ ID NO: 41051 - RNA, 19 nt, Homo sapiens
  misc_RNA (1)...(19): siRNA sense strand
ccaaugaacugccugucaa

SEQ ID NO: 41052 - RNA, 19 nt, Homo sapiens
  misc_RNA (1)...(19): siRNA sense strand
caaagaagagucuguugaa

SEQ ID NO: 41053 - RNA, 19 nt, Homo sapiens
  misc_RNA (1)...(19): siRNA sense strand
gcauuucaaucacauuaug

SEQ ID NO: 41054 - RNA, 19 nt, Homo sapiens
  misc_RNA (1)...(19): siRNA sense strand
gcacaaggacugaugaaca

SEQ ID NO: 41055 - RNA, 19 nt, Homo sapiens
  misc_RNA (1)...(19): siRNA sense strand
gaaauugaaauccagcaaa

SEQ ID NO: 41056 - RNA, 19 nt, Homo sapiens
  misc_RNA (1)...(19): siRNA sense strand
ggaagacaugccaauauuu

SEQ ID NO: 41057 - RNA, 19 nt, Homo sapiens
  misc_RNA (1)...(19): siRNA sense strand
uagacaaacucauaggaaa

SEQ ID NO: 41058 - RNA, 19 nt, Homo sapiens
  misc_RNA (1)...(19): siRNA sense strand
gggccaaccuguccugcua

SEQ ID NO: 41059 - RNA, 19 nt, Homo sapiens
  misc_RNA (1)...(19): siRNA sense strand
gcacagcuauggaagaaaa

SEQ ID NO: 41060 - RNA, 19 nt, Homo sapiens
  misc_RNA (1)...(19): siRNA sense strand
ggaaaccucagaaauugaa

SEQ ID NO: 41061 - RNA, 19 nt, Homo sapiens
  misc_RNA (1)...(19): siRNA sense strand
ggaaggacgggacagaauu

SEQ ID NO: 41062 - RNA, 19 nt, Homo sapiens
  misc_RNA (1)...(19): siRNA sense strand
ugaaaucacccaaagagaa

SEQ ID NO: 41063 - RNA, 19 nt, Homo sapiens
  misc_RNA (1)...(19): siRNA sense strand
gcucauggaaccacacuaa

SEQ ID NO: 41064 - RNA, 19 nt, Homo sapiens
  misc_RNA (1)...(19): siRNA sense strand
ccaaggagucuucugguaa

SEQ ID NO: 41065 - RNA, 19 nt, Homo sapiens
  misc_RNA (1)...(19): siRNA sense strand
gggcgaaggcgaugacaaa

SEQ ID NO: 41066 - RNA, 19 nt, Homo sapiens
  misc_RNA (1)...(19): siRNA sense strand
uaacgacuguaaucagguu

SEQ ID NO: 41067 - RNA, 19 nt, Homo sapiens
  misc_RNA (1)...(19): siRNA sense strand
gaaggacgggacagaauug

SEQ ID NO: 41068 - RNA, 19 nt, Homo sapiens
  misc_RNA (1)...(19): siRNA sense strand
aaagaagagucuguugaaa

SEQ ID NO: 41069 - RNA, 19 nt, Homo sapiens
  misc_RNA (1)...(19): siRNA sense strand
aagaggcuauuacguguuu

SEQ ID NO: 41070 - RNA, 19 nt, Homo sapiens
  misc_RNA (1)...(19): siRNA sense strand
ugaaauccagcaaaucuuu

SEQ ID NO: 41071 - RNA, 19 nt, Homo sapiens
  misc_RNA (1)...(19): siRNA sense strand
gaaagaagacauagcucau

SEQ ID NO: 41072 - RNA, 19 nt, Homo sapiens
  misc_RNA (1)...(19): siRNA sense strand
acacacuccucuagacaaa

SEQ ID NO: 41073 - RNA, 19 nt, Homo sapiens
  misc_RNA (1)...(19): siRNA sense strand
guuauuagccgagcacaaa

SEQ ID NO: 41074 - RNA, 19 nt, Homo sapiens
  misc_RNA (1)...(19): siRNA sense strand
ccaugaugauuucuacuug

SEQ ID NO: 41075 - RNA, 19 nt, Homo sapiens
  misc_RNA (1)...(19): siRNA sense strand
gguaacaucuucccauagc

SEQ ID NO: 41076 - RNA, 19 nt, Homo sapiens
  misc_RNA (1)...(19): siRNA sense strand
guuccaaguuguugaaauc

SEQ ID NO: 41077 - RNA, 19 nt, Homo sapiens
  misc_RNA (1)...(19): siRNA sense strand
ggaugagugugauggugaa

SEQ ID NO: 41078 - RNA, 19 nt, Homo sapiens
  misc_RNA (1)...(19): siRNA sense strand
cugaagacaauuccaauaa

SEQ ID NO: 41079 - RNA, 19 nt, Homo sapiens
  misc_RNA (1)...(19): siRNA sense strand
caugacacccucugugaaa

SEQ ID NO: 41080 - RNA, 19 nt, Homo sapiens
  misc_RNA (1)...(19): siRNA sense strand
acaguucccuccuucauca

SEQ ID NO: 41081 - RNA, 19 nt, Homo sapiens
  misc_RNA (1)...(19): siRNA sense strand
gcaucggccucaacugugu

SEQ ID NO: 41082 - RNA, 19 nt, Homo sapiens
  misc_RNA (1)...(19): siRNA sense strand
ccucaacgguaacaucuuc

SEQ ID NO: 41083 - RNA, 19 nt, Homo sapiens
  misc_RNA (1)...(19): siRNA sense strand
caaacucugugccgacauc

SEQ ID NO: 41084 - RNA, 19 nt, Homo sapiens
  misc_RNA (1)...(19): siRNA sense strand
cacaaagguugccaaagug

SEQ ID NO: 41085 - RNA, 19 nt, Homo sapiens
  misc_RNA (1)...(19): siRNA sense strand
caacaacagcagcagcaaa

SEQ ID NO: 41086 - RNA, 19 nt, Homo sapiens
  misc_RNA (1)...(19): siRNA sense strand
gcccaguccugaagugaug

SEQ ID NO: 41087 - RNA, 19 nt, Homo sapiens
  misc_RNA (1)...(19): siRNA sense strand
cccaaggagucuucuggua

SEQ ID NO: 41088 - RNA, 19 nt, Homo sapiens
  misc_RNA (1)...(19): siRNA sense strand
ggauggcacacuacugaaa

SEQ ID NO: 41089 - RNA, 19 nt, Homo sapiens
  misc_RNA (1)...(19): siRNA sense strand
caaggagucuucugguaac

SEQ ID NO: 41090 - RNA, 19 nt, Homo sapiens
  misc_RNA (1)...(19): siRNA sense strand
cagaauuggacgaaaguuu

SEQ ID NO: 41091 - RNA, 19 nt, Homo sapiens
  misc_RNA (1)...(19): siRNA sense strand
gcagcaaacccacaaaggu

SEQ ID NO: 41092 - RNA, 19 nt, Homo sapiens
  misc_RNA (1)...(19): siRNA sense strand
caaaggaggcagugcaagu

SEQ ID NO: 41093 - RNA, 19 nt, Homo sapiens
  misc_RNA (1)...(19): siRNA sense strand
gacaaacucauaggaaaga

SEQ ID NO: 41094 - RNA, 19 nt, Homo sapiens
  misc_RNA (1)...(19): siRNA sense strand
gcagugauucuacucuuuc

SEQ ID NO: 41095 - RNA, 19 nt, Homo sapiens
  misc_RNA (1)...(19): siRNA sense strand
acgguaacaucuucccaua

SEQ ID NO: 41096 - RNA, 19 nt, Homo sapiens
  misc_RNA (1)...(19): siRNA sense strand
caagacacauuccuuaacc

SEQ ID NO: 41097 - RNA, 19 nt, Homo sapiens
  misc_RNA (1)...(19): siRNA sense strand
uuauugaucucgacaccaa

SEQ ID NO: 41098 - RNA, 19 nt, Homo sapiens
  misc_RNA (1)...(19): siRNA sense strand
gcaggcauuucaaucacau

SEQ ID NO: 41099 - RNA, 19 nt, Homo sapiens
  misc_RNA (1)...(19): siRNA sense strand
cagcagugauucuacucuu

SEQ ID NO: 41100 - RNA, 19 nt, Homo sapiens
  misc_RNA (1)...(19): siRNA sense strand
ccucagaaauugaaaucca

SEQ ID NO: 41101 - RNA, 19 nt, Homo sapiens
  misc_RNA (1)...(19): siRNA sense strand
cauggaaccacacuaaaug

SEQ ID NO: 41102 - RNA, 19 nt, Homo sapiens
  misc_RNA (1)...(19): siRNA sense strand
acaaagaagagucuguuga

SEQ ID NO: 41103 - RNA, 19 nt, Homo sapiens
  misc_RNA (1)...(19): siRNA sense strand
gaaaacgauuugauguguu

SEQ ID NO: 41104 - RNA, 19 nt, Homo sapiens
  misc_RNA (1)...(19): siRNA sense strand
caaccuguccugcuacugu

SEQ ID NO: 41105 - RNA, 19 nt, Homo sapiens
  misc_RNA (1)...(19): siRNA sense strand
gccuucaccuggacagauu

SEQ ID NO: 41106 - RNA, 19 nt, Homo sapiens
  misc_RNA (1)...(19): siRNA sense strand
caaaaugccaguagcagua

SEQ ID NO: 41107 - RNA, 19 nt, Homo sapiens
  misc_RNA (1)...(19): siRNA sense strand
gaagaaaacgauuugaugu

SEQ ID NO: 41108 - RNA, 19 nt, Homo sapiens
  misc_RNA (1)...(19): siRNA sense strand
gcaagacacauuccuuaac

SEQ ID NO: 41109 - RNA, 19 nt, Homo sapiens
  misc_RNA (1)...(19): siRNA sense strand
gauuugauguguuauuagc

SEQ ID NO: 41110 - RNA, 19 nt, Homo sapiens
  misc_RNA (1)...(19): siRNA sense strand
cacaaggacugaugaacag

SEQ ID NO: 41111 - RNA, 19 nt, Homo sapiens
  misc_RNA (1)...(19): siRNA sense strand
gauccugugugcaguaugc

SEQ ID NO: 41112 - RNA, 19 nt, Homo sapiens
  misc_RNA (1)...(19): siRNA sense strand
gaagaggcuauuacguguu

SEQ ID NO: 41113 - RNA, 19 nt, Homo sapiens
  misc_RNA (1)...(19): siRNA sense strand
ucaaaccgcaggcauuuca

SEQ ID NO: 41114 - RNA, 19 nt, Homo sapiens
  misc_RNA (1)...(19): siRNA sense strand
gcgaaggcgaugacaaaga

SEQ ID NO: 41115 - RNA, 19 nt, Homo sapiens
  misc_RNA (1)...(19): siRNA sense strand
gcaccgcccacucuggaaa

SEQ ID NO: 41116 - RNA, 19 nt, Homo sapiens
  misc_RNA (1)...(19): siRNA sense strand
guccagcccaugaugauuu

SEQ ID NO: 41117 - RNA, 19 nt, Homo sapiens
  misc_RNA (1)...(19): siRNA sense strand
ugaaugcacagcuauggaa

SEQ ID NO: 41118 - RNA, 19 nt, Homo sapiens
  misc_RNA (1)...(19): siRNA sense strand
uaucagaaagagaguuuga

SEQ ID NO: 41119 - RNA, 19 nt, Homo sapiens
  misc_RNA (1)...(19): siRNA sense strand
gagccagcuucucgguuau

SEQ ID NO: 41120 - RNA, 19 nt, Homo sapiens
  misc_RNA (1)...(19): siRNA sense strand
ucuacuuggugguguguaa

SEQ ID NO: 41121 - RNA, 19 nt, Homo sapiens
  misc_RNA (1)...(19): siRNA sense strand
gggaaggacgggacagaau

SEQ ID NO: 41122 - RNA, 19 nt, Homo sapiens
  misc_RNA (1)...(19): siRNA sense strand
gaagugaugcugggacagu

SEQ ID NO: 41123 - RNA, 19 nt, Homo sapiens
  misc_RNA (1)...(19): siRNA sense strand
caaguuccaaguuguugaa

SEQ ID NO: 41124 - RNA, 19 nt, Homo sapiens
  misc_RNA (1)...(19): siRNA sense strand
gugaacagcagugauucua

SEQ ID NO: 41125 - RNA, 19 nt, Homo sapiens
  misc_RNA (1)...(19): siRNA sense strand
ccugaagacaauuccaaua

SEQ ID NO: 41126 - RNA, 19 nt, Homo sapiens
  misc_RNA (1)...(19): siRNA sense strand
gauggcacacuacugaaau

SEQ ID NO: 41127 - RNA, 19 nt, Homo sapiens
  misc_RNA (1)...(19): siRNA sense strand
caaacucauaggaaagaaa

SEQ ID NO: 41128 - RNA, 19 nt, Homo sapiens
  misc_RNA (1)...(19): siRNA sense strand
cuagacaaacucauaggaa

SEQ ID NO: 41129 - RNA, 19 nt, Homo sapiens
  misc_RNA (1)...(19): siRNA sense strand
cucauuccauggagucuuu

SEQ ID NO: 41130 - RNA, 19 nt, Homo sapiens
  misc_RNA (1)...(19): siRNA sense strand
ugacaaagaagagucuguu

SEQ ID NO: 41131 - RNA, 19 nt, Homo sapiens
  misc_RNA (1)...(19): siRNA sense strand
ucacaggagccgcaccaaa

SEQ ID NO: 41132 - RNA, 19 nt, Homo sapiens
  misc_RNA (1)...(19): siRNA sense strand
gaaaagaaaccugaagaca

SEQ ID NO: 41133 - RNA, 19 nt, Homo sapiens
  misc_RNA (1)...(19): siRNA sense strand
ugucaaaccgcaggcauuu

SEQ ID NO: 41134 - RNA, 19 nt, Homo sapiens
  misc_RNA (1)...(19): siRNA sense strand
gacaaagaagagucuguug

SEQ ID NO: 41135 - RNA, 19 nt, Homo sapiens
  misc_RNA (1)...(19): siRNA sense strand
ugacaugcaagacacauuc

SEQ ID NO: 41136 - RNA, 19 nt, Homo sapiens
  misc_RNA (1)...(19): siRNA sense strand
uagcaucggccucaacugu

SEQ ID NO: 41137 - RNA, 19 nt, Homo sapiens
  misc_RNA (1)...(19): siRNA sense strand
ccaaagugccagccgugaa

SEQ ID NO: 41138 - RNA, 19 nt, Homo sapiens
  misc_RNA (1)...(19): siRNA sense strand
gaacacaaccuguacauuu

SEQ ID NO: 41139 - RNA, 19 nt, Homo sapiens
  misc_RNA (1)...(19): siRNA sense strand
gaagaaggauuugaacuaa

SEQ ID NO: 41140 - RNA, 19 nt, Homo sapiens
  misc_RNA (1)...(19): siRNA sense strand
gagcgaggcuacaugaauu

SEQ ID NO: 41141 - RNA, 19 nt, Homo sapiens
  misc_RNA (1)...(19): siRNA sense strand
gcaaugugguugaguguga

SEQ ID NO: 41142 - RNA, 19 nt, Homo sapiens
  misc_RNA (1)...(19): siRNA sense strand
guagagaccaucaauaauu

SEQ ID NO: 41143 - RNA, 19 nt, Homo sapiens
  misc_RNA (1)...(19): siRNA sense strand
ccacggaagcuaugacuua

SEQ ID NO: 41144 - RNA, 19 nt, Homo sapiens
  misc_RNA (1)...(19): siRNA sense strand
uaccuaaacuccauauuga

SEQ ID NO: 41145 - RNA, 19 nt, Homo sapiens
  misc_RNA (1)...(19): siRNA sense strand
agaagaagcuugcccuaug

SEQ ID NO: 41146 - RNA, 19 nt, Homo sapiens
  misc_RNA (1)...(19): siRNA sense strand
cggaagcuaugacuuauga

SEQ ID NO: 41147 - RNA, 19 nt, Homo sapiens
  misc_RNA (1)...(19): siRNA sense strand
gccaaagccuugaaucaga

SEQ ID NO: 41148 - RNA, 19 nt, Homo sapiens
  misc_RNA (1)...(19): siRNA sense strand
guaccuaaacuccauauug

SEQ ID NO: 41149 - RNA, 19 nt, Homo sapiens
  misc_RNA (1)...(19): siRNA sense strand
gcugugaguucuccuguga

SEQ ID NO: 41150 - RNA, 19 nt, Homo sapiens
  misc_RNA (1)...(19): siRNA sense strand
gcccagagccuucagugua

SEQ ID NO: 41151 - RNA, 19 nt, Homo sapiens
  misc_RNA (1)...(19): siRNA sense strand
ucaguggacucaaguguga

SEQ ID NO: 41152 - RNA, 19 nt, Homo sapiens
  misc_RNA (1)...(19): siRNA sense strand
gcuauucaccaaguuauua

SEQ ID NO: 41153 - RNA, 19 nt, Homo sapiens
  misc_RNA (1)...(19): siRNA sense strand
ugaagaaggauuugaacua

SEQ ID NO: 41154 - RNA, 19 nt, Homo sapiens
  misc_RNA (1)...(19): siRNA sense strand
caaaucauccugcaacuuc

SEQ ID NO: 41155 - RNA, 19 nt, Homo sapiens
  misc_RNA (1)...(19): siRNA sense strand
agaaggauuugaacuaaug

SEQ ID NO: 41156 - RNA, 19 nt, Homo sapiens
  misc_RNA (1)...(19): siRNA sense strand
guguagagaccaucaauaa

SEQ ID NO: 41157 - RNA, 19 nt, Homo sapiens
  misc_RNA (1)...(19): siRNA sense strand
ugaggagggauuugaauua

SEQ ID NO: 41158 - RNA, 19 nt, Homo sapiens
  misc_RNA (1)...(19): siRNA sense strand
gaagagauugaguaccuaa

SEQ ID NO: 41159 - RNA, 19 nt, Homo sapiens
  misc_RNA (1)...(19): siRNA sense strand
gaagaagcuugcccuaugc

SEQ ID NO: 41160 - RNA, 19 nt, Homo sapiens
  misc_RNA (1)...(19): siRNA sense strand
guggagaucuacaucaaga

SEQ ID NO: 41161 - RNA, 19 nt, Homo sapiens
  misc_RNA (1)...(19): siRNA sense strand
gagcauggaagccugguuu

SEQ ID NO: 41162 - RNA, 19 nt, Homo sapiens
  misc_RNA (1)...(19): siRNA sense strand
acaaagaagagauugagua

SEQ ID NO: 41163 - RNA, 19 nt, Homo sapiens
  misc_RNA (1)...(19): siRNA sense strand
ccaauggguucguggaaug

SEQ ID NO: 41164 - RNA, 19 nt, Homo sapiens
  misc_RNA (1)...(19): siRNA sense strand
gagcaaauugugaacugua

SEQ ID NO: 41165 - RNA, 19 nt, Homo sapiens
  misc_RNA (1)...(19): siRNA sense strand
acacacaccugguugcaau

SEQ ID NO: 41166 - RNA, 19 nt, Homo sapiens
  misc_RNA (1)...(19): siRNA sense strand
acacuggucuggccugcua

SEQ ID NO: 41167 - RNA, 19 nt, Homo sapiens
  misc_RNA (1)...(19): siRNA sense strand
ggaaacuucagcuacaauu

SEQ ID NO: 41168 - RNA, 19 nt, Homo sapiens
  misc_RNA (1)...(19): siRNA sense strand
ucucucagcucucacuuug

SEQ ID NO: 41169 - RNA, 19 nt, Homo sapiens
  misc_RNA (1)...(19): siRNA sense strand
uaaacuccauauugagcua

SEQ ID NO: 41170 - RNA, 19 nt, Homo sapiens
  misc_RNA (1)...(19): siRNA sense strand
gaagcuaugacuuaugaug

SEQ ID NO: 41171 - RNA, 19 nt, Homo sapiens
  misc_RNA (1)...(19): siRNA sense strand
gaacuguacagcccuggaa

SEQ ID NO: 41172 - RNA, 19 nt, Homo sapiens
  misc_RNA (1)...(19): siRNA sense strand
caaguucgccuguccugaa

SEQ ID NO: 41173 - RNA, 19 nt, Homo sapiens
  misc_RNA (1)...(19): siRNA sense strand
gcguggagaucuacaucaa

SEQ ID NO: 41174 - RNA, 19 nt, Homo sapiens
  misc_RNA (1)...(19): siRNA sense strand
ccaggugaacccaacaaua

SEQ ID NO: 41175 - RNA, 19 nt, Homo sapiens
  misc_RNA (1)...(19): siRNA sense strand
aacacaaccuguacauuug

SEQ ID NO: 41176 - RNA, 19 nt, Homo sapiens
  misc_RNA (1)...(19): siRNA sense strand
ggagaucuacaucaagaga

SEQ ID NO: 41177 - RNA, 19 nt, Homo sapiens
  misc_RNA (1)...(19): siRNA sense strand
gaacccaacaauaggcaaa

SEQ ID NO: 41178 - RNA, 19 nt, Homo sapiens
  misc_RNA (1)...(19): siRNA sense strand
gcacaucucagggacaaug

SEQ ID NO: 41179 - RNA, 19 nt, Homo sapiens
  misc_RNA (1)...(19): siRNA sense strand
gagauugaguaccuaaacu

SEQ ID NO: 41180 - RNA, 19 nt, Homo sapiens
  misc_RNA (1)...(19): siRNA sense strand
cggaaaugcuuacggaaag

SEQ ID NO: 41181 - RNA, 19 nt, Homo sapiens
  misc_RNA (1)...(19): siRNA sense strand
gaggcuacaugaauugucu

SEQ ID NO: 41182 - RNA, 19 nt, Homo sapiens
  misc_RNA (1)...(19): siRNA sense strand
caggugaacccaacaauag

SEQ ID NO: 41183 - RNA, 19 nt, Homo sapiens
  misc_RNA (1)...(19): siRNA sense strand
caacuugagugcacaucuc

SEQ ID NO: 41184 - RNA, 19 nt, Homo sapiens
  misc_RNA (1)...(19): siRNA sense strand
uacaugaauugucuuccua

SEQ ID NO: 41185 - RNA, 19 nt, Homo sapiens
  misc_RNA (1)...(19): siRNA sense strand
caaagaagagauugaguac

SEQ ID NO: 41186 - RNA, 19 nt, Homo sapiens
  misc_RNA (1)...(19): siRNA sense strand
gaguucaccuucaaaucau

SEQ ID NO: 41187 - RNA, 19 nt, Homo sapiens
  misc_RNA (1)...(19): siRNA sense strand
gaaacuucagcuacaauuc

SEQ ID NO: 41188 - RNA, 19 nt, Homo sapiens
  misc_RNA (1)...(19): siRNA sense strand
gaugugggcauguggaaug

SEQ ID NO: 41189 - RNA, 19 nt, Homo sapiens
  misc_RNA (1)...(19): siRNA sense strand
ucagaaaagucaacaaugu

SEQ ID NO: 41190 - RNA, 19 nt, Homo sapiens
  misc_RNA (1)...(19): siRNA sense strand
ggagaguucaccuucaaau

SEQ ID NO: 41191 - RNA, 19 nt, Homo sapiens
  misc_RNA (1)...(19): siRNA sense strand
aagaagagauugaguaccu

SEQ ID NO: 41192 - RNA, 19 nt, Homo sapiens
  misc_RNA (1)...(19): siRNA sense strand
cgggaaagaucaacaugag

SEQ ID NO: 41193 - RNA, 19 nt, Homo sapiens
  misc_RNA (1)...(19): siRNA sense strand
gaccaucaauaauuacacu

SEQ ID NO: 41194 - RNA, 19 nt, Homo sapiens
  misc_RNA (1)...(19): siRNA sense strand
acacagcaaaucccaguuu

SEQ ID NO: 41195 - RNA, 19 nt, Homo sapiens
  misc_RNA (1)...(19): siRNA sense strand
ucugugaggugcagccauu

SEQ ID NO: 41196 - RNA, 19 nt, Homo sapiens
  misc_RNA (1)...(19): siRNA sense strand
ccaaguuauuacuggauug

SEQ ID NO: 41197 - RNA, 19 nt, Homo sapiens
  misc_RNA (1)...(19): siRNA sense strand
gugcacaucucagggacaa

SEQ ID NO: 41198 - RNA, 19 nt, Homo sapiens
  misc_RNA (1)...(19): siRNA sense strand
agaguucaccuucaaauca

SEQ ID NO: 41199 - RNA, 19 nt, Homo sapiens
  misc_RNA (1)...(19): siRNA sense strand
gugagcaaauugugaacug

SEQ ID NO: 41200 - RNA, 19 nt, Homo sapiens
  misc_RNA (1)...(19): siRNA sense strand
auauugagcuauucaccaa

SEQ ID NO: 41201 - RNA, 19 nt, Homo sapiens
  misc_RNA (1)...(19): siRNA sense strand
gacucucccuccugacauu

SEQ ID NO: 41202 - RNA, 19 nt, Homo sapiens
  misc_RNA (1)...(19): siRNA sense strand
gaaggauggacgcucaaug

SEQ ID NO: 41203 - RNA, 19 nt, Homo sapiens
  misc_RNA (1)...(19): siRNA sense strand
ugacugugaagaaggauuu

SEQ ID NO: 41204 - RNA, 19 nt, Homo sapiens
  misc_RNA (1)...(19): siRNA sense strand
ggaacacaaccuguacauu

SEQ ID NO: 41205 - RNA, 19 nt, Homo sapiens
  misc_RNA (1)...(19): siRNA sense strand
cuuuggugcuucucauuaa

SEQ ID NO: 41206 - RNA, 19 nt, Homo sapiens
  misc_RNA (1)...(19): siRNA sense strand
cuugguagcuggacuuucu

SEQ ID NO: 41207 - RNA, 19 nt, Homo sapiens
  misc_RNA (1)...(19): siRNA sense strand
gaccagcccagguugaaug

SEQ ID NO: 41208 - RNA, 19 nt, Homo sapiens
  misc_RNA (1)...(19): siRNA sense strand
gaugaggccagugcuuauu

SEQ ID NO: 41209 - RNA, 19 nt, Homo sapiens
  misc_RNA (1)...(19): siRNA sense strand
ggagaauucaccuacaagu

SEQ ID NO: 41210 - RNA, 19 nt, Homo sapiens
  misc_RNA (1)...(19): siRNA sense strand
ccauggaacacaaccugua

SEQ ID NO: 41211 - RNA, 19 nt, Homo sapiens
  misc_RNA (1)...(19): siRNA sense strand
gagcuauucaccaaguuau

SEQ ID NO: 41212 - RNA, 19 nt, Homo sapiens
  misc_RNA (1)...(19): siRNA sense strand
gagaauucaccuacaaguc

SEQ ID NO: 41213 - RNA, 19 nt, Homo sapiens
  misc_RNA (1)...(19): siRNA sense strand
gcuggagaguucaccuuca

SEQ ID NO: 41214 - RNA, 19 nt, Homo sapiens
  misc_RNA (1)...(19): siRNA sense strand
uggagaccaugcaguguau

SEQ ID NO: 41215 - RNA, 19 nt, Homo sapiens
  misc_RNA (1)...(19): siRNA sense strand
ugagcuauucaccaaguua

SEQ ID NO: 41216 - RNA, 19 nt, Homo sapiens
  misc_RNA (1)...(19): siRNA sense strand
ucucagcucucacuuuggu

SEQ ID NO: 41217 - RNA, 19 nt, Homo sapiens
  misc_RNA (1)...(19): siRNA sense strand
gugaggagggauuugaauu

SEQ ID NO: 41218 - RNA, 19 nt, Homo sapiens
  misc_RNA (1)...(19): siRNA sense strand
gccaauggguucguggaau

SEQ ID NO: 41219 - RNA, 19 nt, Homo sapiens
  misc_RNA (1)...(19): siRNA sense strand
cacggaagcuaugacuuau

SEQ ID NO: 41220 - RNA, 19 nt, Homo sapiens
  misc_RNA (1)...(19): siRNA sense strand
agaucuacaucaagagaga

SEQ ID NO: 41221 - RNA, 19 nt, Homo sapiens
  misc_RNA (1)...(19): siRNA sense strand
gagaguucaccuucaaauc

SEQ ID NO: 41222 - RNA, 19 nt, Homo sapiens
  misc_RNA (1)...(19): siRNA sense strand
ccuguacauuugacuguga

SEQ ID NO: 41223 - RNA, 19 nt, Homo sapiens
  misc_RNA (1)...(19): siRNA sense strand
gugggcauguggaaugaug

SEQ ID NO: 41224 - RNA, 19 nt, Homo sapiens
  misc_RNA (1)...(19): siRNA sense strand
acggaaagcaaagaaauuu

SEQ ID NO: 41225 - RNA, 19 nt, Homo sapiens
  misc_RNA (1)...(19): siRNA sense strand
cgagcgaggcuacaugaau

SEQ ID NO: 41226 - RNA, 19 nt, Homo sapiens
  misc_RNA (1)...(19): siRNA sense strand
uggccacggugaaugugua

SEQ ID NO: 41227 - RNA, 19 nt, Homo sapiens
  misc_RNA (1)...(19): siRNA sense strand
agaagagauugaguaccua

SEQ ID NO: 41228 - RNA, 19 nt, Homo sapiens
  misc_RNA (1)...(19): siRNA sense strand
cuggagaguucaccuucaa

SEQ ID NO: 41229 - RNA, 19 nt, Homo sapiens
  misc_RNA (1)...(19): siRNA sense strand
ugagugugaugcugugaca

SEQ ID NO: 41230 - RNA, 19 nt, Homo sapiens
  misc_RNA (1)...(19): siRNA sense strand
gaagccugguuugcaguca

SEQ ID NO: 41231 - RNA, 19 nt, Homo sapiens
  misc_RNA (1)...(19): siRNA sense strand
acaccugguugcaauucaa

SEQ ID NO: 41232 - RNA, 19 nt, Homo sapiens
  misc_RNA (1)...(19): siRNA sense strand
acaauggacagaagagguu

SEQ ID NO: 41233 - RNA, 19 nt, Homo sapiens
  misc_RNA (1)...(19): siRNA sense strand
caugugaagcugugagaug

SEQ ID NO: 41234 - RNA, 19 nt, Homo sapiens
  misc_RNA (1)...(19): siRNA sense strand
uauguccucuggagaaugg

SEQ ID NO: 41235 - RNA, 19 nt, Homo sapiens
  misc_RNA (1)...(19): siRNA sense strand
ggagccuggucuuacaaca

SEQ ID NO: 41236 - RNA, 19 nt, Homo sapiens
  misc_RNA (1)...(19): siRNA sense strand
gcaguggacacagcaaauc

SEQ ID NO: 41237 - RNA, 19 nt, Homo sapiens
  misc_RNA (1)...(19): siRNA sense strand
aagcuaugacuuaugauga

SEQ ID NO: 41238 - RNA, 19 nt, Homo sapiens
  misc_RNA (1)...(19): siRNA sense strand
cagaagggauuuaugaaug

SEQ ID NO: 41239 - RNA, 19 nt, Homo sapiens
  misc_RNA (1)...(19): siRNA sense strand
gcauaaaggcgucaucuug

SEQ ID NO: 41240 - RNA, 19 nt, Homo sapiens
  misc_RNA (1)...(19): siRNA sense strand
gguaagaaggauuccauua

SEQ ID NO: 41241 - RNA, 19 nt, Homo sapiens
  misc_RNA (1)...(19): siRNA sense strand
aggagaaacugaaagaauu

SEQ ID NO: 41242 - RNA, 19 nt, Homo sapiens
  misc_RNA (1)...(19): siRNA sense strand
gcagaagggauuuaugaau

SEQ ID NO: 41243 - RNA, 19 nt, Homo sapiens
  misc_RNA (1)...(19): siRNA sense strand
caagagaaucagaugcaua

SEQ ID NO: 41244 - RNA, 19 nt, Homo sapiens
  misc_RNA (1)...(19): siRNA sense strand
gagaguggcagaagggauu

SEQ ID NO: 41245 - RNA, 19 nt, Homo sapiens
  misc_RNA (1)...(19): siRNA sense strand
aagagaaucagaugcauaa

SEQ ID NO: 41246 - RNA, 19 nt, Homo sapiens
  misc_RNA (1)...(19): siRNA sense strand
agaaucagaugcauaaagg

SEQ ID NO: 41247 - RNA, 19 nt, Homo sapiens
  misc_RNA (1)...(19): siRNA sense strand
ggagaaacugaaagaauuc

SEQ ID NO: 41248 - RNA, 19 nt, Homo sapiens
  misc_RNA (1)...(19): siRNA sense strand
gggcacagccaaccaccua

SEQ ID NO: 41249 - RNA, 19 nt, Homo sapiens
  misc_RNA (1)...(19): siRNA sense strand
gcaaacaagagaaucagau

SEQ ID NO: 41250 - RNA, 19 nt, Homo sapiens
  misc_RNA (1)...(19): siRNA sense strand
uaagaaggauuccauuacg

SEQ ID NO: 41251 - RNA, 19 nt, Homo sapiens
  misc_RNA (1)...(19): siRNA sense strand
gagaaucagaugcauaaag

SEQ ID NO: 41252 - RNA, 19 nt, Homo sapiens
  misc_RNA (1)...(19): siRNA sense strand
agaaggauuccauuacgua

SEQ ID NO: 41253 - RNA, 19 nt, Homo sapiens
  misc_RNA (1)...(19): siRNA sense strand
caaacaagagaaucagaug

SEQ ID NO: 41254 - RNA, 19 nt, Homo sapiens
  misc_RNA (1)...(19): siRNA sense strand
ugacaaggagaaacugaaa

SEQ ID NO: 41255 - RNA, 19 nt, Homo sapiens
  misc_RNA (1)...(19): siRNA sense strand
uggcagaagggauuuauga

SEQ ID NO: 41256 - RNA, 19 nt, Homo sapiens
  misc_RNA (1)...(19): siRNA sense strand
gcacagccaaccaccuaga

SEQ ID NO: 41257 - RNA, 19 nt, Homo sapiens
  misc_RNA (1)...(19): siRNA sense strand
gaagggauuuaugaaugca

SEQ ID NO: 41258 - RNA, 19 nt, Homo sapiens
  misc_RNA (1)...(19): siRNA sense strand
ccaagugccgcaaacaaga

SEQ ID NO: 41259 - RNA, 19 nt, Homo sapiens
  misc_RNA (1)...(19): siRNA sense strand
acaaggagaaacugaaaga

SEQ ID NO: 41260 - RNA, 19 nt, Homo sapiens
  misc_RNA (1)...(19): siRNA sense strand
ucaaggaccacguagacaa

SEQ ID NO: 41261 - RNA, 19 nt, Homo sapiens
  misc_RNA (1)...(19): siRNA sense strand
ccacguagacaaugacaag

SEQ ID NO: 41262 - RNA, 19 nt, Homo sapiens
  misc_RNA (1)...(19): siRNA sense strand
caaggaccacguagacaau

SEQ ID NO: 41263 - RNA, 19 nt, Homo sapiens
  misc_RNA (1)...(19): siRNA sense strand
gagguaagaaggauuccau

SEQ ID NO: 41264 - RNA, 19 nt, Homo sapiens
  misc_RNA (1)...(19): siRNA sense strand
agaagggauuuaugaaugc

SEQ ID NO: 41265 - RNA, 19 nt, Homo sapiens
  misc_RNA (1)...(19): siRNA sense strand
gccacugcccggugcauuu

SEQ ID NO: 41266 - RNA, 19 nt, Homo sapiens
  misc_RNA (1)...(19): siRNA sense strand
aaggagaaacugaaagaau

SEQ ID NO: 41267 - RNA, 19 nt, Homo sapiens
  misc_RNA (1)...(19): siRNA sense strand
ggcagaagggauuuaugaa

SEQ ID NO: 41268 - RNA, 19 nt, Homo sapiens
  misc_RNA (1)...(19): siRNA sense strand
caaggagaaacugaaagaa

SEQ ID NO: 41269 - RNA, 19 nt, Homo sapiens
  misc_RNA (1)...(19): siRNA sense strand
gagccuuacggaugccuuu

SEQ ID NO: 41270 - RNA, 19 nt, Homo sapiens
  misc_RNA (1)...(19): siRNA sense strand
ggauuuaugaaugcaaaga

SEQ ID NO: 41271 - RNA, 19 nt, Homo sapiens
  misc_RNA (1)...(19): siRNA sense strand
cgucaacaugggagccuua

SEQ ID NO: 41272 - RNA, 19 nt, Homo sapiens
  misc_RNA (1)...(19): siRNA sense strand
gaagcgcgaggacgugaag

SEQ ID NO: 41273 - RNA, 19 nt, Homo sapiens
  misc_RNA (1)...(19): siRNA sense strand
gccaagugccgcaaacaag

SEQ ID NO: 41274 - RNA, 19 nt, Homo sapiens
  misc_RNA (1)...(19): siRNA sense strand
ccacugcccggugcauuug

SEQ ID NO: 41275 - RNA, 19 nt, Homo sapiens
  misc_RNA (1)...(19): siRNA sense strand
agggauuuaugaaugcaaa

SEQ ID NO: 41276 - RNA, 19 nt, Homo sapiens
  misc_RNA (1)...(19): siRNA sense strand
gcggagguaagaaggauuc

SEQ ID NO: 41277 - RNA, 19 nt, Homo sapiens
  misc_RNA (1)...(19): siRNA sense strand
aagaaggauuccauuacgu

SEQ ID NO: 41278 - RNA, 19 nt, Homo sapiens
  misc_RNA (1)...(19): siRNA sense strand
ccaagucuuuugaccagaa

SEQ ID NO: 41279 - RNA, 19 nt, Homo sapiens
  misc_RNA (1)...(19): siRNA sense strand
gaagagcucacggcuuuug

SEQ ID NO: 41280 - RNA, 19 nt, Homo sapiens
  misc_RNA (1)...(19): siRNA sense strand
gggcagaccaagcugaaac

SEQ ID NO: 41281 - RNA, 19 nt, Homo sapiens
  misc_RNA (1)...(19): siRNA sense strand
guucaaggaccacguagac

SEQ ID NO: 41282 - RNA, 19 nt, Homo sapiens
  misc_RNA (1)...(19): siRNA sense strand
cagaagggauuuaugaaug

SEQ ID NO: 41283 - RNA, 19 nt, Homo sapiens
  misc_RNA (1)...(19): siRNA sense strand
gcauaaaggcgucaucuug

SEQ ID NO: 41284 - RNA, 19 nt, Homo sapiens
  misc_RNA (1)...(19): siRNA sense strand
gguaagaaggauuccauua

SEQ ID NO: 41285 - RNA, 19 nt, Homo sapiens
  misc_RNA (1)...(19): siRNA sense strand
aggagaaacugaaagaauu

SEQ ID NO: 41286 - RNA, 19 nt, Homo sapiens
  misc_RNA (1)...(19): siRNA sense strand
gcagaagggauuuaugaau

SEQ ID NO: 41287 - RNA, 19 nt, Homo sapiens
  misc_RNA (1)...(19): siRNA sense strand
caagagaaucagaugcaua

SEQ ID NO: 41288 - RNA, 19 nt, Homo sapiens
  misc_RNA (1)...(19): siRNA sense strand
gagaguggcagaagggauu

SEQ ID NO: 41289 - RNA, 19 nt, Homo sapiens
  misc_RNA (1)...(19): siRNA sense strand
aagagaaucagaugcauaa

SEQ ID NO: 41290 - RNA, 19 nt, Homo sapiens
  misc_RNA (1)...(19): siRNA sense strand
agaaucagaugcauaaagg

SEQ ID NO: 41291 - RNA, 19 nt, Homo sapiens
  misc_RNA (1)...(19): siRNA sense strand
ggagaaacugaaagaauuc

SEQ ID NO: 41292 - RNA, 19 nt, Homo sapiens
  misc_RNA (1)...(19): siRNA sense strand
gggcacagccaaccaccua

SEQ ID NO: 41293 - RNA, 19 nt, Homo sapiens
  misc_RNA (1)...(19): siRNA sense strand
gcaaacaagagaaucagau

SEQ ID NO: 41294 - RNA, 19 nt, Homo sapiens
  misc_RNA (1)...(19): siRNA sense strand
uaagaaggauuccauuacg

SEQ ID NO: 41295 - RNA, 19 nt, Homo sapiens
  misc_RNA (1)...(19): siRNA sense strand
gagaaucagaugcauaaag

SEQ ID NO: 41296 - RNA, 19 nt, Homo sapiens
  misc_RNA (1)...(19): siRNA sense strand
agaaggauuccauuacgua

SEQ ID NO: 41297 - RNA, 19 nt, Homo sapiens
  misc_RNA (1)...(19): siRNA sense strand
caaacaagagaaucagaug

SEQ ID NO: 41298 - RNA, 19 nt, Homo sapiens
  misc_RNA (1)...(19): siRNA sense strand
ugacaaggagaaacugaaa

SEQ ID NO: 41299 - RNA, 19 nt, Homo sapiens
  misc_RNA (1)...(19): siRNA sense strand
uggcagaagggauuuauga

SEQ ID NO: 41300 - RNA, 19 nt, Homo sapiens
  misc_RNA (1)...(19): siRNA sense strand
gcacagccaaccaccuaga

SEQ ID NO: 41301 - RNA, 19 nt, Homo sapiens
  misc_RNA (1)...(19): siRNA sense strand
gaagggauuuaugaaugca

SEQ ID NO: 41302 - RNA, 19 nt, Homo sapiens
  misc_RNA (1)...(19): siRNA sense strand
ccaagugccgcaaacaaga

SEQ ID NO: 41303 - RNA, 19 nt, Homo sapiens
  misc_RNA (1)...(19): siRNA sense strand
acaaggagaaacugaaaga

SEQ ID NO: 41304 - RNA, 19 nt, Homo sapiens
  misc_RNA (1)...(19): siRNA sense strand
ucaaggaccacguagacaa

SEQ ID NO: 41305 - RNA, 19 nt, Homo sapiens
  misc_RNA (1)...(19): siRNA sense strand
ccacguagacaaugacaag

SEQ ID NO: 41306 - RNA, 19 nt, Homo sapiens
  misc_RNA (1)...(19): siRNA sense strand
caaggaccacguagacaau

SEQ ID NO: 41307 - RNA, 19 nt, Homo sapiens
  misc_RNA (1)...(19): siRNA sense strand
gagguaagaaggauuccau

SEQ ID NO: 41308 - RNA, 19 nt, Homo sapiens
  misc_RNA (1)...(19): siRNA sense strand
agaagggauuuaugaaugc

SEQ ID NO: 41309 - RNA, 19 nt, Homo sapiens
  misc_RNA (1)...(19): siRNA sense strand
gccacugcccggugcauuu

SEQ ID NO: 41310 - RNA, 19 nt, Homo sapiens
  misc_RNA (1)...(19): siRNA sense strand
aaggagaaacugaaagaau

SEQ ID NO: 41311 - RNA, 19 nt, Homo sapiens
  misc_RNA (1)...(19): siRNA sense strand
ggcagaagggauuuaugaa

SEQ ID NO: 41312 - RNA, 19 nt, Homo sapiens
  misc_RNA (1)...(19): siRNA sense strand
caaggagaaacugaaagaa

SEQ ID NO: 41313 - RNA, 19 nt, Homo sapiens
  misc_RNA (1)...(19): siRNA sense strand
gagccuuacggaugccuuu

SEQ ID NO: 41314 - RNA, 19 nt, Homo sapiens
  misc_RNA (1)...(19): siRNA sense strand
ggauuuaugaaugcaaaga

SEQ ID NO: 41315 - RNA, 19 nt, Homo sapiens
  misc_RNA (1)...(19): siRNA sense strand
cgucaacaugggagccuua

SEQ ID NO: 41316 - RNA, 19 nt, Homo sapiens
  misc_RNA (1)...(19): siRNA sense strand
gaagcgcgaggacgugaag

SEQ ID NO: 41317 - RNA, 19 nt, Homo sapiens
  misc_RNA (1)...(19): siRNA sense strand
gccaagugccgcaaacaag

SEQ ID NO: 41318 - RNA, 19 nt, Homo sapiens
  misc_RNA (1)...(19): siRNA sense strand
ccacugcccggugcauuug

SEQ ID NO: 41319 - RNA, 19 nt, Homo sapiens
  misc_RNA (1)...(19): siRNA sense strand
agggauuuaugaaugcaaa

SEQ ID NO: 41320 - RNA, 19 nt, Homo sapiens
  misc_RNA (1)...(19): siRNA sense strand
gcggagguaagaaggauuc

SEQ ID NO: 41321 - RNA, 19 nt, Homo sapiens
  misc_RNA (1)...(19): siRNA sense strand
aagaaggauuccauuacgu

SEQ ID NO: 41322 - RNA, 19 nt, Homo sapiens
  misc_RNA (1)...(19): siRNA sense strand
ccaagucuuuugaccagaa

SEQ ID NO: 41323 - RNA, 19 nt, Homo sapiens
  misc_RNA (1)...(19): siRNA sense strand
gaagagcucacggcuuuug

SEQ ID NO: 41324 - RNA, 19 nt, Homo sapiens
  misc_RNA (1)...(19): siRNA sense strand
gggcagaccaagcugaaac

SEQ ID NO: 41325 - RNA, 19 nt, Homo sapiens
  misc_RNA (1)...(19): siRNA sense strand
guucaaggaccacguagac

SEQ ID NO: 41326 - RNA, 19 nt, Homo sapiens
  misc_RNA (1)...(19): siRNA sense strand
gaacaacucuuccaaugua

SEQ ID NO: 41327 - RNA, 19 nt, Homo sapiens
  misc_RNA (1)...(19): siRNA sense strand
ggacauaacucacgccuuu

SEQ ID NO: 41328 - RNA, 19 nt, Homo sapiens
  misc_RNA (1)...(19): siRNA sense strand
gaggauauauucucacuuu

SEQ ID NO: 41329 - RNA, 19 nt, Homo sapiens
  misc_RNA (1)...(19): siRNA sense strand
aaacaggccuggcuuauaa

SEQ ID NO: 41330 - RNA, 19 nt, Homo sapiens
  misc_RNA (1)...(19): siRNA sense strand
ugacagagauugagaacua

SEQ ID NO: 41331 - RNA, 19 nt, Homo sapiens
  misc_RNA (1)...(19): siRNA sense strand
caugaaagcugcaaagauu

SEQ ID NO: 41332 - RNA, 19 nt, Homo sapiens
  misc_RNA (1)...(19): siRNA sense strand
ccagagguuucuuuaauua

SEQ ID NO: 41333 - RNA, 19 nt, Homo sapiens
  misc_RNA (1)...(19): siRNA sense strand
ccaccugucuuacuaguua

SEQ ID NO: 41334 - RNA, 19 nt, Homo sapiens
  misc_RNA (1)...(19): siRNA sense strand
agacaaugcucuggaauua

SEQ ID NO: 41335 - RNA, 19 nt, Homo sapiens
  misc_RNA (1)...(19): siRNA sense strand
gaggaaagcucccuugaca

SEQ ID NO: 41336 - RNA, 19 nt, Homo sapiens
  misc_RNA (1)...(19): siRNA sense strand
gaagccagcacucaauuua

SEQ ID NO: 41337 - RNA, 19 nt, Homo sapiens
  misc_RNA (1)...(19): siRNA sense strand
gggauucgcugaaacugua

SEQ ID NO: 41338 - RNA, 19 nt, Homo sapiens
  misc_RNA (1)...(19): siRNA sense strand
gcaaacuucuucauuggaa

SEQ ID NO: 41339 - RNA, 19 nt, Homo sapiens
  misc_RNA (1)...(19): siRNA sense strand
gaaacuccguggaaaauua

SEQ ID NO: 41340 - RNA, 19 nt, Homo sapiens
  misc_RNA (1)...(19): siRNA sense strand
gggaugaacugcaaugguu

SEQ ID NO: 41341 - RNA, 19 nt, Homo sapiens
  misc_RNA (1)...(19): siRNA sense strand
accaaucgcuuucaaguua

SEQ ID NO: 41342 - RNA, 19 nt, Homo sapiens
  misc_RNA (1)...(19): siRNA sense strand
gaaccucccaccugucuua

SEQ ID NO: 41343 - RNA, 19 nt, Homo sapiens
  misc_RNA (1)...(19): siRNA sense strand
gccauggcauuuauucuua

SEQ ID NO: 41344 - RNA, 19 nt, Homo sapiens
  misc_RNA (1)...(19): siRNA sense strand
gaacuacgugggaaucaua

SEQ ID NO: 41345 - RNA, 19 nt, Homo sapiens
  misc_RNA (1)...(19): siRNA sense strand
aaagagagcuggaaagucu

SEQ ID NO: 41346 - RNA, 19 nt, Homo sapiens
  misc_RNA (1)...(19): siRNA sense strand
gcuggcaaguugaacauua

SEQ ID NO: 41347 - RNA, 19 nt, Homo sapiens
  misc_RNA (1)...(19): siRNA sense strand
ggaaagcucccuugacaga

SEQ ID NO: 41348 - RNA, 19 nt, Homo sapiens
  misc_RNA (1)...(19): siRNA sense strand
ggaauuagagagauuagaa

SEQ ID NO: 41349 - RNA, 19 nt, Homo sapiens
  misc_RNA (1)...(19): siRNA sense strand
gcaauggcuucccuucuga

SEQ ID NO: 41350 - RNA, 19 nt, Homo sapiens
  misc_RNA (1)...(19): siRNA sense strand
uaacaacugcugagaaauu

SEQ ID NO: 41351 - RNA, 19 nt, Homo sapiens
  misc_RNA (1)...(19): siRNA sense strand
ggugaaaggugugcuggua

SEQ ID NO: 41352 - RNA, 19 nt, Homo sapiens
  misc_RNA (1)...(19): siRNA sense strand
ggagugcuaugacaauuuc

SEQ ID NO: 41353 - RNA, 19 nt, Homo sapiens
  misc_RNA (1)...(19): siRNA sense strand
ggaauuggucuuggaguua

SEQ ID NO: 41354 - RNA, 19 nt, Homo sapiens
  misc_RNA (1)...(19): siRNA sense strand
gaacugucauuccauccaa

SEQ ID NO: 41355 - RNA, 19 nt, Homo sapiens
  misc_RNA (1)...(19): siRNA sense strand
ucaccuaugucauugaauu

SEQ ID NO: 41356 - RNA, 19 nt, Homo sapiens
  misc_RNA (1)...(19): siRNA sense strand
cuacaaagcccugcaguuu

SEQ ID NO: 41357 - RNA, 19 nt, Homo sapiens
  misc_RNA (1)...(19): siRNA sense strand
gcaaguugaacauuacuaa

SEQ ID NO: 41358 - RNA, 19 nt, Homo sapiens
  misc_RNA (1)...(19): siRNA sense strand
caucugcugugaagucuuu

SEQ ID NO: 41359 - RNA, 19 nt, Homo sapiens
  misc_RNA (1)...(19): siRNA sense strand
gauggaggguuaacacuuc

SEQ ID NO: 41360 - RNA, 19 nt, Homo sapiens
  misc_RNA (1)...(19): siRNA sense strand
ggaagcgacuaucaaagau

SEQ ID NO: 41361 - RNA, 19 nt, Homo sapiens
  misc_RNA (1)...(19): siRNA sense strand
gaauuggucuuggaguuau

SEQ ID NO: 41362 - RNA, 19 nt, Homo sapiens
  misc_RNA (1)...(19): siRNA sense strand
guauauggcuugguuggaa

SEQ ID NO: 41363 - RNA, 19 nt, Homo sapiens
  misc_RNA (1)...(19): siRNA sense strand
gcaagaaagggauccauau

SEQ ID NO: 41364 - RNA, 19 nt, Homo sapiens
  misc_RNA (1)...(19): siRNA sense strand
ugaaagcugcaaagauuua

SEQ ID NO: 41365 - RNA, 19 nt, Homo sapiens
  misc_RNA (1)...(19): siRNA sense strand
guccagagguuucuuuaau

SEQ ID NO: 41366 - RNA, 19 nt, Homo sapiens
  misc_RNA (1)...(19): siRNA sense strand
uaacgacaaucacagguau

SEQ ID NO: 41367 - RNA, 19 nt, Homo sapiens
  misc_RNA (1)...(19): siRNA sense strand
gaaccaugcuggccauuuu

SEQ ID NO: 41368 - RNA, 19 nt, Homo sapiens
  misc_RNA (1)...(19): siRNA sense strand
gggcagcugucaucaccua

SEQ ID NO: 41369 - RNA, 19 nt, Homo sapiens
  misc_RNA (1)...(19): siRNA sense strand
guaagaagccagaugugaa

SEQ ID NO: 41370 - RNA, 19 nt, Homo sapiens
  misc_RNA (1)...(19): siRNA sense strand
ggaugccguucccaagaua

SEQ ID NO: 41371 - RNA, 19 nt, Homo sapiens
  misc_RNA (1)...(19): siRNA sense strand
gcuaugacuucucaagaug

SEQ ID NO: 41372 - RNA, 19 nt, Homo sapiens
  misc_RNA (1)...(19): siRNA sense strand
ccaaugacauccggauuau

SEQ ID NO: 41373 - RNA, 19 nt, Homo sapiens
  misc_RNA (1)...(19): siRNA sense strand
cgaguucggugggucaaua

SEQ ID NO: 41374 - RNA, 19 nt, Homo sapiens
  misc_RNA (1)...(19): siRNA sense strand
gcaaggacaacaucuacaa

SEQ ID NO: 41375 - RNA, 19 nt, Homo sapiens
  misc_RNA (1)...(19): siRNA sense strand
ucaaagauaaugaguguga

SEQ ID NO: 41376 - RNA, 19 nt, Homo sapiens
  misc_RNA (1)...(19): siRNA sense strand
gcaagaggaauuagagaga

SEQ ID NO: 41377 - RNA, 19 nt, Homo sapiens
  misc_RNA (1)...(19): siRNA sense strand
uaaggaagaugaucaagcu

SEQ ID NO: 41378 - RNA, 19 nt, Homo sapiens
  misc_RNA (1)...(19): siRNA sense strand
gguuggaaauccucacaaa

SEQ ID NO: 41379 - RNA, 19 nt, Homo sapiens
  misc_RNA (1)...(19): siRNA sense strand
uuuaacaacugcugagaaa

SEQ ID NO: 41380 - RNA, 19 nt, Homo sapiens
  misc_RNA (1)...(19): siRNA sense strand
caaccgcauugaagaagaa

SEQ ID NO: 41381 - RNA, 19 nt, Homo sapiens
  misc_RNA (1)...(19): siRNA sense strand
caaacacucuggugauugg

SEQ ID NO: 41382 - RNA, 19 nt, Homo sapiens
  misc_RNA (1)...(19): siRNA sense strand
ccacacaggcucuuuccua

SEQ ID NO: 41383 - RNA, 19 nt, Homo sapiens
  misc_RNA (1)...(19): siRNA sense strand
gcaucaauauuugcagaaa

SEQ ID NO: 41384 - RNA, 19 nt, Homo sapiens
  misc_RNA (1)...(19): siRNA sense strand
ggcaaaggcccaagucauu

SEQ ID NO: 41385 - RNA, 19 nt, Homo sapiens
  misc_RNA (1)...(19): siRNA sense strand
ggagagugauucgaugaug

SEQ ID NO: 41386 - RNA, 19 nt, Homo sapiens
  misc_RNA (1)...(19): siRNA sense strand
aacaacugcugagaaauua

SEQ ID NO: 41387 - RNA, 19 nt, Homo sapiens
  misc_RNA (1)...(19): siRNA sense strand
caaguuagugucauaaaug

SEQ ID NO: 41388 - RNA, 19 nt, Homo sapiens
  misc_RNA (1)...(19): siRNA sense strand
gagcaacucgcaaagaaug

SEQ ID NO: 41389 - RNA, 19 nt, Homo sapiens
  misc_RNA (1)...(19): siRNA sense strand
gauguuuggugguuguuug

SEQ ID NO: 41390 - RNA, 19 nt, Homo sapiens
  misc_RNA (1)...(19): siRNA sense strand
ucaauaggccugaucuuug

SEQ ID NO: 41391 - RNA, 19 nt, Homo sapiens
  misc_RNA (1)...(19): siRNA sense strand
ggaaucaggagugcuauga

SEQ ID NO: 41392 - RNA, 19 nt, Homo sapiens
  misc_RNA (1)...(19): siRNA sense strand
caacucuuccaauguauuu

SEQ ID NO: 41393 - RNA, 19 nt, Homo sapiens
  misc_RNA (1)...(19): siRNA sense strand
guauggaauuuacaacaug

SEQ ID NO: 41394 - RNA, 19 nt, Homo sapiens
  misc_RNA (1)...(19): siRNA sense strand
uaccaagcaucaauauuug

SEQ ID NO: 41395 - RNA, 19 nt, Homo sapiens
  misc_RNA (1)...(19): siRNA sense strand
uaagaugcaugcugaacau

SEQ ID NO: 41396 - RNA, 19 nt, Homo sapiens
  misc_RNA (1)...(19): siRNA sense strand
ugggauaccuggagaugaa

SEQ ID NO: 41397 - RNA, 19 nt, Homo sapiens
  misc_RNA (1)...(19): siRNA sense strand
ggccucauaugcacuuauu

SEQ ID NO: 41398 - RNA, 19 nt, Homo sapiens
  misc_RNA (1)...(19): siRNA sense strand
uggaaauccucacaaagaa

SEQ ID NO: 41399 - RNA, 19 nt, Homo sapiens
  misc_RNA (1)...(19): siRNA sense strand
auacugacccaccacauua

SEQ ID NO: 41400 - RNA, 19 nt, Homo sapiens
  misc_RNA (1)...(19): siRNA sense strand
ucgacugaaugaacucuua

SEQ ID NO: 41401 - RNA, 19 nt, Homo sapiens
  misc_RNA (1)...(19): siRNA sense strand
caacugcugagaaauuaaa

SEQ ID NO: 41402 - RNA, 19 nt, Homo sapiens
  misc_RNA (1)...(19): siRNA sense strand
ggaaagacuguaaauuaag

SEQ ID NO: 41403 - RNA, 19 nt, Homo sapiens
  misc_RNA (1)...(19): siRNA sense strand
ggaagccagcacucaauuu

SEQ ID NO: 41404 - RNA, 19 nt, Homo sapiens
  misc_RNA (1)...(19): siRNA sense strand
gcagucauguuugucauca

SEQ ID NO: 41405 - RNA, 19 nt, Homo sapiens
  misc_RNA (1)...(19): siRNA sense strand
caucaccuaugucauugaa

SEQ ID NO: 41406 - RNA, 19 nt, Homo sapiens
  misc_RNA (1)...(19): siRNA sense strand
aagagaugauugaaccaua

SEQ ID NO: 41407 - RNA, 19 nt, Homo sapiens
  misc_RNA (1)...(19): siRNA sense strand
cugagcaaauuuaggauaa

SEQ ID NO: 41408 - RNA, 19 nt, Homo sapiens
  misc_RNA (1)...(19): siRNA sense strand
ggaggguuaacacuucuua

SEQ ID NO: 41409 - RNA, 19 nt, Homo sapiens
  misc_RNA (1)...(19): siRNA sense strand
cugaacaacucuuccaaug

SEQ ID NO: 41410 - RNA, 19 nt, Homo sapiens
  misc_RNA (1)...(19): siRNA sense strand
ggaugaagcucagaaaaga

SEQ ID NO: 41411 - RNA, 19 nt, Homo sapiens
  misc_RNA (1)...(19): siRNA sense strand
ugacaucucucagguucuu

SEQ ID NO: 41412 - RNA, 19 nt, Homo sapiens
  misc_RNA (1)...(19): siRNA sense strand
uaggaagaaugaaaccaaa

SEQ ID NO: 41413 - RNA, 19 nt, Homo sapiens
  misc_RNA (1)...(19): siRNA sense strand
ccucauaugcacuuauuaa

SEQ ID NO: 41414 - RNA, 19 nt, Homo sapiens
  misc_RNA (1)...(19): siRNA sense strand
caauaggccugaucuuugc

SEQ ID NO: 41415 - RNA, 19 nt, Homo sapiens
  misc_RNA (1)...(19): siRNA sense strand
aaacaaagagagcuggaaa

SEQ ID NO: 41416 - RNA, 19 nt, Homo sapiens
  misc_RNA (1)...(19): siRNA sense strand
gggaagaucaaccgcauug

SEQ ID NO: 41417 - RNA, 19 nt, Homo sapiens
  misc_RNA (1)...(19): siRNA sense strand
caauugauguuuggugguu

SEQ ID NO: 41418 - RNA, 19 nt, Homo sapiens
  misc_RNA (1)...(19): siRNA sense strand
ccaaggauuugacaucucu

SEQ ID NO: 41419 - RNA, 19 nt, Homo sapiens
  misc_RNA (1)...(19): siRNA sense strand
gucauugaauucuuccuuu

SEQ ID NO: 41420 - RNA, 19 nt, Homo sapiens
  misc_RNA (1)...(19): siRNA sense strand
gaauuucaguagcuggaau

SEQ ID NO: 41421 - RNA, 19 nt, Homo sapiens
  misc_RNA (1)...(19): siRNA sense strand
gaaagcugcaaagauuuaa

SEQ ID NO: 41422 - RNA, 19 nt, Homo sapiens
  misc_RNA (1)...(19): siRNA sense strand
aaagauggcagcauuaaca

SEQ ID NO: 41423 - RNA, 19 nt, Homo sapiens
  misc_RNA (1)...(19): siRNA sense strand
agacucagaaucagcuuua

SEQ ID NO: 41424 - RNA, 19 nt, Homo sapiens
  misc_RNA (1)...(19): siRNA sense strand
gaaugaaaccaaacacucu

SEQ ID NO: 41425 - RNA, 19 nt, Homo sapiens
  misc_RNA (1)...(19): siRNA sense strand
ggaagaaugaaaccaaaca

SEQ ID NO: 41426 - RNA, 19 nt, Homo sapiens
  misc_RNA (1)...(19): siRNA sense strand
gcagaaagucucuauaauu

SEQ ID NO: 41427 - RNA, 19 nt, Homo sapiens
  misc_RNA (1)...(19): siRNA sense strand
cagaaagucucuauaauuc

SEQ ID NO: 41428 - RNA, 19 nt, Homo sapiens
  misc_RNA (1)...(19): siRNA sense strand
gagcagaaagucucuauaa

SEQ ID NO: 41429 - RNA, 19 nt, Homo sapiens
  misc_RNA (1)...(19): siRNA sense strand
gcauguggcucagcaauuu

SEQ ID NO: 41430 - RNA, 19 nt, Homo sapiens
  misc_RNA (1)...(19): siRNA sense strand
gaaaagcuaucaacaacua

SEQ ID NO: 41431 - RNA, 19 nt, Homo sapiens
  misc_RNA (1)...(19): siRNA sense strand
ccagauaccuuuacaucaa

SEQ ID NO: 41432 - RNA, 19 nt, Homo sapiens
  misc_RNA (1)...(19): siRNA sense strand
uagcaaacauucugucauu

SEQ ID NO: 41433 - RNA, 19 nt, Homo sapiens
  misc_RNA (1)...(19): siRNA sense strand
ggacuugugcugcugaaua

SEQ ID NO: 41434 - RNA, 19 nt, Homo sapiens
  misc_RNA (1)...(19): siRNA sense strand
gaugaugucaccaaagaua

SEQ ID NO: 41435 - RNA, 19 nt, Homo sapiens
  misc_RNA (1)...(19): siRNA sense strand
ggacuucuguggaccuuau

SEQ ID NO: 41436 - RNA, 19 nt, Homo sapiens
  misc_RNA (1)...(19): siRNA sense strand
gaaagucucuauaauucag

SEQ ID NO: 41437 - RNA, 19 nt, Homo sapiens
  misc_RNA (1)...(19): siRNA sense strand
gacuugugcugcugaauaa

SEQ ID NO: 41438 - RNA, 19 nt, Homo sapiens
  misc_RNA (1)...(19): siRNA sense strand
cagaugaacugcccacaau

SEQ ID NO: 41439 - RNA, 19 nt, Homo sapiens
  misc_RNA (1)...(19): siRNA sense strand
ggacacacuuggaagaauc

SEQ ID NO: 41440 - RNA, 19 nt, Homo sapiens
  misc_RNA (1)...(19): siRNA sense strand
uaauucagcucuucaccaa

SEQ ID NO: 41441 - RNA, 19 nt, Homo sapiens
  misc_RNA (1)...(19): siRNA sense strand
gagaagaagcaucgaguga

SEQ ID NO: 41442 - RNA, 19 nt, Homo sapiens
  misc_RNA (1)...(19): siRNA sense strand
gccaaaagcugcuguagaa

SEQ ID NO: 41443 - RNA, 19 nt, Homo sapiens
  misc_RNA (1)...(19): siRNA sense strand
ugaauaaguucucuuggau

SEQ ID NO: 41444 - RNA, 19 nt, Homo sapiens
  misc_RNA (1)...(19): siRNA sense strand
caaguuagaugaggaaguc

SEQ ID NO: 41445 - RNA, 19 nt, Homo sapiens
  misc_RNA (1)...(19): siRNA sense strand
aauaaguucucuuggauga

SEQ ID NO: 41446 - RNA, 19 nt, Homo sapiens
  misc_RNA (1)...(19): siRNA sense strand
gggaccaucucauauacuu

SEQ ID NO: 41447 - RNA, 19 nt, Homo sapiens
  misc_RNA (1)...(19): siRNA sense strand
aaucaaagccauguuagua

SEQ ID NO: 41448 - RNA, 19 nt, Homo sapiens
  misc_RNA (1)...(19): siRNA sense strand
ggaaugagugggauguuug

SEQ ID NO: 41449 - RNA, 19 nt, Homo sapiens
  misc_RNA (1)...(19): siRNA sense strand
gcaaacauucugucauuag

SEQ ID NO: 41450 - RNA, 19 nt, Homo sapiens
  misc_RNA (1)...(19): siRNA sense strand
ugagugggauguuuguuug

SEQ ID NO: 41451 - RNA, 19 nt, Homo sapiens
  misc_RNA (1)...(19): siRNA sense strand
caaacauucugucauuagu

SEQ ID NO: 41452 - RNA, 19 nt, Homo sapiens
  misc_RNA (1)...(19): siRNA sense strand
ucacugcugucucuguauu

SEQ ID NO: 41453 - RNA, 19 nt, Homo sapiens
  misc_RNA (1)...(19): siRNA sense strand
gaugucaccaaagauauua

SEQ ID NO: 41454 - RNA, 19 nt, Homo sapiens
  misc_RNA (1)...(19): siRNA sense strand
aaacaaagcuugaaaagac

SEQ ID NO: 41455 - RNA, 19 nt, Homo sapiens
  misc_RNA (1)...(19): siRNA sense strand
uguggcagcugcucaacua

SEQ ID NO: 41456 - RNA, 19 nt, Homo sapiens
  misc_RNA (1)...(19): siRNA sense strand
gacguucucucuuucuaau

SEQ ID NO: 41457 - RNA, 19 nt, Homo sapiens
  misc_RNA (1)...(19): siRNA sense strand
uuugucagcuucuuugaaa

SEQ ID NO: 41458 - RNA, 19 nt, Homo sapiens
  misc_RNA (1)...(19): siRNA sense strand
gaccaucucauauacuuau

SEQ ID NO: 41459 - RNA, 19 nt, Homo sapiens
  misc_RNA (1)...(19): siRNA sense strand
ggacuauauugugggcuaa

SEQ ID NO: 41460 - RNA, 19 nt, Homo sapiens
  misc_RNA (1)...(19): siRNA sense strand
uaucaacaguacagaugaa

SEQ ID NO: 41461 - RNA, 19 nt, Homo sapiens
  misc_RNA (1)...(19): siRNA sense strand
ugaggaaauugcugcagaa

SEQ ID NO: 41462 - RNA, 19 nt, Homo sapiens
  misc_RNA (1)...(19): siRNA sense strand
cuguggaccuuauguguuu

SEQ ID NO: 41463 - RNA, 19 nt, Homo sapiens
  misc_RNA (1)...(19): siRNA sense strand
guacauugcggacuucugu

SEQ ID NO: 41464 - RNA, 19 nt, Homo sapiens
  misc_RNA (1)...(19): siRNA sense strand
gauaugacauuggugugau

SEQ ID NO: 41465 - RNA, 19 nt, Homo sapiens
  misc_RNA (1)...(19): siRNA sense strand
aaauugggaccaucucaua

SEQ ID NO: 41466 - RNA, 19 nt, Homo sapiens
  misc_RNA (1)...(19): siRNA sense strand
aagaaucaaagccauguua

SEQ ID NO: 41467 - RNA, 19 nt, Homo sapiens
  misc_RNA (1)...(19): siRNA sense strand
cagaggauaugaugauguc

SEQ ID NO: 41468 - RNA, 19 nt, Homo sapiens
  misc_RNA (1)...(19): siRNA sense strand
cugaauaaguucucuugga

SEQ ID NO: 41469 - RNA, 19 nt, Homo sapiens
  misc_RNA (1)...(19): siRNA sense strand
gcgacguucucucuuucua

SEQ ID NO: 41470 - RNA, 19 nt, Homo sapiens
  misc_RNA (1)...(19): siRNA sense strand
auucagcucuucaccaauu

SEQ ID NO: 41471 - RNA, 19 nt, Homo sapiens
  misc_RNA (1)...(19): siRNA sense strand
cauacucaaugaacccaaa

SEQ ID NO: 41472 - RNA, 19 nt, Homo sapiens
  misc_RNA (1)...(19): siRNA sense strand
gauaugaugaugucaccaa

SEQ ID NO: 41473 - RNA, 19 nt, Homo sapiens
  misc_RNA (1)...(19): siRNA sense strand
uaaguucucuuggaugagu

SEQ ID NO: 41474 - RNA, 19 nt, Homo sapiens
  misc_RNA (1)...(19): siRNA sense strand
gaccacguccugcugcuuu

SEQ ID NO: 41475 - RNA, 19 nt, Homo sapiens
  misc_RNA (1)...(19): siRNA sense strand
ggauaugacauugguguga

SEQ ID NO: 41476 - RNA, 19 nt, Homo sapiens
  misc_RNA (1)...(19): siRNA sense strand
uggaaugagugggauguuu

SEQ ID NO: 41477 - RNA, 19 nt, Homo sapiens
  misc_RNA (1)...(19): siRNA sense strand
ugaaaagacucagaggaua

SEQ ID NO: 41478 - RNA, 19 nt, Homo sapiens
  misc_RNA (1)...(19): siRNA sense strand
ggaccaucucauauacuua

SEQ ID NO: 41479 - RNA, 19 nt, Homo sapiens
  misc_RNA (1)...(19): siRNA sense strand
ggaagaaucaaagccaugu

SEQ ID NO: 41480 - RNA, 19 nt, Homo sapiens
  misc_RNA (1)...(19): siRNA sense strand
cauuguagcucuguguuuc

SEQ ID NO: 41481 - RNA, 19 nt, Homo sapiens
  misc_RNA (1)...(19): siRNA sense strand
cguucucucuuucuaauug

SEQ ID NO: 41482 - RNA, 19 nt, Homo sapiens
  misc_RNA (1)...(19): siRNA sense strand
gggcgacguucucucuuuc

SEQ ID NO: 41483 - RNA, 19 nt, Homo sapiens
  misc_RNA (1)...(19): siRNA sense strand
aacauucugucauuaguug

SEQ ID NO: 41484 - RNA, 19 nt, Homo sapiens
  misc_RNA (1)...(19): siRNA sense strand
cauuggaguuggcgcugua

SEQ ID NO: 41485 - RNA, 19 nt, Homo sapiens
  misc_RNA (1)...(19): siRNA sense strand
guauaucggugaaauugcu

SEQ ID NO: 41486 - RNA, 19 nt, Homo sapiens
  misc_RNA (1)...(19): siRNA sense strand
gaacugcccacaaucucau

SEQ ID NO: 41487 - RNA, 19 nt, Homo sapiens
  misc_RNA (1)...(19): siRNA sense strand
uaaaguuccagaaaccaaa

SEQ ID NO: 41488 - RNA, 19 nt, Homo sapiens
  misc_RNA (1)...(19): siRNA sense strand
gaaaagacucagaggauau

SEQ ID NO: 41489 - RNA, 19 nt, Homo sapiens
  misc_RNA (1)...(19): siRNA sense strand
agaagcauaucaggacuau

SEQ ID NO: 41490 - RNA, 19 nt, Homo sapiens
  misc_RNA (1)...(19): siRNA sense strand
ggcagcugcucaacuaauc

SEQ ID NO: 41491 - RNA, 19 nt, Homo sapiens
  misc_RNA (1)...(19): siRNA sense strand
ccucaacagguaauaauau

SEQ ID NO: 41492 - RNA, 19 nt, Homo sapiens
  misc_RNA (1)...(19): siRNA sense strand
ggaguuggcgcuguaaaca

SEQ ID NO: 41493 - RNA, 19 nt, Homo sapiens
  misc_RNA (1)...(19): siRNA sense strand
augaugaugucaccaaaga

SEQ ID NO: 41494 - RNA, 19 nt, Homo sapiens
  misc_RNA (1)...(19): siRNA sense strand
gcaaaacaaagcuugaaaa

SEQ ID NO: 41495 - RNA, 19 nt, Homo sapiens
  misc_RNA (1)...(19): siRNA sense strand
ucagauuauuggucuugaa

SEQ ID NO: 41496 - RNA, 19 nt, Homo sapiens
  misc_RNA (1)...(19): siRNA sense strand
aguuggagcucucuugaug

SEQ ID NO: 41497 - RNA, 19 nt, Homo sapiens
  misc_RNA (1)...(19): siRNA sense strand
gaaucaaagccauguuagu

SEQ ID NO: 41498 - RNA, 19 nt, Homo sapiens
  misc_RNA (1)...(19): siRNA sense strand
gggacacacuuggaagaau

SEQ ID NO: 41499 - RNA, 19 nt, Homo sapiens
  misc_RNA (1)...(19): siRNA sense strand
ccuaggagcuacagagacu

SEQ ID NO: 41500 - RNA, 19 nt, Homo sapiens
  misc_RNA (1)...(19): siRNA sense strand
guucaugguggcugaguuu

SEQ ID NO: 41501 - RNA, 19 nt, Homo sapiens
  misc_RNA (1)...(19): siRNA sense strand
gagaaaagaaagagaagaa

SEQ ID NO: 41502 - RNA, 19 nt, Homo sapiens
  misc_RNA (1)...(19): siRNA sense strand
uuucaggccugguuccuau

SEQ ID NO: 41503 - RNA, 19 nt, Homo sapiens
  misc_RNA (1)...(19): siRNA sense strand
gaugaacugcccacaaucu

SEQ ID NO: 41504 - RNA, 19 nt, Homo sapiens
  misc_RNA (1)...(19): siRNA sense strand
gagccauccuucagucucu

SEQ ID NO: 41505 - RNA, 19 nt, Homo sapiens
  misc_RNA (1)...(19): siRNA sense strand
ucucuuggaugaguuaugu

SEQ ID NO: 41506 - RNA, 19 nt, Homo sapiens
  misc_RNA (1)...(19): siRNA sense strand
gaagaaucaaagccauguu

SEQ ID NO: 41507 - RNA, 19 nt, Homo sapiens
  misc_RNA (1)...(19): siRNA sense strand
gaaaccaaaggaaagucuu

SEQ ID NO: 41508 - RNA, 19 nt, Homo sapiens
  misc_RNA (1)...(19): siRNA sense strand
agcaaacauucugucauua

SEQ ID NO: 41509 - RNA, 19 nt, Homo sapiens
  misc_RNA (1)...(19): siRNA sense strand
agaaaugaaauuccuagga

SEQ ID NO: 41510 - RNA, 19 nt, Homo sapiens
  misc_RNA (1)...(19): siRNA sense strand
cacaaucucauacucaaug

SEQ ID NO: 41511 - RNA, 19 nt, Homo sapiens
  misc_RNA (1)...(19): siRNA sense strand
gaaugagugggauguuugu

SEQ ID NO: 41512 - RNA, 19 nt, Homo sapiens
  misc_RNA (1)...(19): siRNA sense strand
cgacguucucucuuucuaa

SEQ ID NO: 41513 - RNA, 19 nt, Homo sapiens
  misc_RNA (1)...(19): siRNA sense strand
gagaaggcagggcgacguu

SEQ ID NO: 41514 - RNA, 19 nt, Homo sapiens
  misc_RNA (1)...(19): siRNA sense strand
uuucacugcugucucugua

SEQ ID NO: 41515 - RNA, 19 nt, Homo sapiens
  misc_RNA (1)...(19): siRNA sense strand
cagauaccuuuacaucaag

SEQ ID NO: 41516 - RNA, 19 nt, Homo sapiens
  misc_RNA (1)...(19): siRNA sense strand
caacagguaauaauaucuc

SEQ ID NO: 41517 - RNA, 19 nt, Homo sapiens
  misc_RNA (1)...(19): siRNA sense strand
ugucagcuucuuugaaauu

SEQ ID NO: 41518 - RNA, 19 nt, Homo sapiens
  misc_RNA (1)...(19): siRNA sense strand
ugaguuaugugagcaugau

SEQ ID NO: 41519 - RNA, 19 nt, Homo sapiens
  misc_RNA (1)...(19): siRNA sense strand
gaucaaugcaccucaacag

SEQ ID NO: 41520 - RNA, 19 nt, Homo sapiens
  misc_RNA (1)...(19): siRNA sense strand
gcagggcgacguucucucu

SEQ ID NO: 41521 - RNA, 19 nt, Homo sapiens
  misc_RNA (1)...(19): siRNA sense strand
gcuaauuucaggccugguu

SEQ ID NO: 41522 - RNA, 19 nt, Homo sapiens
  misc_RNA (1)...(19): siRNA sense strand
gaugaggaagucaaagcaa

SEQ ID NO: 41523 - RNA, 19 nt, Homo sapiens
  misc_RNA (1)...(19): siRNA sense strand
aaaagcugcuguagaaaug

SEQ ID NO: 41524 - RNA, 19 nt, Homo sapiens
  misc_RNA (1)...(19): siRNA sense strand
guuaucaacaguacagaug

SEQ ID NO: 41525 - RNA, 19 nt, Homo sapiens
  misc_RNA (1)...(19): siRNA sense strand
augaggaagucaaagcaaa

SEQ ID NO: 41526 - RNA, 19 nt, Homo sapiens
  misc_RNA (1)...(19): siRNA sense strand
gaaggaaggugcucacauu

SEQ ID NO: 41527 - RNA, 19 nt, Homo sapiens
  misc_RNA (1)...(19): siRNA sense strand
gcucacauuccuuaaauua

SEQ ID NO: 41528 - RNA, 19 nt, Homo sapiens
  misc_RNA (1)...(19): siRNA sense strand
gagcgaugauucugacauu

SEQ ID NO: 41529 - RNA, 19 nt, Homo sapiens
  misc_RNA (1)...(19): siRNA sense strand
gaugauacagcacugauaa

SEQ ID NO: 41530 - RNA, 19 nt, Homo sapiens
  misc_RNA (1)...(19): siRNA sense strand
gaauacugcagcuuccuua

SEQ ID NO: 41531 - RNA, 19 nt, Homo sapiens
  misc_RNA (1)...(19): siRNA sense strand
gagagaaaccuguguugug

SEQ ID NO: 41532 - RNA, 19 nt, Homo sapiens
  misc_RNA (1)...(19): siRNA sense strand
gcuaucauacuggcuauua

SEQ ID NO: 41533 - RNA, 19 nt, Homo sapiens
  misc_RNA (1)...(19): siRNA sense strand
uaagcaugcucuaaagaau

SEQ ID NO: 41534 - RNA, 19 nt, Homo sapiens
  misc_RNA (1)...(19): siRNA sense strand
ucugugaaguagcuaauaa

SEQ ID NO: 41535 - RNA, 19 nt, Homo sapiens
  misc_RNA (1)...(19): siRNA sense strand
ggaaauagagaggagcaaa

SEQ ID NO: 41536 - RNA, 19 nt, Homo sapiens
  misc_RNA (1)...(19): siRNA sense strand
gaaaaugaaagccaaguuu

SEQ ID NO: 41537 - RNA, 19 nt, Homo sapiens
  misc_RNA (1)...(19): siRNA sense strand
gugcucacauuccuuaaau

SEQ ID NO: 41538 - RNA, 19 nt, Homo sapiens
  misc_RNA (1)...(19): siRNA sense strand
ucagaagacgguugcauuu

SEQ ID NO: 41539 - RNA, 19 nt, Homo sapiens
  misc_RNA (1)...(19): siRNA sense strand
cagaagacgguugcauuua

SEQ ID NO: 41540 - RNA, 19 nt, Homo sapiens
  misc_RNA (1)...(19): siRNA sense strand
gcacaggccagagcgauga

SEQ ID NO: 41541 - RNA, 19 nt, Homo sapiens
  misc_RNA (1)...(19): siRNA sense strand
gcugaugcuuugggaagua

SEQ ID NO: 41542 - RNA, 19 nt, Homo sapiens
  misc_RNA (1)...(19): siRNA sense strand
ccaaaucugcuccauggaa

SEQ ID NO: 41543 - RNA, 19 nt, Homo sapiens
  misc_RNA (1)...(19): siRNA sense strand
ggaugauacagcacugaua

SEQ ID NO: 41544 - RNA, 19 nt, Homo sapiens
  misc_RNA (1)...(19): siRNA sense strand
gauaacaucaagcccaaau

SEQ ID NO: 41545 - RNA, 19 nt, Homo sapiens
  misc_RNA (1)...(19): siRNA sense strand
agaagacgguugcauuuac

SEQ ID NO: 41546 - RNA, 19 nt, Homo sapiens
  misc_RNA (1)...(19): siRNA sense strand
gcgaugauucugacauuug

SEQ ID NO: 41547 - RNA, 19 nt, Homo sapiens
  misc_RNA (1)...(19): siRNA sense strand
gguuuacacuggauaugga

SEQ ID NO: 41548 - RNA, 19 nt, Homo sapiens
  misc_RNA (1)...(19): siRNA sense strand
gcagcuuccuuacaacagu

SEQ ID NO: 41549 - RNA, 19 nt, Homo sapiens
  misc_RNA (1)...(19): siRNA sense strand
ugaugaugcugaugcuuug

SEQ ID NO: 41550 - RNA, 19 nt, Homo sapiens
  misc_RNA (1)...(19): siRNA sense strand
gaaaaccugcuaagaagaa

SEQ ID NO: 41551 - RNA, 19 nt, Homo sapiens
  misc_RNA (1)...(19): siRNA sense strand
aaacuucggguaaaccaaa

SEQ ID NO: 41552 - RNA, 19 nt, Homo sapiens
  misc_RNA (1)...(19): siRNA sense strand
aaagccaaguuucaacaga

SEQ ID NO: 41553 - RNA, 19 nt, Homo sapiens
  misc_RNA (1)...(19): siRNA sense strand
aaagaaaaccugcuaagaa

SEQ ID NO: 41554 - RNA, 19 nt, Homo sapiens
  misc_RNA (1)...(19): siRNA sense strand
ugggaaguauguuaauuuc

SEQ ID NO: 41555 - RNA, 19 nt, Homo sapiens
  misc_RNA (1)...(19): siRNA sense strand
uaacaucaagcccaaaucu

SEQ ID NO: 41556 - RNA, 19 nt, Homo sapiens
  misc_RNA (1)...(19): siRNA sense strand
uaagagagaaaccuguguu

SEQ ID NO: 41557 - RNA, 19 nt, Homo sapiens
  misc_RNA (1)...(19): siRNA sense strand
caacagaugaaagugagaa

SEQ ID NO: 41558 - RNA, 19 nt, Homo sapiens
  misc_RNA (1)...(19): siRNA sense strand
gaagacgguugcauuuacc

SEQ ID NO: 41559 - RNA, 19 nt, Homo sapiens
  misc_RNA (1)...(19): siRNA sense strand
uacacuggauauggaaaua

SEQ ID NO: 41560 - RNA, 19 nt, Homo sapiens
  misc_RNA (1)...(19): siRNA sense strand
uuaagcaugcucuaaagaa

SEQ ID NO: 41561 - RNA, 19 nt, Homo sapiens
  misc_RNA (1)...(19): siRNA sense strand
ggugacauuugugaaacuu

SEQ ID NO: 41562 - RNA, 19 nt, Homo sapiens
  misc_RNA (1)...(19): siRNA sense strand
uacugcagcuuccuuacaa

SEQ ID NO: 41563 - RNA, 19 nt, Homo sapiens
  misc_RNA (1)...(19): siRNA sense strand
ccucccauauguccagauu

SEQ ID NO: 41564 - RNA, 19 nt, Homo sapiens
  misc_RNA (1)...(19): siRNA sense strand
gaaauagagaggagcaaaa

SEQ ID NO: 41565 - RNA, 19 nt, Homo sapiens
  misc_RNA (1)...(19): siRNA sense strand
cacuggauauggaaauaga

SEQ ID NO: 41566 - RNA, 19 nt, Homo sapiens
  misc_RNA (1)...(19): siRNA sense strand
guccagauucucuugauga

SEQ ID NO: 41567 - RNA, 19 nt, Homo sapiens
  misc_RNA (1)...(19): siRNA sense strand
gucagaagacgguugcauu

SEQ ID NO: 41568 - RNA, 19 nt, Homo sapiens
  misc_RNA (1)...(19): siRNA sense strand
ucugacauuugggaugaua

SEQ ID NO: 41569 - RNA, 19 nt, Homo sapiens
  misc_RNA (1)...(19): siRNA sense strand
cgaugauucugacauuugg

SEQ ID NO: 41570 - RNA, 19 nt, Homo sapiens
  misc_RNA (1)...(19): siRNA sense strand
gaauaaaagccaaaagaag

SEQ ID NO: 41571 - RNA, 19 nt, Homo sapiens
  misc_RNA (1)...(19): siRNA sense strand
gcuuugggaaguauguuaa

SEQ ID NO: 41572 - RNA, 19 nt, Homo sapiens
  misc_RNA (1)...(19): siRNA sense strand
ucccauauguccagauucu

SEQ ID NO: 41573 - RNA, 19 nt, Homo sapiens
  misc_RNA (1)...(19): siRNA sense strand
aagccaaguuucaacagau

SEQ ID NO: 41574 - RNA, 19 nt, Homo sapiens
  misc_RNA (1)...(19): siRNA sense strand
aagaaaaccugcuaagaag

SEQ ID NO: 41575 - RNA, 19 nt, Homo sapiens
  misc_RNA (1)...(19): siRNA sense strand
gcauuuacccagcuaccau

SEQ ID NO: 41576 - RNA, 19 nt, Homo sapiens
  misc_RNA (1)...(19): siRNA sense strand
gaaacuucggguaaaccaa

SEQ ID NO: 41577 - RNA, 19 nt, Homo sapiens
  misc_RNA (1)...(19): siRNA sense strand
ggugcucacauuccuuaaa

SEQ ID NO: 41578 - RNA, 19 nt, Homo sapiens
  misc_RNA (1)...(19): siRNA sense strand
cuaucauacuggcuauuau

SEQ ID NO: 41579 - RNA, 19 nt, Homo sapiens
  misc_RNA (1)...(19): siRNA sense strand
cccaccaccucccauaugu

SEQ ID NO: 41580 - RNA, 19 nt, Homo sapiens
  misc_RNA (1)...(19): siRNA sense strand
gaaaguuggggacaaaugu

SEQ ID NO: 41581 - RNA, 19 nt, Homo sapiens
  misc_RNA (1)...(19): siRNA sense strand
aaccugcuaagaagaauaa

SEQ ID NO: 41582 - RNA, 19 nt, Homo sapiens
  misc_RNA (1)...(19): siRNA sense strand
auucugacauuugggauga

SEQ ID NO: 41583 - RNA, 19 nt, Homo sapiens
  misc_RNA (1)...(19): siRNA sense strand
uugaugaugcugaugcuuu

SEQ ID NO: 41584 - RNA, 19 nt, Homo sapiens
  misc_RNA (1)...(19): siRNA sense strand
ggaggauuccgugcuguuc

SEQ ID NO: 41585 - RNA, 19 nt, Homo sapiens
  misc_RNA (1)...(19): siRNA sense strand
caaaaucuguccgaucuac

SEQ ID NO: 41586 - RNA, 19 nt, Homo sapiens
  misc_RNA (1)...(19): siRNA sense strand
ucauuuaagcaugcucuaa

SEQ ID NO: 41587 - RNA, 19 nt, Homo sapiens
  misc_RNA (1)...(19): siRNA sense strand
aaaccugcuaagaagaaua

SEQ ID NO: 41588 - RNA, 19 nt, Homo sapiens
  misc_RNA (1)...(19): siRNA sense strand
gggaaguauguuaauuuca

SEQ ID NO: 41589 - RNA, 19 nt, Homo sapiens
  misc_RNA (1)...(19): siRNA sense strand
aaaucuguccgaucuacuu

SEQ ID NO: 41590 - RNA, 19 nt, Homo sapiens
  misc_RNA (1)...(19): siRNA sense strand
gguugcauuuacccagcua

SEQ ID NO: 41591 - RNA, 19 nt, Homo sapiens
  misc_RNA (1)...(19): siRNA sense strand
gaaggaaggugcucacauu

SEQ ID NO: 41592 - RNA, 19 nt, Homo sapiens
  misc_RNA (1)...(19): siRNA sense strand
gcucacauuccuuaaauua

SEQ ID NO: 41593 - RNA, 19 nt, Homo sapiens
  misc_RNA (1)...(19): siRNA sense strand
gagcgaugauucugacauu

SEQ ID NO: 41594 - RNA, 19 nt, Homo sapiens
  misc_RNA (1)...(19): siRNA sense strand
gaugauacagcacugauaa

SEQ ID NO: 41595 - RNA, 19 nt, Homo sapiens
  misc_RNA (1)...(19): siRNA sense strand
gaauacugcagcuuccuua

SEQ ID NO: 41596 - RNA, 19 nt, Homo sapiens
  misc_RNA (1)...(19): siRNA sense strand
gagagaaaccuguguugug

SEQ ID NO: 41597 - RNA, 19 nt, Homo sapiens
  misc_RNA (1)...(19): siRNA sense strand
gcuaucauacuggcuauua

SEQ ID NO: 41598 - RNA, 19 nt, Homo sapiens
  misc_RNA (1)...(19): siRNA sense strand
uaagcaugcucuaaagaau

SEQ ID NO: 41599 - RNA, 19 nt, Homo sapiens
  misc_RNA (1)...(19): siRNA sense strand
ucugugaaguagcuaauaa

SEQ ID NO: 41600 - RNA, 19 nt, Homo sapiens
  misc_RNA (1)...(19): siRNA sense strand
ggaaauagagaggagcaaa

SEQ ID NO: 41601 - RNA, 19 nt, Homo sapiens
  misc_RNA (1)...(19): siRNA sense strand
gaaaaugaaagccaaguuu

SEQ ID NO: 41602 - RNA, 19 nt, Homo sapiens
  misc_RNA (1)...(19): siRNA sense strand
gugcucacauuccuuaaau

SEQ ID NO: 41603 - RNA, 19 nt, Homo sapiens
  misc_RNA (1)...(19): siRNA sense strand
ucagaagacgguugcauuu

SEQ ID NO: 41604 - RNA, 19 nt, Homo sapiens
  misc_RNA (1)...(19): siRNA sense strand
cagaagacgguugcauuua

SEQ ID NO: 41605 - RNA, 19 nt, Homo sapiens
  misc_RNA (1)...(19): siRNA sense strand
gcacaggccagagcgauga

SEQ ID NO: 41606 - RNA, 19 nt, Homo sapiens
  misc_RNA (1)...(19): siRNA sense strand
gcugaugcuuugggaagua

SEQ ID NO: 41607 - RNA, 19 nt, Homo sapiens
  misc_RNA (1)...(19): siRNA sense strand
ccaaaucugcuccauggaa

SEQ ID NO: 41608 - RNA, 19 nt, Homo sapiens
  misc_RNA (1)...(19): siRNA sense strand
ggaugauacagcacugaua

SEQ ID NO: 41609 - RNA, 19 nt, Homo sapiens
  misc_RNA (1)...(19): siRNA sense strand
gauaacaucaagcccaaau

SEQ ID NO: 41610 - RNA, 19 nt, Homo sapiens
  misc_RNA (1)...(19): siRNA sense strand
agaagacgguugcauuuac

SEQ ID NO: 41611 - RNA, 19 nt, Homo sapiens
  misc_RNA (1)...(19): siRNA sense strand
gcgaugauucugacauuug

SEQ ID NO: 41612 - RNA, 19 nt, Homo sapiens
  misc_RNA (1)...(19): siRNA sense strand
gguuuacacuggauaugga

SEQ ID NO: 41613 - RNA, 19 nt, Homo sapiens
  misc_RNA (1)...(19): siRNA sense strand
gcagcuuccuuacaacagu

SEQ ID NO: 41614 - RNA, 19 nt, Homo sapiens
  misc_RNA (1)...(19): siRNA sense strand
ugaugaugcugaugcuuug

SEQ ID NO: 41615 - RNA, 19 nt, Homo sapiens
  misc_RNA (1)...(19): siRNA sense strand
gaaaaccugcuaagaagaa

SEQ ID NO: 41616 - RNA, 19 nt, Homo sapiens
  misc_RNA (1)...(19): siRNA sense strand
aaacuucggguaaaccaaa

SEQ ID NO: 41617 - RNA, 19 nt, Homo sapiens
  misc_RNA (1)...(19): siRNA sense strand
aaagccaaguuucaacaga

SEQ ID NO: 41618 - RNA, 19 nt, Homo sapiens
  misc_RNA (1)...(19): siRNA sense strand
aaagaaaaccugcuaagaa

SEQ ID NO: 41619 - RNA, 19 nt, Homo sapiens
  misc_RNA (1)...(19): siRNA sense strand
ugggaaguauguuaauuuc

SEQ ID NO: 41620 - RNA, 19 nt, Homo sapiens
  misc_RNA (1)...(19): siRNA sense strand
uaacaucaagcccaaaucu

SEQ ID NO: 41621 - RNA, 19 nt, Homo sapiens
  misc_RNA (1)...(19): siRNA sense strand
uaagagagaaaccuguguu

SEQ ID NO: 41622 - RNA, 19 nt, Homo sapiens
  misc_RNA (1)...(19): siRNA sense strand
caacagaugaaagugagaa

SEQ ID NO: 41623 - RNA, 19 nt, Homo sapiens
  misc_RNA (1)...(19): siRNA sense strand
gaagacgguugcauuuacc

SEQ ID NO: 41624 - RNA, 19 nt, Homo sapiens
  misc_RNA (1)...(19): siRNA sense strand
uacacuggauauggaaaua

SEQ ID NO: 41625 - RNA, 19 nt, Homo sapiens
  misc_RNA (1)...(19): siRNA sense strand
uuaagcaugcucuaaagaa

SEQ ID NO: 41626 - RNA, 19 nt, Homo sapiens
  misc_RNA (1)...(19): siRNA sense strand
ggugacauuugugaaacuu

SEQ ID NO: 41627 - RNA, 19 nt, Homo sapiens
  misc_RNA (1)...(19): siRNA sense strand
uacugcagcuuccuuacaa

SEQ ID NO: 41628 - RNA, 19 nt, Homo sapiens
  misc_RNA (1)...(19): siRNA sense strand
ccucccauauguccagauu

SEQ ID NO: 41629 - RNA, 19 nt, Homo sapiens
  misc_RNA (1)...(19): siRNA sense strand
gaaauagagaggagcaaaa

SEQ ID NO: 41630 - RNA, 19 nt, Homo sapiens
  misc_RNA (1)...(19): siRNA sense strand
cacuggauauggaaauaga

SEQ ID NO: 41631 - RNA, 19 nt, Homo sapiens
  misc_RNA (1)...(19): siRNA sense strand
guccagauucucuugauga

SEQ ID NO: 41632 - RNA, 19 nt, Homo sapiens
  misc_RNA (1)...(19): siRNA sense strand
gucagaagacgguugcauu

SEQ ID NO: 41633 - RNA, 19 nt, Homo sapiens
  misc_RNA (1)...(19): siRNA sense strand
ucugacauuugggaugaua

SEQ ID NO: 41634 - RNA, 19 nt, Homo sapiens
  misc_RNA (1)...(19): siRNA sense strand
cgaugauucugacauuugg

SEQ ID NO: 41635 - RNA, 19 nt, Homo sapiens
  misc_RNA (1)...(19): siRNA sense strand
gaauaaaagccaaaagaag

SEQ ID NO: 41636 - RNA, 19 nt, Homo sapiens
  misc_RNA (1)...(19): siRNA sense strand
gcuuugggaaguauguuaa

SEQ ID NO: 41637 - RNA, 19 nt, Homo sapiens
  misc_RNA (1)...(19): siRNA sense strand
ucccauauguccagauucu

SEQ ID NO: 41638 - RNA, 19 nt, Homo sapiens
  misc_RNA (1)...(19): siRNA sense strand
aagccaaguuucaacagau

SEQ ID NO: 41639 - RNA, 19 nt, Homo sapiens
  misc_RNA (1)...(19): siRNA sense strand
aagaaaaccugcuaagaag

SEQ ID NO: 41640 - RNA, 19 nt, Homo sapiens
  misc_RNA (1)...(19): siRNA sense strand
gcauuuacccagcuaccau

SEQ ID NO: 41641 - RNA, 19 nt, Homo sapiens
  misc_RNA (1)...(19): siRNA sense strand
gaaacuucggguaaaccaa

SEQ ID NO: 41642 - RNA, 19 nt, Homo sapiens
  misc_RNA (1)...(19): siRNA sense strand
ggugcucacauuccuuaaa

SEQ ID NO: 41643 - RNA, 19 nt, Homo sapiens
  misc_RNA (1)...(19): siRNA sense strand
cuaucauacuggcuauuau

SEQ ID NO: 41644 - RNA, 19 nt, Homo sapiens
  misc_RNA (1)...(19): siRNA sense strand
cccaccaccucccauaugu

SEQ ID NO: 41645 - RNA, 19 nt, Homo sapiens
  misc_RNA (1)...(19): siRNA sense strand
gaaaguuggggacaaaugu

SEQ ID NO: 41646 - RNA, 19 nt, Homo sapiens
  misc_RNA (1)...(19): siRNA sense strand
aaccugcuaagaagaauaa

SEQ ID NO: 41647 - RNA, 19 nt, Homo sapiens
  misc_RNA (1)...(19): siRNA sense strand
auucugacauuugggauga

SEQ ID NO: 41648 - RNA, 19 nt, Homo sapiens
  misc_RNA (1)...(19): siRNA sense strand
uugaugaugcugaugcuuu

SEQ ID NO: 41649 - RNA, 19 nt, Homo sapiens
  misc_RNA (1)...(19): siRNA sense strand
ggaggauuccgugcuguuc

SEQ ID NO: 41650 - RNA, 19 nt, Homo sapiens
  misc_RNA (1)...(19): siRNA sense strand
caaaaucuguccgaucuac

SEQ ID NO: 41651 - RNA, 19 nt, Homo sapiens
  misc_RNA (1)...(19): siRNA sense strand
ucauuuaagcaugcucuaa

SEQ ID NO: 41652 - RNA, 19 nt, Homo sapiens
  misc_RNA (1)...(19): siRNA sense strand
aaaccugcuaagaagaaua

SEQ ID NO: 41653 - RNA, 19 nt, Homo sapiens
  misc_RNA (1)...(19): siRNA sense strand
gggaaguauguuaauuuca

SEQ ID NO: 41654 - RNA, 19 nt, Homo sapiens
  misc_RNA (1)...(19): siRNA sense strand
aaaucuguccgaucuacuu

SEQ ID NO: 41655 - RNA, 19 nt, Homo sapiens
  misc_RNA (1)...(19): siRNA sense strand
gguugcauuuacccagcua

SEQ ID NO: 41656 - RNA, 19 nt, Homo sapiens
  misc_RNA (1)...(19): siRNA sense strand
cuacgaaccugaagccuaa

SEQ ID NO: 41657 - RNA, 19 nt, Homo sapiens
  misc_RNA (1)...(19): siRNA sense strand
ccaaagagcaagugacaaa

SEQ ID NO: 41658 - RNA, 19 nt, Homo sapiens
  misc_RNA (1)...(19): siRNA sense strand
ggaaggguaucaagacuac

SEQ ID NO: 41659 - RNA, 19 nt, Homo sapiens
  misc_RNA (1)...(19): siRNA sense strand
gagcaagugacaaauguug

SEQ ID NO: 41660 - RNA, 19 nt, Homo sapiens
  misc_RNA (1)...(19): siRNA sense strand
caaacaggguguggcagaa

SEQ ID NO: 41661 - RNA, 19 nt, Homo sapiens
  misc_RNA (1)...(19): siRNA sense strand
ugacagcaguagcccagaa

SEQ ID NO: 41662 - RNA, 19 nt, Homo sapiens
  misc_RNA (1)...(19): siRNA sense strand
gaccaaagagcaagugaca

SEQ ID NO: 41663 - RNA, 19 nt, Homo sapiens
  misc_RNA (1)...(19): siRNA sense strand
aagagcaagugacaaaugu

SEQ ID NO: 41664 - RNA, 19 nt, Homo sapiens
  misc_RNA (1)...(19): siRNA sense strand
ggagggagcagggagcauu

SEQ ID NO: 41665 - RNA, 19 nt, Homo sapiens
  misc_RNA (1)...(19): siRNA sense strand
gcaagugacaaauguugga

SEQ ID NO: 41666 - RNA, 19 nt, Homo sapiens
  misc_RNA (1)...(19): siRNA sense strand
uggcaacaguggcugagaa

SEQ ID NO: 41667 - RNA, 19 nt, Homo sapiens
  misc_RNA (1)...(19): siRNA sense strand
aaagagcaagugacaaaug

SEQ ID NO: 41668 - RNA, 19 nt, Homo sapiens
  misc_RNA (1)...(19): siRNA sense strand
gcagaagcagcaggaaaga

SEQ ID NO: 41669 - RNA, 19 nt, Homo sapiens
  misc_RNA (1)...(19): siRNA sense strand
caacaguggcugagaagac

SEQ ID NO: 41670 - RNA, 19 nt, Homo sapiens
  misc_RNA (1)...(19): siRNA sense strand
ggcagaagcagcaggaaag

SEQ ID NO: 41671 - RNA, 19 nt, Homo sapiens
  misc_RNA (1)...(19): siRNA sense strand
uggcugagaagaccaaaga

SEQ ID NO: 41672 - RNA, 19 nt, Homo sapiens
  misc_RNA (1)...(19): siRNA sense strand
gaagcagcaggaaagacaa

SEQ ID NO: 41673 - RNA, 19 nt, Homo sapiens
  misc_RNA (1)...(19): siRNA sense strand
ugagaagaccaaagagcaa

SEQ ID NO: 41674 - RNA, 19 nt, Homo sapiens
  misc_RNA (1)...(19): siRNA sense strand
agaagcagcaggaaagaca

SEQ ID NO: 41675 - RNA, 19 nt, Homo sapiens
  misc_RNA (1)...(19): siRNA sense strand
ucaagacuacgaaccugaa

SEQ ID NO: 41676 - RNA, 19 nt, Homo sapiens
  misc_RNA (1)...(19): siRNA sense strand
gaagaccaaagagcaagug

SEQ ID NO: 41677 - RNA, 19 nt, Homo sapiens
  misc_RNA (1)...(19): siRNA sense strand
uguggcugcugcugagaaa

SEQ ID NO: 41678 - RNA, 19 nt, Homo sapiens
  misc_RNA (1)...(19): siRNA sense strand
caaagagcaagugacaaau

SEQ ID NO: 41679 - RNA, 19 nt, Homo sapiens
  misc_RNA (1)...(19): siRNA sense strand
gagggagcagggagcauug

SEQ ID NO: 41680 - RNA, 19 nt, Homo sapiens
  misc_RNA (1)...(19): siRNA sense strand
gaggguguucucuauguag

SEQ ID NO: 41681 - RNA, 19 nt, Homo sapiens
  misc_RNA (1)...(19): siRNA sense strand
gcaguggugacggguguga

SEQ ID NO: 41682 - RNA, 19 nt, Homo sapiens
  misc_RNA (1)...(19): siRNA sense strand
cuacgaaccugaagccuaa

SEQ ID NO: 41683 - RNA, 19 nt, Homo sapiens
  misc_RNA (1)...(19): siRNA sense strand
ccaaagagcaagugacaaa

SEQ ID NO: 41684 - RNA, 19 nt, Homo sapiens
  misc_RNA (1)...(19): siRNA sense strand
ggaaggguaucaagacuac

SEQ ID NO: 41685 - RNA, 19 nt, Homo sapiens
  misc_RNA (1)...(19): siRNA sense strand
gagcaagugacaaauguug

SEQ ID NO: 41686 - RNA, 19 nt, Homo sapiens
  misc_RNA (1)...(19): siRNA sense strand
caaacaggguguggcagaa

SEQ ID NO: 41687 - RNA, 19 nt, Homo sapiens
  misc_RNA (1)...(19): siRNA sense strand
ugacagcaguagcccagaa

SEQ ID NO: 41688 - RNA, 19 nt, Homo sapiens
  misc_RNA (1)...(19): siRNA sense strand
gaccaaagagcaagugaca

SEQ ID NO: 41689 - RNA, 19 nt, Homo sapiens
  misc_RNA (1)...(19): siRNA sense strand
aagagcaagugacaaaugu

SEQ ID NO: 41690 - RNA, 19 nt, Homo sapiens
  misc_RNA (1)...(19): siRNA sense strand
ggagggagcagggagcauu

SEQ ID NO: 41691 - RNA, 19 nt, Homo sapiens
  misc_RNA (1)...(19): siRNA sense strand
gcaagugacaaauguugga

SEQ ID NO: 41692 - RNA, 19 nt, Homo sapiens
  misc_RNA (1)...(19): siRNA sense strand
uggcaacaguggcugagaa

SEQ ID NO: 41693 - RNA, 19 nt, Homo sapiens
  misc_RNA (1)...(19): siRNA sense strand
aaagagcaagugacaaaug

SEQ ID NO: 41694 - RNA, 19 nt, Homo sapiens
  misc_RNA (1)...(19): siRNA sense strand
gcagaagcagcaggaaaga

SEQ ID NO: 41695 - RNA, 19 nt, Homo sapiens
  misc_RNA (1)...(19): siRNA sense strand
caacaguggcugagaagac

SEQ ID NO: 41696 - RNA, 19 nt, Homo sapiens
  misc_RNA (1)...(19): siRNA sense strand
ggcagaagcagcaggaaag

SEQ ID NO: 41697 - RNA, 19 nt, Homo sapiens
  misc_RNA (1)...(19): siRNA sense strand
uggcugagaagaccaaaga

SEQ ID NO: 41698 - RNA, 19 nt, Homo sapiens
  misc_RNA (1)...(19): siRNA sense strand
gaagcagcaggaaagacaa

SEQ ID NO: 41699 - RNA, 19 nt, Homo sapiens
  misc_RNA (1)...(19): siRNA sense strand
ugagaagaccaaagagcaa

SEQ ID NO: 41700 - RNA, 19 nt, Homo sapiens
  misc_RNA (1)...(19): siRNA sense strand
agaagcagcaggaaagaca

SEQ ID NO: 41701 - RNA, 19 nt, Homo sapiens
  misc_RNA (1)...(19): siRNA sense strand
ucaagacuacgaaccugaa

SEQ ID NO: 41702 - RNA, 19 nt, Homo sapiens
  misc_RNA (1)...(19): siRNA sense strand
gaagaccaaagagcaagug

SEQ ID NO: 41703 - RNA, 19 nt, Homo sapiens
  misc_RNA (1)...(19): siRNA sense strand
uguggcugcugcugagaaa

SEQ ID NO: 41704 - RNA, 19 nt, Homo sapiens
  misc_RNA (1)...(19): siRNA sense strand
caaagagcaagugacaaau

SEQ ID NO: 41705 - RNA, 19 nt, Homo sapiens
  misc_RNA (1)...(19): siRNA sense strand
gagggagcagggagcauug

SEQ ID NO: 41706 - RNA, 19 nt, Homo sapiens
  misc_RNA (1)...(19): siRNA sense strand
gaggguguucucuauguag

SEQ ID NO: 41707 - RNA, 19 nt, Homo sapiens
  misc_RNA (1)...(19): siRNA sense strand
gcaguggugacggguguga

SEQ ID NO: 41708 - RNA, 19 nt, Homo sapiens
  misc_RNA (1)...(19): siRNA sense strand
uagcuugggugucuucuua

SEQ ID NO: 41709 - RNA, 19 nt, Homo sapiens
  misc_RNA (1)...(19): siRNA sense strand
gcuacuaucugauuuacug

SEQ ID NO: 41710 - RNA, 19 nt, Homo sapiens
  misc_RNA (1)...(19): siRNA sense strand
gcuaugcccuggccacuug

SEQ ID NO: 41711 - RNA, 19 nt, Homo sapiens
  misc_RNA (1)...(19): siRNA sense strand
guacacagacauacgguuu

SEQ ID NO: 41712 - RNA, 19 nt, Homo sapiens
  misc_RNA (1)...(19): siRNA sense strand
cuucaaggcuacuaucuga

SEQ ID NO: 41713 - RNA, 19 nt, Homo sapiens
  misc_RNA (1)...(19): siRNA sense strand
uugggugucuucuuauuua

SEQ ID NO: 41714 - RNA, 19 nt, Homo sapiens
  misc_RNA (1)...(19): siRNA sense strand
caaggcuacuaucugauuu

SEQ ID NO: 41715 - RNA, 19 nt, Homo sapiens
  misc_RNA (1)...(19): siRNA sense strand
gaaagcccuuauuccauuc

SEQ ID NO: 41716 - RNA, 19 nt, Homo sapiens
  misc_RNA (1)...(19): siRNA sense strand
ggacauuuguguacucacu

SEQ ID NO: 41717 - RNA, 19 nt, Homo sapiens
  misc_RNA (1)...(19): siRNA sense strand
ggaaauggaguccuucaag

SEQ ID NO: 41718 - RNA, 19 nt, Homo sapiens
  misc_RNA (1)...(19): siRNA sense strand
gguucuaccucaagauguu

SEQ ID NO: 41719 - RNA, 19 nt, Homo sapiens
  misc_RNA (1)...(19): siRNA sense strand
gauuuacugugcugaauac

SEQ ID NO: 41720 - RNA, 19 nt, Homo sapiens
  misc_RNA (1)...(19): siRNA sense strand
gcuugggugucuucuuauu

SEQ ID NO: 41721 - RNA, 19 nt, Homo sapiens
  misc_RNA (1)...(19): siRNA sense strand
ucaaggcuacuaucugauu

SEQ ID NO: 41722 - RNA, 19 nt, Homo sapiens
  misc_RNA (1)...(19): siRNA sense strand
acacagacauacgguuuag

SEQ ID NO: 41723 - RNA, 19 nt, Homo sapiens
  misc_RNA (1)...(19): siRNA sense strand
ggccucuucugccuacauu

SEQ ID NO: 41724 - RNA, 19 nt, Homo sapiens
  misc_RNA (1)...(19): siRNA sense strand
uuauccagcuauacucauu

SEQ ID NO: 41725 - RNA, 19 nt, Homo sapiens
  misc_RNA (1)...(19): siRNA sense strand
cuacaggauuccacaaggu

SEQ ID NO: 41726 - RNA, 19 nt, Homo sapiens
  misc_RNA (1)...(19): siRNA sense strand
caagauguuugaggacuac

SEQ ID NO: 41727 - RNA, 19 nt, Homo sapiens
  misc_RNA (1)...(19): siRNA sense strand
guauguuucuggagccaau

SEQ ID NO: 41728 - RNA, 19 nt, Homo sapiens
  misc_RNA (1)...(19): siRNA sense strand
gggaggccuuauccagcua

SEQ ID NO: 41729 - RNA, 19 nt, Homo sapiens
  misc_RNA (1)...(19): siRNA sense strand
cuucugcacuggaaaugga

SEQ ID NO: 41730 - RNA, 19 nt, Homo sapiens
  misc_RNA (1)...(19): siRNA sense strand
gaggccuuauccagcuaua

SEQ ID NO: 41731 - RNA, 19 nt, Homo sapiens
  misc_RNA (1)...(19): siRNA sense strand
ccaauuuccucggugagau

SEQ ID NO: 41732 - RNA, 19 nt, Homo sapiens
  misc_RNA (1)...(19): siRNA sense strand
ugauuuacugugcugaaua

SEQ ID NO: 41733 - RNA, 19 nt, Homo sapiens
  misc_RNA (1)...(19): siRNA sense strand
ccagcuauacucauucuca

SEQ ID NO: 41734 - RNA, 19 nt, Homo sapiens
  misc_RNA (1)...(19): siRNA sense strand
aagguggcuuguuuacgua

SEQ ID NO: 41735 - RNA, 19 nt, Homo sapiens
  misc_RNA (1)...(19): siRNA sense strand
ccucccagcacuugcauuu

SEQ ID NO: 41736 - RNA, 19 nt, Homo sapiens
  misc_RNA (1)...(19): siRNA sense strand
gaugggugguacacagaca

SEQ ID NO: 41737 - RNA, 19 nt, Homo sapiens
  misc_RNA (1)...(19): siRNA sense strand
caggacauuuguguacuca

SEQ ID NO: 41738 - RNA, 19 nt, Homo sapiens
  misc_RNA (1)...(19): siRNA sense strand
uacacagacauacgguuua

SEQ ID NO: 41739 - RNA, 19 nt, Homo sapiens
  misc_RNA (1)...(19): siRNA sense strand
gagaaaucagcuacaggau

SEQ ID NO: 41740 - RNA, 19 nt, Homo sapiens
  misc_RNA (1)...(19): siRNA sense strand
gcacacggagagccugaag

SEQ ID NO: 41741 - RNA, 19 nt, Homo sapiens
  misc_RNA (1)...(19): siRNA sense strand
cacuggaaauggaguccuu

SEQ ID NO: 41742 - RNA, 19 nt, Homo sapiens
  misc_RNA (1)...(19): siRNA sense strand
ccuuauuccauucaucuuu

SEQ ID NO: 41743 - RNA, 19 nt, Homo sapiens
  misc_RNA (1)...(19): siRNA sense strand
gggugucuucuuauuuauu

SEQ ID NO: 41744 - RNA, 19 nt, Homo sapiens
  misc_RNA (1)...(19): siRNA sense strand
cgguuuagcuugggugucu

SEQ ID NO: 41745 - RNA, 19 nt, Homo sapiens
  misc_RNA (1)...(19): siRNA sense strand
aaggcuacuaucugauuua

SEQ ID NO: 41746 - RNA, 19 nt, Homo sapiens
  misc_RNA (1)...(19): siRNA sense strand
ucucggaaagcccuuauuc

SEQ ID NO: 41747 - RNA, 19 nt, Homo sapiens
  misc_RNA (1)...(19): siRNA sense strand
ucccagcacuugcauuugc

SEQ ID NO: 41748 - RNA, 19 nt, Homo sapiens
  misc_RNA (1)...(19): siRNA sense strand
uguacucacugcucaaucg

SEQ ID NO: 41749 - RNA, 19 nt, Homo sapiens
  misc_RNA (1)...(19): siRNA sense strand
gaacuuaucuuccuucuuc

SEQ ID NO: 41750 - RNA, 19 nt, Homo sapiens
  misc_RNA (1)...(19): siRNA sense strand
gagaacaucuuuaccuuua

SEQ ID NO: 41751 - RNA, 19 nt, Homo sapiens
  misc_RNA (1)...(19): siRNA sense strand
gaagaaggcugugagcuua

SEQ ID NO: 41752 - RNA, 19 nt, Homo sapiens
  misc_RNA (1)...(19): siRNA sense strand
ggacagagcuacacaucuu

SEQ ID NO: 41753 - RNA, 19 nt, Homo sapiens
  misc_RNA (1)...(19): siRNA sense strand
ggaauugugucaaacuaua

SEQ ID NO: 41754 - RNA, 19 nt, Homo sapiens
  misc_RNA (1)...(19): siRNA sense strand
uaaaugagcugauggaugu

SEQ ID NO: 41755 - RNA, 19 nt, Homo sapiens
  misc_RNA (1)...(19): siRNA sense strand
gaacaucuccgacuucuug

SEQ ID NO: 41756 - RNA, 19 nt, Homo sapiens
  misc_RNA (1)...(19): siRNA sense strand
gcacggaaauucuacaaga

SEQ ID NO: 41757 - RNA, 19 nt, Homo sapiens
  misc_RNA (1)...(19): siRNA sense strand
gaacagagguauggaggaa

SEQ ID NO: 41758 - RNA, 19 nt, Homo sapiens
  misc_RNA (1)...(19): siRNA sense strand
ggaaggauccuaucuauuc

SEQ ID NO: 41759 - RNA, 19 nt, Homo sapiens
  misc_RNA (1)...(19): siRNA sense strand
guugcaaacuggaguauua

SEQ ID NO: 41760 - RNA, 19 nt, Homo sapiens
  misc_RNA (1)...(19): siRNA sense strand
gcacacagaugaacaugau

SEQ ID NO: 41761 - RNA, 19 nt, Homo sapiens
  misc_RNA (1)...(19): siRNA sense strand
gaagaaacacugacacuau

SEQ ID NO: 41762 - RNA, 19 nt, Homo sapiens
  misc_RNA (1)...(19): siRNA sense strand
ggaagaggaauacgaauaa

SEQ ID NO: 41763 - RNA, 19 nt, Homo sapiens
  misc_RNA (1)...(19): siRNA sense strand
guaguggugucaucuauuu

SEQ ID NO: 41764 - RNA, 19 nt, Homo sapiens
  misc_RNA (1)...(19): siRNA sense strand
gaacaucuuuaccuuuaug

SEQ ID NO: 41765 - RNA, 19 nt, Homo sapiens
  misc_RNA (1)...(19): siRNA sense strand
gagaaggaguugcgacuga

SEQ ID NO: 41766 - RNA, 19 nt, Homo sapiens
  misc_RNA (1)...(19): siRNA sense strand
ggagagaauugcaggaaga

SEQ ID NO: 41767 - RNA, 19 nt, Homo sapiens
  misc_RNA (1)...(19): siRNA sense strand
gaagaaagagcccuggaaa

SEQ ID NO: 41768 - RNA, 19 nt, Homo sapiens
  misc_RNA (1)...(19): siRNA sense strand
gaacucguguggccuuuau

SEQ ID NO: 41769 - RNA, 19 nt, Homo sapiens
  misc_RNA (1)...(19): siRNA sense strand
gcaaggguauaucgagauu

SEQ ID NO: 41770 - RNA, 19 nt, Homo sapiens
  misc_RNA (1)...(19): siRNA sense strand
ggaagaauccuacauuaca

SEQ ID NO: 41771 - RNA, 19 nt, Homo sapiens
  misc_RNA (1)...(19): siRNA sense strand
gguauucccugacauguau

SEQ ID NO: 41772 - RNA, 19 nt, Homo sapiens
  misc_RNA (1)...(19): siRNA sense strand
gauccuaucuauucuuaug

SEQ ID NO: 41773 - RNA, 19 nt, Homo sapiens
  misc_RNA (1)...(19): siRNA sense strand
ggaauacgaauaagggaua

SEQ ID NO: 41774 - RNA, 19 nt, Homo sapiens
  misc_RNA (1)...(19): siRNA sense strand
ucugggacaucaugaauua

SEQ ID NO: 41775 - RNA, 19 nt, Homo sapiens
  misc_RNA (1)...(19): siRNA sense strand
ccaagcaccuccaguuuau

SEQ ID NO: 41776 - RNA, 19 nt, Homo sapiens
  misc_RNA (1)...(19): siRNA sense strand
gcagacguccuccugaaua

SEQ ID NO: 41777 - RNA, 19 nt, Homo sapiens
  misc_RNA (1)...(19): siRNA sense strand
caacugguaugaagacaau

SEQ ID NO: 41778 - RNA, 19 nt, Homo sapiens
  misc_RNA (1)...(19): siRNA sense strand
ggacgauucuuucaugauc

SEQ ID NO: 41779 - RNA, 19 nt, Homo sapiens
  misc_RNA (1)...(19): siRNA sense strand
gggaucugcuccugaagua

SEQ ID NO: 41780 - RNA, 19 nt, Homo sapiens
  misc_RNA (1)...(19): siRNA sense strand
gaaacugaagacaacauua

SEQ ID NO: 41781 - RNA, 19 nt, Homo sapiens
  misc_RNA (1)...(19): siRNA sense strand
gcacgaaggauacugaaga

SEQ ID NO: 41782 - RNA, 19 nt, Homo sapiens
  misc_RNA (1)...(19): siRNA sense strand
gaccagguguuuguaaauu

SEQ ID NO: 41783 - RNA, 19 nt, Homo sapiens
  misc_RNA (1)...(19): siRNA sense strand
gaacuaaccaagauuuauc

SEQ ID NO: 41784 - RNA, 19 nt, Homo sapiens
  misc_RNA (1)...(19): siRNA sense strand
ugaccuaacuccagaacaa

SEQ ID NO: 41785 - RNA, 19 nt, Homo sapiens
  misc_RNA (1)...(19): siRNA sense strand
gaagaacuggaacacguua

SEQ ID NO: 41786 - RNA, 19 nt, Homo sapiens
  misc_RNA (1)...(19): siRNA sense strand
gaaggauacugaagaaugc

SEQ ID NO: 41787 - RNA, 19 nt, Homo sapiens
  misc_RNA (1)...(19): siRNA sense strand
gggauugacuccacaagga

SEQ ID NO: 41788 - RNA, 19 nt, Homo sapiens
  misc_RNA (1)...(19): siRNA sense strand
ggucaaagccugggaagaa

SEQ ID NO: 41789 - RNA, 19 nt, Homo sapiens
  misc_RNA (1)...(19): siRNA sense strand
cguguggccuuuaucuuua

SEQ ID NO: 41790 - RNA, 19 nt, Homo sapiens
  misc_RNA (1)...(19): siRNA sense strand
ugauguggcugaagaaaga

SEQ ID NO: 41791 - RNA, 19 nt, Homo sapiens
  misc_RNA (1)...(19): siRNA sense strand
ggagugcauuggucaagaa

SEQ ID NO: 41792 - RNA, 19 nt, Homo sapiens
  misc_RNA (1)...(19): siRNA sense strand
aagaaacacugacacuauu

SEQ ID NO: 41793 - RNA, 19 nt, Homo sapiens
  misc_RNA (1)...(19): siRNA sense strand
gcucugaugcuuucuauug

SEQ ID NO: 41794 - RNA, 19 nt, Homo sapiens
  misc_RNA (1)...(19): siRNA sense strand
ggcacaggcuuguacuuaa

SEQ ID NO: 41795 - RNA, 19 nt, Homo sapiens
  misc_RNA (1)...(19): siRNA sense strand
ggacauauuuaacaucacu

SEQ ID NO: 41796 - RNA, 19 nt, Homo sapiens
  misc_RNA (1)...(19): siRNA sense strand
gauagaagacacucuguau

SEQ ID NO: 41797 - RNA, 19 nt, Homo sapiens
  misc_RNA (1)...(19): siRNA sense strand
caagaacuccucaugaaug

SEQ ID NO: 41798 - RNA, 19 nt, Homo sapiens
  misc_RNA (1)...(19): siRNA sense strand
gacaacagcacacagauga

SEQ ID NO: 41799 - RNA, 19 nt, Homo sapiens
  misc_RNA (1)...(19): siRNA sense strand
gaauaagggauaucuugaa

SEQ ID NO: 41800 - RNA, 19 nt, Homo sapiens
  misc_RNA (1)...(19): siRNA sense strand
ggagggacauauuuaacau

SEQ ID NO: 41801 - RNA, 19 nt, Homo sapiens
  misc_RNA (1)...(19): siRNA sense strand
caucucaaguccaaauuug

SEQ ID NO: 41802 - RNA, 19 nt, Homo sapiens
  misc_RNA (1)...(19): siRNA sense strand
gagcugaucccguggaaga

SEQ ID NO: 41803 - RNA, 19 nt, Homo sapiens
  misc_RNA (1)...(19): siRNA sense strand
cuacacaucuugucccaau

SEQ ID NO: 41804 - RNA, 19 nt, Homo sapiens
  misc_RNA (1)...(19): siRNA sense strand
cuaaggagcccauuguuga

SEQ ID NO: 41805 - RNA, 19 nt, Homo sapiens
  misc_RNA (1)...(19): siRNA sense strand
ucacccagcuguuccagaa

SEQ ID NO: 41806 - RNA, 19 nt, Homo sapiens
  misc_RNA (1)...(19): siRNA sense strand
gaagaauccuacauuacag

SEQ ID NO: 41807 - RNA, 19 nt, Homo sapiens
  misc_RNA (1)...(19): siRNA sense strand
gcaggaagaggaauacgaa

SEQ ID NO: 41808 - RNA, 19 nt, Homo sapiens
  misc_RNA (1)...(19): siRNA sense strand
caaauaagaacuucaagca

SEQ ID NO: 41809 - RNA, 19 nt, Homo sapiens
  misc_RNA (1)...(19): siRNA sense strand
ugaagaggcucaggaccua

SEQ ID NO: 41810 - RNA, 19 nt, Homo sapiens
  misc_RNA (1)...(19): siRNA sense strand
aaagacagguauugggauu

SEQ ID NO: 41811 - RNA, 19 nt, Homo sapiens
  misc_RNA (1)...(19): siRNA sense strand
ggauauaugggcagcagua

SEQ ID NO: 41812 - RNA, 19 nt, Homo sapiens
  misc_RNA (1)...(19): siRNA sense strand
ggaagcugcucauugucuu

SEQ ID NO: 41813 - RNA, 19 nt, Homo sapiens
  misc_RNA (1)...(19): siRNA sense strand
aaacguauccugcucuuau

SEQ ID NO: 41814 - RNA, 19 nt, Homo sapiens
  misc_RNA (1)...(19): siRNA sense strand
cagacguccuccugaauaa

SEQ ID NO: 41815 - RNA, 19 nt, Homo sapiens
  misc_RNA (1)...(19): siRNA sense strand
ucugauaugucaccaagaa

SEQ ID NO: 41816 - RNA, 19 nt, Homo sapiens
  misc_RNA (1)...(19): siRNA sense strand
gaccuuggccggaucauga

SEQ ID NO: 41817 - RNA, 19 nt, Homo sapiens
  misc_RNA (1)...(19): siRNA sense strand
gucaagagauuccaacaca

SEQ ID NO: 41818 - RNA, 19 nt, Homo sapiens
  misc_RNA (1)...(19): siRNA sense strand
uggauaaguuugaaagcua

SEQ ID NO: 41819 - RNA, 19 nt, Homo sapiens
  misc_RNA (1)...(19): siRNA sense strand
gguaugaagacaauaacua

SEQ ID NO: 41820 - RNA, 19 nt, Homo sapiens
  misc_RNA (1)...(19): siRNA sense strand
ggacucacccggagagaau

SEQ ID NO: 41821 - RNA, 19 nt, Homo sapiens
  misc_RNA (1)...(19): siRNA sense strand
gcagagccuuggcaugugu

SEQ ID NO: 41822 - RNA, 19 nt, Homo sapiens
  misc_RNA (1)...(19): siRNA sense strand
gaaggauccuaucuauucu

SEQ ID NO: 41823 - RNA, 19 nt, Homo sapiens
  misc_RNA (1)...(19): siRNA sense strand
cuugaaagaugaagaaaca

SEQ ID NO: 41824 - RNA, 19 nt, Homo sapiens
  misc_RNA (1)...(19): siRNA sense strand
ggagugguauucccugaca

SEQ ID NO: 41825 - RNA, 19 nt, Homo sapiens
  misc_RNA (1)...(19): siRNA sense strand
cagcauccuuccuguuuga

SEQ ID NO: 41826 - RNA, 19 nt, Homo sapiens
  misc_RNA (1)...(19): siRNA sense strand
acagagguauggaggaauu

SEQ ID NO: 41827 - RNA, 19 nt, Homo sapiens
  misc_RNA (1)...(19): siRNA sense strand
agagaaggcuggacagaca

SEQ ID NO: 41828 - RNA, 19 nt, Homo sapiens
  misc_RNA (1)...(19): siRNA sense strand
ggauguaaaugagcugaug

SEQ ID NO: 41829 - RNA, 19 nt, Homo sapiens
  misc_RNA (1)...(19): siRNA sense strand
gcacaggcuuguacuuaac

SEQ ID NO: 41830 - RNA, 19 nt, Homo sapiens
  misc_RNA (1)...(19): siRNA sense strand
gaacuggacccugcggaaa

SEQ ID NO: 41831 - RNA, 19 nt, Homo sapiens
  misc_RNA (1)...(19): siRNA sense strand
gcauggaucuacucugucu

SEQ ID NO: 41832 - RNA, 19 nt, Homo sapiens
  misc_RNA (1)...(19): siRNA sense strand
gaaccgcuguuucccuauc

SEQ ID NO: 41833 - RNA, 19 nt, Homo sapiens
  misc_RNA (1)...(19): siRNA sense strand
cugaugcuuucuauuguua

SEQ ID NO: 41834 - RNA, 19 nt, Homo sapiens
  misc_RNA (1)...(19): siRNA sense strand
gcaaacuggaguauuaaga

SEQ ID NO: 41835 - RNA, 19 nt, Homo sapiens
  misc_RNA (1)...(19): siRNA sense strand
ccagcuuuguccuuuauuu

SEQ ID NO: 41836 - RNA, 19 nt, Homo sapiens
  misc_RNA (1)...(19): siRNA sense strand
gggagaagcucaccaugcu

SEQ ID NO: 41837 - RNA, 19 nt, Homo sapiens
  misc_RNA (1)...(19): siRNA sense strand
cugacacuauuucucauua

SEQ ID NO: 41838 - RNA, 19 nt, Homo sapiens
  misc_RNA (1)...(19): siRNA sense strand
gcacugcuccugcuguaug

SEQ ID NO: 41839 - RNA, 19 nt, Homo sapiens
  misc_RNA (1)...(19): siRNA sense strand
aaggguggcuuccggagua

SEQ ID NO: 41840 - RNA, 19 nt, Homo sapiens
  misc_RNA (1)...(19): siRNA sense strand
gggaucuucugcaauguga

SEQ ID NO: 41841 - RNA, 19 nt, Homo sapiens
  misc_RNA (1)...(19): siRNA sense strand
acacaggccuccaccacaa

SEQ ID NO: 41842 - RNA, 19 nt, Homo sapiens
  misc_RNA (1)...(19): siRNA sense strand
guaccugguucgcuuugaa

SEQ ID NO: 41843 - RNA, 19 nt, Homo sapiens
  misc_RNA (1)...(19): siRNA sense strand
caucaugcauggaagaauc

SEQ ID NO: 41844 - RNA, 19 nt, Homo sapiens
  misc_RNA (1)...(19): siRNA sense strand
cgaaggauacugaagaaug

SEQ ID NO: 41845 - RNA, 19 nt, Homo sapiens
  misc_RNA (1)...(19): siRNA sense strand
cagaagaacaacauccuuu

SEQ ID NO: 41846 - RNA, 19 nt, Homo sapiens
  misc_RNA (1)...(19): siRNA sense strand
guccagagaccuuuacaaa

SEQ ID NO: 41847 - RNA, 19 nt, Homo sapiens
  misc_RNA (1)...(19): siRNA sense strand
caccaagaauucaagaguu

SEQ ID NO: 41848 - RNA, 19 nt, Homo sapiens
  misc_RNA (1)...(19): siRNA sense strand
ggauagaagacacucugua

SEQ ID NO: 41849 - RNA, 19 nt, Homo sapiens
  misc_RNA (1)...(19): siRNA sense strand
caacacacauauacacuaa

SEQ ID NO: 41850 - RNA, 19 nt, Homo sapiens
  misc_RNA (1)...(19): siRNA sense strand
gcucugaggucuuugaugu

SEQ ID NO: 41851 - RNA, 19 nt, Homo sapiens
  misc_RNA (1)...(19): siRNA sense strand
ggagaccucugacccuuau

SEQ ID NO: 41852 - RNA, 19 nt, Homo sapiens
  misc_RNA (1)...(19): siRNA sense strand
gcacggcucugugaugugu

SEQ ID NO: 41853 - RNA, 19 nt, Homo sapiens
  misc_RNA (1)...(19): siRNA sense strand
ggucuuugaugucacagaa

SEQ ID NO: 41854 - RNA, 19 nt, Homo sapiens
  misc_RNA (1)...(19): siRNA sense strand
gcucaggagucaacacaca

SEQ ID NO: 41855 - RNA, 19 nt, Homo sapiens
  misc_RNA (1)...(19): siRNA sense strand
uggagagacuguagaauca

SEQ ID NO: 41856 - RNA, 19 nt, Homo sapiens
  misc_RNA (1)...(19): siRNA sense strand
ucaaauggcugggcagagu

SEQ ID NO: 41857 - RNA, 19 nt, Homo sapiens
  misc_RNA (1)...(19): siRNA sense strand
uaagcuggauggagaggaa

SEQ ID NO: 41858 - RNA, 19 nt, Homo sapiens
  misc_RNA (1)...(19): siRNA sense strand
ugacucugcuccauccauu

SEQ ID NO: 41859 - RNA, 19 nt, Homo sapiens
  misc_RNA (1)...(19): siRNA sense strand
aaaaggaacugaacauugu

SEQ ID NO: 41860 - RNA, 19 nt, Homo sapiens
  misc_RNA (1)...(19): siRNA sense strand
ggaugaugguuacaaugug

SEQ ID NO: 41861 - RNA, 19 nt, Homo sapiens
  misc_RNA (1)...(19): siRNA sense strand
ggagucaacacacauauac

SEQ ID NO: 41862 - RNA, 19 nt, Homo sapiens
  misc_RNA (1)...(19): siRNA sense strand
gggcacggcucugugaugu

SEQ ID NO: 41863 - RNA, 19 nt, Homo sapiens
  misc_RNA (1)...(19): siRNA sense strand
uacaaaggcuucucuccau

SEQ ID NO: 41864 - RNA, 19 nt, Homo sapiens
  misc_RNA (1)...(19): siRNA sense strand
gcagguggcuaagcuggau

SEQ ID NO: 41865 - RNA, 19 nt, Homo sapiens
  misc_RNA (1)...(19): siRNA sense strand
gcugaauccugaagacaag

SEQ ID NO: 41866 - RNA, 19 nt, Homo sapiens
  misc_RNA (1)...(19): siRNA sense strand
ggauggagagacuguagaa

SEQ ID NO: 41867 - RNA, 19 nt, Homo sapiens
  misc_RNA (1)...(19): siRNA sense strand
cauauacacuaaggaggaa

SEQ ID NO: 41868 - RNA, 19 nt, Homo sapiens
  misc_RNA (1)...(19): siRNA sense strand
gugcaguguuggccuauca

SEQ ID NO: 41869 - RNA, 19 nt, Homo sapiens
  misc_RNA (1)...(19): siRNA sense strand
caaccgacgcucugagaug

SEQ ID NO: 41870 - RNA, 19 nt, Homo sapiens
  misc_RNA (1)...(19): siRNA sense strand
ucuuugaugucacagaauu

SEQ ID NO: 41871 - RNA, 19 nt, Homo sapiens
  misc_RNA (1)...(19): siRNA sense strand
acacacauauacacuaagg

SEQ ID NO: 41872 - RNA, 19 nt, Homo sapiens
  misc_RNA (1)...(19): siRNA sense strand
ccagacaccuaucgcuuac

SEQ ID NO: 41873 - RNA, 19 nt, Homo sapiens
  misc_RNA (1)...(19): siRNA sense strand
ggacugggagacuguagau

SEQ ID NO: 41874 - RNA, 19 nt, Homo sapiens
  misc_RNA (1)...(19): siRNA sense strand
caaaaggaacugaacauug

SEQ ID NO: 41875 - RNA, 19 nt, Homo sapiens
  misc_RNA (1)...(19): siRNA sense strand
ucaacacacauauacacua

SEQ ID NO: 41876 - RNA, 19 nt, Homo sapiens
  misc_RNA (1)...(19): siRNA sense strand
uggaugacuugcacaacuu

SEQ ID NO: 41877 - RNA, 19 nt, Homo sapiens
  misc_RNA (1)...(19): siRNA sense strand
ucaggagucaacacacaua

SEQ ID NO: 41878 - RNA, 19 nt, Homo sapiens
  misc_RNA (1)...(19): siRNA sense strand
caccaacucugugaaacug

SEQ ID NO: 41879 - RNA, 19 nt, Homo sapiens
  misc_RNA (1)...(19): siRNA sense strand
aaccgacgcucugagauga

SEQ ID NO: 41880 - RNA, 19 nt, Homo sapiens
  misc_RNA (1)...(19): siRNA sense strand
ggagcugaauccugaagac

SEQ ID NO: 41881 - RNA, 19 nt, Homo sapiens
  misc_RNA (1)...(19): siRNA sense strand
uaucaggaccaucggugua

SEQ ID NO: 41882 - RNA, 19 nt, Homo sapiens
  misc_RNA (1)...(19): siRNA sense strand
acugggagacuguagauuu

SEQ ID NO: 41883 - RNA, 19 nt, Homo sapiens
  misc_RNA (1)...(19): siRNA sense strand
ggaugacuugcacaacuuu

SEQ ID NO: 41884 - RNA, 19 nt, Homo sapiens
  misc_RNA (1)...(19): siRNA sense strand
gggugacucugggcucuga

SEQ ID NO: 41885 - RNA, 19 nt, Homo sapiens
  misc_RNA (1)...(19): siRNA sense strand
cugagguccugcuggcaua

SEQ ID NO: 41886 - RNA, 19 nt, Homo sapiens
  misc_RNA (1)...(19): siRNA sense strand
acggcucugugauguguua

SEQ ID NO: 41887 - RNA, 19 nt, Homo sapiens
  misc_RNA (1)...(19): siRNA sense strand
uccagacaccuaucgcuua

SEQ ID NO: 41888 - RNA, 19 nt, Homo sapiens
  misc_RNA (1)...(19): siRNA sense strand
ucugggcucugaggucuuu

SEQ ID NO: 41889 - RNA, 19 nt, Homo sapiens
  misc_RNA (1)...(19): siRNA sense strand
gcuggcauaugagaugaau

SEQ ID NO: 41890 - RNA, 19 nt, Homo sapiens
  misc_RNA (1)...(19): siRNA sense strand
ggucuggaguggagaacag

SEQ ID NO: 41891 - RNA, 19 nt, Homo sapiens
  misc_RNA (1)...(19): siRNA sense strand
cagaauuuguggaccuaca

SEQ ID NO: 41892 - RNA, 19 nt, Homo sapiens
  misc_RNA (1)...(19): siRNA sense strand
ucugaggucuuugauguca

SEQ ID NO: 41893 - RNA, 19 nt, Homo sapiens
  misc_RNA (1)...(19): siRNA sense strand
ccucuaugcuguucacaac

SEQ ID NO: 41894 - RNA, 19 nt, Homo sapiens
  misc_RNA (1)...(19): siRNA sense strand
gcgagguguucucagcaau

SEQ ID NO: 41895 - RNA, 19 nt, Homo sapiens
  misc_RNA (1)...(19): siRNA sense strand
ugaggucuuugaugucaca

SEQ ID NO: 41896 - RNA, 19 nt, Homo sapiens
  misc_RNA (1)...(19): siRNA sense strand
ggcaucguguccaugucua

SEQ ID NO: 41897 - RNA, 19 nt, Homo sapiens
  misc_RNA (1)...(19): siRNA sense strand
cuaaggaggaagugaguuc

SEQ ID NO: 41898 - RNA, 19 nt, Homo sapiens
  misc_RNA (1)...(19): siRNA sense strand
uggcgucuguggcaguuga

SEQ ID NO: 41899 - RNA, 19 nt, Homo sapiens
  misc_RNA (1)...(19): siRNA sense strand
cuacugggacugccuaugg

SEQ ID NO: 41900 - RNA, 19 nt, Homo sapiens
  misc_RNA (1)...(19): siRNA sense strand
ggccaccaacucugugaaa

SEQ ID NO: 41901 - RNA, 19 nt, Homo sapiens
  misc_RNA (1)...(19): siRNA sense strand
gagguguucucagcaaugc

SEQ ID NO: 41902 - RNA, 19 nt, Homo sapiens
  misc_RNA (1)...(19): siRNA sense strand
gaauccugaagacaaggua

SEQ ID NO: 41903 - RNA, 19 nt, Homo sapiens
  misc_RNA (1)...(19): siRNA sense strand
caaaggcuucucuccaucu

SEQ ID NO: 41904 - RNA, 19 nt, Homo sapiens
  misc_RNA (1)...(19): siRNA sense strand
acccaacccuaucuucuuc

SEQ ID NO: 41905 - RNA, 19 nt, Homo sapiens
  misc_RNA (1)...(19): siRNA sense strand
ccugagcugcugacagaaa

SEQ ID NO: 41906 - RNA, 19 nt, Homo sapiens
  misc_RNA (1)...(19): siRNA sense strand
uggaugaugguuacaaugu

SEQ ID NO: 41907 - RNA, 19 nt, Homo sapiens
  misc_RNA (1)...(19): siRNA sense strand
uuuguaaggcuguggauga

SEQ ID NO: 41908 - RNA, 19 nt, Homo sapiens
  misc_RNA (1)...(19): siRNA sense strand
gggagacuguagauuuuga

SEQ ID NO: 41909 - RNA, 19 nt, Homo sapiens
  misc_RNA (1)...(19): siRNA sense strand
ggcaaccgacgcucugaga

SEQ ID NO: 41910 - RNA, 19 nt, Homo sapiens
  misc_RNA (1)...(19): siRNA sense strand
ugcacaacuuucccaggua

SEQ ID NO: 41911 - RNA, 19 nt, Homo sapiens
  misc_RNA (1)...(19): siRNA sense strand
ucgcuuacacguaguagga

SEQ ID NO: 41912 - RNA, 19 nt, Homo sapiens
  misc_RNA (1)...(19): siRNA sense strand
gccuguaccuaaccuggau

SEQ ID NO: 41913 - RNA, 19 nt, Homo sapiens
  misc_RNA (1)...(19): siRNA sense strand
ccggaaccaucugccugua

SEQ ID NO: 41914 - RNA, 19 nt, Homo sapiens
  misc_RNA (1)...(19): siRNA sense strand
uguggaugaugguuacaau

SEQ ID NO: 41915 - RNA, 19 nt, Homo sapiens
  misc_RNA (1)...(19): siRNA sense strand
gagcugaauccugaagaca

SEQ ID NO: 41916 - RNA, 19 nt, Homo sapiens
  misc_RNA (1)...(19): siRNA sense strand
uggcauaugagaugaaugg

SEQ ID NO: 41917 - RNA, 19 nt, Homo sapiens
  misc_RNA (1)...(19): siRNA sense strand
ccccugagcugcugacaga

SEQ ID NO: 41918 - RNA, 19 nt, Homo sapiens
  misc_RNA (1)...(19): siRNA sense strand
gaauuuguggaccuacauc

SEQ ID NO: 41919 - RNA, 19 nt, Homo sapiens
  misc_RNA (1)...(19): siRNA sense strand
cacccaacccuaucuucuu

SEQ ID NO: 41920 - RNA, 19 nt, Homo sapiens
  misc_RNA (1)...(19): siRNA sense strand
gaauugagauggaacauuu

SEQ ID NO: 41921 - RNA, 19 nt, Homo sapiens
  misc_RNA (1)...(19): siRNA sense strand
gggaggagauugcuucuua

SEQ ID NO: 41922 - RNA, 19 nt, Homo sapiens
  misc_RNA (1)...(19): siRNA sense strand
gaaaccaaauccaaacaaa

SEQ ID NO: 41923 - RNA, 19 nt, Homo sapiens
  misc_RNA (1)...(19): siRNA sense strand
caacuggaauaucuaauug

SEQ ID NO: 41924 - RNA, 19 nt, Homo sapiens
  misc_RNA (1)...(19): siRNA sense strand
ggagauugcuucuuauuac

SEQ ID NO: 41925 - RNA, 19 nt, Homo sapiens
  misc_RNA (1)...(19): siRNA sense strand
agagaaaucuugggaaauu

SEQ ID NO: 41926 - RNA, 19 nt, Homo sapiens
  misc_RNA (1)...(19): siRNA sense strand
ugaaacaacuggaauaucu

SEQ ID NO: 41927 - RNA, 19 nt, Homo sapiens
  misc_RNA (1)...(19): siRNA sense strand
ccagagaaaucuugggaaa

SEQ ID NO: 41928 - RNA, 19 nt, Homo sapiens
  misc_RNA (1)...(19): siRNA sense strand
ggaggagugugauaaauag

SEQ ID NO: 41929 - RNA, 19 nt, Homo sapiens
  misc_RNA (1)...(19): siRNA sense strand
gaacauuucccagaauuug

SEQ ID NO: 41930 - RNA, 19 nt, Homo sapiens
  misc_RNA (1)...(19): siRNA sense strand
gggcaaauauaauggcuau

SEQ ID NO: 41931 - RNA, 19 nt, Homo sapiens
  misc_RNA (1)...(19): siRNA sense strand
gaaguuacccaggcaauga

SEQ ID NO: 41932 - RNA, 19 nt, Homo sapiens
  misc_RNA (1)...(19): siRNA sense strand
ccucagacauggccaagaa

SEQ ID NO: 41933 - RNA, 19 nt, Homo sapiens
  misc_RNA (1)...(19): siRNA sense strand
gagcagcacuaccauugug

SEQ ID NO: 41934 - RNA, 19 nt, Homo sapiens
  misc_RNA (1)...(19): siRNA sense strand
gaaauugaccugaaacaac

SEQ ID NO: 41935 - RNA, 19 nt, Homo sapiens
  misc_RNA (1)...(19): siRNA sense strand
gaagcucugugccgggaaa

SEQ ID NO: 41936 - RNA, 19 nt, Homo sapiens
  misc_RNA (1)...(19): siRNA sense strand
gagaugggcuggugaagcu

SEQ ID NO: 41937 - RNA, 19 nt, Homo sapiens
  misc_RNA (1)...(19): siRNA sense strand
gcaaacgucaucuucagaa

SEQ ID NO: 41938 - RNA, 19 nt, Homo sapiens
  misc_RNA (1)...(19): siRNA sense strand
gaaacaacuggaauaucua

SEQ ID NO: 41939 - RNA, 19 nt, Homo sapiens
  misc_RNA (1)...(19): siRNA sense strand
ccaaugcugaucucuguua

SEQ ID NO: 41940 - RNA, 19 nt, Homo sapiens
  misc_RNA (1)...(19): siRNA sense strand
ggaggagauugcuucuuau

SEQ ID NO: 41941 - RNA, 19 nt, Homo sapiens
  misc_RNA (1)...(19): siRNA sense strand
gaugagaucuauggagaca

SEQ ID NO: 41942 - RNA, 19 nt, Homo sapiens
  misc_RNA (1)...(19): siRNA sense strand
gagaaaucuugggaaauug

SEQ ID NO: 41943 - RNA, 19 nt, Homo sapiens
  misc_RNA (1)...(19): siRNA sense strand
gcuaaggacgucauucuga

SEQ ID NO: 41944 - RNA, 19 nt, Homo sapiens
  misc_RNA (1)...(19): siRNA sense strand
ugagaucuauggagacaug

SEQ ID NO: 41945 - RNA, 19 nt, Homo sapiens
  misc_RNA (1)...(19): siRNA sense strand
acaugaaggugaaaccaaa

SEQ ID NO: 41946 - RNA, 19 nt, Homo sapiens
  misc_RNA (1)...(19): siRNA sense strand
gccaagcuauugaccuuug

SEQ ID NO: 41947 - RNA, 19 nt, Homo sapiens
  misc_RNA (1)...(19): siRNA sense strand
cagccaagcuauugaccuu

SEQ ID NO: 41948 - RNA, 19 nt, Homo sapiens
  misc_RNA (1)...(19): siRNA sense strand
ggaaauugaccugaaacaa

SEQ ID NO: 41949 - RNA, 19 nt, Homo sapiens
  misc_RNA (1)...(19): siRNA sense strand
gcuauugaccuuuguuuag

SEQ ID NO: 41950 - RNA, 19 nt, Homo sapiens
  misc_RNA (1)...(19): siRNA sense strand
cagcuugucucauugucaa

SEQ ID NO: 41951 - RNA, 19 nt, Homo sapiens
  misc_RNA (1)...(19): siRNA sense strand
gaggagauugcuucuuauu

SEQ ID NO: 41952 - RNA, 19 nt, Homo sapiens
  misc_RNA (1)...(19): siRNA sense strand
aggucaaacucuacaauuu

SEQ ID NO: 41953 - RNA, 19 nt, Homo sapiens
  misc_RNA (1)...(19): siRNA sense strand
gaggucaaacucuacaauu

SEQ ID NO: 41954 - RNA, 19 nt, Homo sapiens
  misc_RNA (1)...(19): siRNA sense strand
guccaaugcugaucucugu

SEQ ID NO: 41955 - RNA, 19 nt, Homo sapiens
  misc_RNA (1)...(19): siRNA sense strand
ggaguucacggagcgguua

SEQ ID NO: 41956 - RNA, 19 nt, Homo sapiens
  misc_RNA (1)...(19): siRNA sense strand
aaauugaccugaaacaacu

SEQ ID NO: 41957 - RNA, 19 nt, Homo sapiens
  misc_RNA (1)...(19): siRNA sense strand
gcaaauauaauggcuaugc

SEQ ID NO: 41958 - RNA, 19 nt, Homo sapiens
  misc_RNA (1)...(19): siRNA sense strand
gcagccggauccaggaguu

SEQ ID NO: 41959 - RNA, 19 nt, Homo sapiens
  misc_RNA (1)...(19): siRNA sense strand
uuggaaaccugccuacaga

SEQ ID NO: 41960 - RNA, 19 nt, Homo sapiens
  misc_RNA (1)...(19): siRNA sense strand
ggaauugagauggaacauu

SEQ ID NO: 41961 - RNA, 19 nt, Homo sapiens
  misc_RNA (1)...(19): siRNA sense strand
cagcaaacgucaucuucag

SEQ ID NO: 41962 - RNA, 19 nt, Homo sapiens
  misc_RNA (1)...(19): siRNA sense strand
ggacucgggcaaauauaau

SEQ ID NO: 41963 - RNA, 19 nt, Homo sapiens
  misc_RNA (1)...(19): siRNA sense strand
gcuuugaguacccgaauuu

SEQ ID NO: 41964 - RNA, 19 nt, Homo sapiens
  misc_RNA (1)...(19): siRNA sense strand
gaccugguuucucucucua

SEQ ID NO: 41965 - RNA, 19 nt, Homo sapiens
  misc_RNA (1)...(19): siRNA sense strand
cuacagacccugaaguuac

SEQ ID NO: 41966 - RNA, 19 nt, Homo sapiens
  misc_RNA (1)...(19): siRNA sense strand
gugagcagcacuaccauug

SEQ ID NO: 41967 - RNA, 19 nt, Homo sapiens
  misc_RNA (1)...(19): siRNA sense strand
uccaagaccugguuucucu

SEQ ID NO: 41968 - RNA, 19 nt, Homo sapiens
  misc_RNA (1)...(19): siRNA sense strand
caggaggagugugauaaau

SEQ ID NO: 41969 - RNA, 19 nt, Homo sapiens
  misc_RNA (1)...(19): siRNA sense strand
aggaggagugugauaaaua

SEQ ID NO: 41970 - RNA, 19 nt, Homo sapiens
  misc_RNA (1)...(19): siRNA sense strand
ccaggaggagugugauaaa

SEQ ID NO: 41971 - RNA, 19 nt, Homo sapiens
  misc_RNA (1)...(19): siRNA sense strand
caaugcugaucucuguuau

SEQ ID NO: 41972 - RNA, 19 nt, Homo sapiens
  misc_RNA (1)...(19): siRNA sense strand
aggagauugcuucuuauua

SEQ ID NO: 41973 - RNA, 19 nt, Homo sapiens
  misc_RNA (1)...(19): siRNA sense strand
gcagccaggaggaguguga

SEQ ID NO: 41974 - RNA, 19 nt, Homo sapiens
  misc_RNA (1)...(19): siRNA sense strand
ugauuucccuguccauugg

SEQ ID NO: 41975 - RNA, 19 nt, Homo sapiens
  misc_RNA (1)...(19): siRNA sense strand
ccauacaugauucagauga

SEQ ID NO: 41976 - RNA, 19 nt, Homo sapiens
  misc_RNA (1)...(19): siRNA sense strand
agaaaucuugggaaauuga

SEQ ID NO: 41977 - RNA, 19 nt, Homo sapiens
  misc_RNA (1)...(19): siRNA sense strand
gccaggaggagugugauaa

SEQ ID NO: 41978 - RNA, 19 nt, Homo sapiens
  misc_RNA (1)...(19): siRNA sense strand
ccuacagacccugaaguua

SEQ ID NO: 41979 - RNA, 19 nt, Homo sapiens
  misc_RNA (1)...(19): siRNA sense strand
acccauacaugauucagau

SEQ ID NO: 41980 - RNA, 19 nt, Homo sapiens
  misc_RNA (1)...(19): siRNA sense strand
ggauccaggaguucuguga

SEQ ID NO: 41981 - RNA, 19 nt, Homo sapiens
  misc_RNA (1)...(19): siRNA sense strand
gaaaggccagguggucugu

SEQ ID NO: 41982 - RNA, 19 nt, Homo sapiens
  misc_RNA (1)...(19): siRNA sense strand
ggacaacaugaaggugaaa

SEQ ID NO: 41983 - RNA, 19 nt, Homo sapiens
  misc_RNA (1)...(19): siRNA sense strand
ccaaacaaaaccaugauuu

SEQ ID NO: 41984 - RNA, 19 nt, Homo sapiens
  misc_RNA (1)...(19): siRNA sense strand
uggacaacaugaaggugaa

SEQ ID NO: 41985 - RNA, 19 nt, Homo sapiens
  misc_RNA (1)...(19): siRNA sense strand
ugaaaccaaauccaaacaa

SEQ ID NO: 41986 - RNA, 19 nt, Homo sapiens
  misc_RNA (1)...(19): siRNA sense strand
ggacccuacuguguuugga

SEQ ID NO: 41987 - RNA, 19 nt, Homo sapiens
  misc_RNA (1)...(19): siRNA sense strand
ucccagaauuugagaacga

SEQ ID NO: 41988 - RNA, 19 nt, Homo sapiens
  misc_RNA (1)...(19): siRNA sense strand
uugggacccuguaccauug

SEQ ID NO: 41989 - RNA, 19 nt, Homo sapiens
  misc_RNA (1)...(19): siRNA sense strand
gccuacagacccugaaguu

SEQ ID NO: 41990 - RNA, 19 nt, Homo sapiens
  misc_RNA (1)...(19): siRNA sense strand
gguuggaauugagauggaa

SEQ ID NO: 41991 - RNA, 19 nt, Homo sapiens
  misc_RNA (1)...(19): siRNA sense strand
uugggaaauugaccugaaa

SEQ ID NO: 41992 - RNA, 19 nt, Homo sapiens
  misc_RNA (1)...(19): siRNA sense strand
cuugggaaauugaccugaa

SEQ ID NO: 41993 - RNA, 19 nt, Homo sapiens
  misc_RNA (1)...(19): siRNA sense strand
aaggccagguggucuguga

SEQ ID NO: 41994 - RNA, 19 nt, Homo sapiens
  misc_RNA (1)...(19): siRNA sense strand
uggacucgggcaaauauaa

SEQ ID NO: 41995 - RNA, 19 nt, Homo sapiens
  misc_RNA (1)...(19): siRNA sense strand
gagauugcuucuuauuacc

SEQ ID NO: 41996 - RNA, 19 nt, Homo sapiens
  misc_RNA (1)...(19): siRNA sense strand
caaguccaaugcugaucuc

SEQ ID NO: 41997 - RNA, 19 nt, Homo sapiens
  misc_RNA (1)...(19): siRNA sense strand
gugggucaguguucagcaa

SEQ ID NO: 41998 - RNA, 19 nt, Homo sapiens
  misc_RNA (1)...(19): siRNA sense strand
gaccugaaacaacuggaau

SEQ ID NO: 41999 - RNA, 19 nt, Homo sapiens
  misc_RNA (1)...(19): siRNA sense strand
gaccuuuguuuagcugugu

SEQ ID NO: 42000 - RNA, 19 nt, Homo sapiens
  misc_RNA (1)...(19): siRNA sense strand
ccaagcuauugaccuuugu

SEQ ID NO: 42001 - RNA, 19 nt, Homo sapiens
  misc_RNA (1)...(19): siRNA sense strand
gaaggugaaaccaaaucca

SEQ ID NO: 42002 - RNA, 19 nt, Homo sapiens
  misc_RNA (1)...(19): siRNA sense strand
ggcuggauccucauucaug

SEQ ID NO: 42003 - RNA, 19 nt, Homo sapiens
  misc_RNA (1)...(19): siRNA sense strand
gacaugguguuuucggauu

SEQ ID NO: 42004 - RNA, 19 nt, Homo sapiens
  misc_RNA (1)...(19): siRNA sense strand
cugagucuaugggaauuga

SEQ ID NO: 42005 - RNA, 19 nt, Homo sapiens
  misc_RNA (1)...(19): siRNA sense strand
guaccucaugguuggaauu

SEQ ID NO: 42006 - RNA, 19 nt, Homo sapiens
  misc_RNA (1)...(19): siRNA sense strand
gcaguguguccccaucuua

SEQ ID NO: 42007 - RNA, 19 nt, Homo sapiens
  misc_RNA (1)...(19): siRNA sense strand
caaacaaaaccaugauuuc

SEQ ID NO: 42008 - RNA, 19 nt, Homo sapiens
  misc_RNA (1)...(19): siRNA sense strand
ugauucagaugagcagcaa

SEQ ID NO: 42009 - RNA, 19 nt, Homo sapiens
  misc_RNA (1)...(19): siRNA sense strand
caauuuguugccagagaaa

SEQ ID NO: 42010 - RNA, 19 nt, Homo sapiens
  misc_RNA (1)...(19): siRNA sense strand
ggugaaaccaaauccaaac

SEQ ID NO: 42011 - RNA, 19 nt, Homo sapiens
  misc_RNA (1)...(19): siRNA sense strand
cauacaugauucagaugag

SEQ ID NO: 42012 - RNA, 19 nt, Homo sapiens
  misc_RNA (1)...(19): siRNA sense strand
gggaaauugaccugaaaca

SEQ ID NO: 42013 - RNA, 19 nt, Homo sapiens
  misc_RNA (1)...(19): siRNA sense strand
agaccugguuucucucucu

SEQ ID NO: 42014 - RNA, 19 nt, Homo sapiens
  misc_RNA (1)...(19): siRNA sense strand
augcugaucucuguuaugg

SEQ ID NO: 42015 - RNA, 19 nt, Homo sapiens
  misc_RNA (1)...(19): siRNA sense strand
uagcugaugagaucuaugg

SEQ ID NO: 42016 - RNA, 19 nt, Homo sapiens
  misc_RNA (1)...(19): siRNA sense strand
ccugaaacaacuggaauau

SEQ ID NO: 42017 - RNA, 19 nt, Homo sapiens
  misc_RNA (1)...(19): siRNA sense strand
gaagcuaaggacgucauuc

SEQ ID NO: 42018 - RNA, 19 nt, Homo sapiens
  misc_RNA (1)...(19): siRNA sense strand
ggcaaugagauccgagaug

SEQ ID NO: 42019 - RNA, 19 nt, Homo sapiens
  misc_RNA (1)...(19): siRNA sense strand
ucagcaaacgucaucuuca

SEQ ID NO: 42020 - RNA, 19 nt, Homo sapiens
  misc_RNA (1)...(19): siRNA sense strand
ucacgucgcuccagcaaga

SEQ ID NO: 42021 - RNA, 19 nt, Homo sapiens
  misc_RNA (1)...(19): siRNA sense strand
ccaaggaggugcugguuca

SEQ ID NO: 42022 - RNA, 19 nt, Homo sapiens
  misc_RNA (1)...(19): siRNA sense strand
gaggaggcauuccggcaaa

SEQ ID NO: 42023 - RNA, 19 nt, Homo sapiens
  misc_RNA (1)...(19): siRNA sense strand
gagagauccuccgacaauu

SEQ ID NO: 42024 - RNA, 19 nt, Homo sapiens
  misc_RNA (1)...(19): siRNA sense strand
ucacugagguccgugucua

SEQ ID NO: 42025 - RNA, 19 nt, Homo sapiens
  misc_RNA (1)...(19): siRNA sense strand
gcaggaaggaggaggcauu

SEQ ID NO: 42026 - RNA, 19 nt, Homo sapiens
  misc_RNA (1)...(19): siRNA sense strand
cuaaaaugaucaaggguua

SEQ ID NO: 42027 - RNA, 19 nt, Homo sapiens
  misc_RNA (1)...(19): siRNA sense strand
agagggagguggucgaugu

SEQ ID NO: 42028 - RNA, 19 nt, Homo sapiens
  misc_RNA (1)...(19): siRNA sense strand
ggaagagagagaggccuua

SEQ ID NO: 42029 - RNA, 19 nt, Homo sapiens
  misc_RNA (1)...(19): siRNA sense strand
gagauccuccgacaauuca

SEQ ID NO: 42030 - RNA, 19 nt, Homo sapiens
  misc_RNA (1)...(19): siRNA sense strand
ccaagccggucuuccauac

SEQ ID NO: 42031 - RNA, 19 nt, Homo sapiens
  misc_RNA (1)...(19): siRNA sense strand
ggcaaaagcuggccaugga

SEQ ID NO: 42032 - RNA, 19 nt, Homo sapiens
  misc_RNA (1)...(19): siRNA sense strand
cuggaaauaugacagacaa

SEQ ID NO: 42033 - RNA, 19 nt, Homo sapiens
  misc_RNA (1)...(19): siRNA sense strand
gaagagagagaggccuuag

SEQ ID NO: 42034 - RNA, 19 nt, Homo sapiens
  misc_RNA (1)...(19): siRNA sense strand
ggaaauaugacagacaaaa

SEQ ID NO: 42035 - RNA, 19 nt, Homo sapiens
  misc_RNA (1)...(19): siRNA sense strand
cgaggacggcgacgacuau

SEQ ID NO: 42036 - RNA, 19 nt, Homo sapiens
  misc_RNA (1)...(19): siRNA sense strand
gcuccucuccuccaaacaa

SEQ ID NO: 42037 - RNA, 19 nt, Homo sapiens
  misc_RNA (1)...(19): siRNA sense strand
agagagagaggccuuagug

SEQ ID NO: 42038 - RNA, 19 nt, Homo sapiens
  misc_RNA (1)...(19): siRNA sense strand
gucuacaacugguuugcaa

SEQ ID NO: 42039 - RNA, 19 nt, Homo sapiens
  misc_RNA (1)...(19): siRNA sense strand
ggacggcgacgacuaugac

SEQ ID NO: 42040 - RNA, 19 nt, Homo sapiens
  misc_RNA (1)...(19): siRNA sense strand
ccagaguucagucaacaga

SEQ ID NO: 42041 - RNA, 19 nt, Homo sapiens
  misc_RNA (1)...(19): siRNA sense strand
ggaaugcaacagggcagaa

SEQ ID NO: 42042 - RNA, 19 nt, Homo sapiens
  misc_RNA (1)...(19): siRNA sense strand
gaaugcaacagggcagaau

SEQ ID NO: 42043 - RNA, 19 nt, Homo sapiens
  misc_RNA (1)...(19): siRNA sense strand
caaccagacaguccagagu

SEQ ID NO: 42044 - RNA, 19 nt, Homo sapiens
  misc_RNA (1)...(19): siRNA sense strand
cagcuccucuccuccaaac

SEQ ID NO: 42045 - RNA, 19 nt, Homo sapiens
  misc_RNA (1)...(19): siRNA sense strand
uggaccggaugcucaguga

SEQ ID NO: 42046 - RNA, 19 nt, Homo sapiens
  misc_RNA (1)...(19): siRNA sense strand
gagcccaccaacaagaaga

SEQ ID NO: 42047 - RNA, 19 nt, Homo sapiens
  misc_RNA (1)...(19): siRNA sense strand
gaaauaugacagacaaaag

SEQ ID NO: 42048 - RNA, 19 nt, Homo sapiens
  misc_RNA (1)...(19): siRNA sense strand
agagauccuccgacaauuc

SEQ ID NO: 42049 - RNA, 19 nt, Homo sapiens
  misc_RNA (1)...(19): siRNA sense strand
ugagguccgugucuacaac

SEQ ID NO: 42050 - RNA, 19 nt, Homo sapiens
  misc_RNA (1)...(19): siRNA sense strand
gcucacgucgcuccagcaa

SEQ ID NO: 42051 - RNA, 19 nt, Homo sapiens
  misc_RNA (1)...(19): siRNA sense strand
cgucccagcaaaucuugua

SEQ ID NO: 42052 - RNA, 19 nt, Homo sapiens
  misc_RNA (1)...(19): siRNA sense strand
ucacgucgcuccagcaaga

SEQ ID NO: 42053 - RNA, 19 nt, Homo sapiens
  misc_RNA (1)...(19): siRNA sense strand
ccaaggaggugcugguuca

SEQ ID NO: 42054 - RNA, 19 nt, Homo sapiens
  misc_RNA (1)...(19): siRNA sense strand
gaggaggcauuccggcaaa

SEQ ID NO: 42055 - RNA, 19 nt, Homo sapiens
  misc_RNA (1)...(19): siRNA sense strand
gagagauccuccgacaauu

SEQ ID NO: 42056 - RNA, 19 nt, Homo sapiens
  misc_RNA (1)...(19): siRNA sense strand
ucacugagguccgugucua

SEQ ID NO: 42057 - RNA, 19 nt, Homo sapiens
  misc_RNA (1)...(19): siRNA sense strand
gcaggaaggaggaggcauu

SEQ ID NO: 42058 - RNA, 19 nt, Homo sapiens
  misc_RNA (1)...(19): siRNA sense strand
cuaaaaugaucaaggguua

SEQ ID NO: 42059 - RNA, 19 nt, Homo sapiens
  misc_RNA (1)...(19): siRNA sense strand
agagggagguggucgaugu

SEQ ID NO: 42060 - RNA, 19 nt, Homo sapiens
  misc_RNA (1)...(19): siRNA sense strand
ggaagagagagaggccuua

SEQ ID NO: 42061 - RNA, 19 nt, Homo sapiens
  misc_RNA (1)...(19): siRNA sense strand
gagauccuccgacaauuca

SEQ ID NO: 42062 - RNA, 19 nt, Homo sapiens
  misc_RNA (1)...(19): siRNA sense strand
ccaagccggucuuccauac

SEQ ID NO: 42063 - RNA, 19 nt, Homo sapiens
  misc_RNA (1)...(19): siRNA sense strand
ggcaaaagcuggccaugga

SEQ ID NO: 42064 - RNA, 19 nt, Homo sapiens
  misc_RNA (1)...(19): siRNA sense strand
cuggaaauaugacagacaa

SEQ ID NO: 42065 - RNA, 19 nt, Homo sapiens
  misc_RNA (1)...(19): siRNA sense strand
gaagagagagaggccuuag

SEQ ID NO: 42066 - RNA, 19 nt, Homo sapiens
  misc_RNA (1)...(19): siRNA sense strand
ggaaauaugacagacaaaa

SEQ ID NO: 42067 - RNA, 19 nt, Homo sapiens
  misc_RNA (1)...(19): siRNA sense strand
cgaggacggcgacgacuau

SEQ ID NO: 42068 - RNA, 19 nt, Homo sapiens
  misc_RNA (1)...(19): siRNA sense strand
gcuccucuccuccaaacaa

SEQ ID NO: 42069 - RNA, 19 nt, Homo sapiens
  misc_RNA (1)...(19): siRNA sense strand
agagagagaggccuuagug

SEQ ID NO: 42070 - RNA, 19 nt, Homo sapiens
  misc_RNA (1)...(19): siRNA sense strand
gucuacaacugguuugcaa

SEQ ID NO: 42071 - RNA, 19 nt, Homo sapiens
  misc_RNA (1)...(19): siRNA sense strand
ggacggcgacgacuaugac

SEQ ID NO: 42072 - RNA, 19 nt, Homo sapiens
  misc_RNA (1)...(19): siRNA sense strand
ccagaguucagucaacaga

SEQ ID NO: 42073 - RNA, 19 nt, Homo sapiens
  misc_RNA (1)...(19): siRNA sense strand
ggaaugcaacagggcagaa

SEQ ID NO: 42074 - RNA, 19 nt, Homo sapiens
  misc_RNA (1)...(19): siRNA sense strand
gaaugcaacagggcagaau

SEQ ID NO: 42075 - RNA, 19 nt, Homo sapiens
  misc_RNA (1)...(19): siRNA sense strand
caaccagacaguccagagu

SEQ ID NO: 42076 - RNA, 19 nt, Homo sapiens
  misc_RNA (1)...(19): siRNA sense strand
cagcuccucuccuccaaac

SEQ ID NO: 42077 - RNA, 19 nt, Homo sapiens
  misc_RNA (1)...(19): siRNA sense strand
uggaccggaugcucaguga

SEQ ID NO: 42078 - RNA, 19 nt, Homo sapiens
  misc_RNA (1)...(19): siRNA sense strand
gagcccaccaacaagaaga

SEQ ID NO: 42079 - RNA, 19 nt, Homo sapiens
  misc_RNA (1)...(19): siRNA sense strand
gaaauaugacagacaaaag

SEQ ID NO: 42080 - RNA, 19 nt, Homo sapiens
  misc_RNA (1)...(19): siRNA sense strand
agagauccuccgacaauuc

SEQ ID NO: 42081 - RNA, 19 nt, Homo sapiens
  misc_RNA (1)...(19): siRNA sense strand
ugagguccgugucuacaac

SEQ ID NO: 42082 - RNA, 19 nt, Homo sapiens
  misc_RNA (1)...(19): siRNA sense strand
gcucacgucgcuccagcaa

SEQ ID NO: 42083 - RNA, 19 nt, Homo sapiens
  misc_RNA (1)...(19): siRNA sense strand
cgucccagcaaaucuugua

SEQ ID NO: 42084 - RNA, 19 nt, Homo sapiens
  misc_RNA (1)...(19): siRNA sense strand
gaagaaggcccaugaguua

SEQ ID NO: 42085 - RNA, 19 nt, Homo sapiens
  misc_RNA (1)...(19): siRNA sense strand
ccagaaugcucucaugauu

SEQ ID NO: 42086 - RNA, 19 nt, Homo sapiens
  misc_RNA (1)...(19): siRNA sense strand
gcauuacaguuccucauga

SEQ ID NO: 42087 - RNA, 19 nt, Homo sapiens
  misc_RNA (1)...(19): siRNA sense strand
ucucacagcucaaaugguu

SEQ ID NO: 42088 - RNA, 19 nt, Homo sapiens
  misc_RNA (1)...(19): siRNA sense strand
agaaugcucucaugauuuc

SEQ ID NO: 42089 - RNA, 19 nt, Homo sapiens
  misc_RNA (1)...(19): siRNA sense strand
uggaagauguccugaagaa

SEQ ID NO: 42090 - RNA, 19 nt, Homo sapiens
  misc_RNA (1)...(19): siRNA sense strand
caagagaucaucaguguca

SEQ ID NO: 42091 - RNA, 19 nt, Homo sapiens
  misc_RNA (1)...(19): siRNA sense strand
cccaagagaucaucagugu

SEQ ID NO: 42092 - RNA, 19 nt, Homo sapiens
  misc_RNA (1)...(19): siRNA sense strand
cacaagaccuacauugauc

SEQ ID NO: 42093 - RNA, 19 nt, Homo sapiens
  misc_RNA (1)...(19): siRNA sense strand
uaggaggauucacauauga

SEQ ID NO: 42094 - RNA, 19 nt, Homo sapiens
  misc_RNA (1)...(19): siRNA sense strand
ggacagccaucugguagag

SEQ ID NO: 42095 - RNA, 19 nt, Homo sapiens
  misc_RNA (1)...(19): siRNA sense strand
ugaagaaggcccaugaguu

SEQ ID NO: 42096 - RNA, 19 nt, Homo sapiens
  misc_RNA (1)...(19): siRNA sense strand
ccacaagaccuacauugau

SEQ ID NO: 42097 - RNA, 19 nt, Homo sapiens
  misc_RNA (1)...(19): siRNA sense strand
gcaggugcuuagucucuug

SEQ ID NO: 42098 - RNA, 19 nt, Homo sapiens
  misc_RNA (1)...(19): siRNA sense strand
cuacuuaaccuccgugaug

SEQ ID NO: 42099 - RNA, 19 nt, Homo sapiens
  misc_RNA (1)...(19): siRNA sense strand
cagcaccucuuaccuugga

SEQ ID NO: 42100 - RNA, 19 nt, Homo sapiens
  misc_RNA (1)...(19): siRNA sense strand
gggacaggcuggucucaca

SEQ ID NO: 42101 - RNA, 19 nt, Homo sapiens
  misc_RNA (1)...(19): siRNA sense strand
gaacagugcgagaggagau

SEQ ID NO: 42102 - RNA, 19 nt, Homo sapiens
  misc_RNA (1)...(19): siRNA sense strand
gaaggcccaugaguuagga

SEQ ID NO: 42103 - RNA, 19 nt, Homo sapiens
  misc_RNA (1)...(19): siRNA sense strand
cagaaugcucucaugauuu

SEQ ID NO: 42104 - RNA, 19 nt, Homo sapiens
  misc_RNA (1)...(19): siRNA sense strand
uuaggaggauucacauaug

SEQ ID NO: 42105 - RNA, 19 nt, Homo sapiens
  misc_RNA (1)...(19): siRNA sense strand
ggacaaacuucuguaugcu

SEQ ID NO: 42106 - RNA, 19 nt, Homo sapiens
  misc_RNA (1)...(19): siRNA sense strand
guuaggaggauucacauau

SEQ ID NO: 42107 - RNA, 19 nt, Homo sapiens
  misc_RNA (1)...(19): siRNA sense strand
uguaugcuguggaaccuuu

SEQ ID NO: 42108 - RNA, 19 nt, Homo sapiens
  misc_RNA (1)...(19): siRNA sense strand
gaaccacaagaccuacauu

SEQ ID NO: 42109 - RNA, 19 nt, Homo sapiens
  misc_RNA (1)...(19): siRNA sense strand
gggaacagcaugucucaag

SEQ ID NO: 42110 - RNA, 19 nt, Homo sapiens
  misc_RNA (1)...(19): siRNA sense strand
ugagaugugugaaauacca

SEQ ID NO: 42111 - RNA, 19 nt, Homo sapiens
  misc_RNA (1)...(19): siRNA sense strand
guacagacaguccaucucu

SEQ ID NO: 42112 - RNA, 19 nt, Homo sapiens
  misc_RNA (1)...(19): siRNA sense strand
acagccaucugguagagaa

SEQ ID NO: 42113 - RNA, 19 nt, Homo sapiens
  misc_RNA (1)...(19): siRNA sense strand
ggaccaaggaagaccucua

SEQ ID NO: 42114 - RNA, 19 nt, Homo sapiens
  misc_RNA (1)...(19): siRNA sense strand
cguggaagauguccugaag

SEQ ID NO: 42115 - RNA, 19 nt, Homo sapiens
  misc_RNA (1)...(19): siRNA sense strand
ggucggagacaacggauca

SEQ ID NO: 42116 - RNA, 19 nt, Homo sapiens
  misc_RNA (1)...(19): siRNA sense strand
gaugagaagagagccauug

SEQ ID NO: 42117 - RNA, 19 nt, Homo sapiens
  misc_RNA (1)...(19): siRNA sense strand
uggacaaacuucuguaugc

SEQ ID NO: 42118 - RNA, 19 nt, Homo sapiens
  misc_RNA (1)...(19): siRNA sense strand
ucaaggcgaggguugcuuu

SEQ ID NO: 42119 - RNA, 19 nt, Homo sapiens
  misc_RNA (1)...(19): siRNA sense strand
ggagacaacggaucaccau

SEQ ID NO: 42120 - RNA, 19 nt, Homo sapiens
  misc_RNA (1)...(19): siRNA sense strand
agagagccauugggcauga

SEQ ID NO: 42121 - RNA, 19 nt, Homo sapiens
  misc_RNA (1)...(19): siRNA sense strand
gagggccacuuugggaaug

SEQ ID NO: 42122 - RNA, 19 nt, Homo sapiens
  misc_RNA (1)...(19): siRNA sense strand
agaccuacauugaucugau

SEQ ID NO: 42123 - RNA, 19 nt, Homo sapiens
  misc_RNA (1)...(19): siRNA sense strand
uacaguuccucaugacuuc

SEQ ID NO: 42124 - RNA, 19 nt, Homo sapiens
  misc_RNA (1)...(19): siRNA sense strand
ggccagcaccucuuaccuu

SEQ ID NO: 42125 - RNA, 19 nt, Homo sapiens
  misc_RNA (1)...(19): siRNA sense strand
gaacugggaacagcauguc

SEQ ID NO: 42126 - RNA, 19 nt, Homo sapiens
  misc_RNA (1)...(19): siRNA sense strand
gaccaaggaagaccucuac

SEQ ID NO: 42127 - RNA, 19 nt, Homo sapiens
  misc_RNA (1)...(19): siRNA sense strand
agguauugcugacuacaga

SEQ ID NO: 42128 - RNA, 19 nt, Homo sapiens
  misc_RNA (1)...(19): siRNA sense strand
ugaguuaggaggauucaca

SEQ ID NO: 42129 - RNA, 19 nt, Homo sapiens
  misc_RNA (1)...(19): siRNA sense strand
ggcauuacaguuccucaug

SEQ ID NO: 42130 - RNA, 19 nt, Homo sapiens
  misc_RNA (1)...(19): siRNA sense strand
gccaucugguagagaaguu

SEQ ID NO: 42131 - RNA, 19 nt, Homo sapiens
  misc_RNA (1)...(19): siRNA sense strand
uuacaguuccucaugacuu

SEQ ID NO: 42132 - RNA, 19 nt, Homo sapiens
  misc_RNA (1)...(19): siRNA sense strand
caccacgagucauguugga

SEQ ID NO: 42133 - RNA, 19 nt, Homo sapiens
  misc_RNA (1)...(19): siRNA sense strand
guugggccagcaccucuua

SEQ ID NO: 42134 - RNA, 19 nt, Homo sapiens
  misc_RNA (1)...(19): siRNA sense strand
ccauugggcaugaucacaa

SEQ ID NO: 42135 - RNA, 19 nt, Homo sapiens
  misc_RNA (1)...(19): siRNA sense strand
gcccaugaguuaggaggau

SEQ ID NO: 42136 - RNA, 19 nt, Homo sapiens
  misc_RNA (1)...(19): siRNA sense strand
gcagaacugggaacagcau

SEQ ID NO: 42137 - RNA, 19 nt, Homo sapiens
  misc_RNA (1)...(19): siRNA sense strand
caccauggccaucagaaca

SEQ ID NO: 42138 - RNA, 19 nt, Homo sapiens
  misc_RNA (1)...(19): siRNA sense strand
ccuggaggaugagaagaga

SEQ ID NO: 42139 - RNA, 19 nt, Homo sapiens
  misc_RNA (1)...(19): siRNA sense strand
acugagaugugugaaauac

SEQ ID NO: 42140 - RNA, 19 nt, Homo sapiens
  misc_RNA (1)...(19): siRNA sense strand
ggcuuucccuggagcacuu

SEQ ID NO: 42141 - RNA, 19 nt, Homo sapiens
  misc_RNA (1)...(19): siRNA sense strand
gguggacaaacuucuguau

SEQ ID NO: 42142 - RNA, 19 nt, Homo sapiens
  misc_RNA (1)...(19): siRNA sense strand
cagaagcggguccaugaca

SEQ ID NO: 42143 - RNA, 19 nt, Homo sapiens
  misc_RNA (1)...(19): siRNA sense strand
ugaggcugguuagcuggua

SEQ ID NO: 42144 - RNA, 19 nt, Homo sapiens
  misc_RNA (1)...(19): siRNA sense strand
cuacagacccaaggaugga

SEQ ID NO: 42145 - RNA, 19 nt, Homo sapiens
  misc_RNA (1)...(19): siRNA sense strand
gaucaccauggccaucaga

SEQ ID NO: 42146 - RNA, 19 nt, Homo sapiens
  misc_RNA (1)...(19): siRNA sense strand
ggucucacagcucaaaugg

SEQ ID NO: 42147 - RNA, 19 nt, Homo sapiens
  misc_RNA (1)...(19): siRNA sense strand
ccucagacccaagagauca

SEQ ID NO: 42148 - RNA, 19 nt, Homo sapiens
  misc_RNA (1)...(19): siRNA sense strand
cccauuggcauuacaguuc

SEQ ID NO: 42149 - RNA, 19 nt, Homo sapiens
  misc_RNA (1)...(19): siRNA sense strand
ugacagcgugguggacaaa

SEQ ID NO: 42150 - RNA, 19 nt, Homo sapiens
  misc_RNA (1)...(19): siRNA sense strand
accagaagcggguccauga

SEQ ID NO: 42151 - RNA, 19 nt, Homo sapiens
  misc_RNA (1)...(19): siRNA sense strand
ggaagaagcugguaaagga

SEQ ID NO: 42152 - RNA, 19 nt, Homo sapiens
  misc_RNA (1)...(19): siRNA sense strand
ucaagcagaugaagaugua

SEQ ID NO: 42153 - RNA, 19 nt, Homo sapiens
  misc_RNA (1)...(19): siRNA sense strand
gguaucaccuggguuguaa

SEQ ID NO: 42154 - RNA, 19 nt, Homo sapiens
  misc_RNA (1)...(19): siRNA sense strand
gcugacaggucgcgucuau

SEQ ID NO: 42155 - RNA, 19 nt, Homo sapiens
  misc_RNA (1)...(19): siRNA sense strand
ggaccgacaugcucuccaa

SEQ ID NO: 42156 - RNA, 19 nt, Homo sapiens
  misc_RNA (1)...(19): siRNA sense strand
gguuguaacugcaagauca

SEQ ID NO: 42157 - RNA, 19 nt, Homo sapiens
  misc_RNA (1)...(19): siRNA sense strand
ccgacaugcucuccaauuu

SEQ ID NO: 42158 - RNA, 19 nt, Homo sapiens
  misc_RNA (1)...(19): siRNA sense strand
gcuacuaccugccuugcuu

SEQ ID NO: 42159 - RNA, 19 nt, Homo sapiens
  misc_RNA (1)...(19): siRNA sense strand
ugacaggucgcgucuauga

SEQ ID NO: 42160 - RNA, 19 nt, Homo sapiens
  misc_RNA (1)...(19): siRNA sense strand
gaucaaguccugcuacuac

SEQ ID NO: 42161 - RNA, 19 nt, Homo sapiens
  misc_RNA (1)...(19): siRNA sense strand
gauaaaagcaucaucaaug

SEQ ID NO: 42162 - RNA, 19 nt, Homo sapiens
  misc_RNA (1)...(19): siRNA sense strand
uaccgaggcuucaccaaga

SEQ ID NO: 42163 - RNA, 19 nt, Homo sapiens
  misc_RNA (1)...(19): siRNA sense strand
gggcugaacuaucgguauc

SEQ ID NO: 42164 - RNA, 19 nt, Homo sapiens
  misc_RNA (1)...(19): siRNA sense strand
gcaaggggcugaacuaucg

SEQ ID NO: 42165 - RNA, 19 nt, Homo sapiens
  misc_RNA (1)...(19): siRNA sense strand
gacaugcucuccaauuucg

SEQ ID NO: 42166 - RNA, 19 nt, Homo sapiens
  misc_RNA (1)...(19): siRNA sense strand
gccuuaagcuggaggucaa

SEQ ID NO: 42167 - RNA, 19 nt, Homo sapiens
  misc_RNA (1)...(19): siRNA sense strand
cuaccugccuugcuuugug

SEQ ID NO: 42168 - RNA, 19 nt, Homo sapiens
  misc_RNA (1)...(19): siRNA sense strand
cgucuaugauggcaagaug

SEQ ID NO: 42169 - RNA, 19 nt, Homo sapiens
  misc_RNA (1)...(19): siRNA sense strand
cgacaugcucuccaauuuc

SEQ ID NO: 42170 - RNA, 19 nt, Homo sapiens
  misc_RNA (1)...(19): siRNA sense strand
gcaagaucaaguccugcua

SEQ ID NO: 42171 - RNA, 19 nt, Homo sapiens
  misc_RNA (1)...(19): siRNA sense strand
agcuggaggucaacaagua

SEQ ID NO: 42172 - RNA, 19 nt, Homo sapiens
  misc_RNA (1)...(19): siRNA sense strand
ucuaugauggcaagaugua

SEQ ID NO: 42173 - RNA, 19 nt, Homo sapiens
  misc_RNA (1)...(19): siRNA sense strand
uaccugccuugcuuuguga

SEQ ID NO: 42174 - RNA, 19 nt, Homo sapiens
  misc_RNA (1)...(19): siRNA sense strand
gcuaccaguccaaacacua

SEQ ID NO: 42175 - RNA, 19 nt, Homo sapiens
  misc_RNA (1)...(19): siRNA sense strand
gcucuccaauuucgguuac

SEQ ID NO: 42176 - RNA, 19 nt, Homo sapiens
  misc_RNA (1)...(19): siRNA sense strand
acaggucgcgucuaugaug

SEQ ID NO: 42177 - RNA, 19 nt, Homo sapiens
  misc_RNA (1)...(19): siRNA sense strand
gggaagaagcugguaaagg

SEQ ID NO: 42178 - RNA, 19 nt, Homo sapiens
  misc_RNA (1)...(19): siRNA sense strand
caacuccgacaucgugauc

SEQ ID NO: 42179 - RNA, 19 nt, Homo sapiens
  misc_RNA (1)...(19): siRNA sense strand
gcuuugugacuuccaagaa

SEQ ID NO: 42180 - RNA, 19 nt, Homo sapiens
  misc_RNA (1)...(19): siRNA sense strand
ucaccaagaugccccaugu

SEQ ID NO: 42181 - RNA, 19 nt, Homo sapiens
  misc_RNA (1)...(19): siRNA sense strand
caggacgccuucugcaacu

SEQ ID NO: 42182 - RNA, 19 nt, Homo sapiens
  misc_RNA (1)...(19): siRNA sense strand
gaaauuugcguguggagua

SEQ ID NO: 42183 - RNA, 19 nt, Homo sapiens
  misc_RNA (1)...(19): siRNA sense strand
gagaauauuucacccuuca

SEQ ID NO: 42184 - RNA, 19 nt, Homo sapiens
  misc_RNA (1)...(19): siRNA sense strand
gagguuggcucugacugua

SEQ ID NO: 42185 - RNA, 19 nt, Homo sapiens
  misc_RNA (1)...(19): siRNA sense strand
agaugaagcucccagaaug

SEQ ID NO: 42186 - RNA, 19 nt, Homo sapiens
  misc_RNA (1)...(19): siRNA sense strand
cgucugggcuucuugcauu

SEQ ID NO: 42187 - RNA, 19 nt, Homo sapiens
  misc_RNA (1)...(19): siRNA sense strand
gcacagaggaagagaaucu

SEQ ID NO: 42188 - RNA, 19 nt, Homo sapiens
  misc_RNA (1)...(19): siRNA sense strand
cccaagcaauggaugauuu

SEQ ID NO: 42189 - RNA, 19 nt, Homo sapiens
  misc_RNA (1)...(19): siRNA sense strand
gaagaaaccacuggaugga

SEQ ID NO: 42190 - RNA, 19 nt, Homo sapiens
  misc_RNA (1)...(19): siRNA sense strand
guaccaccauccacuacaa

SEQ ID NO: 42191 - RNA, 19 nt, Homo sapiens
  misc_RNA (1)...(19): siRNA sense strand
gaauauuucacccuucaga

SEQ ID NO: 42192 - RNA, 19 nt, Homo sapiens
  misc_RNA (1)...(19): siRNA sense strand
cagucuaccucccgccaua

SEQ ID NO: 42193 - RNA, 19 nt, Homo sapiens
  misc_RNA (1)...(19): siRNA sense strand
ggaagacuccagugguaau

SEQ ID NO: 42194 - RNA, 19 nt, Homo sapiens
  misc_RNA (1)...(19): siRNA sense strand
guauuuggaugacagaaac

SEQ ID NO: 42195 - RNA, 19 nt, Homo sapiens
  misc_RNA (1)...(19): siRNA sense strand
gugcagcuguggguugauu

SEQ ID NO: 42196 - RNA, 19 nt, Homo sapiens
  misc_RNA (1)...(19): siRNA sense strand
agacuccagugguaaucua

SEQ ID NO: 42197 - RNA, 19 nt, Homo sapiens
  misc_RNA (1)...(19): siRNA sense strand
agcaauggaugauuugaug

SEQ ID NO: 42198 - RNA, 19 nt, Homo sapiens
  misc_RNA (1)...(19): siRNA sense strand
ccacuacaacuacaugugu

SEQ ID NO: 42199 - RNA, 19 nt, Homo sapiens
  misc_RNA (1)...(19): siRNA sense strand
ccagccaccugaaguccaa

SEQ ID NO: 42200 - RNA, 19 nt, Homo sapiens
  misc_RNA (1)...(19): siRNA sense strand
gcuuugaggugcguguuug

SEQ ID NO: 42201 - RNA, 19 nt, Homo sapiens
  misc_RNA (1)...(19): siRNA sense strand
gcgcacagaggaagagaau

SEQ ID NO: 42202 - RNA, 19 nt, Homo sapiens
  misc_RNA (1)...(19): siRNA sense strand
gacagaagggccugacuca

SEQ ID NO: 42203 - RNA, 19 nt, Homo sapiens
  misc_RNA (1)...(19): siRNA sense strand
gagccgcagucagauccua

SEQ ID NO: 42204 - RNA, 19 nt, Homo sapiens
  misc_RNA (1)...(19): siRNA sense strand
cgugagcgcuucgagaugu

SEQ ID NO: 42205 - RNA, 19 nt, Homo sapiens
  misc_RNA (1)...(19): siRNA sense strand
gaaacuacuuccugaaaac

SEQ ID NO: 42206 - RNA, 19 nt, Homo sapiens
  misc_RNA (1)...(19): siRNA sense strand
gaaaccacuggauggagaa

SEQ ID NO: 42207 - RNA, 19 nt, Homo sapiens
  misc_RNA (1)...(19): siRNA sense strand
cagaugaagcucccagaau

SEQ ID NO: 42208 - RNA, 19 nt, Homo sapiens
  misc_RNA (1)...(19): siRNA sense strand
cgccugagguuggcucuga

SEQ ID NO: 42209 - RNA, 19 nt, Homo sapiens
  misc_RNA (1)...(19): siRNA sense strand
ucagaccuauggaaacuac

SEQ ID NO: 42210 - RNA, 19 nt, Homo sapiens
  misc_RNA (1)...(19): siRNA sense strand
gaaugaggccuuggaacuc

SEQ ID NO: 42211 - RNA, 19 nt, Homo sapiens
  misc_RNA (1)...(19): siRNA sense strand
ugaaugaggccuuggaacu

SEQ ID NO: 42212 - RNA, 19 nt, Homo sapiens
  misc_RNA (1)...(19): siRNA sense strand
gugugguggugcccuauga

SEQ ID NO: 42213 - RNA, 19 nt, Homo sapiens
  misc_RNA (1)...(19): siRNA sense strand
ccaagcaauggaugauuug

SEQ ID NO: 42214 - RNA, 19 nt, Homo sapiens
  misc_RNA (1)...(19): siRNA sense strand
aaauuugcguguggaguau

SEQ ID NO: 42215 - RNA, 19 nt, Homo sapiens
  misc_RNA (1)...(19): siRNA sense strand
ccagaugaagcucccagaa

SEQ ID NO: 42216 - RNA, 19 nt, Homo sapiens
  misc_RNA (1)...(19): siRNA sense strand
ccaccauccacuacaacua

SEQ ID NO: 42217 - RNA, 19 nt, Homo sapiens
  misc_RNA (1)...(19): siRNA sense strand
ccauggccaucuacaagca

SEQ ID NO: 42218 - RNA, 19 nt, Homo sapiens
  misc_RNA (1)...(19): siRNA sense strand
accacuggauggagaauau

SEQ ID NO: 42219 - RNA, 19 nt, Homo sapiens
  misc_RNA (1)...(19): siRNA sense strand
ccgaguggaaggaaauuug

SEQ ID NO: 42220 - RNA, 19 nt, Homo sapiens
  misc_RNA (1)...(19): siRNA sense strand
gaagacuccagugguaauc

SEQ ID NO: 42221 - RNA, 19 nt, Homo sapiens
  misc_RNA (1)...(19): siRNA sense strand
uggaugacagaaacacuuu

SEQ ID NO: 42222 - RNA, 19 nt, Homo sapiens
  misc_RNA (1)...(19): siRNA sense strand
aaaccuaccagggcagcua

SEQ ID NO: 42223 - RNA, 19 nt, Homo sapiens
  misc_RNA (1)...(19): siRNA sense strand
gcugaaugaggccuuggaa

SEQ ID NO: 42224 - RNA, 19 nt, Homo sapiens
  misc_RNA (1)...(19): siRNA sense strand
caagauguuuugccaacug

SEQ ID NO: 42225 - RNA, 19 nt, Homo sapiens
  misc_RNA (1)...(19): siRNA sense strand
gaugaagcucccagaaugc

SEQ ID NO: 42226 - RNA, 19 nt, Homo sapiens
  misc_RNA (1)...(19): siRNA sense strand
agcgagcacugcccaacaa

SEQ ID NO: 42227 - RNA, 19 nt, Homo sapiens
  misc_RNA (1)...(19): siRNA sense strand
gaugaucacuuuccagaua

SEQ ID NO: 42228 - RNA, 19 nt, Homo sapiens
  misc_RNA (1)...(19): siRNA sense strand
guacagagcuuccggaaag

SEQ ID NO: 42229 - RNA, 19 nt, Homo sapiens
  misc_RNA (1)...(19): siRNA sense strand
ggacacaaaucacaaugaa

SEQ ID NO: 42230 - RNA, 19 nt, Homo sapiens
  misc_RNA (1)...(19): siRNA sense strand
gaaaggcgcuagaauugau

SEQ ID NO: 42231 - RNA, 19 nt, Homo sapiens
  misc_RNA (1)...(19): siRNA sense strand
ccagauugcucucuaauga

SEQ ID NO: 42232 - RNA, 19 nt, Homo sapiens
  misc_RNA (1)...(19): siRNA sense strand
gaagaaagaagaaacaaga

SEQ ID NO: 42233 - RNA, 19 nt, Homo sapiens
  misc_RNA (1)...(19): siRNA sense strand
agacaaagaugaagaugaa

SEQ ID NO: 42234 - RNA, 19 nt, Homo sapiens
  misc_RNA (1)...(19): siRNA sense strand
gaagagaagguauaugaaa

SEQ ID NO: 42235 - RNA, 19 nt, Homo sapiens
  misc_RNA (1)...(19): siRNA sense strand
gaauagaaaucuccacagu

SEQ ID NO: 42236 - RNA, 19 nt, Homo sapiens
  misc_RNA (1)...(19): siRNA sense strand
gcaguugaauccauauuug

SEQ ID NO: 42237 - RNA, 19 nt, Homo sapiens
  misc_RNA (1)...(19): siRNA sense strand
gaaaucuagugaaugauga

SEQ ID NO: 42238 - RNA, 19 nt, Homo sapiens
  misc_RNA (1)...(19): siRNA sense strand
gcaguuguauguggaauuu

SEQ ID NO: 42239 - RNA, 19 nt, Homo sapiens
  misc_RNA (1)...(19): siRNA sense strand
aaacugaacuugguguuaa

SEQ ID NO: 42240 - RNA, 19 nt, Homo sapiens
  misc_RNA (1)...(19): siRNA sense strand
caagaaaggcgcuagaauu

SEQ ID NO: 42241 - RNA, 19 nt, Homo sapiens
  misc_RNA (1)...(19): siRNA sense strand
gaaggaauuugucaaucuu

SEQ ID NO: 42242 - RNA, 19 nt, Homo sapiens
  misc_RNA (1)...(19): siRNA sense strand
gaaugagguucuagaaaug

SEQ ID NO: 42243 - RNA, 19 nt, Homo sapiens
  misc_RNA (1)...(19): siRNA sense strand
ugaaugagguucuagaaau

SEQ ID NO: 42244 - RNA, 19 nt, Homo sapiens
  misc_RNA (1)...(19): siRNA sense strand
ggaaggaauuugucaaucu

SEQ ID NO: 42245 - RNA, 19 nt, Homo sapiens
  misc_RNA (1)...(19): siRNA sense strand
gaaaaccacuuaucccuuu

SEQ ID NO: 42246 - RNA, 19 nt, Homo sapiens
  misc_RNA (1)...(19): siRNA sense strand
caaugaaucucccuuaaag

SEQ ID NO: 42247 - RNA, 19 nt, Homo sapiens
  misc_RNA (1)...(19): siRNA sense strand
uaacagaagagaagguaua

SEQ ID NO: 42248 - RNA, 19 nt, Homo sapiens
  misc_RNA (1)...(19): siRNA sense strand
gaaacugaacuugguguua

SEQ ID NO: 42249 - RNA, 19 nt, Homo sapiens
  misc_RNA (1)...(19): siRNA sense strand
cagaagagaagguauauga

SEQ ID NO: 42250 - RNA, 19 nt, Homo sapiens
  misc_RNA (1)...(19): siRNA sense strand
ccaaugauguaugaucuaa

SEQ ID NO: 42251 - RNA, 19 nt, Homo sapiens
  misc_RNA (1)...(19): siRNA sense strand
gacagcaguugaauccaua

SEQ ID NO: 42252 - RNA, 19 nt, Homo sapiens
  misc_RNA (1)...(19): siRNA sense strand
ggauauugaugccauuaga

SEQ ID NO: 42253 - RNA, 19 nt, Homo sapiens
  misc_RNA (1)...(19): siRNA sense strand
uaugacaugucccuuuaua

SEQ ID NO: 42254 - RNA, 19 nt, Homo sapiens
  misc_RNA (1)...(19): siRNA sense strand
ugaagaagaugaugaagag

SEQ ID NO: 42255 - RNA, 19 nt, Homo sapiens
  misc_RNA (1)...(19): siRNA sense strand
guagagaaagagaggauua

SEQ ID NO: 42256 - RNA, 19 nt, Homo sapiens
  misc_RNA (1)...(19): siRNA sense strand
ugacaugucccuuuauauu

SEQ ID NO: 42257 - RNA, 19 nt, Homo sapiens
  misc_RNA (1)...(19): siRNA sense strand
gucgaaaucuagugaauga

SEQ ID NO: 42258 - RNA, 19 nt, Homo sapiens
  misc_RNA (1)...(19): siRNA sense strand
ggaagaagacucagaagca

SEQ ID NO: 42259 - RNA, 19 nt, Homo sapiens
  misc_RNA (1)...(19): siRNA sense strand
gaagaagacucagaagcau

SEQ ID NO: 42260 - RNA, 19 nt, Homo sapiens
  misc_RNA (1)...(19): siRNA sense strand
ggacagcaguugaauccau

SEQ ID NO: 42261 - RNA, 19 nt, Homo sapiens
  misc_RNA (1)...(19): siRNA sense strand
gaauucgcauguacaguga

SEQ ID NO: 42262 - RNA, 19 nt, Homo sapiens
  misc_RNA (1)...(19): siRNA sense strand
ugaaugcugucacaaagaa

SEQ ID NO: 42263 - RNA, 19 nt, Homo sapiens
  misc_RNA (1)...(19): siRNA sense strand
gaugaugugucuguggaua

SEQ ID NO: 42264 - RNA, 19 nt, Homo sapiens
  misc_RNA (1)...(19): siRNA sense strand
gggaaaucguucauucauu

SEQ ID NO: 42265 - RNA, 19 nt, Homo sapiens
  misc_RNA (1)...(19): siRNA sense strand
ugagggagguguuuccaaa

SEQ ID NO: 42266 - RNA, 19 nt, Homo sapiens
  misc_RNA (1)...(19): siRNA sense strand
ugacguaucacaauguaua

SEQ ID NO: 42267 - RNA, 19 nt, Homo sapiens
  misc_RNA (1)...(19): siRNA sense strand
gaaugugacuugacguauc

SEQ ID NO: 42268 - RNA, 19 nt, Homo sapiens
  misc_RNA (1)...(19): siRNA sense strand
gagaagguauaugaaauuc

SEQ ID NO: 42269 - RNA, 19 nt, Homo sapiens
  misc_RNA (1)...(19): siRNA sense strand
gauguaugaucuaaaggaa

SEQ ID NO: 42270 - RNA, 19 nt, Homo sapiens
  misc_RNA (1)...(19): siRNA sense strand
guaacccaaugauguauga

SEQ ID NO: 42271 - RNA, 19 nt, Homo sapiens
  misc_RNA (1)...(19): siRNA sense strand
ugaagaagcaguuguaugu

SEQ ID NO: 42272 - RNA, 19 nt, Homo sapiens
  misc_RNA (1)...(19): siRNA sense strand
gaaagaagaaacaagaaag

SEQ ID NO: 42273 - RNA, 19 nt, Homo sapiens
  misc_RNA (1)...(19): siRNA sense strand
gagaugaucgcuauggaaa

SEQ ID NO: 42274 - RNA, 19 nt, Homo sapiens
  misc_RNA (1)...(19): siRNA sense strand
gcacuuguccggcuagaga

SEQ ID NO: 42275 - RNA, 19 nt, Homo sapiens
  misc_RNA (1)...(19): siRNA sense strand
gaaaugaagccugcacgaa

SEQ ID NO: 42276 - RNA, 19 nt, Homo sapiens
  misc_RNA (1)...(19): siRNA sense strand
ggaauacucaagcaaagaa

SEQ ID NO: 42277 - RNA, 19 nt, Homo sapiens
  misc_RNA (1)...(19): siRNA sense strand
uuuaugacaugucccuuua

SEQ ID NO: 42278 - RNA, 19 nt, Homo sapiens
  misc_RNA (1)...(19): siRNA sense strand
cugacuacauucucaauaa

SEQ ID NO: 42279 - RNA, 19 nt, Homo sapiens
  misc_RNA (1)...(19): siRNA sense strand
ggaaaauccugcagacuug

SEQ ID NO: 42280 - RNA, 19 nt, Homo sapiens
  misc_RNA (1)...(19): siRNA sense strand
ucucauacuugcuuuaaug

SEQ ID NO: 42281 - RNA, 19 nt, Homo sapiens
  misc_RNA (1)...(19): siRNA sense strand
agacucuucuugcaguuua

SEQ ID NO: 42282 - RNA, 19 nt, Homo sapiens
  misc_RNA (1)...(19): siRNA sense strand
cagggacucuguucugauu

SEQ ID NO: 42283 - RNA, 19 nt, Homo sapiens
  misc_RNA (1)...(19): siRNA sense strand
caccuaacguggaauguga

SEQ ID NO: 42284 - RNA, 19 nt, Homo sapiens
  misc_RNA (1)...(19): siRNA sense strand
acacaaaucacaaugaaga

SEQ ID NO: 42285 - RNA, 19 nt, Homo sapiens
  misc_RNA (1)...(19): siRNA sense strand
gguuuacuaugcaaaugua

SEQ ID NO: 42286 - RNA, 19 nt, Homo sapiens
  misc_RNA (1)...(19): siRNA sense strand
cagcuuaccuugagaacuc

SEQ ID NO: 42287 - RNA, 19 nt, Homo sapiens
  misc_RNA (1)...(19): siRNA sense strand
ggagguguuuccaaagaau

SEQ ID NO: 42288 - RNA, 19 nt, Homo sapiens
  misc_RNA (1)...(19): siRNA sense strand
gacaauagaauucgcaugu

SEQ ID NO: 42289 - RNA, 19 nt, Homo sapiens
  misc_RNA (1)...(19): siRNA sense strand
uuaaugaaccacugaauga

SEQ ID NO: 42290 - RNA, 19 nt, Homo sapiens
  misc_RNA (1)...(19): siRNA sense strand
gagaaagagaggauuauuc

SEQ ID NO: 42291 - RNA, 19 nt, Homo sapiens
  misc_RNA (1)...(19): siRNA sense strand
gaacaagaaaggcgcuaga

SEQ ID NO: 42292 - RNA, 19 nt, Homo sapiens
  misc_RNA (1)...(19): siRNA sense strand
caacuccugcucugagaua

SEQ ID NO: 42293 - RNA, 19 nt, Homo sapiens
  misc_RNA (1)...(19): siRNA sense strand
gaauaugacgguggcuaua

SEQ ID NO: 42294 - RNA, 19 nt, Homo sapiens
  misc_RNA (1)...(19): siRNA sense strand
acaugucccuuuauauuga

SEQ ID NO: 42295 - RNA, 19 nt, Homo sapiens
  misc_RNA (1)...(19): siRNA sense strand
gcaaagcgaugagcaagcu

SEQ ID NO: 42296 - RNA, 19 nt, Homo sapiens
  misc_RNA (1)...(19): siRNA sense strand
caaugcacuuguauauuug

SEQ ID NO: 42297 - RNA, 19 nt, Homo sapiens
  misc_RNA (1)...(19): siRNA sense strand
agauugcucucuaaugaaa

SEQ ID NO: 42298 - RNA, 19 nt, Homo sapiens
  misc_RNA (1)...(19): siRNA sense strand
ggagacaacaauuugcaaa

SEQ ID NO: 42299 - RNA, 19 nt, Homo sapiens
  misc_RNA (1)...(19): siRNA sense strand
caauagaauucgcauguac

SEQ ID NO: 42300 - RNA, 19 nt, Homo sapiens
  misc_RNA (1)...(19): siRNA sense strand
gaaaaugguuuacuaugca

SEQ ID NO: 42301 - RNA, 19 nt, Homo sapiens
  misc_RNA (1)...(19): siRNA sense strand
aagaaaggcgcuagaauug

SEQ ID NO: 42302 - RNA, 19 nt, Homo sapiens
  misc_RNA (1)...(19): siRNA sense strand
ccaaugaaucucccuuaaa

SEQ ID NO: 42303 - RNA, 19 nt, Homo sapiens
  misc_RNA (1)...(19): siRNA sense strand
gcgagcagcugcaaagcau

SEQ ID NO: 42304 - RNA, 19 nt, Homo sapiens
  misc_RNA (1)...(19): siRNA sense strand
gacaugucccuuuauauug

SEQ ID NO: 42305 - RNA, 19 nt, Homo sapiens
  misc_RNA (1)...(19): siRNA sense strand
ggagacauuucagcaacuu

SEQ ID NO: 42306 - RNA, 19 nt, Homo sapiens
  misc_RNA (1)...(19): siRNA sense strand
ugacuuacuuaacagaaga

SEQ ID NO: 42307 - RNA, 19 nt, Homo sapiens
  misc_RNA (1)...(19): siRNA sense strand
ccacaguccugaauaucug

SEQ ID NO: 42308 - RNA, 19 nt, Homo sapiens
  misc_RNA (1)...(19): siRNA sense strand
gaccaaugaaucucccuua

SEQ ID NO: 42309 - RNA, 19 nt, Homo sapiens
  misc_RNA (1)...(19): siRNA sense strand
gguuuaauccaucuucuuu

SEQ ID NO: 42310 - RNA, 19 nt, Homo sapiens
  misc_RNA (1)...(19): siRNA sense strand
ggcuagagaugaucgcuau

SEQ ID NO: 42311 - RNA, 19 nt, Homo sapiens
  misc_RNA (1)...(19): siRNA sense strand
gaaguggacacaaaucaca

SEQ ID NO: 42312 - RNA, 19 nt, Homo sapiens
  misc_RNA (1)...(19): siRNA sense strand
aggaagaacugaaaucucu

SEQ ID NO: 42313 - RNA, 19 nt, Homo sapiens
  misc_RNA (1)...(19): siRNA sense strand
uacugggucuggcuauuua

SEQ ID NO: 42314 - RNA, 19 nt, Homo sapiens
  misc_RNA (1)...(19): siRNA sense strand
gggagguguuuccaaagaa

SEQ ID NO: 42315 - RNA, 19 nt, Homo sapiens
  misc_RNA (1)...(19): siRNA sense strand
acaauagaauucgcaugua

SEQ ID NO: 42316 - RNA, 19 nt, Homo sapiens
  misc_RNA (1)...(19): siRNA sense strand
uaacguggaaugugacuug

SEQ ID NO: 42317 - RNA, 19 nt, Homo sapiens
  misc_RNA (1)...(19): siRNA sense strand
ggagaagaaagaagaaaca

SEQ ID NO: 42318 - RNA, 19 nt, Homo sapiens
  misc_RNA (1)...(19): siRNA sense strand
guucauucauuuacagaug

SEQ ID NO: 42319 - RNA, 19 nt, Homo sapiens
  misc_RNA (1)...(19): siRNA sense strand
gaagcgagcagcugcaaag

SEQ ID NO: 42320 - RNA, 19 nt, Homo sapiens
  misc_RNA (1)...(19): siRNA sense strand
gaagagcccaucccugagu

SEQ ID NO: 42321 - RNA, 19 nt, Homo sapiens
  misc_RNA (1)...(19): siRNA sense strand
uuaccuacaucucauacuu

SEQ ID NO: 42322 - RNA, 19 nt, Homo sapiens
  misc_RNA (1)...(19): siRNA sense strand
gaagaaacuacagaauaug

SEQ ID NO: 42323 - RNA, 19 nt, Homo sapiens
  misc_RNA (1)...(19): siRNA sense strand
aagggaauguggaagauga

SEQ ID NO: 42324 - RNA, 19 nt, Homo sapiens
  misc_RNA (1)...(19): siRNA sense strand
guacugggucuggcuauuu

SEQ ID NO: 42325 - RNA, 19 nt, Homo sapiens
  misc_RNA (1)...(19): siRNA sense strand
ggaauuugaaggagaacaa

SEQ ID NO: 42326 - RNA, 19 nt, Homo sapiens
  misc_RNA (1)...(19): siRNA sense strand
aaaguuagacgugaccaua

SEQ ID NO: 42327 - RNA, 19 nt, Homo sapiens
  misc_RNA (1)...(19): siRNA sense strand
gaugaucacuuuccagaua

SEQ ID NO: 42328 - RNA, 19 nt, Homo sapiens
  misc_RNA (1)...(19): siRNA sense strand
guacagagcuuccggaaag

SEQ ID NO: 42329 - RNA, 19 nt, Homo sapiens
  misc_RNA (1)...(19): siRNA sense strand
ggacacaaaucacaaugaa

SEQ ID NO: 42330 - RNA, 19 nt, Homo sapiens
  misc_RNA (1)...(19): siRNA sense strand
gaaaggcgcuagaauugau

SEQ ID NO: 42331 - RNA, 19 nt, Homo sapiens
  misc_RNA (1)...(19): siRNA sense strand
ccagauugcucucuaauga

SEQ ID NO: 42332 - RNA, 19 nt, Homo sapiens
  misc_RNA (1)...(19): siRNA sense strand
gaagaaagaagaaacaaga

SEQ ID NO: 42333 - RNA, 19 nt, Homo sapiens
  misc_RNA (1)...(19): siRNA sense strand
agacaaagaugaagaugaa

SEQ ID NO: 42334 - RNA, 19 nt, Homo sapiens
  misc_RNA (1)...(19): siRNA sense strand
gaagagaagguauaugaaa

SEQ ID NO: 42335 - RNA, 19 nt, Homo sapiens
  misc_RNA (1)...(19): siRNA sense strand
gaauagaaaucuccacagu

SEQ ID NO: 42336 - RNA, 19 nt, Homo sapiens
  misc_RNA (1)...(19): siRNA sense strand
gcaguugaauccauauuug

SEQ ID NO: 42337 - RNA, 19 nt, Homo sapiens
  misc_RNA (1)...(19): siRNA sense strand
gaaaucuagugaaugauga

SEQ ID NO: 42338 - RNA, 19 nt, Homo sapiens
  misc_RNA (1)...(19): siRNA sense strand
gcaguuguauguggaauuu

SEQ ID NO: 42339 - RNA, 19 nt, Homo sapiens
  misc_RNA (1)...(19): siRNA sense strand
aaacugaacuugguguuaa

SEQ ID NO: 42340 - RNA, 19 nt, Homo sapiens
  misc_RNA (1)...(19): siRNA sense strand
caagaaaggcgcuagaauu

SEQ ID NO: 42341 - RNA, 19 nt, Homo sapiens
  misc_RNA (1)...(19): siRNA sense strand
gaaggaauuugucaaucuu

SEQ ID NO: 42342 - RNA, 19 nt, Homo sapiens
  misc_RNA (1)...(19): siRNA sense strand
gaaugagguucuagaaaug

SEQ ID NO: 42343 - RNA, 19 nt, Homo sapiens
  misc_RNA (1)...(19): siRNA sense strand
ugaaugagguucuagaaau

SEQ ID NO: 42344 - RNA, 19 nt, Homo sapiens
  misc_RNA (1)...(19): siRNA sense strand
ggaaggaauuugucaaucu

SEQ ID NO: 42345 - RNA, 19 nt, Homo sapiens
  misc_RNA (1)...(19): siRNA sense strand
gaaaaccacuuaucccuuu

SEQ ID NO: 42346 - RNA, 19 nt, Homo sapiens
  misc_RNA (1)...(19): siRNA sense strand
caaugaaucucccuuaaag

SEQ ID NO: 42347 - RNA, 19 nt, Homo sapiens
  misc_RNA (1)...(19): siRNA sense strand
uaacagaagagaagguaua

SEQ ID NO: 42348 - RNA, 19 nt, Homo sapiens
  misc_RNA (1)...(19): siRNA sense strand
gaaacugaacuugguguua

SEQ ID NO: 42349 - RNA, 19 nt, Homo sapiens
  misc_RNA (1)...(19): siRNA sense strand
cagaagagaagguauauga

SEQ ID NO: 42350 - RNA, 19 nt, Homo sapiens
  misc_RNA (1)...(19): siRNA sense strand
ccaaugauguaugaucuaa

SEQ ID NO: 42351 - RNA, 19 nt, Homo sapiens
  misc_RNA (1)...(19): siRNA sense strand
gacagcaguugaauccaua

SEQ ID NO: 42352 - RNA, 19 nt, Homo sapiens
  misc_RNA (1)...(19): siRNA sense strand
ggauauugaugccauuaga

SEQ ID NO: 42353 - RNA, 19 nt, Homo sapiens
  misc_RNA (1)...(19): siRNA sense strand
uaugacaugucccuuuaua

SEQ ID NO: 42354 - RNA, 19 nt, Homo sapiens
  misc_RNA (1)...(19): siRNA sense strand
ugaagaagaugaugaagag

SEQ ID NO: 42355 - RNA, 19 nt, Homo sapiens
  misc_RNA (1)...(19): siRNA sense strand
guagagaaagagaggauua

SEQ ID NO: 42356 - RNA, 19 nt, Homo sapiens
  misc_RNA (1)...(19): siRNA sense strand
ugacaugucccuuuauauu

SEQ ID NO: 42357 - RNA, 19 nt, Homo sapiens
  misc_RNA (1)...(19): siRNA sense strand
gucgaaaucuagugaauga

SEQ ID NO: 42358 - RNA, 19 nt, Homo sapiens
  misc_RNA (1)...(19): siRNA sense strand
ggaagaagacucagaagca

SEQ ID NO: 42359 - RNA, 19 nt, Homo sapiens
  misc_RNA (1)...(19): siRNA sense strand
gaagaagacucagaagcau

SEQ ID NO: 42360 - RNA, 19 nt, Homo sapiens
  misc_RNA (1)...(19): siRNA sense strand
ggacagcaguugaauccau

SEQ ID NO: 42361 - RNA, 19 nt, Homo sapiens
  misc_RNA (1)...(19): siRNA sense strand
gaauucgcauguacaguga

SEQ ID NO: 42362 - RNA, 19 nt, Homo sapiens
  misc_RNA (1)...(19): siRNA sense strand
ugaaugcugucacaaagaa

SEQ ID NO: 42363 - RNA, 19 nt, Homo sapiens
  misc_RNA (1)...(19): siRNA sense strand
gaugaugugucuguggaua

SEQ ID NO: 42364 - RNA, 19 nt, Homo sapiens
  misc_RNA (1)...(19): siRNA sense strand
gggaaaucguucauucauu

SEQ ID NO: 42365 - RNA, 19 nt, Homo sapiens
  misc_RNA (1)...(19): siRNA sense strand
ugagggagguguuuccaaa

SEQ ID NO: 42366 - RNA, 19 nt, Homo sapiens
  misc_RNA (1)...(19): siRNA sense strand
ugacguaucacaauguaua

SEQ ID NO: 42367 - RNA, 19 nt, Homo sapiens
  misc_RNA (1)...(19): siRNA sense strand
gaaugugacuugacguauc

SEQ ID NO: 42368 - RNA, 19 nt, Homo sapiens
  misc_RNA (1)...(19): siRNA sense strand
gagaagguauaugaaauuc

SEQ ID NO: 42369 - RNA, 19 nt, Homo sapiens
  misc_RNA (1)...(19): siRNA sense strand
gauguaugaucuaaaggaa

SEQ ID NO: 42370 - RNA, 19 nt, Homo sapiens
  misc_RNA (1)...(19): siRNA sense strand
guaacccaaugauguauga

SEQ ID NO: 42371 - RNA, 19 nt, Homo sapiens
  misc_RNA (1)...(19): siRNA sense strand
ugaagaagcaguuguaugu

SEQ ID NO: 42372 - RNA, 19 nt, Homo sapiens
  misc_RNA (1)...(19): siRNA sense strand
gaaagaagaaacaagaaag

SEQ ID NO: 42373 - RNA, 19 nt, Homo sapiens
  misc_RNA (1)...(19): siRNA sense strand
gagaugaucgcuauggaaa

SEQ ID NO: 42374 - RNA, 19 nt, Homo sapiens
  misc_RNA (1)...(19): siRNA sense strand
gcacuuguccggcuagaga

SEQ ID NO: 42375 - RNA, 19 nt, Homo sapiens
  misc_RNA (1)...(19): siRNA sense strand
gaaaugaagccugcacgaa

SEQ ID NO: 42376 - RNA, 19 nt, Homo sapiens
  misc_RNA (1)...(19): siRNA sense strand
ggaauacucaagcaaagaa

SEQ ID NO: 42377 - RNA, 19 nt, Homo sapiens
  misc_RNA (1)...(19): siRNA sense strand
uuuaugacaugucccuuua

SEQ ID NO: 42378 - RNA, 19 nt, Homo sapiens
  misc_RNA (1)...(19): siRNA sense strand
cugacuacauucucaauaa

SEQ ID NO: 42379 - RNA, 19 nt, Homo sapiens
  misc_RNA (1)...(19): siRNA sense strand
ggaaaauccugcagacuug

SEQ ID NO: 42380 - RNA, 19 nt, Homo sapiens
  misc_RNA (1)...(19): siRNA sense strand
ucucauacuugcuuuaaug

SEQ ID NO: 42381 - RNA, 19 nt, Homo sapiens
  misc_RNA (1)...(19): siRNA sense strand
agacucuucuugcaguuua

SEQ ID NO: 42382 - RNA, 19 nt, Homo sapiens
  misc_RNA (1)...(19): siRNA sense strand
cagggacucuguucugauu

SEQ ID NO: 42383 - RNA, 19 nt, Homo sapiens
  misc_RNA (1)...(19): siRNA sense strand
caccuaacguggaauguga

SEQ ID NO: 42384 - RNA, 19 nt, Homo sapiens
  misc_RNA (1)...(19): siRNA sense strand
acacaaaucacaaugaaga

SEQ ID NO: 42385 - RNA, 19 nt, Homo sapiens
  misc_RNA (1)...(19): siRNA sense strand
gguuuacuaugcaaaugua

SEQ ID NO: 42386 - RNA, 19 nt, Homo sapiens
  misc_RNA (1)...(19): siRNA sense strand
cagcuuaccuugagaacuc

SEQ ID NO: 42387 - RNA, 19 nt, Homo sapiens
  misc_RNA (1)...(19): siRNA sense strand
ggagguguuuccaaagaau

SEQ ID NO: 42388 - RNA, 19 nt, Homo sapiens
  misc_RNA (1)...(19): siRNA sense strand
gacaauagaauucgcaugu

SEQ ID NO: 42389 - RNA, 19 nt, Homo sapiens
  misc_RNA (1)...(19): siRNA sense strand
uuaaugaaccacugaauga

SEQ ID NO: 42390 - RNA, 19 nt, Homo sapiens
  misc_RNA (1)...(19): siRNA sense strand
gagaaagagaggauuauuc

SEQ ID NO: 42391 - RNA, 19 nt, Homo sapiens
  misc_RNA (1)...(19): siRNA sense strand
gaacaagaaaggcgcuaga

SEQ ID NO: 42392 - RNA, 19 nt, Homo sapiens
  misc_RNA (1)...(19): siRNA sense strand
caacuccugcucugagaua

SEQ ID NO: 42393 - RNA, 19 nt, Homo sapiens
  misc_RNA (1)...(19): siRNA sense strand
gaauaugacgguggcuaua

SEQ ID NO: 42394 - RNA, 19 nt, Homo sapiens
  misc_RNA (1)...(19): siRNA sense strand
acaugucccuuuauauuga

SEQ ID NO: 42395 - RNA, 19 nt, Homo sapiens
  misc_RNA (1)...(19): siRNA sense strand
gcaaagcgaugagcaagcu

SEQ ID NO: 42396 - RNA, 19 nt, Homo sapiens
  misc_RNA (1)...(19): siRNA sense strand
caaugcacuuguauauuug

SEQ ID NO: 42397 - RNA, 19 nt, Homo sapiens
  misc_RNA (1)...(19): siRNA sense strand
agauugcucucuaaugaaa

SEQ ID NO: 42398 - RNA, 19 nt, Homo sapiens
  misc_RNA (1)...(19): siRNA sense strand
ggagacaacaauuugcaaa

SEQ ID NO: 42399 - RNA, 19 nt, Homo sapiens
  misc_RNA (1)...(19): siRNA sense strand
caauagaauucgcauguac

SEQ ID NO: 42400 - RNA, 19 nt, Homo sapiens
  misc_RNA (1)...(19): siRNA sense strand
gaaaaugguuuacuaugca

SEQ ID NO: 42401 - RNA, 19 nt, Homo sapiens
  misc_RNA (1)...(19): siRNA sense strand
aagaaaggcgcuagaauug

SEQ ID NO: 42402 - RNA, 19 nt, Homo sapiens
  misc_RNA (1)...(19): siRNA sense strand
ccaaugaaucucccuuaaa

SEQ ID NO: 42403 - RNA, 19 nt, Homo sapiens
  misc_RNA (1)...(19): siRNA sense strand
gacaugucccuuuauauug

SEQ ID NO: 42404 - RNA, 19 nt, Homo sapiens
  misc_RNA (1)...(19): siRNA sense strand
ggagacauuucagcaacuu

SEQ ID NO: 42405 - RNA, 19 nt, Homo sapiens
  misc_RNA (1)...(19): siRNA sense strand
gcgagcagcugcaaagcau

SEQ ID NO: 42406 - RNA, 19 nt, Homo sapiens
  misc_RNA (1)...(19): siRNA sense strand
ugacuuacuuaacagaaga

SEQ ID NO: 42407 - RNA, 19 nt, Homo sapiens
  misc_RNA (1)...(19): siRNA sense strand
ccacaguccugaauaucug

SEQ ID NO: 42408 - RNA, 19 nt, Homo sapiens
  misc_RNA (1)...(19): siRNA sense strand
gaccaaugaaucucccuua

SEQ ID NO: 42409 - RNA, 19 nt, Homo sapiens
  misc_RNA (1)...(19): siRNA sense strand
gguuuaauccaucuucuuu

SEQ ID NO: 42410 - RNA, 19 nt, Homo sapiens
  misc_RNA (1)...(19): siRNA sense strand
ggcuagagaugaucgcuau

SEQ ID NO: 42411 - RNA, 19 nt, Homo sapiens
  misc_RNA (1)...(19): siRNA sense strand
gaaguggacacaaaucaca

SEQ ID NO: 42412 - RNA, 19 nt, Homo sapiens
  misc_RNA (1)...(19): siRNA sense strand
aggaagaacugaaaucucu

SEQ ID NO: 42413 - RNA, 19 nt, Homo sapiens
  misc_RNA (1)...(19): siRNA sense strand
uacugggucuggcuauuua

SEQ ID NO: 42414 - RNA, 19 nt, Homo sapiens
  misc_RNA (1)...(19): siRNA sense strand
gggagguguuuccaaagaa

SEQ ID NO: 42415 - RNA, 19 nt, Homo sapiens
  misc_RNA (1)...(19): siRNA sense strand
acaauagaauucgcaugua

SEQ ID NO: 42416 - RNA, 19 nt, Homo sapiens
  misc_RNA (1)...(19): siRNA sense strand
uaacguggaaugugacuug

SEQ ID NO: 42417 - RNA, 19 nt, Homo sapiens
  misc_RNA (1)...(19): siRNA sense strand
ggagaagaaagaagaaaca

SEQ ID NO: 42418 - RNA, 19 nt, Homo sapiens
  misc_RNA (1)...(19): siRNA sense strand
guucauucauuuacagaug

SEQ ID NO: 42419 - RNA, 19 nt, Homo sapiens
  misc_RNA (1)...(19): siRNA sense strand
gaagcgagcagcugcaaag

SEQ ID NO: 42420 - RNA, 19 nt, Homo sapiens
  misc_RNA (1)...(19): siRNA sense strand
gaagagcccaucccugagu

SEQ ID NO: 42421 - RNA, 19 nt, Homo sapiens
  misc_RNA (1)...(19): siRNA sense strand
uuaccuacaucucauacuu

SEQ ID NO: 42422 - RNA, 19 nt, Homo sapiens
  misc_RNA (1)...(19): siRNA sense strand
gaagaaacuacagaauaug

SEQ ID NO: 42423 - RNA, 19 nt, Homo sapiens
  misc_RNA (1)...(19): siRNA sense strand
aagggaauguggaagauga

SEQ ID NO: 42424 - RNA, 19 nt, Homo sapiens
  misc_RNA (1)...(19): siRNA sense strand
guacugggucuggcuauuu

SEQ ID NO: 42425 - RNA, 19 nt, Homo sapiens
  misc_RNA (1)...(19): siRNA sense strand
ggaauuugaaggagaacaa

SEQ ID NO: 42426 - RNA, 19 nt, Homo sapiens
  misc_RNA (1)...(19): siRNA sense strand
aaaguuagacgugaccaua

SEQ ID NO: 42427 - RNA, 19 nt, Homo sapiens
  misc_RNA (1)...(19): siRNA sense strand
gaugaucacuuuccagaua

SEQ ID NO: 42428 - RNA, 19 nt, Homo sapiens
  misc_RNA (1)...(19): siRNA sense strand
guacagagcuuccggaaag

SEQ ID NO: 42429 - RNA, 19 nt, Homo sapiens
  misc_RNA (1)...(19): siRNA sense strand
ggacacaaaucacaaugaa

SEQ ID NO: 42430 - RNA, 19 nt, Homo sapiens
  misc_RNA (1)...(19): siRNA sense strand
gaaaggcgcuagaauugau

SEQ ID NO: 42431 - RNA, 19 nt, Homo sapiens
  misc_RNA (1)...(19): siRNA sense strand
ccagauugcucucuaauga

SEQ ID NO: 42432 - RNA, 19 nt, Homo sapiens
  misc_RNA (1)...(19): siRNA sense strand
gaagaaagaagaaacaaga

SEQ ID NO: 42433 - RNA, 19 nt, Homo sapiens
  misc_RNA (1)...(19): siRNA sense strand
agacaaagaugaagaugaa

SEQ ID NO: 42434 - RNA, 19 nt, Homo sapiens
  misc_RNA (1)...(19): siRNA sense strand
gaagagaagguauaugaaa

SEQ ID NO: 42435 - RNA, 19 nt, Homo sapiens
  misc_RNA (1)...(19): siRNA sense strand
gaauagaaaucuccacagu

SEQ ID NO: 42436 - RNA, 19 nt, Homo sapiens
  misc_RNA (1)...(19): siRNA sense strand
gcaguugaauccauauuug

SEQ ID NO: 42437 - RNA, 19 nt, Homo sapiens
  misc_RNA (1)...(19): siRNA sense strand
gaaaucuagugaaugauga

SEQ ID NO: 42438 - RNA, 19 nt, Homo sapiens
  misc_RNA (1)...(19): siRNA sense strand
gcaguuguauguggaauuu

SEQ ID NO: 42439 - RNA, 19 nt, Homo sapiens
  misc_RNA (1)...(19): siRNA sense strand
aaacugaacuugguguuaa

SEQ ID NO: 42440 - RNA, 19 nt, Homo sapiens
  misc_RNA (1)...(19): siRNA sense strand
caagaaaggcgcuagaauu

SEQ ID NO: 42441 - RNA, 19 nt, Homo sapiens
  misc_RNA (1)...(19): siRNA sense strand
gaaggaauuugucaaucuu

SEQ ID NO: 42442 - RNA, 19 nt, Homo sapiens
  misc_RNA (1)...(19): siRNA sense strand
gaaugagguucuagaaaug

SEQ ID NO: 42443 - RNA, 19 nt, Homo sapiens
  misc_RNA (1)...(19): siRNA sense strand
ugaaugagguucuagaaau

SEQ ID NO: 42444 - RNA, 19 nt, Homo sapiens
  misc_RNA (1)...(19): siRNA sense strand
ggaaggaauuugucaaucu

SEQ ID NO: 42445 - RNA, 19 nt, Homo sapiens
  misc_RNA (1)...(19): siRNA sense strand
gaaaaccacuuaucccuuu

SEQ ID NO: 42446 - RNA, 19 nt, Homo sapiens
  misc_RNA (1)...(19): siRNA sense strand
caaugaaucucccuuaaag

SEQ ID NO: 42447 - RNA, 19 nt, Homo sapiens
  misc_RNA (1)...(19): siRNA sense strand
uaacagaagagaagguaua

SEQ ID NO: 42448 - RNA, 19 nt, Homo sapiens
  misc_RNA (1)...(19): siRNA sense strand
gaaacugaacuugguguua

SEQ ID NO: 42449 - RNA, 19 nt, Homo sapiens
  misc_RNA (1)...(19): siRNA sense strand
cagaagagaagguauauga

SEQ ID NO: 42450 - RNA, 19 nt, Homo sapiens
  misc_RNA (1)...(19): siRNA sense strand
ccaaugauguaugaucuaa

SEQ ID NO: 42451 - RNA, 19 nt, Homo sapiens
  misc_RNA (1)...(19): siRNA sense strand
gacagcaguugaauccaua

SEQ ID NO: 42452 - RNA, 19 nt, Homo sapiens
  misc_RNA (1)...(19): siRNA sense strand
ggauauugaugccauuaga

SEQ ID NO: 42453 - RNA, 19 nt, Homo sapiens
  misc_RNA (1)...(19): siRNA sense strand
uaugacaugucccuuuaua

SEQ ID NO: 42454 - RNA, 19 nt, Homo sapiens
  misc_RNA (1)...(19): siRNA sense strand
ugaagaagaugaugaagag

SEQ ID NO: 42455 - RNA, 19 nt, Homo sapiens
  misc_RNA (1)...(19): siRNA sense strand
guagagaaagagaggauua

SEQ ID NO: 42456 - RNA, 19 nt, Homo sapiens
  misc_RNA (1)...(19): siRNA sense strand
ugacaugucccuuuauauu

SEQ ID NO: 42457 - RNA, 19 nt, Homo sapiens
  misc_RNA (1)...(19): siRNA sense strand
gucgaaaucuagugaauga

SEQ ID NO: 42458 - RNA, 19 nt, Homo sapiens
  misc_RNA (1)...(19): siRNA sense strand
ggaagaagacucagaagca

SEQ ID NO: 42459 - RNA, 19 nt, Homo sapiens
  misc_RNA (1)...(19): siRNA sense strand
gaagaagacucagaagcau

SEQ ID NO: 42460 - RNA, 19 nt, Homo sapiens
  misc_RNA (1)...(19): siRNA sense strand
ggacagcaguugaauccau

SEQ ID NO: 42461 - RNA, 19 nt, Homo sapiens
  misc_RNA (1)...(19): siRNA sense strand
gaauucgcauguacaguga

SEQ ID NO: 42462 - RNA, 19 nt, Homo sapiens
  misc_RNA (1)...(19): siRNA sense strand
ugaaugcugucacaaagaa

SEQ ID NO: 42463 - RNA, 19 nt, Homo sapiens
  misc_RNA (1)...(19): siRNA sense strand
gaugaugugucuguggaua

SEQ ID NO: 42464 - RNA, 19 nt, Homo sapiens
  misc_RNA (1)...(19): siRNA sense strand
gggaaaucguucauucauu

SEQ ID NO: 42465 - RNA, 19 nt, Homo sapiens
  misc_RNA (1)...(19): siRNA sense strand
ugagggagguguuuccaaa

SEQ ID NO: 42466 - RNA, 19 nt, Homo sapiens
  misc_RNA (1)...(19): siRNA sense strand
ugacguaucacaauguaua

SEQ ID NO: 42467 - RNA, 19 nt, Homo sapiens
  misc_RNA (1)...(19): siRNA sense strand
gaaugugacuugacguauc

SEQ ID NO: 42468 - RNA, 19 nt, Homo sapiens
  misc_RNA (1)...(19): siRNA sense strand
gagaagguauaugaaauuc

SEQ ID NO: 42469 - RNA, 19 nt, Homo sapiens
  misc_RNA (1)...(19): siRNA sense strand
gauguaugaucuaaaggaa

SEQ ID NO: 42470 - RNA, 19 nt, Homo sapiens
  misc_RNA (1)...(19): siRNA sense strand
guaacccaaugauguauga

SEQ ID NO: 42471 - RNA, 19 nt, Homo sapiens
  misc_RNA (1)...(19): siRNA sense strand
ugaagaagcaguuguaugu

SEQ ID NO: 42472 - RNA, 19 nt, Homo sapiens
  misc_RNA (1)...(19): siRNA sense strand
gaaagaagaaacaagaaag

SEQ ID NO: 42473 - RNA, 19 nt, Homo sapiens
  misc_RNA (1)...(19): siRNA sense strand
gagaugaucgcuauggaaa

SEQ ID NO: 42474 - RNA, 19 nt, Homo sapiens
  misc_RNA (1)...(19): siRNA sense strand
gcacuuguccggcuagaga

SEQ ID NO: 42475 - RNA, 19 nt, Homo sapiens
  misc_RNA (1)...(19): siRNA sense strand
gaaaugaagccugcacgaa

SEQ ID NO: 42476 - RNA, 19 nt, Homo sapiens
  misc_RNA (1)...(19): siRNA sense strand
ggaauacucaagcaaagaa

SEQ ID NO: 42477 - RNA, 19 nt, Homo sapiens
  misc_RNA (1)...(19): siRNA sense strand
uuuaugacaugucccuuua

SEQ ID NO: 42478 - RNA, 19 nt, Homo sapiens
  misc_RNA (1)...(19): siRNA sense strand
cugacuacauucucaauaa

SEQ ID NO: 42479 - RNA, 19 nt, Homo sapiens
  misc_RNA (1)...(19): siRNA sense strand
ggaaaauccugcagacuug

SEQ ID NO: 42480 - RNA, 19 nt, Homo sapiens
  misc_RNA (1)...(19): siRNA sense strand
ucucauacuugcuuuaaug

SEQ ID NO: 42481 - RNA, 19 nt, Homo sapiens
  misc_RNA (1)...(19): siRNA sense strand
agacucuucuugcaguuua

SEQ ID NO: 42482 - RNA, 19 nt, Homo sapiens
  misc_RNA (1)...(19): siRNA sense strand
cagggacucuguucugauu

SEQ ID NO: 42483 - RNA, 19 nt, Homo sapiens
  misc_RNA (1)...(19): siRNA sense strand
caccuaacguggaauguga

SEQ ID NO: 42484 - RNA, 19 nt, Homo sapiens
  misc_RNA (1)...(19): siRNA sense strand
acacaaaucacaaugaaga

SEQ ID NO: 42485 - RNA, 19 nt, Homo sapiens
  misc_RNA (1)...(19): siRNA sense strand
gguuuacuaugcaaaugua

SEQ ID NO: 42486 - RNA, 19 nt, Homo sapiens
  misc_RNA (1)...(19): siRNA sense strand
cagcuuaccuugagaacuc

SEQ ID NO: 42487 - RNA, 19 nt, Homo sapiens
  misc_RNA (1)...(19): siRNA sense strand
ggagguguuuccaaagaau

SEQ ID NO: 42488 - RNA, 19 nt, Homo sapiens
  misc_RNA (1)...(19): siRNA sense strand
gacaauagaauucgcaugu

SEQ ID NO: 42489 - RNA, 19 nt, Homo sapiens
  misc_RNA (1)...(19): siRNA sense strand
uuaaugaaccacugaauga

SEQ ID NO: 42490 - RNA, 19 nt, Homo sapiens
  misc_RNA (1)...(19): siRNA sense strand
gagaaagagaggauuauuc

SEQ ID NO: 42491 - RNA, 19 nt, Homo sapiens
  misc_RNA (1)...(19): siRNA sense strand
gaacaagaaaggcgcuaga

SEQ ID NO: 42492 - RNA, 19 nt, Homo sapiens
  misc_RNA (1)...(19): siRNA sense strand
caacuccugcucugagaua

SEQ ID NO: 42493 - RNA, 19 nt, Homo sapiens
  misc_RNA (1)...(19): siRNA sense strand
gaauaugacgguggcuaua

SEQ ID NO: 42494 - RNA, 19 nt, Homo sapiens
  misc_RNA (1)...(19): siRNA sense strand
acaugucccuuuauauuga

SEQ ID NO: 42495 - RNA, 19 nt, Homo sapiens
  misc_RNA (1)...(19): siRNA sense strand
gcaaagcgaugagcaagcu

SEQ ID NO: 42496 - RNA, 19 nt, Homo sapiens
  misc_RNA (1)...(19): siRNA sense strand
caaugcacuuguauauuug

SEQ ID NO: 42497 - RNA, 19 nt, Homo sapiens
  misc_RNA (1)...(19): siRNA sense strand
agauugcucucuaaugaaa

SEQ ID NO: 42498 - RNA, 19 nt, Homo sapiens
  misc_RNA (1)...(19): siRNA sense strand
ggagacaacaauuugcaaa

SEQ ID NO: 42499 - RNA, 19 nt, Homo sapiens
  misc_RNA (1)...(19): siRNA sense strand
caauagaauucgcauguac

SEQ ID NO: 42500 - RNA, 19 nt, Homo sapiens
  misc_RNA (1)...(19): siRNA sense strand
gaaaaugguuuacuaugca

SEQ ID NO: 42501 - RNA, 19 nt, Homo sapiens
  misc_RNA (1)...(19): siRNA sense strand
aagaaaggcgcuagaauug

SEQ ID NO: 42502 - RNA, 19 nt, Homo sapiens
  misc_RNA (1)...(19): siRNA sense strand
ccaaugaaucucccuuaaa

SEQ ID NO: 42503 - RNA, 19 nt, Homo sapiens
  misc_RNA (1)...(19): siRNA sense strand
gcgagcagcugcaaagcau

SEQ ID NO: 42504 - RNA, 19 nt, Homo sapiens
  misc_RNA (1)...(19): siRNA sense strand
gacaugucccuuuauauug

SEQ ID NO: 42505 - RNA, 19 nt, Homo sapiens
  misc_RNA (1)...(19): siRNA sense strand
ggagacauuucagcaacuu

SEQ ID NO: 42506 - RNA, 19 nt, Homo sapiens
  misc_RNA (1)...(19): siRNA sense strand
ugacuuacuuaacagaaga

SEQ ID NO: 42507 - RNA, 19 nt, Homo sapiens
  misc_RNA (1)...(19): siRNA sense strand
ccacaguccugaauaucug

SEQ ID NO: 42508 - RNA, 19 nt, Homo sapiens
  misc_RNA (1)...(19): siRNA sense strand
gaccaaugaaucucccuua

SEQ ID NO: 42509 - RNA, 19 nt, Homo sapiens
  misc_RNA (1)...(19): siRNA sense strand
gguuuaauccaucuucuuu

SEQ ID NO: 42510 - RNA, 19 nt, Homo sapiens
  misc_RNA (1)...(19): siRNA sense strand
ggcuagagaugaucgcuau

SEQ ID NO: 42511 - RNA, 19 nt, Homo sapiens
  misc_RNA (1)...(19): siRNA sense strand
gaaguggacacaaaucaca

SEQ ID NO: 42512 - RNA, 19 nt, Homo sapiens
  misc_RNA (1)...(19): siRNA sense strand
aggaagaacugaaaucucu

SEQ ID NO: 42513 - RNA, 19 nt, Homo sapiens
  misc_RNA (1)...(19): siRNA sense strand
uacugggucuggcuauuua

SEQ ID NO: 42514 - RNA, 19 nt, Homo sapiens
  misc_RNA (1)...(19): siRNA sense strand
gggagguguuuccaaagaa

SEQ ID NO: 42515 - RNA, 19 nt, Homo sapiens
  misc_RNA (1)...(19): siRNA sense strand
acaauagaauucgcaugua

SEQ ID NO: 42516 - RNA, 19 nt, Homo sapiens
  misc_RNA (1)...(19): siRNA sense strand
uaacguggaaugugacuug

SEQ ID NO: 42517 - RNA, 19 nt, Homo sapiens
  misc_RNA (1)...(19): siRNA sense strand
ggagaagaaagaagaaaca

SEQ ID NO: 42518 - RNA, 19 nt, Homo sapiens
  misc_RNA (1)...(19): siRNA sense strand
guucauucauuuacagaug

SEQ ID NO: 42519 - RNA, 19 nt, Homo sapiens
  misc_RNA (1)...(19): siRNA sense strand
gaagcgagcagcugcaaag

SEQ ID NO: 42520 - RNA, 19 nt, Homo sapiens
  misc_RNA (1)...(19): siRNA sense strand
gaagagcccaucccugagu

SEQ ID NO: 42521 - RNA, 19 nt, Homo sapiens
  misc_RNA (1)...(19): siRNA sense strand
uuaccuacaucucauacuu

SEQ ID NO: 42522 - RNA, 19 nt, Homo sapiens
  misc_RNA (1)...(19): siRNA sense strand
gaagaaacuacagaauaug

SEQ ID NO: 42523 - RNA, 19 nt, Homo sapiens
  misc_RNA (1)...(19): siRNA sense strand
aagggaauguggaagauga

SEQ ID NO: 42524 - RNA, 19 nt, Homo sapiens
  misc_RNA (1)...(19): siRNA sense strand
guacugggucuggcuauuu

SEQ ID NO: 42525 - RNA, 19 nt, Homo sapiens
  misc_RNA (1)...(19): siRNA sense strand
ggaauuugaaggagaacaa

SEQ ID NO: 42526 - RNA, 19 nt, Homo sapiens
  misc_RNA (1)...(19): siRNA sense strand
aaaguuagacgugaccaua

SEQ ID NO: 42527 - RNA, 19 nt, Homo sapiens
  misc_RNA (1)...(19): siRNA sense strand
ggaaaggucucugaaagaa

SEQ ID NO: 42528 - RNA, 19 nt, Homo sapiens
  misc_RNA (1)...(19): siRNA sense strand
ggagaaaccuguggaaaug

SEQ ID NO: 42529 - RNA, 19 nt, Homo sapiens
  misc_RNA (1)...(19): siRNA sense strand
ggaguuaucuggugacaau

SEQ ID NO: 42530 - RNA, 19 nt, Homo sapiens
  misc_RNA (1)...(19): siRNA sense strand
cagaaaagcuugcagaaua

SEQ ID NO: 42531 - RNA, 19 nt, Homo sapiens
  misc_RNA (1)...(19): siRNA sense strand
aaagagaaauccugccaaa

SEQ ID NO: 42532 - RNA, 19 nt, Homo sapiens
  misc_RNA (1)...(19): siRNA sense strand
ggaauuaggauuauaugga

SEQ ID NO: 42533 - RNA, 19 nt, Homo sapiens
  misc_RNA (1)...(19): siRNA sense strand
uaucagggaauuaggauua

SEQ ID NO: 42534 - RNA, 19 nt, Homo sapiens
  misc_RNA (1)...(19): siRNA sense strand
gaagcuuucucauccugaa

SEQ ID NO: 42535 - RNA, 19 nt, Homo sapiens
  misc_RNA (1)...(19): siRNA sense strand
caaaagcgcucaaggacaa

SEQ ID NO: 42536 - RNA, 19 nt, Homo sapiens
  misc_RNA (1)...(19): siRNA sense strand
caaagggauugccauggaa

SEQ ID NO: 42537 - RNA, 19 nt, Homo sapiens
  misc_RNA (1)...(19): siRNA sense strand
acaaagggauugccaugga

SEQ ID NO: 42538 - RNA, 19 nt, Homo sapiens
  misc_RNA (1)...(19): siRNA sense strand
ggaagcagcagaguuaugu

SEQ ID NO: 42539 - RNA, 19 nt, Homo sapiens
  misc_RNA (1)...(19): siRNA sense strand
ucaagcacauucaggaguu

SEQ ID NO: 42540 - RNA, 19 nt, Homo sapiens
  misc_RNA (1)...(19): siRNA sense strand
gaaaggucucugaaagaaa

SEQ ID NO: 42541 - RNA, 19 nt, Homo sapiens
  misc_RNA (1)...(19): siRNA sense strand
ggacuugaagccacuuuga

SEQ ID NO: 42542 - RNA, 19 nt, Homo sapiens
  misc_RNA (1)...(19): siRNA sense strand
gaaaugcuacugcuucucu

SEQ ID NO: 42543 - RNA, 19 nt, Homo sapiens
  misc_RNA (1)...(19): siRNA sense strand
aagggaaccugaacagcua

SEQ ID NO: 42544 - RNA, 19 nt, Homo sapiens
  misc_RNA (1)...(19): siRNA sense strand
caagcacauucaggaguua

SEQ ID NO: 42545 - RNA, 19 nt, Homo sapiens
  misc_RNA (1)...(19): siRNA sense strand
gggaaaggucucugaaaga

SEQ ID NO: 42546 - RNA, 19 nt, Homo sapiens
  misc_RNA (1)...(19): siRNA sense strand
aaauuggccuggauacaga

SEQ ID NO: 42547 - RNA, 19 nt, Homo sapiens
  misc_RNA (1)...(19): siRNA sense strand
ggaaugccaagucagugua

SEQ ID NO: 42548 - RNA, 19 nt, Homo sapiens
  misc_RNA (1)...(19): siRNA sense strand
gugacaauaucgaucaaau

SEQ ID NO: 42549 - RNA, 19 nt, Homo sapiens
  misc_RNA (1)...(19): siRNA sense strand
gaaccugaacagcuacuau

SEQ ID NO: 42550 - RNA, 19 nt, Homo sapiens
  misc_RNA (1)...(19): siRNA sense strand
uuucucauccugaagauua

SEQ ID NO: 42551 - RNA, 19 nt, Homo sapiens
  misc_RNA (1)...(19): siRNA sense strand
cugcuucucuagugaguaa

SEQ ID NO: 42552 - RNA, 19 nt, Homo sapiens
  misc_RNA (1)...(19): siRNA sense strand
aggauuauauggacuugaa

SEQ ID NO: 42553 - RNA, 19 nt, Homo sapiens
  misc_RNA (1)...(19): siRNA sense strand
gaaggagaaaccuguggaa

SEQ ID NO: 42554 - RNA, 19 nt, Homo sapiens
  misc_RNA (1)...(19): siRNA sense strand
ucagggaauuaggauuaua

SEQ ID NO: 42555 - RNA, 19 nt, Homo sapiens
  misc_RNA (1)...(19): siRNA sense strand
gcagcagaguuauguuugg

SEQ ID NO: 42556 - RNA, 19 nt, Homo sapiens
  misc_RNA (1)...(19): siRNA sense strand
aguggaagcagcagaguua

SEQ ID NO: 42557 - RNA, 19 nt, Homo sapiens
  misc_RNA (1)...(19): siRNA sense strand
caguguaugugguuggaaa

SEQ ID NO: 42558 - RNA, 19 nt, Homo sapiens
  misc_RNA (1)...(19): siRNA sense strand
gcacugccucuucuauuuc

SEQ ID NO: 42559 - RNA, 19 nt, Homo sapiens
  misc_RNA (1)...(19): siRNA sense strand
gcuacugcuucucuaguga

SEQ ID NO: 42560 - RNA, 19 nt, Homo sapiens
  misc_RNA (1)...(19): siRNA sense strand
gcucaaggacaaagggauu

SEQ ID NO: 42561 - RNA, 19 nt, Homo sapiens
  misc_RNA (1)...(19): siRNA sense strand
ggaaagcauaacuguguau

SEQ ID NO: 42562 - RNA, 19 nt, Homo sapiens
  misc_RNA (1)...(19): siRNA sense strand
ugaaggaugcgaaggaaga

SEQ ID NO: 42563 - RNA, 19 nt, Homo sapiens
  misc_RNA (1)...(19): siRNA sense strand
aaacugaagucugggaaag

SEQ ID NO: 42564 - RNA, 19 nt, Homo sapiens
  misc_RNA (1)...(19): siRNA sense strand
aaaggucucugaaagaaaa

SEQ ID NO: 42565 - RNA, 19 nt, Homo sapiens
  misc_RNA (1)...(19): siRNA sense strand
ugggaaaggucucugaaag

SEQ ID NO: 42566 - RNA, 19 nt, Homo sapiens
  misc_RNA (1)...(19): siRNA sense strand
uggaaagcauaacugugua

SEQ ID NO: 42567 - RNA, 19 nt, Homo sapiens
  misc_RNA (1)...(19): siRNA sense strand
agcacugccucuucuauuu

SEQ ID NO: 42568 - RNA, 19 nt, Homo sapiens
  misc_RNA (1)...(19): siRNA sense strand
cagcagaguuauguuugga

SEQ ID NO: 42569 - RNA, 19 nt, Homo sapiens
  misc_RNA (1)...(19): siRNA sense strand
guggaaaccucaaaagaga

SEQ ID NO: 42570 - RNA, 19 nt, Homo sapiens
  misc_RNA (1)...(19): siRNA sense strand
ggauugccauggaaagcau

SEQ ID NO: 42571 - RNA, 19 nt, Homo sapiens
  misc_RNA (1)...(19): siRNA sense strand
ucacauacagucucaagca

SEQ ID NO: 42572 - RNA, 19 nt, Homo sapiens
  misc_RNA (1)...(19): siRNA sense strand
cauacagucucaagcacau

SEQ ID NO: 42573 - RNA, 19 nt, Homo sapiens
  misc_RNA (1)...(19): siRNA sense strand
aagcagcagaguuauguuu

SEQ ID NO: 42574 - RNA, 19 nt, Homo sapiens
  misc_RNA (1)...(19): siRNA sense strand
cagcacugccucuucuauu

SEQ ID NO: 42575 - RNA, 19 nt, Homo sapiens
  misc_RNA (1)...(19): siRNA sense strand
ccacuuugaucccuguuuu

SEQ ID NO: 42576 - RNA, 19 nt, Homo sapiens
  misc_RNA (1)...(19): siRNA sense strand
ccucagcacugccucuucu

SEQ ID NO: 42577 - RNA, 19 nt, Homo sapiens
  misc_RNA (1)...(19): siRNA sense strand
gaaaagcuugcagaauaua

SEQ ID NO: 42578 - RNA, 19 nt, Homo sapiens
  misc_RNA (1)...(19): siRNA sense strand
caagucaguguaugugguu

SEQ ID NO: 42579 - RNA, 19 nt, Homo sapiens
  misc_RNA (1)...(19): siRNA sense strand
agaguuauguuuggagcaa

SEQ ID NO: 42580 - RNA, 19 nt, Homo sapiens
  misc_RNA (1)...(19): siRNA sense strand
guauaucagggaauuagga

SEQ ID NO: 42581 - RNA, 19 nt, Homo sapiens
  misc_RNA (1)...(19): siRNA sense strand
aagcauaacuguguaucag

SEQ ID NO: 42582 - RNA, 19 nt, Homo sapiens
  misc_RNA (1)...(19): siRNA sense strand
agaaaagcuugcagaauau

SEQ ID NO: 42583 - RNA, 19 nt, Homo sapiens
  misc_RNA (1)...(19): siRNA sense strand
gaaugccaagucaguguau

SEQ ID NO: 42584 - RNA, 19 nt, Homo sapiens
  misc_RNA (1)...(19): siRNA sense strand
agaaaccuguggaaaugca

SEQ ID NO: 42585 - RNA, 19 nt, Homo sapiens
  misc_RNA (1)...(19): siRNA sense strand
ggccucacauacagucuca

SEQ ID NO: 42586 - RNA, 19 nt, Homo sapiens
  misc_RNA (1)...(19): siRNA sense strand
gaaagcauaacuguguauc

SEQ ID NO: 42587 - RNA, 19 nt, Homo sapiens
  misc_RNA (1)...(19): siRNA sense strand
cagggaauuaggauuauau

SEQ ID NO: 42588 - RNA, 19 nt, Homo sapiens
  misc_RNA (1)...(19): siRNA sense strand
guuaucuggugacaauauc

SEQ ID NO: 42589 - RNA, 19 nt, Homo sapiens
  misc_RNA (1)...(19): siRNA sense strand
gaagcagcagaguuauguu

SEQ ID NO: 42590 - RNA, 19 nt, Homo sapiens
  misc_RNA (1)...(19): siRNA sense strand
ccucuggccucacauacag

SEQ ID NO: 42591 - RNA, 19 nt, Homo sapiens
  misc_RNA (1)...(19): siRNA sense strand
aggagaaaccuguggaaau

SEQ ID NO: 42592 - RNA, 19 nt, Homo sapiens
  misc_RNA (1)...(19): siRNA sense strand
aaaauggaaugccaaguca

SEQ ID NO: 42593 - RNA, 19 nt, Homo sapiens
  misc_RNA (1)...(19): siRNA sense strand
aaaugcuacugcuucucua

SEQ ID NO: 42594 - RNA, 19 nt, Homo sapiens
  misc_RNA (1)...(19): siRNA sense strand
ggccaggauccguauauca

SEQ ID NO: 42595 - RNA, 19 nt, Homo sapiens
  misc_RNA (1)...(19): siRNA sense strand
ggaaaccucaaaagagaaa

SEQ ID NO: 42596 - RNA, 19 nt, Homo sapiens
  misc_RNA (1)...(19): siRNA sense strand
gaaggaugcgaaggaagau

SEQ ID NO: 42597 - RNA, 19 nt, Homo sapiens
  misc_RNA (1)...(19): siRNA sense strand
gagcaaaacaauaaaacug

SEQ ID NO: 42598 - RNA, 19 nt, Homo sapiens
  misc_RNA (1)...(19): siRNA sense strand
gcacauucaggaguuaucu

SEQ ID NO: 42599 - RNA, 19 nt, Homo sapiens
  misc_RNA (1)...(19): siRNA sense strand
uggaaaugcuacugcuucu

SEQ ID NO: 42600 - RNA, 19 nt, Homo sapiens
  misc_RNA (1)...(19): siRNA sense strand
aaccugaacagcuacuauu

SEQ ID NO: 42601 - RNA, 19 nt, Homo sapiens
  misc_RNA (1)...(19): siRNA sense strand
ccauggaaagcauaacugu

SEQ ID NO: 42602 - RNA, 19 nt, Homo sapiens
  misc_RNA (1)...(19): siRNA sense strand
aaagggauugccauggaaa

SEQ ID NO: 42603 - RNA, 19 nt, Homo sapiens
  misc_RNA (1)...(19): siRNA sense strand
gagaaauccugccaaaagc

SEQ ID NO: 42604 - RNA, 19 nt, Homo sapiens
  misc_RNA (1)...(19): siRNA sense strand
acugaaggaugcgaaggaa

SEQ ID NO: 42605 - RNA, 19 nt, Homo sapiens
  misc_RNA (1)...(19): siRNA sense strand
gcuugcagaauauauuugu

SEQ ID NO: 42606 - RNA, 19 nt, Homo sapiens
  misc_RNA (1)...(19): siRNA sense strand
gaaagaaagucaccuugaa

SEQ ID NO: 42607 - RNA, 19 nt, Homo sapiens
  misc_RNA (1)...(19): siRNA sense strand
ccagcgaggucuugaaaua

SEQ ID NO: 42608 - RNA, 19 nt, Homo sapiens
  misc_RNA (1)...(19): siRNA sense strand
ggacagaucaugacacuga

SEQ ID NO: 42609 - RNA, 19 nt, Homo sapiens
  misc_RNA (1)...(19): siRNA sense strand
ccaaagggcuguaucuaga

SEQ ID NO: 42610 - RNA, 19 nt, Homo sapiens
  misc_RNA (1)...(19): siRNA sense strand
ggaagacccuguggacuuu

SEQ ID NO: 42611 - RNA, 19 nt, Homo sapiens
  misc_RNA (1)...(19): siRNA sense strand
gaacggagccaaugacuuc

SEQ ID NO: 42612 - RNA, 19 nt, Homo sapiens
  misc_RNA (1)...(19): siRNA sense strand
gaagaggccugcacucagu

SEQ ID NO: 42613 - RNA, 19 nt, Homo sapiens
  misc_RNA (1)...(19): siRNA sense strand
gaggagagauugagcuguu

SEQ ID NO: 42614 - RNA, 19 nt, Homo sapiens
  misc_RNA (1)...(19): siRNA sense strand
ggucacaucuucacauuca

SEQ ID NO: 42615 - RNA, 19 nt, Homo sapiens
  misc_RNA (1)...(19): siRNA sense strand
gaaaguguguggccugugu

SEQ ID NO: 42616 - RNA, 19 nt, Homo sapiens
  misc_RNA (1)...(19): siRNA sense strand
gaaggaggaggucuuuaua

SEQ ID NO: 42617 - RNA, 19 nt, Homo sapiens
  misc_RNA (1)...(19): siRNA sense strand
gaacauggaagucaacguu

SEQ ID NO: 42618 - RNA, 19 nt, Homo sapiens
  misc_RNA (1)...(19): siRNA sense strand
guagaauccuuaccaguga

SEQ ID NO: 42619 - RNA, 19 nt, Homo sapiens
  misc_RNA (1)...(19): siRNA sense strand
ucacuuacguucugcauga

SEQ ID NO: 42620 - RNA, 19 nt, Homo sapiens
  misc_RNA (1)...(19): siRNA sense strand
gaggacaccugauuucugu

SEQ ID NO: 42621 - RNA, 19 nt, Homo sapiens
  misc_RNA (1)...(19): siRNA sense strand
aaacgcuccuucucgauua

SEQ ID NO: 42622 - RNA, 19 nt, Homo sapiens
  misc_RNA (1)...(19): siRNA sense strand
ggccagaccuugcugaaga

SEQ ID NO: 42623 - RNA, 19 nt, Homo sapiens
  misc_RNA (1)...(19): siRNA sense strand
gagcugaacugcccgaaag

SEQ ID NO: 42624 - RNA, 19 nt, Homo sapiens
  misc_RNA (1)...(19): siRNA sense strand
ggaaagaaagucaccuuga

SEQ ID NO: 42625 - RNA, 19 nt, Homo sapiens
  misc_RNA (1)...(19): siRNA sense strand
gcaccugccugucaaguca

SEQ ID NO: 42626 - RNA, 19 nt, Homo sapiens
  misc_RNA (1)...(19): siRNA sense strand
ggagaaacagugaagauug

SEQ ID NO: 42627 - RNA, 19 nt, Homo sapiens
  misc_RNA (1)...(19): siRNA sense strand
gagaagacuuugugugagu

SEQ ID NO: 42628 - RNA, 19 nt, Homo sapiens
  misc_RNA (1)...(19): siRNA sense strand
ggacgucucuguggauuca

SEQ ID NO: 42629 - RNA, 19 nt, Homo sapiens
  misc_RNA (1)...(19): siRNA sense strand
gagaaacagugaagauugg

SEQ ID NO: 42630 - RNA, 19 nt, Homo sapiens
  misc_RNA (1)...(19): siRNA sense strand
gcaaagccauguacuccau

SEQ ID NO: 42631 - RNA, 19 nt, Homo sapiens
  misc_RNA (1)...(19): siRNA sense strand
ggucaucucuggauucaag

SEQ ID NO: 42632 - RNA, 19 nt, Homo sapiens
  misc_RNA (1)...(19): siRNA sense strand
gaaacgcuccuucucgauu

SEQ ID NO: 42633 - RNA, 19 nt, Homo sapiens
  misc_RNA (1)...(19): siRNA sense strand
ccaaggcuuucauuucaaa

SEQ ID NO: 42634 - RNA, 19 nt, Homo sapiens
  misc_RNA (1)...(19): siRNA sense strand
caagagcuuugacaacaga

SEQ ID NO: 42635 - RNA, 19 nt, Homo sapiens
  misc_RNA (1)...(19): siRNA sense strand
guucuuauguccuauuuca

SEQ ID NO: 42636 - RNA, 19 nt, Homo sapiens
  misc_RNA (1)...(19): siRNA sense strand
ccugagcacugccagauuu

SEQ ID NO: 42637 - RNA, 19 nt, Homo sapiens
  misc_RNA (1)...(19): siRNA sense strand
gggaggaccugcagaugga

SEQ ID NO: 42638 - RNA, 19 nt, Homo sapiens
  misc_RNA (1)...(19): siRNA sense strand
gaaauccugccucugauga

SEQ ID NO: 42639 - RNA, 19 nt, Homo sapiens
  misc_RNA (1)...(19): siRNA sense strand
ggaagacugugaugaucga

SEQ ID NO: 42640 - RNA, 19 nt, Homo sapiens
  misc_RNA (1)...(19): siRNA sense strand
gaggaggucuuuauacaac

SEQ ID NO: 42641 - RNA, 19 nt, Homo sapiens
  misc_RNA (1)...(19): siRNA sense strand
acauggaagucaacguuua

SEQ ID NO: 42642 - RNA, 19 nt, Homo sapiens
  misc_RNA (1)...(19): siRNA sense strand
auacuugacuucagaaaug

SEQ ID NO: 42643 - RNA, 19 nt, Homo sapiens
  misc_RNA (1)...(19): siRNA sense strand
ggaagcaucaccaccauug

SEQ ID NO: 42644 - RNA, 19 nt, Homo sapiens
  misc_RNA (1)...(19): siRNA sense strand
gacagauacuucaacaaga

SEQ ID NO: 42645 - RNA, 19 nt, Homo sapiens
  misc_RNA (1)...(19): siRNA sense strand
gcaauuccuuccuccacaa

SEQ ID NO: 42646 - RNA, 19 nt, Homo sapiens
  misc_RNA (1)...(19): siRNA sense strand
gaaggcgagugcuguggaa

SEQ ID NO: 42647 - RNA, 19 nt, Homo sapiens
  misc_RNA (1)...(19): siRNA sense strand
cagauaaagucauguugga

SEQ ID NO: 42648 - RNA, 19 nt, Homo sapiens
  misc_RNA (1)...(19): siRNA sense strand
gggaacuccuggaaaguga

SEQ ID NO: 42649 - RNA, 19 nt, Homo sapiens
  misc_RNA (1)...(19): siRNA sense strand
gaggagggcugcgaugugu

SEQ ID NO: 42650 - RNA, 19 nt, Homo sapiens
  misc_RNA (1)...(19): siRNA sense strand
cgccaaggcuuucauuuca

SEQ ID NO: 42651 - RNA, 19 nt, Homo sapiens
  misc_RNA (1)...(19): siRNA sense strand
ugaaauccaucgaggugaa

SEQ ID NO: 42652 - RNA, 19 nt, Homo sapiens
  misc_RNA (1)...(19): siRNA sense strand
aaacugugcucuggauuug

SEQ ID NO: 42653 - RNA, 19 nt, Homo sapiens
  misc_RNA (1)...(19): siRNA sense strand
gugagaagacuuuguguga

SEQ ID NO: 42654 - RNA, 19 nt, Homo sapiens
  misc_RNA (1)...(19): siRNA sense strand
gagugagccucuccgugua

SEQ ID NO: 42655 - RNA, 19 nt, Homo sapiens
  misc_RNA (1)...(19): siRNA sense strand
cagcuguucuuauguccua

SEQ ID NO: 42656 - RNA, 19 nt, Homo sapiens
  misc_RNA (1)...(19): siRNA sense strand
gaccacuccuucuccauug

SEQ ID NO: 42657 - RNA, 19 nt, Homo sapiens
  misc_RNA (1)...(19): siRNA sense strand
ggagaacaguggugugaac

SEQ ID NO: 42658 - RNA, 19 nt, Homo sapiens
  misc_RNA (1)...(19): siRNA sense strand
gaggacagaucaugacacu

SEQ ID NO: 42659 - RNA, 19 nt, Homo sapiens
  misc_RNA (1)...(19): siRNA sense strand
ccagugcugugaugaguau

SEQ ID NO: 42660 - RNA, 19 nt, Homo sapiens
  misc_RNA (1)...(19): siRNA sense strand
caaacugugcucuggauuu

SEQ ID NO: 42661 - RNA, 19 nt, Homo sapiens
  misc_RNA (1)...(19): siRNA sense strand
agaagaaggucauugugau

SEQ ID NO: 42662 - RNA, 19 nt, Homo sapiens
  misc_RNA (1)...(19): siRNA sense strand
aaacgugccagaacuauga

SEQ ID NO: 42663 - RNA, 19 nt, Homo sapiens
  misc_RNA (1)...(19): siRNA sense strand
gagcagugccagcuucuga

SEQ ID NO: 42664 - RNA, 19 nt, Homo sapiens
  misc_RNA (1)...(19): siRNA sense strand
ggaggucuuuauacaacaa

SEQ ID NO: 42665 - RNA, 19 nt, Homo sapiens
  misc_RNA (1)...(19): siRNA sense strand
ggaacguggucccggagaa

SEQ ID NO: 42666 - RNA, 19 nt, Homo sapiens
  misc_RNA (1)...(19): siRNA sense strand
ggaaggaucggacaaaauu

SEQ ID NO: 42667 - RNA, 19 nt, Homo sapiens
  misc_RNA (1)...(19): siRNA sense strand
gagugugaguggcgcuaua

SEQ ID NO: 42668 - RNA, 19 nt, Homo sapiens
  misc_RNA (1)...(19): siRNA sense strand
ggaccacuccuucuccauu

SEQ ID NO: 42669 - RNA, 19 nt, Homo sapiens
  misc_RNA (1)...(19): siRNA sense strand
aagauuggcugcaacacuu

SEQ ID NO: 42670 - RNA, 19 nt, Homo sapiens
  misc_RNA (1)...(19): siRNA sense strand
caacggaugucccggaacu

SEQ ID NO: 42671 - RNA, 19 nt, Homo sapiens
  misc_RNA (1)...(19): siRNA sense strand
ugaagaggcccaugaagga

SEQ ID NO: 42672 - RNA, 19 nt, Homo sapiens
  misc_RNA (1)...(19): siRNA sense strand
gcagcugugucccugaaga

SEQ ID NO: 42673 - RNA, 19 nt, Homo sapiens
  misc_RNA (1)...(19): siRNA sense strand
gaagaagaaggucauugug

SEQ ID NO: 42674 - RNA, 19 nt, Homo sapiens
  misc_RNA (1)...(19): siRNA sense strand
gaaauacacacuguuccaa

SEQ ID NO: 42675 - RNA, 19 nt, Homo sapiens
  misc_RNA (1)...(19): siRNA sense strand
guggauuccuccuguagaa

SEQ ID NO: 42676 - RNA, 19 nt, Homo sapiens
  misc_RNA (1)...(19): siRNA sense strand
ggcuguaucuagaaacuga

SEQ ID NO: 42677 - RNA, 19 nt, Homo sapiens
  misc_RNA (1)...(19): siRNA sense strand
ggaggaggucuuuauacaa

SEQ ID NO: 42678 - RNA, 19 nt, Homo sapiens
  misc_RNA (1)...(19): siRNA sense strand
gggcuucacuuacguucug

SEQ ID NO: 42679 - RNA, 19 nt, Homo sapiens
  misc_RNA (1)...(19): siRNA sense strand
gcaagugugugaggugauc

SEQ ID NO: 42680 - RNA, 19 nt, Homo sapiens
  misc_RNA (1)...(19): siRNA sense strand
gaacguggucccggagaaa

SEQ ID NO: 42681 - RNA, 19 nt, Homo sapiens
  misc_RNA (1)...(19): siRNA sense strand
ggagaacggguaugagugu

SEQ ID NO: 42682 - RNA, 19 nt, Homo sapiens
  misc_RNA (1)...(19): siRNA sense strand
agggacagcuccuggauga

SEQ ID NO: 42683 - RNA, 19 nt, Homo sapiens
  misc_RNA (1)...(19): siRNA sense strand
aaacugaggcuggguacua

SEQ ID NO: 42684 - RNA, 19 nt, Homo sapiens
  misc_RNA (1)...(19): siRNA sense strand
aaagggcuguaucuagaaa

SEQ ID NO: 42685 - RNA, 19 nt, Homo sapiens
  misc_RNA (1)...(19): siRNA sense strand
gaagaaggucauugugauc

SEQ ID NO: 42686 - RNA, 19 nt, Homo sapiens
  misc_RNA (1)...(19): siRNA sense strand
caguggaucugcagcaaug

SEQ ID NO: 42687 - RNA, 19 nt, Homo sapiens
  misc_RNA (1)...(19): siRNA sense strand
ucagacagauacuucaaca

SEQ ID NO: 42688 - RNA, 19 nt, Homo sapiens
  misc_RNA (1)...(19): siRNA sense strand
gcaagaaacgggucaccau

SEQ ID NO: 42689 - RNA, 19 nt, Homo sapiens
  misc_RNA (1)...(19): siRNA sense strand
ugaaggaggaggucuuuau

SEQ ID NO: 42690 - RNA, 19 nt, Homo sapiens
  misc_RNA (1)...(19): siRNA sense strand
gugacaguguucccuauug

SEQ ID NO: 42691 - RNA, 19 nt, Homo sapiens
  misc_RNA (1)...(19): siRNA sense strand
caagaggaacuccaugguu

SEQ ID NO: 42692 - RNA, 19 nt, Homo sapiens
  misc_RNA (1)...(19): siRNA sense strand
gcagacauaccaggagaaa

SEQ ID NO: 42693 - RNA, 19 nt, Homo sapiens
  misc_RNA (1)...(19): siRNA sense strand
ucagugggaucugccagua

SEQ ID NO: 42694 - RNA, 19 nt, Homo sapiens
  misc_RNA (1)...(19): siRNA sense strand
gaggugauucuccauaaug

SEQ ID NO: 42695 - RNA, 19 nt, Homo sapiens
  misc_RNA (1)...(19): siRNA sense strand
cagaauggcaagagaguga

SEQ ID NO: 42696 - RNA, 19 nt, Homo sapiens
  misc_RNA (1)...(19): siRNA sense strand
agacauaccaggagaaagu

SEQ ID NO: 42697 - RNA, 19 nt, Homo sapiens
  misc_RNA (1)...(19): siRNA sense strand
ucaaugccauggagugcaa

SEQ ID NO: 42698 - RNA, 19 nt, Homo sapiens
  misc_RNA (1)...(19): siRNA sense strand
caacagccuugugaaacug

SEQ ID NO: 42699 - RNA, 19 nt, Homo sapiens
  misc_RNA (1)...(19): siRNA sense strand
gcuaagaggaggacagauc

SEQ ID NO: 42700 - RNA, 19 nt, Homo sapiens
  misc_RNA (1)...(19): siRNA sense strand
ccaccugccuucccgacaa

SEQ ID NO: 42701 - RNA, 19 nt, Homo sapiens
  misc_RNA (1)...(19): siRNA sense strand
ggaagacccagugcuguga

SEQ ID NO: 42702 - RNA, 19 nt, Homo sapiens
  misc_RNA (1)...(19): siRNA sense strand
gcaggaaggaggagugcaa

SEQ ID NO: 42703 - RNA, 19 nt, Homo sapiens
  misc_RNA (1)...(19): siRNA sense strand
ccaguuucccagcuucuua

SEQ ID NO: 42704 - RNA, 19 nt, Homo sapiens
  misc_RNA (1)...(19): siRNA sense strand
ccggaaauccugccucuga

SEQ ID NO: 42705 - RNA, 19 nt, Homo sapiens
  misc_RNA (1)...(19): siRNA sense strand
caagaucgaccgcccugaa

SEQ ID NO: 42706 - RNA, 19 nt, Homo sapiens
  misc_RNA (1)...(19): siRNA sense strand
ggaaagagcuuguuugaug

SEQ ID NO: 42707 - RNA, 19 nt, Homo sapiens
  misc_RNA (1)...(19): siRNA sense strand
gaagagaucuguucaaguu

SEQ ID NO: 42708 - RNA, 19 nt, Homo sapiens
  misc_RNA (1)...(19): siRNA sense strand
gaaauaaaguggaacgaaa

SEQ ID NO: 42709 - RNA, 19 nt, Homo sapiens
  misc_RNA (1)...(19): siRNA sense strand
guaaacagcuccugaaaga

SEQ ID NO: 42710 - RNA, 19 nt, Homo sapiens
  misc_RNA (1)...(19): siRNA sense strand
gaacaugaacuccaaauuu

SEQ ID NO: 42711 - RNA, 19 nt, Homo sapiens
  misc_RNA (1)...(19): siRNA sense strand
ugacagauguugccaauaa

SEQ ID NO: 42712 - RNA, 19 nt, Homo sapiens
  misc_RNA (1)...(19): siRNA sense strand
gcagaaacaugccaauaaa

SEQ ID NO: 42713 - RNA, 19 nt, Homo sapiens
  misc_RNA (1)...(19): siRNA sense strand
gaacugaggcccagcaaua

SEQ ID NO: 42714 - RNA, 19 nt, Homo sapiens
  misc_RNA (1)...(19): siRNA sense strand
ggaaagacauucaucauag

SEQ ID NO: 42715 - RNA, 19 nt, Homo sapiens
  misc_RNA (1)...(19): siRNA sense strand
gaaagugauucauucagua

SEQ ID NO: 42716 - RNA, 19 nt, Homo sapiens
  misc_RNA (1)...(19): siRNA sense strand
caaaucaucuugucucauu

SEQ ID NO: 42717 - RNA, 19 nt, Homo sapiens
  misc_RNA (1)...(19): siRNA sense strand
ggaugaaugugcagaauaa

SEQ ID NO: 42718 - RNA, 19 nt, Homo sapiens
  misc_RNA (1)...(19): siRNA sense strand
gaccaaaccuguauuuaga

SEQ ID NO: 42719 - RNA, 19 nt, Homo sapiens
  misc_RNA (1)...(19): siRNA sense strand
gagcaaauguuacuuguuc

SEQ ID NO: 42720 - RNA, 19 nt, Homo sapiens
  misc_RNA (1)...(19): siRNA sense strand
ggaagaagaugaugauaag

SEQ ID NO: 42721 - RNA, 19 nt, Homo sapiens
  misc_RNA (1)...(19): siRNA sense strand
guacguugcuuaaaucuga

SEQ ID NO: 42722 - RNA, 19 nt, Homo sapiens
  misc_RNA (1)...(19): siRNA sense strand
ccaaagagcauuguuauaa

SEQ ID NO: 42723 - RNA, 19 nt, Homo sapiens
  misc_RNA (1)...(19): siRNA sense strand
gaagauggauuugaagaug

SEQ ID NO: 42724 - RNA, 19 nt, Homo sapiens
  misc_RNA (1)...(19): siRNA sense strand
gaagaauuguguccaaaga

SEQ ID NO: 42725 - RNA, 19 nt, Homo sapiens
  misc_RNA (1)...(19): siRNA sense strand
acagagaccuggagccuua

SEQ ID NO: 42726 - RNA, 19 nt, Homo sapiens
  misc_RNA (1)...(19): siRNA sense strand
guacagagaagaagucuaa

SEQ ID NO: 42727 - RNA, 19 nt, Homo sapiens
  misc_RNA (1)...(19): siRNA sense strand
gaagauguacuuggaaaua

SEQ ID NO: 42728 - RNA, 19 nt, Homo sapiens
  misc_RNA (1)...(19): siRNA sense strand
cuaaggacauggaaucaua

SEQ ID NO: 42729 - RNA, 19 nt, Homo sapiens
  misc_RNA (1)...(19): siRNA sense strand
ugagagugaugaagauuua

SEQ ID NO: 42730 - RNA, 19 nt, Homo sapiens
  misc_RNA (1)...(19): siRNA sense strand
ugagagugaugaagauuua

SEQ ID NO: 42731 - RNA, 19 nt, Homo sapiens
  misc_RNA (1)...(19): siRNA sense strand
gaaagaagagauaauguug

SEQ ID NO: 42732 - RNA, 19 nt, Homo sapiens
  misc_RNA (1)...(19): siRNA sense strand
agacucagauuguguuaua

SEQ ID NO: 42733 - RNA, 19 nt, Homo sapiens
  misc_RNA (1)...(19): siRNA sense strand
gguagaaauuggcuucaua

SEQ ID NO: 42734 - RNA, 19 nt, Homo sapiens
  misc_RNA (1)...(19): siRNA sense strand
gagaagauguacuuggaaa

SEQ ID NO: 42735 - RNA, 19 nt, Homo sapiens
  misc_RNA (1)...(19): siRNA sense strand
gauauuagcaugagucuau

SEQ ID NO: 42736 - RNA, 19 nt, Homo sapiens
  misc_RNA (1)...(19): siRNA sense strand
gaagaaguaggcaucaaua

SEQ ID NO: 42737 - RNA, 19 nt, Homo sapiens
  misc_RNA (1)...(19): siRNA sense strand
gaaagagcuuguuugaugu

SEQ ID NO: 42738 - RNA, 19 nt, Homo sapiens
  misc_RNA (1)...(19): siRNA sense strand
gauccauuguguauaguua

SEQ ID NO: 42739 - RNA, 19 nt, Homo sapiens
  misc_RNA (1)...(19): siRNA sense strand
caauugagauccuuaaaca

SEQ ID NO: 42740 - RNA, 19 nt, Homo sapiens
  misc_RNA (1)...(19): siRNA sense strand
ggaaagugauucauucagu

SEQ ID NO: 42741 - RNA, 19 nt, Homo sapiens
  misc_RNA (1)...(19): siRNA sense strand
ggagaucaguggaaacuuc

SEQ ID NO: 42742 - RNA, 19 nt, Homo sapiens
  misc_RNA (1)...(19): siRNA sense strand
caaauaguguucagacaga

SEQ ID NO: 42743 - RNA, 19 nt, Homo sapiens
  misc_RNA (1)...(19): siRNA sense strand
ggacauggaaucauauuau

SEQ ID NO: 42744 - RNA, 19 nt, Homo sapiens
  misc_RNA (1)...(19): siRNA sense strand
gaagaaagaagagauaaug

SEQ ID NO: 42745 - RNA, 19 nt, Homo sapiens
  misc_RNA (1)...(19): siRNA sense strand
gcaccaaagagcauuguua

SEQ ID NO: 42746 - RNA, 19 nt, Homo sapiens
  misc_RNA (1)...(19): siRNA sense strand
cuacuaacauugagacuga

SEQ ID NO: 42747 - RNA, 19 nt, Homo sapiens
  misc_RNA (1)...(19): siRNA sense strand
uuaaauaggcaccuucuua

SEQ ID NO: 42748 - RNA, 19 nt, Homo sapiens
  misc_RNA (1)...(19): siRNA sense strand
ccagaauacuguucaggua

SEQ ID NO: 42749 - RNA, 19 nt, Homo sapiens
  misc_RNA (1)...(19): siRNA sense strand
gaacuuaggaaacuuaauc

SEQ ID NO: 42750 - RNA, 19 nt, Homo sapiens
  misc_RNA (1)...(19): siRNA sense strand
gaaauucagugugucauag

SEQ ID NO: 42751 - RNA, 19 nt, Homo sapiens
  misc_RNA (1)...(19): siRNA sense strand
cuaauucaguuguguguuu

SEQ ID NO: 42752 - RNA, 19 nt, Homo sapiens
  misc_RNA (1)...(19): siRNA sense strand
aaacauuucugccaaacaa

SEQ ID NO: 42753 - RNA, 19 nt, Homo sapiens
  misc_RNA (1)...(19): siRNA sense strand
ggaauuaugggaacugaaa

SEQ ID NO: 42754 - RNA, 19 nt, Homo sapiens
  misc_RNA (1)...(19): siRNA sense strand
gguagaagcuaggcagaaa

SEQ ID NO: 42755 - RNA, 19 nt, Homo sapiens
  misc_RNA (1)...(19): siRNA sense strand
gaagauuauugcugauguu

SEQ ID NO: 42756 - RNA, 19 nt, Homo sapiens
  misc_RNA (1)...(19): siRNA sense strand
gaaagaaaggcauguguuc

SEQ ID NO: 42757 - RNA, 19 nt, Homo sapiens
  misc_RNA (1)...(19): siRNA sense strand
gcaagaaauuaauggacaa

SEQ ID NO: 42758 - RNA, 19 nt, Homo sapiens
  misc_RNA (1)...(19): siRNA sense strand
gggaagaagaugaugauaa

SEQ ID NO: 42759 - RNA, 19 nt, Homo sapiens
  misc_RNA (1)...(19): siRNA sense strand
guaaauuuccucucacuga

SEQ ID NO: 42760 - RNA, 19 nt, Homo sapiens
  misc_RNA (1)...(19): siRNA sense strand
gagaagcaaggaagaagua

SEQ ID NO: 42761 - RNA, 19 nt, Homo sapiens
  misc_RNA (1)...(19): siRNA sense strand
aaaggcagguguaggaauu

SEQ ID NO: 42762 - RNA, 19 nt, Homo sapiens
  misc_RNA (1)...(19): siRNA sense strand
uaaaagaugugcuguagaa

SEQ ID NO: 42763 - RNA, 19 nt, Homo sapiens
  misc_RNA (1)...(19): siRNA sense strand
ggagaugcuuaagucuuua

SEQ ID NO: 42764 - RNA, 19 nt, Homo sapiens
  misc_RNA (1)...(19): siRNA sense strand
agaauucacuggauccauu

SEQ ID NO: 42765 - RNA, 19 nt, Homo sapiens
  misc_RNA (1)...(19): siRNA sense strand
gauuauugcugauguuauc

SEQ ID NO: 42766 - RNA, 19 nt, Homo sapiens
  misc_RNA (1)...(19): siRNA sense strand
guaaugagaaguuucgauu

SEQ ID NO: 42767 - RNA, 19 nt, Homo sapiens
  misc_RNA (1)...(19): siRNA sense strand
guauccaccuguuuaugua

SEQ ID NO: 42768 - RNA, 19 nt, Homo sapiens
  misc_RNA (1)...(19): siRNA sense strand
uaaagaugauggcaaagau

SEQ ID NO: 42769 - RNA, 19 nt, Homo sapiens
  misc_RNA (1)...(19): siRNA sense strand
gaaagacauucaucauagg

SEQ ID NO: 42770 - RNA, 19 nt, Homo sapiens
  misc_RNA (1)...(19): siRNA sense strand
ugaaggagaucaguggaaa

SEQ ID NO: 42771 - RNA, 19 nt, Homo sapiens
  misc_RNA (1)...(19): siRNA sense strand
gaagugauaccagcaagaa

SEQ ID NO: 42772 - RNA, 19 nt, Homo sapiens
  misc_RNA (1)...(19): siRNA sense strand
cagauuggaucauugcuau

SEQ ID NO: 42773 - RNA, 19 nt, Homo sapiens
  misc_RNA (1)...(19): siRNA sense strand
gaccaagugcuacagcuua

SEQ ID NO: 42774 - RNA, 19 nt, Homo sapiens
  misc_RNA (1)...(19): siRNA sense strand
uggagaugcuuaagucuuu

SEQ ID NO: 42775 - RNA, 19 nt, Homo sapiens
  misc_RNA (1)...(19): siRNA sense strand
gaggguuucuaucuuacua

SEQ ID NO: 42776 - RNA, 19 nt, Homo sapiens
  misc_RNA (1)...(19): siRNA sense strand
gagagcaaauguuacuugu

SEQ ID NO: 42777 - RNA, 19 nt, Homo sapiens
  misc_RNA (1)...(19): siRNA sense strand
guagaaauuggcuucauaa

SEQ ID NO: 42778 - RNA, 19 nt, Homo sapiens
  misc_RNA (1)...(19): siRNA sense strand
cagaucaccuguacugguu

SEQ ID NO: 42779 - RNA, 19 nt, Homo sapiens
  misc_RNA (1)...(19): siRNA sense strand
gauggaagaccaagugcua

SEQ ID NO: 42780 - RNA, 19 nt, Homo sapiens
  misc_RNA (1)...(19): siRNA sense strand
ucacugaggaggaugauaa

SEQ ID NO: 42781 - RNA, 19 nt, Homo sapiens
  misc_RNA (1)...(19): siRNA sense strand
cccaacacuugaucauuua

SEQ ID NO: 42782 - RNA, 19 nt, Homo sapiens
  misc_RNA (1)...(19): siRNA sense strand
gcaacuggauauggaaaga

SEQ ID NO: 42783 - RNA, 19 nt, Homo sapiens
  misc_RNA (1)...(19): siRNA sense strand
ccaguucaguggaaaguga

SEQ ID NO: 42784 - RNA, 19 nt, Homo sapiens
  misc_RNA (1)...(19): siRNA sense strand
ggaaauaaaguggaacgaa

SEQ ID NO: 42785 - RNA, 19 nt, Homo sapiens
  misc_RNA (1)...(19): siRNA sense strand
gauaccagcaagaaauuaa

SEQ ID NO: 42786 - RNA, 19 nt, Homo sapiens
  misc_RNA (1)...(19): siRNA sense strand
cagcuauucuggcaacaaa

SEQ ID NO: 42787 - RNA, 19 nt, Homo sapiens
  misc_RNA (1)...(19): siRNA sense strand
uguguuauauggcaaauug

SEQ ID NO: 42788 - RNA, 19 nt, Homo sapiens
  misc_RNA (1)...(19): siRNA sense strand
caucauagguuuguaagag

SEQ ID NO: 42789 - RNA, 19 nt, Homo sapiens
  misc_RNA (1)...(19): siRNA sense strand
agacauucaucauagguuu

SEQ ID NO: 42790 - RNA, 19 nt, Homo sapiens
  misc_RNA (1)...(19): siRNA sense strand
auacguaacuccagaauac

SEQ ID NO: 42791 - RNA, 19 nt, Homo sapiens
  misc_RNA (1)...(19): siRNA sense strand
gagcuuguuugaugucguu

SEQ ID NO: 42792 - RNA, 19 nt, Homo sapiens
  misc_RNA (1)...(19): siRNA sense strand
gaacaaacaguugacuuca

SEQ ID NO: 42793 - RNA, 19 nt, Homo sapiens
  misc_RNA (1)...(19): siRNA sense strand
ggccaucacauacucuuua

SEQ ID NO: 42794 - RNA, 19 nt, Homo sapiens
  misc_RNA (1)...(19): siRNA sense strand
aagaugugcuguagaagaa

SEQ ID NO: 42795 - RNA, 19 nt, Homo sapiens
  misc_RNA (1)...(19): siRNA sense strand
gcagccauuucuugucaaa

SEQ ID NO: 42796 - RNA, 19 nt, Homo sapiens
  misc_RNA (1)...(19): siRNA sense strand
gaaguugggcucccuaaag

SEQ ID NO: 42797 - RNA, 19 nt, Homo sapiens
  misc_RNA (1)...(19): siRNA sense strand
gaguagaagacaacaaauu

SEQ ID NO: 42798 - RNA, 19 nt, Homo sapiens
  misc_RNA (1)...(19): siRNA sense strand
cuacgugacuuugauauca

SEQ ID NO: 42799 - RNA, 19 nt, Homo sapiens
  misc_RNA (1)...(19): siRNA sense strand
gagauaauguugcugucau

SEQ ID NO: 42800 - RNA, 19 nt, Homo sapiens
  misc_RNA (1)...(19): siRNA sense strand
gaaauggagaugcuuaagu

SEQ ID NO: 42801 - RNA, 19 nt, Homo sapiens
  misc_RNA (1)...(19): siRNA sense strand
aacgauacguccuauguaa

SEQ ID NO: 42802 - RNA, 19 nt, Homo sapiens
  misc_RNA (1)...(19): siRNA sense strand
aacgauacguccuauguaa

SEQ ID NO: 42803 - RNA, 19 nt, Homo sapiens
  misc_RNA (1)...(19): siRNA sense strand
acccaacacuugaucauuu

SEQ ID NO: 42804 - RNA, 19 nt, Homo sapiens
  misc_RNA (1)...(19): siRNA sense strand
gacauggaaucauauuauc

SEQ ID NO: 42805 - RNA, 19 nt, Homo sapiens
  misc_RNA (1)...(19): siRNA sense strand
ggaagaaguaggcaucaau

SEQ ID NO: 42806 - RNA, 19 nt, Homo sapiens
  misc_RNA (1)...(19): siRNA sense strand
gaacuuaggagccaccuua

SEQ ID NO: 42807 - RNA, 19 nt, Homo sapiens
  misc_RNA (1)...(19): siRNA sense strand
cuacagcagugacaauuua

SEQ ID NO: 42808 - RNA, 19 nt, Homo sapiens
  misc_RNA (1)...(19): siRNA sense strand
gaagcacacuggugagaaa

SEQ ID NO: 42809 - RNA, 19 nt, Homo sapiens
  misc_RNA (1)...(19): siRNA sense strand
ggaaucagaugaacuuagg

SEQ ID NO: 42810 - RNA, 19 nt, Homo sapiens
  misc_RNA (1)...(19): siRNA sense strand
ugaaaccauuccaguguaa

SEQ ID NO: 42811 - RNA, 19 nt, Homo sapiens
  misc_RNA (1)...(19): siRNA sense strand
gugaaaccauuccagugua

SEQ ID NO: 42812 - RNA, 19 nt, Homo sapiens
  misc_RNA (1)...(19): siRNA sense strand
cgccuucacuguccacuuu

SEQ ID NO: 42813 - RNA, 19 nt, Homo sapiens
  misc_RNA (1)...(19): siRNA sense strand
ggacugugaacgaagguuu

SEQ ID NO: 42814 - RNA, 19 nt, Homo sapiens
  misc_RNA (1)...(19): siRNA sense strand
ucagaggcauucaggaugu

SEQ ID NO: 42815 - RNA, 19 nt, Homo sapiens
  misc_RNA (1)...(19): siRNA sense strand
agagaaacaugaccaaacu

SEQ ID NO: 42816 - RNA, 19 nt, Homo sapiens
  misc_RNA (1)...(19): siRNA sense strand
auacaggugugaaaccauu

SEQ ID NO: 42817 - RNA, 19 nt, Homo sapiens
  misc_RNA (1)...(19): siRNA sense strand
uacccaggcugcaauaaga

SEQ ID NO: 42818 - RNA, 19 nt, Homo sapiens
  misc_RNA (1)...(19): siRNA sense strand
gaauuaguccgccaucaca

SEQ ID NO: 42819 - RNA, 19 nt, Homo sapiens
  misc_RNA (1)...(19): siRNA sense strand
cgagagcgauaaccacaca

SEQ ID NO: 42820 - RNA, 19 nt, Homo sapiens
  misc_RNA (1)...(19): siRNA sense strand
caacaugcaucagagaaac

SEQ ID NO: 42821 - RNA, 19 nt, Homo sapiens
  misc_RNA (1)...(19): siRNA sense strand
ugcaugaccuggaaucaga

SEQ ID NO: 42822 - RNA, 19 nt, Homo sapiens
  misc_RNA (1)...(19): siRNA sense strand
ugagaaaccauaccagugu

SEQ ID NO: 42823 - RNA, 19 nt, Homo sapiens
  misc_RNA (1)...(19): siRNA sense strand
caucacaacaugcaucaga

SEQ ID NO: 42824 - RNA, 19 nt, Homo sapiens
  misc_RNA (1)...(19): siRNA sense strand
ccaaaugacaucccagcuu

SEQ ID NO: 42825 - RNA, 19 nt, Homo sapiens
  misc_RNA (1)...(19): siRNA sense strand
ugacaucccagcuugaaug

SEQ ID NO: 42826 - RNA, 19 nt, Homo sapiens
  misc_RNA (1)...(19): siRNA sense strand
caucccagcuugaaugcau

SEQ ID NO: 42827 - RNA, 19 nt, Homo sapiens
  misc_RNA (1)...(19): siRNA sense strand
gcagugacaauuuauacca

SEQ ID NO: 42828 - RNA, 19 nt, Homo sapiens
  misc_RNA (1)...(19): siRNA sense strand
ggaagcacacuggugagaa

SEQ ID NO: 42829 - RNA, 19 nt, Homo sapiens
  misc_RNA (1)...(19): siRNA sense strand
gagaaacgccccuucaugu

SEQ ID NO: 42830 - RNA, 19 nt, Homo sapiens
  misc_RNA (1)...(19): siRNA sense strand
cugcggagcccaauacaga

SEQ ID NO: 42831 - RNA, 19 nt, Homo sapiens
  misc_RNA (1)...(19): siRNA sense strand
gaaaccauuccaguguaaa

SEQ ID NO: 42832 - RNA, 19 nt, Homo sapiens
  misc_RNA (1)...(19): siRNA sense strand
agacaccaaaggagacaua

SEQ ID NO: 42833 - RNA, 19 nt, Homo sapiens
  misc_RNA (1)...(19): siRNA sense strand
caucugagaccagugagaa

SEQ ID NO: 42834 - RNA, 19 nt, Homo sapiens
  misc_RNA (1)...(19): siRNA sense strand
uugaaugcaugaccuggaa

SEQ ID NO: 42835 - RNA, 19 nt, Homo sapiens
  misc_RNA (1)...(19): siRNA sense strand
ccggucagaugaauuaguc

SEQ ID NO: 42836 - RNA, 19 nt, Homo sapiens
  misc_RNA (1)...(19): siRNA sense strand
gagacauacaggugugaaa

SEQ ID NO: 42837 - RNA, 19 nt, Homo sapiens
  misc_RNA (1)...(19): siRNA sense strand
ccgccucacuccuucauca

SEQ ID NO: 42838 - RNA, 19 nt, Homo sapiens
  misc_RNA (1)...(19): siRNA sense strand
cagugacaauuuauaccaa

SEQ ID NO: 42839 - RNA, 19 nt, Homo sapiens
  misc_RNA (1)...(19): siRNA sense strand
guggccaaguugucagaaa

SEQ ID NO: 42840 - RNA, 19 nt, Homo sapiens
  misc_RNA (1)...(19): siRNA sense strand
ggagcccaauacagaauac

SEQ ID NO: 42841 - RNA, 19 nt, Homo sapiens
  misc_RNA (1)...(19): siRNA sense strand
gaaugcaugaccuggaauc

SEQ ID NO: 42842 - RNA, 19 nt, Homo sapiens
  misc_RNA (1)...(19): siRNA sense strand
acaacaugcaucagagaaa

SEQ ID NO: 42843 - RNA, 19 nt, Homo sapiens
  misc_RNA (1)...(19): siRNA sense strand
ccuggaaucagaugaacuu

SEQ ID NO: 42844 - RNA, 19 nt, Homo sapiens
  misc_RNA (1)...(19): siRNA sense strand
cagagaaacaugaccaaac

SEQ ID NO: 42845 - RNA, 19 nt, Homo sapiens
  misc_RNA (1)...(19): siRNA sense strand
ucacaacaugcaucagaga

SEQ ID NO: 42846 - RNA, 19 nt, Homo sapiens
  misc_RNA (1)...(19): siRNA sense strand
gaaacgccccuucaugugu

SEQ ID NO: 42847 - RNA, 19 nt, Homo sapiens
  misc_RNA (1)...(19): siRNA sense strand
cagcagugacaauuuauac

SEQ ID NO: 42848 - RNA, 19 nt, Homo sapiens
  misc_RNA (1)...(19): siRNA sense strand
ugcccggucagaugaauua

SEQ ID NO: 42849 - RNA, 19 nt, Homo sapiens
  misc_RNA (1)...(19): siRNA sense strand
ugugaaaccauuccagugu

SEQ ID NO: 42850 - RNA, 19 nt, Homo sapiens
  misc_RNA (1)...(19): siRNA sense strand
cuuaggagccaccuuaaag

SEQ ID NO: 42851 - RNA, 19 nt, Homo sapiens
  misc_RNA (1)...(19): siRNA sense strand
caaccacucauucaagcau

SEQ ID NO: 42852 - RNA, 19 nt, Homo sapiens
  misc_RNA (1)...(19): siRNA sense strand
ucagagaaacaugaccaaa

SEQ ID NO: 42853 - RNA, 19 nt, Homo sapiens
  misc_RNA (1)...(19): siRNA sense strand
ugaccuggaaucagaugaa

SEQ ID NO: 42854 - RNA, 19 nt, Homo sapiens
  misc_RNA (1)...(19): siRNA sense strand
ccuacagcagugacaauuu

SEQ ID NO: 42855 - RNA, 19 nt, Homo sapiens
  misc_RNA (1)...(19): siRNA sense strand
acagcagugacaauuuaua

SEQ ID NO: 42856 - RNA, 19 nt, Homo sapiens
  misc_RNA (1)...(19): siRNA sense strand
ggagacauacaggugugaa

SEQ ID NO: 42857 - RNA, 19 nt, Homo sapiens
  misc_RNA (1)...(19): siRNA sense strand
cacgcacggugucuucaga

SEQ ID NO: 42858 - RNA, 19 nt, Homo sapiens
  misc_RNA (1)...(19): siRNA sense strand
ccagcccgcuauucgcaau

SEQ ID NO: 42859 - RNA, 19 nt, Homo sapiens
  misc_RNA (1)...(19): siRNA sense strand
gaccuggaaucagaugaac

SEQ ID NO: 42860 - RNA, 19 nt, Homo sapiens
  misc_RNA (1)...(19): siRNA sense strand
acccacaccaggacucaua

SEQ ID NO: 42861 - RNA, 19 nt, Homo sapiens
  misc_RNA (1)...(19): siRNA sense strand
caggcugcaauaagagaua

SEQ ID NO: 42862 - RNA, 19 nt, Homo sapiens
  misc_RNA (1)...(19): siRNA sense strand
gcuuacccaggcugcaaua

SEQ ID NO: 42863 - RNA, 19 nt, Homo sapiens
  misc_RNA (1)...(19): siRNA sense strand
cggcaucugagaccaguga

SEQ ID NO: 42864 - RNA, 19 nt, Homo sapiens
  misc_RNA (1)...(19): siRNA sense strand
gaacuuaggagccaccuua

SEQ ID NO: 42865 - RNA, 19 nt, Homo sapiens
  misc_RNA (1)...(19): siRNA sense strand
cuacagcagugacaauuua

SEQ ID NO: 42866 - RNA, 19 nt, Homo sapiens
  misc_RNA (1)...(19): siRNA sense strand
gaagcacacuggugagaaa

SEQ ID NO: 42867 - RNA, 19 nt, Homo sapiens
  misc_RNA (1)...(19): siRNA sense strand
ggaaucagaugaacuuagg

SEQ ID NO: 42868 - RNA, 19 nt, Homo sapiens
  misc_RNA (1)...(19): siRNA sense strand
ugaaaccauuccaguguaa

SEQ ID NO: 42869 - RNA, 19 nt, Homo sapiens
  misc_RNA (1)...(19): siRNA sense strand
gugaaaccauuccagugua

SEQ ID NO: 42870 - RNA, 19 nt, Homo sapiens
  misc_RNA (1)...(19): siRNA sense strand
cgccuucacuguccacuuu

SEQ ID NO: 42871 - RNA, 19 nt, Homo sapiens
  misc_RNA (1)...(19): siRNA sense strand
ggacugugaacgaagguuu

SEQ ID NO: 42872 - RNA, 19 nt, Homo sapiens
  misc_RNA (1)...(19): siRNA sense strand
ucagaggcauucaggaugu

SEQ ID NO: 42873 - RNA, 19 nt, Homo sapiens
  misc_RNA (1)...(19): siRNA sense strand
agagaaacaugaccaaacu

SEQ ID NO: 42874 - RNA, 19 nt, Homo sapiens
  misc_RNA (1)...(19): siRNA sense strand
auacaggugugaaaccauu

SEQ ID NO: 42875 - RNA, 19 nt, Homo sapiens
  misc_RNA (1)...(19): siRNA sense strand
uacccaggcugcaauaaga

SEQ ID NO: 42876 - RNA, 19 nt, Homo sapiens
  misc_RNA (1)...(19): siRNA sense strand
gaauuaguccgccaucaca

SEQ ID NO: 42877 - RNA, 19 nt, Homo sapiens
  misc_RNA (1)...(19): siRNA sense strand
cgagagcgauaaccacaca

SEQ ID NO: 42878 - RNA, 19 nt, Homo sapiens
  misc_RNA (1)...(19): siRNA sense strand
caacaugcaucagagaaac

SEQ ID NO: 42879 - RNA, 19 nt, Homo sapiens
  misc_RNA (1)...(19): siRNA sense strand
ugcaugaccuggaaucaga

SEQ ID NO: 42880 - RNA, 19 nt, Homo sapiens
  misc_RNA (1)...(19): siRNA sense strand
ugagaaaccauaccagugu

SEQ ID NO: 42881 - RNA, 19 nt, Homo sapiens
  misc_RNA (1)...(19): siRNA sense strand
caucacaacaugcaucaga

SEQ ID NO: 42882 - RNA, 19 nt, Homo sapiens
  misc_RNA (1)...(19): siRNA sense strand
ccaaaugacaucccagcuu

SEQ ID NO: 42883 - RNA, 19 nt, Homo sapiens
  misc_RNA (1)...(19): siRNA sense strand
ugacaucccagcuugaaug

SEQ ID NO: 42884 - RNA, 19 nt, Homo sapiens
  misc_RNA (1)...(19): siRNA sense strand
caucccagcuugaaugcau

SEQ ID NO: 42885 - RNA, 19 nt, Homo sapiens
  misc_RNA (1)...(19): siRNA sense strand
gcagugacaauuuauacca

SEQ ID NO: 42886 - RNA, 19 nt, Homo sapiens
  misc_RNA (1)...(19): siRNA sense strand
ggaagcacacuggugagaa

SEQ ID NO: 42887 - RNA, 19 nt, Homo sapiens
  misc_RNA (1)...(19): siRNA sense strand
gagaaacgccccuucaugu

SEQ ID NO: 42888 - RNA, 19 nt, Homo sapiens
  misc_RNA (1)...(19): siRNA sense strand
cugcggagcccaauacaga

SEQ ID NO: 42889 - RNA, 19 nt, Homo sapiens
  misc_RNA (1)...(19): siRNA sense strand
gaaaccauuccaguguaaa

SEQ ID NO: 42890 - RNA, 19 nt, Homo sapiens
  misc_RNA (1)...(19): siRNA sense strand
agacaccaaaggagacaua

SEQ ID NO: 42891 - RNA, 19 nt, Homo sapiens
  misc_RNA (1)...(19): siRNA sense strand
caucugagaccagugagaa

SEQ ID NO: 42892 - RNA, 19 nt, Homo sapiens
  misc_RNA (1)...(19): siRNA sense strand
uugaaugcaugaccuggaa

SEQ ID NO: 42893 - RNA, 19 nt, Homo sapiens
  misc_RNA (1)...(19): siRNA sense strand
ccggucagaugaauuaguc

SEQ ID NO: 42894 - RNA, 19 nt, Homo sapiens
  misc_RNA (1)...(19): siRNA sense strand
gagacauacaggugugaaa

SEQ ID NO: 42895 - RNA, 19 nt, Homo sapiens
  misc_RNA (1)...(19): siRNA sense strand
ccgccucacuccuucauca

SEQ ID NO: 42896 - RNA, 19 nt, Homo sapiens
  misc_RNA (1)...(19): siRNA sense strand
cagugacaauuuauaccaa

SEQ ID NO: 42897 - RNA, 19 nt, Homo sapiens
  misc_RNA (1)...(19): siRNA sense strand
guggccaaguugucagaaa

SEQ ID NO: 42898 - RNA, 19 nt, Homo sapiens
  misc_RNA (1)...(19): siRNA sense strand
ggagcccaauacagaauac

SEQ ID NO: 42899 - RNA, 19 nt, Homo sapiens
  misc_RNA (1)...(19): siRNA sense strand
gaaugcaugaccuggaauc

SEQ ID NO: 42900 - RNA, 19 nt, Homo sapiens
  misc_RNA (1)...(19): siRNA sense strand
acaacaugcaucagagaaa

SEQ ID NO: 42901 - RNA, 19 nt, Homo sapiens
  misc_RNA (1)...(19): siRNA sense strand
ccuggaaucagaugaacuu

SEQ ID NO: 42902 - RNA, 19 nt, Homo sapiens
  misc_RNA (1)...(19): siRNA sense strand
cagagaaacaugaccaaac

SEQ ID NO: 42903 - RNA, 19 nt, Homo sapiens
  misc_RNA (1)...(19): siRNA sense strand
ucacaacaugcaucagaga

SEQ ID NO: 42904 - RNA, 19 nt, Homo sapiens
  misc_RNA (1)...(19): siRNA sense strand
gaaacgccccuucaugugu

SEQ ID NO: 42905 - RNA, 19 nt, Homo sapiens
  misc_RNA (1)...(19): siRNA sense strand
cagcagugacaauuuauac

SEQ ID NO: 42906 - RNA, 19 nt, Homo sapiens
  misc_RNA (1)...(19): siRNA sense strand
ugcccggucagaugaauua

SEQ ID NO: 42907 - RNA, 19 nt, Homo sapiens
  misc_RNA (1)...(19): siRNA sense strand
ugugaaaccauuccagugu

SEQ ID NO: 42908 - RNA, 19 nt, Homo sapiens
  misc_RNA (1)...(19): siRNA sense strand
cuuaggagccaccuuaaag

SEQ ID NO: 42909 - RNA, 19 nt, Homo sapiens
  misc_RNA (1)...(19): siRNA sense strand
caaccacucauucaagcau

SEQ ID NO: 42910 - RNA, 19 nt, Homo sapiens
  misc_RNA (1)...(19): siRNA sense strand
ucagagaaacaugaccaaa

SEQ ID NO: 42911 - RNA, 19 nt, Homo sapiens
  misc_RNA (1)...(19): siRNA sense strand
ugaccuggaaucagaugaa

SEQ ID NO: 42912 - RNA, 19 nt, Homo sapiens
  misc_RNA (1)...(19): siRNA sense strand
ccuacagcagugacaauuu

SEQ ID NO: 42913 - RNA, 19 nt, Homo sapiens
  misc_RNA (1)...(19): siRNA sense strand
acagcagugacaauuuaua

SEQ ID NO: 42914 - RNA, 19 nt, Homo sapiens
  misc_RNA (1)...(19): siRNA sense strand
ggagacauacaggugugaa

SEQ ID NO: 42915 - RNA, 19 nt, Homo sapiens
  misc_RNA (1)...(19): siRNA sense strand
cacgcacggugucuucaga

SEQ ID NO: 42916 - RNA, 19 nt, Homo sapiens
  misc_RNA (1)...(19): siRNA sense strand
ccagcccgcuauucgcaau

SEQ ID NO: 42917 - RNA, 19 nt, Homo sapiens
  misc_RNA (1)...(19): siRNA sense strand
gaccuggaaucagaugaac

SEQ ID NO: 42918 - RNA, 19 nt, Homo sapiens
  misc_RNA (1)...(19): siRNA sense strand
acccacaccaggacucaua

SEQ ID NO: 42919 - RNA, 19 nt, Homo sapiens
  misc_RNA (1)...(19): siRNA sense strand
caggcugcaauaagagaua

SEQ ID NO: 42920 - RNA, 19 nt, Homo sapiens
  misc_RNA (1)...(19): siRNA sense strand
gcuuacccaggcugcaaua

SEQ ID NO: 42921 - RNA, 19 nt, Homo sapiens
  misc_RNA (1)...(19): siRNA sense strand
cggcaucugagaccaguga

SEQ ID NO: 42922 - RNA, 19 nt, Homo sapiens
  misc_RNA (1)...(19): siRNA sense strand
gaacuuaggagccaccuua

SEQ ID NO: 42923 - RNA, 19 nt, Homo sapiens
  misc_RNA (1)...(19): siRNA sense strand
cuacagcagugacaauuua

SEQ ID NO: 42924 - RNA, 19 nt, Homo sapiens
  misc_RNA (1)...(19): siRNA sense strand
gaagcacacuggugagaaa

SEQ ID NO: 42925 - RNA, 19 nt, Homo sapiens
  misc_RNA (1)...(19): siRNA sense strand
ggaaucagaugaacuuagg

SEQ ID NO: 42926 - RNA, 19 nt, Homo sapiens
  misc_RNA (1)...(19): siRNA sense strand
ugaaaccauuccaguguaa

SEQ ID NO: 42927 - RNA, 19 nt, Homo sapiens
  misc_RNA (1)...(19): siRNA sense strand
gugaaaccauuccagugua

SEQ ID NO: 42928 - RNA, 19 nt, Homo sapiens
  misc_RNA (1)...(19): siRNA sense strand
cgccuucacuguccacuuu

SEQ ID NO: 42929 - RNA, 19 nt, Homo sapiens
  misc_RNA (1)...(19): siRNA sense strand
ggacugugaacgaagguuu

SEQ ID NO: 42930 - RNA, 19 nt, Homo sapiens
  misc_RNA (1)...(19): siRNA sense strand
ucagaggcauucaggaugu

SEQ ID NO: 42931 - RNA, 19 nt, Homo sapiens
  misc_RNA (1)...(19): siRNA sense strand
agagaaacaugaccaaacu

SEQ ID NO: 42932 - RNA, 19 nt, Homo sapiens
  misc_RNA (1)...(19): siRNA sense strand
auacaggugugaaaccauu

SEQ ID NO: 42933 - RNA, 19 nt, Homo sapiens
  misc_RNA (1)...(19): siRNA sense strand
uacccaggcugcaauaaga

SEQ ID NO: 42934 - RNA, 19 nt, Homo sapiens
  misc_RNA (1)...(19): siRNA sense strand
gaauuaguccgccaucaca

SEQ ID NO: 42935 - RNA, 19 nt, Homo sapiens
  misc_RNA (1)...(19): siRNA sense strand
cgagagcgauaaccacaca

SEQ ID NO: 42936 - RNA, 19 nt, Homo sapiens
  misc_RNA (1)...(19): siRNA sense strand
caacaugcaucagagaaac

SEQ ID NO: 42937 - RNA, 19 nt, Homo sapiens
  misc_RNA (1)...(19): siRNA sense strand
ugcaugaccuggaaucaga

SEQ ID NO: 42938 - RNA, 19 nt, Homo sapiens
  misc_RNA (1)...(19): siRNA sense strand
ugagaaaccauaccagugu

SEQ ID NO: 42939 - RNA, 19 nt, Homo sapiens
  misc_RNA (1)...(19): siRNA sense strand
caucacaacaugcaucaga

SEQ ID NO: 42940 - RNA, 19 nt, Homo sapiens
  misc_RNA (1)...(19): siRNA sense strand
ccaaaugacaucccagcuu

SEQ ID NO: 42941 - RNA, 19 nt, Homo sapiens
  misc_RNA (1)...(19): siRNA sense strand
ugacaucccagcuugaaug

SEQ ID NO: 42942 - RNA, 19 nt, Homo sapiens
  misc_RNA (1)...(19): siRNA sense strand
caucccagcuugaaugcau

SEQ ID NO: 42943 - RNA, 19 nt, Homo sapiens
  misc_RNA (1)...(19): siRNA sense strand
gcagugacaauuuauacca

SEQ ID NO: 42944 - RNA, 19 nt, Homo sapiens
  misc_RNA (1)...(19): siRNA sense strand
ggaagcacacuggugagaa

SEQ ID NO: 42945 - RNA, 19 nt, Homo sapiens
  misc_RNA (1)...(19): siRNA sense strand
gagaaacgccccuucaugu

SEQ ID NO: 42946 - RNA, 19 nt, Homo sapiens
  misc_RNA (1)...(19): siRNA sense strand
cugcggagcccaauacaga

SEQ ID NO: 42947 - RNA, 19 nt, Homo sapiens
  misc_RNA (1)...(19): siRNA sense strand
gaaaccauuccaguguaaa

SEQ ID NO: 42948 - RNA, 19 nt, Homo sapiens
  misc_RNA (1)...(19): siRNA sense strand
agacaccaaaggagacaua

SEQ ID NO: 42949 - RNA, 19 nt, Homo sapiens
  misc_RNA (1)...(19): siRNA sense strand
caucugagaccagugagaa

SEQ ID NO: 42950 - RNA, 19 nt, Homo sapiens
  misc_RNA (1)...(19): siRNA sense strand
uugaaugcaugaccuggaa

SEQ ID NO: 42951 - RNA, 19 nt, Homo sapiens
  misc_RNA (1)...(19): siRNA sense strand
ccggucagaugaauuaguc

SEQ ID NO: 42952 - RNA, 19 nt, Homo sapiens
  misc_RNA (1)...(19): siRNA sense strand
gagacauacaggugugaaa

SEQ ID NO: 42953 - RNA, 19 nt, Homo sapiens
  misc_RNA (1)...(19): siRNA sense strand
ccgccucacuccuucauca

SEQ ID NO: 42954 - RNA, 19 nt, Homo sapiens
  misc_RNA (1)...(19): siRNA sense strand
cagugacaauuuauaccaa

SEQ ID NO: 42955 - RNA, 19 nt, Homo sapiens
  misc_RNA (1)...(19): siRNA sense strand
guggccaaguugucagaaa

SEQ ID NO: 42956 - RNA, 19 nt, Homo sapiens
  misc_RNA (1)...(19): siRNA sense strand
ggagcccaauacagaauac

SEQ ID NO: 42957 - RNA, 19 nt, Homo sapiens
  misc_RNA (1)...(19): siRNA sense strand
gaaugcaugaccuggaauc

SEQ ID NO: 42958 - RNA, 19 nt, Homo sapiens
  misc_RNA (1)...(19): siRNA sense strand
acaacaugcaucagagaaa

SEQ ID NO: 42959 - RNA, 19 nt, Homo sapiens
  misc_RNA (1)...(19): siRNA sense strand
ccuggaaucagaugaacuu

SEQ ID NO: 42960 - RNA, 19 nt, Homo sapiens
  misc_RNA (1)...(19): siRNA sense strand
cagagaaacaugaccaaac

SEQ ID NO: 42961 - RNA, 19 nt, Homo sapiens
  misc_RNA (1)...(19): siRNA sense strand
ucacaacaugcaucagaga

SEQ ID NO: 42962 - RNA, 19 nt, Homo sapiens
  misc_RNA (1)...(19): siRNA sense strand
gaaacgccccuucaugugu

SEQ ID NO: 42963 - RNA, 19 nt, Homo sapiens
  misc_RNA (1)...(19): siRNA sense strand
cagcagugacaauuuauac

SEQ ID NO: 42964 - RNA, 19 nt, Homo sapiens
  misc_RNA (1)...(19): siRNA sense strand
ugcccggucagaugaauua

SEQ ID NO: 42965 - RNA, 19 nt, Homo sapiens
  misc_RNA (1)...(19): siRNA sense strand
ugugaaaccauuccagugu

SEQ ID NO: 42966 - RNA, 19 nt, Homo sapiens
  misc_RNA (1)...(19): siRNA sense strand
cuuaggagccaccuuaaag

SEQ ID NO: 42967 - RNA, 19 nt, Homo sapiens
  misc_RNA (1)...(19): siRNA sense strand
caaccacucauucaagcau

SEQ ID NO: 42968 - RNA, 19 nt, Homo sapiens
  misc_RNA (1)...(19): siRNA sense strand
ucagagaaacaugaccaaa

SEQ ID NO: 42969 - RNA, 19 nt, Homo sapiens
  misc_RNA (1)...(19): siRNA sense strand
ugaccuggaaucagaugaa

SEQ ID NO: 42970 - RNA, 19 nt, Homo sapiens
  misc_RNA (1)...(19): siRNA sense strand
ccuacagcagugacaauuu

SEQ ID NO: 42971 - RNA, 19 nt, Homo sapiens
  misc_RNA (1)...(19): siRNA sense strand
acagcagugacaauuuaua

SEQ ID NO: 42972 - RNA, 19 nt, Homo sapiens
  misc_RNA (1)...(19): siRNA sense strand
ggagacauacaggugugaa

SEQ ID NO: 42973 - RNA, 19 nt, Homo sapiens
  misc_RNA (1)...(19): siRNA sense strand
cacgcacggugucuucaga

SEQ ID NO: 42974 - RNA, 19 nt, Homo sapiens
  misc_RNA (1)...(19): siRNA sense strand
ccagcccgcuauucgcaau

SEQ ID NO: 42975 - RNA, 19 nt, Homo sapiens
  misc_RNA (1)...(19): siRNA sense strand
gaccuggaaucagaugaac

SEQ ID NO: 42976 - RNA, 19 nt, Homo sapiens
  misc_RNA (1)...(19): siRNA sense strand
acccacaccaggacucaua

SEQ ID NO: 42977 - RNA, 19 nt, Homo sapiens
  misc_RNA (1)...(19): siRNA sense strand
caggcugcaauaagagaua

SEQ ID NO: 42978 - RNA, 19 nt, Homo sapiens
  misc_RNA (1)...(19): siRNA sense strand
gcuuacccaggcugcaaua

SEQ ID NO: 42979 - RNA, 19 nt, Homo sapiens
  misc_RNA (1)...(19): siRNA sense strand
cggcaucugagaccaguga

SEQ ID NO: 42980 - RNA, 19 nt, Homo sapiens
  misc_RNA (1)...(19): siRNA sense strand
gaacuuaggagccaccuua

SEQ ID NO: 42981 - RNA, 19 nt, Homo sapiens
  misc_RNA (1)...(19): siRNA sense strand
cuacagcagugacaauuua

SEQ ID NO: 42982 - RNA, 19 nt, Homo sapiens
  misc_RNA (1)...(19): siRNA sense strand
gaagcacacuggugagaaa

SEQ ID NO: 42983 - RNA, 19 nt, Homo sapiens
  misc_RNA (1)...(19): siRNA sense strand
ggaaucagaugaacuuagg

SEQ ID NO: 42984 - RNA, 19 nt, Homo sapiens
  misc_RNA (1)...(19): siRNA sense strand
ugaaaccauuccaguguaa

SEQ ID NO: 42985 - RNA, 19 nt, Homo sapiens
  misc_RNA (1)...(19): siRNA sense strand
gugaaaccauuccagugua

SEQ ID NO: 42986 - RNA, 19 nt, Homo sapiens
  misc_RNA (1)...(19): siRNA sense strand
cgccuucacuguccacuuu

SEQ ID NO: 42987 - RNA, 19 nt, Homo sapiens
  misc_RNA (1)...(19): siRNA sense strand
ggacugugaacgaagguuu

SEQ ID NO: 42988 - RNA, 19 nt, Homo sapiens
  misc_RNA (1)...(19): siRNA sense strand
ucagaggcauucaggaugu

SEQ ID NO: 42989 - RNA, 19 nt, Homo sapiens
  misc_RNA (1)...(19): siRNA sense strand
agagaaacaugaccaaacu

SEQ ID NO: 42990 - RNA, 19 nt, Homo sapiens
  misc_RNA (1)...(19): siRNA sense strand
auacaggugugaaaccauu

SEQ ID NO: 42991 - RNA, 19 nt, Homo sapiens
  misc_RNA (1)...(19): siRNA sense strand
uacccaggcugcaauaaga

SEQ ID NO: 42992 - RNA, 19 nt, Homo sapiens
  misc_RNA (1)...(19): siRNA sense strand
gaauuaguccgccaucaca

SEQ ID NO: 42993 - RNA, 19 nt, Homo sapiens
  misc_RNA (1)...(19): siRNA sense strand
cgagagcgauaaccacaca

SEQ ID NO: 42994 - RNA, 19 nt, Homo sapiens
  misc_RNA (1)...(19): siRNA sense strand
caacaugcaucagagaaac

SEQ ID NO: 42995 - RNA, 19 nt, Homo sapiens
  misc_RNA (1)...(19): siRNA sense strand
ugcaugaccuggaaucaga

SEQ ID NO: 42996 - RNA, 19 nt, Homo sapiens
  misc_RNA (1)...(19): siRNA sense strand
ugagaaaccauaccagugu

SEQ ID NO: 42997 - RNA, 19 nt, Homo sapiens
  misc_RNA (1)...(19): siRNA sense strand
caucacaacaugcaucaga

SEQ ID NO: 42998 - RNA, 19 nt, Homo sapiens
  misc_RNA (1)...(19): siRNA sense strand
ccaaaugacaucccagcuu

SEQ ID NO: 42999 - RNA, 19 nt, Homo sapiens
  misc_RNA (1)...(19): siRNA sense strand
ugacaucccagcuugaaug

SEQ ID NO: 43000 - RNA, 19 nt, Homo sapiens
  misc_RNA (1)...(19): siRNA sense strand
caucccagcuugaaugcau

SEQ ID NO: 43001 - RNA, 19 nt, Homo sapiens
  misc_RNA (1)...(19): siRNA sense strand
gcagugacaauuuauacca

SEQ ID NO: 43002 - RNA, 19 nt, Homo sapiens
  misc_RNA (1)...(19): siRNA sense strand
ggaagcacacuggugagaa

SEQ ID NO: 43003 - RNA, 19 nt, Homo sapiens
  misc_RNA (1)...(19): siRNA sense strand
gagaaacgccccuucaugu

SEQ ID NO: 43004 - RNA, 19 nt, Homo sapiens
  misc_RNA (1)...(19): siRNA sense strand
cugcggagcccaauacaga

SEQ ID NO: 43005 - RNA, 19 nt, Homo sapiens
  misc_RNA (1)...(19): siRNA sense strand
gaaaccauuccaguguaaa

SEQ ID NO: 43006 - RNA, 19 nt, Homo sapiens
  misc_RNA (1)...(19): siRNA sense strand
agacaccaaaggagacaua

SEQ ID NO: 43007 - RNA, 19 nt, Homo sapiens
  misc_RNA (1)...(19): siRNA sense strand
caucugagaccagugagaa

SEQ ID NO: 43008 - RNA, 19 nt, Homo sapiens
  misc_RNA (1)...(19): siRNA sense strand
uugaaugcaugaccuggaa

SEQ ID NO: 43009 - RNA, 19 nt, Homo sapiens
  misc_RNA (1)...(19): siRNA sense strand
ccggucagaugaauuaguc

SEQ ID NO: 43010 - RNA, 19 nt, Homo sapiens
  misc_RNA (1)...(19): siRNA sense strand
gagacauacaggugugaaa

SEQ ID NO: 43011 - RNA, 19 nt, Homo sapiens
  misc_RNA (1)...(19): siRNA sense strand
ccgccucacuccuucauca

SEQ ID NO: 43012 - RNA, 19 nt, Homo sapiens
  misc_RNA (1)...(19): siRNA sense strand
cagugacaauuuauaccaa

SEQ ID NO: 43013 - RNA, 19 nt, Homo sapiens
  misc_RNA (1)...(19): siRNA sense strand
guggccaaguugucagaaa

SEQ ID NO: 43014 - RNA, 19 nt, Homo sapiens
  misc_RNA (1)...(19): siRNA sense strand
ggagcccaauacagaauac

SEQ ID NO: 43015 - RNA, 19 nt, Homo sapiens
  misc_RNA (1)...(19): siRNA sense strand
gaaugcaugaccuggaauc

SEQ ID NO: 43016 - RNA, 19 nt, Homo sapiens
  misc_RNA (1)...(19): siRNA sense strand
acaacaugcaucagagaaa

SEQ ID NO: 43017 - RNA, 19 nt, Homo sapiens
  misc_RNA (1)...(19): siRNA sense strand
ccuggaaucagaugaacuu

SEQ ID NO: 43018 - RNA, 19 nt, Homo sapiens
  misc_RNA (1)...(19): siRNA sense strand
cagagaaacaugaccaaac

SEQ ID NO: 43019 - RNA, 19 nt, Homo sapiens
  misc_RNA (1)...(19): siRNA sense strand
ucacaacaugcaucagaga

SEQ ID NO: 43020 - RNA, 19 nt, Homo sapiens
  misc_RNA (1)...(19): siRNA sense strand
gaaacgccccuucaugugu

SEQ ID NO: 43021 - RNA, 19 nt, Homo sapiens
  misc_RNA (1)...(19): siRNA sense strand
cagcagugacaauuuauac

SEQ ID NO: 43022 - RNA, 19 nt, Homo sapiens
  misc_RNA (1)...(19): siRNA sense strand
ugcccggucagaugaauua

SEQ ID NO: 43023 - RNA, 19 nt, Homo sapiens
  misc_RNA (1)...(19): siRNA sense strand
ugugaaaccauuccagugu

SEQ ID NO: 43024 - RNA, 19 nt, Homo sapiens
  misc_RNA (1)...(19): siRNA sense strand
cuuaggagccaccuuaaag

SEQ ID NO: 43025 - RNA, 19 nt, Homo sapiens
  misc_RNA (1)...(19): siRNA sense strand
caaccacucauucaagcau

SEQ ID NO: 43026 - RNA, 19 nt, Homo sapiens
  misc_RNA (1)...(19): siRNA sense strand
ucagagaaacaugaccaaa

SEQ ID NO: 43027 - RNA, 19 nt, Homo sapiens
  misc_RNA (1)...(19): siRNA sense strand
ugaccuggaaucagaugaa

SEQ ID NO: 43028 - RNA, 19 nt, Homo sapiens
  misc_RNA (1)...(19): siRNA sense strand
ccuacagcagugacaauuu

SEQ ID NO: 43029 - RNA, 19 nt, Homo sapiens
  misc_RNA (1)...(19): siRNA sense strand
acagcagugacaauuuaua

SEQ ID NO: 43030 - RNA, 19 nt, Homo sapiens
  misc_RNA (1)...(19): siRNA sense strand
ggagacauacaggugugaa

SEQ ID NO: 43031 - RNA, 19 nt, Homo sapiens
  misc_RNA (1)...(19): siRNA sense strand
cacgcacggugucuucaga

SEQ ID NO: 43032 - RNA, 19 nt, Homo sapiens
  misc_RNA (1)...(19): siRNA sense strand
ccagcccgcuauucgcaau

SEQ ID NO: 43033 - RNA, 19 nt, Homo sapiens
  misc_RNA (1)...(19): siRNA sense strand
gaccuggaaucagaugaac

SEQ ID NO: 43034 - RNA, 19 nt, Homo sapiens
  misc_RNA (1)...(19): siRNA sense strand
acccacaccaggacucaua

SEQ ID NO: 43035 - RNA, 19 nt, Homo sapiens
  misc_RNA (1)...(19): siRNA sense strand
caggcugcaauaagagaua

SEQ ID NO: 43036 - RNA, 19 nt, Homo sapiens
  misc_RNA (1)...(19): siRNA sense strand
gcuuacccaggcugcaaua

SEQ ID NO: 43037 - RNA, 19 nt, Homo sapiens
  misc_RNA (1)...(19): siRNA sense strand
cggcaucugagaccaguga

SEQ ID NO: 43038 - RNA, 19 nt, Homo sapiens
  misc_RNA (1)...(19): siRNA sense strand
ggaauaagcuucacaguuc

SEQ ID NO: 43039 - RNA, 19 nt, Homo sapiens
  misc_RNA (1)...(19): siRNA sense strand
gcagaaaggugguggagaa

SEQ ID NO: 43040 - RNA, 19 nt, Homo sapiens
  misc_RNA (1)...(19): siRNA sense strand
gauguuggcuccagucuaa

SEQ ID NO: 43041 - RNA, 19 nt, Homo sapiens
  misc_RNA (1)...(19): siRNA sense strand
gcacagauauugucaugga

SEQ ID NO: 43042 - RNA, 19 nt, Homo sapiens
  misc_RNA (1)...(19): siRNA sense strand
ggaagcagcugcgauuuga

SEQ ID NO: 43043 - RNA, 19 nt, Homo sapiens
  misc_RNA (1)...(19): siRNA sense strand
gaacaagaucguccacuuu

SEQ ID NO: 43044 - RNA, 19 nt, Homo sapiens
  misc_RNA (1)...(19): siRNA sense strand
ggucacagcugccuacaug

SEQ ID NO: 43045 - RNA, 19 nt, Homo sapiens
  misc_RNA (1)...(19): siRNA sense strand
caacuuuacuguuucagaa

SEQ ID NO: 43046 - RNA, 19 nt, Homo sapiens
  misc_RNA (1)...(19): siRNA sense strand
gaagaacuaccagccauua

SEQ ID NO: 43047 - RNA, 19 nt, Homo sapiens
  misc_RNA (1)...(19): siRNA sense strand
ggaagcaagucaagucugu

SEQ ID NO: 43048 - RNA, 19 nt, Homo sapiens
  misc_RNA (1)...(19): siRNA sense strand
uagaggagcuacacuauuc

SEQ ID NO: 43049 - RNA, 19 nt, Homo sapiens
  misc_RNA (1)...(19): siRNA sense strand
gcacagugaugcucuccaa

SEQ ID NO: 43050 - RNA, 19 nt, Homo sapiens
  misc_RNA (1)...(19): siRNA sense strand
uaagaagguuccaggguuu

SEQ ID NO: 43051 - RNA, 19 nt, Homo sapiens
  misc_RNA (1)...(19): siRNA sense strand
gagacucacugcaccauug

SEQ ID NO: 43052 - RNA, 19 nt, Homo sapiens
  misc_RNA (1)...(19): siRNA sense strand
gaaaaucaccuaugaagaa

SEQ ID NO: 43053 - RNA, 19 nt, Homo sapiens
  misc_RNA (1)...(19): siRNA sense strand
ggacaguuguggcucuuga

SEQ ID NO: 43054 - RNA, 19 nt, Homo sapiens
  misc_RNA (1)...(19): siRNA sense strand
gaccugagcugaagaucga

SEQ ID NO: 43055 - RNA, 19 nt, Homo sapiens
  misc_RNA (1)...(19): siRNA sense strand
caggagaacuguccagaug

SEQ ID NO: 43056 - RNA, 19 nt, Homo sapiens
  misc_RNA (1)...(19): siRNA sense strand
agagugagguugacaaguu

SEQ ID NO: 43057 - RNA, 19 nt, Homo sapiens
  misc_RNA (1)...(19): siRNA sense strand
gaaaucgacugccuaacag

SEQ ID NO: 43058 - RNA, 19 nt, Homo sapiens
  misc_RNA (1)...(19): siRNA sense strand
caaggagaauuguuggaaa

SEQ ID NO: 43059 - RNA, 19 nt, Homo sapiens
  misc_RNA (1)...(19): siRNA sense strand
aagagaggauugugcauaa

SEQ ID NO: 43060 - RNA, 19 nt, Homo sapiens
  misc_RNA (1)...(19): siRNA sense strand
gaugaggacaugcugauaa

SEQ ID NO: 43061 - RNA, 19 nt, Homo sapiens
  misc_RNA (1)...(19): siRNA sense strand
gaacuaccagccauuauca

SEQ ID NO: 43062 - RNA, 19 nt, Homo sapiens
  misc_RNA (1)...(19): siRNA sense strand
aagaucaaguccauagaua

SEQ ID NO: 43063 - RNA, 19 nt, Homo sapiens
  misc_RNA (1)...(19): siRNA sense strand
ggaguaacauaacuggaau

SEQ ID NO: 43064 - RNA, 19 nt, Homo sapiens
  misc_RNA (1)...(19): siRNA sense strand
gagcucagcacacagguaa

SEQ ID NO: 43065 - RNA, 19 nt, Homo sapiens
  misc_RNA (1)...(19): siRNA sense strand
agaauaugcuguuuccuau

SEQ ID NO: 43066 - RNA, 19 nt, Homo sapiens
  misc_RNA (1)...(19): siRNA sense strand
guaauaacgugaaggaacu

SEQ ID NO: 43067 - RNA, 19 nt, Homo sapiens
  misc_RNA (1)...(19): siRNA sense strand
gaagacaagugugguaaac

SEQ ID NO: 43068 - RNA, 19 nt, Homo sapiens
  misc_RNA (1)...(19): siRNA sense strand
gggaguauuucucagcauu

SEQ ID NO: 43069 - RNA, 19 nt, Homo sapiens
  misc_RNA (1)...(19): siRNA sense strand
gcaugaaccagaagaaaga

SEQ ID NO: 43070 - RNA, 19 nt, Homo sapiens
  misc_RNA (1)...(19): siRNA sense strand
aaaccaaccuucccuccaa

SEQ ID NO: 43071 - RNA, 19 nt, Homo sapiens
  misc_RNA (1)...(19): siRNA sense strand
guccauagauacaucagaa

SEQ ID NO: 43072 - RNA, 19 nt, Homo sapiens
  misc_RNA (1)...(19): siRNA sense strand
aauaugcuguuuccuauga

SEQ ID NO: 43073 - RNA, 19 nt, Homo sapiens
  misc_RNA (1)...(19): siRNA sense strand
acacggagauuggcauuga

SEQ ID NO: 43074 - RNA, 19 nt, Homo sapiens
  misc_RNA (1)...(19): siRNA sense strand
guagaaaucgacugccuaa

SEQ ID NO: 43075 - RNA, 19 nt, Homo sapiens
  misc_RNA (1)...(19): siRNA sense strand
gagaaugggaggaggcuuu

SEQ ID NO: 43076 - RNA, 19 nt, Homo sapiens
  misc_RNA (1)...(19): siRNA sense strand
ggaauaggaagcaccaaga

SEQ ID NO: 43077 - RNA, 19 nt, Homo sapiens
  misc_RNA (1)...(19): siRNA sense strand
gcucagcacacagguaaua

SEQ ID NO: 43078 - RNA, 19 nt, Homo sapiens
  misc_RNA (1)...(19): siRNA sense strand
uaacaggagaucauaagaa

SEQ ID NO: 43079 - RNA, 19 nt, Homo sapiens
  misc_RNA (1)...(19): siRNA sense strand
gccaaggccuucauaccaa

SEQ ID NO: 43080 - RNA, 19 nt, Homo sapiens
  misc_RNA (1)...(19): siRNA sense strand
gagaggauugugcauaauu

SEQ ID NO: 43081 - RNA, 19 nt, Homo sapiens
  misc_RNA (1)...(19): siRNA sense strand
cagugaugcucuccaagua

SEQ ID NO: 43082 - RNA, 19 nt, Homo sapiens
  misc_RNA (1)...(19): siRNA sense strand
uacaggagcuggcccuuug

SEQ ID NO: 43083 - RNA, 19 nt, Homo sapiens
  misc_RNA (1)...(19): siRNA sense strand
caauugaggaugcuauaaa

SEQ ID NO: 43084 - RNA, 19 nt, Homo sapiens
  misc_RNA (1)...(19): siRNA sense strand
accagaagcuugaggguuu

SEQ ID NO: 43085 - RNA, 19 nt, Homo sapiens
  misc_RNA (1)...(19): siRNA sense strand
ugacacacuucaaccagaa

SEQ ID NO: 43086 - RNA, 19 nt, Homo sapiens
  misc_RNA (1)...(19): siRNA sense strand
cagaggaggugcggagaaa

SEQ ID NO: 43087 - RNA, 19 nt, Homo sapiens
  misc_RNA (1)...(19): siRNA sense strand
aagagaaccuggaagacaa

SEQ ID NO: 43088 - RNA, 19 nt, Homo sapiens
  misc_RNA (1)...(19): siRNA sense strand
caacaagaaggccaucuau

SEQ ID NO: 43089 - RNA, 19 nt, Homo sapiens
  misc_RNA (1)...(19): siRNA sense strand
gcuacagcuuugagacuaa

SEQ ID NO: 43090 - RNA, 19 nt, Homo sapiens
  misc_RNA (1)...(19): siRNA sense strand
cgaagcagauaauguugug

SEQ ID NO: 43091 - RNA, 19 nt, Homo sapiens
  misc_RNA (1)...(19): siRNA sense strand
ugacaacuguggaaggaau

SEQ ID NO: 43092 - RNA, 19 nt, Homo sapiens
  misc_RNA (1)...(19): siRNA sense strand
gcauaauucccaccaaguu

SEQ ID NO: 43093 - RNA, 19 nt, Homo sapiens
  misc_RNA (1)...(19): siRNA sense strand
aaucaccuaugaagaacua

SEQ ID NO: 43094 - RNA, 19 nt, Homo sapiens
  misc_RNA (1)...(19): siRNA sense strand
ggauaagguuacuuguguu

SEQ ID NO: 43095 - RNA, 19 nt, Homo sapiens
  misc_RNA (1)...(19): siRNA sense strand
gggaguaacauaacuggaa

SEQ ID NO: 43096 - RNA, 19 nt, Homo sapiens
  misc_RNA (1)...(19): siRNA sense strand
gagauuggcauugagauga

SEQ ID NO: 43097 - RNA, 19 nt, Homo sapiens
  misc_RNA (1)...(19): siRNA sense strand
gagaugggaauaauccaaa

SEQ ID NO: 43098 - RNA, 19 nt, Homo sapiens
  misc_RNA (1)...(19): siRNA sense strand
gcaggagcccuacuucaug

SEQ ID NO: 43099 - RNA, 19 nt, Homo sapiens
  misc_RNA (1)...(19): siRNA sense strand
gaacaacuccuuuuaugga

SEQ ID NO: 43100 - RNA, 19 nt, Homo sapiens
  misc_RNA (1)...(19): siRNA sense strand
gguaaccaguggcaugaga

SEQ ID NO: 43101 - RNA, 19 nt, Homo sapiens
  misc_RNA (1)...(19): siRNA sense strand
gaacacggagauuggcauu

SEQ ID NO: 43102 - RNA, 19 nt, Homo sapiens
  misc_RNA (1)...(19): siRNA sense strand
agaacaagaucguccacuu

SEQ ID NO: 43103 - RNA, 19 nt, Homo sapiens
  misc_RNA (1)...(19): siRNA sense strand
ccaaggccuucauaccaaa

SEQ ID NO: 43104 - RNA, 19 nt, Homo sapiens
  misc_RNA (1)...(19): siRNA sense strand
acacagaacaccaugaaga

SEQ ID NO: 43105 - RNA, 19 nt, Homo sapiens
  misc_RNA (1)...(19): siRNA sense strand
cgaaggauaagguuacuug

SEQ ID NO: 43106 - RNA, 19 nt, Homo sapiens
  misc_RNA (1)...(19): siRNA sense strand
ggguuuguuuguuucauuu

SEQ ID NO: 43107 - RNA, 19 nt, Homo sapiens
  misc_RNA (1)...(19): siRNA sense strand
gaucaaguccauagauaca

SEQ ID NO: 43108 - RNA, 19 nt, Homo sapiens
  misc_RNA (1)...(19): siRNA sense strand
guucaagaauaugcuguuu

SEQ ID NO: 43109 - RNA, 19 nt, Homo sapiens
  misc_RNA (1)...(19): siRNA sense strand
gaaccuggaagacaagugu

SEQ ID NO: 43110 - RNA, 19 nt, Homo sapiens
  misc_RNA (1)...(19): siRNA sense strand
uaucauuggugcugugguu

SEQ ID NO: 43111 - RNA, 19 nt, Homo sapiens
  misc_RNA (1)...(19): siRNA sense strand
aggauaagguuacuugugu

SEQ ID NO: 43112 - RNA, 19 nt, Homo sapiens
  misc_RNA (1)...(19): siRNA sense strand
agacaagugugguaaacug

SEQ ID NO: 43113 - RNA, 19 nt, Homo sapiens
  misc_RNA (1)...(19): siRNA sense strand
ggaagacaagugugguaaa

SEQ ID NO: 43114 - RNA, 19 nt, Homo sapiens
  misc_RNA (1)...(19): siRNA sense strand
gugaugcucuccaaguaug

SEQ ID NO: 43115 - RNA, 19 nt, Homo sapiens
  misc_RNA (1)...(19): siRNA sense strand
aagaauaugcuguuuccua

SEQ ID NO: 43116 - RNA, 19 nt, Homo sapiens
  misc_RNA (1)...(19): siRNA sense strand
ugcaaacccuggucuguga

SEQ ID NO: 43117 - RNA, 19 nt, Homo sapiens
  misc_RNA (1)...(19): siRNA sense strand
ccgcacagauauugucaug

SEQ ID NO: 43118 - RNA, 19 nt, Homo sapiens
  misc_RNA (1)...(19): siRNA sense strand
gaaccuccgcacagauauu

SEQ ID NO: 43119 - RNA, 19 nt, Homo sapiens
  misc_RNA (1)...(19): siRNA sense strand
aaagagaggauugugcaua

SEQ ID NO: 43120 - RNA, 19 nt, Homo sapiens
  misc_RNA (1)...(19): siRNA sense strand
gauaagguuacuuguguug

SEQ ID NO: 43121 - RNA, 19 nt, Homo sapiens
  misc_RNA (1)...(19): siRNA sense strand
ggagcuggcccuuugcuau

SEQ ID NO: 43122 - RNA, 19 nt, Homo sapiens
  misc_RNA (1)...(19): siRNA sense strand
caagagaaccuggaagaca

SEQ ID NO: 43123 - RNA, 19 nt, Homo sapiens
  misc_RNA (1)...(19): siRNA sense strand
ccuacaagaucccggcauu

SEQ ID NO: 43124 - RNA, 19 nt, Homo sapiens
  misc_RNA (1)...(19): siRNA sense strand
gagcccuacuucaugugua

SEQ ID NO: 43125 - RNA, 19 nt, Homo sapiens
  misc_RNA (1)...(19): siRNA sense strand
gugaggccguguacuguga

SEQ ID NO: 43126 - RNA, 19 nt, Homo sapiens
  misc_RNA (1)...(19): siRNA sense strand
ggagauggagcucuuugug

SEQ ID NO: 43127 - RNA, 19 nt, Homo sapiens
  misc_RNA (1)...(19): siRNA sense strand
gauauugucauggauguug

SEQ ID NO: 43128 - RNA, 19 nt, Homo sapiens
  misc_RNA (1)...(19): siRNA sense strand
gcucugaaguagaaaucga

SEQ ID NO: 43129 - RNA, 19 nt, Homo sapiens
  misc_RNA (1)...(19): siRNA sense strand
ggcuugcucugaaguagaa

SEQ ID NO: 43130 - RNA, 19 nt, Homo sapiens
  misc_RNA (1)...(19): siRNA sense strand
ggcuacagcuuugagacua

SEQ ID NO: 43131 - RNA, 19 nt, Homo sapiens
  misc_RNA (1)...(19): siRNA sense strand
aaucugggcuacagcuuug

SEQ ID NO: 43132 - RNA, 19 nt, Homo sapiens
  misc_RNA (1)...(19): siRNA sense strand
cauaauucccaccaaguuu

SEQ ID NO: 43133 - RNA, 19 nt, Homo sapiens
  misc_RNA (1)...(19): siRNA sense strand
gagugagguugacaaguuc

SEQ ID NO: 43134 - RNA, 19 nt, Homo sapiens
  misc_RNA (1)...(19): siRNA sense strand
cuagcaagcucucaguauc

SEQ ID NO: 43135 - RNA, 19 nt, Homo sapiens
  misc_RNA (1)...(19): siRNA sense strand
auacaagguuggcuucaug

SEQ ID NO: 43136 - RNA, 19 nt, Homo sapiens
  misc_RNA (1)...(19): siRNA sense strand
agaaaucgacugccuaaca

SEQ ID NO: 43137 - RNA, 19 nt, Homo sapiens
  misc_RNA (1)...(19): siRNA sense strand
ucuaaacccugccauugau

SEQ ID NO: 43138 - RNA, 19 nt, Homo sapiens
  misc_RNA (1)...(19): siRNA sense strand
gagcacaucuucuguagua

SEQ ID NO: 43139 - RNA, 19 nt, Homo sapiens
  misc_RNA (1)...(19): siRNA sense strand
guaguaagcuucgaaauuu

SEQ ID NO: 43140 - RNA, 19 nt, Homo sapiens
  misc_RNA (1)...(19): siRNA sense strand
caaaguaccuugaagugua

SEQ ID NO: 43141 - RNA, 19 nt, Homo sapiens
  misc_RNA (1)...(19): siRNA sense strand
gaaauagacuuacuagcaa

SEQ ID NO: 43142 - RNA, 19 nt, Homo sapiens
  misc_RNA (1)...(19): siRNA sense strand
acaaugagcugucagauuu

SEQ ID NO: 43143 - RNA, 19 nt, Homo sapiens
  misc_RNA (1)...(19): siRNA sense strand
cgacauaccuucuguugaa

SEQ ID NO: 43144 - RNA, 19 nt, Homo sapiens
  misc_RNA (1)...(19): siRNA sense strand
ucagauauguugugaguaa

SEQ ID NO: 43145 - RNA, 19 nt, Homo sapiens
  misc_RNA (1)...(19): siRNA sense strand
gcaagacucauaugaauuu

SEQ ID NO: 43146 - RNA, 19 nt, Homo sapiens
  misc_RNA (1)...(19): siRNA sense strand
gaagauaaauagacaacug

SEQ ID NO: 43147 - RNA, 19 nt, Homo sapiens
  misc_RNA (1)...(19): siRNA sense strand
gaaauuugcuacaugacaa

SEQ ID NO: 43148 - RNA, 19 nt, Homo sapiens
  misc_RNA (1)...(19): siRNA sense strand
gaagugauccaaauguuaa

SEQ ID NO: 43149 - RNA, 19 nt, Homo sapiens
  misc_RNA (1)...(19): siRNA sense strand
gaagcaggcucaacagaga

SEQ ID NO: 43150 - RNA, 19 nt, Homo sapiens
  misc_RNA (1)...(19): siRNA sense strand
gaaguaagaaagucagaua

SEQ ID NO: 43151 - RNA, 19 nt, Homo sapiens
  misc_RNA (1)...(19): siRNA sense strand
gcagugggcugucuucaga

SEQ ID NO: 43152 - RNA, 19 nt, Homo sapiens
  misc_RNA (1)...(19): siRNA sense strand
gaguaaagcuucagugcaa

SEQ ID NO: 43153 - RNA, 19 nt, Homo sapiens
  misc_RNA (1)...(19): siRNA sense strand
guacuaacauucugagaga

SEQ ID NO: 43154 - RNA, 19 nt, Homo sapiens
  misc_RNA (1)...(19): siRNA sense strand
gagagagccuguguguuua

SEQ ID NO: 43155 - RNA, 19 nt, Homo sapiens
  misc_RNA (1)...(19): siRNA sense strand
guaagugacugcauuggaa

SEQ ID NO: 43156 - RNA, 19 nt, Homo sapiens
  misc_RNA (1)...(19): siRNA sense strand
ugaagucucuuuaccauug

SEQ ID NO: 43157 - RNA, 19 nt, Homo sapiens
  misc_RNA (1)...(19): siRNA sense strand
ggauggaccucuuguacuu

SEQ ID NO: 43158 - RNA, 19 nt, Homo sapiens
  misc_RNA (1)...(19): siRNA sense strand
gaagguaguggaauuauug

SEQ ID NO: 43159 - RNA, 19 nt, Homo sapiens
  misc_RNA (1)...(19): siRNA sense strand
ugagagagccuguguguuu

SEQ ID NO: 43160 - RNA, 19 nt, Homo sapiens
  misc_RNA (1)...(19): siRNA sense strand
ggaagugauccaaauguua

SEQ ID NO: 43161 - RNA, 19 nt, Homo sapiens
  misc_RNA (1)...(19): siRNA sense strand
gagcaggaaugaaguagug

SEQ ID NO: 43162 - RNA, 19 nt, Homo sapiens
  misc_RNA (1)...(19): siRNA sense strand
uaacauguccgaugaauuc

SEQ ID NO: 43163 - RNA, 19 nt, Homo sapiens
  misc_RNA (1)...(19): siRNA sense strand
guaagaaagucagauaugu

SEQ ID NO: 43164 - RNA, 19 nt, Homo sapiens
  misc_RNA (1)...(19): siRNA sense strand
cagcaagacucauaugaau

SEQ ID NO: 43165 - RNA, 19 nt, Homo sapiens
  misc_RNA (1)...(19): siRNA sense strand
ccagaaaugcuguuaauau

SEQ ID NO: 43166 - RNA, 19 nt, Homo sapiens
  misc_RNA (1)...(19): siRNA sense strand
gagcuugcaguaauucuua

SEQ ID NO: 43167 - RNA, 19 nt, Homo sapiens
  misc_RNA (1)...(19): siRNA sense strand
ucagugagcuugcaguaau

SEQ ID NO: 43168 - RNA, 19 nt, Homo sapiens
  misc_RNA (1)...(19): siRNA sense strand
aaacguggccaucacaaua

SEQ ID NO: 43169 - RNA, 19 nt, Homo sapiens
  misc_RNA (1)...(19): siRNA sense strand
aaagaggaaucuaagcaaa

SEQ ID NO: 43170 - RNA, 19 nt, Homo sapiens
  misc_RNA (1)...(19): siRNA sense strand
uacaccaccuucuacauua

SEQ ID NO: 43171 - RNA, 19 nt, Homo sapiens
  misc_RNA (1)...(19): siRNA sense strand
gcacacaguauaucaucua

SEQ ID NO: 43172 - RNA, 19 nt, Homo sapiens
  misc_RNA (1)...(19): siRNA sense strand
gcacguggauauagucaag

SEQ ID NO: 43173 - RNA, 19 nt, Homo sapiens
  misc_RNA (1)...(19): siRNA sense strand
uaaaguuggugguacauca

SEQ ID NO: 43174 - RNA, 19 nt, Homo sapiens
  misc_RNA (1)...(19): siRNA sense strand
guacaccaccuucuacauu

SEQ ID NO: 43175 - RNA, 19 nt, Homo sapiens
  misc_RNA (1)...(19): siRNA sense strand
gcaggaaacaagaagaauu

SEQ ID NO: 43176 - RNA, 19 nt, Homo sapiens
  misc_RNA (1)...(19): siRNA sense strand
uacaguaacucauguuguu

SEQ ID NO: 43177 - RNA, 19 nt, Homo sapiens
  misc_RNA (1)...(19): siRNA sense strand
ggauauagucaagcuguua

SEQ ID NO: 43178 - RNA, 19 nt, Homo sapiens
  misc_RNA (1)...(19): siRNA sense strand
gagagacuuugcuccauau

SEQ ID NO: 43179 - RNA, 19 nt, Homo sapiens
  misc_RNA (1)...(19): siRNA sense strand
ugaaauagacuuacuagca

SEQ ID NO: 43180 - RNA, 19 nt, Homo sapiens
  misc_RNA (1)...(19): siRNA sense strand
gauaaauggugaaauagac

SEQ ID NO: 43181 - RNA, 19 nt, Homo sapiens
  misc_RNA (1)...(19): siRNA sense strand
gaaaguaugaaaucgcuau

SEQ ID NO: 43182 - RNA, 19 nt, Homo sapiens
  misc_RNA (1)...(19): siRNA sense strand
ggccagauccucaguagaa

SEQ ID NO: 43183 - RNA, 19 nt, Homo sapiens
  misc_RNA (1)...(19): siRNA sense strand
gaagauaaaccuaggaaaa

SEQ ID NO: 43184 - RNA, 19 nt, Homo sapiens
  misc_RNA (1)...(19): siRNA sense strand
gauggaugcuacuucuauu

SEQ ID NO: 43185 - RNA, 19 nt, Homo sapiens
  misc_RNA (1)...(19): siRNA sense strand
caaaaugacucaccacuuc

SEQ ID NO: 43186 - RNA, 19 nt, Homo sapiens
  misc_RNA (1)...(19): siRNA sense strand
acaguaacauguccgauga

SEQ ID NO: 43187 - RNA, 19 nt, Homo sapiens
  misc_RNA (1)...(19): siRNA sense strand
gcaaacccagccugcaaua

SEQ ID NO: 43188 - RNA, 19 nt, Homo sapiens
  misc_RNA (1)...(19): siRNA sense strand
gcugucagauuugaaagaa

SEQ ID NO: 43189 - RNA, 19 nt, Homo sapiens
  misc_RNA (1)...(19): siRNA sense strand
aauggaugcuggauucuaa

SEQ ID NO: 43190 - RNA, 19 nt, Homo sapiens
  misc_RNA (1)...(19): siRNA sense strand
ccauauugcuucuauuaag

SEQ ID NO: 43191 - RNA, 19 nt, Homo sapiens
  misc_RNA (1)...(19): siRNA sense strand
caguaauucuuaaggcuaa

SEQ ID NO: 43192 - RNA, 19 nt, Homo sapiens
  misc_RNA (1)...(19): siRNA sense strand
aaacccagccugcaauaaa

SEQ ID NO: 43193 - RNA, 19 nt, Homo sapiens
  misc_RNA (1)...(19): siRNA sense strand
ugaagguaguggaauuauu

SEQ ID NO: 43194 - RNA, 19 nt, Homo sapiens
  misc_RNA (1)...(19): siRNA sense strand
agaaaucuuugccauuaga

SEQ ID NO: 43195 - RNA, 19 nt, Homo sapiens
  misc_RNA (1)...(19): siRNA sense strand
ugucagauuugaaagaaga

SEQ ID NO: 43196 - RNA, 19 nt, Homo sapiens
  misc_RNA (1)...(19): siRNA sense strand
gaaagucagauauguugug

SEQ ID NO: 43197 - RNA, 19 nt, Homo sapiens
  misc_RNA (1)...(19): siRNA sense strand
caacuggacagcaugauuc

SEQ ID NO: 43198 - RNA, 19 nt, Homo sapiens
  misc_RNA (1)...(19): siRNA sense strand
accauuggcugagcaaaua

SEQ ID NO: 43199 - RNA, 19 nt, Homo sapiens
  misc_RNA (1)...(19): siRNA sense strand
cagcaugauucaacuuugu

SEQ ID NO: 43200 - RNA, 19 nt, Homo sapiens
  misc_RNA (1)...(19): siRNA sense strand
cacaucuucuguaguaauu

SEQ ID NO: 43201 - RNA, 19 nt, Homo sapiens
  misc_RNA (1)...(19): siRNA sense strand
gcacaucuucuguaguaau

SEQ ID NO: 43202 - RNA, 19 nt, Homo sapiens
  misc_RNA (1)...(19): siRNA sense strand
aaaguaccuugaaguguau

SEQ ID NO: 43203 - RNA, 19 nt, Homo sapiens
  misc_RNA (1)...(19): siRNA sense strand
ggugaugcaguucaaagua

SEQ ID NO: 43204 - RNA, 19 nt, Homo sapiens
  misc_RNA (1)...(19): siRNA sense strand
gaguuugacaguacaguaa

SEQ ID NO: 43205 - RNA, 19 nt, Homo sapiens
  misc_RNA (1)...(19): siRNA sense strand
aaagucagauauguuguga

SEQ ID NO: 43206 - RNA, 19 nt, Homo sapiens
  misc_RNA (1)...(19): siRNA sense strand
guaaaagcaugucuacgaa

SEQ ID NO: 43207 - RNA, 19 nt, Homo sapiens
  misc_RNA (1)...(19): siRNA sense strand
gaacaccaccggguaucaa

SEQ ID NO: 43208 - RNA, 19 nt, Homo sapiens
  misc_RNA (1)...(19): siRNA sense strand
ccaccuucaugcaaacgua

SEQ ID NO: 43209 - RNA, 19 nt, Homo sapiens
  misc_RNA (1)...(19): siRNA sense strand
caaagaggaaucuaagcaa

SEQ ID NO: 43210 - RNA, 19 nt, Homo sapiens
  misc_RNA (1)...(19): siRNA sense strand
gaaguagugacuccugaga

SEQ ID NO: 43211 - RNA, 19 nt, Homo sapiens
  misc_RNA (1)...(19): siRNA sense strand
ucaaacaccauccaaagga

SEQ ID NO: 43212 - RNA, 19 nt, Homo sapiens
  misc_RNA (1)...(19): siRNA sense strand
ggaugcuacuucuauuugu

SEQ ID NO: 43213 - RNA, 19 nt, Homo sapiens
  misc_RNA (1)...(19): siRNA sense strand
gaaugggcacguggauaua

SEQ ID NO: 43214 - RNA, 19 nt, Homo sapiens
  misc_RNA (1)...(19): siRNA sense strand
uguaguaagcuucgaaauu

SEQ ID NO: 43215 - RNA, 19 nt, Homo sapiens
  misc_RNA (1)...(19): siRNA sense strand
ccuucgagcugguuuauag

SEQ ID NO: 43216 - RNA, 19 nt, Homo sapiens
  misc_RNA (1)...(19): siRNA sense strand
gaugcuacuucuauuugug

SEQ ID NO: 43217 - RNA, 19 nt, Homo sapiens
  misc_RNA (1)...(19): siRNA sense strand
gaugcuggauucuaaaauu

SEQ ID NO: 43218 - RNA, 19 nt, Homo sapiens
  misc_RNA (1)...(19): siRNA sense strand
gcuguuacuuuccuaugga

SEQ ID NO: 43219 - RNA, 19 nt, Homo sapiens
  misc_RNA (1)...(19): siRNA sense strand
caauauggcugugaaaaga

SEQ ID NO: 43220 - RNA, 19 nt, Homo sapiens
  misc_RNA (1)...(19): siRNA sense strand
acaccaccuucuacauuaa

SEQ ID NO: 43221 - RNA, 19 nt, Homo sapiens
  misc_RNA (1)...(19): siRNA sense strand
uaagagcaggaaugaagua

SEQ ID NO: 43222 - RNA, 19 nt, Homo sapiens
  misc_RNA (1)...(19): siRNA sense strand
ggaaacaagaagaauucaa

SEQ ID NO: 43223 - RNA, 19 nt, Homo sapiens
  misc_RNA (1)...(19): siRNA sense strand
guaguaauuguguaaguga

SEQ ID NO: 43224 - RNA, 19 nt, Homo sapiens
  misc_RNA (1)...(19): siRNA sense strand
gacagcaugauucaacuuu

SEQ ID NO: 43225 - RNA, 19 nt, Homo sapiens
  misc_RNA (1)...(19): siRNA sense strand
gagcugguuuauagacugu

SEQ ID NO: 43226 - RNA, 19 nt, Homo sapiens
  misc_RNA (1)...(19): siRNA sense strand
augaagcuguugcccaaua

SEQ ID NO: 43227 - RNA, 19 nt, Homo sapiens
  misc_RNA (1)...(19): siRNA sense strand
ucuagucccucagcaauga

SEQ ID NO: 43228 - RNA, 19 nt, Homo sapiens
  misc_RNA (1)...(19): siRNA sense strand
ugguuuagcccucgaagua

SEQ ID NO: 43229 - RNA, 19 nt, Homo sapiens
  misc_RNA (1)...(19): siRNA sense strand
aagcaugucuacgaagaaa

SEQ ID NO: 43230 - RNA, 19 nt, Homo sapiens
  misc_RNA (1)...(19): siRNA sense strand
caucuucuguaguaauugu

SEQ ID NO: 43231 - RNA, 19 nt, Homo sapiens
  misc_RNA (1)...(19): siRNA sense strand
gagcaccaguggagauuuu

SEQ ID NO: 43232 - RNA, 19 nt, Homo sapiens
  misc_RNA (1)...(19): siRNA sense strand
aagaaagucagauauguug

SEQ ID NO: 43233 - RNA, 19 nt, Homo sapiens
  misc_RNA (1)...(19): siRNA sense strand
uagucaagcuguuacuuuc

SEQ ID NO: 43234 - RNA, 19 nt, Homo sapiens
  misc_RNA (1)...(19): siRNA sense strand
ggccaucacaauagacuuu

SEQ ID NO: 43235 - RNA, 19 nt, Homo sapiens
  misc_RNA (1)...(19): siRNA sense strand
uaacugaagucucuuuacc

SEQ ID NO: 43236 - RNA, 19 nt, Homo sapiens
  misc_RNA (1)...(19): siRNA sense strand
ccaaagaggaaucuaagca

SEQ ID NO: 43237 - RNA, 19 nt, Homo sapiens
  misc_RNA (1)...(19): siRNA sense strand
aagaagauggugaauuuga

SEQ ID NO: 43238 - RNA, 19 nt, Homo sapiens
  misc_RNA (1)...(19): siRNA sense strand
ccaagacccuccacagaug

SEQ ID NO: 43239 - RNA, 19 nt, Homo sapiens
  misc_RNA (1)...(19): siRNA sense strand
guggauagcuuggaauuca

SEQ ID NO: 43240 - RNA, 19 nt, Homo sapiens
  misc_RNA (1)...(19): siRNA sense strand
ggaaguuucagaucuugua

SEQ ID NO: 43241 - RNA, 19 nt, Homo sapiens
  misc_RNA (1)...(19): siRNA sense strand
ggagguggcucugaagauc

SEQ ID NO: 43242 - RNA, 19 nt, Homo sapiens
  misc_RNA (1)...(19): siRNA sense strand
gugaggagguggcucugaa

SEQ ID NO: 43243 - RNA, 19 nt, Homo sapiens
  misc_RNA (1)...(19): siRNA sense strand
ucuccgagcuccuauuuca

SEQ ID NO: 43244 - RNA, 19 nt, Homo sapiens
  misc_RNA (1)...(19): siRNA sense strand
cagagugccuggaaguuuc

SEQ ID NO: 43245 - RNA, 19 nt, Homo sapiens
  misc_RNA (1)...(19): siRNA sense strand
guucagguuugguucaaga

SEQ ID NO: 43246 - RNA, 19 nt, Homo sapiens
  misc_RNA (1)...(19): siRNA sense strand
ggagcuggaggcacuguuu

SEQ ID NO: 43247 - RNA, 19 nt, Homo sapiens
  misc_RNA (1)...(19): siRNA sense strand
ggucuccgagcuccuauuu

SEQ ID NO: 43248 - RNA, 19 nt, Homo sapiens
  misc_RNA (1)...(19): siRNA sense strand
gaucagagugccuggaagu

SEQ ID NO: 43249 - RNA, 19 nt, Homo sapiens
  misc_RNA (1)...(19): siRNA sense strand
ccauggacccucuggacua

SEQ ID NO: 43250 - RNA, 19 nt, Homo sapiens
  misc_RNA (1)...(19): siRNA sense strand
ucagagugccuggaaguuu

SEQ ID NO: 43251 - RNA, 19 nt, Homo sapiens
  misc_RNA (1)...(19): siRNA sense strand
gcaccuggaaauucaccua

SEQ ID NO: 43252 - RNA, 19 nt, Homo sapiens
  misc_RNA (1)...(19): siRNA sense strand
ccuggaaguuucagaucuu

SEQ ID NO: 43253 - RNA, 19 nt, Homo sapiens
  misc_RNA (1)...(19): siRNA sense strand
ucaagaaccggagggcuaa

SEQ ID NO: 43254 - RNA, 19 nt, Homo sapiens
  misc_RNA (1)...(19): siRNA sense strand
ggacuacaaggaucagagu

SEQ ID NO: 43255 - RNA, 19 nt, Homo sapiens
  misc_RNA (1)...(19): siRNA sense strand
ccuggaaauucaccuacaa

SEQ ID NO: 43256 - RNA, 19 nt, Homo sapiens
  misc_RNA (1)...(19): siRNA sense strand
ggaaauucaccuacaaucc

SEQ ID NO: 43257 - RNA, 19 nt, Homo sapiens
  misc_RNA (1)...(19): siRNA sense strand
ccaguacccagacgucuau

SEQ ID NO: 43258 - RNA, 19 nt, Homo sapiens
  misc_RNA (1)...(19): siRNA sense strand
gaggagguggcucugaaga

SEQ ID NO: 43259 - RNA, 19 nt, Homo sapiens
  misc_RNA (1)...(19): siRNA sense strand
gucaacgccuuggcccuaa

SEQ ID NO: 43260 - RNA, 19 nt, Homo sapiens
  misc_RNA (1)...(19): siRNA sense strand
ccacgggcaccuggaaauu

SEQ ID NO: 43261 - RNA, 19 nt, Homo sapiens
  misc_RNA (1)...(19): siRNA sense strand
gagcuggaggcacuguuug

SEQ ID NO: 43262 - RNA, 19 nt, Homo sapiens
  misc_RNA (1)...(19): siRNA sense strand
gaaccggagggcuaaaugc

SEQ ID NO: 43263 - RNA, 19 nt, Homo sapiens
  misc_RNA (1)...(19): siRNA sense strand
gaaguuucagaucuuguag

SEQ ID NO: 43264 - RNA, 19 nt, Homo sapiens
  misc_RNA (1)...(19): siRNA sense strand
ggguucagguuugguucaa

SEQ ID NO: 43265 - RNA, 19 nt, Homo sapiens
  misc_RNA (1)...(19): siRNA sense strand
gccuggaaguuucagaucu

SEQ ID NO: 43266 - RNA, 19 nt, Homo sapiens
  misc_RNA (1)...(19): siRNA sense strand
acgggcaccuggaaauuca

SEQ ID NO: 43267 - RNA, 19 nt, Homo sapiens
  misc_RNA (1)...(19): siRNA sense strand
gcagcgacagcagcagaaa

SEQ ID NO: 43268 - RNA, 19 nt, Homo sapiens
  misc_RNA (1)...(19): siRNA sense strand
cccaagacccuccacagau

SEQ ID NO: 43269 - RNA, 19 nt, Homo sapiens
  misc_RNA (1)...(19): siRNA sense strand
gagguggcucugaagauca

SEQ ID NO: 43270 - RNA, 19 nt, Homo sapiens
  misc_RNA (1)...(19): siRNA sense strand
uggauagcuuggaauucaa

SEQ ID NO: 43271 - RNA, 19 nt, Homo sapiens
  misc_RNA (1)...(19): siRNA sense strand
aguccaggguucagguuug

SEQ ID NO: 43272 - RNA, 19 nt, Homo sapiens
  misc_RNA (1)...(19): siRNA sense strand
caagacccuccacagaugu

SEQ ID NO: 43273 - RNA, 19 nt, Homo sapiens
  misc_RNA (1)...(19): siRNA sense strand
uaacuugucuccaugauuu

SEQ ID NO: 43274 - RNA, 19 nt, Homo sapiens
  misc_RNA (1)...(19): siRNA sense strand
caacuggucugucaacgua

SEQ ID NO: 43275 - RNA, 19 nt, Homo sapiens
  misc_RNA (1)...(19): siRNA sense strand
gaagaaagccaagaaggua

SEQ ID NO: 43276 - RNA, 19 nt, Homo sapiens
  misc_RNA (1)...(19): siRNA sense strand
gagcaaguccucacugaua

SEQ ID NO: 43277 - RNA, 19 nt, Homo sapiens
  misc_RNA (1)...(19): siRNA sense strand
gauaagacauccaggaaca

SEQ ID NO: 43278 - RNA, 19 nt, Homo sapiens
  misc_RNA (1)...(19): siRNA sense strand
caagagcccugguccuaug

SEQ ID NO: 43279 - RNA, 19 nt, Homo sapiens
  misc_RNA (1)...(19): siRNA sense strand
gaaaaugaaugccgaguca

SEQ ID NO: 43280 - RNA, 19 nt, Homo sapiens
  misc_RNA (1)...(19): siRNA sense strand
gagauaagacauccaggaa

SEQ ID NO: 43281 - RNA, 19 nt, Homo sapiens
  misc_RNA (1)...(19): siRNA sense strand
gcuaugcucaggaugauuu

SEQ ID NO: 43282 - RNA, 19 nt, Homo sapiens
  misc_RNA (1)...(19): siRNA sense strand
ucucugagguuccaccaaa

SEQ ID NO: 43283 - RNA, 19 nt, Homo sapiens
  misc_RNA (1)...(19): siRNA sense strand
gaaaacagguaacuugucu

SEQ ID NO: 43284 - RNA, 19 nt, Homo sapiens
  misc_RNA (1)...(19): siRNA sense strand
guacguuucuaccgcaaug

SEQ ID NO: 43285 - RNA, 19 nt, Homo sapiens
  misc_RNA (1)...(19): siRNA sense strand
gcuuggugauuccauguaa

SEQ ID NO: 43286 - RNA, 19 nt, Homo sapiens
  misc_RNA (1)...(19): siRNA sense strand
aaacaucugccaauaugaa

SEQ ID NO: 43287 - RNA, 19 nt, Homo sapiens
  misc_RNA (1)...(19): siRNA sense strand
ggagugcguuacauuuaca

SEQ ID NO: 43288 - RNA, 19 nt, Homo sapiens
  misc_RNA (1)...(19): siRNA sense strand
gaugaugauguguuuauug

SEQ ID NO: 43289 - RNA, 19 nt, Homo sapiens
  misc_RNA (1)...(19): siRNA sense strand
ccucagacaacuucuuuaa

SEQ ID NO: 43290 - RNA, 19 nt, Homo sapiens
  misc_RNA (1)...(19): siRNA sense strand
ggaagcacaaggaccugua

SEQ ID NO: 43291 - RNA, 19 nt, Homo sapiens
  misc_RNA (1)...(19): siRNA sense strand
gccaagagcccugguccua

SEQ ID NO: 43292 - RNA, 19 nt, Homo sapiens
  misc_RNA (1)...(19): siRNA sense strand
gggagugcguuacauuuac

SEQ ID NO: 43293 - RNA, 19 nt, Homo sapiens
  misc_RNA (1)...(19): siRNA sense strand
acagguaacuugucuccau

SEQ ID NO: 43294 - RNA, 19 nt, Homo sapiens
  misc_RNA (1)...(19): siRNA sense strand
uaucacagaagccaucaaa

SEQ ID NO: 43295 - RNA, 19 nt, Homo sapiens
  misc_RNA (1)...(19): siRNA sense strand
gaagaucggaagcauggau

SEQ ID NO: 43296 - RNA, 19 nt, Homo sapiens
  misc_RNA (1)...(19): siRNA sense strand
ucacagaagccaucaaacu

SEQ ID NO: 43297 - RNA, 19 nt, Homo sapiens
  misc_RNA (1)...(19): siRNA sense strand
uaagcagucucccaucucu

SEQ ID NO: 43298 - RNA, 19 nt, Homo sapiens
  misc_RNA (1)...(19): siRNA sense strand
caugauuucuuuggugaug

SEQ ID NO: 43299 - RNA, 19 nt, Homo sapiens
  misc_RNA (1)...(19): siRNA sense strand
ucuacacucuggauggaaa

SEQ ID NO: 43300 - RNA, 19 nt, Homo sapiens
  misc_RNA (1)...(19): siRNA sense strand
gugaugaugauguguuuau

SEQ ID NO: 43301 - RNA, 19 nt, Homo sapiens
  misc_RNA (1)...(19): siRNA sense strand
augcgaggcucccggauga

SEQ ID NO: 43302 - RNA, 19 nt, Homo sapiens
  misc_RNA (1)...(19): siRNA sense strand
aaucccaacuggucuguca

SEQ ID NO: 43303 - RNA, 19 nt, Homo sapiens
  misc_RNA (1)...(19): siRNA sense strand
ccaggaagaucggaagcau

SEQ ID NO: 43304 - RNA, 19 nt, Homo sapiens
  misc_RNA (1)...(19): siRNA sense strand
gaccugacgcgaucucugu

SEQ ID NO: 43305 - RNA, 19 nt, Homo sapiens
  misc_RNA (1)...(19): siRNA sense strand
gcacugaguaaugagaaga

SEQ ID NO: 43306 - RNA, 19 nt, Homo sapiens
  misc_RNA (1)...(19): siRNA sense strand
ugcaggcacugaguaauga

SEQ ID NO: 43307 - RNA, 19 nt, Homo sapiens
  misc_RNA (1)...(19): siRNA sense strand
caagaagacagcccacucu

SEQ ID NO: 43308 - RNA, 19 nt, Homo sapiens
  misc_RNA (1)...(19): siRNA sense strand
gcguuacauuuacaccauu

SEQ ID NO: 43309 - RNA, 19 nt, Homo sapiens
  misc_RNA (1)...(19): siRNA sense strand
agggagugcguuacauuua

SEQ ID NO: 43310 - RNA, 19 nt, Homo sapiens
  misc_RNA (1)...(19): siRNA sense strand
cagggagugcguuacauuu

SEQ ID NO: 43311 - RNA, 19 nt, Homo sapiens
  misc_RNA (1)...(19): siRNA sense strand
gcacaggccagggagaaca

SEQ ID NO: 43312 - RNA, 19 nt, Homo sapiens
  misc_RNA (1)...(19): siRNA sense strand
guaacuugucuccaugauu

SEQ ID NO: 43313 - RNA, 19 nt, Homo sapiens
  misc_RNA (1)...(19): siRNA sense strand
gguaacuugucuccaugau

SEQ ID NO: 43314 - RNA, 19 nt, Homo sapiens
  misc_RNA (1)...(19): siRNA sense strand
ucagggagugcguuacauu

SEQ ID NO: 43315 - RNA, 19 nt, Homo sapiens
  misc_RNA (1)...(19): siRNA sense strand
cacagaagccaucaaacug

SEQ ID NO: 43316 - RNA, 19 nt, Homo sapiens
  misc_RNA (1)...(19): siRNA sense strand
ccagggagaacaaggacuu

SEQ ID NO: 43317 - RNA, 19 nt, Homo sapiens
  misc_RNA (1)...(19): siRNA sense strand
gccgagucaugaagggaaa

SEQ ID NO: 43318 - RNA, 19 nt, Homo sapiens
  misc_RNA (1)...(19): siRNA sense strand
uggugaugaugauguguuu

SEQ ID NO: 43319 - RNA, 19 nt, Homo sapiens
  misc_RNA (1)...(19): siRNA sense strand
ugacgaaagagauaagaca

SEQ ID NO: 43320 - RNA, 19 nt, Homo sapiens
  misc_RNA (1)...(19): siRNA sense strand
uaagacauccaggaacaug

SEQ ID NO: 43321 - RNA, 19 nt, Homo sapiens
  misc_RNA (1)...(19): siRNA sense strand
cggacucgcuuggugauuc

SEQ ID NO: 43322 - RNA, 19 nt, Homo sapiens
  misc_RNA (1)...(19): siRNA sense strand
agcaaguccucacugauau

SEQ ID NO: 43323 - RNA, 19 nt, Homo sapiens
  misc_RNA (1)...(19): siRNA sense strand
uggaguacaccaagaaugu

SEQ ID NO: 43324 - RNA, 19 nt, Homo sapiens
  misc_RNA (1)...(19): siRNA sense strand
gaucggaagcauggaugaa

SEQ ID NO: 43325 - RNA, 19 nt, Homo sapiens
  misc_RNA (1)...(19): siRNA sense strand
agaagaaagccaagaaggu

SEQ ID NO: 43326 - RNA, 19 nt, Homo sapiens
  misc_RNA (1)...(19): siRNA sense strand
ucuaagcagucucccaucu

SEQ ID NO: 43327 - RNA, 19 nt, Homo sapiens
  misc_RNA (1)...(19): siRNA sense strand
ccucacugauaucacagaa

SEQ ID NO: 43328 - RNA, 19 nt, Homo sapiens
  misc_RNA (1)...(19): siRNA sense strand
auugauggauccaggaaga

SEQ ID NO: 43329 - RNA, 19 nt, Homo sapiens
  misc_RNA (1)...(19): siRNA sense strand
uguacgcuguguccucuga

SEQ ID NO: 43330 - RNA, 19 nt, Homo sapiens
  misc_RNA (1)...(19): siRNA sense strand
gaguacaccaagaauguca

SEQ ID NO: 43331 - RNA, 19 nt, Homo sapiens
  misc_RNA (1)...(19): siRNA sense strand
gcaaguccucacugauauc

SEQ ID NO: 43332 - RNA, 19 nt, Homo sapiens
  misc_RNA (1)...(19): siRNA sense strand
ccaagagcccugguccuau

SEQ ID NO: 43333 - RNA, 19 nt, Homo sapiens
  misc_RNA (1)...(19): siRNA sense strand
aagccaagaagguacguuu

SEQ ID NO: 43334 - RNA, 19 nt, Homo sapiens
  misc_RNA (1)...(19): siRNA sense strand
gggaaagcuaugucuguuc

SEQ ID NO: 43335 - RNA, 19 nt, Homo sapiens
  misc_RNA (1)...(19): siRNA sense strand
gggauuguguacgcugugu

SEQ ID NO: 43336 - RNA, 19 nt, Homo sapiens
  misc_RNA (1)...(19): siRNA sense strand
ccuaugcgccgaagcaagu

SEQ ID NO: 43337 - RNA, 19 nt, Homo sapiens
  misc_RNA (1)...(19): siRNA sense strand
caaguccucacugauauca

SEQ ID NO: 43338 - RNA, 19 nt, Homo sapiens
  misc_RNA (1)...(19): siRNA sense strand
guacaccaagaaugucaau

SEQ ID NO: 43339 - RNA, 19 nt, Homo sapiens
  misc_RNA (1)...(19): siRNA sense strand
cguuacauuuacaccauug

SEQ ID NO: 43340 - RNA, 19 nt, Homo sapiens
  misc_RNA (1)...(19): siRNA sense strand
gaccuguaccugccucugu

SEQ ID NO: 43341 - RNA, 19 nt, Homo sapiens
  misc_RNA (1)...(19): siRNA sense strand
gacgaaagagauaagacau

SEQ ID NO: 43342 - RNA, 19 nt, Homo sapiens
  misc_RNA (1)...(19): siRNA sense strand
ggggaaagcuaugucuguu

SEQ ID NO: 43343 - RNA, 19 nt, Homo sapiens
  misc_RNA (1)...(19): siRNA sense strand
ugcgugugcuucugaacaa

SEQ ID NO: 43344 - RNA, 19 nt, Homo sapiens
  misc_RNA (1)...(19): siRNA sense strand
gaagcacaaggaccuguac

SEQ ID NO: 43345 - RNA, 19 nt, Homo sapiens
  misc_RNA (1)...(19): siRNA sense strand
aguccucacugauaucaca

SEQ ID NO: 43346 - RNA, 19 nt, Homo sapiens
  misc_RNA (1)...(19): siRNA sense strand
acuggucugucaacguaaa

SEQ ID NO: 43347 - RNA, 19 nt, Homo sapiens
  misc_RNA (1)...(19): siRNA sense strand
ggacucgcuuggugauucc

SEQ ID NO: 43348 - RNA, 19 nt, Homo sapiens
  misc_RNA (1)...(19): siRNA sense strand
ugauuucuuuggugaugau

SEQ ID NO: 43349 - RNA, 19 nt, Homo sapiens
  misc_RNA (1)...(19): siRNA sense strand
gcugugcgugugcuucuga

SEQ ID NO: 43350 - RNA, 19 nt, Homo sapiens
  misc_RNA (1)...(19): siRNA sense strand
uaacuugucuccaugauuu

SEQ ID NO: 43351 - RNA, 19 nt, Homo sapiens
  misc_RNA (1)...(19): siRNA sense strand
caacuggucugucaacgua

SEQ ID NO: 43352 - RNA, 19 nt, Homo sapiens
  misc_RNA (1)...(19): siRNA sense strand
gaagaaagccaagaaggua

SEQ ID NO: 43353 - RNA, 19 nt, Homo sapiens
  misc_RNA (1)...(19): siRNA sense strand
gagcaaguccucacugaua

SEQ ID NO: 43354 - RNA, 19 nt, Homo sapiens
  misc_RNA (1)...(19): siRNA sense strand
gauaagacauccaggaaca

SEQ ID NO: 43355 - RNA, 19 nt, Homo sapiens
  misc_RNA (1)...(19): siRNA sense strand
caagagcccugguccuaug

SEQ ID NO: 43356 - RNA, 19 nt, Homo sapiens
  misc_RNA (1)...(19): siRNA sense strand
gaaaaugaaugccgaguca

SEQ ID NO: 43357 - RNA, 19 nt, Homo sapiens
  misc_RNA (1)...(19): siRNA sense strand
gagauaagacauccaggaa

SEQ ID NO: 43358 - RNA, 19 nt, Homo sapiens
  misc_RNA (1)...(19): siRNA sense strand
gcuaugcucaggaugauuu

SEQ ID NO: 43359 - RNA, 19 nt, Homo sapiens
  misc_RNA (1)...(19): siRNA sense strand
gaaaacagguaacuugucu

SEQ ID NO: 43360 - RNA, 19 nt, Homo sapiens
  misc_RNA (1)...(19): siRNA sense strand
guacguuucuaccgcaaug

SEQ ID NO: 43361 - RNA, 19 nt, Homo sapiens
  misc_RNA (1)...(19): siRNA sense strand
gcuuggugauuccauguaa

SEQ ID NO: 43362 - RNA, 19 nt, Homo sapiens
  misc_RNA (1)...(19): siRNA sense strand
aaacaucugccaauaugaa

SEQ ID NO: 43363 - RNA, 19 nt, Homo sapiens
  misc_RNA (1)...(19): siRNA sense strand
ggagugcguuacauuuaca

SEQ ID NO: 43364 - RNA, 19 nt, Homo sapiens
  misc_RNA (1)...(19): siRNA sense strand
gaugaugauguguuuauug

SEQ ID NO: 43365 - RNA, 19 nt, Homo sapiens
  misc_RNA (1)...(19): siRNA sense strand
ccucagacaacuucuuuaa

SEQ ID NO: 43366 - RNA, 19 nt, Homo sapiens
  misc_RNA (1)...(19): siRNA sense strand
ggaagcacaaggaccugua

SEQ ID NO: 43367 - RNA, 19 nt, Homo sapiens
  misc_RNA (1)...(19): siRNA sense strand
gccaagagcccugguccua

SEQ ID NO: 43368 - RNA, 19 nt, Homo sapiens
  misc_RNA (1)...(19): siRNA sense strand
gggagugcguuacauuuac

SEQ ID NO: 43369 - RNA, 19 nt, Homo sapiens
  misc_RNA (1)...(19): siRNA sense strand
acagguaacuugucuccau

SEQ ID NO: 43370 - RNA, 19 nt, Homo sapiens
  misc_RNA (1)...(19): siRNA sense strand
uaucacagaagccaucaaa

SEQ ID NO: 43371 - RNA, 19 nt, Homo sapiens
  misc_RNA (1)...(19): siRNA sense strand
gaagaucggaagcauggau

SEQ ID NO: 43372 - RNA, 19 nt, Homo sapiens
  misc_RNA (1)...(19): siRNA sense strand
ucacagaagccaucaaacu

SEQ ID NO: 43373 - RNA, 19 nt, Homo sapiens
  misc_RNA (1)...(19): siRNA sense strand
uaagcagucucccaucucu

SEQ ID NO: 43374 - RNA, 19 nt, Homo sapiens
  misc_RNA (1)...(19): siRNA sense strand
caugauuucuuuggugaug

SEQ ID NO: 43375 - RNA, 19 nt, Homo sapiens
  misc_RNA (1)...(19): siRNA sense strand
ucuacacucuggauggaaa

SEQ ID NO: 43376 - RNA, 19 nt, Homo sapiens
  misc_RNA (1)...(19): siRNA sense strand
gugaugaugauguguuuau

SEQ ID NO: 43377 - RNA, 19 nt, Homo sapiens
  misc_RNA (1)...(19): siRNA sense strand
gcacugaguaaugagaaga

SEQ ID NO: 43378 - RNA, 19 nt, Homo sapiens
  misc_RNA (1)...(19): siRNA sense strand
augcgaggcucccggauga

SEQ ID NO: 43379 - RNA, 19 nt, Homo sapiens
  misc_RNA (1)...(19): siRNA sense strand
aaucccaacuggucuguca

SEQ ID NO: 43380 - RNA, 19 nt, Homo sapiens
  misc_RNA (1)...(19): siRNA sense strand
ccaggaagaucggaagcau

SEQ ID NO: 43381 - RNA, 19 nt, Homo sapiens
  misc_RNA (1)...(19): siRNA sense strand
gaccugacgcgaucucugu

SEQ ID NO: 43382 - RNA, 19 nt, Homo sapiens
  misc_RNA (1)...(19): siRNA sense strand
ugcaggcacugaguaauga

SEQ ID NO: 43383 - RNA, 19 nt, Homo sapiens
  misc_RNA (1)...(19): siRNA sense strand
caagaagacagcccacucu

SEQ ID NO: 43384 - RNA, 19 nt, Homo sapiens
  misc_RNA (1)...(19): siRNA sense strand
gcguuacauuuacaccauu

SEQ ID NO: 43385 - RNA, 19 nt, Homo sapiens
  misc_RNA (1)...(19): siRNA sense strand
agggagugcguuacauuua

SEQ ID NO: 43386 - RNA, 19 nt, Homo sapiens
  misc_RNA (1)...(19): siRNA sense strand
cagggagugcguuacauuu

SEQ ID NO: 43387 - RNA, 19 nt, Homo sapiens
  misc_RNA (1)...(19): siRNA sense strand
gcacaggccagggagaaca

SEQ ID NO: 43388 - RNA, 19 nt, Homo sapiens
  misc_RNA (1)...(19): siRNA sense strand
guaacuugucuccaugauu

SEQ ID NO: 43389 - RNA, 19 nt, Homo sapiens
  misc_RNA (1)...(19): siRNA sense strand
gguaacuugucuccaugau

SEQ ID NO: 43390 - RNA, 19 nt, Homo sapiens
  misc_RNA (1)...(19): siRNA sense strand
ucagggagugcguuacauu

SEQ ID NO: 43391 - RNA, 19 nt, Homo sapiens
  misc_RNA (1)...(19): siRNA sense strand
cacagaagccaucaaacug

SEQ ID NO: 43392 - RNA, 19 nt, Homo sapiens
  misc_RNA (1)...(19): siRNA sense strand
ccagggagaacaaggacuu

SEQ ID NO: 43393 - RNA, 19 nt, Homo sapiens
  misc_RNA (1)...(19): siRNA sense strand
ugacgaaagagauaagaca

SEQ ID NO: 43394 - RNA, 19 nt, Homo sapiens
  misc_RNA (1)...(19): siRNA sense strand
gccgagucaugaagggaaa

SEQ ID NO: 43395 - RNA, 19 nt, Homo sapiens
  misc_RNA (1)...(19): siRNA sense strand
uggugaugaugauguguuu

SEQ ID NO: 43396 - RNA, 19 nt, Homo sapiens
  misc_RNA (1)...(19): siRNA sense strand
gaucggaagcauggaugaa

SEQ ID NO: 43397 - RNA, 19 nt, Homo sapiens
  misc_RNA (1)...(19): siRNA sense strand
cggacucgcuuggugauuc

SEQ ID NO: 43398 - RNA, 19 nt, Homo sapiens
  misc_RNA (1)...(19): siRNA sense strand
uaagacauccaggaacaug

SEQ ID NO: 43399 - RNA, 19 nt, Homo sapiens
  misc_RNA (1)...(19): siRNA sense strand
agcaaguccucacugauau

SEQ ID NO: 43400 - RNA, 19 nt, Homo sapiens
  misc_RNA (1)...(19): siRNA sense strand
uggaguacaccaagaaugu

SEQ ID NO: 43401 - RNA, 19 nt, Homo sapiens
  misc_RNA (1)...(19): siRNA sense strand
auugauggauccaggaaga

SEQ ID NO: 43402 - RNA, 19 nt, Homo sapiens
  misc_RNA (1)...(19): siRNA sense strand
ucuaagcagucucccaucu

SEQ ID NO: 43403 - RNA, 19 nt, Homo sapiens
  misc_RNA (1)...(19): siRNA sense strand
ccucacugauaucacagaa

SEQ ID NO: 43404 - RNA, 19 nt, Homo sapiens
  misc_RNA (1)...(19): siRNA sense strand
agaagaaagccaagaaggu

SEQ ID NO: 43405 - RNA, 19 nt, Homo sapiens
  misc_RNA (1)...(19): siRNA sense strand
uguacgcuguguccucuga

SEQ ID NO: 43406 - RNA, 19 nt, Homo sapiens
  misc_RNA (1)...(19): siRNA sense strand
gaguacaccaagaauguca

SEQ ID NO: 43407 - RNA, 19 nt, Homo sapiens
  misc_RNA (1)...(19): siRNA sense strand
gcaaguccucacugauauc

SEQ ID NO: 43408 - RNA, 19 nt, Homo sapiens
  misc_RNA (1)...(19): siRNA sense strand
ccaagagcccugguccuau

SEQ ID NO: 43409 - RNA, 19 nt, Homo sapiens
  misc_RNA (1)...(19): siRNA sense strand
gggaaagcuaugucuguuc

SEQ ID NO: 43410 - RNA, 19 nt, Homo sapiens
  misc_RNA (1)...(19): siRNA sense strand
aagccaagaagguacguuu

SEQ ID NO: 43411 - RNA, 19 nt, Homo sapiens
  misc_RNA (1)...(19): siRNA sense strand
gggauuguguacgcugugu

SEQ ID NO: 43412 - RNA, 19 nt, Homo sapiens
  misc_RNA (1)...(19): siRNA sense strand
ccuaugcgccgaagcaagu

SEQ ID NO: 43413 - RNA, 19 nt, Homo sapiens
  misc_RNA (1)...(19): siRNA sense strand
caaguccucacugauauca

SEQ ID NO: 43414 - RNA, 19 nt, Homo sapiens
  misc_RNA (1)...(19): siRNA sense strand
guacaccaagaaugucaau

SEQ ID NO: 43415 - RNA, 19 nt, Homo sapiens
  misc_RNA (1)...(19): siRNA sense strand
cguuacauuuacaccauug

SEQ ID NO: 43416 - RNA, 19 nt, Homo sapiens
  misc_RNA (1)...(19): siRNA sense strand
gaccuguaccugccucugu

SEQ ID NO: 43417 - RNA, 19 nt, Homo sapiens
  misc_RNA (1)...(19): siRNA sense strand
gacgaaagagauaagacau

SEQ ID NO: 43418 - RNA, 19 nt, Homo sapiens
  misc_RNA (1)...(19): siRNA sense strand
ggggaaagcuaugucuguu

SEQ ID NO: 43419 - RNA, 19 nt, Homo sapiens
  misc_RNA (1)...(19): siRNA sense strand
ugcgugugcuucugaacaa

SEQ ID NO: 43420 - RNA, 19 nt, Homo sapiens
  misc_RNA (1)...(19): siRNA sense strand
gaagcacaaggaccuguac

SEQ ID NO: 43421 - RNA, 19 nt, Homo sapiens
  misc_RNA (1)...(19): siRNA sense strand
aguccucacugauaucaca

SEQ ID NO: 43422 - RNA, 19 nt, Homo sapiens
  misc_RNA (1)...(19): siRNA sense strand
acuggucugucaacguaaa

SEQ ID NO: 43423 - RNA, 19 nt, Homo sapiens
  misc_RNA (1)...(19): siRNA sense strand
ggacucgcuuggugauucc

SEQ ID NO: 43424 - RNA, 19 nt, Homo sapiens
  misc_RNA (1)...(19): siRNA sense strand
ugauuucuuuggugaugau

SEQ ID NO: 43425 - RNA, 19 nt, Homo sapiens
  misc_RNA (1)...(19): siRNA sense strand
gcugugcgugugcuucuga

SEQ ID NO: 43426 - RNA, 19 nt, Homo sapiens
  misc_RNA (1)...(19): siRNA sense strand
uaacuugucuccaugauuu

SEQ ID NO: 43427 - RNA, 19 nt, Homo sapiens
  misc_RNA (1)...(19): siRNA sense strand
caacuggucugucaacgua

SEQ ID NO: 43428 - RNA, 19 nt, Homo sapiens
  misc_RNA (1)...(19): siRNA sense strand
gaagaaagccaagaaggua

SEQ ID NO: 43429 - RNA, 19 nt, Homo sapiens
  misc_RNA (1)...(19): siRNA sense strand
gagcaaguccucacugaua

SEQ ID NO: 43430 - RNA, 19 nt, Homo sapiens
  misc_RNA (1)...(19): siRNA sense strand
gauaagacauccaggaaca

SEQ ID NO: 43431 - RNA, 19 nt, Homo sapiens
  misc_RNA (1)...(19): siRNA sense strand
caagagcccugguccuaug

SEQ ID NO: 43432 - RNA, 19 nt, Homo sapiens
  misc_RNA (1)...(19): siRNA sense strand
gaaaaugaaugccgaguca

SEQ ID NO: 43433 - RNA, 19 nt, Homo sapiens
  misc_RNA (1)...(19): siRNA sense strand
gagauaagacauccaggaa

SEQ ID NO: 43434 - RNA, 19 nt, Homo sapiens
  misc_RNA (1)...(19): siRNA sense strand
gcuaugcucaggaugauuu

SEQ ID NO: 43435 - RNA, 19 nt, Homo sapiens
  misc_RNA (1)...(19): siRNA sense strand
gaaaacagguaacuugucu

SEQ ID NO: 43436 - RNA, 19 nt, Homo sapiens
  misc_RNA (1)...(19): siRNA sense strand
guacguuucuaccgcaaug

SEQ ID NO: 43437 - RNA, 19 nt, Homo sapiens
  misc_RNA (1)...(19): siRNA sense strand
gcuuggugauuccauguaa

SEQ ID NO: 43438 - RNA, 19 nt, Homo sapiens
  misc_RNA (1)...(19): siRNA sense strand
aaacaucugccaauaugaa

SEQ ID NO: 43439 - RNA, 19 nt, Homo sapiens
  misc_RNA (1)...(19): siRNA sense strand
ggagugcguuacauuuaca

SEQ ID NO: 43440 - RNA, 19 nt, Homo sapiens
  misc_RNA (1)...(19): siRNA sense strand
gaugaugauguguuuauug

SEQ ID NO: 43441 - RNA, 19 nt, Homo sapiens
  misc_RNA (1)...(19): siRNA sense strand
ccucagacaacuucuuuaa

SEQ ID NO: 43442 - RNA, 19 nt, Homo sapiens
  misc_RNA (1)...(19): siRNA sense strand
ggaagcacaaggaccugua

SEQ ID NO: 43443 - RNA, 19 nt, Homo sapiens
  misc_RNA (1)...(19): siRNA sense strand
gccaagagcccugguccua

SEQ ID NO: 43444 - RNA, 19 nt, Homo sapiens
  misc_RNA (1)...(19): siRNA sense strand
gggagugcguuacauuuac

SEQ ID NO: 43445 - RNA, 19 nt, Homo sapiens
  misc_RNA (1)...(19): siRNA sense strand
acagguaacuugucuccau

SEQ ID NO: 43446 - RNA, 19 nt, Homo sapiens
  misc_RNA (1)...(19): siRNA sense strand
uaucacagaagccaucaaa

SEQ ID NO: 43447 - RNA, 19 nt, Homo sapiens
  misc_RNA (1)...(19): siRNA sense strand
gaagaucggaagcauggau

SEQ ID NO: 43448 - RNA, 19 nt, Homo sapiens
  misc_RNA (1)...(19): siRNA sense strand
ucacagaagccaucaaacu

SEQ ID NO: 43449 - RNA, 19 nt, Homo sapiens
  misc_RNA (1)...(19): siRNA sense strand
uaagcagucucccaucucu

SEQ ID NO: 43450 - RNA, 19 nt, Homo sapiens
  misc_RNA (1)...(19): siRNA sense strand
caugauuucuuuggugaug

SEQ ID NO: 43451 - RNA, 19 nt, Homo sapiens
  misc_RNA (1)...(19): siRNA sense strand
ucuacacucuggauggaaa

SEQ ID NO: 43452 - RNA, 19 nt, Homo sapiens
  misc_RNA (1)...(19): siRNA sense strand
gugaugaugauguguuuau

SEQ ID NO: 43453 - RNA, 19 nt, Homo sapiens
  misc_RNA (1)...(19): siRNA sense strand
gcacugaguaaugagaaga

SEQ ID NO: 43454 - RNA, 19 nt, Homo sapiens
  misc_RNA (1)...(19): siRNA sense strand
augcgaggcucccggauga

SEQ ID NO: 43455 - RNA, 19 nt, Homo sapiens
  misc_RNA (1)...(19): siRNA sense strand
aaucccaacuggucuguca

SEQ ID NO: 43456 - RNA, 19 nt, Homo sapiens
  misc_RNA (1)...(19): siRNA sense strand
ccaggaagaucggaagcau

SEQ ID NO: 43457 - RNA, 19 nt, Homo sapiens
  misc_RNA (1)...(19): siRNA sense strand
gaccugacgcgaucucugu

SEQ ID NO: 43458 - RNA, 19 nt, Homo sapiens
  misc_RNA (1)...(19): siRNA sense strand
ugcaggcacugaguaauga

SEQ ID NO: 43459 - RNA, 19 nt, Homo sapiens
  misc_RNA (1)...(19): siRNA sense strand
caagaagacagcccacucu

SEQ ID NO: 43460 - RNA, 19 nt, Homo sapiens
  misc_RNA (1)...(19): siRNA sense strand
gcguuacauuuacaccauu

SEQ ID NO: 43461 - RNA, 19 nt, Homo sapiens
  misc_RNA (1)...(19): siRNA sense strand
agggagugcguuacauuua

SEQ ID NO: 43462 - RNA, 19 nt, Homo sapiens
  misc_RNA (1)...(19): siRNA sense strand
cagggagugcguuacauuu

SEQ ID NO: 43463 - RNA, 19 nt, Homo sapiens
  misc_RNA (1)...(19): siRNA sense strand
gcacaggccagggagaaca

SEQ ID NO: 43464 - RNA, 19 nt, Homo sapiens
  misc_RNA (1)...(19): siRNA sense strand
guaacuugucuccaugauu

SEQ ID NO: 43465 - RNA, 19 nt, Homo sapiens
  misc_RNA (1)...(19): siRNA sense strand
gguaacuugucuccaugau

SEQ ID NO: 43466 - RNA, 19 nt, Homo sapiens
  misc_RNA (1)...(19): siRNA sense strand
ucagggagugcguuacauu

SEQ ID NO: 43467 - RNA, 19 nt, Homo sapiens
  misc_RNA (1)...(19): siRNA sense strand
cacagaagccaucaaacug

SEQ ID NO: 43468 - RNA, 19 nt, Homo sapiens
  misc_RNA (1)...(19): siRNA sense strand
ccagggagaacaaggacuu

SEQ ID NO: 43469 - RNA, 19 nt, Homo sapiens
  misc_RNA (1)...(19): siRNA sense strand
ugacgaaagagauaagaca

SEQ ID NO: 43470 - RNA, 19 nt, Homo sapiens
  misc_RNA (1)...(19): siRNA sense strand
gccgagucaugaagggaaa

SEQ ID NO: 43471 - RNA, 19 nt, Homo sapiens
  misc_RNA (1)...(19): siRNA sense strand
uggugaugaugauguguuu

SEQ ID NO: 43472 - RNA, 19 nt, Homo sapiens
  misc_RNA (1)...(19): siRNA sense strand
gaucggaagcauggaugaa

SEQ ID NO: 43473 - RNA, 19 nt, Homo sapiens
  misc_RNA (1)...(19): siRNA sense strand
cggacucgcuuggugauuc

SEQ ID NO: 43474 - RNA, 19 nt, Homo sapiens
  misc_RNA (1)...(19): siRNA sense strand
uaagacauccaggaacaug

SEQ ID NO: 43475 - RNA, 19 nt, Homo sapiens
  misc_RNA (1)...(19): siRNA sense strand
agcaaguccucacugauau

SEQ ID NO: 43476 - RNA, 19 nt, Homo sapiens
  misc_RNA (1)...(19): siRNA sense strand
uggaguacaccaagaaugu

SEQ ID NO: 43477 - RNA, 19 nt, Homo sapiens
  misc_RNA (1)...(19): siRNA sense strand
auugauggauccaggaaga

SEQ ID NO: 43478 - RNA, 19 nt, Homo sapiens
  misc_RNA (1)...(19): siRNA sense strand
ucuaagcagucucccaucu

SEQ ID NO: 43479 - RNA, 19 nt, Homo sapiens
  misc_RNA (1)...(19): siRNA sense strand
ccucacugauaucacagaa

SEQ ID NO: 43480 - RNA, 19 nt, Homo sapiens
  misc_RNA (1)...(19): siRNA sense strand
agaagaaagccaagaaggu

SEQ ID NO: 43481 - RNA, 19 nt, Homo sapiens
  misc_RNA (1)...(19): siRNA sense strand
uguacgcuguguccucuga

SEQ ID NO: 43482 - RNA, 19 nt, Homo sapiens
  misc_RNA (1)...(19): siRNA sense strand
gaguacaccaagaauguca

SEQ ID NO: 43483 - RNA, 19 nt, Homo sapiens
  misc_RNA (1)...(19): siRNA sense strand
gcaaguccucacugauauc

SEQ ID NO: 43484 - RNA, 19 nt, Homo sapiens
  misc_RNA (1)...(19): siRNA sense strand
ccaagagcccugguccuau

SEQ ID NO: 43485 - RNA, 19 nt, Homo sapiens
  misc_RNA (1)...(19): siRNA sense strand
gggaaagcuaugucuguuc

SEQ ID NO: 43486 - RNA, 19 nt, Homo sapiens
  misc_RNA (1)...(19): siRNA sense strand
aagccaagaagguacguuu

SEQ ID NO: 43487 - RNA, 19 nt, Homo sapiens
  misc_RNA (1)...(19): siRNA sense strand
gggauuguguacgcugugu

SEQ ID NO: 43488 - RNA, 19 nt, Homo sapiens
  misc_RNA (1)...(19): siRNA sense strand
ccuaugcgccgaagcaagu

SEQ ID NO: 43489 - RNA, 19 nt, Homo sapiens
  misc_RNA (1)...(19): siRNA sense strand
caaguccucacugauauca

SEQ ID NO: 43490 - RNA, 19 nt, Homo sapiens
  misc_RNA (1)...(19): siRNA sense strand
guacaccaagaaugucaau

SEQ ID NO: 43491 - RNA, 19 nt, Homo sapiens
  misc_RNA (1)...(19): siRNA sense strand
cguuacauuuacaccauug

SEQ ID NO: 43492 - RNA, 19 nt, Homo sapiens
  misc_RNA (1)...(19): siRNA sense strand
gaccuguaccugccucugu

SEQ ID NO: 43493 - RNA, 19 nt, Homo sapiens
  misc_RNA (1)...(19): siRNA sense strand
gacgaaagagauaagacau

SEQ ID NO: 43494 - RNA, 19 nt, Homo sapiens
  misc_RNA (1)...(19): siRNA sense strand
ggggaaagcuaugucuguu

SEQ ID NO: 43495 - RNA, 19 nt, Homo sapiens
  misc_RNA (1)...(19): siRNA sense strand
ugcgugugcuucugaacaa

SEQ ID NO: 43496 - RNA, 19 nt, Homo sapiens
  misc_RNA (1)...(19): siRNA sense strand
gaagcacaaggaccuguac

SEQ ID NO: 43497 - RNA, 19 nt, Homo sapiens
  misc_RNA (1)...(19): siRNA sense strand
aguccucacugauaucaca

SEQ ID NO: 43498 - RNA, 19 nt, Homo sapiens
  misc_RNA (1)...(19): siRNA sense strand
acuggucugucaacguaaa

SEQ ID NO: 43499 - RNA, 19 nt, Homo sapiens
  misc_RNA (1)...(19): siRNA sense strand
ggacucgcuuggugauucc

SEQ ID NO: 43500 - RNA, 19 nt, Homo sapiens
  misc_RNA (1)...(19): siRNA sense strand
ugauuucuuuggugaugau

SEQ ID NO: 43501 - RNA, 19 nt, Homo sapiens
  misc_RNA (1)...(19): siRNA sense strand
gcugugcgugugcuucuga

SEQ ID NO: 43502 - RNA, 19 nt, Homo sapiens
  misc_RNA (1)...(19): siRNA sense strand
uaacuugucuccaugauuu

SEQ ID NO: 43503 - RNA, 19 nt, Homo sapiens
  misc_RNA (1)...(19): siRNA sense strand
caacuggucugucaacgua

SEQ ID NO: 43504 - RNA, 19 nt, Homo sapiens
  misc_RNA (1)...(19): siRNA sense strand
gaagaaagccaagaaggua

SEQ ID NO: 43505 - RNA, 19 nt, Homo sapiens
  misc_RNA (1)...(19): siRNA sense strand
gagcaaguccucacugaua

SEQ ID NO: 43506 - RNA, 19 nt, Homo sapiens
  misc_RNA (1)...(19): siRNA sense strand
gauaagacauccaggaaca

SEQ ID NO: 43507 - RNA, 19 nt, Homo sapiens
  misc_RNA (1)...(19): siRNA sense strand
caagagcccugguccuaug

SEQ ID NO: 43508 - RNA, 19 nt, Homo sapiens
  misc_RNA (1)...(19): siRNA sense strand
gaaaaugaaugccgaguca

SEQ ID NO: 43509 - RNA, 19 nt, Homo sapiens
  misc_RNA (1)...(19): siRNA sense strand
gagauaagacauccaggaa

SEQ ID NO: 43510 - RNA, 19 nt, Homo sapiens
  misc_RNA (1)...(19): siRNA sense strand
gcuaugcucaggaugauuu

SEQ ID NO: 43511 - RNA, 19 nt, Homo sapiens
  misc_RNA (1)...(19): siRNA sense strand
gaaaacagguaacuugucu

SEQ ID NO: 43512 - RNA, 19 nt, Homo sapiens
  misc_RNA (1)...(19): siRNA sense strand
guacguuucuaccgcaaug

SEQ ID NO: 43513 - RNA, 19 nt, Homo sapiens
  misc_RNA (1)...(19): siRNA sense strand
gcuuggugauuccauguaa

SEQ ID NO: 43514 - RNA, 19 nt, Homo sapiens
  misc_RNA (1)...(19): siRNA sense strand
aaacaucugccaauaugaa

SEQ ID NO: 43515 - RNA, 19 nt, Homo sapiens
  misc_RNA (1)...(19): siRNA sense strand
ggagugcguuacauuuaca

SEQ ID NO: 43516 - RNA, 19 nt, Homo sapiens
  misc_RNA (1)...(19): siRNA sense strand
gaugaugauguguuuauug

SEQ ID NO: 43517 - RNA, 19 nt, Homo sapiens
  misc_RNA (1)...(19): siRNA sense strand
ccucagacaacuucuuuaa

SEQ ID NO: 43518 - RNA, 19 nt, Homo sapiens
  misc_RNA (1)...(19): siRNA sense strand
ggaagcacaaggaccugua

SEQ ID NO: 43519 - RNA, 19 nt, Homo sapiens
  misc_RNA (1)...(19): siRNA sense strand
gccaagagcccugguccua

SEQ ID NO: 43520 - RNA, 19 nt, Homo sapiens
  misc_RNA (1)...(19): siRNA sense strand
gggagugcguuacauuuac

SEQ ID NO: 43521 - RNA, 19 nt, Homo sapiens
  misc_RNA (1)...(19): siRNA sense strand
acagguaacuugucuccau

SEQ ID NO: 43522 - RNA, 19 nt, Homo sapiens
  misc_RNA (1)...(19): siRNA sense strand
uaucacagaagccaucaaa

SEQ ID NO: 43523 - RNA, 19 nt, Homo sapiens
  misc_RNA (1)...(19): siRNA sense strand
gaagaucggaagcauggau

SEQ ID NO: 43524 - RNA, 19 nt, Homo sapiens
  misc_RNA (1)...(19): siRNA sense strand
ucacagaagccaucaaacu

SEQ ID NO: 43525 - RNA, 19 nt, Homo sapiens
  misc_RNA (1)...(19): siRNA sense strand
uaagcagucucccaucucu

SEQ ID NO: 43526 - RNA, 19 nt, Homo sapiens
  misc_RNA (1)...(19): siRNA sense strand
caugauuucuuuggugaug

SEQ ID NO: 43527 - RNA, 19 nt, Homo sapiens
  misc_RNA (1)...(19): siRNA sense strand
ucuacacucuggauggaaa

SEQ ID NO: 43528 - RNA, 19 nt, Homo sapiens
  misc_RNA (1)...(19): siRNA sense strand
gugaugaugauguguuuau

SEQ ID NO: 43529 - RNA, 19 nt, Homo sapiens
  misc_RNA (1)...(19): siRNA sense strand
gcacugaguaaugagaaga

SEQ ID NO: 43530 - RNA, 19 nt, Homo sapiens
  misc_RNA (1)...(19): siRNA sense strand
augcgaggcucccggauga

SEQ ID NO: 43531 - RNA, 19 nt, Homo sapiens
  misc_RNA (1)...(19): siRNA sense strand
aaucccaacuggucuguca

SEQ ID NO: 43532 - RNA, 19 nt, Homo sapiens
  misc_RNA (1)...(19): siRNA sense strand
ccaggaagaucggaagcau

SEQ ID NO: 43533 - RNA, 19 nt, Homo sapiens
  misc_RNA (1)...(19): siRNA sense strand
gaccugacgcgaucucugu

SEQ ID NO: 43534 - RNA, 19 nt, Homo sapiens
  misc_RNA (1)...(19): siRNA sense strand
ugcaggcacugaguaauga

SEQ ID NO: 43535 - RNA, 19 nt, Homo sapiens
  misc_RNA (1)...(19): siRNA sense strand
caagaagacagcccacucu

SEQ ID NO: 43536 - RNA, 19 nt, Homo sapiens
  misc_RNA (1)...(19): siRNA sense strand
gcguuacauuuacaccauu

SEQ ID NO: 43537 - RNA, 19 nt, Homo sapiens
  misc_RNA (1)...(19): siRNA sense strand
agggagugcguuacauuua

SEQ ID NO: 43538 - RNA, 19 nt, Homo sapiens
  misc_RNA (1)...(19): siRNA sense strand
cagggagugcguuacauuu

SEQ ID NO: 43539 - RNA, 19 nt, Homo sapiens
  misc_RNA (1)...(19): siRNA sense strand
gcacaggccagggagaaca

SEQ ID NO: 43540 - RNA, 19 nt, Homo sapiens
  misc_RNA (1)...(19): siRNA sense strand
guaacuugucuccaugauu

SEQ ID NO: 43541 - RNA, 19 nt, Homo sapiens
  misc_RNA (1)...(19): siRNA sense strand
gguaacuugucuccaugau

SEQ ID NO: 43542 - RNA, 19 nt, Homo sapiens
  misc_RNA (1)...(19): siRNA sense strand
ucagggagugcguuacauu

SEQ ID NO: 43543 - RNA, 19 nt, Homo sapiens
  misc_RNA (1)...(19): siRNA sense strand
cacagaagccaucaaacug

SEQ ID NO: 43544 - RNA, 19 nt, Homo sapiens
  misc_RNA (1)...(19): siRNA sense strand
ccagggagaacaaggacuu

SEQ ID NO: 43545 - RNA, 19 nt, Homo sapiens
  misc_RNA (1)...(19): siRNA sense strand
ugacgaaagagauaagaca

SEQ ID NO: 43546 - RNA, 19 nt, Homo sapiens
  misc_RNA (1)...(19): siRNA sense strand
gccgagucaugaagggaaa

SEQ ID NO: 43547 - RNA, 19 nt, Homo sapiens
  misc_RNA (1)...(19): siRNA sense strand
uggugaugaugauguguuu

SEQ ID NO: 43548 - RNA, 19 nt, Homo sapiens
  misc_RNA (1)...(19): siRNA sense strand
gaucggaagcauggaugaa

SEQ ID NO: 43549 - RNA, 19 nt, Homo sapiens
  misc_RNA (1)...(19): siRNA sense strand
cggacucgcuuggugauuc

SEQ ID NO: 43550 - RNA, 19 nt, Homo sapiens
  misc_RNA (1)...(19): siRNA sense strand
uaagacauccaggaacaug

SEQ ID NO: 43551 - RNA, 19 nt, Homo sapiens
  misc_RNA (1)...(19): siRNA sense strand
agcaaguccucacugauau

SEQ ID NO: 43552 - RNA, 19 nt, Homo sapiens
  misc_RNA (1)...(19): siRNA sense strand
uggaguacaccaagaaugu

SEQ ID NO: 43553 - RNA, 19 nt, Homo sapiens
  misc_RNA (1)...(19): siRNA sense strand
auugauggauccaggaaga

SEQ ID NO: 43554 - RNA, 19 nt, Homo sapiens
  misc_RNA (1)...(19): siRNA sense strand
ucuaagcagucucccaucu

SEQ ID NO: 43555 - RNA, 19 nt, Homo sapiens
  misc_RNA (1)...(19): siRNA sense strand
ccucacugauaucacagaa

SEQ ID NO: 43556 - RNA, 19 nt, Homo sapiens
  misc_RNA (1)...(19): siRNA sense strand
agaagaaagccaagaaggu

SEQ ID NO: 43557 - RNA, 19 nt, Homo sapiens
  misc_RNA (1)...(19): siRNA sense strand
uguacgcuguguccucuga

SEQ ID NO: 43558 - RNA, 19 nt, Homo sapiens
  misc_RNA (1)...(19): siRNA sense strand
gaguacaccaagaauguca

SEQ ID NO: 43559 - RNA, 19 nt, Homo sapiens
  misc_RNA (1)...(19): siRNA sense strand
gcaaguccucacugauauc

SEQ ID NO: 43560 - RNA, 19 nt, Homo sapiens
  misc_RNA (1)...(19): siRNA sense strand
ccaagagcccugguccuau

SEQ ID NO: 43561 - RNA, 19 nt, Homo sapiens
  misc_RNA (1)...(19): siRNA sense strand
gggaaagcuaugucuguuc

SEQ ID NO: 43562 - RNA, 19 nt, Homo sapiens
  misc_RNA (1)...(19): siRNA sense strand
aagccaagaagguacguuu

SEQ ID NO: 43563 - RNA, 19 nt, Homo sapiens
  misc_RNA (1)...(19): siRNA sense strand
gggauuguguacgcugugu

SEQ ID NO: 43564 - RNA, 19 nt, Homo sapiens
  misc_RNA (1)...(19): siRNA sense strand
ccuaugcgccgaagcaagu

SEQ ID NO: 43565 - RNA, 19 nt, Homo sapiens
  misc_RNA (1)...(19): siRNA sense strand
caaguccucacugauauca

SEQ ID NO: 43566 - RNA, 19 nt, Homo sapiens
  misc_RNA (1)...(19): siRNA sense strand
guacaccaagaaugucaau

SEQ ID NO: 43567 - RNA, 19 nt, Homo sapiens
  misc_RNA (1)...(19): siRNA sense strand
cguuacauuuacaccauug

SEQ ID NO: 43568 - RNA, 19 nt, Homo sapiens
  misc_RNA (1)...(19): siRNA sense strand
gaccuguaccugccucugu

SEQ ID NO: 43569 - RNA, 19 nt, Homo sapiens
  misc_RNA (1)...(19): siRNA sense strand
gacgaaagagauaagacau

SEQ ID NO: 43570 - RNA, 19 nt, Homo sapiens
  misc_RNA (1)...(19): siRNA sense strand
ggggaaagcuaugucuguu

SEQ ID NO: 43571 - RNA, 19 nt, Homo sapiens
  misc_RNA (1)...(19): siRNA sense strand
ugcgugugcuucugaacaa

SEQ ID NO: 43572 - RNA, 19 nt, Homo sapiens
  misc_RNA (1)...(19): siRNA sense strand
gaagcacaaggaccuguac

SEQ ID NO: 43573 - RNA, 19 nt, Homo sapiens
  misc_RNA (1)...(19): siRNA sense strand
aguccucacugauaucaca

SEQ ID NO: 43574 - RNA, 19 nt, Homo sapiens
  misc_RNA (1)...(19): siRNA sense strand
acuggucugucaacguaaa

SEQ ID NO: 43575 - RNA, 19 nt, Homo sapiens
  misc_RNA (1)...(19): siRNA sense strand
ggacucgcuuggugauucc

SEQ ID NO: 43576 - RNA, 19 nt, Homo sapiens
  misc_RNA (1)...(19): siRNA sense strand
ugauuucuuuggugaugau

SEQ ID NO: 43577 - RNA, 19 nt, Homo sapiens
  misc_RNA (1)...(19): siRNA sense strand
gcugugcgugugcuucuga

SEQ ID NO: 43578 - RNA, 19 nt, Homo sapiens
  misc_RNA (1)...(19): siRNA sense strand
gugcugaccuccaaauacc

SEQ ID NO: 43579 - RNA, 19 nt, Homo sapiens
  misc_RNA (1)...(19): siRNA sense strand
agaccuacuucccgcacuu

SEQ ID NO: 43580 - RNA, 19 nt, Homo sapiens
  misc_RNA (1)...(19): siRNA sense strand
gaccuccaaauaccguuaa

SEQ ID NO: 43581 - RNA, 19 nt, Homo sapiens
  misc_RNA (1)...(19): siRNA sense strand
guuaagggccacggcaaga

SEQ ID NO: 43582 - RNA, 19 nt, Homo sapiens
  misc_RNA (1)...(19): siRNA sense strand
ugaccuccaaauaccguua

SEQ ID NO: 43583 - RNA, 19 nt, Homo sapiens
  misc_RNA (1)...(19): siRNA sense strand
caacuucaagcuccuaagc

SEQ ID NO: 43584 - RNA, 19 nt, Homo sapiens
  misc_RNA (1)...(19): siRNA sense strand
ggacaaggcuacuaucaca

SEQ ID NO: 43585 - RNA, 19 nt, Homo sapiens
  misc_RNA (1)...(19): siRNA sense strand
ggaagaugcuggaggagaa

SEQ ID NO: 43586 - RNA, 19 nt, Homo sapiens
  misc_RNA (1)...(19): siRNA sense strand
gcaccuggaugaucucaag

SEQ ID NO: 43587 - RNA, 19 nt, Homo sapiens
  misc_RNA (1)...(19): siRNA sense strand
gaaggcuccugguugucua

SEQ ID NO: 43588 - RNA, 19 nt, Homo sapiens
  misc_RNA (1)...(19): siRNA sense strand
gagguucuuugacagcuuu

SEQ ID NO: 43589 - RNA, 19 nt, Homo sapiens
  misc_RNA (1)...(19): siRNA sense strand
ggcaauccauuucggcaaa

SEQ ID NO: 43590 - RNA, 19 nt, Homo sapiens
  misc_RNA (1)...(19): siRNA sense strand
ggacccagagguucuuuga

SEQ ID NO: 43591 - RNA, 19 nt, Homo sapiens
  misc_RNA (1)...(19): siRNA sense strand
caaggcacauggcaagaag

SEQ ID NO: 43592 - RNA, 19 nt, Homo sapiens
  misc_RNA (1)...(19): siRNA sense strand
gcauguggauccugagaac

SEQ ID NO: 43593 - RNA, 19 nt, Homo sapiens
  misc_RNA (1)...(19): siRNA sense strand
gcaaggugaauguggaaga

SEQ ID NO: 43594 - RNA, 19 nt, Homo sapiens
  misc_RNA (1)...(19): siRNA sense strand
caaggugaauguggaagau

SEQ ID NO: 43595 - RNA, 19 nt, Homo sapiens
  misc_RNA (1)...(19): siRNA sense strand
gaggacaaggcuacuauca

SEQ ID NO: 43596 - RNA, 19 nt, Homo sapiens
  misc_RNA (1)...(19): siRNA sense strand
gaagaugcuggaggagaaa

SEQ ID NO: 43597 - RNA, 19 nt, Homo sapiens
  misc_RNA (1)...(19): siRNA sense strand
ugggaaggcuccugguugu

SEQ ID NO: 43598 - RNA, 19 nt, Homo sapiens
  misc_RNA (1)...(19): siRNA sense strand
acccagagguucuuugaca

SEQ ID NO: 43599 - RNA, 19 nt, Homo sapiens
  misc_RNA (1)...(19): siRNA sense strand
ggaaggcuccugguugucu

SEQ ID NO: 43600 - RNA, 19 nt, Homo sapiens
  misc_RNA (1)...(19): siRNA sense strand
acuucaagcuccugggaaa

SEQ ID NO: 43601 - RNA, 19 nt, Homo sapiens
  misc_RNA (1)...(19): siRNA sense strand
gcaauccauuucggcaaag

SEQ ID NO: 43602 - RNA, 19 nt, Homo sapiens
  misc_RNA (1)...(19): siRNA sense strand
gaggaggacaaggcuacua

SEQ ID NO: 43603 - RNA, 19 nt, Homo sapiens
  misc_RNA (1)...(19): siRNA sense strand
ccauuucggcaaagaauuc

SEQ ID NO: 43604 - RNA, 19 nt, Homo sapiens
  misc_RNA (1)...(19): siRNA sense strand
ucaagcuccugggaaaugu

SEQ ID NO: 43605 - RNA, 19 nt, Homo sapiens
  misc_RNA (1)...(19): siRNA sense strand
ucaaggcacauggcaagaa

SEQ ID NO: 43606 - RNA, 19 nt, Homo sapiens
  misc_RNA (1)...(19): siRNA sense strand
ggcaagaaggugcugacuu

SEQ ID NO: 43607 - RNA, 19 nt, Homo sapiens
  misc_RNA (1)...(19): siRNA sense strand
caauccauuucggcaaaga

SEQ ID NO: 43608 - RNA, 19 nt, Homo sapiens
  misc_RNA (1)...(19): siRNA sense strand
gggcaaggugaauguggaa

SEQ ID NO: 43609 - RNA, 19 nt, Homo sapiens
  misc_RNA (1)...(19): siRNA sense strand
ggacaaggcuacuaucaca

SEQ ID NO: 43610 - RNA, 19 nt, Homo sapiens
  misc_RNA (1)...(19): siRNA sense strand
ggaagaugcuggaggagaa

SEQ ID NO: 43611 - RNA, 19 nt, Homo sapiens
  misc_RNA (1)...(19): siRNA sense strand
gcaccuggaugaucucaag

SEQ ID NO: 43612 - RNA, 19 nt, Homo sapiens
  misc_RNA (1)...(19): siRNA sense strand
gaaggcuccugguugucua

SEQ ID NO: 43613 - RNA, 19 nt, Homo sapiens
  misc_RNA (1)...(19): siRNA sense strand
gagguucuuugacagcuuu

SEQ ID NO: 43614 - RNA, 19 nt, Homo sapiens
  misc_RNA (1)...(19): siRNA sense strand
ggcaauccauuucggcaaa

SEQ ID NO: 43615 - RNA, 19 nt, Homo sapiens
  misc_RNA (1)...(19): siRNA sense strand
ggacccagagguucuuuga

SEQ ID NO: 43616 - RNA, 19 nt, Homo sapiens
  misc_RNA (1)...(19): siRNA sense strand
caaggcacauggcaagaag

SEQ ID NO: 43617 - RNA, 19 nt, Homo sapiens
  misc_RNA (1)...(19): siRNA sense strand
gcauguggauccugagaac

SEQ ID NO: 43618 - RNA, 19 nt, Homo sapiens
  misc_RNA (1)...(19): siRNA sense strand
gcaaggugaauguggaaga

SEQ ID NO: 43619 - RNA, 19 nt, Homo sapiens
  misc_RNA (1)...(19): siRNA sense strand
caaggugaauguggaagau

SEQ ID NO: 43620 - RNA, 19 nt, Homo sapiens
  misc_RNA (1)...(19): siRNA sense strand
gaggacaaggcuacuauca

SEQ ID NO: 43621 - RNA, 19 nt, Homo sapiens
  misc_RNA (1)...(19): siRNA sense strand
gaagaugcuggaggagaaa

SEQ ID NO: 43622 - RNA, 19 nt, Homo sapiens
  misc_RNA (1)...(19): siRNA sense strand
ugggaaggcuccugguugu

SEQ ID NO: 43623 - RNA, 19 nt, Homo sapiens
  misc_RNA (1)...(19): siRNA sense strand
acccagagguucuuugaca

SEQ ID NO: 43624 - RNA, 19 nt, Homo sapiens
  misc_RNA (1)...(19): siRNA sense strand
ggaaggcuccugguugucu

SEQ ID NO: 43625 - RNA, 19 nt, Homo sapiens
  misc_RNA (1)...(19): siRNA sense strand
acuucaagcuccugggaaa

SEQ ID NO: 43626 - RNA, 19 nt, Homo sapiens
  misc_RNA (1)...(19): siRNA sense strand
gcaauccauuucggcaaag

SEQ ID NO: 43627 - RNA, 19 nt, Homo sapiens
  misc_RNA (1)...(19): siRNA sense strand
gaggaggacaaggcuacua

SEQ ID NO: 43628 - RNA, 19 nt, Homo sapiens
  misc_RNA (1)...(19): siRNA sense strand
ccauuucggcaaagaauuc

SEQ ID NO: 43629 - RNA, 19 nt, Homo sapiens
  misc_RNA (1)...(19): siRNA sense strand
ucaagcuccugggaaaugu

SEQ ID NO: 43630 - RNA, 19 nt, Homo sapiens
  misc_RNA (1)...(19): siRNA sense strand
ucaaggcacauggcaagaa

SEQ ID NO: 43631 - RNA, 19 nt, Homo sapiens
  misc_RNA (1)...(19): siRNA sense strand
ggcaagaaggugcugacuu

SEQ ID NO: 43632 - RNA, 19 nt, Homo sapiens
  misc_RNA (1)...(19): siRNA sense strand
caauccauuucggcaaaga

SEQ ID NO: 43633 - RNA, 19 nt, Homo sapiens
  misc_RNA (1)...(19): siRNA sense strand
gggcaaggugaauguggaa

SEQ ID NO: 43634 - RNA, 19 nt, Homo sapiens
  misc_RNA (1)...(19): siRNA sense strand
gagaaggaauuucauguuc

SEQ ID NO: 43635 - RNA, 19 nt, Homo sapiens
  misc_RNA (1)...(19): siRNA sense strand
ccgaguaccugcaguuuaa

SEQ ID NO: 43636 - RNA, 19 nt, Homo sapiens
  misc_RNA (1)...(19): siRNA sense strand
gaagauaugugcccagcau

SEQ ID NO: 43637 - RNA, 19 nt, Homo sapiens
  misc_RNA (1)...(19): siRNA sense strand
gcuuggaucugaugacuuu

SEQ ID NO: 43638 - RNA, 19 nt, Homo sapiens
  misc_RNA (1)...(19): siRNA sense strand
ccacagcuauucuggcuuu

SEQ ID NO: 43639 - RNA, 19 nt, Homo sapiens
  misc_RNA (1)...(19): siRNA sense strand
caacuugauugguaaauuc

SEQ ID NO: 43640 - RNA, 19 nt, Homo sapiens
  misc_RNA (1)...(19): siRNA sense strand
ggaccuguguucuuuauca

SEQ ID NO: 43641 - RNA, 19 nt, Homo sapiens
  misc_RNA (1)...(19): siRNA sense strand
gcaacuugauugguaaauu

SEQ ID NO: 43642 - RNA, 19 nt, Homo sapiens
  misc_RNA (1)...(19): siRNA sense strand
caauggagagugucaauuu

SEQ ID NO: 43643 - RNA, 19 nt, Homo sapiens
  misc_RNA (1)...(19): siRNA sense strand
guaaauucuucuccacuga

SEQ ID NO: 43644 - RNA, 19 nt, Homo sapiens
  misc_RNA (1)...(19): siRNA sense strand
gaugggacauucauuugga

SEQ ID NO: 43645 - RNA, 19 nt, Homo sapiens
  misc_RNA (1)...(19): siRNA sense strand
gaacagucuaggaucauaa

SEQ ID NO: 43646 - RNA, 19 nt, Homo sapiens
  misc_RNA (1)...(19): siRNA sense strand
ggagaaggaauuucauguu

SEQ ID NO: 43647 - RNA, 19 nt, Homo sapiens
  misc_RNA (1)...(19): siRNA sense strand
gaucauaaccguucuuggu

SEQ ID NO: 43648 - RNA, 19 nt, Homo sapiens
  misc_RNA (1)...(19): siRNA sense strand
agacaaaggacucuggaua

SEQ ID NO: 43649 - RNA, 19 nt, Homo sapiens
  misc_RNA (1)...(19): siRNA sense strand
gaggaccuguguucuuuau

SEQ ID NO: 43650 - RNA, 19 nt, Homo sapiens
  misc_RNA (1)...(19): siRNA sense strand
caaccagucugugggcuuu

SEQ ID NO: 43651 - RNA, 19 nt, Homo sapiens
  misc_RNA (1)...(19): siRNA sense strand
ccuguguucuuuaucaaua

SEQ ID NO: 43652 - RNA, 19 nt, Homo sapiens
  misc_RNA (1)...(19): siRNA sense strand
ccgaggaccuguguucuuu

SEQ ID NO: 43653 - RNA, 19 nt, Homo sapiens
  misc_RNA (1)...(19): siRNA sense strand
ggaauuucauguucggaau

SEQ ID NO: 43654 - RNA, 19 nt, Homo sapiens
  misc_RNA (1)...(19): siRNA sense strand
gagcuucuuucgacucuuc

SEQ ID NO: 43655 - RNA, 19 nt, Homo sapiens
  misc_RNA (1)...(19): siRNA sense strand
ugaacagucuaggaucaua

SEQ ID NO: 43656 - RNA, 19 nt, Homo sapiens
  misc_RNA (1)...(19): siRNA sense strand
gaaccagcccaccaaugaa

SEQ ID NO: 43657 - RNA, 19 nt, Homo sapiens
  misc_RNA (1)...(19): siRNA sense strand
caugaacagucuaggauca

SEQ ID NO: 43658 - RNA, 19 nt, Homo sapiens
  misc_RNA (1)...(19): siRNA sense strand
agaaccagcccaccaauga

SEQ ID NO: 43659 - RNA, 19 nt, Homo sapiens
  misc_RNA (1)...(19): siRNA sense strand
agaagcaccucgaccugaa

SEQ ID NO: 43660 - RNA, 19 nt, Homo sapiens
  misc_RNA (1)...(19): siRNA sense strand
cagcggcaaccaccuauuu

SEQ ID NO: 43661 - RNA, 19 nt, Homo sapiens
  misc_RNA (1)...(19): siRNA sense strand
gaagggcaacauugacaug

SEQ ID NO: 43662 - RNA, 19 nt, Homo sapiens
  misc_RNA (1)...(19): siRNA sense strand
acuggcaacuugauuggua

SEQ ID NO: 43663 - RNA, 19 nt, Homo sapiens
  misc_RNA (1)...(19): siRNA sense strand
gaguaccugcaguuuaaua

SEQ ID NO: 43664 - RNA, 19 nt, Homo sapiens
  misc_RNA (1)...(19): siRNA sense strand
gcaccucgaccugaaagaa

SEQ ID NO: 43665 - RNA, 19 nt, Homo sapiens
  misc_RNA (1)...(19): siRNA sense strand
gacaaaggacucuggauac

SEQ ID NO: 43666 - RNA, 19 nt, Homo sapiens
  misc_RNA (1)...(19): siRNA sense strand
agaagacuauaaucaaugg

SEQ ID NO: 43667 - RNA, 19 nt, Homo sapiens
  misc_RNA (1)...(19): siRNA sense strand
gagaaauuccagacaaugg

SEQ ID NO: 43668 - RNA, 19 nt, Homo sapiens
  misc_RNA (1)...(19): siRNA sense strand
ggccaaggagacccaauuu

SEQ ID NO: 43669 - RNA, 19 nt, Homo sapiens
  misc_RNA (1)...(19): siRNA sense strand
cuaggagccuucaggacuu

SEQ ID NO: 43670 - RNA, 19 nt, Homo sapiens
  misc_RNA (1)...(19): siRNA sense strand
aaauucuucuccacugaaa

SEQ ID NO: 43671 - RNA, 19 nt, Homo sapiens
  misc_RNA (1)...(19): siRNA sense strand
gaccuguguucuuuaucaa

SEQ ID NO: 43672 - RNA, 19 nt, Homo sapiens
  misc_RNA (1)...(19): siRNA sense strand
ccugguggcuuggaucuga

SEQ ID NO: 43673 - RNA, 19 nt, Homo sapiens
  misc_RNA (1)...(19): siRNA sense strand
gccgaguaccugcaguuua

SEQ ID NO: 43674 - RNA, 19 nt, Homo sapiens
  misc_RNA (1)...(19): siRNA sense strand
gaagcaccucgaccugaaa

SEQ ID NO: 43675 - RNA, 19 nt, Homo sapiens
  misc_RNA (1)...(19): siRNA sense strand
aauggagagugucaauuug

SEQ ID NO: 43676 - RNA, 19 nt, Homo sapiens
  misc_RNA (1)...(19): siRNA sense strand
cuucaggacuuuguauuca

SEQ ID NO: 43677 - RNA, 19 nt, Homo sapiens
  misc_RNA (1)...(19): siRNA sense strand
gauaugugcccagcaugaa

SEQ ID NO: 43678 - RNA, 19 nt, Homo sapiens
  misc_RNA (1)...(19): siRNA sense strand
uguugaagauccugcaaga

SEQ ID NO: 43679 - RNA, 19 nt, Homo sapiens
  misc_RNA (1)...(19): siRNA sense strand
gcggguaagcgaguguuua

SEQ ID NO: 43680 - RNA, 19 nt, Homo sapiens
  misc_RNA (1)...(19): siRNA sense strand
ggucagcggcaaccaccua

SEQ ID NO: 43681 - RNA, 19 nt, Homo sapiens
  misc_RNA (1)...(19): siRNA sense strand
ucuugucgccugccuguua

SEQ ID NO: 43682 - RNA, 19 nt, Homo sapiens
  misc_RNA (1)...(19): siRNA sense strand
acugagaaauuccagacaa

SEQ ID NO: 43683 - RNA, 19 nt, Homo sapiens
  misc_RNA (1)...(19): siRNA sense strand
gagaaccagcccaccaaug

SEQ ID NO: 43684 - RNA, 19 nt, Homo sapiens
  misc_RNA (1)...(19): siRNA sense strand
ucaauggaacaaccuuauu

SEQ ID NO: 43685 - RNA, 19 nt, Homo sapiens
  misc_RNA (1)...(19): siRNA sense strand
ccaaggagacccaauuucg

SEQ ID NO: 43686 - RNA, 19 nt, Homo sapiens
  misc_RNA (1)...(19): siRNA sense strand
gggagaaggaauuucaugu

SEQ ID NO: 43687 - RNA, 19 nt, Homo sapiens
  misc_RNA (1)...(19): siRNA sense strand
ucuggaugcuuggauguuu

SEQ ID NO: 43688 - RNA, 19 nt, Homo sapiens
  misc_RNA (1)...(19): siRNA sense strand
ccugaaagaagacuauaau

SEQ ID NO: 43689 - RNA, 19 nt, Homo sapiens
  misc_RNA (1)...(19): siRNA sense strand
uaaauucuucuccacugaa

SEQ ID NO: 43690 - RNA, 19 nt, Homo sapiens
  misc_RNA (1)...(19): siRNA sense strand
ugugaugggacauucauuu

SEQ ID NO: 43691 - RNA, 19 nt, Homo sapiens
  misc_RNA (1)...(19): siRNA sense strand
gugaugggacauucauuug

SEQ ID NO: 43692 - RNA, 19 nt, Homo sapiens
  misc_RNA (1)...(19): siRNA sense strand
guuuacggguguugaagau

SEQ ID NO: 43693 - RNA, 19 nt, Homo sapiens
  misc_RNA (1)...(19): siRNA sense strand
cugagaaauuccagacaau

SEQ ID NO: 43694 - RNA, 19 nt, Homo sapiens
  misc_RNA (1)...(19): siRNA sense strand
uaggagccuucaggacuuu

SEQ ID NO: 43695 - RNA, 19 nt, Homo sapiens
  misc_RNA (1)...(19): siRNA sense strand
cgaggaccuguguucuuua

SEQ ID NO: 43696 - RNA, 19 nt, Homo sapiens
  misc_RNA (1)...(19): siRNA sense strand
ggccucacguggcuuugug

SEQ ID NO: 43697 - RNA, 19 nt, Homo sapiens
  misc_RNA (1)...(19): siRNA sense strand
uggaacaaccuuauugaag

SEQ ID NO: 43698 - RNA, 19 nt, Homo sapiens
  misc_RNA (1)...(19): siRNA sense strand
aaucaauggaacaaccuua

SEQ ID NO: 43699 - RNA, 19 nt, Homo sapiens
  misc_RNA (1)...(19): siRNA sense strand
aaacugacuuugcuuuugu

SEQ ID NO: 43700 - RNA, 19 nt, Homo sapiens
  misc_RNA (1)...(19): siRNA sense strand
gggagcuucuuucgacucu

SEQ ID NO: 43701 - RNA, 19 nt, Homo sapiens
  misc_RNA (1)...(19): siRNA sense strand
ggaggaauggaucccuuuc

SEQ ID NO: 43702 - RNA, 19 nt, Homo sapiens
  misc_RNA (1)...(19): siRNA sense strand
gaccugaaagaagacuaua

SEQ ID NO: 43703 - RNA, 19 nt, Homo sapiens
  misc_RNA (1)...(19): siRNA sense strand
cagcaugaacagucuagga

SEQ ID NO: 43704 - RNA, 19 nt, Homo sapiens
  misc_RNA (1)...(19): siRNA sense strand
ccaccuauuucugcaagca

SEQ ID NO: 43705 - RNA, 19 nt, Homo sapiens
  misc_RNA (1)...(19): siRNA sense strand
gaauuucauguucggaauc

SEQ ID NO: 43706 - RNA, 19 nt, Homo sapiens
  misc_RNA (1)...(19): siRNA sense strand
cgaccugaaagaagacuau

SEQ ID NO: 43707 - RNA, 19 nt, Homo sapiens
  misc_RNA (1)...(19): siRNA sense strand
guucaucggagucaaacug

SEQ ID NO: 43708 - RNA, 19 nt, Homo sapiens
  misc_RNA (1)...(19): siRNA sense strand
guucuugguucuguucauc

SEQ ID NO: 43709 - RNA, 19 nt, Homo sapiens
  misc_RNA (1)...(19): siRNA sense strand
gauggagggucagaaucuc

SEQ ID NO: 43710 - RNA, 19 nt, Homo sapiens
  misc_RNA (1)...(19): siRNA sense strand
uggaucugaugacuuugaa

SEQ ID NO: 43711 - RNA, 19 nt, Homo sapiens
  misc_RNA (1)...(19): siRNA sense strand
gcaagcaggccccagaaga

SEQ ID NO: 43712 - RNA, 19 nt, Homo sapiens
  misc_RNA (1)...(19): siRNA sense strand
aauggaacaaccuuauuga

SEQ ID NO: 43713 - RNA, 19 nt, Homo sapiens
  misc_RNA (1)...(19): siRNA sense strand
uaugaagggcaggagguua

SEQ ID NO: 43714 - RNA, 19 nt, Homo sapiens
  misc_RNA (1)...(19): siRNA sense strand
cuugauugguaaauucuuc

SEQ ID NO: 43715 - RNA, 19 nt, Homo sapiens
  misc_RNA (1)...(19): siRNA sense strand
ugagaaauuccagacaaug

SEQ ID NO: 43716 - RNA, 19 nt, Homo sapiens
  misc_RNA (1)...(19): siRNA sense strand
gagccuucaggacuuugua

SEQ ID NO: 43717 - RNA, 19 nt, Homo sapiens
  misc_RNA (1)...(19): siRNA sense strand
agauaugugcccagcauga

SEQ ID NO: 43718 - RNA, 19 nt, Homo sapiens
  misc_RNA (1)...(19): siRNA sense strand
gagcagccccuguggauuc

SEQ ID NO: 43719 - RNA, 19 nt, Homo sapiens
  misc_RNA (1)...(19): siRNA sense strand
gugacuggcaacuugauug

SEQ ID NO: 43720 - RNA, 19 nt, Homo sapiens
  misc_RNA (1)...(19): siRNA sense strand
cuggcaacuugauugguaa

SEQ ID NO: 43721 - RNA, 19 nt, Homo sapiens
  misc_RNA (1)...(19): siRNA sense strand
ggauaccccuugaucaucu

SEQ ID NO: 43722 - RNA, 19 nt, Homo sapiens
  misc_RNA (1)...(19): siRNA sense strand
gaaaacaagugucugcuua

SEQ ID NO: 43723 - RNA, 19 nt, Homo sapiens
  misc_RNA (1)...(19): siRNA sense strand
gcaagacugugguuucauu

SEQ ID NO: 43724 - RNA, 19 nt, Homo sapiens
  misc_RNA (1)...(19): siRNA sense strand
gcuugaaacugcugaagua

SEQ ID NO: 43725 - RNA, 19 nt, Homo sapiens
  misc_RNA (1)...(19): siRNA sense strand
gaacagaagcugaaugagu

SEQ ID NO: 43726 - RNA, 19 nt, Homo sapiens
  misc_RNA (1)...(19): siRNA sense strand
aacagaagcugaaugagua

SEQ ID NO: 43727 - RNA, 19 nt, Homo sapiens
  misc_RNA (1)...(19): siRNA sense strand
gcugaaguauguccuguuu

SEQ ID NO: 43728 - RNA, 19 nt, Homo sapiens
  misc_RNA (1)...(19): siRNA sense strand
ugaaacugcugaaguaugu

SEQ ID NO: 43729 - RNA, 19 nt, Homo sapiens
  misc_RNA (1)...(19): siRNA sense strand
gcaguguugugguauaaau

SEQ ID NO: 43730 - RNA, 19 nt, Homo sapiens
  misc_RNA (1)...(19): siRNA sense strand
gggcaugaguagcuugaaa

SEQ ID NO: 43731 - RNA, 19 nt, Homo sapiens
  misc_RNA (1)...(19): siRNA sense strand
ucggagugcucuuccauaa

SEQ ID NO: 43732 - RNA, 19 nt, Homo sapiens
  misc_RNA (1)...(19): siRNA sense strand
gaacugccagauugacaaa

SEQ ID NO: 43733 - RNA, 19 nt, Homo sapiens
  misc_RNA (1)...(19): siRNA sense strand
aaacaagugucugcuuaug

SEQ ID NO: 43734 - RNA, 19 nt, Homo sapiens
  misc_RNA (1)...(19): siRNA sense strand
gaaagcaagacugugguuu

SEQ ID NO: 43735 - RNA, 19 nt, Homo sapiens
  misc_RNA (1)...(19): siRNA sense strand
ggagugcucuuccauaacc

SEQ ID NO: 43736 - RNA, 19 nt, Homo sapiens
  misc_RNA (1)...(19): siRNA sense strand
ugaaugaguauguggcuaa

SEQ ID NO: 43737 - RNA, 19 nt, Homo sapiens
  misc_RNA (1)...(19): siRNA sense strand
guauaaauggcacgaguga

SEQ ID NO: 43738 - RNA, 19 nt, Homo sapiens
  misc_RNA (1)...(19): siRNA sense strand
auaaauggcacgagugauu

SEQ ID NO: 43739 - RNA, 19 nt, Homo sapiens
  misc_RNA (1)...(19): siRNA sense strand
acaagugucugcuuauguc

SEQ ID NO: 43740 - RNA, 19 nt, Homo sapiens
  misc_RNA (1)...(19): siRNA sense strand
gggauguccuuugcacuga

SEQ ID NO: 43741 - RNA, 19 nt, Homo sapiens
  misc_RNA (1)...(19): siRNA sense strand
gaagcugaaugaguaugug

SEQ ID NO: 43742 - RNA, 19 nt, Homo sapiens
  misc_RNA (1)...(19): siRNA sense strand
agucauuucugcaguguug

SEQ ID NO: 43743 - RNA, 19 nt, Homo sapiens
  misc_RNA (1)...(19): siRNA sense strand
caugggcucuaucaaggaa

SEQ ID NO: 43744 - RNA, 19 nt, Homo sapiens
  misc_RNA (1)...(19): siRNA sense strand
acccugaacugccagauug

SEQ ID NO: 43745 - RNA, 19 nt, Homo sapiens
  misc_RNA (1)...(19): siRNA sense strand
ccgacagcauccaccguua

SEQ ID NO: 43746 - RNA, 19 nt, Homo sapiens
  misc_RNA (1)...(19): siRNA sense strand
ccauccugcucuuuguaua

SEQ ID NO: 43747 - RNA, 19 nt, Homo sapiens
  misc_RNA (1)...(19): siRNA sense strand
aagcaagacugugguuuca

SEQ ID NO: 43748 - RNA, 19 nt, Homo sapiens
  misc_RNA (1)...(19): siRNA sense strand
gcaauguguuugucaucgu

SEQ ID NO: 43749 - RNA, 19 nt, Homo sapiens
  misc_RNA (1)...(19): siRNA sense strand
gaucuguggcugcugcauu

SEQ ID NO: 43750 - RNA, 19 nt, Homo sapiens
  misc_RNA (1)...(19): siRNA sense strand
uauaugaacagaagcugaa

SEQ ID NO: 43751 - RNA, 19 nt, Homo sapiens
  misc_RNA (1)...(19): siRNA sense strand
cguuaccacucagacaaua

SEQ ID NO: 43752 - RNA, 19 nt, Homo sapiens
  misc_RNA (1)...(19): siRNA sense strand
uuucugcaguguuguggua

SEQ ID NO: 43753 - RNA, 19 nt, Homo sapiens
  misc_RNA (1)...(19): siRNA sense strand
uaaauggcacgagugauug

SEQ ID NO: 43754 - RNA, 19 nt, Homo sapiens
  misc_RNA (1)...(19): siRNA sense strand
gaaugaguauguggcuaag

SEQ ID NO: 43755 - RNA, 19 nt, Homo sapiens
  misc_RNA (1)...(19): siRNA sense strand
aaucaucaccaucugugua

SEQ ID NO: 43756 - RNA, 19 nt, Homo sapiens
  misc_RNA (1)...(19): siRNA sense strand
ucauuccaauuuccuguau

SEQ ID NO: 43757 - RNA, 19 nt, Homo sapiens
  misc_RNA (1)...(19): siRNA sense strand
cugcuuaugucguucuuca

SEQ ID NO: 43758 - RNA, 19 nt, Homo sapiens
  misc_RNA (1)...(19): siRNA sense strand
cugcaguguugugguauaa

SEQ ID NO: 43759 - RNA, 19 nt, Homo sapiens
  misc_RNA (1)...(19): siRNA sense strand
cauccaccguuaccacuca

SEQ ID NO: 43760 - RNA, 19 nt, Homo sapiens
  misc_RNA (1)...(19): siRNA sense strand
cgugggcucuauuaucaug

SEQ ID NO: 43761 - RNA, 19 nt, Homo sapiens
  misc_RNA (1)...(19): siRNA sense strand
gcucuauuaucaugguagu

SEQ ID NO: 43762 - RNA, 19 nt, Homo sapiens
  misc_RNA (1)...(19): siRNA sense strand
gacugugguuucauuccaa

SEQ ID NO: 43763 - RNA, 19 nt, Homo sapiens
  misc_RNA (1)...(19): siRNA sense strand
ggaggguugcuaugcgaaa

SEQ ID NO: 43764 - RNA, 19 nt, Homo sapiens
  misc_RNA (1)...(19): siRNA sense strand
aaagcaagacugugguuuc

SEQ ID NO: 43765 - RNA, 19 nt, Homo sapiens
  misc_RNA (1)...(19): siRNA sense strand
caacuucggagugcucuuc

SEQ ID NO: 43766 - RNA, 19 nt, Homo sapiens
  misc_RNA (1)...(19): siRNA sense strand
cauuccaauuuccuguaua

SEQ ID NO: 43767 - RNA, 19 nt, Homo sapiens
  misc_RNA (1)...(19): siRNA sense strand
caucgugggcucuauuauc

SEQ ID NO: 43768 - RNA, 19 nt, Homo sapiens
  misc_RNA (1)...(19): siRNA sense strand
cgaaagcaagacugugguu

SEQ ID NO: 43769 - RNA, 19 nt, Homo sapiens
  misc_RNA (1)...(19): siRNA sense strand
uaugugugauugagguguu

SEQ ID NO: 43770 - RNA, 19 nt, Homo sapiens
  misc_RNA (1)...(19): siRNA sense strand
gugguuucauuccaauuuc

SEQ ID NO: 43771 - RNA, 19 nt, Homo sapiens
  misc_RNA (1)...(19): siRNA sense strand
gggcucuauuaucauggua

SEQ ID NO: 43772 - RNA, 19 nt, Homo sapiens
  misc_RNA (1)...(19): siRNA sense strand
ucugcaguguugugguaua

SEQ ID NO: 43773 - RNA, 19 nt, Homo sapiens
  misc_RNA (1)...(19): siRNA sense strand
ucuauuaucaugguaguug

SEQ ID NO: 43774 - RNA, 19 nt, Homo sapiens
  misc_RNA (1)...(19): siRNA sense strand
gucaucgugggcucuauua

SEQ ID NO: 43775 - RNA, 19 nt, Homo sapiens
  misc_RNA (1)...(19): siRNA sense strand
gacccugaacugccagauu

SEQ ID NO: 43776 - RNA, 19 nt, Homo sapiens
  misc_RNA (1)...(19): siRNA sense strand
aucgugggcucuauuauca

SEQ ID NO: 43777 - RNA, 19 nt, Homo sapiens
  misc_RNA (1)...(19): siRNA sense strand
gcugauccacaacaacuuc

SEQ ID NO: 43778 - RNA, 19 nt, Homo sapiens
  misc_RNA (1)...(19): siRNA sense strand
gaggguugcuaugcgaaag

SEQ ID NO: 43779 - RNA, 19 nt, Homo sapiens
  misc_RNA (1)...(19): siRNA sense strand
ucauccugcugcugauuau

SEQ ID NO: 43780 - RNA, 19 nt, Homo sapiens
  misc_RNA (1)...(19): siRNA sense strand
gcaugggcucuaucaagga

SEQ ID NO: 43781 - RNA, 19 nt, Homo sapiens
  misc_RNA (1)...(19): siRNA sense strand
augaacagaagcugaauga

SEQ ID NO: 43782 - RNA, 19 nt, Homo sapiens
  misc_RNA (1)...(19): siRNA sense strand
cauccugcucuuuguauau

SEQ ID NO: 43783 - RNA, 19 nt, Homo sapiens
  misc_RNA (1)...(19): siRNA sense strand
gcuuaugucguucuucauc

SEQ ID NO: 43784 - RNA, 19 nt, Homo sapiens
  misc_RNA (1)...(19): siRNA sense strand
ggccauccugcucuuugua

SEQ ID NO: 43785 - RNA, 19 nt, Homo sapiens
  misc_RNA (1)...(19): siRNA sense strand
ccuuugcacugacccugaa

SEQ ID NO: 43786 - RNA, 19 nt, Homo sapiens
  misc_RNA (1)...(19): siRNA sense strand
caucaccaucuguguaugu

SEQ ID NO: 43787 - RNA, 19 nt, Homo sapiens
  misc_RNA (1)...(19): siRNA sense strand
ugugguuucauuccaauuu

SEQ ID NO: 43788 - RNA, 19 nt, Homo sapiens
  misc_RNA (1)...(19): siRNA sense strand
ccagucauuucugcagugu

SEQ ID NO: 43789 - RNA, 19 nt, Homo sapiens
  misc_RNA (1)...(19): siRNA sense strand
agacugugguuucauucca

SEQ ID NO: 43790 - RNA, 19 nt, Homo sapiens
  misc_RNA (1)...(19): siRNA sense strand
gaaucaucaccaucugugu

SEQ ID NO: 43791 - RNA, 19 nt, Homo sapiens
  misc_RNA (1)...(19): siRNA sense strand
gaagaucucugccuacaug

SEQ ID NO: 43792 - RNA, 19 nt, Homo sapiens
  misc_RNA (1)...(19): siRNA sense strand
gaagauucguguggacauu

SEQ ID NO: 43793 - RNA, 19 nt, Homo sapiens
  misc_RNA (1)...(19): siRNA sense strand
ggcaugaucugcuacaauc

SEQ ID NO: 43794 - RNA, 19 nt, Homo sapiens
  misc_RNA (1)...(19): siRNA sense strand
cugcuacaauccagaauuu

SEQ ID NO: 43795 - RNA, 19 nt, Homo sapiens
  misc_RNA (1)...(19): siRNA sense strand
caaaguacuuggaggaacu

SEQ ID NO: 43796 - RNA, 19 nt, Homo sapiens
  misc_RNA (1)...(19): siRNA sense strand
ggccaugguuugcaggaaa

SEQ ID NO: 43797 - RNA, 19 nt, Homo sapiens
  misc_RNA (1)...(19): siRNA sense strand
gcuacaauccagaauuuga

SEQ ID NO: 43798 - RNA, 19 nt, Homo sapiens
  misc_RNA (1)...(19): siRNA sense strand
uugagaaacugaagccaaa

SEQ ID NO: 43799 - RNA, 19 nt, Homo sapiens
  misc_RNA (1)...(19): siRNA sense strand
ggaacucccugaaaagcua

SEQ ID NO: 43800 - RNA, 19 nt, Homo sapiens
  misc_RNA (1)...(19): siRNA sense strand
gggaagcggccaugguuug

SEQ ID NO: 43801 - RNA, 19 nt, Homo sapiens
  misc_RNA (1)...(19): siRNA sense strand
ggccuggacuuucccaauc

SEQ ID NO: 43802 - RNA, 19 nt, Homo sapiens
  misc_RNA (1)...(19): siRNA sense strand
gacagaagaggagaagauu

SEQ ID NO: 43803 - RNA, 19 nt, Homo sapiens
  misc_RNA (1)...(19): siRNA sense strand
gaaacugaagccaaaguac

SEQ ID NO: 43804 - RNA, 19 nt, Homo sapiens
  misc_RNA (1)...(19): siRNA sense strand
caauccagaauuugagaaa

SEQ ID NO: 43805 - RNA, 19 nt, Homo sapiens
  misc_RNA (1)...(19): siRNA sense strand
agaaacugaagccaaagua

SEQ ID NO: 43806 - RNA, 19 nt, Homo sapiens
  misc_RNA (1)...(19): siRNA sense strand
agacagaagaggagaagau

SEQ ID NO: 43807 - RNA, 19 nt, Homo sapiens
  misc_RNA (1)...(19): siRNA sense strand
gagaaacugaagccaaagu

SEQ ID NO: 43808 - RNA, 19 nt, Homo sapiens
  misc_RNA (1)...(19): siRNA sense strand
gaucucugccuacaugaag

SEQ ID NO: 43809 - RNA, 19 nt, Homo sapiens
  misc_RNA (1)...(19): siRNA sense strand
caagcugggccuggacuuu

SEQ ID NO: 43810 - RNA, 19 nt, Homo sapiens
  misc_RNA (1)...(19): siRNA sense strand
gggcaugaucugcuacaau

SEQ ID NO: 43811 - RNA, 19 nt, Homo sapiens
  misc_RNA (1)...(19): siRNA sense strand
cagaagaggagaagauucg

SEQ ID NO: 43812 - RNA, 19 nt, Homo sapiens
  misc_RNA (1)...(19): siRNA sense strand
ggagacagaagaggagaag

SEQ ID NO: 43813 - RNA, 19 nt, Homo sapiens
  misc_RNA (1)...(19): siRNA sense strand
ccaaucugcccuacuugau

SEQ ID NO: 43814 - RNA, 19 nt, Homo sapiens
  misc_RNA (1)...(19): siRNA sense strand
aaacugaagccaaaguacu

SEQ ID NO: 43815 - RNA, 19 nt, Homo sapiens
  misc_RNA (1)...(19): siRNA sense strand
uucccaaucugcccuacuu

SEQ ID NO: 43816 - RNA, 19 nt, Homo sapiens
  misc_RNA (1)...(19): siRNA sense strand
gaagaucucugccuacaug

SEQ ID NO: 43817 - RNA, 19 nt, Homo sapiens
  misc_RNA (1)...(19): siRNA sense strand
caagaccuguguucucaaa

SEQ ID NO: 43818 - RNA, 19 nt, Homo sapiens
  misc_RNA (1)...(19): siRNA sense strand
gaagauucguguggacauu

SEQ ID NO: 43819 - RNA, 19 nt, Homo sapiens
  misc_RNA (1)...(19): siRNA sense strand
ggcaugaucugcuacaauc

SEQ ID NO: 43820 - RNA, 19 nt, Homo sapiens
  misc_RNA (1)...(19): siRNA sense strand
cugcuacaauccagaauuu

SEQ ID NO: 43821 - RNA, 19 nt, Homo sapiens
  misc_RNA (1)...(19): siRNA sense strand
caaaguacuuggaggaacu

SEQ ID NO: 43822 - RNA, 19 nt, Homo sapiens
  misc_RNA (1)...(19): siRNA sense strand
ggccaugguuugcaggaaa

SEQ ID NO: 43823 - RNA, 19 nt, Homo sapiens
  misc_RNA (1)...(19): siRNA sense strand
gcuacaauccagaauuuga

SEQ ID NO: 43824 - RNA, 19 nt, Homo sapiens
  misc_RNA (1)...(19): siRNA sense strand
uugagaaacugaagccaaa

SEQ ID NO: 43825 - RNA, 19 nt, Homo sapiens
  misc_RNA (1)...(19): siRNA sense strand
ggaacucccugaaaagcua

SEQ ID NO: 43826 - RNA, 19 nt, Homo sapiens
  misc_RNA (1)...(19): siRNA sense strand
agaccuguguucucaaaga

SEQ ID NO: 43827 - RNA, 19 nt, Homo sapiens
  misc_RNA (1)...(19): siRNA sense strand
gggaagcggccaugguuug

SEQ ID NO: 43828 - RNA, 19 nt, Homo sapiens
  misc_RNA (1)...(19): siRNA sense strand
ggccuggacuuucccaauc

SEQ ID NO: 43829 - RNA, 19 nt, Homo sapiens
  misc_RNA (1)...(19): siRNA sense strand
cccaagaccuguguucuca

SEQ ID NO: 43830 - RNA, 19 nt, Homo sapiens
  misc_RNA (1)...(19): siRNA sense strand
gacagaagaggagaagauu

SEQ ID NO: 43831 - RNA, 19 nt, Homo sapiens
  misc_RNA (1)...(19): siRNA sense strand
gaccuguguucucaaagau

SEQ ID NO: 43832 - RNA, 19 nt, Homo sapiens
  misc_RNA (1)...(19): siRNA sense strand
gaaacugaagccaaaguac

SEQ ID NO: 43833 - RNA, 19 nt, Homo sapiens
  misc_RNA (1)...(19): siRNA sense strand
caauccagaauuugagaaa

SEQ ID NO: 43834 - RNA, 19 nt, Homo sapiens
  misc_RNA (1)...(19): siRNA sense strand
agaaacugaagccaaagua

SEQ ID NO: 43835 - RNA, 19 nt, Homo sapiens
  misc_RNA (1)...(19): siRNA sense strand
agacagaagaggagaagau

SEQ ID NO: 43836 - RNA, 19 nt, Homo sapiens
  misc_RNA (1)...(19): siRNA sense strand
gagaaacugaagccaaagu

SEQ ID NO: 43837 - RNA, 19 nt, Homo sapiens
  misc_RNA (1)...(19): siRNA sense strand
gaucucugccuacaugaag

SEQ ID NO: 43838 - RNA, 19 nt, Homo sapiens
  misc_RNA (1)...(19): siRNA sense strand
gggcaugaucugcuacaau

SEQ ID NO: 43839 - RNA, 19 nt, Homo sapiens
  misc_RNA (1)...(19): siRNA sense strand
caagcugggccuggacuuu

SEQ ID NO: 43840 - RNA, 19 nt, Homo sapiens
  misc_RNA (1)...(19): siRNA sense strand
cagaagaggagaagauucg

SEQ ID NO: 43841 - RNA, 19 nt, Homo sapiens
  misc_RNA (1)...(19): siRNA sense strand
ggagacagaagaggagaag

SEQ ID NO: 43842 - RNA, 19 nt, Homo sapiens
  misc_RNA (1)...(19): siRNA sense strand
ccaaucugcccuacuugau

SEQ ID NO: 43843 - RNA, 19 nt, Homo sapiens
  misc_RNA (1)...(19): siRNA sense strand
aaacugaagccaaaguacu

SEQ ID NO: 43844 - RNA, 19 nt, Homo sapiens
  misc_RNA (1)...(19): siRNA sense strand
uucccaaucugcccuacuu

SEQ ID NO: 43845 - RNA, 19 nt, Homo sapiens
  misc_RNA (1)...(19): siRNA sense strand
ggagggagcuucgauauga

SEQ ID NO: 43846 - RNA, 19 nt, Homo sapiens
  misc_RNA (1)...(19): siRNA sense strand
caaaugaccuucuuuccaa

SEQ ID NO: 43847 - RNA, 19 nt, Homo sapiens
  misc_RNA (1)...(19): siRNA sense strand
gcagagauaucacgacaug

SEQ ID NO: 43848 - RNA, 19 nt, Homo sapiens
  misc_RNA (1)...(19): siRNA sense strand
ggacaggauuuccagugua

SEQ ID NO: 43849 - RNA, 19 nt, Homo sapiens
  misc_RNA (1)...(19): siRNA sense strand
ggaggucauuaaaguauaa

SEQ ID NO: 43850 - RNA, 19 nt, Homo sapiens
  misc_RNA (1)...(19): siRNA sense strand
gaggaaggaugacauuaug

SEQ ID NO: 43851 - RNA, 19 nt, Homo sapiens
  misc_RNA (1)...(19): siRNA sense strand
gaauauauccuggugauug

SEQ ID NO: 43852 - RNA, 19 nt, Homo sapiens
  misc_RNA (1)...(19): siRNA sense strand
gacaggauuuccaguguaa

SEQ ID NO: 43853 - RNA, 19 nt, Homo sapiens
  misc_RNA (1)...(19): siRNA sense strand
gaccaggacugccuugaug

SEQ ID NO: 43854 - RNA, 19 nt, Homo sapiens
  misc_RNA (1)...(19): siRNA sense strand
caagccagcugcuccaguu

SEQ ID NO: 43855 - RNA, 19 nt, Homo sapiens
  misc_RNA (1)...(19): siRNA sense strand
gagaagagagugugacaau

SEQ ID NO: 43856 - RNA, 19 nt, Homo sapiens
  misc_RNA (1)...(19): siRNA sense strand
cuauggagaugaugagaaa

SEQ ID NO: 43857 - RNA, 19 nt, Homo sapiens
  misc_RNA (1)...(19): siRNA sense strand
cagaacaggagcaccauua

SEQ ID NO: 43858 - RNA, 19 nt, Homo sapiens
  misc_RNA (1)...(19): siRNA sense strand
gggaggucauuaaaguaua

SEQ ID NO: 43859 - RNA, 19 nt, Homo sapiens
  misc_RNA (1)...(19): siRNA sense strand
ggacgacugugaagauguc

SEQ ID NO: 43860 - RNA, 19 nt, Homo sapiens
  misc_RNA (1)...(19): siRNA sense strand
ccaggaagaugcucagagu

SEQ ID NO: 43861 - RNA, 19 nt, Homo sapiens
  misc_RNA (1)...(19): siRNA sense strand
aaauguugguggagguuua

SEQ ID NO: 43862 - RNA, 19 nt, Homo sapiens
  misc_RNA (1)...(19): siRNA sense strand
gagcaggcauccaggaaag

SEQ ID NO: 43863 - RNA, 19 nt, Homo sapiens
  misc_RNA (1)...(19): siRNA sense strand
gaagaugucagggccauug

SEQ ID NO: 43864 - RNA, 19 nt, Homo sapiens
  misc_RNA (1)...(19): siRNA sense strand
gcaaaugaccuucuuucca

SEQ ID NO: 43865 - RNA, 19 nt, Homo sapiens
  misc_RNA (1)...(19): siRNA sense strand
gauaugacuccaccuguga

SEQ ID NO: 43866 - RNA, 19 nt, Homo sapiens
  misc_RNA (1)...(19): siRNA sense strand
gaugggagcuggaguugcu

SEQ ID NO: 43867 - RNA, 19 nt, Homo sapiens
  misc_RNA (1)...(19): siRNA sense strand
ccagaucaguacaauuaug

SEQ ID NO: 43868 - RNA, 19 nt, Homo sapiens
  misc_RNA (1)...(19): siRNA sense strand
gagaugaugagaaauacuu

SEQ ID NO: 43869 - RNA, 19 nt, Homo sapiens
  misc_RNA (1)...(19): siRNA sense strand
uuccagaucaguacaauua

SEQ ID NO: 43870 - RNA, 19 nt, Homo sapiens
  misc_RNA (1)...(19): siRNA sense strand
gaaggugaaccagagagua

SEQ ID NO: 43871 - RNA, 19 nt, Homo sapiens
  misc_RNA (1)...(19): siRNA sense strand
gaacaggagcaccauuaca

SEQ ID NO: 43872 - RNA, 19 nt, Homo sapiens
  misc_RNA (1)...(19): siRNA sense strand
gagauaucacgacauguuu

SEQ ID NO: 43873 - RNA, 19 nt, Homo sapiens
  misc_RNA (1)...(19): siRNA sense strand
ucggaaacccuacaacuuu

SEQ ID NO: 43874 - RNA, 19 nt, Homo sapiens
  misc_RNA (1)...(19): siRNA sense strand
ggucagaguggacagauug

SEQ ID NO: 43875 - RNA, 19 nt, Homo sapiens
  misc_RNA (1)...(19): siRNA sense strand
gggccuugcuucaacaaug

SEQ ID NO: 43876 - RNA, 19 nt, Homo sapiens
  misc_RNA (1)...(19): siRNA sense strand
accaguaucugauggaauu

SEQ ID NO: 43877 - RNA, 19 nt, Homo sapiens
  misc_RNA (1)...(19): siRNA sense strand
ggaccaguaucugauggaa

SEQ ID NO: 43878 - RNA, 19 nt, Homo sapiens
  misc_RNA (1)...(19): siRNA sense strand
aauauauccuggugauuga

SEQ ID NO: 43879 - RNA, 19 nt, Homo sapiens
  misc_RNA (1)...(19): siRNA sense strand
gugaacgucucuacuaugg

SEQ ID NO: 43880 - RNA, 19 nt, Homo sapiens
  misc_RNA (1)...(19): siRNA sense strand
guacgaugccaguuauuau

SEQ ID NO: 43881 - RNA, 19 nt, Homo sapiens
  misc_RNA (1)...(19): siRNA sense strand
uggaaucuccucagaguuu

SEQ ID NO: 43882 - RNA, 19 nt, Homo sapiens
  misc_RNA (1)...(19): siRNA sense strand
uggguggcauuuaugaaua

SEQ ID NO: 43883 - RNA, 19 nt, Homo sapiens
  misc_RNA (1)...(19): siRNA sense strand
gcagaugggagcuggaguu

SEQ ID NO: 43884 - RNA, 19 nt, Homo sapiens
  misc_RNA (1)...(19): siRNA sense strand
gaggacgacugugaagaug

SEQ ID NO: 43885 - RNA, 19 nt, Homo sapiens
  misc_RNA (1)...(19): siRNA sense strand
cagccaguaugaaccaauu

SEQ ID NO: 43886 - RNA, 19 nt, Homo sapiens
  misc_RNA (1)...(19): siRNA sense strand
gaaacgccaccuugugugu

SEQ ID NO: 43887 - RNA, 19 nt, Homo sapiens
  misc_RNA (1)...(19): siRNA sense strand
gaugaggaaggaugacauu

SEQ ID NO: 43888 - RNA, 19 nt, Homo sapiens
  misc_RNA (1)...(19): siRNA sense strand
gaagagagugugacaaucc

SEQ ID NO: 43889 - RNA, 19 nt, Homo sapiens
  misc_RNA (1)...(19): siRNA sense strand
gcaaacacagacagaagga

SEQ ID NO: 43890 - RNA, 19 nt, Homo sapiens
  misc_RNA (1)...(19): siRNA sense strand
ggguggcauuuaugaauau

SEQ ID NO: 43891 - RNA, 19 nt, Homo sapiens
  misc_RNA (1)...(19): siRNA sense strand
agagauaucacgacauguu

SEQ ID NO: 43892 - RNA, 19 nt, Homo sapiens
  misc_RNA (1)...(19): siRNA sense strand
uaaugcaaaugaccuucuu

SEQ ID NO: 43893 - RNA, 19 nt, Homo sapiens
  misc_RNA (1)...(19): siRNA sense strand
gagcaaacacagacagaag

SEQ ID NO: 43894 - RNA, 19 nt, Homo sapiens
  misc_RNA (1)...(19): siRNA sense strand
ugaggaaggaugacauuau

SEQ ID NO: 43895 - RNA, 19 nt, Homo sapiens
  misc_RNA (1)...(19): siRNA sense strand
ucagggccauugacgaaga

SEQ ID NO: 43896 - RNA, 19 nt, Homo sapiens
  misc_RNA (1)...(19): siRNA sense strand
uaucaggagaccauuguaa

SEQ ID NO: 43897 - RNA, 19 nt, Homo sapiens
  misc_RNA (1)...(19): siRNA sense strand
gccagcugcuccaguucua

SEQ ID NO: 43898 - RNA, 19 nt, Homo sapiens
  misc_RNA (1)...(19): siRNA sense strand
ggaaaggagaagagagugu

SEQ ID NO: 43899 - RNA, 19 nt, Homo sapiens
  misc_RNA (1)...(19): siRNA sense strand
aaaauggaaucccuuggua

SEQ ID NO: 43900 - RNA, 19 nt, Homo sapiens
  misc_RNA (1)...(19): siRNA sense strand
gaaggaaugcugcagucau

SEQ ID NO: 43901 - RNA, 19 nt, Homo sapiens
  misc_RNA (1)...(19): siRNA sense strand
gugagacgguauacaaugg

SEQ ID NO: 43902 - RNA, 19 nt, Homo sapiens
  misc_RNA (1)...(19): siRNA sense strand
gaagaugcucagagugugu

SEQ ID NO: 43903 - RNA, 19 nt, Homo sapiens
  misc_RNA (1)...(19): siRNA sense strand
ggugacaucugggaucaag

SEQ ID NO: 43904 - RNA, 19 nt, Homo sapiens
  misc_RNA (1)...(19): siRNA sense strand
ccuugggcauucaauauga

SEQ ID NO: 43905 - RNA, 19 nt, Homo sapiens
  misc_RNA (1)...(19): siRNA sense strand
gguggcauuuaugaauaua

SEQ ID NO: 43906 - RNA, 19 nt, Homo sapiens
  misc_RNA (1)...(19): siRNA sense strand
caucugcaguggugacauc

SEQ ID NO: 43907 - RNA, 19 nt, Homo sapiens
  misc_RNA (1)...(19): siRNA sense strand
acaggagcaccauuacaua

SEQ ID NO: 43908 - RNA, 19 nt, Homo sapiens
  misc_RNA (1)...(19): siRNA sense strand
auacuggaaucuccucaga

SEQ ID NO: 43909 - RNA, 19 nt, Homo sapiens
  misc_RNA (1)...(19): siRNA sense strand
uguacgaugccaguuauua

SEQ ID NO: 43910 - RNA, 19 nt, Homo sapiens
  misc_RNA (1)...(19): siRNA sense strand
agaaggagccaaagcagau

SEQ ID NO: 43911 - RNA, 19 nt, Homo sapiens
  misc_RNA (1)...(19): siRNA sense strand
aaggugaaccagagaguaa

SEQ ID NO: 43912 - RNA, 19 nt, Homo sapiens
  misc_RNA (1)...(19): siRNA sense strand
aaaugaccuucuuuccaaa

SEQ ID NO: 43913 - RNA, 19 nt, Homo sapiens
  misc_RNA (1)...(19): siRNA sense strand
ccugugaacgucucuacua

SEQ ID NO: 43914 - RNA, 19 nt, Homo sapiens
  misc_RNA (1)...(19): siRNA sense strand
ggagugaccaucggcauag

SEQ ID NO: 43915 - RNA, 19 nt, Homo sapiens
  misc_RNA (1)...(19): siRNA sense strand
gcuguggaagacauuauuu

SEQ ID NO: 43916 - RNA, 19 nt, Homo sapiens
  misc_RNA (1)...(19): siRNA sense strand
uaugcuggaugaaggaaug

SEQ ID NO: 43917 - RNA, 19 nt, Homo sapiens
  misc_RNA (1)...(19): siRNA sense strand
ucacaagacacuucauucu

SEQ ID NO: 43918 - RNA, 19 nt, Homo sapiens
  misc_RNA (1)...(19): siRNA sense strand
ugaaccaauuccaggauca

SEQ ID NO: 43919 - RNA, 19 nt, Homo sapiens
  misc_RNA (1)...(19): siRNA sense strand
ggagaaggugaaccagaga

SEQ ID NO: 43920 - RNA, 19 nt, Homo sapiens
  misc_RNA (1)...(19): siRNA sense strand
aauggaaucccuugguauu

SEQ ID NO: 43921 - RNA, 19 nt, Homo sapiens
  misc_RNA (1)...(19): siRNA sense strand
gcuacacccgcagcaguua

SEQ ID NO: 43922 - RNA, 19 nt, Homo sapiens
  misc_RNA (1)...(19): siRNA sense strand
gacagaaggagccaaagca

SEQ ID NO: 43923 - RNA, 19 nt, Homo sapiens
  misc_RNA (1)...(19): siRNA sense strand
ggccauggcuguggaagac

SEQ ID NO: 43924 - RNA, 19 nt, Homo sapiens
  misc_RNA (1)...(19): siRNA sense strand
uguguacgaugccaguuau

SEQ ID NO: 43925 - RNA, 19 nt, Homo sapiens
  misc_RNA (1)...(19): siRNA sense strand
aacgccaccuuguguguaa

SEQ ID NO: 43926 - RNA, 19 nt, Homo sapiens
  misc_RNA (1)...(19): siRNA sense strand
gacaauccagcaccucaga

SEQ ID NO: 43927 - RNA, 19 nt, Homo sapiens
  misc_RNA (1)...(19): siRNA sense strand
gaugugggccuugcuucaa

SEQ ID NO: 43928 - RNA, 19 nt, Homo sapiens
  misc_RNA (1)...(19): siRNA sense strand
gcuccuugggcauucaaua

SEQ ID NO: 43929 - RNA, 19 nt, Homo sapiens
  misc_RNA (1)...(19): siRNA sense strand
gauccauggguggcauuua

SEQ ID NO: 43930 - RNA, 19 nt, Homo sapiens
  misc_RNA (1)...(19): siRNA sense strand
uaacugcacaggagaaggu

SEQ ID NO: 43931 - RNA, 19 nt, Homo sapiens
  misc_RNA (1)...(19): siRNA sense strand
ggaaggaugacauuaugcu

SEQ ID NO: 43932 - RNA, 19 nt, Homo sapiens
  misc_RNA (1)...(19): siRNA sense strand
gaauggagggagcuucgau

SEQ ID NO: 43933 - RNA, 19 nt, Homo sapiens
  misc_RNA (1)...(19): siRNA sense strand
guguguacgaugccaguua

SEQ ID NO: 43934 - RNA, 19 nt, Homo sapiens
  misc_RNA (1)...(19): siRNA sense strand
ccaauuccaggaucacaga

SEQ ID NO: 43935 - RNA, 19 nt, Homo sapiens
  misc_RNA (1)...(19): siRNA sense strand
auggagaugaugagaaaua

SEQ ID NO: 43936 - RNA, 19 nt, Homo sapiens
  misc_RNA (1)...(19): siRNA sense strand
ggccuugcuucaacaaugg

SEQ ID NO: 43937 - RNA, 19 nt, Homo sapiens
  misc_RNA (1)...(19): siRNA sense strand
gcgguggcuuggcacagaa

SEQ ID NO: 43938 - RNA, 19 nt, Homo sapiens
  misc_RNA (1)...(19): siRNA sense strand
uggaaucccuugguauuac

SEQ ID NO: 43939 - RNA, 19 nt, Homo sapiens
  misc_RNA (1)...(19): siRNA sense strand
agaguggacagauugcuuu

SEQ ID NO: 43940 - RNA, 19 nt, Homo sapiens
  misc_RNA (1)...(19): siRNA sense strand
acuggaaucuccucagagu

SEQ ID NO: 43941 - RNA, 19 nt, Homo sapiens
  misc_RNA (1)...(19): siRNA sense strand
ugaggacgacugugaagau

SEQ ID NO: 43942 - RNA, 19 nt, Homo sapiens
  misc_RNA (1)...(19): siRNA sense strand
caggaaaggagaagagagu

SEQ ID NO: 43943 - RNA, 19 nt, Homo sapiens
  misc_RNA (1)...(19): siRNA sense strand
gaaggagccaaagcagaug

SEQ ID NO: 43944 - RNA, 19 nt, Homo sapiens
  misc_RNA (1)...(19): siRNA sense strand
uaugccaaguucaucaaug

SEQ ID NO: 43945 - RNA, 19 nt, Homo sapiens
  misc_RNA (1)...(19): siRNA sense strand
gcaaaggaauguuaaucua

SEQ ID NO: 43946 - RNA, 19 nt, Homo sapiens
  misc_RNA (1)...(19): siRNA sense strand
gaauggauauuugcagaua

SEQ ID NO: 43947 - RNA, 19 nt, Homo sapiens
  misc_RNA (1)...(19): siRNA sense strand
cagaaucacugaaagcaaa

SEQ ID NO: 43948 - RNA, 19 nt, Homo sapiens
  misc_RNA (1)...(19): siRNA sense strand
caucguggcgcauguauua

SEQ ID NO: 43949 - RNA, 19 nt, Homo sapiens
  misc_RNA (1)...(19): siRNA sense strand
gaagacaauuauucacguu

SEQ ID NO: 43950 - RNA, 19 nt, Homo sapiens
  misc_RNA (1)...(19): siRNA sense strand
gaaaccaaauccugaucaa

SEQ ID NO: 43951 - RNA, 19 nt, Homo sapiens
  misc_RNA (1)...(19): siRNA sense strand
caagagcaaaggaauguua

SEQ ID NO: 43952 - RNA, 19 nt, Homo sapiens
  misc_RNA (1)...(19): siRNA sense strand
ccauuaaaguuacugguuu

SEQ ID NO: 43953 - RNA, 19 nt, Homo sapiens
  misc_RNA (1)...(19): siRNA sense strand
uaaguacgauguucaagug

SEQ ID NO: 43954 - RNA, 19 nt, Homo sapiens
  misc_RNA (1)...(19): siRNA sense strand
gaaaauaaacgcuccaaaa

SEQ ID NO: 43955 - RNA, 19 nt, Homo sapiens
  misc_RNA (1)...(19): siRNA sense strand
gaaaccagaaucacugaaa

SEQ ID NO: 43956 - RNA, 19 nt, Homo sapiens
  misc_RNA (1)...(19): siRNA sense strand
gaguggagccaaccuauuu

SEQ ID NO: 43957 - RNA, 19 nt, Homo sapiens
  misc_RNA (1)...(19): siRNA sense strand
gcagaacgaccacucacua

SEQ ID NO: 43958 - RNA, 19 nt, Homo sapiens
  misc_RNA (1)...(19): siRNA sense strand
caaauaaauccuccacuga

SEQ ID NO: 43959 - RNA, 19 nt, Homo sapiens
  misc_RNA (1)...(19): siRNA sense strand
ccuggaaccucaauuguga

SEQ ID NO: 43960 - RNA, 19 nt, Homo sapiens
  misc_RNA (1)...(19): siRNA sense strand
ucacgccauugaucaaaua

SEQ ID NO: 43961 - RNA, 19 nt, Homo sapiens
  misc_RNA (1)...(19): siRNA sense strand
ccacaaacacuacagaaga

SEQ ID NO: 43962 - RNA, 19 nt, Homo sapiens
  misc_RNA (1)...(19): siRNA sense strand
ugaaggaacucgucucucu

SEQ ID NO: 43963 - RNA, 19 nt, Homo sapiens
  misc_RNA (1)...(19): siRNA sense strand
gagccaaccuauuuaugug

SEQ ID NO: 43964 - RNA, 19 nt, Homo sapiens
  misc_RNA (1)...(19): siRNA sense strand
gaacucgucucucuaucca

SEQ ID NO: 43965 - RNA, 19 nt, Homo sapiens
  misc_RNA (1)...(19): siRNA sense strand
gaagaugacuaugaaacca

SEQ ID NO: 43966 - RNA, 19 nt, Homo sapiens
  misc_RNA (1)...(19): siRNA sense strand
ugacuuacuuccugaugaa

SEQ ID NO: 43967 - RNA, 19 nt, Homo sapiens
  misc_RNA (1)...(19): siRNA sense strand
gaaagcaaauguguaacca

SEQ ID NO: 43968 - RNA, 19 nt, Homo sapiens
  misc_RNA (1)...(19): siRNA sense strand
gcagggcucuggagugagu

SEQ ID NO: 43969 - RNA, 19 nt, Homo sapiens
  misc_RNA (1)...(19): siRNA sense strand
gaaugucacagcagagauu

SEQ ID NO: 43970 - RNA, 19 nt, Homo sapiens
  misc_RNA (1)...(19): siRNA sense strand
uacaaggaauggauauuug

SEQ ID NO: 43971 - RNA, 19 nt, Homo sapiens
  misc_RNA (1)...(19): siRNA sense strand
guacgauguucaagugaga

SEQ ID NO: 43972 - RNA, 19 nt, Homo sapiens
  misc_RNA (1)...(19): siRNA sense strand
ccugucaauuucaccauua

SEQ ID NO: 43973 - RNA, 19 nt, Homo sapiens
  misc_RNA (1)...(19): siRNA sense strand
ggagccaaccuauuuaugu

SEQ ID NO: 43974 - RNA, 19 nt, Homo sapiens
  misc_RNA (1)...(19): siRNA sense strand
agaaaccagugucugcuuu

SEQ ID NO: 43975 - RNA, 19 nt, Homo sapiens
  misc_RNA (1)...(19): siRNA sense strand
gaacgaccacucacuacug

SEQ ID NO: 43976 - RNA, 19 nt, Homo sapiens
  misc_RNA (1)...(19): siRNA sense strand
gaaggaacucgucucucua

SEQ ID NO: 43977 - RNA, 19 nt, Homo sapiens
  misc_RNA (1)...(19): siRNA sense strand
gauacugcaagcugacuua

SEQ ID NO: 43978 - RNA, 19 nt, Homo sapiens
  misc_RNA (1)...(19): siRNA sense strand
cuacagaagacaauuauuc

SEQ ID NO: 43979 - RNA, 19 nt, Homo sapiens
  misc_RNA (1)...(19): siRNA sense strand
ccaaugcauucaucucaau

SEQ ID NO: 43980 - RNA, 19 nt, Homo sapiens
  misc_RNA (1)...(19): siRNA sense strand
ggaccauccugcagaacga

SEQ ID NO: 43981 - RNA, 19 nt, Homo sapiens
  misc_RNA (1)...(19): siRNA sense strand
aauaaacgcuccaaaagaa

SEQ ID NO: 43982 - RNA, 19 nt, Homo sapiens
  misc_RNA (1)...(19): siRNA sense strand
caaaagaagaugacuauga

SEQ ID NO: 43983 - RNA, 19 nt, Homo sapiens
  misc_RNA (1)...(19): siRNA sense strand
aaauaucgcaugcugguuu

SEQ ID NO: 43984 - RNA, 19 nt, Homo sapiens
  misc_RNA (1)...(19): siRNA sense strand
aaauaaauccuccacugaa

SEQ ID NO: 43985 - RNA, 19 nt, Homo sapiens
  misc_RNA (1)...(19): siRNA sense strand
cauuaaaguuacugguuug

SEQ ID NO: 43986 - RNA, 19 nt, Homo sapiens
  misc_RNA (1)...(19): siRNA sense strand
aauaaauccuccacugaau

SEQ ID NO: 43987 - RNA, 19 nt, Homo sapiens
  misc_RNA (1)...(19): siRNA sense strand
caaaggaauguuaaucuag

SEQ ID NO: 43988 - RNA, 19 nt, Homo sapiens
  misc_RNA (1)...(19): siRNA sense strand
cgccauugaucaaauaaau

SEQ ID NO: 43989 - RNA, 19 nt, Homo sapiens
  misc_RNA (1)...(19): siRNA sense strand
acacuacagaagacaauua

SEQ ID NO: 43990 - RNA, 19 nt, Homo sapiens
  misc_RNA (1)...(19): siRNA sense strand
ggaaaccaaauccugauca

SEQ ID NO: 43991 - RNA, 19 nt, Homo sapiens
  misc_RNA (1)...(19): siRNA sense strand
gaucaagagcaaaggaaug

SEQ ID NO: 43992 - RNA, 19 nt, Homo sapiens
  misc_RNA (1)...(19): siRNA sense strand
ugaagaaugccaagaauac

SEQ ID NO: 43993 - RNA, 19 nt, Homo sapiens
  misc_RNA (1)...(19): siRNA sense strand
gagcaaaggaauguuaauc

SEQ ID NO: 43994 - RNA, 19 nt, Homo sapiens
  misc_RNA (1)...(19): siRNA sense strand
gaccaaugcauucaucuca

SEQ ID NO: 43995 - RNA, 19 nt, Homo sapiens
  misc_RNA (1)...(19): siRNA sense strand
gaagaaugccaagaauaca

SEQ ID NO: 43996 - RNA, 19 nt, Homo sapiens
  misc_RNA (1)...(19): siRNA sense strand
aaccaaauccugaucaaga

SEQ ID NO: 43997 - RNA, 19 nt, Homo sapiens
  misc_RNA (1)...(19): siRNA sense strand
acugaaagcaaauguguaa

SEQ ID NO: 43998 - RNA, 19 nt, Homo sapiens
  misc_RNA (1)...(19): siRNA sense strand
gcaaauguguaaccauccu

SEQ ID NO: 43999 - RNA, 19 nt, Homo sapiens
  misc_RNA (1)...(19): siRNA sense strand
caagugagagcagcaguga

SEQ ID NO: 44000 - RNA, 19 nt, Homo sapiens
  misc_RNA (1)...(19): siRNA sense strand
acugcaagcugacuuacuu

SEQ ID NO: 44001 - RNA, 19 nt, Homo sapiens
  misc_RNA (1)...(19): siRNA sense strand
gcccuuugaucagcuguuu

SEQ ID NO: 44002 - RNA, 19 nt, Homo sapiens
  misc_RNA (1)...(19): siRNA sense strand
uuaaggucauaccaaguuu

SEQ ID NO: 44003 - RNA, 19 nt, Homo sapiens
  misc_RNA (1)...(19): siRNA sense strand
aggcagggcucuggaguga

SEQ ID NO: 44004 - RNA, 19 nt, Homo sapiens
  misc_RNA (1)...(19): siRNA sense strand
ccauugcuuugauuaugaa

SEQ ID NO: 44005 - RNA, 19 nt, Homo sapiens
  misc_RNA (1)...(19): siRNA sense strand
uaaauccuccacugaaugu

SEQ ID NO: 44006 - RNA, 19 nt, Homo sapiens
  misc_RNA (1)...(19): siRNA sense strand
ggcuugcggugcuuguuaa

SEQ ID NO: 44007 - RNA, 19 nt, Homo sapiens
  misc_RNA (1)...(19): siRNA sense strand
ucacuucucccaccuguca

SEQ ID NO: 44008 - RNA, 19 nt, Homo sapiens
  misc_RNA (1)...(19): siRNA sense strand
cugaggacacgcaguauuu

SEQ ID NO: 44009 - RNA, 19 nt, Homo sapiens
  misc_RNA (1)...(19): siRNA sense strand
aaaccagaaucacugaaag

SEQ ID NO: 44010 - RNA, 19 nt, Homo sapiens
  misc_RNA (1)...(19): siRNA sense strand
uaaccauccuccacaaagg

SEQ ID NO: 44011 - RNA, 19 nt, Homo sapiens
  misc_RNA (1)...(19): siRNA sense strand
ggauauuugcagauagaaa

SEQ ID NO: 44012 - RNA, 19 nt, Homo sapiens
  misc_RNA (1)...(19): siRNA sense strand
acaauacaaggaauggaua

SEQ ID NO: 44013 - RNA, 19 nt, Homo sapiens
  misc_RNA (1)...(19): siRNA sense strand
gaucaucguggcgcaugua

SEQ ID NO: 44014 - RNA, 19 nt, Homo sapiens
  misc_RNA (1)...(19): siRNA sense strand
uccauugcuuugauuauga

SEQ ID NO: 44015 - RNA, 19 nt, Homo sapiens
  misc_RNA (1)...(19): siRNA sense strand
gagaaaccagugucugcuu

SEQ ID NO: 44016 - RNA, 19 nt, Homo sapiens
  misc_RNA (1)...(19): siRNA sense strand
ucacugaaagcaaaugugu

SEQ ID NO: 44017 - RNA, 19 nt, Homo sapiens
  misc_RNA (1)...(19): siRNA sense strand
gcaccacaaacacuacaga

SEQ ID NO: 44018 - RNA, 19 nt, Homo sapiens
  misc_RNA (1)...(19): siRNA sense strand
caaugcauucaucucaaua

SEQ ID NO: 44019 - RNA, 19 nt, Homo sapiens
  misc_RNA (1)...(19): siRNA sense strand
gacugaagaaugccaagaa

SEQ ID NO: 44020 - RNA, 19 nt, Homo sapiens
  misc_RNA (1)...(19): siRNA sense strand
guauggcucuuggacugaa

SEQ ID NO: 44021 - RNA, 19 nt, Homo sapiens
  misc_RNA (1)...(19): siRNA sense strand
caagaauacagcaaagaca

SEQ ID NO: 44022 - RNA, 19 nt, Homo sapiens
  misc_RNA (1)...(19): siRNA sense strand
guaaccauccuccacaaag

SEQ ID NO: 44023 - RNA, 19 nt, Homo sapiens
  misc_RNA (1)...(19): siRNA sense strand
cugaagaaugccaagaaua

SEQ ID NO: 44024 - RNA, 19 nt, Homo sapiens
  misc_RNA (1)...(19): siRNA sense strand
ucucccaccugucaauuuc

SEQ ID NO: 44025 - RNA, 19 nt, Homo sapiens
  misc_RNA (1)...(19): siRNA sense strand
cauaccaaguuucccuuca

SEQ ID NO: 44026 - RNA, 19 nt, Homo sapiens
  misc_RNA (1)...(19): siRNA sense strand
cacaaacacuacagaagac

SEQ ID NO: 44027 - RNA, 19 nt, Homo sapiens
  misc_RNA (1)...(19): siRNA sense strand
cacugcaccuggcuuguug

SEQ ID NO: 44028 - RNA, 19 nt, Homo sapiens
  misc_RNA (1)...(19): siRNA sense strand
ggaauggauauuugcagau

SEQ ID NO: 44029 - RNA, 19 nt, Homo sapiens
  misc_RNA (1)...(19): siRNA sense strand
ggacugaagaaugccaaga

SEQ ID NO: 44030 - RNA, 19 nt, Homo sapiens
  misc_RNA (1)...(19): siRNA sense strand
acucgucucucuauccaau

SEQ ID NO: 44031 - RNA, 19 nt, Homo sapiens
  misc_RNA (1)...(19): siRNA sense strand
caauacaaggaauggauau

SEQ ID NO: 44032 - RNA, 19 nt, Homo sapiens
  misc_RNA (1)...(19): siRNA sense strand
ugguuuggcucaaguucuu

SEQ ID NO: 44033 - RNA, 19 nt, Homo sapiens
  misc_RNA (1)...(19): siRNA sense strand
acugaagaaugccaagaau

SEQ ID NO: 44034 - RNA, 19 nt, Homo sapiens
  misc_RNA (1)...(19): siRNA sense strand
cugacuuacuuccugauga

SEQ ID NO: 44035 - RNA, 19 nt, Homo sapiens
  misc_RNA (1)...(19): siRNA sense strand
gaaauaucgcaugcugguu

SEQ ID NO: 44036 - RNA, 19 nt, Homo sapiens
  misc_RNA (1)...(19): siRNA sense strand
guguaaccauccuccacaa

SEQ ID NO: 44037 - RNA, 19 nt, Homo sapiens
  misc_RNA (1)...(19): siRNA sense strand
ggacuuuuauccucagcaa

SEQ ID NO: 44038 - RNA, 19 nt, Homo sapiens
  misc_RNA (1)...(19): siRNA sense strand
uuuaaggucauaccaaguu

SEQ ID NO: 44039 - RNA, 19 nt, Homo sapiens
  misc_RNA (1)...(19): siRNA sense strand
gcauguauuacucauccuu

SEQ ID NO: 44040 - RNA, 19 nt, Homo sapiens
  misc_RNA (1)...(19): siRNA sense strand
uggcuugcggugcuuguua

SEQ ID NO: 44041 - RNA, 19 nt, Homo sapiens
  misc_RNA (1)...(19): siRNA sense strand
aaacacuacagaagacaau

SEQ ID NO: 44042 - RNA, 19 nt, Homo sapiens
  misc_RNA (1)...(19): siRNA sense strand
caaacacuacagaagacaa

SEQ ID NO: 44043 - RNA, 19 nt, Homo sapiens
  misc_RNA (1)...(19): siRNA sense strand
gacuaugaaaccagaauca

SEQ ID NO: 44044 - RNA, 19 nt, Homo sapiens
  misc_RNA (1)...(19): siRNA sense strand
auggauauuugcagauaga

SEQ ID NO: 44045 - RNA, 19 nt, Homo sapiens
  misc_RNA (1)...(19): siRNA sense strand
gcaaaggaauguuaaucua

SEQ ID NO: 44046 - RNA, 19 nt, Homo sapiens
  misc_RNA (1)...(19): siRNA sense strand
gaauggauauuugcagaua

SEQ ID NO: 44047 - RNA, 19 nt, Homo sapiens
  misc_RNA (1)...(19): siRNA sense strand
cagaaucacugaaagcaaa

SEQ ID NO: 44048 - RNA, 19 nt, Homo sapiens
  misc_RNA (1)...(19): siRNA sense strand
caucguggcgcauguauua

SEQ ID NO: 44049 - RNA, 19 nt, Homo sapiens
  misc_RNA (1)...(19): siRNA sense strand
gaagacaauuauucacguu

SEQ ID NO: 44050 - RNA, 19 nt, Homo sapiens
  misc_RNA (1)...(19): siRNA sense strand
gaaaccaaauccugaucaa

SEQ ID NO: 44051 - RNA, 19 nt, Homo sapiens
  misc_RNA (1)...(19): siRNA sense strand
caagagcaaaggaauguua

SEQ ID NO: 44052 - RNA, 19 nt, Homo sapiens
  misc_RNA (1)...(19): siRNA sense strand
ccauuaaaguuacugguuu

SEQ ID NO: 44053 - RNA, 19 nt, Homo sapiens
  misc_RNA (1)...(19): siRNA sense strand
uaaguacgauguucaagug

SEQ ID NO: 44054 - RNA, 19 nt, Homo sapiens
  misc_RNA (1)...(19): siRNA sense strand
gaaaauaaacgcuccaaaa

SEQ ID NO: 44055 - RNA, 19 nt, Homo sapiens
  misc_RNA (1)...(19): siRNA sense strand
gaaaccagaaucacugaaa

SEQ ID NO: 44056 - RNA, 19 nt, Homo sapiens
  misc_RNA (1)...(19): siRNA sense strand
gaguggagccaaccuauuu

SEQ ID NO: 44057 - RNA, 19 nt, Homo sapiens
  misc_RNA (1)...(19): siRNA sense strand
gcagaacgaccacucacua

SEQ ID NO: 44058 - RNA, 19 nt, Homo sapiens
  misc_RNA (1)...(19): siRNA sense strand
caaauaaauccuccacuga

SEQ ID NO: 44059 - RNA, 19 nt, Homo sapiens
  misc_RNA (1)...(19): siRNA sense strand
ccuggaaccucaauuguga

SEQ ID NO: 44060 - RNA, 19 nt, Homo sapiens
  misc_RNA (1)...(19): siRNA sense strand
ucacgccauugaucaaaua

SEQ ID NO: 44061 - RNA, 19 nt, Homo sapiens
  misc_RNA (1)...(19): siRNA sense strand
ccacaaacacuacagaaga

SEQ ID NO: 44062 - RNA, 19 nt, Homo sapiens
  misc_RNA (1)...(19): siRNA sense strand
ugaaggaacucgucucucu

SEQ ID NO: 44063 - RNA, 19 nt, Homo sapiens
  misc_RNA (1)...(19): siRNA sense strand
gagccaaccuauuuaugug

SEQ ID NO: 44064 - RNA, 19 nt, Homo sapiens
  misc_RNA (1)...(19): siRNA sense strand
gaacucgucucucuaucca

SEQ ID NO: 44065 - RNA, 19 nt, Homo sapiens
  misc_RNA (1)...(19): siRNA sense strand
gaagaugacuaugaaacca

SEQ ID NO: 44066 - RNA, 19 nt, Homo sapiens
  misc_RNA (1)...(19): siRNA sense strand
ugacuuacuuccugaugaa

SEQ ID NO: 44067 - RNA, 19 nt, Homo sapiens
  misc_RNA (1)...(19): siRNA sense strand
gaaagcaaauguguaacca

SEQ ID NO: 44068 - RNA, 19 nt, Homo sapiens
  misc_RNA (1)...(19): siRNA sense strand
gcagggcucuggagugagu

SEQ ID NO: 44069 - RNA, 19 nt, Homo sapiens
  misc_RNA (1)...(19): siRNA sense strand
gaaugucacagcagagauu

SEQ ID NO: 44070 - RNA, 19 nt, Homo sapiens
  misc_RNA (1)...(19): siRNA sense strand
uacaaggaauggauauuug

SEQ ID NO: 44071 - RNA, 19 nt, Homo sapiens
  misc_RNA (1)...(19): siRNA sense strand
guacgauguucaagugaga

SEQ ID NO: 44072 - RNA, 19 nt, Homo sapiens
  misc_RNA (1)...(19): siRNA sense strand
ccugucaauuucaccauua

SEQ ID NO: 44073 - RNA, 19 nt, Homo sapiens
  misc_RNA (1)...(19): siRNA sense strand
ggagccaaccuauuuaugu

SEQ ID NO: 44074 - RNA, 19 nt, Homo sapiens
  misc_RNA (1)...(19): siRNA sense strand
agaaaccagugucugcuuu

SEQ ID NO: 44075 - RNA, 19 nt, Homo sapiens
  misc_RNA (1)...(19): siRNA sense strand
gaacgaccacucacuacug

SEQ ID NO: 44076 - RNA, 19 nt, Homo sapiens
  misc_RNA (1)...(19): siRNA sense strand
gaaggaacucgucucucua

SEQ ID NO: 44077 - RNA, 19 nt, Homo sapiens
  misc_RNA (1)...(19): siRNA sense strand
gauacugcaagcugacuua

SEQ ID NO: 44078 - RNA, 19 nt, Homo sapiens
  misc_RNA (1)...(19): siRNA sense strand
cuacagaagacaauuauuc

SEQ ID NO: 44079 - RNA, 19 nt, Homo sapiens
  misc_RNA (1)...(19): siRNA sense strand
ccaaugcauucaucucaau

SEQ ID NO: 44080 - RNA, 19 nt, Homo sapiens
  misc_RNA (1)...(19): siRNA sense strand
ggaccauccugcagaacga

SEQ ID NO: 44081 - RNA, 19 nt, Homo sapiens
  misc_RNA (1)...(19): siRNA sense strand
aauaaacgcuccaaaagaa

SEQ ID NO: 44082 - RNA, 19 nt, Homo sapiens
  misc_RNA (1)...(19): siRNA sense strand
caaaagaagaugacuauga

SEQ ID NO: 44083 - RNA, 19 nt, Homo sapiens
  misc_RNA (1)...(19): siRNA sense strand
aaauaucgcaugcugguuu

SEQ ID NO: 44084 - RNA, 19 nt, Homo sapiens
  misc_RNA (1)...(19): siRNA sense strand
aaauaaauccuccacugaa

SEQ ID NO: 44085 - RNA, 19 nt, Homo sapiens
  misc_RNA (1)...(19): siRNA sense strand
cauuaaaguuacugguuug

SEQ ID NO: 44086 - RNA, 19 nt, Homo sapiens
  misc_RNA (1)...(19): siRNA sense strand
aauaaauccuccacugaau

SEQ ID NO: 44087 - RNA, 19 nt, Homo sapiens
  misc_RNA (1)...(19): siRNA sense strand
caaaggaauguuaaucuag

SEQ ID NO: 44088 - RNA, 19 nt, Homo sapiens
  misc_RNA (1)...(19): siRNA sense strand
cgccauugaucaaauaaau

SEQ ID NO: 44089 - RNA, 19 nt, Homo sapiens
  misc_RNA (1)...(19): siRNA sense strand
acacuacagaagacaauua

SEQ ID NO: 44090 - RNA, 19 nt, Homo sapiens
  misc_RNA (1)...(19): siRNA sense strand
ggaaaccaaauccugauca

SEQ ID NO: 44091 - RNA, 19 nt, Homo sapiens
  misc_RNA (1)...(19): siRNA sense strand
gaucaagagcaaaggaaug

SEQ ID NO: 44092 - RNA, 19 nt, Homo sapiens
  misc_RNA (1)...(19): siRNA sense strand
ugaagaaugccaagaauac

SEQ ID NO: 44093 - RNA, 19 nt, Homo sapiens
  misc_RNA (1)...(19): siRNA sense strand
gagcaaaggaauguuaauc

SEQ ID NO: 44094 - RNA, 19 nt, Homo sapiens
  misc_RNA (1)...(19): siRNA sense strand
gaccaaugcauucaucuca

SEQ ID NO: 44095 - RNA, 19 nt, Homo sapiens
  misc_RNA (1)...(19): siRNA sense strand
gaagaaugccaagaauaca

SEQ ID NO: 44096 - RNA, 19 nt, Homo sapiens
  misc_RNA (1)...(19): siRNA sense strand
aaccaaauccugaucaaga

SEQ ID NO: 44097 - RNA, 19 nt, Homo sapiens
  misc_RNA (1)...(19): siRNA sense strand
acugaaagcaaauguguaa

SEQ ID NO: 44098 - RNA, 19 nt, Homo sapiens
  misc_RNA (1)...(19): siRNA sense strand
gcaaauguguaaccauccu

SEQ ID NO: 44099 - RNA, 19 nt, Homo sapiens
  misc_RNA (1)...(19): siRNA sense strand
caagugagagcagcaguga

SEQ ID NO: 44100 - RNA, 19 nt, Homo sapiens
  misc_RNA (1)...(19): siRNA sense strand
acugcaagcugacuuacuu

SEQ ID NO: 44101 - RNA, 19 nt, Homo sapiens
  misc_RNA (1)...(19): siRNA sense strand
gcccuuugaucagcuguuu

SEQ ID NO: 44102 - RNA, 19 nt, Homo sapiens
  misc_RNA (1)...(19): siRNA sense strand
uuaaggucauaccaaguuu

SEQ ID NO: 44103 - RNA, 19 nt, Homo sapiens
  misc_RNA (1)...(19): siRNA sense strand
aggcagggcucuggaguga

SEQ ID NO: 44104 - RNA, 19 nt, Homo sapiens
  misc_RNA (1)...(19): siRNA sense strand
ccauugcuuugauuaugaa

SEQ ID NO: 44105 - RNA, 19 nt, Homo sapiens
  misc_RNA (1)...(19): siRNA sense strand
uaaauccuccacugaaugu

SEQ ID NO: 44106 - RNA, 19 nt, Homo sapiens
  misc_RNA (1)...(19): siRNA sense strand
ggcuugcggugcuuguuaa

SEQ ID NO: 44107 - RNA, 19 nt, Homo sapiens
  misc_RNA (1)...(19): siRNA sense strand
ucacuucucccaccuguca

SEQ ID NO: 44108 - RNA, 19 nt, Homo sapiens
  misc_RNA (1)...(19): siRNA sense strand
cugaggacacgcaguauuu

SEQ ID NO: 44109 - RNA, 19 nt, Homo sapiens
  misc_RNA (1)...(19): siRNA sense strand
aaaccagaaucacugaaag

SEQ ID NO: 44110 - RNA, 19 nt, Homo sapiens
  misc_RNA (1)...(19): siRNA sense strand
uaaccauccuccacaaagg

SEQ ID NO: 44111 - RNA, 19 nt, Homo sapiens
  misc_RNA (1)...(19): siRNA sense strand
ggauauuugcagauagaaa

SEQ ID NO: 44112 - RNA, 19 nt, Homo sapiens
  misc_RNA (1)...(19): siRNA sense strand
acaauacaaggaauggaua

SEQ ID NO: 44113 - RNA, 19 nt, Homo sapiens
  misc_RNA (1)...(19): siRNA sense strand
gaucaucguggcgcaugua

SEQ ID NO: 44114 - RNA, 19 nt, Homo sapiens
  misc_RNA (1)...(19): siRNA sense strand
uccauugcuuugauuauga

SEQ ID NO: 44115 - RNA, 19 nt, Homo sapiens
  misc_RNA (1)...(19): siRNA sense strand
gagaaaccagugucugcuu

SEQ ID NO: 44116 - RNA, 19 nt, Homo sapiens
  misc_RNA (1)...(19): siRNA sense strand
ucacugaaagcaaaugugu

SEQ ID NO: 44117 - RNA, 19 nt, Homo sapiens
  misc_RNA (1)...(19): siRNA sense strand
gcaccacaaacacuacaga

SEQ ID NO: 44118 - RNA, 19 nt, Homo sapiens
  misc_RNA (1)...(19): siRNA sense strand
caaugcauucaucucaaua

SEQ ID NO: 44119 - RNA, 19 nt, Homo sapiens
  misc_RNA (1)...(19): siRNA sense strand
gacugaagaaugccaagaa

SEQ ID NO: 44120 - RNA, 19 nt, Homo sapiens
  misc_RNA (1)...(19): siRNA sense strand
guauggcucuuggacugaa

SEQ ID NO: 44121 - RNA, 19 nt, Homo sapiens
  misc_RNA (1)...(19): siRNA sense strand
caagaauacagcaaagaca

SEQ ID NO: 44122 - RNA, 19 nt, Homo sapiens
  misc_RNA (1)...(19): siRNA sense strand
guaaccauccuccacaaag

SEQ ID NO: 44123 - RNA, 19 nt, Homo sapiens
  misc_RNA (1)...(19): siRNA sense strand
cugaagaaugccaagaaua

SEQ ID NO: 44124 - RNA, 19 nt, Homo sapiens
  misc_RNA (1)...(19): siRNA sense strand
ucucccaccugucaauuuc

SEQ ID NO: 44125 - RNA, 19 nt, Homo sapiens
  misc_RNA (1)...(19): siRNA sense strand
cauaccaaguuucccuuca

SEQ ID NO: 44126 - RNA, 19 nt, Homo sapiens
  misc_RNA (1)...(19): siRNA sense strand
cacaaacacuacagaagac

SEQ ID NO: 44127 - RNA, 19 nt, Homo sapiens
  misc_RNA (1)...(19): siRNA sense strand
cacugcaccuggcuuguug

SEQ ID NO: 44128 - RNA, 19 nt, Homo sapiens
  misc_RNA (1)...(19): siRNA sense strand
ggaauggauauuugcagau

SEQ ID NO: 44129 - RNA, 19 nt, Homo sapiens
  misc_RNA (1)...(19): siRNA sense strand
ggacugaagaaugccaaga

SEQ ID NO: 44130 - RNA, 19 nt, Homo sapiens
  misc_RNA (1)...(19): siRNA sense strand
acucgucucucuauccaau

SEQ ID NO: 44131 - RNA, 19 nt, Homo sapiens
  misc_RNA (1)...(19): siRNA sense strand
caauacaaggaauggauau

SEQ ID NO: 44132 - RNA, 19 nt, Homo sapiens
  misc_RNA (1)...(19): siRNA sense strand
ugguuuggcucaaguucuu

SEQ ID NO: 44133 - RNA, 19 nt, Homo sapiens
  misc_RNA (1)...(19): siRNA sense strand
acugaagaaugccaagaau

SEQ ID NO: 44134 - RNA, 19 nt, Homo sapiens
  misc_RNA (1)...(19): siRNA sense strand
cugacuuacuuccugauga

SEQ ID NO: 44135 - RNA, 19 nt, Homo sapiens
  misc_RNA (1)...(19): siRNA sense strand
gaaauaucgcaugcugguu

SEQ ID NO: 44136 - RNA, 19 nt, Homo sapiens
  misc_RNA (1)...(19): siRNA sense strand
guguaaccauccuccacaa

SEQ ID NO: 44137 - RNA, 19 nt, Homo sapiens
  misc_RNA (1)...(19): siRNA sense strand
ggacuuuuauccucagcaa

SEQ ID NO: 44138 - RNA, 19 nt, Homo sapiens
  misc_RNA (1)...(19): siRNA sense strand
uuuaaggucauaccaaguu

SEQ ID NO: 44139 - RNA, 19 nt, Homo sapiens
  misc_RNA (1)...(19): siRNA sense strand
gcauguauuacucauccuu

SEQ ID NO: 44140 - RNA, 19 nt, Homo sapiens
  misc_RNA (1)...(19): siRNA sense strand
uggcuugcggugcuuguua

SEQ ID NO: 44141 - RNA, 19 nt, Homo sapiens
  misc_RNA (1)...(19): siRNA sense strand
aaacacuacagaagacaau

SEQ ID NO: 44142 - RNA, 19 nt, Homo sapiens
  misc_RNA (1)...(19): siRNA sense strand
caaacacuacagaagacaa

SEQ ID NO: 44143 - RNA, 19 nt, Homo sapiens
  misc_RNA (1)...(19): siRNA sense strand
gacuaugaaaccagaauca

SEQ ID NO: 44144 - RNA, 19 nt, Homo sapiens
  misc_RNA (1)...(19): siRNA sense strand
auggauauuugcagauaga

SEQ ID NO: 44145 - RNA, 19 nt, Homo sapiens
  misc_RNA (1)...(19): siRNA sense strand
gcaaaggaauguuaaucua

SEQ ID NO: 44146 - RNA, 19 nt, Homo sapiens
  misc_RNA (1)...(19): siRNA sense strand
gaauggauauuugcagaua

SEQ ID NO: 44147 - RNA, 19 nt, Homo sapiens
  misc_RNA (1)...(19): siRNA sense strand
cagaaucacugaaagcaaa

SEQ ID NO: 44148 - RNA, 19 nt, Homo sapiens
  misc_RNA (1)...(19): siRNA sense strand
caucguggcgcauguauua

SEQ ID NO: 44149 - RNA, 19 nt, Homo sapiens
  misc_RNA (1)...(19): siRNA sense strand
gaagacaauuauucacguu

SEQ ID NO: 44150 - RNA, 19 nt, Homo sapiens
  misc_RNA (1)...(19): siRNA sense strand
gaaaccaaauccugaucaa

SEQ ID NO: 44151 - RNA, 19 nt, Homo sapiens
  misc_RNA (1)...(19): siRNA sense strand
caagagcaaaggaauguua

SEQ ID NO: 44152 - RNA, 19 nt, Homo sapiens
  misc_RNA (1)...(19): siRNA sense strand
ccauuaaaguuacugguuu

SEQ ID NO: 44153 - RNA, 19 nt, Homo sapiens
  misc_RNA (1)...(19): siRNA sense strand
uaaguacgauguucaagug

SEQ ID NO: 44154 - RNA, 19 nt, Homo sapiens
  misc_RNA (1)...(19): siRNA sense strand
gaaaauaaacgcuccaaaa

SEQ ID NO: 44155 - RNA, 19 nt, Homo sapiens
  misc_RNA (1)...(19): siRNA sense strand
gaaaccagaaucacugaaa

SEQ ID NO: 44156 - RNA, 19 nt, Homo sapiens
  misc_RNA (1)...(19): siRNA sense strand
gaguggagccaaccuauuu

SEQ ID NO: 44157 - RNA, 19 nt, Homo sapiens
  misc_RNA (1)...(19): siRNA sense strand
gcagaacgaccacucacua

SEQ ID NO: 44158 - RNA, 19 nt, Homo sapiens
  misc_RNA (1)...(19): siRNA sense strand
caaauaaauccuccacuga

SEQ ID NO: 44159 - RNA, 19 nt, Homo sapiens
  misc_RNA (1)...(19): siRNA sense strand
ccuggaaccucaauuguga

SEQ ID NO: 44160 - RNA, 19 nt, Homo sapiens
  misc_RNA (1)...(19): siRNA sense strand
ucacgccauugaucaaaua

SEQ ID NO: 44161 - RNA, 19 nt, Homo sapiens
  misc_RNA (1)...(19): siRNA sense strand
ccacaaacacuacagaaga

SEQ ID NO: 44162 - RNA, 19 nt, Homo sapiens
  misc_RNA (1)...(19): siRNA sense strand
ugaaggaacucgucucucu

SEQ ID NO: 44163 - RNA, 19 nt, Homo sapiens
  misc_RNA (1)...(19): siRNA sense strand
gagccaaccuauuuaugug

SEQ ID NO: 44164 - RNA, 19 nt, Homo sapiens
  misc_RNA (1)...(19): siRNA sense strand
gaacucgucucucuaucca

SEQ ID NO: 44165 - RNA, 19 nt, Homo sapiens
  misc_RNA (1)...(19): siRNA sense strand
gaagaugacuaugaaacca

SEQ ID NO: 44166 - RNA, 19 nt, Homo sapiens
  misc_RNA (1)...(19): siRNA sense strand
ugacuuacuuccugaugaa

SEQ ID NO: 44167 - RNA, 19 nt, Homo sapiens
  misc_RNA (1)...(19): siRNA sense strand
gaaagcaaauguguaacca

SEQ ID NO: 44168 - RNA, 19 nt, Homo sapiens
  misc_RNA (1)...(19): siRNA sense strand
gcagggcucuggagugagu

SEQ ID NO: 44169 - RNA, 19 nt, Homo sapiens
  misc_RNA (1)...(19): siRNA sense strand
gaaugucacagcagagauu

SEQ ID NO: 44170 - RNA, 19 nt, Homo sapiens
  misc_RNA (1)...(19): siRNA sense strand
uacaaggaauggauauuug

SEQ ID NO: 44171 - RNA, 19 nt, Homo sapiens
  misc_RNA (1)...(19): siRNA sense strand
guacgauguucaagugaga

SEQ ID NO: 44172 - RNA, 19 nt, Homo sapiens
  misc_RNA (1)...(19): siRNA sense strand
ccugucaauuucaccauua

SEQ ID NO: 44173 - RNA, 19 nt, Homo sapiens
  misc_RNA (1)...(19): siRNA sense strand
ggagccaaccuauuuaugu

SEQ ID NO: 44174 - RNA, 19 nt, Homo sapiens
  misc_RNA (1)...(19): siRNA sense strand
agaaaccagugucugcuuu

SEQ ID NO: 44175 - RNA, 19 nt, Homo sapiens
  misc_RNA (1)...(19): siRNA sense strand
gaacgaccacucacuacug

SEQ ID NO: 44176 - RNA, 19 nt, Homo sapiens
  misc_RNA (1)...(19): siRNA sense strand
gaaggaacucgucucucua

SEQ ID NO: 44177 - RNA, 19 nt, Homo sapiens
  misc_RNA (1)...(19): siRNA sense strand
gauacugcaagcugacuua

SEQ ID NO: 44178 - RNA, 19 nt, Homo sapiens
  misc_RNA (1)...(19): siRNA sense strand
cuacagaagacaauuauuc

SEQ ID NO: 44179 - RNA, 19 nt, Homo sapiens
  misc_RNA (1)...(19): siRNA sense strand
ccaaugcauucaucucaau

SEQ ID NO: 44180 - RNA, 19 nt, Homo sapiens
  misc_RNA (1)...(19): siRNA sense strand
ggaccauccugcagaacga

SEQ ID NO: 44181 - RNA, 19 nt, Homo sapiens
  misc_RNA (1)...(19): siRNA sense strand
aauaaacgcuccaaaagaa

SEQ ID NO: 44182 - RNA, 19 nt, Homo sapiens
  misc_RNA (1)...(19): siRNA sense strand
caaaagaagaugacuauga

SEQ ID NO: 44183 - RNA, 19 nt, Homo sapiens
  misc_RNA (1)...(19): siRNA sense strand
aaauaucgcaugcugguuu

SEQ ID NO: 44184 - RNA, 19 nt, Homo sapiens
  misc_RNA (1)...(19): siRNA sense strand
aaauaaauccuccacugaa

SEQ ID NO: 44185 - RNA, 19 nt, Homo sapiens
  misc_RNA (1)...(19): siRNA sense strand
cauuaaaguuacugguuug

SEQ ID NO: 44186 - RNA, 19 nt, Homo sapiens
  misc_RNA (1)...(19): siRNA sense strand
aauaaauccuccacugaau

SEQ ID NO: 44187 - RNA, 19 nt, Homo sapiens
  misc_RNA (1)...(19): siRNA sense strand
caaaggaauguuaaucuag

SEQ ID NO: 44188 - RNA, 19 nt, Homo sapiens
  misc_RNA (1)...(19): siRNA sense strand
cgccauugaucaaauaaau

SEQ ID NO: 44189 - RNA, 19 nt, Homo sapiens
  misc_RNA (1)...(19): siRNA sense strand
acacuacagaagacaauua

SEQ ID NO: 44190 - RNA, 19 nt, Homo sapiens
  misc_RNA (1)...(19): siRNA sense strand
ggaaaccaaauccugauca

SEQ ID NO: 44191 - RNA, 19 nt, Homo sapiens
  misc_RNA (1)...(19): siRNA sense strand
gaucaagagcaaaggaaug

SEQ ID NO: 44192 - RNA, 19 nt, Homo sapiens
  misc_RNA (1)...(19): siRNA sense strand
ugaagaaugccaagaauac

SEQ ID NO: 44193 - RNA, 19 nt, Homo sapiens
  misc_RNA (1)...(19): siRNA sense strand
gagcaaaggaauguuaauc

SEQ ID NO: 44194 - RNA, 19 nt, Homo sapiens
  misc_RNA (1)...(19): siRNA sense strand
gaccaaugcauucaucuca

SEQ ID NO: 44195 - RNA, 19 nt, Homo sapiens
  misc_RNA (1)...(19): siRNA sense strand
gaagaaugccaagaauaca

SEQ ID NO: 44196 - RNA, 19 nt, Homo sapiens
  misc_RNA (1)...(19): siRNA sense strand
aaccaaauccugaucaaga

SEQ ID NO: 44197 - RNA, 19 nt, Homo sapiens
  misc_RNA (1)...(19): siRNA sense strand
acugaaagcaaauguguaa

SEQ ID NO: 44198 - RNA, 19 nt, Homo sapiens
  misc_RNA (1)...(19): siRNA sense strand
gcaaauguguaaccauccu

SEQ ID NO: 44199 - RNA, 19 nt, Homo sapiens
  misc_RNA (1)...(19): siRNA sense strand
caagugagagcagcaguga

SEQ ID NO: 44200 - RNA, 19 nt, Homo sapiens
  misc_RNA (1)...(19): siRNA sense strand
acugcaagcugacuuacuu

SEQ ID NO: 44201 - RNA, 19 nt, Homo sapiens
  misc_RNA (1)...(19): siRNA sense strand
gcccuuugaucagcuguuu

SEQ ID NO: 44202 - RNA, 19 nt, Homo sapiens
  misc_RNA (1)...(19): siRNA sense strand
uuaaggucauaccaaguuu

SEQ ID NO: 44203 - RNA, 19 nt, Homo sapiens
  misc_RNA (1)...(19): siRNA sense strand
aggcagggcucuggaguga

SEQ ID NO: 44204 - RNA, 19 nt, Homo sapiens
  misc_RNA (1)...(19): siRNA sense strand
ccauugcuuugauuaugaa

SEQ ID NO: 44205 - RNA, 19 nt, Homo sapiens
  misc_RNA (1)...(19): siRNA sense strand
uaaauccuccacugaaugu

SEQ ID NO: 44206 - RNA, 19 nt, Homo sapiens
  misc_RNA (1)...(19): siRNA sense strand
ggcuugcggugcuuguuaa

SEQ ID NO: 44207 - RNA, 19 nt, Homo sapiens
  misc_RNA (1)...(19): siRNA sense strand
ucacuucucccaccuguca

SEQ ID NO: 44208 - RNA, 19 nt, Homo sapiens
  misc_RNA (1)...(19): siRNA sense strand
cugaggacacgcaguauuu

SEQ ID NO: 44209 - RNA, 19 nt, Homo sapiens
  misc_RNA (1)...(19): siRNA sense strand
aaaccagaaucacugaaag

SEQ ID NO: 44210 - RNA, 19 nt, Homo sapiens
  misc_RNA (1)...(19): siRNA sense strand
uaaccauccuccacaaagg

SEQ ID NO: 44211 - RNA, 19 nt, Homo sapiens
  misc_RNA (1)...(19): siRNA sense strand
ggauauuugcagauagaaa

SEQ ID NO: 44212 - RNA, 19 nt, Homo sapiens
  misc_RNA (1)...(19): siRNA sense strand
acaauacaaggaauggaua

SEQ ID NO: 44213 - RNA, 19 nt, Homo sapiens
  misc_RNA (1)...(19): siRNA sense strand
gaucaucguggcgcaugua

SEQ ID NO: 44214 - RNA, 19 nt, Homo sapiens
  misc_RNA (1)...(19): siRNA sense strand
uccauugcuuugauuauga

SEQ ID NO: 44215 - RNA, 19 nt, Homo sapiens
  misc_RNA (1)...(19): siRNA sense strand
gagaaaccagugucugcuu

SEQ ID NO: 44216 - RNA, 19 nt, Homo sapiens
  misc_RNA (1)...(19): siRNA sense strand
ucacugaaagcaaaugugu

SEQ ID NO: 44217 - RNA, 19 nt, Homo sapiens
  misc_RNA (1)...(19): siRNA sense strand
gcaccacaaacacuacaga

SEQ ID NO: 44218 - RNA, 19 nt, Homo sapiens
  misc_RNA (1)...(19): siRNA sense strand
caaugcauucaucucaaua

SEQ ID NO: 44219 - RNA, 19 nt, Homo sapiens
  misc_RNA (1)...(19): siRNA sense strand
gacugaagaaugccaagaa

SEQ ID NO: 44220 - RNA, 19 nt, Homo sapiens
  misc_RNA (1)...(19): siRNA sense strand
guauggcucuuggacugaa

SEQ ID NO: 44221 - RNA, 19 nt, Homo sapiens
  misc_RNA (1)...(19): siRNA sense strand
caagaauacagcaaagaca

SEQ ID NO: 44222 - RNA, 19 nt, Homo sapiens
  misc_RNA (1)...(19): siRNA sense strand
guaaccauccuccacaaag

SEQ ID NO: 44223 - RNA, 19 nt, Homo sapiens
  misc_RNA (1)...(19): siRNA sense strand
cugaagaaugccaagaaua

SEQ ID NO: 44224 - RNA, 19 nt, Homo sapiens
  misc_RNA (1)...(19): siRNA sense strand
ucucccaccugucaauuuc

SEQ ID NO: 44225 - RNA, 19 nt, Homo sapiens
  misc_RNA (1)...(19): siRNA sense strand
cauaccaaguuucccuuca

SEQ ID NO: 44226 - RNA, 19 nt, Homo sapiens
  misc_RNA (1)...(19): siRNA sense strand
cacaaacacuacagaagac

SEQ ID NO: 44227 - RNA, 19 nt, Homo sapiens
  misc_RNA (1)...(19): siRNA sense strand
cacugcaccuggcuuguug

SEQ ID NO: 44228 - RNA, 19 nt, Homo sapiens
  misc_RNA (1)...(19): siRNA sense strand
ggaauggauauuugcagau

SEQ ID NO: 44229 - RNA, 19 nt, Homo sapiens
  misc_RNA (1)...(19): siRNA sense strand
ggacugaagaaugccaaga

SEQ ID NO: 44230 - RNA, 19 nt, Homo sapiens
  misc_RNA (1)...(19): siRNA sense strand
acucgucucucuauccaau

SEQ ID NO: 44231 - RNA, 19 nt, Homo sapiens
  misc_RNA (1)...(19): siRNA sense strand
caauacaaggaauggauau

SEQ ID NO: 44232 - RNA, 19 nt, Homo sapiens
  misc_RNA (1)...(19): siRNA sense strand
ugguuuggcucaaguucuu

SEQ ID NO: 44233 - RNA, 19 nt, Homo sapiens
  misc_RNA (1)...(19): siRNA sense strand
acugaagaaugccaagaau

SEQ ID NO: 44234 - RNA, 19 nt, Homo sapiens
  misc_RNA (1)...(19): siRNA sense strand
cugacuuacuuccugauga

SEQ ID NO: 44235 - RNA, 19 nt, Homo sapiens
  misc_RNA (1)...(19): siRNA sense strand
gaaauaucgcaugcugguu

SEQ ID NO: 44236 - RNA, 19 nt, Homo sapiens
  misc_RNA (1)...(19): siRNA sense strand
guguaaccauccuccacaa

SEQ ID NO: 44237 - RNA, 19 nt, Homo sapiens
  misc_RNA (1)...(19): siRNA sense strand
ggacuuuuauccucagcaa

SEQ ID NO: 44238 - RNA, 19 nt, Homo sapiens
  misc_RNA (1)...(19): siRNA sense strand
uuuaaggucauaccaaguu

SEQ ID NO: 44239 - RNA, 19 nt, Homo sapiens
  misc_RNA (1)...(19): siRNA sense strand
gcauguauuacucauccuu

SEQ ID NO: 44240 - RNA, 19 nt, Homo sapiens
  misc_RNA (1)...(19): siRNA sense strand
uggcuugcggugcuuguua

SEQ ID NO: 44241 - RNA, 19 nt, Homo sapiens
  misc_RNA (1)...(19): siRNA sense strand
aaacacuacagaagacaau

SEQ ID NO: 44242 - RNA, 19 nt, Homo sapiens
  misc_RNA (1)...(19): siRNA sense strand
caaacacuacagaagacaa

SEQ ID NO: 44243 - RNA, 19 nt, Homo sapiens
  misc_RNA (1)...(19): siRNA sense strand
gacuaugaaaccagaauca

SEQ ID NO: 44244 - RNA, 19 nt, Homo sapiens
  misc_RNA (1)...(19): siRNA sense strand
auggauauuugcagauaga

SEQ ID NO: 44245 - RNA, 19 nt, Homo sapiens
  misc_RNA (1)...(19): siRNA sense strand
gcaaaggaauguuaaucua

SEQ ID NO: 44246 - RNA, 19 nt, Homo sapiens
  misc_RNA (1)...(19): siRNA sense strand
gaauggauauuugcagaua

SEQ ID NO: 44247 - RNA, 19 nt, Homo sapiens
  misc_RNA (1)...(19): siRNA sense strand
cagaaucacugaaagcaaa

SEQ ID NO: 44248 - RNA, 19 nt, Homo sapiens
  misc_RNA (1)...(19): siRNA sense strand
caucguggcgcauguauua

SEQ ID NO: 44249 - RNA, 19 nt, Homo sapiens
  misc_RNA (1)...(19): siRNA sense strand
gaagacaauuauucacguu

SEQ ID NO: 44250 - RNA, 19 nt, Homo sapiens
  misc_RNA (1)...(19): siRNA sense strand
gaaaccaaauccugaucaa

SEQ ID NO: 44251 - RNA, 19 nt, Homo sapiens
  misc_RNA (1)...(19): siRNA sense strand
caagagcaaaggaauguua

SEQ ID NO: 44252 - RNA, 19 nt, Homo sapiens
  misc_RNA (1)...(19): siRNA sense strand
ccauuaaaguuacugguuu

SEQ ID NO: 44253 - RNA, 19 nt, Homo sapiens
  misc_RNA (1)...(19): siRNA sense strand
uaaguacgauguucaagug

SEQ ID NO: 44254 - RNA, 19 nt, Homo sapiens
  misc_RNA (1)...(19): siRNA sense strand
gaaaauaaacgcuccaaaa

SEQ ID NO: 44255 - RNA, 19 nt, Homo sapiens
  misc_RNA (1)...(19): siRNA sense strand
gaaaccagaaucacugaaa

SEQ ID NO: 44256 - RNA, 19 nt, Homo sapiens
  misc_RNA (1)...(19): siRNA sense strand
gaguggagccaaccuauuu

SEQ ID NO: 44257 - RNA, 19 nt, Homo sapiens
  misc_RNA (1)...(19): siRNA sense strand
gcagaacgaccacucacua

SEQ ID NO: 44258 - RNA, 19 nt, Homo sapiens
  misc_RNA (1)...(19): siRNA sense strand
caaauaaauccuccacuga

SEQ ID NO: 44259 - RNA, 19 nt, Homo sapiens
  misc_RNA (1)...(19): siRNA sense strand
ccuggaaccucaauuguga

SEQ ID NO: 44260 - RNA, 19 nt, Homo sapiens
  misc_RNA (1)...(19): siRNA sense strand
ucacgccauugaucaaaua

SEQ ID NO: 44261 - RNA, 19 nt, Homo sapiens
  misc_RNA (1)...(19): siRNA sense strand
ccacaaacacuacagaaga

SEQ ID NO: 44262 - RNA, 19 nt, Homo sapiens
  misc_RNA (1)...(19): siRNA sense strand
ugaaggaacucgucucucu

SEQ ID NO: 44263 - RNA, 19 nt, Homo sapiens
  misc_RNA (1)...(19): siRNA sense strand
gagccaaccuauuuaugug

SEQ ID NO: 44264 - RNA, 19 nt, Homo sapiens
  misc_RNA (1)...(19): siRNA sense strand
gaacucgucucucuaucca

SEQ ID NO: 44265 - RNA, 19 nt, Homo sapiens
  misc_RNA (1)...(19): siRNA sense strand
gaagaugacuaugaaacca

SEQ ID NO: 44266 - RNA, 19 nt, Homo sapiens
  misc_RNA (1)...(19): siRNA sense strand
ugacuuacuuccugaugaa

SEQ ID NO: 44267 - RNA, 19 nt, Homo sapiens
  misc_RNA (1)...(19): siRNA sense strand
gaaagcaaauguguaacca

SEQ ID NO: 44268 - RNA, 19 nt, Homo sapiens
  misc_RNA (1)...(19): siRNA sense strand
gcagggcucuggagugagu

SEQ ID NO: 44269 - RNA, 19 nt, Homo sapiens
  misc_RNA (1)...(19): siRNA sense strand
gaaugucacagcagagauu

SEQ ID NO: 44270 - RNA, 19 nt, Homo sapiens
  misc_RNA (1)...(19): siRNA sense strand
uacaaggaauggauauuug

SEQ ID NO: 44271 - RNA, 19 nt, Homo sapiens
  misc_RNA (1)...(19): siRNA sense strand
guacgauguucaagugaga

SEQ ID NO: 44272 - RNA, 19 nt, Homo sapiens
  misc_RNA (1)...(19): siRNA sense strand
ccugucaauuucaccauua

SEQ ID NO: 44273 - RNA, 19 nt, Homo sapiens
  misc_RNA (1)...(19): siRNA sense strand
ggagccaaccuauuuaugu

SEQ ID NO: 44274 - RNA, 19 nt, Homo sapiens
  misc_RNA (1)...(19): siRNA sense strand
agaaaccagugucugcuuu

SEQ ID NO: 44275 - RNA, 19 nt, Homo sapiens
  misc_RNA (1)...(19): siRNA sense strand
gaacgaccacucacuacug

SEQ ID NO: 44276 - RNA, 19 nt, Homo sapiens
  misc_RNA (1)...(19): siRNA sense strand
gaaggaacucgucucucua

SEQ ID NO: 44277 - RNA, 19 nt, Homo sapiens
  misc_RNA (1)...(19): siRNA sense strand
gauacugcaagcugacuua

SEQ ID NO: 44278 - RNA, 19 nt, Homo sapiens
  misc_RNA (1)...(19): siRNA sense strand
cuacagaagacaauuauuc

SEQ ID NO: 44279 - RNA, 19 nt, Homo sapiens
  misc_RNA (1)...(19): siRNA sense strand
ccaaugcauucaucucaau

SEQ ID NO: 44280 - RNA, 19 nt, Homo sapiens
  misc_RNA (1)...(19): siRNA sense strand
ggaccauccugcagaacga

SEQ ID NO: 44281 - RNA, 19 nt, Homo sapiens
  misc_RNA (1)...(19): siRNA sense strand
aauaaacgcuccaaaagaa

SEQ ID NO: 44282 - RNA, 19 nt, Homo sapiens
  misc_RNA (1)...(19): siRNA sense strand
caaaagaagaugacuauga

SEQ ID NO: 44283 - RNA, 19 nt, Homo sapiens
  misc_RNA (1)...(19): siRNA sense strand
aaauaucgcaugcugguuu

SEQ ID NO: 44284 - RNA, 19 nt, Homo sapiens
  misc_RNA (1)...(19): siRNA sense strand
aaauaaauccuccacugaa

SEQ ID NO: 44285 - RNA, 19 nt, Homo sapiens
  misc_RNA (1)...(19): siRNA sense strand
cauuaaaguuacugguuug

SEQ ID NO: 44286 - RNA, 19 nt, Homo sapiens
  misc_RNA (1)...(19): siRNA sense strand
aauaaauccuccacugaau

SEQ ID NO: 44287 - RNA, 19 nt, Homo sapiens
  misc_RNA (1)...(19): siRNA sense strand
caaaggaauguuaaucuag

SEQ ID NO: 44288 - RNA, 19 nt, Homo sapiens
  misc_RNA (1)...(19): siRNA sense strand
cgccauugaucaaauaaau

SEQ ID NO: 44289 - RNA, 19 nt, Homo sapiens
  misc_RNA (1)...(19): siRNA sense strand
acacuacagaagacaauua

SEQ ID NO: 44290 - RNA, 19 nt, Homo sapiens
  misc_RNA (1)...(19): siRNA sense strand
ggaaaccaaauccugauca

SEQ ID NO: 44291 - RNA, 19 nt, Homo sapiens
  misc_RNA (1)...(19): siRNA sense strand
gaucaagagcaaaggaaug

SEQ ID NO: 44292 - RNA, 19 nt, Homo sapiens
  misc_RNA (1)...(19): siRNA sense strand
ugaagaaugccaagaauac

SEQ ID NO: 44293 - RNA, 19 nt, Homo sapiens
  misc_RNA (1)...(19): siRNA sense strand
gagcaaaggaauguuaauc

SEQ ID NO: 44294 - RNA, 19 nt, Homo sapiens
  misc_RNA (1)...(19): siRNA sense strand
gaccaaugcauucaucuca

SEQ ID NO: 44295 - RNA, 19 nt, Homo sapiens
  misc_RNA (1)...(19): siRNA sense strand
gaagaaugccaagaauaca

SEQ ID NO: 44296 - RNA, 19 nt, Homo sapiens
  misc_RNA (1)...(19): siRNA sense strand
aaccaaauccugaucaaga

SEQ ID NO: 44297 - RNA, 19 nt, Homo sapiens
  misc_RNA (1)...(19): siRNA sense strand
acugaaagcaaauguguaa

SEQ ID NO: 44298 - RNA, 19 nt, Homo sapiens
  misc_RNA (1)...(19): siRNA sense strand
gcaaauguguaaccauccu

SEQ ID NO: 44299 - RNA, 19 nt, Homo sapiens
  misc_RNA (1)...(19): siRNA sense strand
caagugagagcagcaguga

SEQ ID NO: 44300 - RNA, 19 nt, Homo sapiens
  misc_RNA (1)...(19): siRNA sense strand
acugcaagcugacuuacuu

SEQ ID NO: 44301 - RNA, 19 nt, Homo sapiens
  misc_RNA (1)...(19): siRNA sense strand
gcccuuugaucagcuguuu

SEQ ID NO: 44302 - RNA, 19 nt, Homo sapiens
  misc_RNA (1)...(19): siRNA sense strand
uuaaggucauaccaaguuu

SEQ ID NO: 44303 - RNA, 19 nt, Homo sapiens
  misc_RNA (1)...(19): siRNA sense strand
aggcagggcucuggaguga

SEQ ID NO: 44304 - RNA, 19 nt, Homo sapiens
  misc_RNA (1)...(19): siRNA sense strand
ccauugcuuugauuaugaa

SEQ ID NO: 44305 - RNA, 19 nt, Homo sapiens
  misc_RNA (1)...(19): siRNA sense strand
uaaauccuccacugaaugu

SEQ ID NO: 44306 - RNA, 19 nt, Homo sapiens
  misc_RNA (1)...(19): siRNA sense strand
ggcuugcggugcuuguuaa

SEQ ID NO: 44307 - RNA, 19 nt, Homo sapiens
  misc_RNA (1)...(19): siRNA sense strand
ucacuucucccaccuguca

SEQ ID NO: 44308 - RNA, 19 nt, Homo sapiens
  misc_RNA (1)...(19): siRNA sense strand
cugaggacacgcaguauuu

SEQ ID NO: 44309 - RNA, 19 nt, Homo sapiens
  misc_RNA (1)...(19): siRNA sense strand
aaaccagaaucacugaaag

SEQ ID NO: 44310 - RNA, 19 nt, Homo sapiens
  misc_RNA (1)...(19): siRNA sense strand
uaaccauccuccacaaagg

SEQ ID NO: 44311 - RNA, 19 nt, Homo sapiens
  misc_RNA (1)...(19): siRNA sense strand
ggauauuugcagauagaaa

SEQ ID NO: 44312 - RNA, 19 nt, Homo sapiens
  misc_RNA (1)...(19): siRNA sense strand
acaauacaaggaauggaua

SEQ ID NO: 44313 - RNA, 19 nt, Homo sapiens
  misc_RNA (1)...(19): siRNA sense strand
gaucaucguggcgcaugua

SEQ ID NO: 44314 - RNA, 19 nt, Homo sapiens
  misc_RNA (1)...(19): siRNA sense strand
uccauugcuuugauuauga

SEQ ID NO: 44315 - RNA, 19 nt, Homo sapiens
  misc_RNA (1)...(19): siRNA sense strand
gagaaaccagugucugcuu

SEQ ID NO: 44316 - RNA, 19 nt, Homo sapiens
  misc_RNA (1)...(19): siRNA sense strand
ucacugaaagcaaaugugu

SEQ ID NO: 44317 - RNA, 19 nt, Homo sapiens
  misc_RNA (1)...(19): siRNA sense strand
gcaccacaaacacuacaga

SEQ ID NO: 44318 - RNA, 19 nt, Homo sapiens
  misc_RNA (1)...(19): siRNA sense strand
caaugcauucaucucaaua

SEQ ID NO: 44319 - RNA, 19 nt, Homo sapiens
  misc_RNA (1)...(19): siRNA sense strand
gacugaagaaugccaagaa

SEQ ID NO: 44320 - RNA, 19 nt, Homo sapiens
  misc_RNA (1)...(19): siRNA sense strand
guauggcucuuggacugaa

SEQ ID NO: 44321 - RNA, 19 nt, Homo sapiens
  misc_RNA (1)...(19): siRNA sense strand
caagaauacagcaaagaca

SEQ ID NO: 44322 - RNA, 19 nt, Homo sapiens
  misc_RNA (1)...(19): siRNA sense strand
guaaccauccuccacaaag

SEQ ID NO: 44323 - RNA, 19 nt, Homo sapiens
  misc_RNA (1)...(19): siRNA sense strand
cugaagaaugccaagaaua

SEQ ID NO: 44324 - RNA, 19 nt, Homo sapiens
  misc_RNA (1)...(19): siRNA sense strand
ucucccaccugucaauuuc

SEQ ID NO: 44325 - RNA, 19 nt, Homo sapiens
  misc_RNA (1)...(19): siRNA sense strand
cauaccaaguuucccuuca

SEQ ID NO: 44326 - RNA, 19 nt, Homo sapiens
  misc_RNA (1)...(19): siRNA sense strand
cacaaacacuacagaagac

SEQ ID NO: 44327 - RNA, 19 nt, Homo sapiens
  misc_RNA (1)...(19): siRNA sense strand
cacugcaccuggcuuguug

SEQ ID NO: 44328 - RNA, 19 nt, Homo sapiens
  misc_RNA (1)...(19): siRNA sense strand
ggaauggauauuugcagau

SEQ ID NO: 44329 - RNA, 19 nt, Homo sapiens
  misc_RNA (1)...(19): siRNA sense strand
ggacugaagaaugccaaga

SEQ ID NO: 44330 - RNA, 19 nt, Homo sapiens
  misc_RNA (1)...(19): siRNA sense strand
acucgucucucuauccaau

SEQ ID NO: 44331 - RNA, 19 nt, Homo sapiens
  misc_RNA (1)...(19): siRNA sense strand
caauacaaggaauggauau

SEQ ID NO: 44332 - RNA, 19 nt, Homo sapiens
  misc_RNA (1)...(19): siRNA sense strand
ugguuuggcucaaguucuu

SEQ ID NO: 44333 - RNA, 19 nt, Homo sapiens
  misc_RNA (1)...(19): siRNA sense strand
acugaagaaugccaagaau

SEQ ID NO: 44334 - RNA, 19 nt, Homo sapiens
  misc_RNA (1)...(19): siRNA sense strand
cugacuuacuuccugauga

SEQ ID NO: 44335 - RNA, 19 nt, Homo sapiens
  misc_RNA (1)...(19): siRNA sense strand
gaaauaucgcaugcugguu

SEQ ID NO: 44336 - RNA, 19 nt, Homo sapiens
  misc_RNA (1)...(19): siRNA sense strand
guguaaccauccuccacaa

SEQ ID NO: 44337 - RNA, 19 nt, Homo sapiens
  misc_RNA (1)...(19): siRNA sense strand
ggacuuuuauccucagcaa

SEQ ID NO: 44338 - RNA, 19 nt, Homo sapiens
  misc_RNA (1)...(19): siRNA sense strand
uuuaaggucauaccaaguu

SEQ ID NO: 44339 - RNA, 19 nt, Homo sapiens
  misc_RNA (1)...(19): siRNA sense strand
gcauguauuacucauccuu

SEQ ID NO: 44340 - RNA, 19 nt, Homo sapiens
  misc_RNA (1)...(19): siRNA sense strand
uggcuugcggugcuuguua

SEQ ID NO: 44341 - RNA, 19 nt, Homo sapiens
  misc_RNA (1)...(19): siRNA sense strand
aaacacuacagaagacaau

SEQ ID NO: 44342 - RNA, 19 nt, Homo sapiens
  misc_RNA (1)...(19): siRNA sense strand
caaacacuacagaagacaa

SEQ ID NO: 44343 - RNA, 19 nt, Homo sapiens
  misc_RNA (1)...(19): siRNA sense strand
gacuaugaaaccagaauca

SEQ ID NO: 44344 - RNA, 19 nt, Homo sapiens
  misc_RNA (1)...(19): siRNA sense strand
auggauauuugcagauaga

SEQ ID NO: 44345 - RNA, 19 nt, Homo sapiens
  misc_RNA (1)...(19): siRNA sense strand
gcaaaggaauguuaaucua

SEQ ID NO: 44346 - RNA, 19 nt, Homo sapiens
  misc_RNA (1)...(19): siRNA sense strand
gaauggauauuugcagaua

SEQ ID NO: 44347 - RNA, 19 nt, Homo sapiens
  misc_RNA (1)...(19): siRNA sense strand
cagaaucacugaaagcaaa

SEQ ID NO: 44348 - RNA, 19 nt, Homo sapiens
  misc_RNA (1)...(19): siRNA sense strand
caucguggcgcauguauua

SEQ ID NO: 44349 - RNA, 19 nt, Homo sapiens
  misc_RNA (1)...(19): siRNA sense strand
gaagacaauuauucacguu

SEQ ID NO: 44350 - RNA, 19 nt, Homo sapiens
  misc_RNA (1)...(19): siRNA sense strand
gaaaccaaauccugaucaa

SEQ ID NO: 44351 - RNA, 19 nt, Homo sapiens
  misc_RNA (1)...(19): siRNA sense strand
caagagcaaaggaauguua

SEQ ID NO: 44352 - RNA, 19 nt, Homo sapiens
  misc_RNA (1)...(19): siRNA sense strand
ccauuaaaguuacugguuu

SEQ ID NO: 44353 - RNA, 19 nt, Homo sapiens
  misc_RNA (1)...(19): siRNA sense strand
uaaguacgauguucaagug

SEQ ID NO: 44354 - RNA, 19 nt, Homo sapiens
  misc_RNA (1)...(19): siRNA sense strand
gaaaauaaacgcuccaaaa

SEQ ID NO: 44355 - RNA, 19 nt, Homo sapiens
  misc_RNA (1)...(19): siRNA sense strand
gaaaccagaaucacugaaa

SEQ ID NO: 44356 - RNA, 19 nt, Homo sapiens
  misc_RNA (1)...(19): siRNA sense strand
gaguggagccaaccuauuu

SEQ ID NO: 44357 - RNA, 19 nt, Homo sapiens
  misc_RNA (1)...(19): siRNA sense strand
gcagaacgaccacucacua

SEQ ID NO: 44358 - RNA, 19 nt, Homo sapiens
  misc_RNA (1)...(19): siRNA sense strand
caaauaaauccuccacuga

SEQ ID NO: 44359 - RNA, 19 nt, Homo sapiens
  misc_RNA (1)...(19): siRNA sense strand
ccuggaaccucaauuguga

SEQ ID NO: 44360 - RNA, 19 nt, Homo sapiens
  misc_RNA (1)...(19): siRNA sense strand
ucacgccauugaucaaaua

SEQ ID NO: 44361 - RNA, 19 nt, Homo sapiens
  misc_RNA (1)...(19): siRNA sense strand
ccacaaacacuacagaaga

SEQ ID NO: 44362 - RNA, 19 nt, Homo sapiens
  misc_RNA (1)...(19): siRNA sense strand
ugaaggaacucgucucucu

SEQ ID NO: 44363 - RNA, 19 nt, Homo sapiens
  misc_RNA (1)...(19): siRNA sense strand
gagccaaccuauuuaugug

SEQ ID NO: 44364 - RNA, 19 nt, Homo sapiens
  misc_RNA (1)...(19): siRNA sense strand
gaacucgucucucuaucca

SEQ ID NO: 44365 - RNA, 19 nt, Homo sapiens
  misc_RNA (1)...(19): siRNA sense strand
gaagaugacuaugaaacca

SEQ ID NO: 44366 - RNA, 19 nt, Homo sapiens
  misc_RNA (1)...(19): siRNA sense strand
ugacuuacuuccugaugaa

SEQ ID NO: 44367 - RNA, 19 nt, Homo sapiens
  misc_RNA (1)...(19): siRNA sense strand
gaaagcaaauguguaacca

SEQ ID NO: 44368 - RNA, 19 nt, Homo sapiens
  misc_RNA (1)...(19): siRNA sense strand
gcagggcucuggagugagu

SEQ ID NO: 44369 - RNA, 19 nt, Homo sapiens
  misc_RNA (1)...(19): siRNA sense strand
gaaugucacagcagagauu

SEQ ID NO: 44370 - RNA, 19 nt, Homo sapiens
  misc_RNA (1)...(19): siRNA sense strand
uacaaggaauggauauuug

SEQ ID NO: 44371 - RNA, 19 nt, Homo sapiens
  misc_RNA (1)...(19): siRNA sense strand
guacgauguucaagugaga

SEQ ID NO: 44372 - RNA, 19 nt, Homo sapiens
  misc_RNA (1)...(19): siRNA sense strand
ccugucaauuucaccauua

SEQ ID NO: 44373 - RNA, 19 nt, Homo sapiens
  misc_RNA (1)...(19): siRNA sense strand
ggagccaaccuauuuaugu

SEQ ID NO: 44374 - RNA, 19 nt, Homo sapiens
  misc_RNA (1)...(19): siRNA sense strand
agaaaccagugucugcuuu

SEQ ID NO: 44375 - RNA, 19 nt, Homo sapiens
  misc_RNA (1)...(19): siRNA sense strand
gaacgaccacucacuacug

SEQ ID NO: 44376 - RNA, 19 nt, Homo sapiens
  misc_RNA (1)...(19): siRNA sense strand
gaaggaacucgucucucua

SEQ ID NO: 44377 - RNA, 19 nt, Homo sapiens
  misc_RNA (1)...(19): siRNA sense strand
gauacugcaagcugacuua

SEQ ID NO: 44378 - RNA, 19 nt, Homo sapiens
  misc_RNA (1)...(19): siRNA sense strand
cuacagaagacaauuauuc

SEQ ID NO: 44379 - RNA, 19 nt, Homo sapiens
  misc_RNA (1)...(19): siRNA sense strand
ccaaugcauucaucucaau

SEQ ID NO: 44380 - RNA, 19 nt, Homo sapiens
  misc_RNA (1)...(19): siRNA sense strand
ggaccauccugcagaacga

SEQ ID NO: 44381 - RNA, 19 nt, Homo sapiens
  misc_RNA (1)...(19): siRNA sense strand
aauaaacgcuccaaaagaa

SEQ ID NO: 44382 - RNA, 19 nt, Homo sapiens
  misc_RNA (1)...(19): siRNA sense strand
caaaagaagaugacuauga

SEQ ID NO: 44383 - RNA, 19 nt, Homo sapiens
  misc_RNA (1)...(19): siRNA sense strand
aaauaucgcaugcugguuu

SEQ ID NO: 44384 - RNA, 19 nt, Homo sapiens
  misc_RNA (1)...(19): siRNA sense strand
aaauaaauccuccacugaa

SEQ ID NO: 44385 - RNA, 19 nt, Homo sapiens
  misc_RNA (1)...(19): siRNA sense strand
cauuaaaguuacugguuug

SEQ ID NO: 44386 - RNA, 19 nt, Homo sapiens
  misc_RNA (1)...(19): siRNA sense strand
aauaaauccuccacugaau

SEQ ID NO: 44387 - RNA, 19 nt, Homo sapiens
  misc_RNA (1)...(19): siRNA sense strand
caaaggaauguuaaucuag

SEQ ID NO: 44388 - RNA, 19 nt, Homo sapiens
  misc_RNA (1)...(19): siRNA sense strand
cgccauugaucaaauaaau

SEQ ID NO: 44389 - RNA, 19 nt, Homo sapiens
  misc_RNA (1)...(19): siRNA sense strand
acacuacagaagacaauua

SEQ ID NO: 44390 - RNA, 19 nt, Homo sapiens
  misc_RNA (1)...(19): siRNA sense strand
ggaaaccaaauccugauca

SEQ ID NO: 44391 - RNA, 19 nt, Homo sapiens
  misc_RNA (1)...(19): siRNA sense strand
gaucaagagcaaaggaaug

SEQ ID NO: 44392 - RNA, 19 nt, Homo sapiens
  misc_RNA (1)...(19): siRNA sense strand
ugaagaaugccaagaauac

SEQ ID NO: 44393 - RNA, 19 nt, Homo sapiens
  misc_RNA (1)...(19): siRNA sense strand
gagcaaaggaauguuaauc

SEQ ID NO: 44394 - RNA, 19 nt, Homo sapiens
  misc_RNA (1)...(19): siRNA sense strand
gaccaaugcauucaucuca

SEQ ID NO: 44395 - RNA, 19 nt, Homo sapiens
  misc_RNA (1)...(19): siRNA sense strand
gaagaaugccaagaauaca

SEQ ID NO: 44396 - RNA, 19 nt, Homo sapiens
  misc_RNA (1)...(19): siRNA sense strand
aaccaaauccugaucaaga

SEQ ID NO: 44397 - RNA, 19 nt, Homo sapiens
  misc_RNA (1)...(19): siRNA sense strand
acugaaagcaaauguguaa

SEQ ID NO: 44398 - RNA, 19 nt, Homo sapiens
  misc_RNA (1)...(19): siRNA sense strand
gcaaauguguaaccauccu

SEQ ID NO: 44399 - RNA, 19 nt, Homo sapiens
  misc_RNA (1)...(19): siRNA sense strand
caagugagagcagcaguga

SEQ ID NO: 44400 - RNA, 19 nt, Homo sapiens
  misc_RNA (1)...(19): siRNA sense strand
acugcaagcugacuuacuu

SEQ ID NO: 44401 - RNA, 19 nt, Homo sapiens
  misc_RNA (1)...(19): siRNA sense strand
gcccuuugaucagcuguuu

SEQ ID NO: 44402 - RNA, 19 nt, Homo sapiens
  misc_RNA (1)...(19): siRNA sense strand
uuaaggucauaccaaguuu

SEQ ID NO: 44403 - RNA, 19 nt, Homo sapiens
  misc_RNA (1)...(19): siRNA sense strand
aggcagggcucuggaguga

SEQ ID NO: 44404 - RNA, 19 nt, Homo sapiens
  misc_RNA (1)...(19): siRNA sense strand
ccauugcuuugauuaugaa

SEQ ID NO: 44405 - RNA, 19 nt, Homo sapiens
  misc_RNA (1)...(19): siRNA sense strand
uaaauccuccacugaaugu

SEQ ID NO: 44406 - RNA, 19 nt, Homo sapiens
  misc_RNA (1)...(19): siRNA sense strand
ggcuugcggugcuuguuaa

SEQ ID NO: 44407 - RNA, 19 nt, Homo sapiens
  misc_RNA (1)...(19): siRNA sense strand
ucacuucucccaccuguca

SEQ ID NO: 44408 - RNA, 19 nt, Homo sapiens
  misc_RNA (1)...(19): siRNA sense strand
cugaggacacgcaguauuu

SEQ ID NO: 44409 - RNA, 19 nt, Homo sapiens
  misc_RNA (1)...(19): siRNA sense strand
aaaccagaaucacugaaag

SEQ ID NO: 44410 - RNA, 19 nt, Homo sapiens
  misc_RNA (1)...(19): siRNA sense strand
uaaccauccuccacaaagg

SEQ ID NO: 44411 - RNA, 19 nt, Homo sapiens
  misc_RNA (1)...(19): siRNA sense strand
ggauauuugcagauagaaa

SEQ ID NO: 44412 - RNA, 19 nt, Homo sapiens
  misc_RNA (1)...(19): siRNA sense strand
acaauacaaggaauggaua

SEQ ID NO: 44413 - RNA, 19 nt, Homo sapiens
  misc_RNA (1)...(19): siRNA sense strand
gaucaucguggcgcaugua

SEQ ID NO: 44414 - RNA, 19 nt, Homo sapiens
  misc_RNA (1)...(19): siRNA sense strand
uccauugcuuugauuauga

SEQ ID NO: 44415 - RNA, 19 nt, Homo sapiens
  misc_RNA (1)...(19): siRNA sense strand
gagaaaccagugucugcuu

SEQ ID NO: 44416 - RNA, 19 nt, Homo sapiens
  misc_RNA (1)...(19): siRNA sense strand
ucacugaaagcaaaugugu

SEQ ID NO: 44417 - RNA, 19 nt, Homo sapiens
  misc_RNA (1)...(19): siRNA sense strand
gcaccacaaacacuacaga

SEQ ID NO: 44418 - RNA, 19 nt, Homo sapiens
  misc_RNA (1)...(19): siRNA sense strand
caaugcauucaucucaaua

SEQ ID NO: 44419 - RNA, 19 nt, Homo sapiens
  misc_RNA (1)...(19): siRNA sense strand
gacugaagaaugccaagaa

SEQ ID NO: 44420 - RNA, 19 nt, Homo sapiens
  misc_RNA (1)...(19): siRNA sense strand
guauggcucuuggacugaa

SEQ ID NO: 44421 - RNA, 19 nt, Homo sapiens
  misc_RNA (1)...(19): siRNA sense strand
caagaauacagcaaagaca

SEQ ID NO: 44422 - RNA, 19 nt, Homo sapiens
  misc_RNA (1)...(19): siRNA sense strand
guaaccauccuccacaaag

SEQ ID NO: 44423 - RNA, 19 nt, Homo sapiens
  misc_RNA (1)...(19): siRNA sense strand
cugaagaaugccaagaaua

SEQ ID NO: 44424 - RNA, 19 nt, Homo sapiens
  misc_RNA (1)...(19): siRNA sense strand
ucucccaccugucaauuuc

SEQ ID NO: 44425 - RNA, 19 nt, Homo sapiens
  misc_RNA (1)...(19): siRNA sense strand
cauaccaaguuucccuuca

SEQ ID NO: 44426 - RNA, 19 nt, Homo sapiens
  misc_RNA (1)...(19): siRNA sense strand
cacaaacacuacagaagac

SEQ ID NO: 44427 - RNA, 19 nt, Homo sapiens
  misc_RNA (1)...(19): siRNA sense strand
cacugcaccuggcuuguug

SEQ ID NO: 44428 - RNA, 19 nt, Homo sapiens
  misc_RNA (1)...(19): siRNA sense strand
ggaauggauauuugcagau

SEQ ID NO: 44429 - RNA, 19 nt, Homo sapiens
  misc_RNA (1)...(19): siRNA sense strand
ggacugaagaaugccaaga

SEQ ID NO: 44430 - RNA, 19 nt, Homo sapiens
  misc_RNA (1)...(19): siRNA sense strand
acucgucucucuauccaau

SEQ ID NO: 44431 - RNA, 19 nt, Homo sapiens
  misc_RNA (1)...(19): siRNA sense strand
caauacaaggaauggauau

SEQ ID NO: 44432 - RNA, 19 nt, Homo sapiens
  misc_RNA (1)...(19): siRNA sense strand
ugguuuggcucaaguucuu

SEQ ID NO: 44433 - RNA, 19 nt, Homo sapiens
  misc_RNA (1)...(19): siRNA sense strand
acugaagaaugccaagaau

SEQ ID NO: 44434 - RNA, 19 nt, Homo sapiens
  misc_RNA (1)...(19): siRNA sense strand
cugacuuacuuccugauga

SEQ ID NO: 44435 - RNA, 19 nt, Homo sapiens
  misc_RNA (1)...(19): siRNA sense strand
gaaauaucgcaugcugguu

SEQ ID NO: 44436 - RNA, 19 nt, Homo sapiens
  misc_RNA (1)...(19): siRNA sense strand
guguaaccauccuccacaa

SEQ ID NO: 44437 - RNA, 19 nt, Homo sapiens
  misc_RNA (1)...(19): siRNA sense strand
ggacuuuuauccucagcaa

SEQ ID NO: 44438 - RNA, 19 nt, Homo sapiens
  misc_RNA (1)...(19): siRNA sense strand
uuuaaggucauaccaaguu

SEQ ID NO: 44439 - RNA, 19 nt, Homo sapiens
  misc_RNA (1)...(19): siRNA sense strand
gcauguauuacucauccuu

SEQ ID NO: 44440 - RNA, 19 nt, Homo sapiens
  misc_RNA (1)...(19): siRNA sense strand
uggcuugcggugcuuguua

SEQ ID NO: 44441 - RNA, 19 nt, Homo sapiens
  misc_RNA (1)...(19): siRNA sense strand
aaacacuacagaagacaau

SEQ ID NO: 44442 - RNA, 19 nt, Homo sapiens
  misc_RNA (1)...(19): siRNA sense strand
caaacacuacagaagacaa

SEQ ID NO: 44443 - RNA, 19 nt, Homo sapiens
  misc_RNA (1)...(19): siRNA sense strand
gacuaugaaaccagaauca

SEQ ID NO: 44444 - RNA, 19 nt, Homo sapiens
  misc_RNA (1)...(19): siRNA sense strand
auggauauuugcagauaga

SEQ ID NO: 44445 - RNA, 19 nt, Homo sapiens
  misc_RNA (1)...(19): siRNA sense strand
gcaaaggaauguuaaucua

SEQ ID NO: 44446 - RNA, 19 nt, Homo sapiens
  misc_RNA (1)...(19): siRNA sense strand
gaauggauauuugcagaua

SEQ ID NO: 44447 - RNA, 19 nt, Homo sapiens
  misc_RNA (1)...(19): siRNA sense strand
cagaaucacugaaagcaaa

SEQ ID NO: 44448 - RNA, 19 nt, Homo sapiens
  misc_RNA (1)...(19): siRNA sense strand
caucguggcgcauguauua

SEQ ID NO: 44449 - RNA, 19 nt, Homo sapiens
  misc_RNA (1)...(19): siRNA sense strand
gaagacaauuauucacguu

SEQ ID NO: 44450 - RNA, 19 nt, Homo sapiens
  misc_RNA (1)...(19): siRNA sense strand
gaaaccaaauccugaucaa

SEQ ID NO: 44451 - RNA, 19 nt, Homo sapiens
  misc_RNA (1)...(19): siRNA sense strand
caagagcaaaggaauguua

SEQ ID NO: 44452 - RNA, 19 nt, Homo sapiens
  misc_RNA (1)...(19): siRNA sense strand
ccauuaaaguuacugguuu

SEQ ID NO: 44453 - RNA, 19 nt, Homo sapiens
  misc_RNA (1)...(19): siRNA sense strand
uaaguacgauguucaagug

SEQ ID NO: 44454 - RNA, 19 nt, Homo sapiens
  misc_RNA (1)...(19): siRNA sense strand
gaaaauaaacgcuccaaaa

SEQ ID NO: 44455 - RNA, 19 nt, Homo sapiens
  misc_RNA (1)...(19): siRNA sense strand
gaaaccagaaucacugaaa

SEQ ID NO: 44456 - RNA, 19 nt, Homo sapiens
  misc_RNA (1)...(19): siRNA sense strand
gaguggagccaaccuauuu

SEQ ID NO: 44457 - RNA, 19 nt, Homo sapiens
  misc_RNA (1)...(19): siRNA sense strand
gcagaacgaccacucacua

SEQ ID NO: 44458 - RNA, 19 nt, Homo sapiens
  misc_RNA (1)...(19): siRNA sense strand
caaauaaauccuccacuga

SEQ ID NO: 44459 - RNA, 19 nt, Homo sapiens
  misc_RNA (1)...(19): siRNA sense strand
ccuggaaccucaauuguga

SEQ ID NO: 44460 - RNA, 19 nt, Homo sapiens
  misc_RNA (1)...(19): siRNA sense strand
ucacgccauugaucaaaua

SEQ ID NO: 44461 - RNA, 19 nt, Homo sapiens
  misc_RNA (1)...(19): siRNA sense strand
ccacaaacacuacagaaga

SEQ ID NO: 44462 - RNA, 19 nt, Homo sapiens
  misc_RNA (1)...(19): siRNA sense strand
ugaaggaacucgucucucu

SEQ ID NO: 44463 - RNA, 19 nt, Homo sapiens
  misc_RNA (1)...(19): siRNA sense strand
gagccaaccuauuuaugug

SEQ ID NO: 44464 - RNA, 19 nt, Homo sapiens
  misc_RNA (1)...(19): siRNA sense strand
gaacucgucucucuaucca

SEQ ID NO: 44465 - RNA, 19 nt, Homo sapiens
  misc_RNA (1)...(19): siRNA sense strand
gaagaugacuaugaaacca

SEQ ID NO: 44466 - RNA, 19 nt, Homo sapiens
  misc_RNA (1)...(19): siRNA sense strand
ugacuuacuuccugaugaa

SEQ ID NO: 44467 - RNA, 19 nt, Homo sapiens
  misc_RNA (1)...(19): siRNA sense strand
gaaagcaaauguguaacca

SEQ ID NO: 44468 - RNA, 19 nt, Homo sapiens
  misc_RNA (1)...(19): siRNA sense strand
gcagggcucuggagugagu

SEQ ID NO: 44469 - RNA, 19 nt, Homo sapiens
  misc_RNA (1)...(19): siRNA sense strand
gaaugucacagcagagauu

SEQ ID NO: 44470 - RNA, 19 nt, Homo sapiens
  misc_RNA (1)...(19): siRNA sense strand
uacaaggaauggauauuug

SEQ ID NO: 44471 - RNA, 19 nt, Homo sapiens
  misc_RNA (1)...(19): siRNA sense strand
guacgauguucaagugaga

SEQ ID NO: 44472 - RNA, 19 nt, Homo sapiens
  misc_RNA (1)...(19): siRNA sense strand
ccugucaauuucaccauua

SEQ ID NO: 44473 - RNA, 19 nt, Homo sapiens
  misc_RNA (1)...(19): siRNA sense strand
ggagccaaccuauuuaugu

SEQ ID NO: 44474 - RNA, 19 nt, Homo sapiens
  misc_RNA (1)...(19): siRNA sense strand
agaaaccagugucugcuuu

SEQ ID NO: 44475 - RNA, 19 nt, Homo sapiens
  misc_RNA (1)...(19): siRNA sense strand
gaacgaccacucacuacug

SEQ ID NO: 44476 - RNA, 19 nt, Homo sapiens
  misc_RNA (1)...(19): siRNA sense strand
gaaggaacucgucucucua

SEQ ID NO: 44477 - RNA, 19 nt, Homo sapiens
  misc_RNA (1)...(19): siRNA sense strand
gauacugcaagcugacuua

SEQ ID NO: 44478 - RNA, 19 nt, Homo sapiens
  misc_RNA (1)...(19): siRNA sense strand
cuacagaagacaauuauuc

SEQ ID NO: 44479 - RNA, 19 nt, Homo sapiens
  misc_RNA (1)...(19): siRNA sense strand
ccaaugcauucaucucaau

SEQ ID NO: 44480 - RNA, 19 nt, Homo sapiens
  misc_RNA (1)...(19): siRNA sense strand
ggaccauccugcagaacga

SEQ ID NO: 44481 - RNA, 19 nt, Homo sapiens
  misc_RNA (1)...(19): siRNA sense strand
aauaaacgcuccaaaagaa

SEQ ID NO: 44482 - RNA, 19 nt, Homo sapiens
  misc_RNA (1)...(19): siRNA sense strand
caaaagaagaugacuauga

SEQ ID NO: 44483 - RNA, 19 nt, Homo sapiens
  misc_RNA (1)...(19): siRNA sense strand
aaauaucgcaugcugguuu

SEQ ID NO: 44484 - RNA, 19 nt, Homo sapiens
  misc_RNA (1)...(19): siRNA sense strand
aaauaaauccuccacugaa

SEQ ID NO: 44485 - RNA, 19 nt, Homo sapiens
  misc_RNA (1)...(19): siRNA sense strand
cauuaaaguuacugguuug

SEQ ID NO: 44486 - RNA, 19 nt, Homo sapiens
  misc_RNA (1)...(19): siRNA sense strand
aauaaauccuccacugaau

SEQ ID NO: 44487 - RNA, 19 nt, Homo sapiens
  misc_RNA (1)...(19): siRNA sense strand
caaaggaauguuaaucuag

SEQ ID NO: 44488 - RNA, 19 nt, Homo sapiens
  misc_RNA (1)...(19): siRNA sense strand
cgccauugaucaaauaaau

SEQ ID NO: 44489 - RNA, 19 nt, Homo sapiens
  misc_RNA (1)...(19): siRNA sense strand
acacuacagaagacaauua

SEQ ID NO: 44490 - RNA, 19 nt, Homo sapiens
  misc_RNA (1)...(19): siRNA sense strand
ggaaaccaaauccugauca

SEQ ID NO: 44491 - RNA, 19 nt, Homo sapiens
  misc_RNA (1)...(19): siRNA sense strand
gaucaagagcaaaggaaug

SEQ ID NO: 44492 - RNA, 19 nt, Homo sapiens
  misc_RNA (1)...(19): siRNA sense strand
ugaagaaugccaagaauac

SEQ ID NO: 44493 - RNA, 19 nt, Homo sapiens
  misc_RNA (1)...(19): siRNA sense strand
gagcaaaggaauguuaauc

SEQ ID NO: 44494 - RNA, 19 nt, Homo sapiens
  misc_RNA (1)...(19): siRNA sense strand
gaccaaugcauucaucuca

SEQ ID NO: 44495 - RNA, 19 nt, Homo sapiens
  misc_RNA (1)...(19): siRNA sense strand
gaagaaugccaagaauaca

SEQ ID NO: 44496 - RNA, 19 nt, Homo sapiens
  misc_RNA (1)...(19): siRNA sense strand
aaccaaauccugaucaaga

SEQ ID NO: 44497 - RNA, 19 nt, Homo sapiens
  misc_RNA (1)...(19): siRNA sense strand
acugaaagcaaauguguaa

SEQ ID NO: 44498 - RNA, 19 nt, Homo sapiens
  misc_RNA (1)...(19): siRNA sense strand
gcaaauguguaaccauccu

SEQ ID NO: 44499 - RNA, 19 nt, Homo sapiens
  misc_RNA (1)...(19): siRNA sense strand
caagugagagcagcaguga

SEQ ID NO: 44500 - RNA, 19 nt, Homo sapiens
  misc_RNA (1)...(19): siRNA sense strand
acugcaagcugacuuacuu

SEQ ID NO: 44501 - RNA, 19 nt, Homo sapiens
  misc_RNA (1)...(19): siRNA sense strand
gcccuuugaucagcuguuu

SEQ ID NO: 44502 - RNA, 19 nt, Homo sapiens
  misc_RNA (1)...(19): siRNA sense strand
uuaaggucauaccaaguuu

SEQ ID NO: 44503 - RNA, 19 nt, Homo sapiens
  misc_RNA (1)...(19): siRNA sense strand
aggcagggcucuggaguga

SEQ ID NO: 44504 - RNA, 19 nt, Homo sapiens
  misc_RNA (1)...(19): siRNA sense strand
ccauugcuuugauuaugaa

SEQ ID NO: 44505 - RNA, 19 nt, Homo sapiens
  misc_RNA (1)...(19): siRNA sense strand
uaaauccuccacugaaugu

SEQ ID NO: 44506 - RNA, 19 nt, Homo sapiens
  misc_RNA (1)...(19): siRNA sense strand
ggcuugcggugcuuguuaa

SEQ ID NO: 44507 - RNA, 19 nt, Homo sapiens
  misc_RNA (1)...(19): siRNA sense strand
ucacuucucccaccuguca

SEQ ID NO: 44508 - RNA, 19 nt, Homo sapiens
  misc_RNA (1)...(19): siRNA sense strand
cugaggacacgcaguauuu

SEQ ID NO: 44509 - RNA, 19 nt, Homo sapiens
  misc_RNA (1)...(19): siRNA sense strand
aaaccagaaucacugaaag

SEQ ID NO: 44510 - RNA, 19 nt, Homo sapiens
  misc_RNA (1)...(19): siRNA sense strand
uaaccauccuccacaaagg

SEQ ID NO: 44511 - RNA, 19 nt, Homo sapiens
  misc_RNA (1)...(19): siRNA sense strand
ggauauuugcagauagaaa

SEQ ID NO: 44512 - RNA, 19 nt, Homo sapiens
  misc_RNA (1)...(19): siRNA sense strand
acaauacaaggaauggaua

SEQ ID NO: 44513 - RNA, 19 nt, Homo sapiens
  misc_RNA (1)...(19): siRNA sense strand
gaucaucguggcgcaugua

SEQ ID NO: 44514 - RNA, 19 nt, Homo sapiens
  misc_RNA (1)...(19): siRNA sense strand
uccauugcuuugauuauga

SEQ ID NO: 44515 - RNA, 19 nt, Homo sapiens
  misc_RNA (1)...(19): siRNA sense strand
gagaaaccagugucugcuu

SEQ ID NO: 44516 - RNA, 19 nt, Homo sapiens
  misc_RNA (1)...(19): siRNA sense strand
ucacugaaagcaaaugugu

SEQ ID NO: 44517 - RNA, 19 nt, Homo sapiens
  misc_RNA (1)...(19): siRNA sense strand
gcaccacaaacacuacaga

SEQ ID NO: 44518 - RNA, 19 nt, Homo sapiens
  misc_RNA (1)...(19): siRNA sense strand
caaugcauucaucucaaua

SEQ ID NO: 44519 - RNA, 19 nt, Homo sapiens
  misc_RNA (1)...(19): siRNA sense strand
gacugaagaaugccaagaa

SEQ ID NO: 44520 - RNA, 19 nt, Homo sapiens
  misc_RNA (1)...(19): siRNA sense strand
guauggcucuuggacugaa

SEQ ID NO: 44521 - RNA, 19 nt, Homo sapiens
  misc_RNA (1)...(19): siRNA sense strand
caagaauacagcaaagaca

SEQ ID NO: 44522 - RNA, 19 nt, Homo sapiens
  misc_RNA (1)...(19): siRNA sense strand
guaaccauccuccacaaag

SEQ ID NO: 44523 - RNA, 19 nt, Homo sapiens
  misc_RNA (1)...(19): siRNA sense strand
cugaagaaugccaagaaua

SEQ ID NO: 44524 - RNA, 19 nt, Homo sapiens
  misc_RNA (1)...(19): siRNA sense strand
ucucccaccugucaauuuc

SEQ ID NO: 44525 - RNA, 19 nt, Homo sapiens
  misc_RNA (1)...(19): siRNA sense strand
cauaccaaguuucccuuca

SEQ ID NO: 44526 - RNA, 19 nt, Homo sapiens
  misc_RNA (1)...(19): siRNA sense strand
cacaaacacuacagaagac

SEQ ID NO: 44527 - RNA, 19 nt, Homo sapiens
  misc_RNA (1)...(19): siRNA sense strand
cacugcaccuggcuuguug

SEQ ID NO: 44528 - RNA, 19 nt, Homo sapiens
  misc_RNA (1)...(19): siRNA sense strand
ggaauggauauuugcagau

SEQ ID NO: 44529 - RNA, 19 nt, Homo sapiens
  misc_RNA (1)...(19): siRNA sense strand
ggacugaagaaugccaaga

SEQ ID NO: 44530 - RNA, 19 nt, Homo sapiens
  misc_RNA (1)...(19): siRNA sense strand
acucgucucucuauccaau

SEQ ID NO: 44531 - RNA, 19 nt, Homo sapiens
  misc_RNA (1)...(19): siRNA sense strand
caauacaaggaauggauau

SEQ ID NO: 44532 - RNA, 19 nt, Homo sapiens
  misc_RNA (1)...(19): siRNA sense strand
ugguuuggcucaaguucuu

SEQ ID NO: 44533 - RNA, 19 nt, Homo sapiens
  misc_RNA (1)...(19): siRNA sense strand
acugaagaaugccaagaau

SEQ ID NO: 44534 - RNA, 19 nt, Homo sapiens
  misc_RNA (1)...(19): siRNA sense strand
cugacuuacuuccugauga

SEQ ID NO: 44535 - RNA, 19 nt, Homo sapiens
  misc_RNA (1)...(19): siRNA sense strand
gaaauaucgcaugcugguu

SEQ ID NO: 44536 - RNA, 19 nt, Homo sapiens
  misc_RNA (1)...(19): siRNA sense strand
guguaaccauccuccacaa

SEQ ID NO: 44537 - RNA, 19 nt, Homo sapiens
  misc_RNA (1)...(19): siRNA sense strand
ggacuuuuauccucagcaa

SEQ ID NO: 44538 - RNA, 19 nt, Homo sapiens
  misc_RNA (1)...(19): siRNA sense strand
uuuaaggucauaccaaguu

SEQ ID NO: 44539 - RNA, 19 nt, Homo sapiens
  misc_RNA (1)...(19): siRNA sense strand
gcauguauuacucauccuu

SEQ ID NO: 44540 - RNA, 19 nt, Homo sapiens
  misc_RNA (1)...(19): siRNA sense strand
uggcuugcggugcuuguua

SEQ ID NO: 44541 - RNA, 19 nt, Homo sapiens
  misc_RNA (1)...(19): siRNA sense strand
aaacacuacagaagacaau

SEQ ID NO: 44542 - RNA, 19 nt, Homo sapiens
  misc_RNA (1)...(19): siRNA sense strand
caaacacuacagaagacaa

SEQ ID NO: 44543 - RNA, 19 nt, Homo sapiens
  misc_RNA (1)...(19): siRNA sense strand
gacuaugaaaccagaauca

SEQ ID NO: 44544 - RNA, 19 nt, Homo sapiens
  misc_RNA (1)...(19): siRNA sense strand
auggauauuugcagauaga

SEQ ID NO: 44545 - RNA, 19 nt, Homo sapiens
  misc_RNA (1)...(19): siRNA sense strand
gaacucaucuuucuacaga

SEQ ID NO: 44546 - RNA, 19 nt, Homo sapiens
  misc_RNA (1)...(19): siRNA sense strand
gaaguucuccugccaguua

SEQ ID NO: 44547 - RNA, 19 nt, Homo sapiens
  misc_RNA (1)...(19): siRNA sense strand
agacagcucuuucuacaua

SEQ ID NO: 44548 - RNA, 19 nt, Homo sapiens
  misc_RNA (1)...(19): siRNA sense strand
caacauggauggucaagga

SEQ ID NO: 44549 - RNA, 19 nt, Homo sapiens
  misc_RNA (1)...(19): siRNA sense strand
ggagacagcucuuucuaca

SEQ ID NO: 44550 - RNA, 19 nt, Homo sapiens
  misc_RNA (1)...(19): siRNA sense strand
ccacgacucuggaaacuau

SEQ ID NO: 44551 - RNA, 19 nt, Homo sapiens
  misc_RNA (1)...(19): siRNA sense strand
gacaaaggcugugcucuug

SEQ ID NO: 44552 - RNA, 19 nt, Homo sapiens
  misc_RNA (1)...(19): siRNA sense strand
ggagacagcgugacucuga

SEQ ID NO: 44553 - RNA, 19 nt, Homo sapiens
  misc_RNA (1)...(19): siRNA sense strand
ucaaggaccuccagcauca

SEQ ID NO: 44554 - RNA, 19 nt, Homo sapiens
  misc_RNA (1)...(19): siRNA sense strand
ucaaagacauucacaacau

SEQ ID NO: 44555 - RNA, 19 nt, Homo sapiens
  misc_RNA (1)...(19): siRNA sense strand
ggaagacaaugccacuguu

SEQ ID NO: 44556 - RNA, 19 nt, Homo sapiens
  misc_RNA (1)...(19): siRNA sense strand
caaagacauucacaacaug

SEQ ID NO: 44557 - RNA, 19 nt, Homo sapiens
  misc_RNA (1)...(19): siRNA sense strand
cagcaaaacucaaaccuuu

SEQ ID NO: 44558 - RNA, 19 nt, Homo sapiens
  misc_RNA (1)...(19): siRNA sense strand
ucagcaauguuguuuguga

SEQ ID NO: 44559 - RNA, 19 nt, Homo sapiens
  misc_RNA (1)...(19): siRNA sense strand
ccacggagcccuuaugaca

SEQ ID NO: 44560 - RNA, 19 nt, Homo sapiens
  misc_RNA (1)...(19): siRNA sense strand
ucacugccguggccagaaa

SEQ ID NO: 44561 - RNA, 19 nt, Homo sapiens
  misc_RNA (1)...(19): siRNA sense strand
ugcaggcacuuacuacuaa

SEQ ID NO: 44562 - RNA, 19 nt, Homo sapiens
  misc_RNA (1)...(19): siRNA sense strand
gcacuuacuacuaauaaag

SEQ ID NO: 44563 - RNA, 19 nt, Homo sapiens
  misc_RNA (1)...(19): siRNA sense strand
cgacaaaggcugugcucuu

SEQ ID NO: 44564 - RNA, 19 nt, Homo sapiens
  misc_RNA (1)...(19): siRNA sense strand
gugaggaaguuucagaaca

SEQ ID NO: 44565 - RNA, 19 nt, Homo sapiens
  misc_RNA (1)...(19): siRNA sense strand
ccucagcaauguuguuugu

SEQ ID NO: 44566 - RNA, 19 nt, Homo sapiens
  misc_RNA (1)...(19): siRNA sense strand
gcugaacggucaaagacau

SEQ ID NO: 44567 - RNA, 19 nt, Homo sapiens
  misc_RNA (1)...(19): siRNA sense strand
caaaggcugugcucuuggu

SEQ ID NO: 44568 - RNA, 19 nt, Homo sapiens
  misc_RNA (1)...(19): siRNA sense strand
gaagacaaugccacuguuc

SEQ ID NO: 44569 - RNA, 19 nt, Homo sapiens
  misc_RNA (1)...(19): siRNA sense strand
ggguagagccggaagacaa

SEQ ID NO: 44570 - RNA, 19 nt, Homo sapiens
  misc_RNA (1)...(19): siRNA sense strand
ggagggagacagcucuuuc

SEQ ID NO: 44571 - RNA, 19 nt, Homo sapiens
  misc_RNA (1)...(19): siRNA sense strand
gggcacgccuuggacagaa

SEQ ID NO: 44572 - RNA, 19 nt, Homo sapiens
  misc_RNA (1)...(19): siRNA sense strand
caggagccgugccaguauu

SEQ ID NO: 44573 - RNA, 19 nt, Homo sapiens
  misc_RNA (1)...(19): siRNA sense strand
gguuugagcucagauaucg

SEQ ID NO: 44574 - RNA, 19 nt, Homo sapiens
  misc_RNA (1)...(19): siRNA sense strand
ugaggaaguuucagaacag

SEQ ID NO: 44575 - RNA, 19 nt, Homo sapiens
  misc_RNA (1)...(19): siRNA sense strand
ggcacuuacuacuaauaaa

SEQ ID NO: 44576 - RNA, 19 nt, Homo sapiens
  misc_RNA (1)...(19): siRNA sense strand
ggucaaagacauucacaac

SEQ ID NO: 44577 - RNA, 19 nt, Homo sapiens
  misc_RNA (1)...(19): siRNA sense strand
ucaggguuguggaaucuug

SEQ ID NO: 44578 - RNA, 19 nt, Homo sapiens
  misc_RNA (1)...(19): siRNA sense strand
gcaggcacuuacuacuaau

SEQ ID NO: 44579 - RNA, 19 nt, Homo sapiens
  misc_RNA (1)...(19): siRNA sense strand
cuacuaauaaagacgauga

SEQ ID NO: 44580 - RNA, 19 nt, Homo sapiens
  misc_RNA (1)...(19): siRNA sense strand
ccuuaugacaucagcaaua

SEQ ID NO: 44581 - RNA, 19 nt, Homo sapiens
  misc_RNA (1)...(19): siRNA sense strand
gcugcgggcucugaaggaa

SEQ ID NO: 44582 - RNA, 19 nt, Homo sapiens
  misc_RNA (1)...(19): siRNA sense strand
gaggaaguuucagaacagu

SEQ ID NO: 44583 - RNA, 19 nt, Homo sapiens
  misc_RNA (1)...(19): siRNA sense strand
gguagagccggaagacaau

SEQ ID NO: 44584 - RNA, 19 nt, Homo sapiens
  misc_RNA (1)...(19): siRNA sense strand
gaacggucaaagacauuca

SEQ ID NO: 44585 - RNA, 19 nt, Homo sapiens
  misc_RNA (1)...(19): siRNA sense strand
gaggcgugcugaccagucu

SEQ ID NO: 44586 - RNA, 19 nt, Homo sapiens
  misc_RNA (1)...(19): siRNA sense strand
gggagcaaguucagcaaaa

SEQ ID NO: 44587 - RNA, 19 nt, Homo sapiens
  misc_RNA (1)...(19): siRNA sense strand
ggaagcugcgggcucugaa

SEQ ID NO: 44588 - RNA, 19 nt, Homo sapiens
  misc_RNA (1)...(19): siRNA sense strand
ccaggagccgugccaguau

SEQ ID NO: 44589 - RNA, 19 nt, Homo sapiens
  misc_RNA (1)...(19): siRNA sense strand
acggagcccuuaugacauc

SEQ ID NO: 44590 - RNA, 19 nt, Homo sapiens
  misc_RNA (1)...(19): siRNA sense strand
gcaaaacucaaaccuuuca

SEQ ID NO: 44591 - RNA, 19 nt, Homo sapiens
  misc_RNA (1)...(19): siRNA sense strand
ccaugugcgucgccaguag

SEQ ID NO: 44592 - RNA, 19 nt, Homo sapiens
  misc_RNA (1)...(19): siRNA sense strand
ggaccuccagcaucacugu

SEQ ID NO: 44593 - RNA, 19 nt, Homo sapiens
  misc_RNA (1)...(19): siRNA sense strand
cuuaugacaucagcaauac

SEQ ID NO: 44594 - RNA, 19 nt, Homo sapiens
  misc_RNA (1)...(19): siRNA sense strand
cgaugauaauauucucuuc

SEQ ID NO: 44595 - RNA, 19 nt, Homo sapiens
  misc_RNA (1)...(19): siRNA sense strand
gggcugaacggucaaagac

SEQ ID NO: 44596 - RNA, 19 nt, Homo sapiens
  misc_RNA (1)...(19): siRNA sense strand
cagcugggacugugcacuu

SEQ ID NO: 44597 - RNA, 19 nt, Homo sapiens
  misc_RNA (1)...(19): siRNA sense strand
ccaguagugucgggagcaa

SEQ ID NO: 44598 - RNA, 19 nt, Homo sapiens
  misc_RNA (1)...(19): siRNA sense strand
ugcauccgccguacucuuu

SEQ ID NO: 44599 - RNA, 19 nt, Homo sapiens
  misc_RNA (1)...(19): siRNA sense strand
gcaugcauccgccguacuc

SEQ ID NO: 44600 - RNA, 19 nt, Homo sapiens
  misc_RNA (1)...(19): siRNA sense strand
ugaaggaaggcaagacaag

SEQ ID NO: 44601 - RNA, 19 nt, Homo sapiens
  misc_RNA (1)...(19): siRNA sense strand
cggaagacaaugccacugu

SEQ ID NO: 44602 - RNA, 19 nt, Homo sapiens
  misc_RNA (1)...(19): siRNA sense strand
gggagacagcucuuucuac

SEQ ID NO: 44603 - RNA, 19 nt, Homo sapiens
  misc_RNA (1)...(19): siRNA sense strand
aggcacuuacuacuaauaa

SEQ ID NO: 44604 - RNA, 19 nt, Homo sapiens
  misc_RNA (1)...(19): siRNA sense strand
gucaaagacauucacaaca

SEQ ID NO: 44605 - RNA, 19 nt, Homo sapiens
  misc_RNA (1)...(19): siRNA sense strand
ccaggagucccagaaguuc

SEQ ID NO: 44606 - RNA, 19 nt, Homo sapiens
  misc_RNA (1)...(19): siRNA sense strand
caggcacuuacuacuaaua

SEQ ID NO: 44607 - RNA, 19 nt, Homo sapiens
  misc_RNA (1)...(19): siRNA sense strand
uccaggagccgugccagua

SEQ ID NO: 44608 - RNA, 19 nt, Homo sapiens
  misc_RNA (1)...(19): siRNA sense strand
gacagcucuuucuacauag

SEQ ID NO: 44609 - RNA, 19 nt, Homo sapiens
  misc_RNA (1)...(19): siRNA sense strand
gagggagacagcucuuucu

SEQ ID NO: 44610 - RNA, 19 nt, Homo sapiens
  misc_RNA (1)...(19): siRNA sense strand
gaacucaucuuucuacaga

SEQ ID NO: 44611 - RNA, 19 nt, Homo sapiens
  misc_RNA (1)...(19): siRNA sense strand
gaaguucuccugccaguua

SEQ ID NO: 44612 - RNA, 19 nt, Homo sapiens
  misc_RNA (1)...(19): siRNA sense strand
agacagcucuuucuacaua

SEQ ID NO: 44613 - RNA, 19 nt, Homo sapiens
  misc_RNA (1)...(19): siRNA sense strand
caacauggauggucaagga

SEQ ID NO: 44614 - RNA, 19 nt, Homo sapiens
  misc_RNA (1)...(19): siRNA sense strand
ggagacagcucuuucuaca

SEQ ID NO: 44615 - RNA, 19 nt, Homo sapiens
  misc_RNA (1)...(19): siRNA sense strand
ccacgacucuggaaacuau

SEQ ID NO: 44616 - RNA, 19 nt, Homo sapiens
  misc_RNA (1)...(19): siRNA sense strand
gacaaaggcugugcucuug

SEQ ID NO: 44617 - RNA, 19 nt, Homo sapiens
  misc_RNA (1)...(19): siRNA sense strand
ggagacagcgugacucuga

SEQ ID NO: 44618 - RNA, 19 nt, Homo sapiens
  misc_RNA (1)...(19): siRNA sense strand
ucaaggaccuccagcauca

SEQ ID NO: 44619 - RNA, 19 nt, Homo sapiens
  misc_RNA (1)...(19): siRNA sense strand
ucaaagacauucacaacau

SEQ ID NO: 44620 - RNA, 19 nt, Homo sapiens
  misc_RNA (1)...(19): siRNA sense strand
ggaagacaaugccacuguu

SEQ ID NO: 44621 - RNA, 19 nt, Homo sapiens
  misc_RNA (1)...(19): siRNA sense strand
caaagacauucacaacaug

SEQ ID NO: 44622 - RNA, 19 nt, Homo sapiens
  misc_RNA (1)...(19): siRNA sense strand
cagcaaaacucaaaccuuu

SEQ ID NO: 44623 - RNA, 19 nt, Homo sapiens
  misc_RNA (1)...(19): siRNA sense strand
ucagcaauguuguuuguga

SEQ ID NO: 44624 - RNA, 19 nt, Homo sapiens
  misc_RNA (1)...(19): siRNA sense strand
ucacugccguggccagaaa

SEQ ID NO: 44625 - RNA, 19 nt, Homo sapiens
  misc_RNA (1)...(19): siRNA sense strand
ugcaggcacuuacuacuaa

SEQ ID NO: 44626 - RNA, 19 nt, Homo sapiens
  misc_RNA (1)...(19): siRNA sense strand
gcacuuacuacuaauaaag

SEQ ID NO: 44627 - RNA, 19 nt, Homo sapiens
  misc_RNA (1)...(19): siRNA sense strand
cgacaaaggcugugcucuu

SEQ ID NO: 44628 - RNA, 19 nt, Homo sapiens
  misc_RNA (1)...(19): siRNA sense strand
gugaggaaguuucagaaca

SEQ ID NO: 44629 - RNA, 19 nt, Homo sapiens
  misc_RNA (1)...(19): siRNA sense strand
ccucagcaauguuguuugu

SEQ ID NO: 44630 - RNA, 19 nt, Homo sapiens
  misc_RNA (1)...(19): siRNA sense strand
gcugaacggucaaagacau

SEQ ID NO: 44631 - RNA, 19 nt, Homo sapiens
  misc_RNA (1)...(19): siRNA sense strand
caaaggcugugcucuuggu

SEQ ID NO: 44632 - RNA, 19 nt, Homo sapiens
  misc_RNA (1)...(19): siRNA sense strand
gaagacaaugccacuguuc

SEQ ID NO: 44633 - RNA, 19 nt, Homo sapiens
  misc_RNA (1)...(19): siRNA sense strand
ggguagagccggaagacaa

SEQ ID NO: 44634 - RNA, 19 nt, Homo sapiens
  misc_RNA (1)...(19): siRNA sense strand
ggagggagacagcucuuuc

SEQ ID NO: 44635 - RNA, 19 nt, Homo sapiens
  misc_RNA (1)...(19): siRNA sense strand
gggcacgccuuggacagaa

SEQ ID NO: 44636 - RNA, 19 nt, Homo sapiens
  misc_RNA (1)...(19): siRNA sense strand
caggagccgugccaguauu

SEQ ID NO: 44637 - RNA, 19 nt, Homo sapiens
  misc_RNA (1)...(19): siRNA sense strand
gguuugagcucagauaucg

SEQ ID NO: 44638 - RNA, 19 nt, Homo sapiens
  misc_RNA (1)...(19): siRNA sense strand
ugaggaaguuucagaacag

SEQ ID NO: 44639 - RNA, 19 nt, Homo sapiens
  misc_RNA (1)...(19): siRNA sense strand
ggcacuuacuacuaauaaa

SEQ ID NO: 44640 - RNA, 19 nt, Homo sapiens
  misc_RNA (1)...(19): siRNA sense strand
ggucaaagacauucacaac

SEQ ID NO: 44641 - RNA, 19 nt, Homo sapiens
  misc_RNA (1)...(19): siRNA sense strand
ucaggguuguggaaucuug

SEQ ID NO: 44642 - RNA, 19 nt, Homo sapiens
  misc_RNA (1)...(19): siRNA sense strand
gcaggcacuuacuacuaau

SEQ ID NO: 44643 - RNA, 19 nt, Homo sapiens
  misc_RNA (1)...(19): siRNA sense strand
cuacuaauaaagacgauga

SEQ ID NO: 44644 - RNA, 19 nt, Homo sapiens
  misc_RNA (1)...(19): siRNA sense strand
gaggaaguuucagaacagu

SEQ ID NO: 44645 - RNA, 19 nt, Homo sapiens
  misc_RNA (1)...(19): siRNA sense strand
gguagagccggaagacaau

SEQ ID NO: 44646 - RNA, 19 nt, Homo sapiens
  misc_RNA (1)...(19): siRNA sense strand
gaacggucaaagacauuca

SEQ ID NO: 44647 - RNA, 19 nt, Homo sapiens
  misc_RNA (1)...(19): siRNA sense strand
gaggcgugcugaccagucu

SEQ ID NO: 44648 - RNA, 19 nt, Homo sapiens
  misc_RNA (1)...(19): siRNA sense strand
gggagcaaguucagcaaaa

SEQ ID NO: 44649 - RNA, 19 nt, Homo sapiens
  misc_RNA (1)...(19): siRNA sense strand
ccaggagccgugccaguau

SEQ ID NO: 44650 - RNA, 19 nt, Homo sapiens
  misc_RNA (1)...(19): siRNA sense strand
gcaaaacucaaaccuuuca

SEQ ID NO: 44651 - RNA, 19 nt, Homo sapiens
  misc_RNA (1)...(19): siRNA sense strand
ccaugugcgucgccaguag

SEQ ID NO: 44652 - RNA, 19 nt, Homo sapiens
  misc_RNA (1)...(19): siRNA sense strand
ggaccuccagcaucacugu

SEQ ID NO: 44653 - RNA, 19 nt, Homo sapiens
  misc_RNA (1)...(19): siRNA sense strand
cgaugauaauauucucuuc

SEQ ID NO: 44654 - RNA, 19 nt, Homo sapiens
  misc_RNA (1)...(19): siRNA sense strand
gggcugaacggucaaagac

SEQ ID NO: 44655 - RNA, 19 nt, Homo sapiens
  misc_RNA (1)...(19): siRNA sense strand
cagcugggacugugcacuu

SEQ ID NO: 44656 - RNA, 19 nt, Homo sapiens
  misc_RNA (1)...(19): siRNA sense strand
ccaguagugucgggagcaa

SEQ ID NO: 44657 - RNA, 19 nt, Homo sapiens
  misc_RNA (1)...(19): siRNA sense strand
cggaagacaaugccacugu

SEQ ID NO: 44658 - RNA, 19 nt, Homo sapiens
  misc_RNA (1)...(19): siRNA sense strand
gggagacagcucuuucuac

SEQ ID NO: 44659 - RNA, 19 nt, Homo sapiens
  misc_RNA (1)...(19): siRNA sense strand
aggcacuuacuacuaauaa

SEQ ID NO: 44660 - RNA, 19 nt, Homo sapiens
  misc_RNA (1)...(19): siRNA sense strand
gucaaagacauucacaaca

SEQ ID NO: 44661 - RNA, 19 nt, Homo sapiens
  misc_RNA (1)...(19): siRNA sense strand
uccaggagccgugccagua

SEQ ID NO: 44662 - RNA, 19 nt, Homo sapiens
  misc_RNA (1)...(19): siRNA sense strand
caggcacuuacuacuaaua

SEQ ID NO: 44663 - RNA, 19 nt, Homo sapiens
  misc_RNA (1)...(19): siRNA sense strand
gacagcucuuucuacauag

SEQ ID NO: 44664 - RNA, 19 nt, Homo sapiens
  misc_RNA (1)...(19): siRNA sense strand
gagggagacagcucuuucu

SEQ ID NO: 44665 - RNA, 19 nt, Homo sapiens
  misc_RNA (1)...(19): siRNA sense strand
ccaggagucccagaaguuc

SEQ ID NO: 44666 - RNA, 19 nt, Homo sapiens
  misc_RNA (1)...(19): siRNA sense strand
uuaauaagcuccaagagaa

SEQ ID NO: 44667 - RNA, 19 nt, Homo sapiens
  misc_RNA (1)...(19): siRNA sense strand
gaagaaugccuuuaauaag

SEQ ID NO: 44668 - RNA, 19 nt, Homo sapiens
  misc_RNA (1)...(19): siRNA sense strand
gaaccaagacccagacauc

SEQ ID NO: 44669 - RNA, 19 nt, Homo sapiens
  misc_RNA (1)...(19): siRNA sense strand
gugaagaaugccuuuaaua

SEQ ID NO: 44670 - RNA, 19 nt, Homo sapiens
  misc_RNA (1)...(19): siRNA sense strand
ggugaagaaugccuuuaau

SEQ ID NO: 44671 - RNA, 19 nt, Homo sapiens
  misc_RNA (1)...(19): siRNA sense strand
gagaaaggcaucuacaaag

SEQ ID NO: 44672 - RNA, 19 nt, Homo sapiens
  misc_RNA (1)...(19): siRNA sense strand
uggaggacuuuaaggguua

SEQ ID NO: 44673 - RNA, 19 nt, Homo sapiens
  misc_RNA (1)...(19): siRNA sense strand
ugucugagaugauccaguu

SEQ ID NO: 44674 - RNA, 19 nt, Homo sapiens
  misc_RNA (1)...(19): siRNA sense strand
gaacagcugcacccacuuc

SEQ ID NO: 44675 - RNA, 19 nt, Homo sapiens
  misc_RNA (1)...(19): siRNA sense strand
cauagaagccuacaugaca

SEQ ID NO: 44676 - RNA, 19 nt, Homo sapiens
  misc_RNA (1)...(19): siRNA sense strand
cuacggcgcugucaucgau

SEQ ID NO: 44677 - RNA, 19 nt, Homo sapiens
  misc_RNA (1)...(19): siRNA sense strand
ugagugaguuugacaucuu

SEQ ID NO: 44678 - RNA, 19 nt, Homo sapiens
  misc_RNA (1)...(19): siRNA sense strand
caaccugccuaacaugcuu

SEQ ID NO: 44679 - RNA, 19 nt, Homo sapiens
  misc_RNA (1)...(19): siRNA sense strand
ucagcagagugaagacuuu

SEQ ID NO: 44680 - RNA, 19 nt, Homo sapiens
  misc_RNA (1)...(19): siRNA sense strand
cuacauagaagccuacaug

SEQ ID NO: 44681 - RNA, 19 nt, Homo sapiens
  misc_RNA (1)...(19): siRNA sense strand
agagaaaggcaucuacaaa

SEQ ID NO: 44682 - RNA, 19 nt, Homo sapiens
  misc_RNA (1)...(19): siRNA sense strand
aggaucagcuggacaacuu

SEQ ID NO: 44683 - RNA, 19 nt, Homo sapiens
  misc_RNA (1)...(19): siRNA sense strand
aagaaugccuuuaauaagc

SEQ ID NO: 44684 - RNA, 19 nt, Homo sapiens
  misc_RNA (1)...(19): siRNA sense strand
acaaagccaugagugaguu

SEQ ID NO: 44685 - RNA, 19 nt, Homo sapiens
  misc_RNA (1)...(19): siRNA sense strand
caaugaagauacgaaacug

SEQ ID NO: 44686 - RNA, 19 nt, Homo sapiens
  misc_RNA (1)...(19): siRNA sense strand
gaagccuacaugacaauga

SEQ ID NO: 44687 - RNA, 19 nt, Homo sapiens
  misc_RNA (1)...(19): siRNA sense strand
aagccuacaugacaaugaa

SEQ ID NO: 44688 - RNA, 19 nt, Homo sapiens
  misc_RNA (1)...(19): siRNA sense strand
uaacaugcuucgagaucuc

SEQ ID NO: 44689 - RNA, 19 nt, Homo sapiens
  misc_RNA (1)...(19): siRNA sense strand
cuacaugacaaugaagaua

SEQ ID NO: 44690 - RNA, 19 nt, Homo sapiens
  misc_RNA (1)...(19): siRNA sense strand
agaaaggcaucuacaaagc

SEQ ID NO: 44691 - RNA, 19 nt, Homo sapiens
  misc_RNA (1)...(19): siRNA sense strand
gagugaguuugacaucuuc

SEQ ID NO: 44692 - RNA, 19 nt, Homo sapiens
  misc_RNA (1)...(19): siRNA sense strand
ugaaggaucagcuggacaa

SEQ ID NO: 44693 - RNA, 19 nt, Homo sapiens
  misc_RNA (1)...(19): siRNA sense strand
ugacaaugaagauacgaaa

SEQ ID NO: 44694 - RNA, 19 nt, Homo sapiens
  misc_RNA (1)...(19): siRNA sense strand
uaauaagcuccaagagaaa

SEQ ID NO: 44695 - RNA, 19 nt, Homo sapiens
  misc_RNA (1)...(19): siRNA sense strand
caagagaaaggcaucuaca

SEQ ID NO: 44696 - RNA, 19 nt, Homo sapiens
  misc_RNA (1)...(19): siRNA sense strand
caucuucaucaacuacaua

SEQ ID NO: 44697 - RNA, 19 nt, Homo sapiens
  misc_RNA (1)...(19): siRNA sense strand
gcgcugucaucgauuucuu

SEQ ID NO: 44698 - RNA, 19 nt, Homo sapiens
  misc_RNA (1)...(19): siRNA sense strand
auagaagccuacaugacaa

SEQ ID NO: 44699 - RNA, 19 nt, Homo sapiens
  misc_RNA (1)...(19): siRNA sense strand
gcaggugaagaaugccuuu

SEQ ID NO: 44700 - RNA, 19 nt, Homo sapiens
  misc_RNA (1)...(19): siRNA sense strand
cuucaucaacuacauagaa

SEQ ID NO: 44701 - RNA, 19 nt, Homo sapiens
  misc_RNA (1)...(19): siRNA sense strand
gaguuugacaucuucauca

SEQ ID NO: 44702 - RNA, 19 nt, Homo sapiens
  misc_RNA (1)...(19): siRNA sense strand
uuuaauaagcuccaagaga

SEQ ID NO: 44703 - RNA, 19 nt, Homo sapiens
  misc_RNA (1)...(19): siRNA sense strand
caucaaggcgcaugugaac

SEQ ID NO: 44704 - RNA, 19 nt, Homo sapiens
  misc_RNA (1)...(19): siRNA sense strand
uggagcaggugaagaaugc

SEQ ID NO: 44705 - RNA, 19 nt, Homo sapiens
  misc_RNA (1)...(19): siRNA sense strand
ccaagacccagacaucaag

SEQ ID NO: 44706 - RNA, 19 nt, Homo sapiens
  misc_RNA (1)...(19): siRNA sense strand
gagaugccuucagcagagu

SEQ ID NO: 44707 - RNA, 19 nt, Homo sapiens
  misc_RNA (1)...(19): siRNA sense strand
ucaaggcgcaugugaacuc

SEQ ID NO: 44708 - RNA, 19 nt, Homo sapiens
  misc_RNA (1)...(19): siRNA sense strand
caaagccaugagugaguuu

SEQ ID NO: 44709 - RNA, 19 nt, Homo sapiens
  misc_RNA (1)...(19): siRNA sense strand
agaaugccuuuaauaagcu

SEQ ID NO: 44710 - RNA, 19 nt, Homo sapiens
  misc_RNA (1)...(19): siRNA sense strand
cugagaugauccaguuuua

SEQ ID NO: 44711 - RNA, 19 nt, Homo sapiens
  misc_RNA (1)...(19): siRNA sense strand
ucuacaaagccaugaguga

SEQ ID NO: 44712 - RNA, 19 nt, Homo sapiens
  misc_RNA (1)...(19): siRNA sense strand
ccguggagcaggugaagaa

SEQ ID NO: 44713 - RNA, 19 nt, Homo sapiens
  misc_RNA (1)...(19): siRNA sense strand
aagagaaaggcaucuacaa

SEQ ID NO: 44714 - RNA, 19 nt, Homo sapiens
  misc_RNA (1)...(19): siRNA sense strand
acaaugaagauacgaaacu

SEQ ID NO: 44715 - RNA, 19 nt, Homo sapiens
  misc_RNA (1)...(19): siRNA sense strand
ccuaacaugcuucgagauc

SEQ ID NO: 44716 - RNA, 19 nt, Homo sapiens
  misc_RNA (1)...(19): siRNA sense strand
cuaacaugcuucgagaucu

SEQ ID NO: 44717 - RNA, 19 nt, Homo sapiens
  misc_RNA (1)...(19): siRNA sense strand
gaagacaacuguagacgaa

SEQ ID NO: 44718 - RNA, 19 nt, Homo sapiens
  misc_RNA (1)...(19): siRNA sense strand
ggacaucuuugaauuauga

SEQ ID NO: 44719 - RNA, 19 nt, Homo sapiens
  misc_RNA (1)...(19): siRNA sense strand
gguacgaucuucuuuauuu

SEQ ID NO: 44720 - RNA, 19 nt, Homo sapiens
  misc_RNA (1)...(19): siRNA sense strand
ggagaacggucaauauauu

SEQ ID NO: 44721 - RNA, 19 nt, Homo sapiens
  misc_RNA (1)...(19): siRNA sense strand
gaugaaggguuccgauuaa

SEQ ID NO: 44722 - RNA, 19 nt, Homo sapiens
  misc_RNA (1)...(19): siRNA sense strand
cagcaaagaugaucaaguu

SEQ ID NO: 44723 - RNA, 19 nt, Homo sapiens
  misc_RNA (1)...(19): siRNA sense strand
gcaaagaaguaaauuguag

SEQ ID NO: 44724 - RNA, 19 nt, Homo sapiens
  misc_RNA (1)...(19): siRNA sense strand
gaagugaaauccugugaug

SEQ ID NO: 44725 - RNA, 19 nt, Homo sapiens
  misc_RNA (1)...(19): siRNA sense strand
gaagugaaauccugugaug

SEQ ID NO: 44726 - RNA, 19 nt, Homo sapiens
  misc_RNA (1)...(19): siRNA sense strand
aaagaugucuguaaacgua

SEQ ID NO: 44727 - RNA, 19 nt, Homo sapiens
  misc_RNA (1)...(19): siRNA sense strand
agaaguggcuauccauuua

SEQ ID NO: 44728 - RNA, 19 nt, Homo sapiens
  misc_RNA (1)...(19): siRNA sense strand
gcacgaagccgccaauuug

SEQ ID NO: 44729 - RNA, 19 nt, Homo sapiens
  misc_RNA (1)...(19): siRNA sense strand
aaagaugucuguaaacgua

SEQ ID NO: 44730 - RNA, 19 nt, Homo sapiens
  misc_RNA (1)...(19): siRNA sense strand
gcacgaagccgccaauuug

SEQ ID NO: 44731 - RNA, 19 nt, Homo sapiens
  misc_RNA (1)...(19): siRNA sense strand
gaacauaucuuuuguccaa

SEQ ID NO: 44732 - RNA, 19 nt, Homo sapiens
  misc_RNA (1)...(19): siRNA sense strand
gaugaaggguuucgcuuaa

SEQ ID NO: 44733 - RNA, 19 nt, Homo sapiens
  misc_RNA (1)...(19): siRNA sense strand
gagauuaugugacuuugaa

SEQ ID NO: 44734 - RNA, 19 nt, Homo sapiens
  misc_RNA (1)...(19): siRNA sense strand
gauaagaaggcaccuauuu

SEQ ID NO: 44735 - RNA, 19 nt, Homo sapiens
  misc_RNA (1)...(19): siRNA sense strand
uaaaugaaguuguggaguu

SEQ ID NO: 44736 - RNA, 19 nt, Homo sapiens
  misc_RNA (1)...(19): siRNA sense strand
uaaaugaaguuguggaguu

SEQ ID NO: 44737 - RNA, 19 nt, Homo sapiens
  misc_RNA (1)...(19): siRNA sense strand
uaaaugaaguuguggaguu

SEQ ID NO: 44738 - RNA, 19 nt, Homo sapiens
  misc_RNA (1)...(19): siRNA sense strand
gcagugaaauccugugaug

SEQ ID NO: 44739 - RNA, 19 nt, Homo sapiens
  misc_RNA (1)...(19): siRNA sense strand
gaaauccugugaugacuuc

SEQ ID NO: 44740 - RNA, 19 nt, Homo sapiens
  misc_RNA (1)...(19): siRNA sense strand
ucucauaguuggcacuuua

SEQ ID NO: 44741 - RNA, 19 nt, Homo sapiens
  misc_RNA (1)...(19): siRNA sense strand
gaaauccugugaugacuuc

SEQ ID NO: 44742 - RNA, 19 nt, Homo sapiens
  misc_RNA (1)...(19): siRNA sense strand
ugagaagccuuuggaauaa

SEQ ID NO: 44743 - RNA, 19 nt, Homo sapiens
  misc_RNA (1)...(19): siRNA sense strand
gaaauccugugaugacuuc

SEQ ID NO: 44744 - RNA, 19 nt, Homo sapiens
  misc_RNA (1)...(19): siRNA sense strand
gaaauccugugaugacuuc

SEQ ID NO: 44745 - RNA, 19 nt, Homo sapiens
  misc_RNA (1)...(19): siRNA sense strand
ggagccaauuggaucauua

SEQ ID NO: 44746 - RNA, 19 nt, Homo sapiens
  misc_RNA (1)...(19): siRNA sense strand
agacguaaaucaugucgua

SEQ ID NO: 44747 - RNA, 19 nt, Homo sapiens
  misc_RNA (1)...(19): siRNA sense strand
caaaugggagccagaguua

SEQ ID NO: 44748 - RNA, 19 nt, Homo sapiens
  misc_RNA (1)...(19): siRNA sense strand
ccagaacccuucaauggaa

SEQ ID NO: 44749 - RNA, 19 nt, Homo sapiens
  misc_RNA (1)...(19): siRNA sense strand
caguuuggaucaacaguua

SEQ ID NO: 44750 - RNA, 19 nt, Homo sapiens
  misc_RNA (1)...(19): siRNA sense strand
gcaauuagaguaccaggaa

SEQ ID NO: 44751 - RNA, 19 nt, Homo sapiens
  misc_RNA (1)...(19): siRNA sense strand
ucacucaucugcugaaugu

SEQ ID NO: 44752 - RNA, 19 nt, Homo sapiens
  misc_RNA (1)...(19): siRNA sense strand
ucacucaucugcugaaugu

SEQ ID NO: 44753 - RNA, 19 nt, Homo sapiens
  misc_RNA (1)...(19): siRNA sense strand
acacguaucucuauaucuu

SEQ ID NO: 44754 - RNA, 19 nt, Homo sapiens
  misc_RNA (1)...(19): siRNA sense strand
gaggacacguaucucuaua

SEQ ID NO: 44755 - RNA, 19 nt, Homo sapiens
  misc_RNA (1)...(19): siRNA sense strand
ggacacguaucucuauauc

SEQ ID NO: 44756 - RNA, 19 nt, Homo sapiens
  misc_RNA (1)...(19): siRNA sense strand
ccagagcaguuuccauuug

SEQ ID NO: 44757 - RNA, 19 nt, Homo sapiens
  misc_RNA (1)...(19): siRNA sense strand
cgaaggaguuagaaaugaa

SEQ ID NO: 44758 - RNA, 19 nt, Homo sapiens
  misc_RNA (1)...(19): siRNA sense strand
gcaucugacuuucccauug

SEQ ID NO: 44759 - RNA, 19 nt, Homo sapiens
  misc_RNA (1)...(19): siRNA sense strand
ugucuuggcuggaaugaaa

SEQ ID NO: 44760 - RNA, 19 nt, Homo sapiens
  misc_RNA (1)...(19): siRNA sense strand
gcaucugacuuucccauug

SEQ ID NO: 44761 - RNA, 19 nt, Homo sapiens
  misc_RNA (1)...(19): siRNA sense strand
caguucggaucccaaauua

SEQ ID NO: 44762 - RNA, 19 nt, Homo sapiens
  misc_RNA (1)...(19): siRNA sense strand
gaaagguguuugagcuugu

SEQ ID NO: 44763 - RNA, 19 nt, Homo sapiens
  misc_RNA (1)...(19): siRNA sense strand
ggacaucuuuaaaguacga

SEQ ID NO: 44764 - RNA, 19 nt, Homo sapiens
  misc_RNA (1)...(19): siRNA sense strand
gaaagguguuugagcuugu

SEQ ID NO: 44765 - RNA, 19 nt, Homo sapiens
  misc_RNA (1)...(19): siRNA sense strand
ggacaucuuuaaaguacga

SEQ ID NO: 44766 - RNA, 19 nt, Homo sapiens
  misc_RNA (1)...(19): siRNA sense strand
gaaagguguuugagcuugu

SEQ ID NO: 44767 - RNA, 19 nt, Homo sapiens
  misc_RNA (1)...(19): siRNA sense strand
uaaaggauaccgacucauu

SEQ ID NO: 44768 - RNA, 19 nt, Homo sapiens
  misc_RNA (1)...(19): siRNA sense strand
gaucaaaggcauccaguuc

SEQ ID NO: 44769 - RNA, 19 nt, Homo sapiens
  misc_RNA (1)...(19): siRNA sense strand
gaacucugcaaacaaauga

SEQ ID NO: 44770 - RNA, 19 nt, Homo sapiens
  misc_RNA (1)...(19): siRNA sense strand
gcacagcuccagaaguuga

SEQ ID NO: 44771 - RNA, 19 nt, Homo sapiens
  misc_RNA (1)...(19): siRNA sense strand
uuaaagggcaguuccguua

SEQ ID NO: 44772 - RNA, 19 nt, Homo sapiens
  misc_RNA (1)...(19): siRNA sense strand
gaauauugguaucugacaa

SEQ ID NO: 44773 - RNA, 19 nt, Homo sapiens
  misc_RNA (1)...(19): siRNA sense strand
gaauauugguaucugacaa

SEQ ID NO: 44774 - RNA, 19 nt, Homo sapiens
  misc_RNA (1)...(19): siRNA sense strand
gaauauugguaucugacaa

SEQ ID NO: 44775 - RNA, 19 nt, Homo sapiens
  misc_RNA (1)...(19): siRNA sense strand
ucaauggaauggugcauau

SEQ ID NO: 44776 - RNA, 19 nt, Homo sapiens
  misc_RNA (1)...(19): siRNA sense strand
cgugugcuauuuccacuua

SEQ ID NO: 44777 - RNA, 19 nt, Homo sapiens
  misc_RNA (1)...(19): siRNA sense strand
cuaccaaccuaacugauga

SEQ ID NO: 44778 - RNA, 19 nt, Homo sapiens
  misc_RNA (1)...(19): siRNA sense strand
guccuacgaucccaauuaa

SEQ ID NO: 44779 - RNA, 19 nt, Homo sapiens
  misc_RNA (1)...(19): siRNA sense strand
guucggaucccaaauuaaa

SEQ ID NO: 44780 - RNA, 19 nt, Homo sapiens
  misc_RNA (1)...(19): siRNA sense strand
gcaacaauagaacaucuuu

SEQ ID NO: 44781 - RNA, 19 nt, Homo sapiens
  misc_RNA (1)...(19): siRNA sense strand
ggaaugagaagccuuugga

SEQ ID NO: 44782 - RNA, 19 nt, Homo sapiens
  misc_RNA (1)...(19): siRNA sense strand
gcaguuccguuagucauug

SEQ ID NO: 44783 - RNA, 19 nt, Homo sapiens
  misc_RNA (1)...(19): siRNA sense strand
gcaccaacagagagaauuu

SEQ ID NO: 44784 - RNA, 19 nt, Homo sapiens
  misc_RNA (1)...(19): siRNA sense strand
gcaccaacagagagaauuu

SEQ ID NO: 44785 - RNA, 19 nt, Homo sapiens
  misc_RNA (1)...(19): siRNA sense strand
gcaccaacagagagaauuu

SEQ ID NO: 44786 - RNA, 19 nt, Homo sapiens
  misc_RNA (1)...(19): siRNA sense strand
gggaggccauucucuauca

SEQ ID NO: 44787 - RNA, 19 nt, Homo sapiens
  misc_RNA (1)...(19): siRNA sense strand
ccauuuacauucucaagga

SEQ ID NO: 44788 - RNA, 19 nt, Homo sapiens
  misc_RNA (1)...(19): siRNA sense strand
gggaggccauucucuauca

SEQ ID NO: 44789 - RNA, 19 nt, Homo sapiens
  misc_RNA (1)...(19): siRNA sense strand
ucccaaagaugucuguaaa

SEQ ID NO: 44790 - RNA, 19 nt, Homo sapiens
  misc_RNA (1)...(19): siRNA sense strand
cgaugaaggguuccgauua

SEQ ID NO: 44791 - RNA, 19 nt, Homo sapiens
  misc_RNA (1)...(19): siRNA sense strand
gaucccaauuaaugacuuu

SEQ ID NO: 44792 - RNA, 19 nt, Homo sapiens
  misc_RNA (1)...(19): siRNA sense strand
ucccaaagaugucuguaaa

SEQ ID NO: 44793 - RNA, 19 nt, Homo sapiens
  misc_RNA (1)...(19): siRNA sense strand
ugaauggaaucucgaagga

SEQ ID NO: 44794 - RNA, 19 nt, Homo sapiens
  misc_RNA (1)...(19): siRNA sense strand
ugucuuggcuggaauggaa

SEQ ID NO: 44795 - RNA, 19 nt, Homo sapiens
  misc_RNA (1)...(19): siRNA sense strand
guauaucacuauggagauu

SEQ ID NO: 44796 - RNA, 19 nt, Homo sapiens
  misc_RNA (1)...(19): siRNA sense strand
cagguuggauccagaauca

SEQ ID NO: 44797 - RNA, 19 nt, Homo sapiens
  misc_RNA (1)...(19): siRNA sense strand
ugucuuggcuggaauggaa

SEQ ID NO: 44798 - RNA, 19 nt, Homo sapiens
  misc_RNA (1)...(19): siRNA sense strand
cagguuggauccagaauca

SEQ ID NO: 44799 - RNA, 19 nt, Homo sapiens
  misc_RNA (1)...(19): siRNA sense strand
gauacugucauuugggaua

SEQ ID NO: 44800 - RNA, 19 nt, Homo sapiens
  misc_RNA (1)...(19): siRNA sense strand
gaacaucuuuucacaaugg

SEQ ID NO: 44801 - RNA, 19 nt, Homo sapiens
  misc_RNA (1)...(19): siRNA sense strand
uaagaaggcaccuauuugu

SEQ ID NO: 44802 - RNA, 19 nt, Homo sapiens
  misc_RNA (1)...(19): siRNA sense strand
aaaugaaguuguggaguuu

SEQ ID NO: 44803 - RNA, 19 nt, Homo sapiens
  misc_RNA (1)...(19): siRNA sense strand
aaaugaaguuguggaguuu

SEQ ID NO: 44804 - RNA, 19 nt, Homo sapiens
  misc_RNA (1)...(19): siRNA sense strand
aaaugaaguuguggaguuu

SEQ ID NO: 44805 - RNA, 19 nt, Homo sapiens
  misc_RNA (1)...(19): siRNA sense strand
aaggacaggugcagacgua

SEQ ID NO: 44806 - RNA, 19 nt, Homo sapiens
  misc_RNA (1)...(19): siRNA sense strand
gaaggaguuagaaaugaaa

SEQ ID NO: 44807 - RNA, 19 nt, Homo sapiens
  misc_RNA (1)...(19): siRNA sense strand
ggaggacacguaucucuau

SEQ ID NO: 44808 - RNA, 19 nt, Homo sapiens
  misc_RNA (1)...(19): siRNA sense strand
caaagaugaucaaguuggu

SEQ ID NO: 44809 - RNA, 19 nt, Homo sapiens
  misc_RNA (1)...(19): siRNA sense strand
auggaacggugguaacuua

SEQ ID NO: 44810 - RNA, 19 nt, Homo sapiens
  misc_RNA (1)...(19): siRNA sense strand
ugagccaccuccaaccaua

SEQ ID NO: 44811 - RNA, 19 nt, Homo sapiens
  misc_RNA (1)...(19): siRNA sense strand
gcaccuauuugugagauca

SEQ ID NO: 44812 - RNA, 19 nt, Homo sapiens
  misc_RNA (1)...(19): siRNA sense strand
gaaauaucuuacacaugug

SEQ ID NO: 44813 - RNA, 19 nt, Homo sapiens
  misc_RNA (1)...(19): siRNA sense strand
ggucaagucccaaagaugu

SEQ ID NO: 44814 - RNA, 19 nt, Homo sapiens
  misc_RNA (1)...(19): siRNA sense strand
ggucaagucccaaagaugu

SEQ ID NO: 44815 - RNA, 19 nt, Homo sapiens
  misc_RNA (1)...(19): siRNA sense strand
gugcagacguaaaucaugu

SEQ ID NO: 44816 - RNA, 19 nt, Homo sapiens
  misc_RNA (1)...(19): siRNA sense strand
ggaagaccguuuucuauca

SEQ ID NO: 44817 - RNA, 19 nt, Homo sapiens
  misc_RNA (1)...(19): siRNA sense strand
gaagacaacuguagacgaa

SEQ ID NO: 44818 - RNA, 19 nt, Homo sapiens
  misc_RNA (1)...(19): siRNA sense strand
ggacaucuuugaauuauga

SEQ ID NO: 44819 - RNA, 19 nt, Homo sapiens
  misc_RNA (1)...(19): siRNA sense strand
gguacgaucuucuuuauuu

SEQ ID NO: 44820 - RNA, 19 nt, Homo sapiens
  misc_RNA (1)...(19): siRNA sense strand
ggagaacggucaauauauu

SEQ ID NO: 44821 - RNA, 19 nt, Homo sapiens
  misc_RNA (1)...(19): siRNA sense strand
gaugaaggguuccgauuaa

SEQ ID NO: 44822 - RNA, 19 nt, Homo sapiens
  misc_RNA (1)...(19): siRNA sense strand
cagcaaagaugaucaaguu

SEQ ID NO: 44823 - RNA, 19 nt, Homo sapiens
  misc_RNA (1)...(19): siRNA sense strand
gcaaagaaguaaauuguag

SEQ ID NO: 44824 - RNA, 19 nt, Homo sapiens
  misc_RNA (1)...(19): siRNA sense strand
gaagugaaauccugugaug

SEQ ID NO: 44825 - RNA, 19 nt, Homo sapiens
  misc_RNA (1)...(19): siRNA sense strand
gaagugaaauccugugaug

SEQ ID NO: 44826 - RNA, 19 nt, Homo sapiens
  misc_RNA (1)...(19): siRNA sense strand
gaagugaaauccugugaug

SEQ ID NO: 44827 - RNA, 19 nt, Homo sapiens
  misc_RNA (1)...(19): siRNA sense strand
aaagaugucuguaaacgua

SEQ ID NO: 44828 - RNA, 19 nt, Homo sapiens
  misc_RNA (1)...(19): siRNA sense strand
agaaguggcuauccauuua

SEQ ID NO: 44829 - RNA, 19 nt, Homo sapiens
  misc_RNA (1)...(19): siRNA sense strand
gcacgaagccgccaauuug

SEQ ID NO: 44830 - RNA, 19 nt, Homo sapiens
  misc_RNA (1)...(19): siRNA sense strand
aaagaugucuguaaacgua

SEQ ID NO: 44831 - RNA, 19 nt, Homo sapiens
  misc_RNA (1)...(19): siRNA sense strand
gcacgaagccgccaauuug

SEQ ID NO: 44832 - RNA, 19 nt, Homo sapiens
  misc_RNA (1)...(19): siRNA sense strand
aaagaugucuguaaacgua

SEQ ID NO: 44833 - RNA, 19 nt, Homo sapiens
  misc_RNA (1)...(19): siRNA sense strand
gcacgaagccgccaauuug

SEQ ID NO: 44834 - RNA, 19 nt, Homo sapiens
  misc_RNA (1)...(19): siRNA sense strand
gaacauaucuuuuguccaa

SEQ ID NO: 44835 - RNA, 19 nt, Homo sapiens
  misc_RNA (1)...(19): siRNA sense strand
gaugaaggguuucgcuuaa

SEQ ID NO: 44836 - RNA, 19 nt, Homo sapiens
  misc_RNA (1)...(19): siRNA sense strand
gagauuaugugacuuugaa

SEQ ID NO: 44837 - RNA, 19 nt, Homo sapiens
  misc_RNA (1)...(19): siRNA sense strand
gauaagaaggcaccuauuu

SEQ ID NO: 44838 - RNA, 19 nt, Homo sapiens
  misc_RNA (1)...(19): siRNA sense strand
uaaaugaaguuguggaguu

SEQ ID NO: 44839 - RNA, 19 nt, Homo sapiens
  misc_RNA (1)...(19): siRNA sense strand
uaaaugaaguuguggaguu

SEQ ID NO: 44840 - RNA, 19 nt, Homo sapiens
  misc_RNA (1)...(19): siRNA sense strand
uaaaugaaguuguggaguu

SEQ ID NO: 44841 - RNA, 19 nt, Homo sapiens
  misc_RNA (1)...(19): siRNA sense strand
uaaaugaaguuguggaguu

SEQ ID NO: 44842 - RNA, 19 nt, Homo sapiens
  misc_RNA (1)...(19): siRNA sense strand
gcagugaaauccugugaug

SEQ ID NO: 44843 - RNA, 19 nt, Homo sapiens
  misc_RNA (1)...(19): siRNA sense strand
gaaauccugugaugacuuc

SEQ ID NO: 44844 - RNA, 19 nt, Homo sapiens
  misc_RNA (1)...(19): siRNA sense strand
ucucauaguuggcacuuua

SEQ ID NO: 44845 - RNA, 19 nt, Homo sapiens
  misc_RNA (1)...(19): siRNA sense strand
gaaauccugugaugacuuc

SEQ ID NO: 44846 - RNA, 19 nt, Homo sapiens
  misc_RNA (1)...(19): siRNA sense strand
ugagaagccuuuggaauaa

SEQ ID NO: 44847 - RNA, 19 nt, Homo sapiens
  misc_RNA (1)...(19): siRNA sense strand
gaaauccugugaugacuuc

SEQ ID NO: 44848 - RNA, 19 nt, Homo sapiens
  misc_RNA (1)...(19): siRNA sense strand
gaaauccugugaugacuuc

SEQ ID NO: 44849 - RNA, 19 nt, Homo sapiens
  misc_RNA (1)...(19): siRNA sense strand
gaaauccugugaugacuuc

SEQ ID NO: 44850 - RNA, 19 nt, Homo sapiens
  misc_RNA (1)...(19): siRNA sense strand
ggagccaauuggaucauua

SEQ ID NO: 44851 - RNA, 19 nt, Homo sapiens
  misc_RNA (1)...(19): siRNA sense strand
agacguaaaucaugucgua

SEQ ID NO: 44852 - RNA, 19 nt, Homo sapiens
  misc_RNA (1)...(19): siRNA sense strand
caaaugggagccagaguua

SEQ ID NO: 44853 - RNA, 19 nt, Homo sapiens
  misc_RNA (1)...(19): siRNA sense strand
ccagaacccuucaauggaa

SEQ ID NO: 44854 - RNA, 19 nt, Homo sapiens
  misc_RNA (1)...(19): siRNA sense strand
caguuuggaucaacaguua

SEQ ID NO: 44855 - RNA, 19 nt, Homo sapiens
  misc_RNA (1)...(19): siRNA sense strand
gcaauuagaguaccaggaa

SEQ ID NO: 44856 - RNA, 19 nt, Homo sapiens
  misc_RNA (1)...(19): siRNA sense strand
ucacucaucugcugaaugu

SEQ ID NO: 44857 - RNA, 19 nt, Homo sapiens
  misc_RNA (1)...(19): siRNA sense strand
ucacucaucugcugaaugu

SEQ ID NO: 44858 - RNA, 19 nt, Homo sapiens
  misc_RNA (1)...(19): siRNA sense strand
ucacucaucugcugaaugu

SEQ ID NO: 44859 - RNA, 19 nt, Homo sapiens
  misc_RNA (1)...(19): siRNA sense strand
acacguaucucuauaucuu

SEQ ID NO: 44860 - RNA, 19 nt, Homo sapiens
  misc_RNA (1)...(19): siRNA sense strand
gaggacacguaucucuaua

SEQ ID NO: 44861 - RNA, 19 nt, Homo sapiens
  misc_RNA (1)...(19): siRNA sense strand
ggacacguaucucuauauc

SEQ ID NO: 44862 - RNA, 19 nt, Homo sapiens
  misc_RNA (1)...(19): siRNA sense strand
ccagagcaguuuccauuug

SEQ ID NO: 44863 - RNA, 19 nt, Homo sapiens
  misc_RNA (1)...(19): siRNA sense strand
cgaaggaguuagaaaugaa

SEQ ID NO: 44864 - RNA, 19 nt, Homo sapiens
  misc_RNA (1)...(19): siRNA sense strand
gcaucugacuuucccauug

SEQ ID NO: 44865 - RNA, 19 nt, Homo sapiens
  misc_RNA (1)...(19): siRNA sense strand
ugucuuggcuggaaugaaa

SEQ ID NO: 44866 - RNA, 19 nt, Homo sapiens
  misc_RNA (1)...(19): siRNA sense strand
gcaucugacuuucccauug

SEQ ID NO: 44867 - RNA, 19 nt, Homo sapiens
  misc_RNA (1)...(19): siRNA sense strand
gcaucugacuuucccauug

SEQ ID NO: 44868 - RNA, 19 nt, Homo sapiens
  misc_RNA (1)...(19): siRNA sense strand
caguucggaucccaaauua

SEQ ID NO: 44869 - RNA, 19 nt, Homo sapiens
  misc_RNA (1)...(19): siRNA sense strand
gaaagguguuugagcuugu

SEQ ID NO: 44870 - RNA, 19 nt, Homo sapiens
  misc_RNA (1)...(19): siRNA sense strand
ggacaucuuuaaaguacga

SEQ ID NO: 44871 - RNA, 19 nt, Homo sapiens
  misc_RNA (1)...(19): siRNA sense strand
gaaagguguuugagcuugu

SEQ ID NO: 44872 - RNA, 19 nt, Homo sapiens
  misc_RNA (1)...(19): siRNA sense strand
ggacaucuuuaaaguacga

SEQ ID NO: 44873 - RNA, 19 nt, Homo sapiens
  misc_RNA (1)...(19): siRNA sense strand
gaaagguguuugagcuugu

SEQ ID NO: 44874 - RNA, 19 nt, Homo sapiens
  misc_RNA (1)...(19): siRNA sense strand
ggacaucuuuaaaguacga

SEQ ID NO: 44875 - RNA, 19 nt, Homo sapiens
  misc_RNA (1)...(19): siRNA sense strand
gaaagguguuugagcuugu

SEQ ID NO: 44876 - RNA, 19 nt, Homo sapiens
  misc_RNA (1)...(19): siRNA sense strand
uaaaggauaccgacucauu

SEQ ID NO: 44877 - RNA, 19 nt, Homo sapiens
  misc_RNA (1)...(19): siRNA sense strand
gaucaaaggcauccaguuc

SEQ ID NO: 44878 - RNA, 19 nt, Homo sapiens
  misc_RNA (1)...(19): siRNA sense strand
gaacucugcaaacaaauga

SEQ ID NO: 44879 - RNA, 19 nt, Homo sapiens
  misc_RNA (1)...(19): siRNA sense strand
gcacagcuccagaaguuga

SEQ ID NO: 44880 - RNA, 19 nt, Homo sapiens
  misc_RNA (1)...(19): siRNA sense strand
uuaaagggcaguuccguua

SEQ ID NO: 44881 - RNA, 19 nt, Homo sapiens
  misc_RNA (1)...(19): siRNA sense strand
gaauauugguaucugacaa

SEQ ID NO: 44882 - RNA, 19 nt, Homo sapiens
  misc_RNA (1)...(19): siRNA sense strand
gaauauugguaucugacaa

SEQ ID NO: 44883 - RNA, 19 nt, Homo sapiens
  misc_RNA (1)...(19): siRNA sense strand
gaauauugguaucugacaa

SEQ ID NO: 44884 - RNA, 19 nt, Homo sapiens
  misc_RNA (1)...(19): siRNA sense strand
gaauauugguaucugacaa

SEQ ID NO: 44885 - RNA, 19 nt, Homo sapiens
  misc_RNA (1)...(19): siRNA sense strand
ucaauggaauggugcauau

SEQ ID NO: 44886 - RNA, 19 nt, Homo sapiens
  misc_RNA (1)...(19): siRNA sense strand
cuaccaaccuaacugauga

SEQ ID NO: 44887 - RNA, 19 nt, Homo sapiens
  misc_RNA (1)...(19): siRNA sense strand
guccuacgaucccaauuaa

SEQ ID NO: 44888 - RNA, 19 nt, Homo sapiens
  misc_RNA (1)...(19): siRNA sense strand
cgugugcuauuuccacuua

SEQ ID NO: 44889 - RNA, 19 nt, Homo sapiens
  misc_RNA (1)...(19): siRNA sense strand
guucggaucccaaauuaaa

SEQ ID NO: 44890 - RNA, 19 nt, Homo sapiens
  misc_RNA (1)...(19): siRNA sense strand
gcaacaauagaacaucuuu

SEQ ID NO: 44891 - RNA, 19 nt, Homo sapiens
  misc_RNA (1)...(19): siRNA sense strand
ggaaugagaagccuuugga

SEQ ID NO: 44892 - RNA, 19 nt, Homo sapiens
  misc_RNA (1)...(19): siRNA sense strand
gcaguuccguuagucauug

SEQ ID NO: 44893 - RNA, 19 nt, Homo sapiens
  misc_RNA (1)...(19): siRNA sense strand
gcaccaacagagagaauuu

SEQ ID NO: 44894 - RNA, 19 nt, Homo sapiens
  misc_RNA (1)...(19): siRNA sense strand
gcaccaacagagagaauuu

SEQ ID NO: 44895 - RNA, 19 nt, Homo sapiens
  misc_RNA (1)...(19): siRNA sense strand
gcaccaacagagagaauuu

SEQ ID NO: 44896 - RNA, 19 nt, Homo sapiens
  misc_RNA (1)...(19): siRNA sense strand
gcaccaacagagagaauuu

SEQ ID NO: 44897 - RNA, 19 nt, Homo sapiens
  misc_RNA (1)...(19): siRNA sense strand
gggaggccauucucuauca

SEQ ID NO: 44898 - RNA, 19 nt, Homo sapiens
  misc_RNA (1)...(19): siRNA sense strand
ccauuuacauucucaagga

SEQ ID NO: 44899 - RNA, 19 nt, Homo sapiens
  misc_RNA (1)...(19): siRNA sense strand
gggaggccauucucuauca

SEQ ID NO: 44900 - RNA, 19 nt, Homo sapiens
  misc_RNA (1)...(19): siRNA sense strand
gggaggccauucucuauca

SEQ ID NO: 44901 - RNA, 19 nt, Homo sapiens
  misc_RNA (1)...(19): siRNA sense strand
ucccaaagaugucuguaaa

SEQ ID NO: 44902 - RNA, 19 nt, Homo sapiens
  misc_RNA (1)...(19): siRNA sense strand
cgaugaaggguuccgauua

SEQ ID NO: 44903 - RNA, 19 nt, Homo sapiens
  misc_RNA (1)...(19): siRNA sense strand
gaucccaauuaaugacuuu

SEQ ID NO: 44904 - RNA, 19 nt, Homo sapiens
  misc_RNA (1)...(19): siRNA sense strand
ucccaaagaugucuguaaa

SEQ ID NO: 44905 - RNA, 19 nt, Homo sapiens
  misc_RNA (1)...(19): siRNA sense strand
ucccaaagaugucuguaaa

SEQ ID NO: 44906 - RNA, 19 nt, Homo sapiens
  misc_RNA (1)...(19): siRNA sense strand
ugaauggaaucucgaagga

SEQ ID NO: 44907 - RNA, 19 nt, Homo sapiens
  misc_RNA (1)...(19): siRNA sense strand
ugucuuggcuggaauggaa

SEQ ID NO: 44908 - RNA, 19 nt, Homo sapiens
  misc_RNA (1)...(19): siRNA sense strand
guauaucacuauggagauu

SEQ ID NO: 44909 - RNA, 19 nt, Homo sapiens
  misc_RNA (1)...(19): siRNA sense strand
cagguuggauccagaauca

SEQ ID NO: 44910 - RNA, 19 nt, Homo sapiens
  misc_RNA (1)...(19): siRNA sense strand
ugucuuggcuggaauggaa

SEQ ID NO: 44911 - RNA, 19 nt, Homo sapiens
  misc_RNA (1)...(19): siRNA sense strand
cagguuggauccagaauca

SEQ ID NO: 44912 - RNA, 19 nt, Homo sapiens
  misc_RNA (1)...(19): siRNA sense strand
ugucuuggcuggaauggaa

SEQ ID NO: 44913 - RNA, 19 nt, Homo sapiens
  misc_RNA (1)...(19): siRNA sense strand
cagguuggauccagaauca

SEQ ID NO: 44914 - RNA, 19 nt, Homo sapiens
  misc_RNA (1)...(19): siRNA sense strand
aaaugaaguuguggaguuu

SEQ ID NO: 44915 - RNA, 19 nt, Homo sapiens
  misc_RNA (1)...(19): siRNA sense strand
gaacaucuuuucacaaugg

SEQ ID NO: 44916 - RNA, 19 nt, Homo sapiens
  misc_RNA (1)...(19): siRNA sense strand
uaagaaggcaccuauuugu

SEQ ID NO: 44917 - RNA, 19 nt, Homo sapiens
  misc_RNA (1)...(19): siRNA sense strand
gugaaaugauggcuuauua

SEQ ID NO: 44918 - RNA, 19 nt, Homo sapiens
  misc_RNA (1)...(19): siRNA sense strand
ccagugaaaugauggcuua

SEQ ID NO: 44919 - RNA, 19 nt, Homo sapiens
  misc_RNA (1)...(19): siRNA sense strand
gaggaugacuuguucuuug

SEQ ID NO: 44920 - RNA, 19 nt, Homo sapiens
  misc_RNA (1)...(19): siRNA sense strand
auaacaagcuggaauuuga

SEQ ID NO: 44921 - RNA, 19 nt, Homo sapiens
  misc_RNA (1)...(19): siRNA sense strand
ggugaugucugguccauau

SEQ ID NO: 44922 - RNA, 19 nt, Homo sapiens
  misc_RNA (1)...(19): siRNA sense strand
gcaaugaggaugacuuguu

SEQ ID NO: 44923 - RNA, 19 nt, Homo sapiens
  misc_RNA (1)...(19): siRNA sense strand
gaaaugauggcuuauuaca

SEQ ID NO: 44924 - RNA, 19 nt, Homo sapiens
  misc_RNA (1)...(19): siRNA sense strand
uaccugagcucgccaguga

SEQ ID NO: 44925 - RNA, 19 nt, Homo sapiens
  misc_RNA (1)...(19): siRNA sense strand
caaugaggaugacuuguuc

SEQ ID NO: 44926 - RNA, 19 nt, Homo sapiens
  misc_RNA (1)...(19): siRNA sense strand
gagaagaaaguaaugacaa

SEQ ID NO: 44927 - RNA, 19 nt, Homo sapiens
  misc_RNA (1)...(19): siRNA sense strand
gacaggauauggagcaaca

SEQ ID NO: 44928 - RNA, 19 nt, Homo sapiens
  misc_RNA (1)...(19): siRNA sense strand
cagcaccucucaagcagaa

SEQ ID NO: 44929 - RNA, 19 nt, Homo sapiens
  misc_RNA (1)...(19): siRNA sense strand
caagugguguucuccaugu

SEQ ID NO: 44930 - RNA, 19 nt, Homo sapiens
  misc_RNA (1)...(19): siRNA sense strand
aaugauggcuuauuacagu

SEQ ID NO: 44931 - RNA, 19 nt, Homo sapiens
  misc_RNA (1)...(19): siRNA sense strand
gcugauggcccuaaacaga

SEQ ID NO: 44932 - RNA, 19 nt, Homo sapiens
  misc_RNA (1)...(19): siRNA sense strand
gaaaagcgauuugucuuca

SEQ ID NO: 44933 - RNA, 19 nt, Homo sapiens
  misc_RNA (1)...(19): siRNA sense strand
guacaaggagaagaaagua

SEQ ID NO: 44934 - RNA, 19 nt, Homo sapiens
  misc_RNA (1)...(19): siRNA sense strand
gcaccuguacgaucacuga

SEQ ID NO: 44935 - RNA, 19 nt, Homo sapiens
  misc_RNA (1)...(19): siRNA sense strand
ucaauaacaagcuggaauu

SEQ ID NO: 44936 - RNA, 19 nt, Homo sapiens
  misc_RNA (1)...(19): siRNA sense strand
gcaauuugugucuuccuaa

SEQ ID NO: 44937 - RNA, 19 nt, Homo sapiens
  misc_RNA (1)...(19): siRNA sense strand
uaacugacuucaccaugca

SEQ ID NO: 44938 - RNA, 19 nt, Homo sapiens
  misc_RNA (1)...(19): siRNA sense strand
cgaugcaccuguacgauca

SEQ ID NO: 44939 - RNA, 19 nt, Homo sapiens
  misc_RNA (1)...(19): siRNA sense strand
agaaugaccugagcaccuu

SEQ ID NO: 44940 - RNA, 19 nt, Homo sapiens
  misc_RNA (1)...(19): siRNA sense strand
ccaaagaagaagauggaaa

SEQ ID NO: 44941 - RNA, 19 nt, Homo sapiens
  misc_RNA (1)...(19): siRNA sense strand
guaccuguccugcguguug

SEQ ID NO: 44942 - RNA, 19 nt, Homo sapiens
  misc_RNA (1)...(19): siRNA sense strand
ggauauggagcaacaagug

SEQ ID NO: 44943 - RNA, 19 nt, Homo sapiens
  misc_RNA (1)...(19): siRNA sense strand
gaugucugguccauaugaa

SEQ ID NO: 44944 - RNA, 19 nt, Homo sapiens
  misc_RNA (1)...(19): siRNA sense strand
gaccugagcaccuucuuuc

SEQ ID NO: 44945 - RNA, 19 nt, Homo sapiens
  misc_RNA (1)...(19): siRNA sense strand
gaugauaagcccacucuac

SEQ ID NO: 44946 - RNA, 19 nt, Homo sapiens
  misc_RNA (1)...(19): siRNA sense strand
ugacuucaccaugcaauuu

SEQ ID NO: 44947 - RNA, 19 nt, Homo sapiens
  misc_RNA (1)...(19): siRNA sense strand
ggagaagaaaguaaugaca

SEQ ID NO: 44948 - RNA, 19 nt, Homo sapiens
  misc_RNA (1)...(19): siRNA sense strand
caauaacaagcuggaauuu

SEQ ID NO: 44949 - RNA, 19 nt, Homo sapiens
  misc_RNA (1)...(19): siRNA sense strand
caaagaagaagauggaaaa

SEQ ID NO: 44950 - RNA, 19 nt, Homo sapiens
  misc_RNA (1)...(19): siRNA sense strand
gcucgccagugaaaugaug

SEQ ID NO: 44951 - RNA, 19 nt, Homo sapiens
  misc_RNA (1)...(19): siRNA sense strand
gcacgaugcaccuguacga

SEQ ID NO: 44952 - RNA, 19 nt, Homo sapiens
  misc_RNA (1)...(19): siRNA sense strand
gccaggauauaacugacuu

SEQ ID NO: 44953 - RNA, 19 nt, Homo sapiens
  misc_RNA (1)...(19): siRNA sense strand
aggaugacuuguucuuuga

SEQ ID NO: 44954 - RNA, 19 nt, Homo sapiens
  misc_RNA (1)...(19): siRNA sense strand
caugggauaacgaggcuua

SEQ ID NO: 44955 - RNA, 19 nt, Homo sapiens
  misc_RNA (1)...(19): siRNA sense strand
ugaagcugauggcccuaaa

SEQ ID NO: 44956 - RNA, 19 nt, Homo sapiens
  misc_RNA (1)...(19): siRNA sense strand
gcccuaaacagaugaagug

SEQ ID NO: 44957 - RNA, 19 nt, Homo sapiens
  misc_RNA (1)...(19): siRNA sense strand
gaugacuuguucuuugaag

SEQ ID NO: 44958 - RNA, 19 nt, Homo sapiens
  misc_RNA (1)...(19): siRNA sense strand
caucagcaccucucaagca

SEQ ID NO: 44959 - RNA, 19 nt, Homo sapiens
  misc_RNA (1)...(19): siRNA sense strand
uggacaagcugaggaagau

SEQ ID NO: 44960 - RNA, 19 nt, Homo sapiens
  misc_RNA (1)...(19): siRNA sense strand
ugauggcccuaaacagaug

SEQ ID NO: 44961 - RNA, 19 nt, Homo sapiens
  misc_RNA (1)...(19): siRNA sense strand
ccaugcaauuugugucuuc

SEQ ID NO: 44962 - RNA, 19 nt, Homo sapiens
  misc_RNA (1)...(19): siRNA sense strand
ggagaguguagaucccaaa

SEQ ID NO: 44963 - RNA, 19 nt, Homo sapiens
  misc_RNA (1)...(19): siRNA sense strand
acaaggagaagaaaguaau

SEQ ID NO: 44964 - RNA, 19 nt, Homo sapiens
  misc_RNA (1)...(19): siRNA sense strand
gagcucgccagugaaauga

SEQ ID NO: 44965 - RNA, 19 nt, Homo sapiens
  misc_RNA (1)...(19): siRNA sense strand
caaggagaagaaaguaaug

SEQ ID NO: 44966 - RNA, 19 nt, Homo sapiens
  misc_RNA (1)...(19): siRNA sense strand
uguccugcguguugaaaga

SEQ ID NO: 44967 - RNA, 19 nt, Homo sapiens
  misc_RNA (1)...(19): siRNA sense strand
ugcaauuugugucuuccua

SEQ ID NO: 44968 - RNA, 19 nt, Homo sapiens
  misc_RNA (1)...(19): siRNA sense strand
cuucuuucccuucaucuuu

SEQ ID NO: 44969 - RNA, 19 nt, Homo sapiens
  misc_RNA (1)...(19): siRNA sense strand
guacaucagcaccucucaa

SEQ ID NO: 44970 - RNA, 19 nt, Homo sapiens
  misc_RNA (1)...(19): siRNA sense strand
cacagaccuuccaggagaa

SEQ ID NO: 44971 - RNA, 19 nt, Homo sapiens
  misc_RNA (1)...(19): siRNA sense strand
gacuucaccaugcaauuug

SEQ ID NO: 44972 - RNA, 19 nt, Homo sapiens
  misc_RNA (1)...(19): siRNA sense strand
gaagauggaaaagcgauuu

SEQ ID NO: 44973 - RNA, 19 nt, Homo sapiens
  misc_RNA (1)...(19): siRNA sense strand
ugagcucgccagugaaaug

SEQ ID NO: 44974 - RNA, 19 nt, Homo sapiens
  misc_RNA (1)...(19): siRNA sense strand
gaaucuccgaccaccacua

SEQ ID NO: 44975 - RNA, 19 nt, Homo sapiens
  misc_RNA (1)...(19): siRNA sense strand
ggaaaagcgauuugucuuc

SEQ ID NO: 44976 - RNA, 19 nt, Homo sapiens
  misc_RNA (1)...(19): siRNA sense strand
ugaggaugacuuguucuuu

SEQ ID NO: 44977 - RNA, 19 nt, Homo sapiens
  misc_RNA (1)...(19): siRNA sense strand
ugaccugagcaccuucuuu

SEQ ID NO: 44978 - RNA, 19 nt, Homo sapiens
  misc_RNA (1)...(19): siRNA sense strand
ggaccucugcccucuggau

SEQ ID NO: 44979 - RNA, 19 nt, Homo sapiens
  misc_RNA (1)...(19): siRNA sense strand
ggaugacuuguucuuugaa

SEQ ID NO: 44980 - RNA, 19 nt, Homo sapiens
  misc_RNA (1)...(19): siRNA sense strand
aauaacaagcuggaauuug

SEQ ID NO: 44981 - RNA, 19 nt, Homo sapiens
  misc_RNA (1)...(19): siRNA sense strand
aaagcgauuugucuucaac

SEQ ID NO: 44982 - RNA, 19 nt, Homo sapiens
  misc_RNA (1)...(19): siRNA sense strand
ccugagcucgccagugaaa

SEQ ID NO: 44983 - RNA, 19 nt, Homo sapiens
  misc_RNA (1)...(19): siRNA sense strand
cuccgggacucacagcaaa

SEQ ID NO: 44984 - RNA, 19 nt, Homo sapiens
  misc_RNA (1)...(19): siRNA sense strand
cugguucccugcccacaga

SEQ ID NO: 44985 - RNA, 19 nt, Homo sapiens
  misc_RNA (1)...(19): siRNA sense strand
uacaaggagaagaaaguaa

SEQ ID NO: 44986 - RNA, 19 nt, Homo sapiens
  misc_RNA (1)...(19): siRNA sense strand
gcaccuucuuucccuucau

SEQ ID NO: 44987 - RNA, 19 nt, Homo sapiens
  misc_RNA (1)...(19): siRNA sense strand
ugaugucugguccauauga

SEQ ID NO: 44988 - RNA, 19 nt, Homo sapiens
  misc_RNA (1)...(19): siRNA sense strand
gcggccaggauauaacuga

SEQ ID NO: 44989 - RNA, 19 nt, Homo sapiens
  misc_RNA (1)...(19): siRNA sense strand
caccuucuuucccuucauc

SEQ ID NO: 44990 - RNA, 19 nt, Homo sapiens
  misc_RNA (1)...(19): siRNA sense strand
cagaaaacaugcccgucuu

SEQ ID NO: 44991 - RNA, 19 nt, Homo sapiens
  misc_RNA (1)...(19): siRNA sense strand
cuccauguccuuuguacaa

SEQ ID NO: 44992 - RNA, 19 nt, Homo sapiens
  misc_RNA (1)...(19): siRNA sense strand
gguguucuccauguccuuu

SEQ ID NO: 44993 - RNA, 19 nt, Homo sapiens
  misc_RNA (1)...(19): siRNA sense strand
ccuguacgaucacugaacu

SEQ ID NO: 44994 - RNA, 19 nt, Homo sapiens
  misc_RNA (1)...(19): siRNA sense strand
ggaacuaucuucuuucauu

SEQ ID NO: 44995 - RNA, 19 nt, Homo sapiens
  misc_RNA (1)...(19): siRNA sense strand
ggaaagauccaaaggaaua

SEQ ID NO: 44996 - RNA, 19 nt, Homo sapiens
  misc_RNA (1)...(19): siRNA sense strand
ccaaagagcugccugaaca

SEQ ID NO: 44997 - RNA, 19 nt, Homo sapiens
  misc_RNA (1)...(19): siRNA sense strand
ccaaagucauggauaagua

SEQ ID NO: 44998 - RNA, 19 nt, Homo sapiens
  misc_RNA (1)...(19): siRNA sense strand
gaacaggucagccaacuug

SEQ ID NO: 44999 - RNA, 19 nt, Homo sapiens
  misc_RNA (1)...(19): siRNA sense strand
gaacuaucuucuuucauug

SEQ ID NO: 45000 - RNA, 19 nt, Homo sapiens
  misc_RNA (1)...(19): siRNA sense strand
gcuaagggcccucuacuaa

SEQ ID NO: 45001 - RNA, 19 nt, Homo sapiens
  misc_RNA (1)...(19): siRNA sense strand
aaagagagacuccagcuua

SEQ ID NO: 45002 - RNA, 19 nt, Homo sapiens
  misc_RNA (1)...(19): siRNA sense strand
uggcaaagcugguuaacaa

SEQ ID NO: 45003 - RNA, 19 nt, Homo sapiens
  misc_RNA (1)...(19): siRNA sense strand
gccacuagcugaagauauu

SEQ ID NO: 45004 - RNA, 19 nt, Homo sapiens
  misc_RNA (1)...(19): siRNA sense strand
ccacaaagaauucuaaguu

SEQ ID NO: 45005 - RNA, 19 nt, Homo sapiens
  misc_RNA (1)...(19): siRNA sense strand
caggaaagauccaaaggaa

SEQ ID NO: 45006 - RNA, 19 nt, Homo sapiens
  misc_RNA (1)...(19): siRNA sense strand
gaauaaagucugcaaggaa

SEQ ID NO: 45007 - RNA, 19 nt, Homo sapiens
  misc_RNA (1)...(19): siRNA sense strand
ucagcaaucucauaaaguu

SEQ ID NO: 45008 - RNA, 19 nt, Homo sapiens
  misc_RNA (1)...(19): siRNA sense strand
gaaaggaggacuucacauc

SEQ ID NO: 45009 - RNA, 19 nt, Homo sapiens
  misc_RNA (1)...(19): siRNA sense strand
acaccaaagucauggauaa

SEQ ID NO: 45010 - RNA, 19 nt, Homo sapiens
  misc_RNA (1)...(19): siRNA sense strand
gacaauuuauccacaaaga

SEQ ID NO: 45011 - RNA, 19 nt, Homo sapiens
  misc_RNA (1)...(19): siRNA sense strand
ucaguuacaccaagaguua

SEQ ID NO: 45012 - RNA, 19 nt, Homo sapiens
  misc_RNA (1)...(19): siRNA sense strand
caagaacuaugugcagauu

SEQ ID NO: 45013 - RNA, 19 nt, Homo sapiens
  misc_RNA (1)...(19): siRNA sense strand
gacuccagcuuaaacauuu

SEQ ID NO: 45014 - RNA, 19 nt, Homo sapiens
  misc_RNA (1)...(19): siRNA sense strand
gcaaggaauucucccaucu

SEQ ID NO: 45015 - RNA, 19 nt, Homo sapiens
  misc_RNA (1)...(19): siRNA sense strand
gcucagcaaucucauaaag

SEQ ID NO: 45016 - RNA, 19 nt, Homo sapiens
  misc_RNA (1)...(19): siRNA sense strand
gaaaguaauucuccauucc

SEQ ID NO: 45017 - RNA, 19 nt, Homo sapiens
  misc_RNA (1)...(19): siRNA sense strand
cugcauggcugcucugaaa

SEQ ID NO: 45018 - RNA, 19 nt, Homo sapiens
  misc_RNA (1)...(19): siRNA sense strand
gaacuggcaaagcugguua

SEQ ID NO: 45019 - RNA, 19 nt, Homo sapiens
  misc_RNA (1)...(19): siRNA sense strand
ucaccacucugucaaauag

SEQ ID NO: 45020 - RNA, 19 nt, Homo sapiens
  misc_RNA (1)...(19): siRNA sense strand
caacugcuguuccauaaac

SEQ ID NO: 45021 - RNA, 19 nt, Homo sapiens
  misc_RNA (1)...(19): siRNA sense strand
uaagggcccucuacuaaag

SEQ ID NO: 45022 - RNA, 19 nt, Homo sapiens
  misc_RNA (1)...(19): siRNA sense strand
aaacaaagaugugugugau

SEQ ID NO: 45023 - RNA, 19 nt, Homo sapiens
  misc_RNA (1)...(19): siRNA sense strand
ucacuaguccuguacagua

SEQ ID NO: 45024 - RNA, 19 nt, Homo sapiens
  misc_RNA (1)...(19): siRNA sense strand
ugaaugcugugauguugaa

SEQ ID NO: 45025 - RNA, 19 nt, Homo sapiens
  misc_RNA (1)...(19): siRNA sense strand
ucacaucucugucacuagu

SEQ ID NO: 45026 - RNA, 19 nt, Homo sapiens
  misc_RNA (1)...(19): siRNA sense strand
aaacucaccuccucuuuac

SEQ ID NO: 45027 - RNA, 19 nt, Homo sapiens
  misc_RNA (1)...(19): siRNA sense strand
agaacuaugugcagauuau

SEQ ID NO: 45028 - RNA, 19 nt, Homo sapiens
  misc_RNA (1)...(19): siRNA sense strand
ggugaaugcugugauguug

SEQ ID NO: 45029 - RNA, 19 nt, Homo sapiens
  misc_RNA (1)...(19): siRNA sense strand
aagagagacuccagcuuaa

SEQ ID NO: 45030 - RNA, 19 nt, Homo sapiens
  misc_RNA (1)...(19): siRNA sense strand
ugaaaguaauucuccauuc

SEQ ID NO: 45031 - RNA, 19 nt, Homo sapiens
  misc_RNA (1)...(19): siRNA sense strand
gccaaguccugugaaagua

SEQ ID NO: 45032 - RNA, 19 nt, Homo sapiens
  misc_RNA (1)...(19): siRNA sense strand
ggacuucacaucucuguca

SEQ ID NO: 45033 - RNA, 19 nt, Homo sapiens
  misc_RNA (1)...(19): siRNA sense strand
caaaugaugaaaucuguga

SEQ ID NO: 45034 - RNA, 19 nt, Homo sapiens
  misc_RNA (1)...(19): siRNA sense strand
caaaggaauaugcuaauca

SEQ ID NO: 45035 - RNA, 19 nt, Homo sapiens
  misc_RNA (1)...(19): siRNA sense strand
ugacaagggacaagaacua

SEQ ID NO: 45036 - RNA, 19 nt, Homo sapiens
  misc_RNA (1)...(19): siRNA sense strand
aauaaagucugcaaggaau

SEQ ID NO: 45037 - RNA, 19 nt, Homo sapiens
  misc_RNA (1)...(19): siRNA sense strand
gggcugacccugacugcua

SEQ ID NO: 45038 - RNA, 19 nt, Homo sapiens
  misc_RNA (1)...(19): siRNA sense strand
uuacugugauucagagauu

SEQ ID NO: 45039 - RNA, 19 nt, Homo sapiens
  misc_RNA (1)...(19): siRNA sense strand
caaacaaagauguguguga

SEQ ID NO: 45040 - RNA, 19 nt, Homo sapiens
  misc_RNA (1)...(19): siRNA sense strand
guaaaacucugugacaauu

SEQ ID NO: 45041 - RNA, 19 nt, Homo sapiens
  misc_RNA (1)...(19): siRNA sense strand
guacuugagccaacccuaa

SEQ ID NO: 45042 - RNA, 19 nt, Homo sapiens
  misc_RNA (1)...(19): siRNA sense strand
agaguuaucuuucuauggu

SEQ ID NO: 45043 - RNA, 19 nt, Homo sapiens
  misc_RNA (1)...(19): siRNA sense strand
uuacuaacauccucuccaa

SEQ ID NO: 45044 - RNA, 19 nt, Homo sapiens
  misc_RNA (1)...(19): siRNA sense strand
cacaaaugaugaaaucugu

SEQ ID NO: 45045 - RNA, 19 nt, Homo sapiens
  misc_RNA (1)...(19): siRNA sense strand
gauguagaguugcccacaa

SEQ ID NO: 45046 - RNA, 19 nt, Homo sapiens
  misc_RNA (1)...(19): siRNA sense strand
aauagagucugcucacaau

SEQ ID NO: 45047 - RNA, 19 nt, Homo sapiens
  misc_RNA (1)...(19): siRNA sense strand
agaauaaagucugcaagga

SEQ ID NO: 45048 - RNA, 19 nt, Homo sapiens
  misc_RNA (1)...(19): siRNA sense strand
ccaaaggaauaugcuaauc

SEQ ID NO: 45049 - RNA, 19 nt, Homo sapiens
  misc_RNA (1)...(19): siRNA sense strand
caccuccucuuuacuguga

SEQ ID NO: 45050 - RNA, 19 nt, Homo sapiens
  misc_RNA (1)...(19): siRNA sense strand
ucaacuaccuguuuuaaug

SEQ ID NO: 45051 - RNA, 19 nt, Homo sapiens
  misc_RNA (1)...(19): siRNA sense strand
gaaaucaaggcucagcaau

SEQ ID NO: 45052 - RNA, 19 nt, Homo sapiens
  misc_RNA (1)...(19): siRNA sense strand
gcucacaauaugcugcuua

SEQ ID NO: 45053 - RNA, 19 nt, Homo sapiens
  misc_RNA (1)...(19): siRNA sense strand
caaauagagucugcucaca

SEQ ID NO: 45054 - RNA, 19 nt, Homo sapiens
  misc_RNA (1)...(19): siRNA sense strand
gaaagauccaaaggaauau

SEQ ID NO: 45055 - RNA, 19 nt, Homo sapiens
  misc_RNA (1)...(19): siRNA sense strand
uccaacugcuguuccauaa

SEQ ID NO: 45056 - RNA, 19 nt, Homo sapiens
  misc_RNA (1)...(19): siRNA sense strand
caagggacaagaacuaugu

SEQ ID NO: 45057 - RNA, 19 nt, Homo sapiens
  misc_RNA (1)...(19): siRNA sense strand
gaaguauuccucaguaagg

SEQ ID NO: 45058 - RNA, 19 nt, Homo sapiens
  misc_RNA (1)...(19): siRNA sense strand
aaucaaggcucagcaaucu

SEQ ID NO: 45059 - RNA, 19 nt, Homo sapiens
  misc_RNA (1)...(19): siRNA sense strand
gaaagagagacuccagcuu

SEQ ID NO: 45060 - RNA, 19 nt, Homo sapiens
  misc_RNA (1)...(19): siRNA sense strand
ucagccaacuugugaagga

SEQ ID NO: 45061 - RNA, 19 nt, Homo sapiens
  misc_RNA (1)...(19): siRNA sense strand
aagauugcauggccaaaga

SEQ ID NO: 45062 - RNA, 19 nt, Homo sapiens
  misc_RNA (1)...(19): siRNA sense strand
cuaacauccucuccaaaug

SEQ ID NO: 45063 - RNA, 19 nt, Homo sapiens
  misc_RNA (1)...(19): siRNA sense strand
aagagggccuggaacgaaa

SEQ ID NO: 45064 - RNA, 19 nt, Homo sapiens
  misc_RNA (1)...(19): siRNA sense strand
cugcugaucuggaggaugu

SEQ ID NO: 45065 - RNA, 19 nt, Homo sapiens
  misc_RNA (1)...(19): siRNA sense strand
gaguuaucuuucuauggua

SEQ ID NO: 45066 - RNA, 19 nt, Homo sapiens
  misc_RNA (1)...(19): siRNA sense strand
gacccugacugcuaugaca

SEQ ID NO: 45067 - RNA, 19 nt, Homo sapiens
  misc_RNA (1)...(19): siRNA sense strand
gcuuccagauguagaguug

SEQ ID NO: 45068 - RNA, 19 nt, Homo sapiens
  misc_RNA (1)...(19): siRNA sense strand
cacaggaauucccuaccua

SEQ ID NO: 45069 - RNA, 19 nt, Homo sapiens
  misc_RNA (1)...(19): siRNA sense strand
caaguccugugaaaguaau

SEQ ID NO: 45070 - RNA, 19 nt, Homo sapiens
  misc_RNA (1)...(19): siRNA sense strand
gaaacaccagccacaggaa

SEQ ID NO: 45071 - RNA, 19 nt, Homo sapiens
  misc_RNA (1)...(19): siRNA sense strand
gaacuaugugcagauuauu

SEQ ID NO: 45072 - RNA, 19 nt, Homo sapiens
  misc_RNA (1)...(19): siRNA sense strand
aaggaacuaucuucuuuca

SEQ ID NO: 45073 - RNA, 19 nt, Homo sapiens
  misc_RNA (1)...(19): siRNA sense strand
caaagucauggauaaguau

SEQ ID NO: 45074 - RNA, 19 nt, Homo sapiens
  misc_RNA (1)...(19): siRNA sense strand
ccaggaaacaccaaaguca

SEQ ID NO: 45075 - RNA, 19 nt, Homo sapiens
  misc_RNA (1)...(19): siRNA sense strand
cuucacaucucugucacua

SEQ ID NO: 45076 - RNA, 19 nt, Homo sapiens
  misc_RNA (1)...(19): siRNA sense strand
gugacaauuuauccacaaa

SEQ ID NO: 45077 - RNA, 19 nt, Homo sapiens
  misc_RNA (1)...(19): siRNA sense strand
ccacaaaugaugaaaucug

SEQ ID NO: 45078 - RNA, 19 nt, Homo sapiens
  misc_RNA (1)...(19): siRNA sense strand
gcugugagucugccucuga

SEQ ID NO: 45079 - RNA, 19 nt, Homo sapiens
  misc_RNA (1)...(19): siRNA sense strand
ccaaguccugugaaaguaa

SEQ ID NO: 45080 - RNA, 19 nt, Homo sapiens
  misc_RNA (1)...(19): siRNA sense strand
cuaagggcccucuacuaaa

SEQ ID NO: 45081 - RNA, 19 nt, Homo sapiens
  misc_RNA (1)...(19): siRNA sense strand
ugugugcacuuacuucaug

SEQ ID NO: 45082 - RNA, 19 nt, Homo sapiens
  misc_RNA (1)...(19): siRNA sense strand
cagcaaucucauaaaguua

SEQ ID NO: 45083 - RNA, 19 nt, Homo sapiens
  misc_RNA (1)...(19): siRNA sense strand
aaagagggccuggaacgaa

SEQ ID NO: 45084 - RNA, 19 nt, Homo sapiens
  misc_RNA (1)...(19): siRNA sense strand
gagucugccucugaagauu

SEQ ID NO: 45085 - RNA, 19 nt, Homo sapiens
  misc_RNA (1)...(19): siRNA sense strand
ccacaggaauucccuaccu

SEQ ID NO: 45086 - RNA, 19 nt, Homo sapiens
  misc_RNA (1)...(19): siRNA sense strand
gaagauugcauggccaaag

SEQ ID NO: 45087 - RNA, 19 nt, Homo sapiens
  misc_RNA (1)...(19): siRNA sense strand
cacaauaugcugcuuaugg

SEQ ID NO: 45088 - RNA, 19 nt, Homo sapiens
  misc_RNA (1)...(19): siRNA sense strand
agagucugcucacaauaug

SEQ ID NO: 45089 - RNA, 19 nt, Homo sapiens
  misc_RNA (1)...(19): siRNA sense strand
uagagucugcucacaauau

SEQ ID NO: 45090 - RNA, 19 nt, Homo sapiens
  misc_RNA (1)...(19): siRNA sense strand
gauccaaaggaauaugcua

SEQ ID NO: 45091 - RNA, 19 nt, Homo sapiens
  misc_RNA (1)...(19): siRNA sense strand
caggucagccaacuuguga

SEQ ID NO: 45092 - RNA, 19 nt, Homo sapiens
  misc_RNA (1)...(19): siRNA sense strand
uggacaugcuuuagagaga

SEQ ID NO: 45093 - RNA, 19 nt, Homo sapiens
  misc_RNA (1)...(19): siRNA sense strand
guauacauuugaacuaagc

SEQ ID NO: 45094 - RNA, 19 nt, Homo sapiens
  misc_RNA (1)...(19): siRNA sense strand
gaagagggcugagaauuca

SEQ ID NO: 45095 - RNA, 19 nt, Homo sapiens
  misc_RNA (1)...(19): siRNA sense strand
gaacugagagugauugaga

SEQ ID NO: 45096 - RNA, 19 nt, Homo sapiens
  misc_RNA (1)...(19): siRNA sense strand
gccaaggagugcuaaagaa

SEQ ID NO: 45097 - RNA, 19 nt, Homo sapiens
  misc_RNA (1)...(19): siRNA sense strand
ucaaagaacugagagugau

SEQ ID NO: 45098 - RNA, 19 nt, Homo sapiens
  misc_RNA (1)...(19): siRNA sense strand
guaaagcuuucugauggaa

SEQ ID NO: 45099 - RNA, 19 nt, Homo sapiens
  misc_RNA (1)...(19): siRNA sense strand
gcauaaagacauacuccaa

SEQ ID NO: 45100 - RNA, 19 nt, Homo sapiens
  misc_RNA (1)...(19): siRNA sense strand
cauaaagacauacuccaaa

SEQ ID NO: 45101 - RNA, 19 nt, Homo sapiens
  misc_RNA (1)...(19): siRNA sense strand
agacauacuccaaaccuuu

SEQ ID NO: 45102 - RNA, 19 nt, Homo sapiens
  misc_RNA (1)...(19): siRNA sense strand
gucagugcauaaagacaua

SEQ ID NO: 45103 - RNA, 19 nt, Homo sapiens
  misc_RNA (1)...(19): siRNA sense strand
ugaagagggcugagaauuc

SEQ ID NO: 45104 - RNA, 19 nt, Homo sapiens
  misc_RNA (1)...(19): siRNA sense strand
ggaccacacugcgccaaca

SEQ ID NO: 45105 - RNA, 19 nt, Homo sapiens
  misc_RNA (1)...(19): siRNA sense strand
gcagaggguuguggagaag

SEQ ID NO: 45106 - RNA, 19 nt, Homo sapiens
  misc_RNA (1)...(19): siRNA sense strand
caaagaacugagagugauu

SEQ ID NO: 45107 - RNA, 19 nt, Homo sapiens
  misc_RNA (1)...(19): siRNA sense strand
aaagcuuucugauggaaga

SEQ ID NO: 45108 - RNA, 19 nt, Homo sapiens
  misc_RNA (1)...(19): siRNA sense strand
agaugucagugcauaaaga

SEQ ID NO: 45109 - RNA, 19 nt, Homo sapiens
  misc_RNA (1)...(19): siRNA sense strand
aaggagugcuaaagaacuu

SEQ ID NO: 45110 - RNA, 19 nt, Homo sapiens
  misc_RNA (1)...(19): siRNA sense strand
gccaacacagaaauuauug

SEQ ID NO: 45111 - RNA, 19 nt, Homo sapiens
  misc_RNA (1)...(19): siRNA sense strand
auaaagacauacuccaaac

SEQ ID NO: 45112 - RNA, 19 nt, Homo sapiens
  misc_RNA (1)...(19): siRNA sense strand
acacugcgccaacacagaa

SEQ ID NO: 45113 - RNA, 19 nt, Homo sapiens
  misc_RNA (1)...(19): siRNA sense strand
cgccaacacagaaauuauu

SEQ ID NO: 45114 - RNA, 19 nt, Homo sapiens
  misc_RNA (1)...(19): siRNA sense strand
uguaaagcuuucugaugga

SEQ ID NO: 45115 - RNA, 19 nt, Homo sapiens
  misc_RNA (1)...(19): siRNA sense strand
gacauacuccaaaccuuuc

SEQ ID NO: 45116 - RNA, 19 nt, Homo sapiens
  misc_RNA (1)...(19): siRNA sense strand
agaggguuguggagaaguu

SEQ ID NO: 45117 - RNA, 19 nt, Homo sapiens
  misc_RNA (1)...(19): siRNA sense strand
gcgccaacacagaaauuau

SEQ ID NO: 45118 - RNA, 19 nt, Homo sapiens
  misc_RNA (1)...(19): siRNA sense strand
acuuagaugucagugcaua

SEQ ID NO: 45119 - RNA, 19 nt, Homo sapiens
  misc_RNA (1)...(19): siRNA sense strand
ugcagaggguuguggagaa

SEQ ID NO: 45120 - RNA, 19 nt, Homo sapiens
  misc_RNA (1)...(19): siRNA sense strand
agagggcugagaauucaua

SEQ ID NO: 45121 - RNA, 19 nt, Homo sapiens
  misc_RNA (1)...(19): siRNA sense strand
uuggcagccuuccugauuu

SEQ ID NO: 45122 - RNA, 19 nt, Homo sapiens
  misc_RNA (1)...(19): siRNA sense strand
uggcagccuuccugauuuc

SEQ ID NO: 45123 - RNA, 19 nt, Homo sapiens
  misc_RNA (1)...(19): siRNA sense strand
cuuggcagccuuccugauu

SEQ ID NO: 45124 - RNA, 19 nt, Homo sapiens
  misc_RNA (1)...(19): siRNA sense strand
uuagaugucagugcauaaa

SEQ ID NO: 45125 - RNA, 19 nt, Homo sapiens
  misc_RNA (1)...(19): siRNA sense strand
aaagaacugagagugauug

SEQ ID NO: 45126 - RNA, 19 nt, Homo sapiens
  misc_RNA (1)...(19): siRNA sense strand
ccaaggagugcuaaagaac

SEQ ID NO: 45127 - RNA, 19 nt, Homo sapiens
  misc_RNA (1)...(19): siRNA sense strand
caaggagugcuaaagaacu

SEQ ID NO: 45128 - RNA, 19 nt, Homo sapiens
  misc_RNA (1)...(19): siRNA sense strand
aagacauacuccaaaccuu

SEQ ID NO: 45129 - RNA, 19 nt, Homo sapiens
  misc_RNA (1)...(19): siRNA sense strand
gagggcugagaauucauaa

SEQ ID NO: 45130 - RNA, 19 nt, Homo sapiens
  misc_RNA (1)...(19): siRNA sense strand
gcaaugaagugcuuucucu

SEQ ID NO: 45131 - RNA, 19 nt, Homo sapiens
  misc_RNA (1)...(19): siRNA sense strand
gaaucuggaugcaaagaau

SEQ ID NO: 45132 - RNA, 19 nt, Homo sapiens
  misc_RNA (1)...(19): siRNA sense strand
aaaccacauuugagaagua

SEQ ID NO: 45133 - RNA, 19 nt, Homo sapiens
  misc_RNA (1)...(19): siRNA sense strand
cuacuuguguuuacuucua

SEQ ID NO: 45134 - RNA, 19 nt, Homo sapiens
  misc_RNA (1)...(19): siRNA sense strand
caacugggugaauguaaua

SEQ ID NO: 45135 - RNA, 19 nt, Homo sapiens
  misc_RNA (1)...(19): siRNA sense strand
caaagaaugugaggaacug

SEQ ID NO: 45136 - RNA, 19 nt, Homo sapiens
  misc_RNA (1)...(19): siRNA sense strand
gaagccaacugggugaaug

SEQ ID NO: 45137 - RNA, 19 nt, Homo sapiens
  misc_RNA (1)...(19): siRNA sense strand
gaauuucgaaaccacauuu

SEQ ID NO: 45138 - RNA, 19 nt, Homo sapiens
  misc_RNA (1)...(19): siRNA sense strand
caaaguaacagcaaugaag

SEQ ID NO: 45139 - RNA, 19 nt, Homo sapiens
  misc_RNA (1)...(19): siRNA sense strand
ccacauuugagaaguauuu

SEQ ID NO: 45140 - RNA, 19 nt, Homo sapiens
  misc_RNA (1)...(19): siRNA sense strand
ggaguuacaaguuauuuca

SEQ ID NO: 45141 - RNA, 19 nt, Homo sapiens
  misc_RNA (1)...(19): siRNA sense strand
gaaaccacauuugagaagu

SEQ ID NO: 45142 - RNA, 19 nt, Homo sapiens
  misc_RNA (1)...(19): siRNA sense strand
gaugcaaguauucaugaua

SEQ ID NO: 45143 - RNA, 19 nt, Homo sapiens
  misc_RNA (1)...(19): siRNA sense strand
guccggagaugcaaguauu

SEQ ID NO: 45144 - RNA, 19 nt, Homo sapiens
  misc_RNA (1)...(19): siRNA sense strand
guauuuccauccagugcua

SEQ ID NO: 45145 - RNA, 19 nt, Homo sapiens
  misc_RNA (1)...(19): siRNA sense strand
uaaugggaauguaacagaa

SEQ ID NO: 45146 - RNA, 19 nt, Homo sapiens
  misc_RNA (1)...(19): siRNA sense strand
gggugaauguaauaaguga

SEQ ID NO: 45147 - RNA, 19 nt, Homo sapiens
  misc_RNA (1)...(19): siRNA sense strand
gagaugcaaguauucauga

SEQ ID NO: 45148 - RNA, 19 nt, Homo sapiens
  misc_RNA (1)...(19): siRNA sense strand
ccaacugggugaauguaau

SEQ ID NO: 45149 - RNA, 19 nt, Homo sapiens
  misc_RNA (1)...(19): siRNA sense strand
ggagaugcaaguauucaug

SEQ ID NO: 45150 - RNA, 19 nt, Homo sapiens
  misc_RNA (1)...(19): siRNA sense strand
gcauucaugucuucauuuu

SEQ ID NO: 45151 - RNA, 19 nt, Homo sapiens
  misc_RNA (1)...(19): siRNA sense strand
gcaaaguaacagcaaugaa

SEQ ID NO: 45152 - RNA, 19 nt, Homo sapiens
  misc_RNA (1)...(19): siRNA sense strand
gaagcuggcauucaugucu

SEQ ID NO: 45153 - RNA, 19 nt, Homo sapiens
  misc_RNA (1)...(19): siRNA sense strand
gugaggaacuggaggaaaa

SEQ ID NO: 45154 - RNA, 19 nt, Homo sapiens
  misc_RNA (1)...(19): siRNA sense strand
uggcauucaugucuucauu

SEQ ID NO: 45155 - RNA, 19 nt, Homo sapiens
  misc_RNA (1)...(19): siRNA sense strand
ugaagugcuuucucuugga

SEQ ID NO: 45156 - RNA, 19 nt, Homo sapiens
  misc_RNA (1)...(19): siRNA sense strand
gcaaagaaugugaggaacu

SEQ ID NO: 45157 - RNA, 19 nt, Homo sapiens
  misc_RNA (1)...(19): siRNA sense strand
ccagugcuacuuguguuua

SEQ ID NO: 45158 - RNA, 19 nt, Homo sapiens
  misc_RNA (1)...(19): siRNA sense strand
gcagaguuuuguacauauu

SEQ ID NO: 45159 - RNA, 19 nt, Homo sapiens
  misc_RNA (1)...(19): siRNA sense strand
ugagaaguauuuccaucca

SEQ ID NO: 45160 - RNA, 19 nt, Homo sapiens
  misc_RNA (1)...(19): siRNA sense strand
cuaaugggaauguaacaga

SEQ ID NO: 45161 - RNA, 19 nt, Homo sapiens
  misc_RNA (1)...(19): siRNA sense strand
gaucuuauucaaucuaugc

SEQ ID NO: 45162 - RNA, 19 nt, Homo sapiens
  misc_RNA (1)...(19): siRNA sense strand
ucacuugaguccggagaug

SEQ ID NO: 45163 - RNA, 19 nt, Homo sapiens
  misc_RNA (1)...(19): siRNA sense strand
gcuacuuuauauacggaaa

SEQ ID NO: 45164 - RNA, 19 nt, Homo sapiens
  misc_RNA (1)...(19): siRNA sense strand
cgaaaccacauuugagaag

SEQ ID NO: 45165 - RNA, 19 nt, Homo sapiens
  misc_RNA (1)...(19): siRNA sense strand
cauauuguccaaauguuca

SEQ ID NO: 45166 - RNA, 19 nt, Homo sapiens
  misc_RNA (1)...(19): siRNA sense strand
aaugaagugcuuucucuug

SEQ ID NO: 45167 - RNA, 19 nt, Homo sapiens
  misc_RNA (1)...(19): siRNA sense strand
ggcauucaugucuucauuu

SEQ ID NO: 45168 - RNA, 19 nt, Homo sapiens
  misc_RNA (1)...(19): siRNA sense strand
aacaguuugucuucuaaug

SEQ ID NO: 45169 - RNA, 19 nt, Homo sapiens
  misc_RNA (1)...(19): siRNA sense strand
aaucugaucauccuagcaa

SEQ ID NO: 45170 - RNA, 19 nt, Homo sapiens
  misc_RNA (1)...(19): siRNA sense strand
gugcagggcuuccuaaaac

SEQ ID NO: 45171 - RNA, 19 nt, Homo sapiens
  misc_RNA (1)...(19): siRNA sense strand
gccaacugggugaauguaa

SEQ ID NO: 45172 - RNA, 19 nt, Homo sapiens
  misc_RNA (1)...(19): siRNA sense strand
aaaguaacagcaaugaagu

SEQ ID NO: 45173 - RNA, 19 nt, Homo sapiens
  misc_RNA (1)...(19): siRNA sense strand
aagcuggcauucaugucuu

SEQ ID NO: 45174 - RNA, 19 nt, Homo sapiens
  misc_RNA (1)...(19): siRNA sense strand
caacaguuugucuucuaau

SEQ ID NO: 45175 - RNA, 19 nt, Homo sapiens
  misc_RNA (1)...(19): siRNA sense strand
cugggugaauguaauaagu

SEQ ID NO: 45176 - RNA, 19 nt, Homo sapiens
  misc_RNA (1)...(19): siRNA sense strand
cauccuagcaaacaacagu

SEQ ID NO: 45177 - RNA, 19 nt, Homo sapiens
  misc_RNA (1)...(19): siRNA sense strand
caaugaagugcuuucucuu

SEQ ID NO: 45178 - RNA, 19 nt, Homo sapiens
  misc_RNA (1)...(19): siRNA sense strand
gagaauuucgaaaccacau

SEQ ID NO: 45179 - RNA, 19 nt, Homo sapiens
  misc_RNA (1)...(19): siRNA sense strand
uugcagaguuuuguacaua

SEQ ID NO: 45180 - RNA, 19 nt, Homo sapiens
  misc_RNA (1)...(19): siRNA sense strand
augcaaagaaugugaggaa

SEQ ID NO: 45181 - RNA, 19 nt, Homo sapiens
  misc_RNA (1)...(19): siRNA sense strand
aaccacauuugagaaguau

SEQ ID NO: 45182 - RNA, 19 nt, Homo sapiens
  misc_RNA (1)...(19): siRNA sense strand
gcaaugaagugcuuucucu

SEQ ID NO: 45183 - RNA, 19 nt, Homo sapiens
  misc_RNA (1)...(19): siRNA sense strand
gaaucuggaugcaaagaau

SEQ ID NO: 45184 - RNA, 19 nt, Homo sapiens
  misc_RNA (1)...(19): siRNA sense strand
aaaccacauuugagaagua

SEQ ID NO: 45185 - RNA, 19 nt, Homo sapiens
  misc_RNA (1)...(19): siRNA sense strand
cuacuuguguuuacuucua

SEQ ID NO: 45186 - RNA, 19 nt, Homo sapiens
  misc_RNA (1)...(19): siRNA sense strand
caacugggugaauguaaua

SEQ ID NO: 45187 - RNA, 19 nt, Homo sapiens
  misc_RNA (1)...(19): siRNA sense strand
caaagaaugugaggaacug

SEQ ID NO: 45188 - RNA, 19 nt, Homo sapiens
  misc_RNA (1)...(19): siRNA sense strand
gaagccaacugggugaaug

SEQ ID NO: 45189 - RNA, 19 nt, Homo sapiens
  misc_RNA (1)...(19): siRNA sense strand
gaauuucgaaaccacauuu

SEQ ID NO: 45190 - RNA, 19 nt, Homo sapiens
  misc_RNA (1)...(19): siRNA sense strand
caaaguaacagcaaugaag

SEQ ID NO: 45191 - RNA, 19 nt, Homo sapiens
  misc_RNA (1)...(19): siRNA sense strand
ccacauuugagaaguauuu

SEQ ID NO: 45192 - RNA, 19 nt, Homo sapiens
  misc_RNA (1)...(19): siRNA sense strand
ggaguuacaaguuauuuca

SEQ ID NO: 45193 - RNA, 19 nt, Homo sapiens
  misc_RNA (1)...(19): siRNA sense strand
gaaaccacauuugagaagu

SEQ ID NO: 45194 - RNA, 19 nt, Homo sapiens
  misc_RNA (1)...(19): siRNA sense strand
gaugcaaguauucaugaua

SEQ ID NO: 45195 - RNA, 19 nt, Homo sapiens
  misc_RNA (1)...(19): siRNA sense strand
guccggagaugcaaguauu

SEQ ID NO: 45196 - RNA, 19 nt, Homo sapiens
  misc_RNA (1)...(19): siRNA sense strand
guauuuccauccagugcua

SEQ ID NO: 45197 - RNA, 19 nt, Homo sapiens
  misc_RNA (1)...(19): siRNA sense strand
uaaugggaauguaacagaa

SEQ ID NO: 45198 - RNA, 19 nt, Homo sapiens
  misc_RNA (1)...(19): siRNA sense strand
gggugaauguaauaaguga

SEQ ID NO: 45199 - RNA, 19 nt, Homo sapiens
  misc_RNA (1)...(19): siRNA sense strand
gagaugcaaguauucauga

SEQ ID NO: 45200 - RNA, 19 nt, Homo sapiens
  misc_RNA (1)...(19): siRNA sense strand
ccaacugggugaauguaau

SEQ ID NO: 45201 - RNA, 19 nt, Homo sapiens
  misc_RNA (1)...(19): siRNA sense strand
ggagaugcaaguauucaug

SEQ ID NO: 45202 - RNA, 19 nt, Homo sapiens
  misc_RNA (1)...(19): siRNA sense strand
gcauucaugucuucauuuu

SEQ ID NO: 45203 - RNA, 19 nt, Homo sapiens
  misc_RNA (1)...(19): siRNA sense strand
gcaaaguaacagcaaugaa

SEQ ID NO: 45204 - RNA, 19 nt, Homo sapiens
  misc_RNA (1)...(19): siRNA sense strand
gaagcuggcauucaugucu

SEQ ID NO: 45205 - RNA, 19 nt, Homo sapiens
  misc_RNA (1)...(19): siRNA sense strand
gugaggaacuggaggaaaa

SEQ ID NO: 45206 - RNA, 19 nt, Homo sapiens
  misc_RNA (1)...(19): siRNA sense strand
uggcauucaugucuucauu

SEQ ID NO: 45207 - RNA, 19 nt, Homo sapiens
  misc_RNA (1)...(19): siRNA sense strand
ugaagugcuuucucuugga

SEQ ID NO: 45208 - RNA, 19 nt, Homo sapiens
  misc_RNA (1)...(19): siRNA sense strand
gcaaagaaugugaggaacu

SEQ ID NO: 45209 - RNA, 19 nt, Homo sapiens
  misc_RNA (1)...(19): siRNA sense strand
ccagugcuacuuguguuua

SEQ ID NO: 45210 - RNA, 19 nt, Homo sapiens
  misc_RNA (1)...(19): siRNA sense strand
gcagaguuuuguacauauu

SEQ ID NO: 45211 - RNA, 19 nt, Homo sapiens
  misc_RNA (1)...(19): siRNA sense strand
ugagaaguauuuccaucca

SEQ ID NO: 45212 - RNA, 19 nt, Homo sapiens
  misc_RNA (1)...(19): siRNA sense strand
cuaaugggaauguaacaga

SEQ ID NO: 45213 - RNA, 19 nt, Homo sapiens
  misc_RNA (1)...(19): siRNA sense strand
gaucuuauucaaucuaugc

SEQ ID NO: 45214 - RNA, 19 nt, Homo sapiens
  misc_RNA (1)...(19): siRNA sense strand
ucacuugaguccggagaug

SEQ ID NO: 45215 - RNA, 19 nt, Homo sapiens
  misc_RNA (1)...(19): siRNA sense strand
gcuacuuuauauacggaaa

SEQ ID NO: 45216 - RNA, 19 nt, Homo sapiens
  misc_RNA (1)...(19): siRNA sense strand
cgaaaccacauuugagaag

SEQ ID NO: 45217 - RNA, 19 nt, Homo sapiens
  misc_RNA (1)...(19): siRNA sense strand
cauauuguccaaauguuca

SEQ ID NO: 45218 - RNA, 19 nt, Homo sapiens
  misc_RNA (1)...(19): siRNA sense strand
aaugaagugcuuucucuug

SEQ ID NO: 45219 - RNA, 19 nt, Homo sapiens
  misc_RNA (1)...(19): siRNA sense strand
ggcauucaugucuucauuu

SEQ ID NO: 45220 - RNA, 19 nt, Homo sapiens
  misc_RNA (1)...(19): siRNA sense strand
aacaguuugucuucuaaug

SEQ ID NO: 45221 - RNA, 19 nt, Homo sapiens
  misc_RNA (1)...(19): siRNA sense strand
aaucugaucauccuagcaa

SEQ ID NO: 45222 - RNA, 19 nt, Homo sapiens
  misc_RNA (1)...(19): siRNA sense strand
gugcagggcuuccuaaaac

SEQ ID NO: 45223 - RNA, 19 nt, Homo sapiens
  misc_RNA (1)...(19): siRNA sense strand
gccaacugggugaauguaa

SEQ ID NO: 45224 - RNA, 19 nt, Homo sapiens
  misc_RNA (1)...(19): siRNA sense strand
aaaguaacagcaaugaagu

SEQ ID NO: 45225 - RNA, 19 nt, Homo sapiens
  misc_RNA (1)...(19): siRNA sense strand
aagcuggcauucaugucuu

SEQ ID NO: 45226 - RNA, 19 nt, Homo sapiens
  misc_RNA (1)...(19): siRNA sense strand
caacaguuugucuucuaau

SEQ ID NO: 45227 - RNA, 19 nt, Homo sapiens
  misc_RNA (1)...(19): siRNA sense strand
cugggugaauguaauaagu

SEQ ID NO: 45228 - RNA, 19 nt, Homo sapiens
  misc_RNA (1)...(19): siRNA sense strand
cauccuagcaaacaacagu

SEQ ID NO: 45229 - RNA, 19 nt, Homo sapiens
  misc_RNA (1)...(19): siRNA sense strand
caaugaagugcuuucucuu

SEQ ID NO: 45230 - RNA, 19 nt, Homo sapiens
  misc_RNA (1)...(19): siRNA sense strand
gagaauuucgaaaccacau

SEQ ID NO: 45231 - RNA, 19 nt, Homo sapiens
  misc_RNA (1)...(19): siRNA sense strand
uugcagaguuuuguacaua

SEQ ID NO: 45232 - RNA, 19 nt, Homo sapiens
  misc_RNA (1)...(19): siRNA sense strand
augcaaagaaugugaggaa

SEQ ID NO: 45233 - RNA, 19 nt, Homo sapiens
  misc_RNA (1)...(19): siRNA sense strand
aaccacauuugagaaguau

SEQ ID NO: 45234 - RNA, 19 nt, Homo sapiens
  misc_RNA (1)...(19): siRNA sense strand
gcaaugaagugcuuucucu

SEQ ID NO: 45235 - RNA, 19 nt, Homo sapiens
  misc_RNA (1)...(19): siRNA sense strand
gaaucuggaugcaaagaau

SEQ ID NO: 45236 - RNA, 19 nt, Homo sapiens
  misc_RNA (1)...(19): siRNA sense strand
caacugggugaauguaaua

SEQ ID NO: 45237 - RNA, 19 nt, Homo sapiens
  misc_RNA (1)...(19): siRNA sense strand
caaagaaugugaggaacug

SEQ ID NO: 45238 - RNA, 19 nt, Homo sapiens
  misc_RNA (1)...(19): siRNA sense strand
gaagccaacugggugaaug

SEQ ID NO: 45239 - RNA, 19 nt, Homo sapiens
  misc_RNA (1)...(19): siRNA sense strand
caaaguaacagcaaugaag

SEQ ID NO: 45240 - RNA, 19 nt, Homo sapiens
  misc_RNA (1)...(19): siRNA sense strand
ggaguuacaaguuauuuca

SEQ ID NO: 45241 - RNA, 19 nt, Homo sapiens
  misc_RNA (1)...(19): siRNA sense strand
gaugcaaguauucaugaua

SEQ ID NO: 45242 - RNA, 19 nt, Homo sapiens
  misc_RNA (1)...(19): siRNA sense strand
guccggagaugcaaguauu

SEQ ID NO: 45243 - RNA, 19 nt, Homo sapiens
  misc_RNA (1)...(19): siRNA sense strand
gggugaauguaauaaguga

SEQ ID NO: 45244 - RNA, 19 nt, Homo sapiens
  misc_RNA (1)...(19): siRNA sense strand
uaaugggaauguaacagaa

SEQ ID NO: 45245 - RNA, 19 nt, Homo sapiens
  misc_RNA (1)...(19): siRNA sense strand
gagaugcaaguauucauga

SEQ ID NO: 45246 - RNA, 19 nt, Homo sapiens
  misc_RNA (1)...(19): siRNA sense strand
ccaacugggugaauguaau

SEQ ID NO: 45247 - RNA, 19 nt, Homo sapiens
  misc_RNA (1)...(19): siRNA sense strand
ggagaugcaaguauucaug

SEQ ID NO: 45248 - RNA, 19 nt, Homo sapiens
  misc_RNA (1)...(19): siRNA sense strand
gcaaaguaacagcaaugaa

SEQ ID NO: 45249 - RNA, 19 nt, Homo sapiens
  misc_RNA (1)...(19): siRNA sense strand
gugaggaacuggaggaaaa

SEQ ID NO: 45250 - RNA, 19 nt, Homo sapiens
  misc_RNA (1)...(19): siRNA sense strand
ugaagugcuuucucuugga

SEQ ID NO: 45251 - RNA, 19 nt, Homo sapiens
  misc_RNA (1)...(19): siRNA sense strand
gcaaagaaugugaggaacu

SEQ ID NO: 45252 - RNA, 19 nt, Homo sapiens
  misc_RNA (1)...(19): siRNA sense strand
gcagaguuuuguacauauu

SEQ ID NO: 45253 - RNA, 19 nt, Homo sapiens
  misc_RNA (1)...(19): siRNA sense strand
cuaaugggaauguaacaga

SEQ ID NO: 45254 - RNA, 19 nt, Homo sapiens
  misc_RNA (1)...(19): siRNA sense strand
gaucuuauucaaucuaugc

SEQ ID NO: 45255 - RNA, 19 nt, Homo sapiens
  misc_RNA (1)...(19): siRNA sense strand
ucacuugaguccggagaug

SEQ ID NO: 45256 - RNA, 19 nt, Homo sapiens
  misc_RNA (1)...(19): siRNA sense strand
gcuacuuuauauacggaaa

SEQ ID NO: 45257 - RNA, 19 nt, Homo sapiens
  misc_RNA (1)...(19): siRNA sense strand
cauauuguccaaauguuca

SEQ ID NO: 45258 - RNA, 19 nt, Homo sapiens
  misc_RNA (1)...(19): siRNA sense strand
aaugaagugcuuucucuug

SEQ ID NO: 45259 - RNA, 19 nt, Homo sapiens
  misc_RNA (1)...(19): siRNA sense strand
gugcagggcuuccuaaaac

SEQ ID NO: 45260 - RNA, 19 nt, Homo sapiens
  misc_RNA (1)...(19): siRNA sense strand
aacaguuugucuucuaaug

SEQ ID NO: 45261 - RNA, 19 nt, Homo sapiens
  misc_RNA (1)...(19): siRNA sense strand
aaucugaucauccuagcaa

SEQ ID NO: 45262 - RNA, 19 nt, Homo sapiens
  misc_RNA (1)...(19): siRNA sense strand
aaaguaacagcaaugaagu

SEQ ID NO: 45263 - RNA, 19 nt, Homo sapiens
  misc_RNA (1)...(19): siRNA sense strand
gccaacugggugaauguaa

SEQ ID NO: 45264 - RNA, 19 nt, Homo sapiens
  misc_RNA (1)...(19): siRNA sense strand
caacaguuugucuucuaau

SEQ ID NO: 45265 - RNA, 19 nt, Homo sapiens
  misc_RNA (1)...(19): siRNA sense strand
caaugaagugcuuucucuu

SEQ ID NO: 45266 - RNA, 19 nt, Homo sapiens
  misc_RNA (1)...(19): siRNA sense strand
cauccuagcaaacaacagu

SEQ ID NO: 45267 - RNA, 19 nt, Homo sapiens
  misc_RNA (1)...(19): siRNA sense strand
cugggugaauguaauaagu

SEQ ID NO: 45268 - RNA, 19 nt, Homo sapiens
  misc_RNA (1)...(19): siRNA sense strand
augcaaagaaugugaggaa

SEQ ID NO: 45269 - RNA, 19 nt, Homo sapiens
  misc_RNA (1)...(19): siRNA sense strand
uugcagaguuuuguacaua

SEQ ID NO: 45270 - RNA, 19 nt, Homo sapiens
  misc_RNA (1)...(19): siRNA sense strand
gaagaaggguuuagcauuu

SEQ ID NO: 45271 - RNA, 19 nt, Homo sapiens
  misc_RNA (1)...(19): siRNA sense strand
ggaaaugcauugucagaaa

SEQ ID NO: 45272 - RNA, 19 nt, Homo sapiens
  misc_RNA (1)...(19): siRNA sense strand
gaaggauacucucuuauug

SEQ ID NO: 45273 - RNA, 19 nt, Homo sapiens
  misc_RNA (1)...(19): siRNA sense strand
ggaaauguccuguccuaua

SEQ ID NO: 45274 - RNA, 19 nt, Homo sapiens
  misc_RNA (1)...(19): siRNA sense strand
gaagauuaaucgaccagua

SEQ ID NO: 45275 - RNA, 19 nt, Homo sapiens
  misc_RNA (1)...(19): siRNA sense strand
gaacacacaucaucuaguc

SEQ ID NO: 45276 - RNA, 19 nt, Homo sapiens
  misc_RNA (1)...(19): siRNA sense strand
gggagaaacugcagaauuc

SEQ ID NO: 45277 - RNA, 19 nt, Homo sapiens
  misc_RNA (1)...(19): siRNA sense strand
gaaauguccuguccuauac

SEQ ID NO: 45278 - RNA, 19 nt, Homo sapiens
  misc_RNA (1)...(19): siRNA sense strand
uauaugagcugguaaagga

SEQ ID NO: 45279 - RNA, 19 nt, Homo sapiens
  misc_RNA (1)...(19): siRNA sense strand
gauacucucuuauuggaaa

SEQ ID NO: 45280 - RNA, 19 nt, Homo sapiens
  misc_RNA (1)...(19): siRNA sense strand
ccacauugcuuuccuuugu

SEQ ID NO: 45281 - RNA, 19 nt, Homo sapiens
  misc_RNA (1)...(19): siRNA sense strand
aagaguaucuggaugaauu

SEQ ID NO: 45282 - RNA, 19 nt, Homo sapiens
  misc_RNA (1)...(19): siRNA sense strand
gaagaaugcccgcugugua

SEQ ID NO: 45283 - RNA, 19 nt, Homo sapiens
  misc_RNA (1)...(19): siRNA sense strand
uaggagaguuccaaaguuu

SEQ ID NO: 45284 - RNA, 19 nt, Homo sapiens
  misc_RNA (1)...(19): siRNA sense strand
gguagaaauuacacccuua

SEQ ID NO: 45285 - RNA, 19 nt, Homo sapiens
  misc_RNA (1)...(19): siRNA sense strand
ugacuaaucuuccucaagu

SEQ ID NO: 45286 - RNA, 19 nt, Homo sapiens
  misc_RNA (1)...(19): siRNA sense strand
ggaagaaggguuuagcauu

SEQ ID NO: 45287 - RNA, 19 nt, Homo sapiens
  misc_RNA (1)...(19): siRNA sense strand
aaugaaggauacucucuua

SEQ ID NO: 45288 - RNA, 19 nt, Homo sapiens
  misc_RNA (1)...(19): siRNA sense strand
acauagaacuuacuggaaa

SEQ ID NO: 45289 - RNA, 19 nt, Homo sapiens
  misc_RNA (1)...(19): siRNA sense strand
agaugaagguccaauguuu

SEQ ID NO: 45290 - RNA, 19 nt, Homo sapiens
  misc_RNA (1)...(19): siRNA sense strand
ccaaugaaauccauaaagg

SEQ ID NO: 45291 - RNA, 19 nt, Homo sapiens
  misc_RNA (1)...(19): siRNA sense strand
ggauguaugugcucaagau

SEQ ID NO: 45292 - RNA, 19 nt, Homo sapiens
  misc_RNA (1)...(19): siRNA sense strand
ggaacagagucaucaauac

SEQ ID NO: 45293 - RNA, 19 nt, Homo sapiens
  misc_RNA (1)...(19): siRNA sense strand
uggcucaguucauuaauaa

SEQ ID NO: 45294 - RNA, 19 nt, Homo sapiens
  misc_RNA (1)...(19): siRNA sense strand
gaaguggcucaguucauua

SEQ ID NO: 45295 - RNA, 19 nt, Homo sapiens
  misc_RNA (1)...(19): siRNA sense strand
uaaaccuccuccuaacaua

SEQ ID NO: 45296 - RNA, 19 nt, Homo sapiens
  misc_RNA (1)...(19): siRNA sense strand
gauuuacgguggcuuguug

SEQ ID NO: 45297 - RNA, 19 nt, Homo sapiens
  misc_RNA (1)...(19): siRNA sense strand
gaacuuacuggaaaugguu

SEQ ID NO: 45298 - RNA, 19 nt, Homo sapiens
  misc_RNA (1)...(19): siRNA sense strand
ggaaaugguuacaaugaac

SEQ ID NO: 45299 - RNA, 19 nt, Homo sapiens
  misc_RNA (1)...(19): siRNA sense strand
ggacaauccugcuggaaac

SEQ ID NO: 45300 - RNA, 19 nt, Homo sapiens
  misc_RNA (1)...(19): siRNA sense strand
guggaaauguccuguccua

SEQ ID NO: 45301 - RNA, 19 nt, Homo sapiens
  misc_RNA (1)...(19): siRNA sense strand
gaaaugcauugucagaaaa

SEQ ID NO: 45302 - RNA, 19 nt, Homo sapiens
  misc_RNA (1)...(19): siRNA sense strand
gaaccacauugcuuuccuu

SEQ ID NO: 45303 - RNA, 19 nt, Homo sapiens
  misc_RNA (1)...(19): siRNA sense strand
aaacauacgucgacagaac

SEQ ID NO: 45304 - RNA, 19 nt, Homo sapiens
  misc_RNA (1)...(19): siRNA sense strand
gaaaauugccuguguucua

SEQ ID NO: 45305 - RNA, 19 nt, Homo sapiens
  misc_RNA (1)...(19): siRNA sense strand
gaacccagaacaauguauu

SEQ ID NO: 45306 - RNA, 19 nt, Homo sapiens
  misc_RNA (1)...(19): siRNA sense strand
uaaucuuccucaagucaua

SEQ ID NO: 45307 - RNA, 19 nt, Homo sapiens
  misc_RNA (1)...(19): siRNA sense strand
gugagaaggugacuguuuc

SEQ ID NO: 45308 - RNA, 19 nt, Homo sapiens
  misc_RNA (1)...(19): siRNA sense strand
ggccagauguggagaagau

SEQ ID NO: 45309 - RNA, 19 nt, Homo sapiens
  misc_RNA (1)...(19): siRNA sense strand
ugaaggauacucucuuauu

SEQ ID NO: 45310 - RNA, 19 nt, Homo sapiens
  misc_RNA (1)...(19): siRNA sense strand
cuugaaagauggauuuguu

SEQ ID NO: 45311 - RNA, 19 nt, Homo sapiens
  misc_RNA (1)...(19): siRNA sense strand
guggcucaguucauuaaua

SEQ ID NO: 45312 - RNA, 19 nt, Homo sapiens
  misc_RNA (1)...(19): siRNA sense strand
gcaaggagcagacgauguc

SEQ ID NO: 45313 - RNA, 19 nt, Homo sapiens
  misc_RNA (1)...(19): siRNA sense strand
gaaacccaguggccagaug

SEQ ID NO: 45314 - RNA, 19 nt, Homo sapiens
  misc_RNA (1)...(19): siRNA sense strand
ggaggagaauacagaguuc

SEQ ID NO: 45315 - RNA, 19 nt, Homo sapiens
  misc_RNA (1)...(19): siRNA sense strand
ugaagacagugcugaugaa

SEQ ID NO: 45316 - RNA, 19 nt, Homo sapiens
  misc_RNA (1)...(19): siRNA sense strand
aaauguaaauccucagguu

SEQ ID NO: 45317 - RNA, 19 nt, Homo sapiens
  misc_RNA (1)...(19): siRNA sense strand
gcacacaaugcgaagauga

SEQ ID NO: 45318 - RNA, 19 nt, Homo sapiens
  misc_RNA (1)...(19): siRNA sense strand
guacuuggucuuauguaaa

SEQ ID NO: 45319 - RNA, 19 nt, Homo sapiens
  misc_RNA (1)...(19): siRNA sense strand
ugcaauggcuguaccaaga

SEQ ID NO: 45320 - RNA, 19 nt, Homo sapiens
  misc_RNA (1)...(19): siRNA sense strand
gcauuuguguggaagugaa

SEQ ID NO: 45321 - RNA, 19 nt, Homo sapiens
  misc_RNA (1)...(19): siRNA sense strand
gaaagauggauuuguucaa

SEQ ID NO: 45322 - RNA, 19 nt, Homo sapiens
  misc_RNA (1)...(19): siRNA sense strand
gcugacaccuuuauaugag

SEQ ID NO: 45323 - RNA, 19 nt, Homo sapiens
  misc_RNA (1)...(19): siRNA sense strand
gcaguuauacuucacauac

SEQ ID NO: 45324 - RNA, 19 nt, Homo sapiens
  misc_RNA (1)...(19): siRNA sense strand
cgacagaacacacaucauc

SEQ ID NO: 45325 - RNA, 19 nt, Homo sapiens
  misc_RNA (1)...(19): siRNA sense strand
ggugagaaggugacuguuu

SEQ ID NO: 45326 - RNA, 19 nt, Homo sapiens
  misc_RNA (1)...(19): siRNA sense strand
ggaccuuccuuggauguau

SEQ ID NO: 45327 - RNA, 19 nt, Homo sapiens
  misc_RNA (1)...(19): siRNA sense strand
uaaguggaguccugagaug

SEQ ID NO: 45328 - RNA, 19 nt, Homo sapiens
  misc_RNA (1)...(19): siRNA sense strand
cuucauaucuggccuuagu

SEQ ID NO: 45329 - RNA, 19 nt, Homo sapiens
  misc_RNA (1)...(19): siRNA sense strand
cgacagaaagcacacaaug

SEQ ID NO: 45330 - RNA, 19 nt, Homo sapiens
  misc_RNA (1)...(19): siRNA sense strand
ugaaauccauaaaggaaag

SEQ ID NO: 45331 - RNA, 19 nt, Homo sapiens
  misc_RNA (1)...(19): siRNA sense strand
uggaaaugguuacaaugaa

SEQ ID NO: 45332 - RNA, 19 nt, Homo sapiens
  misc_RNA (1)...(19): siRNA sense strand
aaagauggauuuguucaag

SEQ ID NO: 45333 - RNA, 19 nt, Homo sapiens
  misc_RNA (1)...(19): siRNA sense strand
gcggucaguugcuguguau

SEQ ID NO: 45334 - RNA, 19 nt, Homo sapiens
  misc_RNA (1)...(19): siRNA sense strand
ucgauaaaccuccuccuaa

SEQ ID NO: 45335 - RNA, 19 nt, Homo sapiens
  misc_RNA (1)...(19): siRNA sense strand
cagauguggagaagauuua

SEQ ID NO: 45336 - RNA, 19 nt, Homo sapiens
  misc_RNA (1)...(19): siRNA sense strand
caauccugcuggaaacaaa

SEQ ID NO: 45337 - RNA, 19 nt, Homo sapiens
  misc_RNA (1)...(19): siRNA sense strand
gggaggugcaggcuucaua

SEQ ID NO: 45338 - RNA, 19 nt, Homo sapiens
  misc_RNA (1)...(19): siRNA sense strand
caauaguacuuggucuuau

SEQ ID NO: 45339 - RNA, 19 nt, Homo sapiens
  misc_RNA (1)...(19): siRNA sense strand
cgauaaaccuccuccuaac

SEQ ID NO: 45340 - RNA, 19 nt, Homo sapiens
  misc_RNA (1)...(19): siRNA sense strand
cuacacaguuggugagaag

SEQ ID NO: 45341 - RNA, 19 nt, Homo sapiens
  misc_RNA (1)...(19): siRNA sense strand
aaaccuuucuacacaguug

SEQ ID NO: 45342 - RNA, 19 nt, Homo sapiens
  misc_RNA (1)...(19): siRNA sense strand
caagaugaagguccaaugu

SEQ ID NO: 45343 - RNA, 19 nt, Homo sapiens
  misc_RNA (1)...(19): siRNA sense strand
acaauaguacuuggucuua

SEQ ID NO: 45344 - RNA, 19 nt, Homo sapiens
  misc_RNA (1)...(19): siRNA sense strand
agacagugcugaugaagac

SEQ ID NO: 45345 - RNA, 19 nt, Homo sapiens
  misc_RNA (1)...(19): siRNA sense strand
caagaagccgugaaugcaa

SEQ ID NO: 45346 - RNA, 19 nt, Homo sapiens
  misc_RNA (1)...(19): siRNA sense strand
ucauaucuggccuuaguua

SEQ ID NO: 45347 - RNA, 19 nt, Homo sapiens
  misc_RNA (1)...(19): siRNA sense strand
aauaguacuuggucuuaug

SEQ ID NO: 45348 - RNA, 19 nt, Homo sapiens
  misc_RNA (1)...(19): siRNA sense strand
cauagaacuuacuggaaau

SEQ ID NO: 45349 - RNA, 19 nt, Homo sapiens
  misc_RNA (1)...(19): siRNA sense strand
gauaaaccuccuccuaaca

SEQ ID NO: 45350 - RNA, 19 nt, Homo sapiens
  misc_RNA (1)...(19): siRNA sense strand
gaaaugcuuuugaaacaca

SEQ ID NO: 45351 - RNA, 19 nt, Homo sapiens
  misc_RNA (1)...(19): siRNA sense strand
guccugagaugaagaaugc

SEQ ID NO: 45352 - RNA, 19 nt, Homo sapiens
  misc_RNA (1)...(19): siRNA sense strand
uugcaaaccguacacauuu

SEQ ID NO: 45353 - RNA, 19 nt, Homo sapiens
  misc_RNA (1)...(19): siRNA sense strand
ugaagaguaucuggaugaa

SEQ ID NO: 45354 - RNA, 19 nt, Homo sapiens
  misc_RNA (1)...(19): siRNA sense strand
cuacagugccuaccgaaga

SEQ ID NO: 45355 - RNA, 19 nt, Homo sapiens
  misc_RNA (1)...(19): siRNA sense strand
caauguagaaagguguuua

SEQ ID NO: 45356 - RNA, 19 nt, Homo sapiens
  misc_RNA (1)...(19): siRNA sense strand
aagaaggguuuagcauuug

SEQ ID NO: 45357 - RNA, 19 nt, Homo sapiens
  misc_RNA (1)...(19): siRNA sense strand
gaaacugcagaauucaaga

SEQ ID NO: 45358 - RNA, 19 nt, Homo sapiens
  misc_RNA (1)...(19): siRNA sense strand
gagaaacugcagaauucaa

SEQ ID NO: 45359 - RNA, 19 nt, Homo sapiens
  misc_RNA (1)...(19): siRNA sense strand
gcucaguucauuaauaaca

SEQ ID NO: 45360 - RNA, 19 nt, Homo sapiens
  misc_RNA (1)...(19): siRNA sense strand
aggaacagagucaucaaua

SEQ ID NO: 45361 - RNA, 19 nt, Homo sapiens
  misc_RNA (1)...(19): siRNA sense strand
gaauucaagauguguuugu

SEQ ID NO: 45362 - RNA, 19 nt, Homo sapiens
  misc_RNA (1)...(19): siRNA sense strand
gaugaagguccaauguuuc

SEQ ID NO: 45363 - RNA, 19 nt, Homo sapiens
  misc_RNA (1)...(19): siRNA sense strand
gcuugaaccacauugcuuu

SEQ ID NO: 45364 - RNA, 19 nt, Homo sapiens
  misc_RNA (1)...(19): siRNA sense strand
ggugcaggcuucauaucug

SEQ ID NO: 45365 - RNA, 19 nt, Homo sapiens
  misc_RNA (1)...(19): siRNA sense strand
ucugcaaucugggucguua

SEQ ID NO: 45366 - RNA, 19 nt, Homo sapiens
  misc_RNA (1)...(19): siRNA sense strand
ggacacauuaucugcaauc

SEQ ID NO: 45367 - RNA, 19 nt, Homo sapiens
  misc_RNA (1)...(19): siRNA sense strand
caaugaaauccauaaagga

SEQ ID NO: 45368 - RNA, 19 nt, Homo sapiens
  misc_RNA (1)...(19): siRNA sense strand
auacuucacauaccaauga

SEQ ID NO: 45369 - RNA, 19 nt, Homo sapiens
  misc_RNA (1)...(19): siRNA sense strand
gaacagagucaucaauacc

SEQ ID NO: 45370 - RNA, 19 nt, Homo sapiens
  misc_RNA (1)...(19): siRNA sense strand
gaacagccaugcaaccaaa

SEQ ID NO: 45371 - RNA, 19 nt, Homo sapiens
  misc_RNA (1)...(19): siRNA sense strand
caaacaagauacccacuga

SEQ ID NO: 45372 - RNA, 19 nt, Homo sapiens
  misc_RNA (1)...(19): siRNA sense strand
gaacaacaaguguccauau

SEQ ID NO: 45373 - RNA, 19 nt, Homo sapiens
  misc_RNA (1)...(19): siRNA sense strand
gcaacgcgcugacauuucu

SEQ ID NO: 45374 - RNA, 19 nt, Homo sapiens
  misc_RNA (1)...(19): siRNA sense strand
gacaucaacuuccucauca

SEQ ID NO: 45375 - RNA, 19 nt, Homo sapiens
  misc_RNA (1)...(19): siRNA sense strand
gcgcugacauuucugaaga

SEQ ID NO: 45376 - RNA, 19 nt, Homo sapiens
  misc_RNA (1)...(19): siRNA sense strand
caacaaguguccauauuuu

SEQ ID NO: 45377 - RNA, 19 nt, Homo sapiens
  misc_RNA (1)...(19): siRNA sense strand
ucaacaagaugcaggaaga

SEQ ID NO: 45378 - RNA, 19 nt, Homo sapiens
  misc_RNA (1)...(19): siRNA sense strand
gugcuaaugugaccaguug

SEQ ID NO: 45379 - RNA, 19 nt, Homo sapiens
  misc_RNA (1)...(19): siRNA sense strand
gaugagaggcaagauauga

SEQ ID NO: 45380 - RNA, 19 nt, Homo sapiens
  misc_RNA (1)...(19): siRNA sense strand
ggacaucaacuuccucauc

SEQ ID NO: 45381 - RNA, 19 nt, Homo sapiens
  misc_RNA (1)...(19): siRNA sense strand
ugacauuucugaagagucu

SEQ ID NO: 45382 - RNA, 19 nt, Homo sapiens
  misc_RNA (1)...(19): siRNA sense strand
gggaugagaggcaagauau

SEQ ID NO: 45383 - RNA, 19 nt, Homo sapiens
  misc_RNA (1)...(19): siRNA sense strand
gaccaguugucucuguuug

SEQ ID NO: 45384 - RNA, 19 nt, Homo sapiens
  misc_RNA (1)...(19): siRNA sense strand
aacaacaaguguccauauu

SEQ ID NO: 45385 - RNA, 19 nt, Homo sapiens
  misc_RNA (1)...(19): siRNA sense strand
ucaacuuccucaucaacaa

SEQ ID NO: 45386 - RNA, 19 nt, Homo sapiens
  misc_RNA (1)...(19): siRNA sense strand
acaacaaguguccauauuu

SEQ ID NO: 45387 - RNA, 19 nt, Homo sapiens
  misc_RNA (1)...(19): siRNA sense strand
caguugaaguacuaaagaa

SEQ ID NO: 45388 - RNA, 19 nt, Homo sapiens
  misc_RNA (1)...(19): siRNA sense strand
caagauacccacugauuuu

SEQ ID NO: 45389 - RNA, 19 nt, Homo sapiens
  misc_RNA (1)...(19): siRNA sense strand
agaccaugcuucagugaga

SEQ ID NO: 45390 - RNA, 19 nt, Homo sapiens
  misc_RNA (1)...(19): siRNA sense strand
acaagauacccacugauuu

SEQ ID NO: 45391 - RNA, 19 nt, Homo sapiens
  misc_RNA (1)...(19): siRNA sense strand
ugucucagaugaccaauac

SEQ ID NO: 45392 - RNA, 19 nt, Homo sapiens
  misc_RNA (1)...(19): siRNA sense strand
ccaccaugcaaacaagaua

SEQ ID NO: 45393 - RNA, 19 nt, Homo sapiens
  misc_RNA (1)...(19): siRNA sense strand
gaaaagaugagagggauga

SEQ ID NO: 45394 - RNA, 19 nt, Homo sapiens
  misc_RNA (1)...(19): siRNA sense strand
aacaagauacccacugauu

SEQ ID NO: 45395 - RNA, 19 nt, Homo sapiens
  misc_RNA (1)...(19): siRNA sense strand
gaaguacuaaagaacaaca

SEQ ID NO: 45396 - RNA, 19 nt, Homo sapiens
  misc_RNA (1)...(19): siRNA sense strand
guacuaaagaacaacaagu

SEQ ID NO: 45397 - RNA, 19 nt, Homo sapiens
  misc_RNA (1)...(19): siRNA sense strand
gauccuggacaucaacuuc

SEQ ID NO: 45398 - RNA, 19 nt, Homo sapiens
  misc_RNA (1)...(19): siRNA sense strand
ucaguugaaguacuaaaga

SEQ ID NO: 45399 - RNA, 19 nt, Homo sapiens
  misc_RNA (1)...(19): siRNA sense strand
guuugggcauucccucuga

SEQ ID NO: 45400 - RNA, 19 nt, Homo sapiens
  misc_RNA (1)...(19): siRNA sense strand
gugaccaguugucucuguu

SEQ ID NO: 45401 - RNA, 19 nt, Homo sapiens
  misc_RNA (1)...(19): siRNA sense strand
ggaugagaggcaagauaug

SEQ ID NO: 45402 - RNA, 19 nt, Homo sapiens
  misc_RNA (1)...(19): siRNA sense strand
caccagaccaugcuucagu

SEQ ID NO: 45403 - RNA, 19 nt, Homo sapiens
  misc_RNA (1)...(19): siRNA sense strand
guugaaguacuaaagaaca

SEQ ID NO: 45404 - RNA, 19 nt, Homo sapiens
  misc_RNA (1)...(19): siRNA sense strand
gaccaauaccaccaugcaa

SEQ ID NO: 45405 - RNA, 19 nt, Homo sapiens
  misc_RNA (1)...(19): siRNA sense strand
gcugacauuucugaagagu

SEQ ID NO: 45406 - RNA, 19 nt, Homo sapiens
  misc_RNA (1)...(19): siRNA sense strand
aggcaacgcgcugacauuu

SEQ ID NO: 45407 - RNA, 19 nt, Homo sapiens
  misc_RNA (1)...(19): siRNA sense strand
caacaagaugcaggaagau

SEQ ID NO: 45408 - RNA, 19 nt, Homo sapiens
  misc_RNA (1)...(19): siRNA sense strand
gcaggcaacgcgcugacau

SEQ ID NO: 45409 - RNA, 19 nt, Homo sapiens
  misc_RNA (1)...(19): siRNA sense strand
accaauaccaccaugcaaa

SEQ ID NO: 45410 - RNA, 19 nt, Homo sapiens
  misc_RNA (1)...(19): siRNA sense strand
ccaauaccaccaugcaaac

SEQ ID NO: 45411 - RNA, 19 nt, Homo sapiens
  misc_RNA (1)...(19): siRNA sense strand
ccacaggacuugcacuuuc

SEQ ID NO: 45412 - RNA, 19 nt, Homo sapiens
  misc_RNA (1)...(19): siRNA sense strand
gcucgaggaccuaaagaua

SEQ ID NO: 45413 - RNA, 19 nt, Homo sapiens
  misc_RNA (1)...(19): siRNA sense strand
cuugugagcuggacgauga

SEQ ID NO: 45414 - RNA, 19 nt, Homo sapiens
  misc_RNA (1)...(19): siRNA sense strand
gcuggacgaugaagauuuc

SEQ ID NO: 45415 - RNA, 19 nt, Homo sapiens
  misc_RNA (1)...(19): siRNA sense strand
gcccugaacucccucaauc

SEQ ID NO: 45416 - RNA, 19 nt, Homo sapiens
  misc_RNA (1)...(19): siRNA sense strand
caagccaggccucaaggua

SEQ ID NO: 45417 - RNA, 19 nt, Homo sapiens
  misc_RNA (1)...(19): siRNA sense strand
gacuugcacuuuccagcuu

SEQ ID NO: 45418 - RNA, 19 nt, Homo sapiens
  misc_RNA (1)...(19): siRNA sense strand
uggaacaggugccuaaagg

SEQ ID NO: 45419 - RNA, 19 nt, Homo sapiens
  misc_RNA (1)...(19): siRNA sense strand
cacgagggcucaaugaacu

SEQ ID NO: 45420 - RNA, 19 nt, Homo sapiens
  misc_RNA (1)...(19): siRNA sense strand
ggaacaggugccuaaagga

SEQ ID NO: 45421 - RNA, 19 nt, Homo sapiens
  misc_RNA (1)...(19): siRNA sense strand
gccuagaccucagccacaa

SEQ ID NO: 45422 - RNA, 19 nt, Homo sapiens
  misc_RNA (1)...(19): siRNA sense strand
gagcuggacgaugaagauu

SEQ ID NO: 45423 - RNA, 19 nt, Homo sapiens
  misc_RNA (1)...(19): siRNA sense strand
ucgaggaccuaaagauaac

SEQ ID NO: 45424 - RNA, 19 nt, Homo sapiens
  misc_RNA (1)...(19): siRNA sense strand
guacucccgccucaaggaa

SEQ ID NO: 45425 - RNA, 19 nt, Homo sapiens
  misc_RNA (1)...(19): siRNA sense strand
cucgaggaccuaaagauaa

SEQ ID NO: 45426 - RNA, 19 nt, Homo sapiens
  misc_RNA (1)...(19): siRNA sense strand
gcucaagccaggccucaag

SEQ ID NO: 45427 - RNA, 19 nt, Homo sapiens
  misc_RNA (1)...(19): siRNA sense strand
ggaagccacaggacuugca

SEQ ID NO: 45428 - RNA, 19 nt, Homo sapiens
  misc_RNA (1)...(19): siRNA sense strand
ccacgagggcucaaugaac

SEQ ID NO: 45429 - RNA, 19 nt, Homo sapiens
  misc_RNA (1)...(19): siRNA sense strand
gagcugcccgagguggaua

SEQ ID NO: 45430 - RNA, 19 nt, Homo sapiens
  misc_RNA (1)...(19): siRNA sense strand
gugugugucugcaguagag

SEQ ID NO: 45431 - RNA, 19 nt, Homo sapiens
  misc_RNA (1)...(19): siRNA sense strand
gagaggagcuggucuauga

SEQ ID NO: 45432 - RNA, 19 nt, Homo sapiens
  misc_RNA (1)...(19): siRNA sense strand
gaggauggcuacaggauga

SEQ ID NO: 45433 - RNA, 19 nt, Homo sapiens
  misc_RNA (1)...(19): siRNA sense strand
gaguacggcuuccagguua

SEQ ID NO: 45434 - RNA, 19 nt, Homo sapiens
  misc_RNA (1)...(19): siRNA sense strand
caagucagcauuccaauaa

SEQ ID NO: 45435 - RNA, 19 nt, Homo sapiens
  misc_RNA (1)...(19): siRNA sense strand
cgacaaacauccaggguau

SEQ ID NO: 45436 - RNA, 19 nt, Homo sapiens
  misc_RNA (1)...(19): siRNA sense strand
agaaacccaucucguaaua

SEQ ID NO: 45437 - RNA, 19 nt, Homo sapiens
  misc_RNA (1)...(19): siRNA sense strand
gcgcaacccuguacgacua

SEQ ID NO: 45438 - RNA, 19 nt, Homo sapiens
  misc_RNA (1)...(19): siRNA sense strand
gcagcaagaucaaugugaa

SEQ ID NO: 45439 - RNA, 19 nt, Homo sapiens
  misc_RNA (1)...(19): siRNA sense strand
ggaccgcuuucaaauauug

SEQ ID NO: 45440 - RNA, 19 nt, Homo sapiens
  misc_RNA (1)...(19): siRNA sense strand
ggaugaaguuugccugcua

SEQ ID NO: 45441 - RNA, 19 nt, Homo sapiens
  misc_RNA (1)...(19): siRNA sense strand
guggaccgcuuucaaauau

SEQ ID NO: 45442 - RNA, 19 nt, Homo sapiens
  misc_RNA (1)...(19): siRNA sense strand
gaaggcggaugguuccuau

SEQ ID NO: 45443 - RNA, 19 nt, Homo sapiens
  misc_RNA (1)...(19): siRNA sense strand
ccaagguucugcagauuga

SEQ ID NO: 45444 - RNA, 19 nt, Homo sapiens
  misc_RNA (1)...(19): siRNA sense strand
gcuuugggcuccuagauga

SEQ ID NO: 45445 - RNA, 19 nt, Homo sapiens
  misc_RNA (1)...(19): siRNA sense strand
gggcagaucguguucauga

SEQ ID NO: 45446 - RNA, 19 nt, Homo sapiens
  misc_RNA (1)...(19): siRNA sense strand
gagcucacauccugguauu

SEQ ID NO: 45447 - RNA, 19 nt, Homo sapiens
  misc_RNA (1)...(19): siRNA sense strand
gaagaucucagcccgauuc

SEQ ID NO: 45448 - RNA, 19 nt, Homo sapiens
  misc_RNA (1)...(19): siRNA sense strand
gggaaagaauauuugauca

SEQ ID NO: 45449 - RNA, 19 nt, Homo sapiens
  misc_RNA (1)...(19): siRNA sense strand
gaucucagcccgauucuca

SEQ ID NO: 45450 - RNA, 19 nt, Homo sapiens
  misc_RNA (1)...(19): siRNA sense strand
aguuugaggugaagaaaua

SEQ ID NO: 45451 - RNA, 19 nt, Homo sapiens
  misc_RNA (1)...(19): siRNA sense strand
ggaggaaacagcaaaggaa

SEQ ID NO: 45452 - RNA, 19 nt, Homo sapiens
  misc_RNA (1)...(19): siRNA sense strand
aaacccaucucguaauaau

SEQ ID NO: 45453 - RNA, 19 nt, Homo sapiens
  misc_RNA (1)...(19): siRNA sense strand
guaggaggaucgccugaga

SEQ ID NO: 45454 - RNA, 19 nt, Homo sapiens
  misc_RNA (1)...(19): siRNA sense strand
ggaaacaguggaccgcuuu

SEQ ID NO: 45455 - RNA, 19 nt, Homo sapiens
  misc_RNA (1)...(19): siRNA sense strand
agacggaccagcccauuua

SEQ ID NO: 45456 - RNA, 19 nt, Homo sapiens
  misc_RNA (1)...(19): siRNA sense strand
gaagagcuguggccuccau

SEQ ID NO: 45457 - RNA, 19 nt, Homo sapiens
  misc_RNA (1)...(19): siRNA sense strand
ggagaccaguggaccuuau

SEQ ID NO: 45458 - RNA, 19 nt, Homo sapiens
  misc_RNA (1)...(19): siRNA sense strand
gagaugcgguguccaaggu

SEQ ID NO: 45459 - RNA, 19 nt, Homo sapiens
  misc_RNA (1)...(19): siRNA sense strand
aggaggaccugauugauga

SEQ ID NO: 45460 - RNA, 19 nt, Homo sapiens
  misc_RNA (1)...(19): siRNA sense strand
caacagcagcacccaguuu

SEQ ID NO: 45461 - RNA, 19 nt, Homo sapiens
  misc_RNA (1)...(19): siRNA sense strand
caacucugaucccaauaug

SEQ ID NO: 45462 - RNA, 19 nt, Homo sapiens
  misc_RNA (1)...(19): siRNA sense strand
ggcaaggucuuugaagcua

SEQ ID NO: 45463 - RNA, 19 nt, Homo sapiens
  misc_RNA (1)...(19): siRNA sense strand
ggccuguccucuauaacua

SEQ ID NO: 45464 - RNA, 19 nt, Homo sapiens
  misc_RNA (1)...(19): siRNA sense strand
ggaagaaggagguguacau

SEQ ID NO: 45465 - RNA, 19 nt, Homo sapiens
  misc_RNA (1)...(19): siRNA sense strand
gccaggaccuacagauaga

SEQ ID NO: 45466 - RNA, 19 nt, Homo sapiens
  misc_RNA (1)...(19): siRNA sense strand
gaaauugggucaguaugcu

SEQ ID NO: 45467 - RNA, 19 nt, Homo sapiens
  misc_RNA (1)...(19): siRNA sense strand
caacaugggcaaggucuuu

SEQ ID NO: 45468 - RNA, 19 nt, Homo sapiens
  misc_RNA (1)...(19): siRNA sense strand
gcaaggucuuugaagcuau

SEQ ID NO: 45469 - RNA, 19 nt, Homo sapiens
  misc_RNA (1)...(19): siRNA sense strand
gaaguuugccugcuacuac

SEQ ID NO: 45470 - RNA, 19 nt, Homo sapiens
  misc_RNA (1)...(19): siRNA sense strand
gaggaggaccugauugaug

SEQ ID NO: 45471 - RNA, 19 nt, Homo sapiens
  misc_RNA (1)...(19): siRNA sense strand
uguugaagguccugaguuu

SEQ ID NO: 45472 - RNA, 19 nt, Homo sapiens
  misc_RNA (1)...(19): siRNA sense strand
ucaaaggccacgucgagua

SEQ ID NO: 45473 - RNA, 19 nt, Homo sapiens
  misc_RNA (1)...(19): siRNA sense strand
gaagaaggagguguacaug

SEQ ID NO: 45474 - RNA, 19 nt, Homo sapiens
  misc_RNA (1)...(19): siRNA sense strand
ggaguacggcuuccagguu

SEQ ID NO: 45475 - RNA, 19 nt, Homo sapiens
  misc_RNA (1)...(19): siRNA sense strand
gaggacagguagugaaagg

SEQ ID NO: 45476 - RNA, 19 nt, Homo sapiens
  misc_RNA (1)...(19): siRNA sense strand
gcaaaggaacccugaaggu

SEQ ID NO: 45477 - RNA, 19 nt, Homo sapiens
  misc_RNA (1)...(19): siRNA sense strand
acaacaaccucauggcaau

SEQ ID NO: 45478 - RNA, 19 nt, Homo sapiens
  misc_RNA (1)...(19): siRNA sense strand
gagcuggucuaugaacuca

SEQ ID NO: 45479 - RNA, 19 nt, Homo sapiens
  misc_RNA (1)...(19): siRNA sense strand
gaccuuauccagaaagaga

SEQ ID NO: 45480 - RNA, 19 nt, Homo sapiens
  misc_RNA (1)...(19): siRNA sense strand
ccgugaagcuccacuuaga

SEQ ID NO: 45481 - RNA, 19 nt, Homo sapiens
  misc_RNA (1)...(19): siRNA sense strand
gcacccuccuucuacuuug

SEQ ID NO: 45482 - RNA, 19 nt, Homo sapiens
  misc_RNA (1)...(19): siRNA sense strand
ccaagucagcauuccaaua

SEQ ID NO: 45483 - RNA, 19 nt, Homo sapiens
  misc_RNA (1)...(19): siRNA sense strand
uggcauuccugucaaaguu

SEQ ID NO: 45484 - RNA, 19 nt, Homo sapiens
  misc_RNA (1)...(19): siRNA sense strand
caggugcccuugaaagaug

SEQ ID NO: 45485 - RNA, 19 nt, Homo sapiens
  misc_RNA (1)...(19): siRNA sense strand
gaggaucgccugagaaacu

SEQ ID NO: 45486 - RNA, 19 nt, Homo sapiens
  misc_RNA (1)...(19): siRNA sense strand
ucacagucaugguggagaa

SEQ ID NO: 45487 - RNA, 19 nt, Homo sapiens
  misc_RNA (1)...(19): siRNA sense strand
agucagcauuccaauaauu

SEQ ID NO: 45488 - RNA, 19 nt, Homo sapiens
  misc_RNA (1)...(19): siRNA sense strand
gcaacucugaucccaauau

SEQ ID NO: 45489 - RNA, 19 nt, Homo sapiens
  misc_RNA (1)...(19): siRNA sense strand
gggacacucugaaccugaa

SEQ ID NO: 45490 - RNA, 19 nt, Homo sapiens
  misc_RNA (1)...(19): siRNA sense strand
ugacacgucugcccaugau

SEQ ID NO: 45491 - RNA, 19 nt, Homo sapiens
  misc_RNA (1)...(19): siRNA sense strand
ggacgucacccuccugagu

SEQ ID NO: 45492 - RNA, 19 nt, Homo sapiens
  misc_RNA (1)...(19): siRNA sense strand
gaaacccaucucguaauaa

SEQ ID NO: 45493 - RNA, 19 nt, Homo sapiens
  misc_RNA (1)...(19): siRNA sense strand
caaggucuuugaagcuaug

SEQ ID NO: 45494 - RNA, 19 nt, Homo sapiens
  misc_RNA (1)...(19): siRNA sense strand
gggugcagcuccaggaugu

SEQ ID NO: 45495 - RNA, 19 nt, Homo sapiens
  misc_RNA (1)...(19): siRNA sense strand
gcagaucguguucaugaau

SEQ ID NO: 45496 - RNA, 19 nt, Homo sapiens
  misc_RNA (1)...(19): siRNA sense strand
gucagcauuccaauaauua

SEQ ID NO: 45497 - RNA, 19 nt, Homo sapiens
  misc_RNA (1)...(19): siRNA sense strand
gugaagcuccacuuagaaa

SEQ ID NO: 45498 - RNA, 19 nt, Homo sapiens
  misc_RNA (1)...(19): siRNA sense strand
cuaaucagaugcgcaacuu

SEQ ID NO: 45499 - RNA, 19 nt, Homo sapiens
  misc_RNA (1)...(19): siRNA sense strand
agaccaagaucacccaagu

SEQ ID NO: 45500 - RNA, 19 nt, Homo sapiens
  misc_RNA (1)...(19): siRNA sense strand
ggacagguagugaaaggau

SEQ ID NO: 45501 - RNA, 19 nt, Homo sapiens
  misc_RNA (1)...(19): siRNA sense strand
ggaccugauugaugaggau

SEQ ID NO: 45502 - RNA, 19 nt, Homo sapiens
  misc_RNA (1)...(19): siRNA sense strand
ggagaagacaacccggaaa

SEQ ID NO: 45503 - RNA, 19 nt, Homo sapiens
  misc_RNA (1)...(19): siRNA sense strand
gagggcagaucguguucau

SEQ ID NO: 45504 - RNA, 19 nt, Homo sapiens
  misc_RNA (1)...(19): siRNA sense strand
ggaagcaaacgaggacuau

SEQ ID NO: 45505 - RNA, 19 nt, Homo sapiens
  misc_RNA (1)...(19): siRNA sense strand
gaugaaaugcaguuagaca

SEQ ID NO: 45506 - RNA, 19 nt, Homo sapiens
  misc_RNA (1)...(19): siRNA sense strand
aagcaaacgaggacuauga

SEQ ID NO: 45507 - RNA, 19 nt, Homo sapiens
  misc_RNA (1)...(19): siRNA sense strand
gugcagagccauugaagca

SEQ ID NO: 45508 - RNA, 19 nt, Homo sapiens
  misc_RNA (1)...(19): siRNA sense strand
uggcaacucugaucccaau

SEQ ID NO: 45509 - RNA, 19 nt, Homo sapiens
  misc_RNA (1)...(19): siRNA sense strand
gcugcggccuguccucuau

SEQ ID NO: 45510 - RNA, 19 nt, Homo sapiens
  misc_RNA (1)...(19): siRNA sense strand
gcaagaagagcagggacaa

SEQ ID NO: 45511 - RNA, 19 nt, Homo sapiens
  misc_RNA (1)...(19): siRNA sense strand
gagagucugcgcaagaaga

SEQ ID NO: 45512 - RNA, 19 nt, Homo sapiens
  misc_RNA (1)...(19): siRNA sense strand
aaaaggcgauuaaugagaa

SEQ ID NO: 45513 - RNA, 19 nt, Homo sapiens
  misc_RNA (1)...(19): siRNA sense strand
gaagcugaauaugggcauu

SEQ ID NO: 45514 - RNA, 19 nt, Homo sapiens
  misc_RNA (1)...(19): siRNA sense strand
uugaugaaaugcaguuaga

SEQ ID NO: 45515 - RNA, 19 nt, Homo sapiens
  misc_RNA (1)...(19): siRNA sense strand
gugcccagcucaacgacuu

SEQ ID NO: 45516 - RNA, 19 nt, Homo sapiens
  misc_RNA (1)...(19): siRNA sense strand
gaccaucgcccuucaucau

SEQ ID NO: 45517 - RNA, 19 nt, Homo sapiens
  misc_RNA (1)...(19): siRNA sense strand
gagcaaaccaugaucuacu

SEQ ID NO: 45518 - RNA, 19 nt, Homo sapiens
  misc_RNA (1)...(19): siRNA sense strand
gcugagagucugcgcaaga

SEQ ID NO: 45519 - RNA, 19 nt, Homo sapiens
  misc_RNA (1)...(19): siRNA sense strand
gcauuccugucaaaguuuc

SEQ ID NO: 45520 - RNA, 19 nt, Homo sapiens
  misc_RNA (1)...(19): siRNA sense strand
gagccacauuucccucuca

SEQ ID NO: 45521 - RNA, 19 nt, Homo sapiens
  misc_RNA (1)...(19): siRNA sense strand
ggaggaggagcugcaguuu

SEQ ID NO: 45522 - RNA, 19 nt, Homo sapiens
  misc_RNA (1)...(19): siRNA sense strand
aauauguccuucccaacuu

SEQ ID NO: 45523 - RNA, 19 nt, Homo sapiens
  misc_RNA (1)...(19): siRNA sense strand
gaaccugggaaagaauauu

SEQ ID NO: 45524 - RNA, 19 nt, Homo sapiens
  misc_RNA (1)...(19): siRNA sense strand
gggagugcgugggcuuuga

SEQ ID NO: 45525 - RNA, 19 nt, Homo sapiens
  misc_RNA (1)...(19): siRNA sense strand
cgaggacuaugaggacuau

SEQ ID NO: 45526 - RNA, 19 nt, Homo sapiens
  misc_RNA (1)...(19): siRNA sense strand
gcugaacaaccgccagauu

SEQ ID NO: 45527 - RNA, 19 nt, Homo sapiens
  misc_RNA (1)...(19): siRNA sense strand
gggagcaaaccaugaucua

SEQ ID NO: 45528 - RNA, 19 nt, Homo sapiens
  misc_RNA (1)...(19): siRNA sense strand
ggcgauuaaugagaaauug

SEQ ID NO: 45529 - RNA, 19 nt, Homo sapiens
  misc_RNA (1)...(19): siRNA sense strand
caaggccgcugcuaaucag

SEQ ID NO: 45530 - RNA, 19 nt, Homo sapiens
  misc_RNA (1)...(19): siRNA sense strand
acaucuaacuggcuucugu

SEQ ID NO: 45531 - RNA, 19 nt, Homo sapiens
  misc_RNA (1)...(19): siRNA sense strand
gcguggagcugagagauaa

SEQ ID NO: 45532 - RNA, 19 nt, Homo sapiens
  misc_RNA (1)...(19): siRNA sense strand
gguaugagcccaucuaucu

SEQ ID NO: 45533 - RNA, 19 nt, Homo sapiens
  misc_RNA (1)...(19): siRNA sense strand
ccagggaccucucucuaau

SEQ ID NO: 45534 - RNA, 19 nt, Homo sapiens
  misc_RNA (1)...(19): siRNA sense strand
gcccgacuaucucgacuuu

SEQ ID NO: 45535 - RNA, 19 nt, Homo sapiens
  misc_RNA (1)...(19): siRNA sense strand
gccuguagcccauguugua

SEQ ID NO: 45536 - RNA, 19 nt, Homo sapiens
  misc_RNA (1)...(19): siRNA sense strand
ggucuacuuugggaucauu

SEQ ID NO: 45537 - RNA, 19 nt, Homo sapiens
  misc_RNA (1)...(19): siRNA sense strand
uagcccauguuguagcaaa

SEQ ID NO: 45538 - RNA, 19 nt, Homo sapiens
  misc_RNA (1)...(19): siRNA sense strand
agggaccucucucuaauca

SEQ ID NO: 45539 - RNA, 19 nt, Homo sapiens
  misc_RNA (1)...(19): siRNA sense strand
gccuguaccucaucuacuc

SEQ ID NO: 45540 - RNA, 19 nt, Homo sapiens
  misc_RNA (1)...(19): siRNA sense strand
ccgacuaucucgacuuugc

SEQ ID NO: 45541 - RNA, 19 nt, Homo sapiens
  misc_RNA (1)...(19): siRNA sense strand
cccagggaccucucucuaa

SEQ ID NO: 45542 - RNA, 19 nt, Homo sapiens
  misc_RNA (1)...(19): siRNA sense strand
ggcguggagcugagagaua

SEQ ID NO: 45543 - RNA, 19 nt, Homo sapiens
  misc_RNA (1)...(19): siRNA sense strand
ugggaucauugcccuguga

SEQ ID NO: 45544 - RNA, 19 nt, Homo sapiens
  misc_RNA (1)...(19): siRNA sense strand
gagaagggugaccgacuca

SEQ ID NO: 45545 - RNA, 19 nt, Homo sapiens
  misc_RNA (1)...(19): siRNA sense strand
ccuccucucugccaucaag

SEQ ID NO: 45546 - RNA, 19 nt, Homo sapiens
  misc_RNA (1)...(19): siRNA sense strand
aggccaagcccugguauga

SEQ ID NO: 45547 - RNA, 19 nt, Homo sapiens
  misc_RNA (1)...(19): siRNA sense strand
ccucuucuccuuccugauc

SEQ ID NO: 45548 - RNA, 19 nt, Homo sapiens
  misc_RNA (1)...(19): siRNA sense strand
agaaacagauaacaccaaa

SEQ ID NO: 45549 - RNA, 19 nt, Homo sapiens
  misc_RNA (1)...(19): siRNA sense strand
cagaaaagauggaaaagaa

SEQ ID NO: 45550 - RNA, 19 nt, Homo sapiens
  misc_RNA (1)...(19): siRNA sense strand
gaggagaaagaaacagaua

SEQ ID NO: 45551 - RNA, 19 nt, Homo sapiens
  misc_RNA (1)...(19): siRNA sense strand
ggaggaugaugaugaugau

SEQ ID NO: 45552 - RNA, 19 nt, Homo sapiens
  misc_RNA (1)...(19): siRNA sense strand
gaugaugacuccucuucag

SEQ ID NO: 45553 - RNA, 19 nt, Homo sapiens
  misc_RNA (1)...(19): siRNA sense strand
auucaaaccugaccacaga

SEQ ID NO: 45554 - RNA, 19 nt, Homo sapiens
  misc_RNA (1)...(19): siRNA sense strand
ggaugaugaugaugaugau

SEQ ID NO: 45555 - RNA, 19 nt, Homo sapiens
  misc_RNA (1)...(19): siRNA sense strand
cagauaacaccaaaccaaa

SEQ ID NO: 45556 - RNA, 19 nt, Homo sapiens
  misc_RNA (1)...(19): siRNA sense strand
ggagaaagaaacagauaac

SEQ ID NO: 45557 - RNA, 19 nt, Homo sapiens
  misc_RNA (1)...(19): siRNA sense strand
gaggcuacaagguccguua

SEQ ID NO: 45558 - RNA, 19 nt, Homo sapiens
  misc_RNA (1)...(19): siRNA sense strand
acacugcgcugguugaaaa

SEQ ID NO: 45559 - RNA, 19 nt, Homo sapiens
  misc_RNA (1)...(19): siRNA sense strand
aaaccugaccacagaauug

SEQ ID NO: 45560 - RNA, 19 nt, Homo sapiens
  misc_RNA (1)...(19): siRNA sense strand
acagauaacaccaaaccaa

SEQ ID NO: 45561 - RNA, 19 nt, Homo sapiens
  misc_RNA (1)...(19): siRNA sense strand
gcuacaagguccguuaugc

SEQ ID NO: 45562 - RNA, 19 nt, Homo sapiens
  misc_RNA (1)...(19): siRNA sense strand
gagaaagaaacagauaaca

SEQ ID NO: 45563 - RNA, 19 nt, Homo sapiens
  misc_RNA (1)...(19): siRNA sense strand
cagaggagaaagaaacaga

SEQ ID NO: 45564 - RNA, 19 nt, Homo sapiens
  misc_RNA (1)...(19): siRNA sense strand
gcaucauaauggacucugu

SEQ ID NO: 45565 - RNA, 19 nt, Homo sapiens
  misc_RNA (1)...(19): siRNA sense strand
caaaccugaccacagaauu

SEQ ID NO: 45566 - RNA, 19 nt, Homo sapiens
  misc_RNA (1)...(19): siRNA sense strand
cggaggaugaugaugauga

SEQ ID NO: 45567 - RNA, 19 nt, Homo sapiens
  misc_RNA (1)...(19): siRNA sense strand
ggacauccccagaaaagau

SEQ ID NO: 45568 - RNA, 19 nt, Homo sapiens
  misc_RNA (1)...(19): siRNA sense strand
gaauuggaggcuacaaggu

SEQ ID NO: 45569 - RNA, 19 nt, Homo sapiens
  misc_RNA (1)...(19): siRNA sense strand
acucuguggugcccucuga

SEQ ID NO: 45570 - RNA, 19 nt, Homo sapiens
  misc_RNA (1)...(19): siRNA sense strand
ccuggagcaucauaaugga

SEQ ID NO: 45571 - RNA, 19 nt, Homo sapiens
  misc_RNA (1)...(19): siRNA sense strand
ccaccuggagcaucauaau

SEQ ID NO: 45572 - RNA, 19 nt, Homo sapiens
  misc_RNA (1)...(19): siRNA sense strand
aaacagauaacaccaaacc

SEQ ID NO: 45573 - RNA, 19 nt, Homo sapiens
  misc_RNA (1)...(19): siRNA sense strand
aggaugaugaugaugauga

SEQ ID NO: 45574 - RNA, 19 nt, Homo sapiens
  misc_RNA (1)...(19): siRNA sense strand
aggagaaagaaacagauaa

SEQ ID NO: 45575 - RNA, 19 nt, Homo sapiens
  misc_RNA (1)...(19): siRNA sense strand
agaaacagauaacaccaaa

SEQ ID NO: 45576 - RNA, 19 nt, Homo sapiens
  misc_RNA (1)...(19): siRNA sense strand
cagaaaagauggaaaagaa

SEQ ID NO: 45577 - RNA, 19 nt, Homo sapiens
  misc_RNA (1)...(19): siRNA sense strand
gaggagaaagaaacagaua

SEQ ID NO: 45578 - RNA, 19 nt, Homo sapiens
  misc_RNA (1)...(19): siRNA sense strand
ggaggaugaugaugaugau

SEQ ID NO: 45579 - RNA, 19 nt, Homo sapiens
  misc_RNA (1)...(19): siRNA sense strand
gaugaugacuccucuucag

SEQ ID NO: 45580 - RNA, 19 nt, Homo sapiens
  misc_RNA (1)...(19): siRNA sense strand
auucaaaccugaccacaga

SEQ ID NO: 45581 - RNA, 19 nt, Homo sapiens
  misc_RNA (1)...(19): siRNA sense strand
ggaugaugaugaugaugau

SEQ ID NO: 45582 - RNA, 19 nt, Homo sapiens
  misc_RNA (1)...(19): siRNA sense strand
cagauaacaccaaaccaaa

SEQ ID NO: 45583 - RNA, 19 nt, Homo sapiens
  misc_RNA (1)...(19): siRNA sense strand
ggagaaagaaacagauaac

SEQ ID NO: 45584 - RNA, 19 nt, Homo sapiens
  misc_RNA (1)...(19): siRNA sense strand
gaggcuacaagguccguua

SEQ ID NO: 45585 - RNA, 19 nt, Homo sapiens
  misc_RNA (1)...(19): siRNA sense strand
acacugcgcugguugaaaa

SEQ ID NO: 45586 - RNA, 19 nt, Homo sapiens
  misc_RNA (1)...(19): siRNA sense strand
aaaccugaccacagaauug

SEQ ID NO: 45587 - RNA, 19 nt, Homo sapiens
  misc_RNA (1)...(19): siRNA sense strand
acagauaacaccaaaccaa

SEQ ID NO: 45588 - RNA, 19 nt, Homo sapiens
  misc_RNA (1)...(19): siRNA sense strand
gcuacaagguccguuaugc

SEQ ID NO: 45589 - RNA, 19 nt, Homo sapiens
  misc_RNA (1)...(19): siRNA sense strand
gagaaagaaacagauaaca

SEQ ID NO: 45590 - RNA, 19 nt, Homo sapiens
  misc_RNA (1)...(19): siRNA sense strand
cagaggagaaagaaacaga

SEQ ID NO: 45591 - RNA, 19 nt, Homo sapiens
  misc_RNA (1)...(19): siRNA sense strand
gcaucauaauggacucugu

SEQ ID NO: 45592 - RNA, 19 nt, Homo sapiens
  misc_RNA (1)...(19): siRNA sense strand
caaaccugaccacagaauu

SEQ ID NO: 45593 - RNA, 19 nt, Homo sapiens
  misc_RNA (1)...(19): siRNA sense strand
cggaggaugaugaugauga

SEQ ID NO: 45594 - RNA, 19 nt, Homo sapiens
  misc_RNA (1)...(19): siRNA sense strand
ggacauccccagaaaagau

SEQ ID NO: 45595 - RNA, 19 nt, Homo sapiens
  misc_RNA (1)...(19): siRNA sense strand
gaauuggaggcuacaaggu

SEQ ID NO: 45596 - RNA, 19 nt, Homo sapiens
  misc_RNA (1)...(19): siRNA sense strand
acucuguggugcccucuga

SEQ ID NO: 45597 - RNA, 19 nt, Homo sapiens
  misc_RNA (1)...(19): siRNA sense strand
ccuggagcaucauaaugga

SEQ ID NO: 45598 - RNA, 19 nt, Homo sapiens
  misc_RNA (1)...(19): siRNA sense strand
ccaccuggagcaucauaau

SEQ ID NO: 45599 - RNA, 19 nt, Homo sapiens
  misc_RNA (1)...(19): siRNA sense strand
aaacagauaacaccaaacc

SEQ ID NO: 45600 - RNA, 19 nt, Homo sapiens
  misc_RNA (1)...(19): siRNA sense strand
aggaugaugaugaugauga

SEQ ID NO: 45601 - RNA, 19 nt, Homo sapiens
  misc_RNA (1)...(19): siRNA sense strand
aggagaaagaaacagauaa

SEQ ID NO: 45602 - RNA, 19 nt, Homo sapiens
  misc_RNA (1)...(19): siRNA sense strand
agaaacagauaacaccaaa

SEQ ID NO: 45603 - RNA, 19 nt, Homo sapiens
  misc_RNA (1)...(19): siRNA sense strand
cagaaaagauggaaaagaa

SEQ ID NO: 45604 - RNA, 19 nt, Homo sapiens
  misc_RNA (1)...(19): siRNA sense strand
gaggagaaagaaacagaua

SEQ ID NO: 45605 - RNA, 19 nt, Homo sapiens
  misc_RNA (1)...(19): siRNA sense strand
ggaggaugaugaugaugau

SEQ ID NO: 45606 - RNA, 19 nt, Homo sapiens
  misc_RNA (1)...(19): siRNA sense strand
gaugaugacuccucuucag

SEQ ID NO: 45607 - RNA, 19 nt, Homo sapiens
  misc_RNA (1)...(19): siRNA sense strand
auucaaaccugaccacaga

SEQ ID NO: 45608 - RNA, 19 nt, Homo sapiens
  misc_RNA (1)...(19): siRNA sense strand
ggaugaugaugaugaugau

SEQ ID NO: 45609 - RNA, 19 nt, Homo sapiens
  misc_RNA (1)...(19): siRNA sense strand
cagauaacaccaaaccaaa

SEQ ID NO: 45610 - RNA, 19 nt, Homo sapiens
  misc_RNA (1)...(19): siRNA sense strand
ggagaaagaaacagauaac

SEQ ID NO: 45611 - RNA, 19 nt, Homo sapiens
  misc_RNA (1)...(19): siRNA sense strand
gaggcuacaagguccguua

SEQ ID NO: 45612 - RNA, 19 nt, Homo sapiens
  misc_RNA (1)...(19): siRNA sense strand
acacugcgcugguugaaaa

SEQ ID NO: 45613 - RNA, 19 nt, Homo sapiens
  misc_RNA (1)...(19): siRNA sense strand
aaaccugaccacagaauug

SEQ ID NO: 45614 - RNA, 19 nt, Homo sapiens
  misc_RNA (1)...(19): siRNA sense strand
acagauaacaccaaaccaa

SEQ ID NO: 45615 - RNA, 19 nt, Homo sapiens
  misc_RNA (1)...(19): siRNA sense strand
gcuacaagguccguuaugc

SEQ ID NO: 45616 - RNA, 19 nt, Homo sapiens
  misc_RNA (1)...(19): siRNA sense strand
gagaaagaaacagauaaca

SEQ ID NO: 45617 - RNA, 19 nt, Homo sapiens
  misc_RNA (1)...(19): siRNA sense strand
cagaggagaaagaaacaga

SEQ ID NO: 45618 - RNA, 19 nt, Homo sapiens
  misc_RNA (1)...(19): siRNA sense strand
gcaucauaauggacucugu

SEQ ID NO: 45619 - RNA, 19 nt, Homo sapiens
  misc_RNA (1)...(19): siRNA sense strand
caaaccugaccacagaauu

SEQ ID NO: 45620 - RNA, 19 nt, Homo sapiens
  misc_RNA (1)...(19): siRNA sense strand
cggaggaugaugaugauga

SEQ ID NO: 45621 - RNA, 19 nt, Homo sapiens
  misc_RNA (1)...(19): siRNA sense strand
ggacauccccagaaaagau

SEQ ID NO: 45622 - RNA, 19 nt, Homo sapiens
  misc_RNA (1)...(19): siRNA sense strand
gaauuggaggcuacaaggu

SEQ ID NO: 45623 - RNA, 19 nt, Homo sapiens
  misc_RNA (1)...(19): siRNA sense strand
acucuguggugcccucuga

SEQ ID NO: 45624 - RNA, 19 nt, Homo sapiens
  misc_RNA (1)...(19): siRNA sense strand
ccuggagcaucauaaugga

SEQ ID NO: 45625 - RNA, 19 nt, Homo sapiens
  misc_RNA (1)...(19): siRNA sense strand
ccaccuggagcaucauaau

SEQ ID NO: 45626 - RNA, 19 nt, Homo sapiens
  misc_RNA (1)...(19): siRNA sense strand
aaacagauaacaccaaacc

SEQ ID NO: 45627 - RNA, 19 nt, Homo sapiens
  misc_RNA (1)...(19): siRNA sense strand
aggaugaugaugaugauga

SEQ ID NO: 45628 - RNA, 19 nt, Homo sapiens
  misc_RNA (1)...(19): siRNA sense strand
aggagaaagaaacagauaa

SEQ ID NO: 45629 - RNA, 19 nt, Homo sapiens
  misc_RNA (1)...(19): siRNA sense strand
agaaacagauaacaccaaa

SEQ ID NO: 45630 - RNA, 19 nt, Homo sapiens
  misc_RNA (1)...(19): siRNA sense strand
cagaaaagauggaaaagaa

SEQ ID NO: 45631 - RNA, 19 nt, Homo sapiens
  misc_RNA (1)...(19): siRNA sense strand
gaggagaaagaaacagaua

SEQ ID NO: 45632 - RNA, 19 nt, Homo sapiens
  misc_RNA (1)...(19): siRNA sense strand
ggaggaugaugaugaugau

SEQ ID NO: 45633 - RNA, 19 nt, Homo sapiens
  misc_RNA (1)...(19): siRNA sense strand
gaugaugacuccucuucag

SEQ ID NO: 45634 - RNA, 19 nt, Homo sapiens
  misc_RNA (1)...(19): siRNA sense strand
auucaaaccugaccacaga

SEQ ID NO: 45635 - RNA, 19 nt, Homo sapiens
  misc_RNA (1)...(19): siRNA sense strand
ggaugaugaugaugaugau

SEQ ID NO: 45636 - RNA, 19 nt, Homo sapiens
  misc_RNA (1)...(19): siRNA sense strand
cagauaacaccaaaccaaa

SEQ ID NO: 45637 - RNA, 19 nt, Homo sapiens
  misc_RNA (1)...(19): siRNA sense strand
ggagaaagaaacagauaac

SEQ ID NO: 45638 - RNA, 19 nt, Homo sapiens
  misc_RNA (1)...(19): siRNA sense strand
gaggcuacaagguccguua

SEQ ID NO: 45639 - RNA, 19 nt, Homo sapiens
  misc_RNA (1)...(19): siRNA sense strand
acacugcgcugguugaaaa

SEQ ID NO: 45640 - RNA, 19 nt, Homo sapiens
  misc_RNA (1)...(19): siRNA sense strand
aaaccugaccacagaauug

SEQ ID NO: 45641 - RNA, 19 nt, Homo sapiens
  misc_RNA (1)...(19): siRNA sense strand
acagauaacaccaaaccaa

SEQ ID NO: 45642 - RNA, 19 nt, Homo sapiens
  misc_RNA (1)...(19): siRNA sense strand
gcuacaagguccguuaugc

SEQ ID NO: 45643 - RNA, 19 nt, Homo sapiens
  misc_RNA (1)...(19): siRNA sense strand
gagaaagaaacagauaaca

SEQ ID NO: 45644 - RNA, 19 nt, Homo sapiens
  misc_RNA (1)...(19): siRNA sense strand
cagaggagaaagaaacaga

SEQ ID NO: 45645 - RNA, 19 nt, Homo sapiens
  misc_RNA (1)...(19): siRNA sense strand
gcaucauaauggacucugu

SEQ ID NO: 45646 - RNA, 19 nt, Homo sapiens
  misc_RNA (1)...(19): siRNA sense strand
caaaccugaccacagaauu

SEQ ID NO: 45647 - RNA, 19 nt, Homo sapiens
  misc_RNA (1)...(19): siRNA sense strand
cggaggaugaugaugauga

SEQ ID NO: 45648 - RNA, 19 nt, Homo sapiens
  misc_RNA (1)...(19): siRNA sense strand
ggacauccccagaaaagau

SEQ ID NO: 45649 - RNA, 19 nt, Homo sapiens
  misc_RNA (1)...(19): siRNA sense strand
gaauuggaggcuacaaggu

SEQ ID NO: 45650 - RNA, 19 nt, Homo sapiens
  misc_RNA (1)...(19): siRNA sense strand
acucuguggugcccucuga

SEQ ID NO: 45651 - RNA, 19 nt, Homo sapiens
  misc_RNA (1)...(19): siRNA sense strand
ccuggagcaucauaaugga

SEQ ID NO: 45652 - RNA, 19 nt, Homo sapiens
  misc_RNA (1)...(19): siRNA sense strand
ccaccuggagcaucauaau

SEQ ID NO: 45653 - RNA, 19 nt, Homo sapiens
  misc_RNA (1)...(19): siRNA sense strand
aaacagauaacaccaaacc

SEQ ID NO: 45654 - RNA, 19 nt, Homo sapiens
  misc_RNA (1)...(19): siRNA sense strand
aggaugaugaugaugauga

SEQ ID NO: 45655 - RNA, 19 nt, Homo sapiens
  misc_RNA (1)...(19): siRNA sense strand
aggagaaagaaacagauaa

SEQ ID NO: 45656 - RNA, 19 nt, Homo sapiens
  misc_RNA (1)...(19): siRNA sense strand
agaaacagauaacaccaaa

SEQ ID NO: 45657 - RNA, 19 nt, Homo sapiens
  misc_RNA (1)...(19): siRNA sense strand
cagaaaagauggaaaagaa

SEQ ID NO: 45658 - RNA, 19 nt, Homo sapiens
  misc_RNA (1)...(19): siRNA sense strand
gaggagaaagaaacagaua

SEQ ID NO: 45659 - RNA, 19 nt, Homo sapiens
  misc_RNA (1)...(19): siRNA sense strand
ggaggaugaugaugaugau

SEQ ID NO: 45660 - RNA, 19 nt, Homo sapiens
  misc_RNA (1)...(19): siRNA sense strand
gaugaugacuccucuucag

SEQ ID NO: 45661 - RNA, 19 nt, Homo sapiens
  misc_RNA (1)...(19): siRNA sense strand
auucaaaccugaccacaga

SEQ ID NO: 45662 - RNA, 19 nt, Homo sapiens
  misc_RNA (1)...(19): siRNA sense strand
ggaugaugaugaugaugau

SEQ ID NO: 45663 - RNA, 19 nt, Homo sapiens
  misc_RNA (1)...(19): siRNA sense strand
cagauaacaccaaaccaaa

SEQ ID NO: 45664 - RNA, 19 nt, Homo sapiens
  misc_RNA (1)...(19): siRNA sense strand
ggagaaagaaacagauaac

SEQ ID NO: 45665 - RNA, 19 nt, Homo sapiens
  misc_RNA (1)...(19): siRNA sense strand
gaggcuacaagguccguua

SEQ ID NO: 45666 - RNA, 19 nt, Homo sapiens
  misc_RNA (1)...(19): siRNA sense strand
acacugcgcugguugaaaa

SEQ ID NO: 45667 - RNA, 19 nt, Homo sapiens
  misc_RNA (1)...(19): siRNA sense strand
aaaccugaccacagaauug

SEQ ID NO: 45668 - RNA, 19 nt, Homo sapiens
  misc_RNA (1)...(19): siRNA sense strand
acagauaacaccaaaccaa

SEQ ID NO: 45669 - RNA, 19 nt, Homo sapiens
  misc_RNA (1)...(19): siRNA sense strand
gcuacaagguccguuaugc

SEQ ID NO: 45670 - RNA, 19 nt, Homo sapiens
  misc_RNA (1)...(19): siRNA sense strand
gagaaagaaacagauaaca

SEQ ID NO: 45671 - RNA, 19 nt, Homo sapiens
  misc_RNA (1)...(19): siRNA sense strand
cagaggagaaagaaacaga

SEQ ID NO: 45672 - RNA, 19 nt, Homo sapiens
  misc_RNA (1)...(19): siRNA sense strand
gcaucauaauggacucugu

SEQ ID NO: 45673 - RNA, 19 nt, Homo sapiens
  misc_RNA (1)...(19): siRNA sense strand
caaaccugaccacagaauu

SEQ ID NO: 45674 - RNA, 19 nt, Homo sapiens
  misc_RNA (1)...(19): siRNA sense strand
cggaggaugaugaugauga

SEQ ID NO: 45675 - RNA, 19 nt, Homo sapiens
  misc_RNA (1)...(19): siRNA sense strand
ggacauccccagaaaagau

SEQ ID NO: 45676 - RNA, 19 nt, Homo sapiens
  misc_RNA (1)...(19): siRNA sense strand
gaauuggaggcuacaaggu

SEQ ID NO: 45677 - RNA, 19 nt, Homo sapiens
  misc_RNA (1)...(19): siRNA sense strand
acucuguggugcccucuga

SEQ ID NO: 45678 - RNA, 19 nt, Homo sapiens
  misc_RNA (1)...(19): siRNA sense strand
ccuggagcaucauaaugga

SEQ ID NO: 45679 - RNA, 19 nt, Homo sapiens
  misc_RNA (1)...(19): siRNA sense strand
ccaccuggagcaucauaau

SEQ ID NO: 45680 - RNA, 19 nt, Homo sapiens
  misc_RNA (1)...(19): siRNA sense strand
aaacagauaacaccaaacc

SEQ ID NO: 45681 - RNA, 19 nt, Homo sapiens
  misc_RNA (1)...(19): siRNA sense strand
aggaugaugaugaugauga

SEQ ID NO: 45682 - RNA, 19 nt, Homo sapiens
  misc_RNA (1)...(19): siRNA sense strand
aggagaaagaaacagauaa

SEQ ID NO: 45683 - RNA, 19 nt, Homo sapiens
  misc_RNA (1)...(19): siRNA sense strand
agaaacagauaacaccaaa

SEQ ID NO: 45684 - RNA, 19 nt, Homo sapiens
  misc_RNA (1)...(19): siRNA sense strand
cagaaaagauggaaaagaa

SEQ ID NO: 45685 - RNA, 19 nt, Homo sapiens
  misc_RNA (1)...(19): siRNA sense strand
gaggagaaagaaacagaua

SEQ ID NO: 45686 - RNA, 19 nt, Homo sapiens
  misc_RNA (1)...(19): siRNA sense strand
ggaggaugaugaugaugau

SEQ ID NO: 45687 - RNA, 19 nt, Homo sapiens
  misc_RNA (1)...(19): siRNA sense strand
gaugaugacuccucuucag

SEQ ID NO: 45688 - RNA, 19 nt, Homo sapiens
  misc_RNA (1)...(19): siRNA sense strand
auucaaaccugaccacaga

SEQ ID NO: 45689 - RNA, 19 nt, Homo sapiens
  misc_RNA (1)...(19): siRNA sense strand
ggaugaugaugaugaugau

SEQ ID NO: 45690 - RNA, 19 nt, Homo sapiens
  misc_RNA (1)...(19): siRNA sense strand
cagauaacaccaaaccaaa

SEQ ID NO: 45691 - RNA, 19 nt, Homo sapiens
  misc_RNA (1)...(19): siRNA sense strand
ggagaaagaaacagauaac

SEQ ID NO: 45692 - RNA, 19 nt, Homo sapiens
  misc_RNA (1)...(19): siRNA sense strand
gaggcuacaagguccguua

SEQ ID NO: 45693 - RNA, 19 nt, Homo sapiens
  misc_RNA (1)...(19): siRNA sense strand
acacugcgcugguugaaaa

SEQ ID NO: 45694 - RNA, 19 nt, Homo sapiens
  misc_RNA (1)...(19): siRNA sense strand
aaaccugaccacagaauug

SEQ ID NO: 45695 - RNA, 19 nt, Homo sapiens
  misc_RNA (1)...(19): siRNA sense strand
acagauaacaccaaaccaa

SEQ ID NO: 45696 - RNA, 19 nt, Homo sapiens
  misc_RNA (1)...(19): siRNA sense strand
gcuacaagguccguuaugc

SEQ ID NO: 45697 - RNA, 19 nt, Homo sapiens
  misc_RNA (1)...(19): siRNA sense strand
gagaaagaaacagauaaca

SEQ ID NO: 45698 - RNA, 19 nt, Homo sapiens
  misc_RNA (1)...(19): siRNA sense strand
cagaggagaaagaaacaga

SEQ ID NO: 45699 - RNA, 19 nt, Homo sapiens
  misc_RNA (1)...(19): siRNA sense strand
gcaucauaauggacucugu

SEQ ID NO: 45700 - RNA, 19 nt, Homo sapiens
  misc_RNA (1)...(19): siRNA sense strand
caaaccugaccacagaauu

SEQ ID NO: 45701 - RNA, 19 nt, Homo sapiens
  misc_RNA (1)...(19): siRNA sense strand
cggaggaugaugaugauga

SEQ ID NO: 45702 - RNA, 19 nt, Homo sapiens
  misc_RNA (1)...(19): siRNA sense strand
ggacauccccagaaaagau

SEQ ID NO: 45703 - RNA, 19 nt, Homo sapiens
  misc_RNA (1)...(19): siRNA sense strand
gaauuggaggcuacaaggu

SEQ ID NO: 45704 - RNA, 19 nt, Homo sapiens
  misc_RNA (1)...(19): siRNA sense strand
acucuguggugcccucuga

SEQ ID NO: 45705 - RNA, 19 nt, Homo sapiens
  misc_RNA (1)...(19): siRNA sense strand
ccuggagcaucauaaugga

SEQ ID NO: 45706 - RNA, 19 nt, Homo sapiens
  misc_RNA (1)...(19): siRNA sense strand
ccaccuggagcaucauaau

SEQ ID NO: 45707 - RNA, 19 nt, Homo sapiens
  misc_RNA (1)...(19): siRNA sense strand
aaacagauaacaccaaacc

SEQ ID NO: 45708 - RNA, 19 nt, Homo sapiens
  misc_RNA (1)...(19): siRNA sense strand
aggaugaugaugaugauga

SEQ ID NO: 45709 - RNA, 19 nt, Homo sapiens
  misc_RNA (1)...(19): siRNA sense strand
aggagaaagaaacagauaa

SEQ ID NO: 45710 - RNA, 19 nt, Homo sapiens
  misc_RNA (1)...(19): siRNA sense strand
agaaacagauaacaccaaa

SEQ ID NO: 45711 - RNA, 19 nt, Homo sapiens
  misc_RNA (1)...(19): siRNA sense strand
cagaaaagauggaaaagaa

SEQ ID NO: 45712 - RNA, 19 nt, Homo sapiens
  misc_RNA (1)...(19): siRNA sense strand
gaggagaaagaaacagaua

SEQ ID NO: 45713 - RNA, 19 nt, Homo sapiens
  misc_RNA (1)...(19): siRNA sense strand
ggaggaugaugaugaugau

SEQ ID NO: 45714 - RNA, 19 nt, Homo sapiens
  misc_RNA (1)...(19): siRNA sense strand
gaugaugacuccucuucag

SEQ ID NO: 45715 - RNA, 19 nt, Homo sapiens
  misc_RNA (1)...(19): siRNA sense strand
auucaaaccugaccacaga

SEQ ID NO: 45716 - RNA, 19 nt, Homo sapiens
  misc_RNA (1)...(19): siRNA sense strand
ggaugaugaugaugaugau

SEQ ID NO: 45717 - RNA, 19 nt, Homo sapiens
  misc_RNA (1)...(19): siRNA sense strand
cagauaacaccaaaccaaa

SEQ ID NO: 45718 - RNA, 19 nt, Homo sapiens
  misc_RNA (1)...(19): siRNA sense strand
ggagaaagaaacagauaac

SEQ ID NO: 45719 - RNA, 19 nt, Homo sapiens
  misc_RNA (1)...(19): siRNA sense strand
gaggcuacaagguccguua

SEQ ID NO: 45720 - RNA, 19 nt, Homo sapiens
  misc_RNA (1)...(19): siRNA sense strand
acacugcgcugguugaaaa

SEQ ID NO: 45721 - RNA, 19 nt, Homo sapiens
  misc_RNA (1)...(19): siRNA sense strand
aaaccugaccacagaauug

SEQ ID NO: 45722 - RNA, 19 nt, Homo sapiens
  misc_RNA (1)...(19): siRNA sense strand
acagauaacaccaaaccaa

SEQ ID NO: 45723 - RNA, 19 nt, Homo sapiens
  misc_RNA (1)...(19): siRNA sense strand
gcuacaagguccguuaugc

SEQ ID NO: 45724 - RNA, 19 nt, Homo sapiens
  misc_RNA (1)...(19): siRNA sense strand
gagaaagaaacagauaaca

SEQ ID NO: 45725 - RNA, 19 nt, Homo sapiens
  misc_RNA (1)...(19): siRNA sense strand
cagaggagaaagaaacaga

SEQ ID NO: 45726 - RNA, 19 nt, Homo sapiens
  misc_RNA (1)...(19): siRNA sense strand
gcaucauaauggacucugu

SEQ ID NO: 45727 - RNA, 19 nt, Homo sapiens
  misc_RNA (1)...(19): siRNA sense strand
caaaccugaccacagaauu

SEQ ID NO: 45728 - RNA, 19 nt, Homo sapiens
  misc_RNA (1)...(19): siRNA sense strand
cggaggaugaugaugauga

SEQ ID NO: 45729 - RNA, 19 nt, Homo sapiens
  misc_RNA (1)...(19): siRNA sense strand
ggacauccccagaaaagau

SEQ ID NO: 45730 - RNA, 19 nt, Homo sapiens
  misc_RNA (1)...(19): siRNA sense strand
gaauuggaggcuacaaggu

SEQ ID NO: 45731 - RNA, 19 nt, Homo sapiens
  misc_RNA (1)...(19): siRNA sense strand
acucuguggugcccucuga

SEQ ID NO: 45732 - RNA, 19 nt, Homo sapiens
  misc_RNA (1)...(19): siRNA sense strand
ccuggagcaucauaaugga

SEQ ID NO: 45733 - RNA, 19 nt, Homo sapiens
  misc_RNA (1)...(19): siRNA sense strand
ccaccuggagcaucauaau

SEQ ID NO: 45734 - RNA, 19 nt, Homo sapiens
  misc_RNA (1)...(19): siRNA sense strand
aaacagauaacaccaaacc

SEQ ID NO: 45735 - RNA, 19 nt, Homo sapiens
  misc_RNA (1)...(19): siRNA sense strand
aggaugaugaugaugauga

SEQ ID NO: 45736 - RNA, 19 nt, Homo sapiens
  misc_RNA (1)...(19): siRNA sense strand
aggagaaagaaacagauaa

SEQ ID NO: 45737 - RNA, 19 nt, Homo sapiens
  misc_RNA (1)...(19): siRNA sense strand
agaaacagauaacaccaaa

SEQ ID NO: 45738 - RNA, 19 nt, Homo sapiens
  misc_RNA (1)...(19): siRNA sense strand
cagaaaagauggaaaagaa

SEQ ID NO: 45739 - RNA, 19 nt, Homo sapiens
  misc_RNA (1)...(19): siRNA sense strand
gaggagaaagaaacagaua

SEQ ID NO: 45740 - RNA, 19 nt, Homo sapiens
  misc_RNA (1)...(19): siRNA sense strand
ggaggaugaugaugaugau

SEQ ID NO: 45741 - RNA, 19 nt, Homo sapiens
  misc_RNA (1)...(19): siRNA sense strand
gaugaugacuccucuucag

SEQ ID NO: 45742 - RNA, 19 nt, Homo sapiens
  misc_RNA (1)...(19): siRNA sense strand
auucaaaccugaccacaga

SEQ ID NO: 45743 - RNA, 19 nt, Homo sapiens
  misc_RNA (1)...(19): siRNA sense strand
ggaugaugaugaugaugau

SEQ ID NO: 45744 - RNA, 19 nt, Homo sapiens
  misc_RNA (1)...(19): siRNA sense strand
cagauaacaccaaaccaaa

SEQ ID NO: 45745 - RNA, 19 nt, Homo sapiens
  misc_RNA (1)...(19): siRNA sense strand
ggagaaagaaacagauaac

SEQ ID NO: 45746 - RNA, 19 nt, Homo sapiens
  misc_RNA (1)...(19): siRNA sense strand
gaggcuacaagguccguua

SEQ ID NO: 45747 - RNA, 19 nt, Homo sapiens
  misc_RNA (1)...(19): siRNA sense strand
acacugcgcugguugaaaa

SEQ ID NO: 45748 - RNA, 19 nt, Homo sapiens
  misc_RNA (1)...(19): siRNA sense strand
aaaccugaccacagaauug

SEQ ID NO: 45749 - RNA, 19 nt, Homo sapiens
  misc_RNA (1)...(19): siRNA sense strand
acagauaacaccaaaccaa

SEQ ID NO: 45750 - RNA, 19 nt, Homo sapiens
  misc_RNA (1)...(19): siRNA sense strand
gcuacaagguccguuaugc

SEQ ID NO: 45751 - RNA, 19 nt, Homo sapiens
  misc_RNA (1)...(19): siRNA sense strand
gagaaagaaacagauaaca

SEQ ID NO: 45752 - RNA, 19 nt, Homo sapiens
  misc_RNA (1)...(19): siRNA sense strand
cagaggagaaagaaacaga

SEQ ID NO: 45753 - RNA, 19 nt, Homo sapiens
  misc_RNA (1)...(19): siRNA sense strand
gcaucauaauggacucugu

SEQ ID NO: 45754 - RNA, 19 nt, Homo sapiens
  misc_RNA (1)...(19): siRNA sense strand
caaaccugaccacagaauu

SEQ ID NO: 45755 - RNA, 19 nt, Homo sapiens
  misc_RNA (1)...(19): siRNA sense strand
cggaggaugaugaugauga

SEQ ID NO: 45756 - RNA, 19 nt, Homo sapiens
  misc_RNA (1)...(19): siRNA sense strand
ggacauccccagaaaagau

SEQ ID NO: 45757 - RNA, 19 nt, Homo sapiens
  misc_RNA (1)...(19): siRNA sense strand
gaauuggaggcuacaaggu

SEQ ID NO: 45758 - RNA, 19 nt, Homo sapiens
  misc_RNA (1)...(19): siRNA sense strand
acucuguggugcccucuga

SEQ ID NO: 45759 - RNA, 19 nt, Homo sapiens
  misc_RNA (1)...(19): siRNA sense strand
ccuggagcaucauaaugga

SEQ ID NO: 45760 - RNA, 19 nt, Homo sapiens
  misc_RNA (1)...(19): siRNA sense strand
ccaccuggagcaucauaau

SEQ ID NO: 45761 - RNA, 19 nt, Homo sapiens
  misc_RNA (1)...(19): siRNA sense strand
aaacagauaacaccaaacc

SEQ ID NO: 45762 - RNA, 19 nt, Homo sapiens
  misc_RNA (1)...(19): siRNA sense strand
aggaugaugaugaugauga

SEQ ID NO: 45763 - RNA, 19 nt, Homo sapiens
  misc_RNA (1)...(19): siRNA sense strand
aggagaaagaaacagauaa

SEQ ID NO: 45764 - RNA, 19 nt, Homo sapiens
  misc_RNA (1)...(19): siRNA sense strand
gaguuucgcuguccuguac

SEQ ID NO: 45765 - RNA, 19 nt, Homo sapiens
  misc_RNA (1)...(19): siRNA sense strand
gucaguaccuuccgaaagc

SEQ ID NO: 45766 - RNA, 19 nt, Homo sapiens
  misc_RNA (1)...(19): siRNA sense strand
ggaccagaucuucuacuuc

SEQ ID NO: 45767 - RNA, 19 nt, Homo sapiens
  misc_RNA (1)...(19): siRNA sense strand
ugacugaggaccagaucuu

SEQ ID NO: 45768 - RNA, 19 nt, Homo sapiens
  misc_RNA (1)...(19): siRNA sense strand
ggacugcgacccucuugac

SEQ ID NO: 45769 - RNA, 19 nt, Homo sapiens
  misc_RNA (1)...(19): siRNA sense strand
ccagcucuauggagacaca

SEQ ID NO: 45770 - RNA, 19 nt, Homo sapiens
  misc_RNA (1)...(19): siRNA sense strand
aggaccagaucuucuacuu

SEQ ID NO: 45771 - RNA, 19 nt, Homo sapiens
  misc_RNA (1)...(19): siRNA sense strand
gcaggugcgccagcucuau

SEQ ID NO: 45772 - RNA, 19 nt, Homo sapiens
  misc_RNA (1)...(19): siRNA sense strand
cugaggaccagaucuucua

SEQ ID NO: 45773 - RNA, 19 nt, Homo sapiens
  misc_RNA (1)...(19): siRNA sense strand
cugcgacccucuugacucu

SEQ ID NO: 45774 - RNA, 19 nt, Homo sapiens
  misc_RNA (1)...(19): siRNA sense strand
gaaacgaggaguacaauaa

SEQ ID NO: 45775 - RNA, 19 nt, Homo sapiens
  misc_RNA (1)...(19): siRNA sense strand
gauccaagcaaccuucuuu

SEQ ID NO: 45776 - RNA, 19 nt, Homo sapiens
  misc_RNA (1)...(19): siRNA sense strand
gcgcuguccuggguucuua

SEQ ID NO: 45777 - RNA, 19 nt, Homo sapiens
  misc_RNA (1)...(19): siRNA sense strand
caggaccagugcaucuaua

SEQ ID NO: 45778 - RNA, 19 nt, Homo sapiens
  misc_RNA (1)...(19): siRNA sense strand
ggacacgaucuuucucaga

SEQ ID NO: 45779 - RNA, 19 nt, Homo sapiens
  misc_RNA (1)...(19): siRNA sense strand
gaccagugcaucuauaaca

SEQ ID NO: 45780 - RNA, 19 nt, Homo sapiens
  misc_RNA (1)...(19): siRNA sense strand
cgaaacgaggaguacaaua

SEQ ID NO: 45781 - RNA, 19 nt, Homo sapiens
  misc_RNA (1)...(19): siRNA sense strand
auaagucgguucaggagau

SEQ ID NO: 45782 - RNA, 19 nt, Homo sapiens
  misc_RNA (1)...(19): siRNA sense strand
agacagaggacacgaucuu

SEQ ID NO: 45783 - RNA, 19 nt, Homo sapiens
  misc_RNA (1)...(19): siRNA sense strand
agaagcagcacgagaagga

SEQ ID NO: 45784 - RNA, 19 nt, Homo sapiens
  misc_RNA (1)...(19): siRNA sense strand
gaggacacgaucuuucuca

SEQ ID NO: 45785 - RNA, 19 nt, Homo sapiens
  misc_RNA (1)...(19): siRNA sense strand
gcaucuauaacaccaccua

SEQ ID NO: 45786 - RNA, 19 nt, Homo sapiens
  misc_RNA (1)...(19): siRNA sense strand
uggagaagcagcacgagaa

SEQ ID NO: 45787 - RNA, 19 nt, Homo sapiens
  misc_RNA (1)...(19): siRNA sense strand
ccuccuaccucugcuggaa

SEQ ID NO: 45788 - RNA, 19 nt, Homo sapiens
  misc_RNA (1)...(19): siRNA sense strand
gacagaggacacgaucuuu

SEQ ID NO: 45789 - RNA, 19 nt, Homo sapiens
  misc_RNA (1)...(19): siRNA sense strand
gcaucggccuuucgaaacg

SEQ ID NO: 45790 - RNA, 19 nt, Homo sapiens
  misc_RNA (1)...(19): siRNA sense strand
gugagccacuggagaagca

SEQ ID NO: 45791 - RNA, 19 nt, Homo sapiens
  misc_RNA (1)...(19): siRNA sense strand
cccauugugugccaaccua

SEQ ID NO: 45792 - RNA, 19 nt, Homo sapiens
  misc_RNA (1)...(19): siRNA sense strand
aaacgaggaguacaauaag

SEQ ID NO: 45793 - RNA, 19 nt, Homo sapiens
  misc_RNA (1)...(19): siRNA sense strand
gcacgagaaggagaggaaa

SEQ ID NO: 45794 - RNA, 19 nt, Homo sapiens
  misc_RNA (1)...(19): siRNA sense strand
ggagaagcagcacgagaag

SEQ ID NO: 45795 - RNA, 19 nt, Homo sapiens
  misc_RNA (1)...(19): siRNA sense strand
ucgcaucggccuuucgaaa

SEQ ID NO: 45796 - RNA, 19 nt, Homo sapiens
  misc_RNA (1)...(19): siRNA sense strand
ggaagcccagaucccauug

SEQ ID NO: 45797 - RNA, 19 nt, Homo sapiens
  misc_RNA (1)...(19): siRNA sense strand
cagaggacacgaucuuucu

SEQ ID NO: 45798 - RNA, 19 nt, Homo sapiens
  misc_RNA (1)...(19): siRNA sense strand
caagcaaccuucuuuuacu

SEQ ID NO: 45799 - RNA, 19 nt, Homo sapiens
  misc_RNA (1)...(19): siRNA sense strand
aagcccagaucccauugug

SEQ ID NO: 45800 - RNA, 19 nt, Homo sapiens
  misc_RNA (1)...(19): siRNA sense strand
uguccuggguucuuacagu

SEQ ID NO: 45801 - RNA, 19 nt, Homo sapiens
  misc_RNA (1)...(19): siRNA sense strand
gaaacgaggaguacaauaa

SEQ ID NO: 45802 - RNA, 19 nt, Homo sapiens
  misc_RNA (1)...(19): siRNA sense strand
gauccaagcaaccuucuuu

SEQ ID NO: 45803 - RNA, 19 nt, Homo sapiens
  misc_RNA (1)...(19): siRNA sense strand
guuccuaccuggacgauga

SEQ ID NO: 45804 - RNA, 19 nt, Homo sapiens
  misc_RNA (1)...(19): siRNA sense strand
gcgcuguccuggguucuua

SEQ ID NO: 45805 - RNA, 19 nt, Homo sapiens
  misc_RNA (1)...(19): siRNA sense strand
gcucaccugcuguuccuua

SEQ ID NO: 45806 - RNA, 19 nt, Homo sapiens
  misc_RNA (1)...(19): siRNA sense strand
ggacacgaucuuucucaga

SEQ ID NO: 45807 - RNA, 19 nt, Homo sapiens
  misc_RNA (1)...(19): siRNA sense strand
cgaaacgaggaguacaaua

SEQ ID NO: 45808 - RNA, 19 nt, Homo sapiens
  misc_RNA (1)...(19): siRNA sense strand
gaaccagugcuucuauaac

SEQ ID NO: 45809 - RNA, 19 nt, Homo sapiens
  misc_RNA (1)...(19): siRNA sense strand
auaagucgguucaggagau

SEQ ID NO: 45810 - RNA, 19 nt, Homo sapiens
  misc_RNA (1)...(19): siRNA sense strand
agacagaggacacgaucuu

SEQ ID NO: 45811 - RNA, 19 nt, Homo sapiens
  misc_RNA (1)...(19): siRNA sense strand
agaagcagcacgagaagga

SEQ ID NO: 45812 - RNA, 19 nt, Homo sapiens
  misc_RNA (1)...(19): siRNA sense strand
gaggacacgaucuuucuca

SEQ ID NO: 45813 - RNA, 19 nt, Homo sapiens
  misc_RNA (1)...(19): siRNA sense strand
aaccagugcuucuauaacu

SEQ ID NO: 45814 - RNA, 19 nt, Homo sapiens
  misc_RNA (1)...(19): siRNA sense strand
gagggaggccgagaacaug

SEQ ID NO: 45815 - RNA, 19 nt, Homo sapiens
  misc_RNA (1)...(19): siRNA sense strand
uggagaagcagcacgagaa

SEQ ID NO: 45816 - RNA, 19 nt, Homo sapiens
  misc_RNA (1)...(19): siRNA sense strand
gacagaggacacgaucuuu

SEQ ID NO: 45817 - RNA, 19 nt, Homo sapiens
  misc_RNA (1)...(19): siRNA sense strand
ccuccuaccucugcuggaa

SEQ ID NO: 45818 - RNA, 19 nt, Homo sapiens
  misc_RNA (1)...(19): siRNA sense strand
gcaucggccuuucgaaacg

SEQ ID NO: 45819 - RNA, 19 nt, Homo sapiens
  misc_RNA (1)...(19): siRNA sense strand
gugagccacuggagaagca

SEQ ID NO: 45820 - RNA, 19 nt, Homo sapiens
  misc_RNA (1)...(19): siRNA sense strand
cccauugugugccaaccua

SEQ ID NO: 45821 - RNA, 19 nt, Homo sapiens
  misc_RNA (1)...(19): siRNA sense strand
aaacgaggaguacaauaag

SEQ ID NO: 45822 - RNA, 19 nt, Homo sapiens
  misc_RNA (1)...(19): siRNA sense strand
gcacgagaaggagaggaaa

SEQ ID NO: 45823 - RNA, 19 nt, Homo sapiens
  misc_RNA (1)...(19): siRNA sense strand
ggagaagcagcacgagaag

SEQ ID NO: 45824 - RNA, 19 nt, Homo sapiens
  misc_RNA (1)...(19): siRNA sense strand
cgagggaggccgagaacau

SEQ ID NO: 45825 - RNA, 19 nt, Homo sapiens
  misc_RNA (1)...(19): siRNA sense strand
ucgcaucggccuuucgaaa

SEQ ID NO: 45826 - RNA, 19 nt, Homo sapiens
  misc_RNA (1)...(19): siRNA sense strand
ggaggccgagaacauguug

SEQ ID NO: 45827 - RNA, 19 nt, Homo sapiens
  misc_RNA (1)...(19): siRNA sense strand
ggaagcccagaucccauug

SEQ ID NO: 45828 - RNA, 19 nt, Homo sapiens
  misc_RNA (1)...(19): siRNA sense strand
cagaggacacgaucuuucu

SEQ ID NO: 45829 - RNA, 19 nt, Homo sapiens
  misc_RNA (1)...(19): siRNA sense strand
caagcaaccuucuuuuacu

SEQ ID NO: 45830 - RNA, 19 nt, Homo sapiens
  misc_RNA (1)...(19): siRNA sense strand
aagcccagaucccauugug

SEQ ID NO: 45831 - RNA, 19 nt, Homo sapiens
  misc_RNA (1)...(19): siRNA sense strand
augggaccgucuccagaua

SEQ ID NO: 45832 - RNA, 19 nt, Homo sapiens
  misc_RNA (1)...(19): siRNA sense strand
uguccuggguucuuacagu

SEQ ID NO: 45833 - RNA, 19 nt, Homo sapiens
  misc_RNA (1)...(19): siRNA sense strand
uaucguaccuuccauguuu

SEQ ID NO: 45834 - RNA, 19 nt, Homo sapiens
  misc_RNA (1)...(19): siRNA sense strand
aagagaaccuucaagcuua

SEQ ID NO: 45835 - RNA, 19 nt, Homo sapiens
  misc_RNA (1)...(19): siRNA sense strand
gauagaggaguuaaugaua

SEQ ID NO: 45836 - RNA, 19 nt, Homo sapiens
  misc_RNA (1)...(19): siRNA sense strand
caaggaagauucguucaga

SEQ ID NO: 45837 - RNA, 19 nt, Homo sapiens
  misc_RNA (1)...(19): siRNA sense strand
gcacgugggagccauuaua

SEQ ID NO: 45838 - RNA, 19 nt, Homo sapiens
  misc_RNA (1)...(19): siRNA sense strand
ugacuuccaucaagcuaua

SEQ ID NO: 45839 - RNA, 19 nt, Homo sapiens
  misc_RNA (1)...(19): siRNA sense strand
uaaugauacuccuggaaua

SEQ ID NO: 45840 - RNA, 19 nt, Homo sapiens
  misc_RNA (1)...(19): siRNA sense strand
gcugaugggaugccuauua

SEQ ID NO: 45841 - RNA, 19 nt, Homo sapiens
  misc_RNA (1)...(19): siRNA sense strand
caagagaaccuucaagcuu

SEQ ID NO: 45842 - RNA, 19 nt, Homo sapiens
  misc_RNA (1)...(19): siRNA sense strand
gccauuauauugcuaacaa

SEQ ID NO: 45843 - RNA, 19 nt, Homo sapiens
  misc_RNA (1)...(19): siRNA sense strand
gcagagcgacuccaagaga

SEQ ID NO: 45844 - RNA, 19 nt, Homo sapiens
  misc_RNA (1)...(19): siRNA sense strand
ccaagucgcugccuuugca

SEQ ID NO: 45845 - RNA, 19 nt, Homo sapiens
  misc_RNA (1)...(19): siRNA sense strand
ugacugcucuuacggaauc

SEQ ID NO: 45846 - RNA, 19 nt, Homo sapiens
  misc_RNA (1)...(19): siRNA sense strand
gaugggaugccuauuaaug

SEQ ID NO: 45847 - RNA, 19 nt, Homo sapiens
  misc_RNA (1)...(19): siRNA sense strand
cugaugggaugccuauuaa

SEQ ID NO: 45848 - RNA, 19 nt, Homo sapiens
  misc_RNA (1)...(19): siRNA sense strand
gaccuucguuucauuucuu

SEQ ID NO: 45849 - RNA, 19 nt, Homo sapiens
  misc_RNA (1)...(19): siRNA sense strand
cagagcgacuccaagagaa

SEQ ID NO: 45850 - RNA, 19 nt, Homo sapiens
  misc_RNA (1)...(19): siRNA sense strand
cgugggagccauuauauug

SEQ ID NO: 45851 - RNA, 19 nt, Homo sapiens
  misc_RNA (1)...(19): siRNA sense strand
ccagauagaggaguuaaug

SEQ ID NO: 45852 - RNA, 19 nt, Homo sapiens
  misc_RNA (1)...(19): siRNA sense strand
gaacaucaaccuggacucu

SEQ ID NO: 45853 - RNA, 19 nt, Homo sapiens
  misc_RNA (1)...(19): siRNA sense strand
aauccuaugugaagcauca

SEQ ID NO: 45854 - RNA, 19 nt, Homo sapiens
  misc_RNA (1)...(19): siRNA sense strand
cauaccagauagaggaguu

SEQ ID NO: 45855 - RNA, 19 nt, Homo sapiens
  misc_RNA (1)...(19): siRNA sense strand
ugggaugccuauuaauguu

SEQ ID NO: 45856 - RNA, 19 nt, Homo sapiens
  misc_RNA (1)...(19): siRNA sense strand
agagaaccuucaagcuuau

SEQ ID NO: 45857 - RNA, 19 nt, Homo sapiens
  misc_RNA (1)...(19): siRNA sense strand
ugauacuccuggaauacaa

SEQ ID NO: 45858 - RNA, 19 nt, Homo sapiens
  misc_RNA (1)...(19): siRNA sense strand
ggaauccuaugugaagcau

SEQ ID NO: 45859 - RNA, 19 nt, Homo sapiens
  misc_RNA (1)...(19): siRNA sense strand
auagaggaguuaaugauac

SEQ ID NO: 45860 - RNA, 19 nt, Homo sapiens
  misc_RNA (1)...(19): siRNA sense strand
gggagccauuauauugcua

SEQ ID NO: 45861 - RNA, 19 nt, Homo sapiens
  misc_RNA (1)...(19): siRNA sense strand
ggagccauuauauugcuaa

SEQ ID NO: 45862 - RNA, 19 nt, Homo sapiens
  misc_RNA (1)...(19): siRNA sense strand
cagauagaggaguuaauga

SEQ ID NO: 45863 - RNA, 19 nt, Homo sapiens
  misc_RNA (1)...(19): siRNA sense strand
gcaaggaagauucguucag

SEQ ID NO: 45864 - RNA, 19 nt, Homo sapiens
  misc_RNA (1)...(19): siRNA sense strand
cuuacggaauccuauguga

SEQ ID NO: 45865 - RNA, 19 nt, Homo sapiens
  misc_RNA (1)...(19): siRNA sense strand
uuaaugauacuccuggaau

SEQ ID NO: 45866 - RNA, 19 nt, Homo sapiens
  misc_RNA (1)...(19): siRNA sense strand
uagaggaguuaaugauacu

SEQ ID NO: 45867 - RNA, 19 nt, Homo sapiens
  misc_RNA (1)...(19): siRNA sense strand
cuaucuggcuagcaaggaa

SEQ ID NO: 45868 - RNA, 19 nt, Homo sapiens
  misc_RNA (1)...(19): siRNA sense strand
aagaccagcaggugcauuu

SEQ ID NO: 45869 - RNA, 19 nt, Homo sapiens
  misc_RNA (1)...(19): siRNA sense strand
gggaugccuauuaauguug

SEQ ID NO: 45870 - RNA, 19 nt, Homo sapiens
  misc_RNA (1)...(19): siRNA sense strand
ggccugaacaagaacauca

SEQ ID NO: 45871 - RNA, 19 nt, Homo sapiens
  misc_RNA (1)...(19): siRNA sense strand
caguaagguccauccauga

SEQ ID NO: 45872 - RNA, 19 nt, Homo sapiens
  misc_RNA (1)...(19): siRNA sense strand
gaccagcaggugcauuuua

SEQ ID NO: 45873 - RNA, 19 nt, Homo sapiens
  misc_RNA (1)...(19): siRNA sense strand
gaagaccagcaggugcauu

SEQ ID NO: 45874 - RNA, 19 nt, Homo sapiens
  misc_RNA (1)...(19): siRNA sense strand
agauagaggaguuaaugau

SEQ ID NO: 45875 - RNA, 19 nt, Homo sapiens
  misc_RNA (1)...(19): siRNA sense strand
aggcagagcgacuccaaga

SEQ ID NO: 45876 - RNA, 19 nt, Homo sapiens
  misc_RNA (1)...(19): siRNA sense strand
cagcacgugggagccauua

SEQ ID NO: 45877 - RNA, 19 nt, Homo sapiens
  misc_RNA (1)...(19): siRNA sense strand
ugccuuugcauaccagaua

SEQ ID NO: 45878 - RNA, 19 nt, Homo sapiens
  misc_RNA (1)...(19): siRNA sense strand
guuaaugauacuccuggaa

SEQ ID NO: 45879 - RNA, 19 nt, Homo sapiens
  misc_RNA (1)...(19): siRNA sense strand
ugaccuucguuucauuucu

SEQ ID NO: 45880 - RNA, 19 nt, Homo sapiens
  misc_RNA (1)...(19): siRNA sense strand
uuacggaauccuaugugaa

SEQ ID NO: 45881 - RNA, 19 nt, Homo sapiens
  misc_RNA (1)...(19): siRNA sense strand
ggcaagcgcuuccgaaaga

SEQ ID NO: 45882 - RNA, 19 nt, Homo sapiens
  misc_RNA (1)...(19): siRNA sense strand
acaacgagaugcagaaguu

SEQ ID NO: 45883 - RNA, 19 nt, Homo sapiens
  misc_RNA (1)...(19): siRNA sense strand
ucacacagaucgccuccuu

SEQ ID NO: 45884 - RNA, 19 nt, Homo sapiens
  misc_RNA (1)...(19): siRNA sense strand
caacuucgacuggcucuuu

SEQ ID NO: 45885 - RNA, 19 nt, Homo sapiens
  misc_RNA (1)...(19): siRNA sense strand
ggucagaacccauucagau

SEQ ID NO: 45886 - RNA, 19 nt, Homo sapiens
  misc_RNA (1)...(19): siRNA sense strand
uggaagauaucaauguuuc

SEQ ID NO: 45887 - RNA, 19 nt, Homo sapiens
  misc_RNA (1)...(19): siRNA sense strand
gaucagcaccuuccuggau

SEQ ID NO: 45888 - RNA, 19 nt, Homo sapiens
  misc_RNA (1)...(19): siRNA sense strand
ccuggaagauaucaauguu

SEQ ID NO: 45889 - RNA, 19 nt, Homo sapiens
  misc_RNA (1)...(19): siRNA sense strand
ggaacaacgagaugcagaa

SEQ ID NO: 45890 - RNA, 19 nt, Homo sapiens
  misc_RNA (1)...(19): siRNA sense strand
gaagauaucaauguuucug

SEQ ID NO: 45891 - RNA, 19 nt, Homo sapiens
  misc_RNA (1)...(19): siRNA sense strand
ucaccaacaugcuccugaa

SEQ ID NO: 45892 - RNA, 19 nt, Homo sapiens
  misc_RNA (1)...(19): siRNA sense strand
cgucaccgcuugugucauc

SEQ ID NO: 45893 - RNA, 19 nt, Homo sapiens
  misc_RNA (1)...(19): siRNA sense strand
gcaagcgcuuccgaaagaa

SEQ ID NO: 45894 - RNA, 19 nt, Homo sapiens
  misc_RNA (1)...(19): siRNA sense strand
uaucaauguuucugucugu

SEQ ID NO: 45895 - RNA, 19 nt, Homo sapiens
  misc_RNA (1)...(19): siRNA sense strand
acagaucgccuccuucaug

SEQ ID NO: 45896 - RNA, 19 nt, Homo sapiens
  misc_RNA (1)...(19): siRNA sense strand
uugcaagggcccacucuua

SEQ ID NO: 45897 - RNA, 19 nt, Homo sapiens
  misc_RNA (1)...(19): siRNA sense strand
ccgcuugugucaucagcua

SEQ ID NO: 45898 - RNA, 19 nt, Homo sapiens
  misc_RNA (1)...(19): siRNA sense strand
gcacgguggcagagaucua

SEQ ID NO: 45899 - RNA, 19 nt, Homo sapiens
  misc_RNA (1)...(19): siRNA sense strand
gaacaacgagaugcagaag

SEQ ID NO: 45900 - RNA, 19 nt, Homo sapiens
  misc_RNA (1)...(19): siRNA sense strand
uggcugcccuuccagauca

SEQ ID NO: 45901 - RNA, 19 nt, Homo sapiens
  misc_RNA (1)...(19): siRNA sense strand
ugcaagggcccacucuuaa

SEQ ID NO: 45902 - RNA, 19 nt, Homo sapiens
  misc_RNA (1)...(19): siRNA sense strand
acacagaucgccuccuuca

SEQ ID NO: 45903 - RNA, 19 nt, Homo sapiens
  misc_RNA (1)...(19): siRNA sense strand
uggcugggcuggcucaaca

SEQ ID NO: 45904 - RNA, 19 nt, Homo sapiens
  misc_RNA (1)...(19): siRNA sense strand
ccagggagugugccagaaa

SEQ ID NO: 45905 - RNA, 19 nt, Homo sapiens
  misc_RNA (1)...(19): siRNA sense strand
ggaacgccagauucacaaa

SEQ ID NO: 45906 - RNA, 19 nt, Homo sapiens
  misc_RNA (1)...(19): siRNA sense strand
gcaagggcccacucuuaac

SEQ ID NO: 45907 - RNA, 19 nt, Homo sapiens
  misc_RNA (1)...(19): siRNA sense strand
ccaucaccaucuccaacaa

SEQ ID NO: 45908 - RNA, 19 nt, Homo sapiens
  misc_RNA (1)...(19): siRNA sense strand
ucugggaaguguucaccaa

SEQ ID NO: 45909 - RNA, 19 nt, Homo sapiens
  misc_RNA (1)...(19): siRNA sense strand
caccaucuccaacaacuuc

SEQ ID NO: 45910 - RNA, 19 nt, Homo sapiens
  misc_RNA (1)...(19): siRNA sense strand
aucagcaccuuccuggaua

SEQ ID NO: 45911 - RNA, 19 nt, Homo sapiens
  misc_RNA (1)...(19): siRNA sense strand
ugaaggaguacagcgauga

SEQ ID NO: 45912 - RNA, 19 nt, Homo sapiens
  misc_RNA (1)...(19): siRNA sense strand
cacccuagagaacaucuuu

SEQ ID NO: 45913 - RNA, 19 nt, Homo sapiens
  misc_RNA (1)...(19): siRNA sense strand
gaacgccagauucacaaac

SEQ ID NO: 45914 - RNA, 19 nt, Homo sapiens
  misc_RNA (1)...(19): siRNA sense strand
gcacacugcggaccuccau

SEQ ID NO: 45915 - RNA, 19 nt, Homo sapiens
  misc_RNA (1)...(19): siRNA sense strand
gucagaacccauucagaug

SEQ ID NO: 45916 - RNA, 19 nt, Homo sapiens
  misc_RNA (1)...(19): siRNA sense strand
ugcagaaguucaaggagau

SEQ ID NO: 45917 - RNA, 19 nt, Homo sapiens
  misc_RNA (1)...(19): siRNA sense strand
cuaccuggcccuggugaaa

SEQ ID NO: 45918 - RNA, 19 nt, Homo sapiens
  misc_RNA (1)...(19): siRNA sense strand
gggcaagcgcuuccgaaag

SEQ ID NO: 45919 - RNA, 19 nt, Homo sapiens
  misc_RNA (1)...(19): siRNA sense strand
gaaggaguacagcgaugag

SEQ ID NO: 45920 - RNA, 19 nt, Homo sapiens
  misc_RNA (1)...(19): siRNA sense strand
guggaacgccagauucaca

SEQ ID NO: 45921 - RNA, 19 nt, Homo sapiens
  misc_RNA (1)...(19): siRNA sense strand
cagggagugugccagaaag

SEQ ID NO: 45922 - RNA, 19 nt, Homo sapiens
  misc_RNA (1)...(19): siRNA sense strand
gauaucaauguuucugucu

SEQ ID NO: 45923 - RNA, 19 nt, Homo sapiens
  misc_RNA (1)...(19): siRNA sense strand
gugcugcugcuauucauca

SEQ ID NO: 45924 - RNA, 19 nt, Homo sapiens
  misc_RNA (1)...(19): siRNA sense strand
uccggaccaugaaggagua

SEQ ID NO: 45925 - RNA, 19 nt, Homo sapiens
  misc_RNA (1)...(19): siRNA sense strand
uuaucuccaugaaccugua

SEQ ID NO: 45926 - RNA, 19 nt, Homo sapiens
  misc_RNA (1)...(19): siRNA sense strand
gcaggucagaacccauuca

SEQ ID NO: 45927 - RNA, 19 nt, Homo sapiens
  misc_RNA (1)...(19): siRNA sense strand
ucaacccacugguguacgu

SEQ ID NO: 45928 - RNA, 19 nt, Homo sapiens
  misc_RNA (1)...(19): siRNA sense strand
ugguugugcugcugcuauu

SEQ ID NO: 45929 - RNA, 19 nt, Homo sapiens
  misc_RNA (1)...(19): siRNA sense strand
gaucauccucuucaucauc

SEQ ID NO: 45930 - RNA, 19 nt, Homo sapiens
  misc_RNA (1)...(19): siRNA sense strand
acgagggccuggacauuga

SEQ ID NO: 45931 - RNA, 19 nt, Homo sapiens
  misc_RNA (1)...(19): siRNA sense strand
gaccagacagccaccuaug

SEQ ID NO: 45932 - RNA, 19 nt, Homo sapiens
  misc_RNA (1)...(19): siRNA sense strand
caucaucgugccuaucuuc

SEQ ID NO: 45933 - RNA, 19 nt, Homo sapiens
  misc_RNA (1)...(19): siRNA sense strand
agaggaacacgcugaagga

SEQ ID NO: 45934 - RNA, 19 nt, Homo sapiens
  misc_RNA (1)...(19): siRNA sense strand
ccagacagccaccuaugag

SEQ ID NO: 45935 - RNA, 19 nt, Homo sapiens
  misc_RNA (1)...(19): siRNA sense strand
cuacgagggccuggacauu

SEQ ID NO: 45936 - RNA, 19 nt, Homo sapiens
  misc_RNA (1)...(19): siRNA sense strand
uccagacgcugcugaucau

SEQ ID NO: 45937 - RNA, 19 nt, Homo sapiens
  misc_RNA (1)...(19): siRNA sense strand
aggaagaucacaccuacga

SEQ ID NO: 45938 - RNA, 19 nt, Homo sapiens
  misc_RNA (1)...(19): siRNA sense strand
aggcuggcauggaggaaga

SEQ ID NO: 45939 - RNA, 19 nt, Homo sapiens
  misc_RNA (1)...(19): siRNA sense strand
gaucauccucuucaucauc

SEQ ID NO: 45940 - RNA, 19 nt, Homo sapiens
  misc_RNA (1)...(19): siRNA sense strand
acgagggccuggacauuga

SEQ ID NO: 45941 - RNA, 19 nt, Homo sapiens
  misc_RNA (1)...(19): siRNA sense strand
gaccagacagccaccuaug

SEQ ID NO: 45942 - RNA, 19 nt, Homo sapiens
  misc_RNA (1)...(19): siRNA sense strand
caucaucgugccuaucuuc

SEQ ID NO: 45943 - RNA, 19 nt, Homo sapiens
  misc_RNA (1)...(19): siRNA sense strand
agaggaacacgcugaagga

SEQ ID NO: 45944 - RNA, 19 nt, Homo sapiens
  misc_RNA (1)...(19): siRNA sense strand
ccagacagccaccuaugag

SEQ ID NO: 45945 - RNA, 19 nt, Homo sapiens
  misc_RNA (1)...(19): siRNA sense strand
cuacgagggccuggacauu

SEQ ID NO: 45946 - RNA, 19 nt, Homo sapiens
  misc_RNA (1)...(19): siRNA sense strand
uccagacgcugcugaucau

SEQ ID NO: 45947 - RNA, 19 nt, Homo sapiens
  misc_RNA (1)...(19): siRNA sense strand
aggaagaucacaccuacga

SEQ ID NO: 45948 - RNA, 19 nt, Homo sapiens
  misc_RNA (1)...(19): siRNA sense strand
aggcuggcauggaggaaga

SEQ ID NO: 45949 - RNA, 19 nt, Homo sapiens
  misc_RNA (1)...(19): siRNA sense strand
gaaauuuccuccuaacaua

SEQ ID NO: 45950 - RNA, 19 nt, Homo sapiens
  misc_RNA (1)...(19): siRNA sense strand
ggaaauaccuucauuggau

SEQ ID NO: 45951 - RNA, 19 nt, Homo sapiens
  misc_RNA (1)...(19): siRNA sense strand
ggaaauguguggauauuga

SEQ ID NO: 45952 - RNA, 19 nt, Homo sapiens
  misc_RNA (1)...(19): siRNA sense strand
ggaaguuucuugugcauuu

SEQ ID NO: 45953 - RNA, 19 nt, Homo sapiens
  misc_RNA (1)...(19): siRNA sense strand
gcagaugaaugccuacuuu

SEQ ID NO: 45954 - RNA, 19 nt, Homo sapiens
  misc_RNA (1)...(19): siRNA sense strand
auacuaagcugauguguuu

SEQ ID NO: 45955 - RNA, 19 nt, Homo sapiens
  misc_RNA (1)...(19): siRNA sense strand
acacauaccuugccucuga

SEQ ID NO: 45956 - RNA, 19 nt, Homo sapiens
  misc_RNA (1)...(19): siRNA sense strand
guagagauauugaugaaug

SEQ ID NO: 45957 - RNA, 19 nt, Homo sapiens
  misc_RNA (1)...(19): siRNA sense strand
gcaagggaaucuaugugua

SEQ ID NO: 45958 - RNA, 19 nt, Homo sapiens
  misc_RNA (1)...(19): siRNA sense strand
ugacagaaaucaaugaaug

SEQ ID NO: 45959 - RNA, 19 nt, Homo sapiens
  misc_RNA (1)...(19): siRNA sense strand
cacaagcacuguagagaua

SEQ ID NO: 45960 - RNA, 19 nt, Homo sapiens
  misc_RNA (1)...(19): siRNA sense strand
gaauaccgccuugaauuua

SEQ ID NO: 45961 - RNA, 19 nt, Homo sapiens
  misc_RNA (1)...(19): siRNA sense strand
agaggagacugcauuaaua

SEQ ID NO: 45962 - RNA, 19 nt, Homo sapiens
  misc_RNA (1)...(19): siRNA sense strand
ggagaccacugugaagaua

SEQ ID NO: 45963 - RNA, 19 nt, Homo sapiens
  misc_RNA (1)...(19): siRNA sense strand
gcauagauguugacgaaug

SEQ ID NO: 45964 - RNA, 19 nt, Homo sapiens
  misc_RNA (1)...(19): siRNA sense strand
aaacugcagugcuuugaua

SEQ ID NO: 45965 - RNA, 19 nt, Homo sapiens
  misc_RNA (1)...(19): siRNA sense strand
caagaggacugcuguggaa

SEQ ID NO: 45966 - RNA, 19 nt, Homo sapiens
  misc_RNA (1)...(19): siRNA sense strand
ggaauggguuauacgguuu

SEQ ID NO: 45967 - RNA, 19 nt, Homo sapiens
  misc_RNA (1)...(19): siRNA sense strand
gccaagauauuaaugaaug

SEQ ID NO: 45968 - RNA, 19 nt, Homo sapiens
  misc_RNA (1)...(19): siRNA sense strand
guacuaugauccugugaaa

SEQ ID NO: 45969 - RNA, 19 nt, Homo sapiens
  misc_RNA (1)...(19): siRNA sense strand
ggugagaacuauaaagaug

SEQ ID NO: 45970 - RNA, 19 nt, Homo sapiens
  misc_RNA (1)...(19): siRNA sense strand
uaaaggaccuguauuuguc

SEQ ID NO: 45971 - RNA, 19 nt, Homo sapiens
  misc_RNA (1)...(19): siRNA sense strand
gugaagauaucaaugaaug

SEQ ID NO: 45972 - RNA, 19 nt, Homo sapiens
  misc_RNA (1)...(19): siRNA sense strand
aaacaagaaugcugcugua

SEQ ID NO: 45973 - RNA, 19 nt, Homo sapiens
  misc_RNA (1)...(19): siRNA sense strand
gugaagauauugaugaaug

SEQ ID NO: 45974 - RNA, 19 nt, Homo sapiens
  misc_RNA (1)...(19): siRNA sense strand
ggacgcaugucauccauuc

SEQ ID NO: 45975 - RNA, 19 nt, Homo sapiens
  misc_RNA (1)...(19): siRNA sense strand
aaacugaugucuaccaaga

SEQ ID NO: 45976 - RNA, 19 nt, Homo sapiens
  misc_RNA (1)...(19): siRNA sense strand
gaggaaauguguggauauu

SEQ ID NO: 45977 - RNA, 19 nt, Homo sapiens
  misc_RNA (1)...(19): siRNA sense strand
gguacuaacugcauagaug

SEQ ID NO: 45978 - RNA, 19 nt, Homo sapiens
  misc_RNA (1)...(19): siRNA sense strand
ggauauugaugaauguuug

SEQ ID NO: 45979 - RNA, 19 nt, Homo sapiens
  misc_RNA (1)...(19): siRNA sense strand
aaagugaaauuuccuccua

SEQ ID NO: 45980 - RNA, 19 nt, Homo sapiens
  misc_RNA (1)...(19): siRNA sense strand
gaacaccaccacucucauu

SEQ ID NO: 45981 - RNA, 19 nt, Homo sapiens
  misc_RNA (1)...(19): siRNA sense strand
ucagcuagaugacaauaaa

SEQ ID NO: 45982 - RNA, 19 nt, Homo sapiens
  misc_RNA (1)...(19): siRNA sense strand
caucagguuucaagaauug

SEQ ID NO: 45983 - RNA, 19 nt, Homo sapiens
  misc_RNA (1)...(19): siRNA sense strand
gaugaccuguuucgaugua

SEQ ID NO: 45984 - RNA, 19 nt, Homo sapiens
  misc_RNA (1)...(19): siRNA sense strand
caagaaugcugcuguacau

SEQ ID NO: 45985 - RNA, 19 nt, Homo sapiens
  misc_RNA (1)...(19): siRNA sense strand
ccagugagauauaccugua

SEQ ID NO: 45986 - RNA, 19 nt, Homo sapiens
  misc_RNA (1)...(19): siRNA sense strand
ggaggguacuaacugcaua

SEQ ID NO: 45987 - RNA, 19 nt, Homo sapiens
  misc_RNA (1)...(19): siRNA sense strand
cuauaaagaugcagaugaa

SEQ ID NO: 45988 - RNA, 19 nt, Homo sapiens
  misc_RNA (1)...(19): siRNA sense strand
gcaaggagucaaagugaaa

SEQ ID NO: 45989 - RNA, 19 nt, Homo sapiens
  misc_RNA (1)...(19): siRNA sense strand
guaaaggaccuguauuugu

SEQ ID NO: 45990 - RNA, 19 nt, Homo sapiens
  misc_RNA (1)...(19): siRNA sense strand
caagguguaugcccuaaug

SEQ ID NO: 45991 - RNA, 19 nt, Homo sapiens
  misc_RNA (1)...(19): siRNA sense strand
gaccauacauuccacauac

SEQ ID NO: 45992 - RNA, 19 nt, Homo sapiens
  misc_RNA (1)...(19): siRNA sense strand
caacaggccagaagacaaa

SEQ ID NO: 45993 - RNA, 19 nt, Homo sapiens
  misc_RNA (1)...(19): siRNA sense strand
gccaauccaucaccaugua

SEQ ID NO: 45994 - RNA, 19 nt, Homo sapiens
  misc_RNA (1)...(19): siRNA sense strand
agaagaaacugaugucuac

SEQ ID NO: 45995 - RNA, 19 nt, Homo sapiens
  misc_RNA (1)...(19): siRNA sense strand
gagaggagacugcauuaau

SEQ ID NO: 45996 - RNA, 19 nt, Homo sapiens
  misc_RNA (1)...(19): siRNA sense strand
cugcauagauguugacgaa

SEQ ID NO: 45997 - RNA, 19 nt, Homo sapiens
  misc_RNA (1)...(19): siRNA sense strand
caagggaaucuauguguaa

SEQ ID NO: 45998 - RNA, 19 nt, Homo sapiens
  misc_RNA (1)...(19): siRNA sense strand
gugaggauauugaugaaug

SEQ ID NO: 45999 - RNA, 19 nt, Homo sapiens
  misc_RNA (1)...(19): siRNA sense strand
ccgagcaucuguaaaguga

SEQ ID NO: 46000 - RNA, 19 nt, Homo sapiens
  misc_RNA (1)...(19): siRNA sense strand
ggaugucucucugcaagaa

SEQ ID NO: 46001 - RNA, 19 nt, Homo sapiens
  misc_RNA (1)...(19): siRNA sense strand
uaaauagcuuugaggaguu

SEQ ID NO: 46002 - RNA, 19 nt, Homo sapiens
  misc_RNA (1)...(19): siRNA sense strand
ugaauucuccuggaucuua

SEQ ID NO: 46003 - RNA, 19 nt, Homo sapiens
  misc_RNA (1)...(19): siRNA sense strand
cagaggaaauguguggaua

SEQ ID NO: 46004 - RNA, 19 nt, Homo sapiens
  misc_RNA (1)...(19): siRNA sense strand
caagaccguuuucuaaaua

SEQ ID NO: 46005 - RNA, 19 nt, Homo sapiens
  misc_RNA (1)...(19): siRNA sense strand
gaugagcagugugugaauu

SEQ ID NO: 46006 - RNA, 19 nt, Homo sapiens
  misc_RNA (1)...(19): siRNA sense strand
uggaaugccuaccggguua

SEQ ID NO: 46007 - RNA, 19 nt, Homo sapiens
  misc_RNA (1)...(19): siRNA sense strand
ugaauaccgccuugaauuu

SEQ ID NO: 46008 - RNA, 19 nt, Homo sapiens
  misc_RNA (1)...(19): siRNA sense strand
gauggccaguguguuaaua

SEQ ID NO: 46009 - RNA, 19 nt, Homo sapiens
  misc_RNA (1)...(19): siRNA sense strand
ccacagauuuagauguaga

SEQ ID NO: 46010 - RNA, 19 nt, Homo sapiens
  misc_RNA (1)...(19): siRNA sense strand
gaacaacagaggaaaugug

SEQ ID NO: 46011 - RNA, 19 nt, Homo sapiens
  misc_RNA (1)...(19): siRNA sense strand
gauccuaccuuuucaaguu

SEQ ID NO: 46012 - RNA, 19 nt, Homo sapiens
  misc_RNA (1)...(19): siRNA sense strand
ugagucaaacgaacaaaua

SEQ ID NO: 46013 - RNA, 19 nt, Homo sapiens
  misc_RNA (1)...(19): siRNA sense strand
ccaaacgucugcgcaaaug

SEQ ID NO: 46014 - RNA, 19 nt, Homo sapiens
  misc_RNA (1)...(19): siRNA sense strand
ccagauacaucagguuuca

SEQ ID NO: 46015 - RNA, 19 nt, Homo sapiens
  misc_RNA (1)...(19): siRNA sense strand
ggaugugaaugaaugugaa

SEQ ID NO: 46016 - RNA, 19 nt, Homo sapiens
  misc_RNA (1)...(19): siRNA sense strand
ggccguacgugugaagaua

SEQ ID NO: 46017 - RNA, 19 nt, Homo sapiens
  misc_RNA (1)...(19): siRNA sense strand
gauuucagcuagaugacaa

SEQ ID NO: 46018 - RNA, 19 nt, Homo sapiens
  misc_RNA (1)...(19): siRNA sense strand
caagaguguuugccagaga

SEQ ID NO: 46019 - RNA, 19 nt, Homo sapiens
  misc_RNA (1)...(19): siRNA sense strand
caucuuccauguaugaaug

SEQ ID NO: 46020 - RNA, 19 nt, Homo sapiens
  misc_RNA (1)...(19): siRNA sense strand
gggagugccuaaacacaga

SEQ ID NO: 46021 - RNA, 19 nt, Homo sapiens
  misc_RNA (1)...(19): siRNA sense strand
gaacuuccgagugguaauu

SEQ ID NO: 46022 - RNA, 19 nt, Homo sapiens
  misc_RNA (1)...(19): siRNA sense strand
guacuuguccggauggauu

SEQ ID NO: 46023 - RNA, 19 nt, Homo sapiens
  misc_RNA (1)...(19): siRNA sense strand
gaugaauguuugaauccaa

SEQ ID NO: 46024 - RNA, 19 nt, Homo sapiens
  misc_RNA (1)...(19): siRNA sense strand
gaagagaaagggcccuguu

SEQ ID NO: 46025 - RNA, 19 nt, Homo sapiens
  misc_RNA (1)...(19): siRNA sense strand
ucagugcccuccaaauuuc

SEQ ID NO: 46026 - RNA, 19 nt, Homo sapiens
  misc_RNA (1)...(19): siRNA sense strand
aaauagcuuugaggaguua

SEQ ID NO: 46027 - RNA, 19 nt, Homo sapiens
  misc_RNA (1)...(19): siRNA sense strand
gaaggauucagaugacuau

SEQ ID NO: 46028 - RNA, 19 nt, Homo sapiens
  misc_RNA (1)...(19): siRNA sense strand
gcuuugauauggaugaaug

SEQ ID NO: 46029 - RNA, 19 nt, Homo sapiens
  misc_RNA (1)...(19): siRNA sense strand
agauguagaucaacccaaa

SEQ ID NO: 46030 - RNA, 19 nt, Homo sapiens
  misc_RNA (1)...(19): siRNA sense strand
aauggugaguguuugaaua

SEQ ID NO: 46031 - RNA, 19 nt, Homo sapiens
  misc_RNA (1)...(19): siRNA sense strand
gcaucaagguggucuuuac

SEQ ID NO: 46032 - RNA, 19 nt, Homo sapiens
  misc_RNA (1)...(19): siRNA sense strand
cuccacagauuuagaugua

SEQ ID NO: 46033 - RNA, 19 nt, Homo sapiens
  misc_RNA (1)...(19): siRNA sense strand
guaaaugaaugcgaugagu

SEQ ID NO: 46034 - RNA, 19 nt, Homo sapiens
  misc_RNA (1)...(19): siRNA sense strand
ggguaugaaugcuacugua

SEQ ID NO: 46035 - RNA, 19 nt, Homo sapiens
  misc_RNA (1)...(19): siRNA sense strand
gaaacauccuccugaagcu

SEQ ID NO: 46036 - RNA, 19 nt, Homo sapiens
  misc_RNA (1)...(19): siRNA sense strand
caagaugaccuguuucgau

SEQ ID NO: 46037 - RNA, 19 nt, Homo sapiens
  misc_RNA (1)...(19): siRNA sense strand
caagggacguacuaugauc

SEQ ID NO: 46038 - RNA, 19 nt, Homo sapiens
  misc_RNA (1)...(19): siRNA sense strand
gaaguuucuugugcauuug

SEQ ID NO: 46039 - RNA, 19 nt, Homo sapiens
  misc_RNA (1)...(19): siRNA sense strand
gaacaaauagaagaaacug

SEQ ID NO: 46040 - RNA, 19 nt, Homo sapiens
  misc_RNA (1)...(19): siRNA sense strand
gcuacuauaaucucaauga

SEQ ID NO: 46041 - RNA, 19 nt, Homo sapiens
  misc_RNA (1)...(19): siRNA sense strand
gaaugcuacuauaaucuca

SEQ ID NO: 46042 - RNA, 19 nt, Homo sapiens
  misc_RNA (1)...(19): siRNA sense strand
cagcaggguuucucaaucu

SEQ ID NO: 46043 - RNA, 19 nt, Homo sapiens
  misc_RNA (1)...(19): siRNA sense strand
gcaggguccuaugauugua

SEQ ID NO: 46044 - RNA, 19 nt, Homo sapiens
  misc_RNA (1)...(19): siRNA sense strand
caagcacuguagagauauu

SEQ ID NO: 46045 - RNA, 19 nt, Homo sapiens
  misc_RNA (1)...(19): siRNA sense strand
caaacgaacaaauagaaga

SEQ ID NO: 46046 - RNA, 19 nt, Homo sapiens
  misc_RNA (1)...(19): siRNA sense strand
gccaguguguuaauacaga

SEQ ID NO: 46047 - RNA, 19 nt, Homo sapiens
  misc_RNA (1)...(19): siRNA sense strand
gcagugcuuugauauggau

SEQ ID NO: 46048 - RNA, 19 nt, Homo sapiens
  misc_RNA (1)...(19): siRNA sense strand
gguaugaaugcuacuguaa

SEQ ID NO: 46049 - RNA, 19 nt, Homo sapiens
  misc_RNA (1)...(19): siRNA sense strand
gaaagauccuguucuauaa

SEQ ID NO: 46050 - RNA, 19 nt, Homo sapiens
  misc_RNA (1)...(19): siRNA sense strand
gcaaauaacucaagacuca

SEQ ID NO: 46051 - RNA, 19 nt, Homo sapiens
  misc_RNA (1)...(19): siRNA sense strand
ggagaacccucaccuaaua

SEQ ID NO: 46052 - RNA, 19 nt, Homo sapiens
  misc_RNA (1)...(19): siRNA sense strand
gaagaaggcaccaauguua

SEQ ID NO: 46053 - RNA, 19 nt, Homo sapiens
  misc_RNA (1)...(19): siRNA sense strand
ggaaagauccuguucuaua

SEQ ID NO: 46054 - RNA, 19 nt, Homo sapiens
  misc_RNA (1)...(19): siRNA sense strand
gaagagaagugucaauauc

SEQ ID NO: 46055 - RNA, 19 nt, Homo sapiens
  misc_RNA (1)...(19): siRNA sense strand
cgauaugacuucagaauuu

SEQ ID NO: 46056 - RNA, 19 nt, Homo sapiens
  misc_RNA (1)...(19): siRNA sense strand
caagaaaccuauaacuuca

SEQ ID NO: 46057 - RNA, 19 nt, Homo sapiens
  misc_RNA (1)...(19): siRNA sense strand
cuaaugaccucaccugaaa

SEQ ID NO: 46058 - RNA, 19 nt, Homo sapiens
  misc_RNA (1)...(19): siRNA sense strand
gaacggugaguacuucuua

SEQ ID NO: 46059 - RNA, 19 nt, Homo sapiens
  misc_RNA (1)...(19): siRNA sense strand
acaaagagguugaggaaga

SEQ ID NO: 46060 - RNA, 19 nt, Homo sapiens
  misc_RNA (1)...(19): siRNA sense strand
caggauauauuguucguuu

SEQ ID NO: 46061 - RNA, 19 nt, Homo sapiens
  misc_RNA (1)...(19): siRNA sense strand
ggaauaaagggacaaauau

SEQ ID NO: 46062 - RNA, 19 nt, Homo sapiens
  misc_RNA (1)...(19): siRNA sense strand
ggaagucaguguacaagau

SEQ ID NO: 46063 - RNA, 19 nt, Homo sapiens
  misc_RNA (1)...(19): siRNA sense strand
aagauaagcugguggaaga

SEQ ID NO: 46064 - RNA, 19 nt, Homo sapiens
  misc_RNA (1)...(19): siRNA sense strand
gcacaaaacuaauccuuga

SEQ ID NO: 46065 - RNA, 19 nt, Homo sapiens
  misc_RNA (1)...(19): siRNA sense strand
gaaacagauucauggagaa

SEQ ID NO: 46066 - RNA, 19 nt, Homo sapiens
  misc_RNA (1)...(19): siRNA sense strand
ggaaagauuacucuacuga

SEQ ID NO: 46067 - RNA, 19 nt, Homo sapiens
  misc_RNA (1)...(19): siRNA sense strand
agucuuggcugaacguuua

SEQ ID NO: 46068 - RNA, 19 nt, Homo sapiens
  misc_RNA (1)...(19): siRNA sense strand
ugaauuaugugucccaguu

SEQ ID NO: 46069 - RNA, 19 nt, Homo sapiens
  misc_RNA (1)...(19): siRNA sense strand
ggaagucacucacagaaac

SEQ ID NO: 46070 - RNA, 19 nt, Homo sapiens
  misc_RNA (1)...(19): siRNA sense strand
ucagacaacauucuucuua

SEQ ID NO: 46071 - RNA, 19 nt, Homo sapiens
  misc_RNA (1)...(19): siRNA sense strand
gcugaacguuuaccauuga

SEQ ID NO: 46072 - RNA, 19 nt, Homo sapiens
  misc_RNA (1)...(19): siRNA sense strand
cuucagaauuuauggguua

SEQ ID NO: 46073 - RNA, 19 nt, Homo sapiens
  misc_RNA (1)...(19): siRNA sense strand
guucagagcuccauuccau

SEQ ID NO: 46074 - RNA, 19 nt, Homo sapiens
  misc_RNA (1)...(19): siRNA sense strand
ccugaugucuggagaauug

SEQ ID NO: 46075 - RNA, 19 nt, Homo sapiens
  misc_RNA (1)...(19): siRNA sense strand
cagacaacauucuucuuaa

SEQ ID NO: 46076 - RNA, 19 nt, Homo sapiens
  misc_RNA (1)...(19): siRNA sense strand
ggaagaaggcaccaauguu

SEQ ID NO: 46077 - RNA, 19 nt, Homo sapiens
  misc_RNA (1)...(19): siRNA sense strand
uuugagaacuugaccuaua

SEQ ID NO: 46078 - RNA, 19 nt, Homo sapiens
  misc_RNA (1)...(19): siRNA sense strand
caaagagguugaggaagaa

SEQ ID NO: 46079 - RNA, 19 nt, Homo sapiens
  misc_RNA (1)...(19): siRNA sense strand
ucaaggaaaugucagugaa

SEQ ID NO: 46080 - RNA, 19 nt, Homo sapiens
  misc_RNA (1)...(19): siRNA sense strand
gcaccacacuguucagagu

SEQ ID NO: 46081 - RNA, 19 nt, Homo sapiens
  misc_RNA (1)...(19): siRNA sense strand
uaacauugcuguccuugag

SEQ ID NO: 46082 - RNA, 19 nt, Homo sapiens
  misc_RNA (1)...(19): siRNA sense strand
gaaaucauacugugaccuu

SEQ ID NO: 46083 - RNA, 19 nt, Homo sapiens
  misc_RNA (1)...(19): siRNA sense strand
ggaagagaagugucaauau

SEQ ID NO: 46084 - RNA, 19 nt, Homo sapiens
  misc_RNA (1)...(19): siRNA sense strand
aaacaaagagguugaggaa

SEQ ID NO: 46085 - RNA, 19 nt, Homo sapiens
  misc_RNA (1)...(19): siRNA sense strand
ggacaaagauacaguuccu

SEQ ID NO: 46086 - RNA, 19 nt, Homo sapiens
  misc_RNA (1)...(19): siRNA sense strand
ggaucaaggagaccuguua

SEQ ID NO: 46087 - RNA, 19 nt, Homo sapiens
  misc_RNA (1)...(19): siRNA sense strand
aaucugagcucccuuugga

SEQ ID NO: 46088 - RNA, 19 nt, Homo sapiens
  misc_RNA (1)...(19): siRNA sense strand
gaacccucaccuaauaaua

SEQ ID NO: 46089 - RNA, 19 nt, Homo sapiens
  misc_RNA (1)...(19): siRNA sense strand
acucaagacucacaagaaa

SEQ ID NO: 46090 - RNA, 19 nt, Homo sapiens
  misc_RNA (1)...(19): siRNA sense strand
ccacacacuuuguaagaau

SEQ ID NO: 46091 - RNA, 19 nt, Homo sapiens
  misc_RNA (1)...(19): siRNA sense strand
gaagucaguguacaagauu

SEQ ID NO: 46092 - RNA, 19 nt, Homo sapiens
  misc_RNA (1)...(19): siRNA sense strand
guacuaaaggcacuagaaa

SEQ ID NO: 46093 - RNA, 19 nt, Homo sapiens
  misc_RNA (1)...(19): siRNA sense strand
gaggguggauucucucugu

SEQ ID NO: 46094 - RNA, 19 nt, Homo sapiens
  misc_RNA (1)...(19): siRNA sense strand
caacuugauccacauguaa

SEQ ID NO: 46095 - RNA, 19 nt, Homo sapiens
  misc_RNA (1)...(19): siRNA sense strand
gaagggaaacagauucaug

SEQ ID NO: 46096 - RNA, 19 nt, Homo sapiens
  misc_RNA (1)...(19): siRNA sense strand
uaaacaaccuucccaaagc

SEQ ID NO: 46097 - RNA, 19 nt, Homo sapiens
  misc_RNA (1)...(19): siRNA sense strand
gcacagucauuagcacaga

SEQ ID NO: 46098 - RNA, 19 nt, Homo sapiens
  misc_RNA (1)...(19): siRNA sense strand
acaagaaaccuauaacuuc

SEQ ID NO: 46099 - RNA, 19 nt, Homo sapiens
  misc_RNA (1)...(19): siRNA sense strand
gaauaaagggacaaauauc

SEQ ID NO: 46100 - RNA, 19 nt, Homo sapiens
  misc_RNA (1)...(19): siRNA sense strand
ggucaugugcuacuugaaa

SEQ ID NO: 46101 - RNA, 19 nt, Homo sapiens
  misc_RNA (1)...(19): siRNA sense strand
ccucgaugcugauucauau

SEQ ID NO: 46102 - RNA, 19 nt, Homo sapiens
  misc_RNA (1)...(19): siRNA sense strand
ccgaggacuucaagacuuu

SEQ ID NO: 46103 - RNA, 19 nt, Homo sapiens
  misc_RNA (1)...(19): siRNA sense strand
ugacagguguuccuaccaa

SEQ ID NO: 46104 - RNA, 19 nt, Homo sapiens
  misc_RNA (1)...(19): siRNA sense strand
gagcagcauccugucauua

SEQ ID NO: 46105 - RNA, 19 nt, Homo sapiens
  misc_RNA (1)...(19): siRNA sense strand
gcagugccacccacgauuu

SEQ ID NO: 46106 - RNA, 19 nt, Homo sapiens
  misc_RNA (1)...(19): siRNA sense strand
gaaagauuacucuacugaa

SEQ ID NO: 46107 - RNA, 19 nt, Homo sapiens
  misc_RNA (1)...(19): siRNA sense strand
guaauuggcaaauaacuca

SEQ ID NO: 46108 - RNA, 19 nt, Homo sapiens
  misc_RNA (1)...(19): siRNA sense strand
ccaggcagcuucugacucu

SEQ ID NO: 46109 - RNA, 19 nt, Homo sapiens
  misc_RNA (1)...(19): siRNA sense strand
uugagaacuugaccuauaa

SEQ ID NO: 46110 - RNA, 19 nt, Homo sapiens
  misc_RNA (1)...(19): siRNA sense strand
uaacuaccuuuaucuccuu

SEQ ID NO: 46111 - RNA, 19 nt, Homo sapiens
  misc_RNA (1)...(19): siRNA sense strand
gcagcauccugucauuaau

SEQ ID NO: 46112 - RNA, 19 nt, Homo sapiens
  misc_RNA (1)...(19): siRNA sense strand
ucaguaggauugaaacauc

SEQ ID NO: 46113 - RNA, 19 nt, Homo sapiens
  misc_RNA (1)...(19): siRNA sense strand
caaguucccugagccaaau

SEQ ID NO: 46114 - RNA, 19 nt, Homo sapiens
  misc_RNA (1)...(19): siRNA sense strand
gguggacgaugccaaguuc

SEQ ID NO: 46115 - RNA, 19 nt, Homo sapiens
  misc_RNA (1)...(19): siRNA sense strand
ugacaucccugacccuuac

SEQ ID NO: 46116 - RNA, 19 nt, Homo sapiens
  misc_RNA (1)...(19): siRNA sense strand
ggccaggaguucgauauga

SEQ ID NO: 46117 - RNA, 19 nt, Homo sapiens
  misc_RNA (1)...(19): siRNA sense strand
gauucucucugucuuggaa

SEQ ID NO: 46118 - RNA, 19 nt, Homo sapiens
  misc_RNA (1)...(19): siRNA sense strand
aggaauaaagggacaaaua

SEQ ID NO: 46119 - RNA, 19 nt, Homo sapiens
  misc_RNA (1)...(19): siRNA sense strand
ccaaauuucuggagcaacu

SEQ ID NO: 46120 - RNA, 19 nt, Homo sapiens
  misc_RNA (1)...(19): siRNA sense strand
ccaaguaugcugggacuaa

SEQ ID NO: 46121 - RNA, 19 nt, Homo sapiens
  misc_RNA (1)...(19): siRNA sense strand
cagcauccugucauuaaua

SEQ ID NO: 46122 - RNA, 19 nt, Homo sapiens
  misc_RNA (1)...(19): siRNA sense strand
gaauguaggucccaauacc

SEQ ID NO: 46123 - RNA, 19 nt, Homo sapiens
  misc_RNA (1)...(19): siRNA sense strand
aauagugugccuuucauua

SEQ ID NO: 46124 - RNA, 19 nt, Homo sapiens
  misc_RNA (1)...(19): siRNA sense strand
acaacuugauccacaugua

SEQ ID NO: 46125 - RNA, 19 nt, Homo sapiens
  misc_RNA (1)...(19): siRNA sense strand
agcagccucuccucaauua

SEQ ID NO: 46126 - RNA, 19 nt, Homo sapiens
  misc_RNA (1)...(19): siRNA sense strand
gcaagucaaggaaauguca

SEQ ID NO: 46127 - RNA, 19 nt, Homo sapiens
  misc_RNA (1)...(19): siRNA sense strand
ggugaacggugaguacuuc

SEQ ID NO: 46128 - RNA, 19 nt, Homo sapiens
  misc_RNA (1)...(19): siRNA sense strand
caaggacagucucccaaca

SEQ ID NO: 46129 - RNA, 19 nt, Homo sapiens
  misc_RNA (1)...(19): siRNA sense strand
gaccucaccugaaaaugua

SEQ ID NO: 46130 - RNA, 19 nt, Homo sapiens
  misc_RNA (1)...(19): siRNA sense strand
gaagaaaaggcauugauug

SEQ ID NO: 46131 - RNA, 19 nt, Homo sapiens
  misc_RNA (1)...(19): siRNA sense strand
ggaggaagucaguguacaa

SEQ ID NO: 46132 - RNA, 19 nt, Homo sapiens
  misc_RNA (1)...(19): siRNA sense strand
uaucccagaugcuauugaa

SEQ ID NO: 46133 - RNA, 19 nt, Homo sapiens
  misc_RNA (1)...(19): siRNA sense strand
gagaacccucaccuaauaa

SEQ ID NO: 46134 - RNA, 19 nt, Homo sapiens
  misc_RNA (1)...(19): siRNA sense strand
gaugcugauucauauccua

SEQ ID NO: 46135 - RNA, 19 nt, Homo sapiens
  misc_RNA (1)...(19): siRNA sense strand
uaccaaaucugcgucauag

SEQ ID NO: 46136 - RNA, 19 nt, Homo sapiens
  misc_RNA (1)...(19): siRNA sense strand
cuucuuaagugaacuggaa

SEQ ID NO: 46137 - RNA, 19 nt, Homo sapiens
  misc_RNA (1)...(19): siRNA sense strand
gaacaacuugauccacaug

SEQ ID NO: 46138 - RNA, 19 nt, Homo sapiens
  misc_RNA (1)...(19): siRNA sense strand
cacacacuuuguaagaaua

SEQ ID NO: 46139 - RNA, 19 nt, Homo sapiens
  misc_RNA (1)...(19): siRNA sense strand
cagaaaccgaguugacuaa

SEQ ID NO: 46140 - RNA, 19 nt, Homo sapiens
  misc_RNA (1)...(19): siRNA sense strand
aaggagaacccucaccuaa

SEQ ID NO: 46141 - RNA, 19 nt, Homo sapiens
  misc_RNA (1)...(19): siRNA sense strand
gcaguucuuucagaugguu

SEQ ID NO: 46142 - RNA, 19 nt, Homo sapiens
  misc_RNA (1)...(19): siRNA sense strand
uaccaugucuaucugaaau

SEQ ID NO: 46143 - RNA, 19 nt, Homo sapiens
  misc_RNA (1)...(19): siRNA sense strand
gaacuugcuccuucagaca

SEQ ID NO: 46144 - RNA, 19 nt, Homo sapiens
  misc_RNA (1)...(19): siRNA sense strand
gaauuuauggguuaucuac

SEQ ID NO: 46145 - RNA, 19 nt, Homo sapiens
  misc_RNA (1)...(19): siRNA sense strand
ggaguucgauaugacuuca

SEQ ID NO: 46146 - RNA, 19 nt, Homo sapiens
  misc_RNA (1)...(19): siRNA sense strand
cacaagaaaccuauaacuu

SEQ ID NO: 46147 - RNA, 19 nt, Homo sapiens
  misc_RNA (1)...(19): siRNA sense strand
ugguguaauuggcaaauaa

SEQ ID NO: 46148 - RNA, 19 nt, Homo sapiens
  misc_RNA (1)...(19): siRNA sense strand
caaguaugcugggacuaau

SEQ ID NO: 46149 - RNA, 19 nt, Homo sapiens
  misc_RNA (1)...(19): siRNA sense strand
ggacauagcucugaauuac

SEQ ID NO: 46150 - RNA, 19 nt, Homo sapiens
  misc_RNA (1)...(19): siRNA sense strand
gcaaacuggagcugaauuu

SEQ ID NO: 46151 - RNA, 19 nt, Homo sapiens
  misc_RNA (1)...(19): siRNA sense strand
uugaacagcuuccggauga

SEQ ID NO: 46152 - RNA, 19 nt, Homo sapiens
  misc_RNA (1)...(19): siRNA sense strand
uuucaaagcuggagaugug

SEQ ID NO: 46153 - RNA, 19 nt, Homo sapiens
  misc_RNA (1)...(19): siRNA sense strand
ucaucgaggugaagacaaa

SEQ ID NO: 46154 - RNA, 19 nt, Homo sapiens
  misc_RNA (1)...(19): siRNA sense strand
ggacaucgcgguggaggaa

SEQ ID NO: 46155 - RNA, 19 nt, Homo sapiens
  misc_RNA (1)...(19): siRNA sense strand
ucagucggaucaacaaaga

SEQ ID NO: 46156 - RNA, 19 nt, Homo sapiens
  misc_RNA (1)...(19): siRNA sense strand
gcggauaccugcccucaac

SEQ ID NO: 46157 - RNA, 19 nt, Homo sapiens
  misc_RNA (1)...(19): siRNA sense strand
ugaagauccucaaagacuu

SEQ ID NO: 46158 - RNA, 19 nt, Homo sapiens
  misc_RNA (1)...(19): siRNA sense strand
cuauuugacuucacuggaa

SEQ ID NO: 46159 - RNA, 19 nt, Homo sapiens
  misc_RNA (1)...(19): siRNA sense strand
ggacguccggaucuucuuu

SEQ ID NO: 46160 - RNA, 19 nt, Homo sapiens
  misc_RNA (1)...(19): siRNA sense strand
gaggacauagcucugaauu

SEQ ID NO: 46161 - RNA, 19 nt, Homo sapiens
  misc_RNA (1)...(19): siRNA sense strand
ucgugaagauccucaaaga

SEQ ID NO: 46162 - RNA, 19 nt, Homo sapiens
  misc_RNA (1)...(19): siRNA sense strand
cagcagcacuccccuauug

SEQ ID NO: 46163 - RNA, 19 nt, Homo sapiens
  misc_RNA (1)...(19): siRNA sense strand
gaacagcuuccggaugaug

SEQ ID NO: 46164 - RNA, 19 nt, Homo sapiens
  misc_RNA (1)...(19): siRNA sense strand
ggccgagagugacuuugaa

SEQ ID NO: 46165 - RNA, 19 nt, Homo sapiens
  misc_RNA (1)...(19): siRNA sense strand
ucacgcagaaggacaacua

SEQ ID NO: 46166 - RNA, 19 nt, Homo sapiens
  misc_RNA (1)...(19): siRNA sense strand
gauccaaguaccucaucua

SEQ ID NO: 46167 - RNA, 19 nt, Homo sapiens
  misc_RNA (1)...(19): siRNA sense strand
gcacuccccuauugaaaga

SEQ ID NO: 46168 - RNA, 19 nt, Homo sapiens
  misc_RNA (1)...(19): siRNA sense strand
ggcgggaguuccagagaga

SEQ ID NO: 46169 - RNA, 19 nt, Homo sapiens
  misc_RNA (1)...(19): siRNA sense strand
ucugggugcugauggauga

SEQ ID NO: 46170 - RNA, 19 nt, Homo sapiens
  misc_RNA (1)...(19): siRNA sense strand
gggccgagagugacuuuga

SEQ ID NO: 46171 - RNA, 19 nt, Homo sapiens
  misc_RNA (1)...(19): siRNA sense strand
gugaagauccucaaagacu

SEQ ID NO: 46172 - RNA, 19 nt, Homo sapiens
  misc_RNA (1)...(19): siRNA sense strand
gcugucggaugaggacgua

SEQ ID NO: 46173 - RNA, 19 nt, Homo sapiens
  misc_RNA (1)...(19): siRNA sense strand
ccucaacgccuacaugaag

SEQ ID NO: 46174 - RNA, 19 nt, Homo sapiens
  misc_RNA (1)...(19): siRNA sense strand
uauuugacuucacuggaaa

SEQ ID NO: 46175 - RNA, 19 nt, Homo sapiens
  misc_RNA (1)...(19): siRNA sense strand
ggccaacauugcugacauc

SEQ ID NO: 46176 - RNA, 19 nt, Homo sapiens
  misc_RNA (1)...(19): siRNA sense strand
uugcugacaucgaggagaa

SEQ ID NO: 46177 - RNA, 19 nt, Homo sapiens
  misc_RNA (1)...(19): siRNA sense strand
gagugacuuugaacagcuu

SEQ ID NO: 46178 - RNA, 19 nt, Homo sapiens
  misc_RNA (1)...(19): siRNA sense strand
aacaggagaucgccgagau

SEQ ID NO: 46179 - RNA, 19 nt, Homo sapiens
  misc_RNA (1)...(19): siRNA sense strand
gaauuucaaagcuggagau

SEQ ID NO: 46180 - RNA, 19 nt, Homo sapiens
  misc_RNA (1)...(19): siRNA sense strand
gcccucaacgccuacauga

SEQ ID NO: 46181 - RNA, 19 nt, Homo sapiens
  misc_RNA (1)...(19): siRNA sense strand
gaugaggacguccggaucu

SEQ ID NO: 46182 - RNA, 19 nt, Homo sapiens
  misc_RNA (1)...(19): siRNA sense strand
ugacaucgaggagaagaga

SEQ ID NO: 46183 - RNA, 19 nt, Homo sapiens
  misc_RNA (1)...(19): siRNA sense strand
ccagagagaggacauagcu

SEQ ID NO: 46184 - RNA, 19 nt, Homo sapiens
  misc_RNA (1)...(19): siRNA sense strand
caaaaggaggauccaagua

SEQ ID NO: 46185 - RNA, 19 nt, Homo sapiens
  misc_RNA (1)...(19): siRNA sense strand
gaggcucuauuugacuuca

SEQ ID NO: 46186 - RNA, 19 nt, Homo sapiens
  misc_RNA (1)...(19): siRNA sense strand
caaacuggagcugaauuuc

SEQ ID NO: 46187 - RNA, 19 nt, Homo sapiens
  misc_RNA (1)...(19): siRNA sense strand
ccuggaagcugcacaucac

SEQ ID NO: 46188 - RNA, 19 nt, Homo sapiens
  misc_RNA (1)...(19): siRNA sense strand
ggacaacuacagggucuac

SEQ ID NO: 46189 - RNA, 19 nt, Homo sapiens
  misc_RNA (1)...(19): siRNA sense strand
ucacaaggcgggaguucca

SEQ ID NO: 46190 - RNA, 19 nt, Homo sapiens
  misc_RNA (1)...(19): siRNA sense strand
ggauccaaguaccucaucu

SEQ ID NO: 46191 - RNA, 19 nt, Homo sapiens
  misc_RNA (1)...(19): siRNA sense strand
cuacaacacgaugccauga

SEQ ID NO: 46192 - RNA, 19 nt, Homo sapiens
  misc_RNA (1)...(19): siRNA sense strand
cuacgugggugugaaacag

SEQ ID NO: 46193 - RNA, 19 nt, Homo sapiens
  misc_RNA (1)...(19): siRNA sense strand
caacuacagggucuacaac

SEQ ID NO: 46194 - RNA, 19 nt, Homo sapiens
  misc_RNA (1)...(19): siRNA sense strand
aggacauagcucugaauua

SEQ ID NO: 46195 - RNA, 19 nt, Homo sapiens
  misc_RNA (1)...(19): siRNA sense strand
gacaccaucagcaccauca

SEQ ID NO: 46196 - RNA, 19 nt, Homo sapiens
  misc_RNA (1)...(19): siRNA sense strand
gcaaacuggagcugaauuu

SEQ ID NO: 46197 - RNA, 19 nt, Homo sapiens
  misc_RNA (1)...(19): siRNA sense strand
uugaacagcuuccggauga

SEQ ID NO: 46198 - RNA, 19 nt, Homo sapiens
  misc_RNA (1)...(19): siRNA sense strand
uuucaaagcuggagaugug

SEQ ID NO: 46199 - RNA, 19 nt, Homo sapiens
  misc_RNA (1)...(19): siRNA sense strand
ucaucgaggugaagacaaa

SEQ ID NO: 46200 - RNA, 19 nt, Homo sapiens
  misc_RNA (1)...(19): siRNA sense strand
ggacaucgcgguggaggaa

SEQ ID NO: 46201 - RNA, 19 nt, Homo sapiens
  misc_RNA (1)...(19): siRNA sense strand
ucagucggaucaacaaaga

SEQ ID NO: 46202 - RNA, 19 nt, Homo sapiens
  misc_RNA (1)...(19): siRNA sense strand
gcggauaccugcccucaac

SEQ ID NO: 46203 - RNA, 19 nt, Homo sapiens
  misc_RNA (1)...(19): siRNA sense strand
ugaagauccucaaagacuu

SEQ ID NO: 46204 - RNA, 19 nt, Homo sapiens
  misc_RNA (1)...(19): siRNA sense strand
cuauuugacuucacuggaa

SEQ ID NO: 46205 - RNA, 19 nt, Homo sapiens
  misc_RNA (1)...(19): siRNA sense strand
ggacguccggaucuucuuu

SEQ ID NO: 46206 - RNA, 19 nt, Homo sapiens
  misc_RNA (1)...(19): siRNA sense strand
gaacagcuuccggaugaug

SEQ ID NO: 46207 - RNA, 19 nt, Homo sapiens
  misc_RNA (1)...(19): siRNA sense strand
cagcagcacuccccuauug

SEQ ID NO: 46208 - RNA, 19 nt, Homo sapiens
  misc_RNA (1)...(19): siRNA sense strand
ucgugaagauccucaaaga

SEQ ID NO: 46209 - RNA, 19 nt, Homo sapiens
  misc_RNA (1)...(19): siRNA sense strand
ggccgagagugacuuugaa

SEQ ID NO: 46210 - RNA, 19 nt, Homo sapiens
  misc_RNA (1)...(19): siRNA sense strand
gauccaaguaccucaucua

SEQ ID NO: 46211 - RNA, 19 nt, Homo sapiens
  misc_RNA (1)...(19): siRNA sense strand
ucugggugcugauggauga

SEQ ID NO: 46212 - RNA, 19 nt, Homo sapiens
  misc_RNA (1)...(19): siRNA sense strand
gugaagauccucaaagacu

SEQ ID NO: 46213 - RNA, 19 nt, Homo sapiens
  misc_RNA (1)...(19): siRNA sense strand
gggccgagagugacuuuga

SEQ ID NO: 46214 - RNA, 19 nt, Homo sapiens
  misc_RNA (1)...(19): siRNA sense strand
ccucaacgccuacaugaag

SEQ ID NO: 46215 - RNA, 19 nt, Homo sapiens
  misc_RNA (1)...(19): siRNA sense strand
ggccaacauugcugacauc

SEQ ID NO: 46216 - RNA, 19 nt, Homo sapiens
  misc_RNA (1)...(19): siRNA sense strand
uauuugacuucacuggaaa

SEQ ID NO: 46217 - RNA, 19 nt, Homo sapiens
  misc_RNA (1)...(19): siRNA sense strand
uugcugacaucgaggagaa

SEQ ID NO: 46218 - RNA, 19 nt, Homo sapiens
  misc_RNA (1)...(19): siRNA sense strand
gagugacuuugaacagcuu

SEQ ID NO: 46219 - RNA, 19 nt, Homo sapiens
  misc_RNA (1)...(19): siRNA sense strand
aacaggagaucgccgagau

SEQ ID NO: 46220 - RNA, 19 nt, Homo sapiens
  misc_RNA (1)...(19): siRNA sense strand
gaauuucaaagcuggagau

SEQ ID NO: 46221 - RNA, 19 nt, Homo sapiens
  misc_RNA (1)...(19): siRNA sense strand
gcccucaacgccuacauga

SEQ ID NO: 46222 - RNA, 19 nt, Homo sapiens
  misc_RNA (1)...(19): siRNA sense strand
gaugaggacguccggaucu

SEQ ID NO: 46223 - RNA, 19 nt, Homo sapiens
  misc_RNA (1)...(19): siRNA sense strand
ugacaucgaggagaagaga

SEQ ID NO: 46224 - RNA, 19 nt, Homo sapiens
  misc_RNA (1)...(19): siRNA sense strand
caaaaggaggauccaagua

SEQ ID NO: 46225 - RNA, 19 nt, Homo sapiens
  misc_RNA (1)...(19): siRNA sense strand
gaggcucuauuugacuuca

SEQ ID NO: 46226 - RNA, 19 nt, Homo sapiens
  misc_RNA (1)...(19): siRNA sense strand
caaacuggagcugaauuuc

SEQ ID NO: 46227 - RNA, 19 nt, Homo sapiens
  misc_RNA (1)...(19): siRNA sense strand
ggauccaaguaccucaucu

SEQ ID NO: 46228 - RNA, 19 nt, Homo sapiens
  misc_RNA (1)...(19): siRNA sense strand
cuacgugggugugaaacag

SEQ ID NO: 46229 - RNA, 19 nt, Homo sapiens
  misc_RNA (1)...(19): siRNA sense strand
gacaccaucagcaccauca

SEQ ID NO: 46230 - RNA, 19 nt, Homo sapiens
  misc_RNA (1)...(19): siRNA sense strand
gcaaugaccuuccaagaga

SEQ ID NO: 46231 - RNA, 19 nt, Homo sapiens
  misc_RNA (1)...(19): siRNA sense strand
gaaauaugcugucuacaug

SEQ ID NO: 46232 - RNA, 19 nt, Homo sapiens
  misc_RNA (1)...(19): siRNA sense strand
gaacaacccuaacccaaga

SEQ ID NO: 46233 - RNA, 19 nt, Homo sapiens
  misc_RNA (1)...(19): siRNA sense strand
cagcugagaucuuguuuaa

SEQ ID NO: 46234 - RNA, 19 nt, Homo sapiens
  misc_RNA (1)...(19): siRNA sense strand
gcaguacucugaagaauuc

SEQ ID NO: 46235 - RNA, 19 nt, Homo sapiens
  misc_RNA (1)...(19): siRNA sense strand
gaaacaaacugcuccucaa

SEQ ID NO: 46236 - RNA, 19 nt, Homo sapiens
  misc_RNA (1)...(19): siRNA sense strand
gagcacagcugagaucuug

SEQ ID NO: 46237 - RNA, 19 nt, Homo sapiens
  misc_RNA (1)...(19): siRNA sense strand
gguggagucuuucuauaua

SEQ ID NO: 46238 - RNA, 19 nt, Homo sapiens
  misc_RNA (1)...(19): siRNA sense strand
gaaccagacugucauaugg

SEQ ID NO: 46239 - RNA, 19 nt, Homo sapiens
  misc_RNA (1)...(19): siRNA sense strand
ggacagauccagaguguug

SEQ ID NO: 46240 - RNA, 19 nt, Homo sapiens
  misc_RNA (1)...(19): siRNA sense strand
ggaauguauuugaguguaa

SEQ ID NO: 46241 - RNA, 19 nt, Homo sapiens
  misc_RNA (1)...(19): siRNA sense strand
gacauugccuucuugauug

SEQ ID NO: 46242 - RNA, 19 nt, Homo sapiens
  misc_RNA (1)...(19): siRNA sense strand
caacugugauggagcaauu

SEQ ID NO: 46243 - RNA, 19 nt, Homo sapiens
  misc_RNA (1)...(19): siRNA sense strand
caacggagcccgaaagaau

SEQ ID NO: 46244 - RNA, 19 nt, Homo sapiens
  misc_RNA (1)...(19): siRNA sense strand
gccaagagcuuaauaccau

SEQ ID NO: 46245 - RNA, 19 nt, Homo sapiens
  misc_RNA (1)...(19): siRNA sense strand
gaacgccauugucugcuuu

SEQ ID NO: 46246 - RNA, 19 nt, Homo sapiens
  misc_RNA (1)...(19): siRNA sense strand
cacaauggauggacuggua

SEQ ID NO: 46247 - RNA, 19 nt, Homo sapiens
  misc_RNA (1)...(19): siRNA sense strand
acaaggacaugaugaguga

SEQ ID NO: 46248 - RNA, 19 nt, Homo sapiens
  misc_RNA (1)...(19): siRNA sense strand
gcgcugccaucaccucuaa

SEQ ID NO: 46249 - RNA, 19 nt, Homo sapiens
  misc_RNA (1)...(19): siRNA sense strand
ucaagaggauagugacauu

SEQ ID NO: 46250 - RNA, 19 nt, Homo sapiens
  misc_RNA (1)...(19): siRNA sense strand
guuaacagccuugaccuua

SEQ ID NO: 46251 - RNA, 19 nt, Homo sapiens
  misc_RNA (1)...(19): siRNA sense strand
gcugagaucuuguuuaacg

SEQ ID NO: 46252 - RNA, 19 nt, Homo sapiens
  misc_RNA (1)...(19): siRNA sense strand
uaacagccuugaccuuaug

SEQ ID NO: 46253 - RNA, 19 nt, Homo sapiens
  misc_RNA (1)...(19): siRNA sense strand
ugacauugccuucuugauu

SEQ ID NO: 46254 - RNA, 19 nt, Homo sapiens
  misc_RNA (1)...(19): siRNA sense strand
gcagugagaacacguaugu

SEQ ID NO: 46255 - RNA, 19 nt, Homo sapiens
  misc_RNA (1)...(19): siRNA sense strand
caugaaugaugcuuacuug

SEQ ID NO: 46256 - RNA, 19 nt, Homo sapiens
  misc_RNA (1)...(19): siRNA sense strand
caggaagaauucaaugcua

SEQ ID NO: 46257 - RNA, 19 nt, Homo sapiens
  misc_RNA (1)...(19): siRNA sense strand
ggugaaauaugcugucuac

SEQ ID NO: 46258 - RNA, 19 nt, Homo sapiens
  misc_RNA (1)...(19): siRNA sense strand
cagaguggauucagacaug

SEQ ID NO: 46259 - RNA, 19 nt, Homo sapiens
  misc_RNA (1)...(19): siRNA sense strand
ccagggaaguggcaaggaa

SEQ ID NO: 46260 - RNA, 19 nt, Homo sapiens
  misc_RNA (1)...(19): siRNA sense strand
gagaacaacaugcccagaa

SEQ ID NO: 46261 - RNA, 19 nt, Homo sapiens
  misc_RNA (1)...(19): siRNA sense strand
gccaggaccucacaaugga

SEQ ID NO: 46262 - RNA, 19 nt, Homo sapiens
  misc_RNA (1)...(19): siRNA sense strand
caaaggcaaccucucguuu

SEQ ID NO: 46263 - RNA, 19 nt, Homo sapiens
  misc_RNA (1)...(19): siRNA sense strand
cuaaauaucucaacuucac

SEQ ID NO: 46264 - RNA, 19 nt, Homo sapiens
  misc_RNA (1)...(19): siRNA sense strand
ucaaggcaaucauggaguu

SEQ ID NO: 46265 - RNA, 19 nt, Homo sapiens
  misc_RNA (1)...(19): siRNA sense strand
ggaacgccauugucugcuu

SEQ ID NO: 46266 - RNA, 19 nt, Homo sapiens
  misc_RNA (1)...(19): siRNA sense strand
guaaugaucagguggugaa

SEQ ID NO: 46267 - RNA, 19 nt, Homo sapiens
  misc_RNA (1)...(19): siRNA sense strand
gcacagcugagaucuuguu

SEQ ID NO: 46268 - RNA, 19 nt, Homo sapiens
  misc_RNA (1)...(19): siRNA sense strand
agacagagagggagucauu

SEQ ID NO: 46269 - RNA, 19 nt, Homo sapiens
  misc_RNA (1)...(19): siRNA sense strand
gaaguggcaaggaauguau

SEQ ID NO: 46270 - RNA, 19 nt, Homo sapiens
  misc_RNA (1)...(19): siRNA sense strand
ggaaguggcaaggaaugua

SEQ ID NO: 46271 - RNA, 19 nt, Homo sapiens
  misc_RNA (1)...(19): siRNA sense strand
gaucgaggguacucagaca

SEQ ID NO: 46272 - RNA, 19 nt, Homo sapiens
  misc_RNA (1)...(19): siRNA sense strand
uccagaguguugugacuua

SEQ ID NO: 46273 - RNA, 19 nt, Homo sapiens
  misc_RNA (1)...(19): siRNA sense strand
gagaucuuguuuaacgauu

SEQ ID NO: 46274 - RNA, 19 nt, Homo sapiens
  misc_RNA (1)...(19): siRNA sense strand
gccagagaauccaguguga

SEQ ID NO: 46275 - RNA, 19 nt, Homo sapiens
  misc_RNA (1)...(19): siRNA sense strand
gcaauacaaggacaugaug

SEQ ID NO: 46276 - RNA, 19 nt, Homo sapiens
  misc_RNA (1)...(19): siRNA sense strand
ugagaacacguaugugaaa

SEQ ID NO: 46277 - RNA, 19 nt, Homo sapiens
  misc_RNA (1)...(19): siRNA sense strand
ugaaauaugcugucuacau

SEQ ID NO: 46278 - RNA, 19 nt, Homo sapiens
  misc_RNA (1)...(19): siRNA sense strand
ccuuuaauaucacguuuga

SEQ ID NO: 46279 - RNA, 19 nt, Homo sapiens
  misc_RNA (1)...(19): siRNA sense strand
gggcucugcuuccuguuug

SEQ ID NO: 46280 - RNA, 19 nt, Homo sapiens
  misc_RNA (1)...(19): siRNA sense strand
cacuaaauaucucaacuuc

SEQ ID NO: 46281 - RNA, 19 nt, Homo sapiens
  misc_RNA (1)...(19): siRNA sense strand
gagcaccagcugcagcaua

SEQ ID NO: 46282 - RNA, 19 nt, Homo sapiens
  misc_RNA (1)...(19): siRNA sense strand
gcuaagagaaggacagauc

SEQ ID NO: 46283 - RNA, 19 nt, Homo sapiens
  misc_RNA (1)...(19): siRNA sense strand
ugaaggaguuugucucaac

SEQ ID NO: 46284 - RNA, 19 nt, Homo sapiens
  misc_RNA (1)...(19): siRNA sense strand
gaugaaggaguuugucuca

SEQ ID NO: 46285 - RNA, 19 nt, Homo sapiens
  misc_RNA (1)...(19): siRNA sense strand
ccaaaaccuuguucucuuu

SEQ ID NO: 46286 - RNA, 19 nt, Homo sapiens
  misc_RNA (1)...(19): siRNA sense strand
guuuaacgauuccguguuc

SEQ ID NO: 46287 - RNA, 19 nt, Homo sapiens
  misc_RNA (1)...(19): siRNA sense strand
caacaaaaccgaauuccaa

SEQ ID NO: 46288 - RNA, 19 nt, Homo sapiens
  misc_RNA (1)...(19): siRNA sense strand
guauuugaguguaaugauc

SEQ ID NO: 46289 - RNA, 19 nt, Homo sapiens
  misc_RNA (1)...(19): siRNA sense strand
caacaugaccagaguggau

SEQ ID NO: 46290 - RNA, 19 nt, Homo sapiens
  misc_RNA (1)...(19): siRNA sense strand
cggauucacuuuaccuuca

SEQ ID NO: 46291 - RNA, 19 nt, Homo sapiens
  misc_RNA (1)...(19): siRNA sense strand
ggauucacuuuaccuucaa

SEQ ID NO: 46292 - RNA, 19 nt, Homo sapiens
  misc_RNA (1)...(19): siRNA sense strand
aaggcaaccucucguuuga

SEQ ID NO: 46293 - RNA, 19 nt, Homo sapiens
  misc_RNA (1)...(19): siRNA sense strand
agaguguugugacuuauga

SEQ ID NO: 46294 - RNA, 19 nt, Homo sapiens
  misc_RNA (1)...(19): siRNA sense strand
caccagacuugcagugaga

SEQ ID NO: 46295 - RNA, 19 nt, Homo sapiens
  misc_RNA (1)...(19): siRNA sense strand
cucccaggcuccaguauuu

SEQ ID NO: 46296 - RNA, 19 nt, Homo sapiens
  misc_RNA (1)...(19): siRNA sense strand
gagaaaagcaccuucauca

SEQ ID NO: 46297 - RNA, 19 nt, Homo sapiens
  misc_RNA (1)...(19): siRNA sense strand
gaauaccagucgggucaug

SEQ ID NO: 46298 - RNA, 19 nt, Homo sapiens
  misc_RNA (1)...(19): siRNA sense strand
uuaacagccuugaccuuau

SEQ ID NO: 46299 - RNA, 19 nt, Homo sapiens
  misc_RNA (1)...(19): siRNA sense strand
gcaaggaauguauuugagu

SEQ ID NO: 46300 - RNA, 19 nt, Homo sapiens
  misc_RNA (1)...(19): siRNA sense strand
gcucaggucccagccagua

SEQ ID NO: 46301 - RNA, 19 nt, Homo sapiens
  misc_RNA (1)...(19): siRNA sense strand
caaugaccuuccaagagaa

SEQ ID NO: 46302 - RNA, 19 nt, Homo sapiens
  misc_RNA (1)...(19): siRNA sense strand
gagaugccuuccgcaguga

SEQ ID NO: 46303 - RNA, 19 nt, Homo sapiens
  misc_RNA (1)...(19): siRNA sense strand
ugacggacguggccauugg

SEQ ID NO: 46304 - RNA, 19 nt, Homo sapiens
  misc_RNA (1)...(19): siRNA sense strand
guccaacgcuaaugucaag

SEQ ID NO: 46305 - RNA, 19 nt, Homo sapiens
  misc_RNA (1)...(19): siRNA sense strand
agacaugaaugaugcuuac

SEQ ID NO: 46306 - RNA, 19 nt, Homo sapiens
  misc_RNA (1)...(19): siRNA sense strand
ugaccagaguggauucaga

SEQ ID NO: 46307 - RNA, 19 nt, Homo sapiens
  misc_RNA (1)...(19): siRNA sense strand
gaaaucccgccaagagcuu

SEQ ID NO: 46308 - RNA, 19 nt, Homo sapiens
  misc_RNA (1)...(19): siRNA sense strand
aaggacagauccagagugu

SEQ ID NO: 46309 - RNA, 19 nt, Homo sapiens
  misc_RNA (1)...(19): siRNA sense strand
cagcaucaccuucaguuuc

SEQ ID NO: 46310 - RNA, 19 nt, Homo sapiens
  misc_RNA (1)...(19): siRNA sense strand
ugagaaaucccgccaagag

SEQ ID NO: 46311 - RNA, 19 nt, Homo sapiens
  misc_RNA (1)...(19): siRNA sense strand
guacgugccacaccaagga

SEQ ID NO: 46312 - RNA, 19 nt, Homo sapiens
  misc_RNA (1)...(19): siRNA sense strand
gugagacccugaaacuaca

SEQ ID NO: 46313 - RNA, 19 nt, Homo sapiens
  misc_RNA (1)...(19): siRNA sense strand
gagaacacguaugugaaag

SEQ ID NO: 46314 - RNA, 19 nt, Homo sapiens
  misc_RNA (1)...(19): siRNA sense strand
uuaauaccaucgcauccaa

SEQ ID NO: 46315 - RNA, 19 nt, Homo sapiens
  misc_RNA (1)...(19): siRNA sense strand
gggcauccgcaaaguggua

SEQ ID NO: 46316 - RNA, 19 nt, Homo sapiens
  misc_RNA (1)...(19): siRNA sense strand
ccacuaaauaucucaacuu

SEQ ID NO: 46317 - RNA, 19 nt, Homo sapiens
  misc_RNA (1)...(19): siRNA sense strand
ggcaaggaauguauuugag

SEQ ID NO: 46318 - RNA, 19 nt, Homo sapiens
  misc_RNA (1)...(19): siRNA sense strand
agaaccagcuucgggagaa

SEQ ID NO: 46319 - RNA, 19 nt, Homo sapiens
  misc_RNA (1)...(19): siRNA sense strand
gcagugugaugcuguucuc

SEQ ID NO: 46320 - RNA, 19 nt, Homo sapiens
  misc_RNA (1)...(19): siRNA sense strand
agcaccagcugcagcauaa

SEQ ID NO: 46321 - RNA, 19 nt, Homo sapiens
  misc_RNA (1)...(19): siRNA sense strand
ggcggaggaugcucagaga

SEQ ID NO: 46322 - RNA, 19 nt, Homo sapiens
  misc_RNA (1)...(19): siRNA sense strand
ucacggaaccucaggaucu

SEQ ID NO: 46323 - RNA, 19 nt, Homo sapiens
  misc_RNA (1)...(19): siRNA sense strand
ccuuuaagauccuaguugu

SEQ ID NO: 46324 - RNA, 19 nt, Homo sapiens
  misc_RNA (1)...(19): siRNA sense strand
aaaggcaaccucucguuug

SEQ ID NO: 46325 - RNA, 19 nt, Homo sapiens
  misc_RNA (1)...(19): siRNA sense strand
gagaauccagugugacauc

SEQ ID NO: 46326 - RNA, 19 nt, Homo sapiens
  misc_RNA (1)...(19): siRNA sense strand
gaguucaacgugacaguga

SEQ ID NO: 46327 - RNA, 19 nt, Homo sapiens
  misc_RNA (1)...(19): siRNA sense strand
gaaaagcaccuucaucaac

SEQ ID NO: 46328 - RNA, 19 nt, Homo sapiens
  misc_RNA (1)...(19): siRNA sense strand
gucauucgcuacgucauug

SEQ ID NO: 46329 - RNA, 19 nt, Homo sapiens
  misc_RNA (1)...(19): siRNA sense strand
gguucaacuuggacacuga

SEQ ID NO: 46330 - RNA, 19 nt, Homo sapiens
  misc_RNA (1)...(19): siRNA sense strand
gggagauagugaugaagua

SEQ ID NO: 46331 - RNA, 19 nt, Homo sapiens
  misc_RNA (1)...(19): siRNA sense strand
gaaguacauccauuauaag

SEQ ID NO: 46332 - RNA, 19 nt, Homo sapiens
  misc_RNA (1)...(19): siRNA sense strand
ggaggauuguggccuucuu

SEQ ID NO: 46333 - RNA, 19 nt, Homo sapiens
  misc_RNA (1)...(19): siRNA sense strand
ggauuguggccuucuuuga

SEQ ID NO: 46334 - RNA, 19 nt, Homo sapiens
  misc_RNA (1)...(19): siRNA sense strand
gaggauuguggccuucuuu

SEQ ID NO: 46335 - RNA, 19 nt, Homo sapiens
  misc_RNA (1)...(19): siRNA sense strand
agauagugaugaaguacau

SEQ ID NO: 46336 - RNA, 19 nt, Homo sapiens
  misc_RNA (1)...(19): siRNA sense strand
gauuguggccuucuuugag

SEQ ID NO: 46337 - RNA, 19 nt, Homo sapiens
  misc_RNA (1)...(19): siRNA sense strand
cccuguggaugacugagua

SEQ ID NO: 46338 - RNA, 19 nt, Homo sapiens
  misc_RNA (1)...(19): siRNA sense strand
cgagugggaugcgggagau

SEQ ID NO: 46339 - RNA, 19 nt, Homo sapiens
  misc_RNA (1)...(19): siRNA sense strand
gagauagugaugaaguaca

SEQ ID NO: 46340 - RNA, 19 nt, Homo sapiens
  misc_RNA (1)...(19): siRNA sense strand
ggagauagugaugaaguac

SEQ ID NO: 46341 - RNA, 19 nt, Homo sapiens
  misc_RNA (1)...(19): siRNA sense strand
gggagauagugaugaagua

SEQ ID NO: 46342 - RNA, 19 nt, Homo sapiens
  misc_RNA (1)...(19): siRNA sense strand
gaaguacauccauuauaag

SEQ ID NO: 46343 - RNA, 19 nt, Homo sapiens
  misc_RNA (1)...(19): siRNA sense strand
ggaggauuguggccuucuu

SEQ ID NO: 46344 - RNA, 19 nt, Homo sapiens
  misc_RNA (1)...(19): siRNA sense strand
ggauuguggccuucuuuga

SEQ ID NO: 46345 - RNA, 19 nt, Homo sapiens
  misc_RNA (1)...(19): siRNA sense strand
gaggauuguggccuucuuu

SEQ ID NO: 46346 - RNA, 19 nt, Homo sapiens
  misc_RNA (1)...(19): siRNA sense strand
agauagugaugaaguacau

SEQ ID NO: 46347 - RNA, 19 nt, Homo sapiens
  misc_RNA (1)...(19): siRNA sense strand
gauuguggccuucuuugag

SEQ ID NO: 46348 - RNA, 19 nt, Homo sapiens
  misc_RNA (1)...(19): siRNA sense strand
cccuguggaugacugagua

SEQ ID NO: 46349 - RNA, 19 nt, Homo sapiens
  misc_RNA (1)...(19): siRNA sense strand
cgagugggaugcgggagau

SEQ ID NO: 46350 - RNA, 19 nt, Homo sapiens
  misc_RNA (1)...(19): siRNA sense strand
gagauagugaugaaguaca

SEQ ID NO: 46351 - RNA, 19 nt, Homo sapiens
  misc_RNA (1)...(19): siRNA sense strand
ggagauagugaugaaguac

SEQ ID NO: 46352 - RNA, 19 nt, Homo sapiens
  misc_RNA (1)...(19): siRNA sense strand
gaaguucucuuuacaacca

SEQ ID NO: 46353 - RNA, 19 nt, Homo sapiens
  misc_RNA (1)...(19): siRNA sense strand
gcaacucgaaguaccauua

SEQ ID NO: 46354 - RNA, 19 nt, Homo sapiens
  misc_RNA (1)...(19): siRNA sense strand
gaaggcugguugacaaaug

SEQ ID NO: 46355 - RNA, 19 nt, Homo sapiens
  misc_RNA (1)...(19): siRNA sense strand
cagcacggcuucuuacuuc

SEQ ID NO: 46356 - RNA, 19 nt, Homo sapiens
  misc_RNA (1)...(19): siRNA sense strand
ugacaaaugccaugaguga

SEQ ID NO: 46357 - RNA, 19 nt, Homo sapiens
  misc_RNA (1)...(19): siRNA sense strand
gcuguuggauaauuaugaa

SEQ ID NO: 46358 - RNA, 19 nt, Homo sapiens
  misc_RNA (1)...(19): siRNA sense strand
aaacugauccguucugugu

SEQ ID NO: 46359 - RNA, 19 nt, Homo sapiens
  misc_RNA (1)...(19): siRNA sense strand
ugacacaggccauccguaa

SEQ ID NO: 46360 - RNA, 19 nt, Homo sapiens
  misc_RNA (1)...(19): siRNA sense strand
gcacugcgaggcaacugua

SEQ ID NO: 46361 - RNA, 19 nt, Homo sapiens
  misc_RNA (1)...(19): siRNA sense strand
ugacgcugcucgacaaaga

SEQ ID NO: 46362 - RNA, 19 nt, Homo sapiens
  misc_RNA (1)...(19): siRNA sense strand
gaacagccuacaccuacaa

SEQ ID NO: 46363 - RNA, 19 nt, Homo sapiens
  misc_RNA (1)...(19): siRNA sense strand
cagaacacgucccagauca

SEQ ID NO: 46364 - RNA, 19 nt, Homo sapiens
  misc_RNA (1)...(19): siRNA sense strand
gcacagcacuccggaacag

SEQ ID NO: 46365 - RNA, 19 nt, Homo sapiens
  misc_RNA (1)...(19): siRNA sense strand
ggaaacugauccguucugu

SEQ ID NO: 46366 - RNA, 19 nt, Homo sapiens
  misc_RNA (1)...(19): siRNA sense strand
cgaggcaacuguagaugug

SEQ ID NO: 46367 - RNA, 19 nt, Homo sapiens
  misc_RNA (1)...(19): siRNA sense strand
caaaugccaugagugacuu

SEQ ID NO: 46368 - RNA, 19 nt, Homo sapiens
  misc_RNA (1)...(19): siRNA sense strand
ucaacgaucucgccucucu

SEQ ID NO: 46369 - RNA, 19 nt, Homo sapiens
  misc_RNA (1)...(19): siRNA sense strand
gcagaacacgucccagauc

SEQ ID NO: 46370 - RNA, 19 nt, Homo sapiens
  misc_RNA (1)...(19): siRNA sense strand
acugauccguucuguguuu

SEQ ID NO: 46371 - RNA, 19 nt, Homo sapiens
  misc_RNA (1)...(19): siRNA sense strand
cggcaguucuugcugaaau

SEQ ID NO: 46372 - RNA, 19 nt, Homo sapiens
  misc_RNA (1)...(19): siRNA sense strand
gcagcacggcuucuuacuu

SEQ ID NO: 46373 - RNA, 19 nt, Homo sapiens
  misc_RNA (1)...(19): siRNA sense strand
gauccguucuguguuuaug

SEQ ID NO: 46374 - RNA, 19 nt, Homo sapiens
  misc_RNA (1)...(19): siRNA sense strand
ccagcagcacggcuucuua

SEQ ID NO: 46375 - RNA, 19 nt, Homo sapiens
  misc_RNA (1)...(19): siRNA sense strand
aagaugacaugggcgauga

SEQ ID NO: 46376 - RNA, 19 nt, Homo sapiens
  misc_RNA (1)...(19): siRNA sense strand
aagccggacucaccacuga

SEQ ID NO: 46377 - RNA, 19 nt, Homo sapiens
  misc_RNA (1)...(19): siRNA sense strand
guugacaaaugccaugagu

SEQ ID NO: 46378 - RNA, 19 nt, Homo sapiens
  misc_RNA (1)...(19): siRNA sense strand
gaugggagaguucaacgau

SEQ ID NO: 46379 - RNA, 19 nt, Homo sapiens
  misc_RNA (1)...(19): siRNA sense strand
gaacacgucccagaucaac

SEQ ID NO: 46380 - RNA, 19 nt, Homo sapiens
  misc_RNA (1)...(19): siRNA sense strand
gcaccaccagcaguacaua

SEQ ID NO: 46381 - RNA, 19 nt, Homo sapiens
  misc_RNA (1)...(19): siRNA sense strand
ugagugacuucccacaaca

SEQ ID NO: 46382 - RNA, 19 nt, Homo sapiens
  misc_RNA (1)...(19): siRNA sense strand
uuggaaggcugguugacaa

SEQ ID NO: 46383 - RNA, 19 nt, Homo sapiens
  misc_RNA (1)...(19): siRNA sense strand
caccagcaguacauagaug

SEQ ID NO: 46384 - RNA, 19 nt, Homo sapiens
  misc_RNA (1)...(19): siRNA sense strand
gccaggagcacaagcuaga

SEQ ID NO: 46385 - RNA, 19 nt, Homo sapiens
  misc_RNA (1)...(19): siRNA sense strand
aguggcuguuggauaauua

SEQ ID NO: 46386 - RNA, 19 nt, Homo sapiens
  misc_RNA (1)...(19): siRNA sense strand
cuguagauguggugaugaa

SEQ ID NO: 46387 - RNA, 19 nt, Homo sapiens
  misc_RNA (1)...(19): siRNA sense strand
caguggcuguuggauaauu

SEQ ID NO: 46388 - RNA, 19 nt, Homo sapiens
  misc_RNA (1)...(19): siRNA sense strand
ugggagaguucaacgaucu

SEQ ID NO: 46389 - RNA, 19 nt, Homo sapiens
  misc_RNA (1)...(19): siRNA sense strand
cgaacagccuacaccuaca

SEQ ID NO: 46390 - RNA, 19 nt, Homo sapiens
  misc_RNA (1)...(19): siRNA sense strand
gccagcaccaccagcagua

SEQ ID NO: 46391 - RNA, 19 nt, Homo sapiens
  misc_RNA (1)...(19): siRNA sense strand
ggcaguucuugcugaaaug

SEQ ID NO: 46392 - RNA, 19 nt, Homo sapiens
  misc_RNA (1)...(19): siRNA sense strand
gcgaggcaacuguagaugu

SEQ ID NO: 46393 - RNA, 19 nt, Homo sapiens
  misc_RNA (1)...(19): siRNA sense strand
ggaggacacgcaguacaug

SEQ ID NO: 46394 - RNA, 19 nt, Homo sapiens
  misc_RNA (1)...(19): siRNA sense strand
cuacgacgaguacauguuc

SEQ ID NO: 46395 - RNA, 19 nt, Homo sapiens
  misc_RNA (1)...(19): siRNA sense strand
caaggugggcgucgucagu

SEQ ID NO: 46396 - RNA, 19 nt, Homo sapiens
  misc_RNA (1)...(19): siRNA sense strand
gcacggcuucuuacuucga

SEQ ID NO: 46397 - RNA, 19 nt, Homo sapiens
  misc_RNA (1)...(19): siRNA sense strand
caagcuagacccagugaac

SEQ ID NO: 46398 - RNA, 19 nt, Homo sapiens
  misc_RNA (1)...(19): siRNA sense strand
gcucuacgacgaguacaug

SEQ ID NO: 46399 - RNA, 19 nt, Homo sapiens
  misc_RNA (1)...(19): siRNA sense strand
ggaaggcugguugacaaau

SEQ ID NO: 46400 - RNA, 19 nt, Homo sapiens
  misc_RNA (1)...(19): siRNA sense strand
gaggagcugcgaccacauc

SEQ ID NO: 46401 - RNA, 19 nt, Homo sapiens
  misc_RNA (1)...(19): siRNA sense strand
gcucgacaaagaugacaug

SEQ ID NO: 46402 - RNA, 19 nt, Homo sapiens
  misc_RNA (1)...(19): siRNA sense strand
cgucccagaucaaccagau

SEQ ID NO: 46403 - RNA, 19 nt, Homo sapiens
  misc_RNA (1)...(19): siRNA sense strand
cugauccguucuguguuua

SEQ ID NO: 46404 - RNA, 19 nt, Homo sapiens
  misc_RNA (1)...(19): siRNA sense strand
gaaacagcggaagguguga

SEQ ID NO: 46405 - RNA, 19 nt, Homo sapiens
  misc_RNA (1)...(19): siRNA sense strand
ggauggacagcaccagaca

SEQ ID NO: 46406 - RNA, 19 nt, Homo sapiens
  misc_RNA (1)...(19): siRNA sense strand
gcgaccacauccucuacca

SEQ ID NO: 46407 - RNA, 19 nt, Homo sapiens
  misc_RNA (1)...(19): siRNA sense strand
ccaggcagccagcuccaau

SEQ ID NO: 46408 - RNA, 19 nt, Homo sapiens
  misc_RNA (1)...(19): siRNA sense strand
ccucaaccgcguggacuuu

SEQ ID NO: 46409 - RNA, 19 nt, Homo sapiens
  misc_RNA (1)...(19): siRNA sense strand
gaaguucucuuuacaacca

SEQ ID NO: 46410 - RNA, 19 nt, Homo sapiens
  misc_RNA (1)...(19): siRNA sense strand
gcaacucgaaguaccauua

SEQ ID NO: 46411 - RNA, 19 nt, Homo sapiens
  misc_RNA (1)...(19): siRNA sense strand
gaaggcugguugacaaaug

SEQ ID NO: 46412 - RNA, 19 nt, Homo sapiens
  misc_RNA (1)...(19): siRNA sense strand
cagcacggcuucuuacuuc

SEQ ID NO: 46413 - RNA, 19 nt, Homo sapiens
  misc_RNA (1)...(19): siRNA sense strand
ugacaaaugccaugaguga

SEQ ID NO: 46414 - RNA, 19 nt, Homo sapiens
  misc_RNA (1)...(19): siRNA sense strand
gcuguuggauaauuaugaa

SEQ ID NO: 46415 - RNA, 19 nt, Homo sapiens
  misc_RNA (1)...(19): siRNA sense strand
aaacugauccguucugugu

SEQ ID NO: 46416 - RNA, 19 nt, Homo sapiens
  misc_RNA (1)...(19): siRNA sense strand
ugacacaggccauccguaa

SEQ ID NO: 46417 - RNA, 19 nt, Homo sapiens
  misc_RNA (1)...(19): siRNA sense strand
gcacugcgaggcaacugua

SEQ ID NO: 46418 - RNA, 19 nt, Homo sapiens
  misc_RNA (1)...(19): siRNA sense strand
ugacgcugcucgacaaaga

SEQ ID NO: 46419 - RNA, 19 nt, Homo sapiens
  misc_RNA (1)...(19): siRNA sense strand
gaacagccuacaccuacaa

SEQ ID NO: 46420 - RNA, 19 nt, Homo sapiens
  misc_RNA (1)...(19): siRNA sense strand
cagaacacgucccagauca

SEQ ID NO: 46421 - RNA, 19 nt, Homo sapiens
  misc_RNA (1)...(19): siRNA sense strand
gcacagcacuccggaacag

SEQ ID NO: 46422 - RNA, 19 nt, Homo sapiens
  misc_RNA (1)...(19): siRNA sense strand
ggaaacugauccguucugu

SEQ ID NO: 46423 - RNA, 19 nt, Homo sapiens
  misc_RNA (1)...(19): siRNA sense strand
cgaggcaacuguagaugug

SEQ ID NO: 46424 - RNA, 19 nt, Homo sapiens
  misc_RNA (1)...(19): siRNA sense strand
caaaugccaugagugacuu

SEQ ID NO: 46425 - RNA, 19 nt, Homo sapiens
  misc_RNA (1)...(19): siRNA sense strand
ucaacgaucucgccucucu

SEQ ID NO: 46426 - RNA, 19 nt, Homo sapiens
  misc_RNA (1)...(19): siRNA sense strand
gcagaacacgucccagauc

SEQ ID NO: 46427 - RNA, 19 nt, Homo sapiens
  misc_RNA (1)...(19): siRNA sense strand
acugauccguucuguguuu

SEQ ID NO: 46428 - RNA, 19 nt, Homo sapiens
  misc_RNA (1)...(19): siRNA sense strand
cggcaguucuugcugaaau

SEQ ID NO: 46429 - RNA, 19 nt, Homo sapiens
  misc_RNA (1)...(19): siRNA sense strand
gcagcacggcuucuuacuu

SEQ ID NO: 46430 - RNA, 19 nt, Homo sapiens
  misc_RNA (1)...(19): siRNA sense strand
gauccguucuguguuuaug

SEQ ID NO: 46431 - RNA, 19 nt, Homo sapiens
  misc_RNA (1)...(19): siRNA sense strand
ccagcagcacggcuucuua

SEQ ID NO: 46432 - RNA, 19 nt, Homo sapiens
  misc_RNA (1)...(19): siRNA sense strand
aagaugacaugggcgauga

SEQ ID NO: 46433 - RNA, 19 nt, Homo sapiens
  misc_RNA (1)...(19): siRNA sense strand
aagccggacucaccacuga

SEQ ID NO: 46434 - RNA, 19 nt, Homo sapiens
  misc_RNA (1)...(19): siRNA sense strand
guugacaaaugccaugagu

SEQ ID NO: 46435 - RNA, 19 nt, Homo sapiens
  misc_RNA (1)...(19): siRNA sense strand
gaugggagaguucaacgau

SEQ ID NO: 46436 - RNA, 19 nt, Homo sapiens
  misc_RNA (1)...(19): siRNA sense strand
gaacacgucccagaucaac

SEQ ID NO: 46437 - RNA, 19 nt, Homo sapiens
  misc_RNA (1)...(19): siRNA sense strand
gcaccaccagcaguacaua

SEQ ID NO: 46438 - RNA, 19 nt, Homo sapiens
  misc_RNA (1)...(19): siRNA sense strand
ugagugacuucccacaaca

SEQ ID NO: 46439 - RNA, 19 nt, Homo sapiens
  misc_RNA (1)...(19): siRNA sense strand
uuggaaggcugguugacaa

SEQ ID NO: 46440 - RNA, 19 nt, Homo sapiens
  misc_RNA (1)...(19): siRNA sense strand
caccagcaguacauagaug

SEQ ID NO: 46441 - RNA, 19 nt, Homo sapiens
  misc_RNA (1)...(19): siRNA sense strand
gccaggagcacaagcuaga

SEQ ID NO: 46442 - RNA, 19 nt, Homo sapiens
  misc_RNA (1)...(19): siRNA sense strand
aguggcuguuggauaauua

SEQ ID NO: 46443 - RNA, 19 nt, Homo sapiens
  misc_RNA (1)...(19): siRNA sense strand
cuguagauguggugaugaa

SEQ ID NO: 46444 - RNA, 19 nt, Homo sapiens
  misc_RNA (1)...(19): siRNA sense strand
caguggcuguuggauaauu

SEQ ID NO: 46445 - RNA, 19 nt, Homo sapiens
  misc_RNA (1)...(19): siRNA sense strand
ugggagaguucaacgaucu

SEQ ID NO: 46446 - RNA, 19 nt, Homo sapiens
  misc_RNA (1)...(19): siRNA sense strand
cgaacagccuacaccuaca

SEQ ID NO: 46447 - RNA, 19 nt, Homo sapiens
  misc_RNA (1)...(19): siRNA sense strand
gccagcaccaccagcagua

SEQ ID NO: 46448 - RNA, 19 nt, Homo sapiens
  misc_RNA (1)...(19): siRNA sense strand
ggcaguucuugcugaaaug

SEQ ID NO: 46449 - RNA, 19 nt, Homo sapiens
  misc_RNA (1)...(19): siRNA sense strand
gcgaggcaacuguagaugu

SEQ ID NO: 46450 - RNA, 19 nt, Homo sapiens
  misc_RNA (1)...(19): siRNA sense strand
ggaggacacgcaguacaug

SEQ ID NO: 46451 - RNA, 19 nt, Homo sapiens
  misc_RNA (1)...(19): siRNA sense strand
cuacgacgaguacauguuc

SEQ ID NO: 46452 - RNA, 19 nt, Homo sapiens
  misc_RNA (1)...(19): siRNA sense strand
caaggugggcgucgucagu

SEQ ID NO: 46453 - RNA, 19 nt, Homo sapiens
  misc_RNA (1)...(19): siRNA sense strand
gcacggcuucuuacuucga

SEQ ID NO: 46454 - RNA, 19 nt, Homo sapiens
  misc_RNA (1)...(19): siRNA sense strand
caagcuagacccagugaac

SEQ ID NO: 46455 - RNA, 19 nt, Homo sapiens
  misc_RNA (1)...(19): siRNA sense strand
gcucuacgacgaguacaug

SEQ ID NO: 46456 - RNA, 19 nt, Homo sapiens
  misc_RNA (1)...(19): siRNA sense strand
ggaaggcugguugacaaau

SEQ ID NO: 46457 - RNA, 19 nt, Homo sapiens
  misc_RNA (1)...(19): siRNA sense strand
gaggagcugcgaccacauc

SEQ ID NO: 46458 - RNA, 19 nt, Homo sapiens
  misc_RNA (1)...(19): siRNA sense strand
gcucgacaaagaugacaug

SEQ ID NO: 46459 - RNA, 19 nt, Homo sapiens
  misc_RNA (1)...(19): siRNA sense strand
cgucccagaucaaccagau

SEQ ID NO: 46460 - RNA, 19 nt, Homo sapiens
  misc_RNA (1)...(19): siRNA sense strand
cugauccguucuguguuua

SEQ ID NO: 46461 - RNA, 19 nt, Homo sapiens
  misc_RNA (1)...(19): siRNA sense strand
gaaacagcggaagguguga

SEQ ID NO: 46462 - RNA, 19 nt, Homo sapiens
  misc_RNA (1)...(19): siRNA sense strand
ggauggacagcaccagaca

SEQ ID NO: 46463 - RNA, 19 nt, Homo sapiens
  misc_RNA (1)...(19): siRNA sense strand
gcgaccacauccucuacca

SEQ ID NO: 46464 - RNA, 19 nt, Homo sapiens
  misc_RNA (1)...(19): siRNA sense strand
ccaggcagccagcuccaau

SEQ ID NO: 46465 - RNA, 19 nt, Homo sapiens
  misc_RNA (1)...(19): siRNA sense strand
ccucaaccgcguggacuuu

SEQ ID NO: 46466 - RNA, 19 nt, Homo sapiens
  misc_RNA (1)...(19): siRNA sense strand
gaagacaccuauggaauug

SEQ ID NO: 46467 - RNA, 19 nt, Homo sapiens
  misc_RNA (1)...(19): siRNA sense strand
gaaaguggcccauuuaaca

SEQ ID NO: 46468 - RNA, 19 nt, Homo sapiens
  misc_RNA (1)...(19): siRNA sense strand
uaccagugcugaucauuua

SEQ ID NO: 46469 - RNA, 19 nt, Homo sapiens
  misc_RNA (1)...(19): siRNA sense strand
ggaagacaccuauggaauu

SEQ ID NO: 46470 - RNA, 19 nt, Homo sapiens
  misc_RNA (1)...(19): siRNA sense strand
gcacacagcaucaucuuug

SEQ ID NO: 46471 - RNA, 19 nt, Homo sapiens
  misc_RNA (1)...(19): siRNA sense strand
aaacugggcuguacuuugu

SEQ ID NO: 46472 - RNA, 19 nt, Homo sapiens
  misc_RNA (1)...(19): siRNA sense strand
gaggaaaguggcccauuua

SEQ ID NO: 46473 - RNA, 19 nt, Homo sapiens
  misc_RNA (1)...(19): siRNA sense strand
ugaggaaaguggcccauuu

SEQ ID NO: 46474 - RNA, 19 nt, Homo sapiens
  misc_RNA (1)...(19): siRNA sense strand
gaaacugggcuguacuuug

SEQ ID NO: 46475 - RNA, 19 nt, Homo sapiens
  misc_RNA (1)...(19): siRNA sense strand
caacguaucugagcucucu

SEQ ID NO: 46476 - RNA, 19 nt, Homo sapiens
  misc_RNA (1)...(19): siRNA sense strand
gcugaucauuuauauguca

SEQ ID NO: 46477 - RNA, 19 nt, Homo sapiens
  misc_RNA (1)...(19): siRNA sense strand
agaaggagcuggcagaacu

SEQ ID NO: 46478 - RNA, 19 nt, Homo sapiens
  misc_RNA (1)...(19): siRNA sense strand
cagaaggccuggucaaagg

SEQ ID NO: 46479 - RNA, 19 nt, Homo sapiens
  misc_RNA (1)...(19): siRNA sense strand
gggcuguacuuuguauauu

SEQ ID NO: 46480 - RNA, 19 nt, Homo sapiens
  misc_RNA (1)...(19): siRNA sense strand
uuucuggagugaaguauaa

SEQ ID NO: 46481 - RNA, 19 nt, Homo sapiens
  misc_RNA (1)...(19): siRNA sense strand
ggaauuguccugcuuucug

SEQ ID NO: 46482 - RNA, 19 nt, Homo sapiens
  misc_RNA (1)...(19): siRNA sense strand
gcccuucaauuacccauau

SEQ ID NO: 46483 - RNA, 19 nt, Homo sapiens
  misc_RNA (1)...(19): siRNA sense strand
ggaaugggaagacaccuau

SEQ ID NO: 46484 - RNA, 19 nt, Homo sapiens
  misc_RNA (1)...(19): siRNA sense strand
ggaagaugaugagcuacug

SEQ ID NO: 46485 - RNA, 19 nt, Homo sapiens
  misc_RNA (1)...(19): siRNA sense strand
gugcugaucauuuauaugu

SEQ ID NO: 46486 - RNA, 19 nt, Homo sapiens
  misc_RNA (1)...(19): siRNA sense strand
caaugaaacugggcuguac

SEQ ID NO: 46487 - RNA, 19 nt, Homo sapiens
  misc_RNA (1)...(19): siRNA sense strand
gggaagacaccuauggaau

SEQ ID NO: 46488 - RNA, 19 nt, Homo sapiens
  misc_RNA (1)...(19): siRNA sense strand
ccagugcugaucauuuaua

SEQ ID NO: 46489 - RNA, 19 nt, Homo sapiens
  misc_RNA (1)...(19): siRNA sense strand
augaugagcuacugcacua

SEQ ID NO: 46490 - RNA, 19 nt, Homo sapiens
  misc_RNA (1)...(19): siRNA sense strand
caucaucuuuggagaagca

SEQ ID NO: 46491 - RNA, 19 nt, Homo sapiens
  misc_RNA (1)...(19): siRNA sense strand
ggaaaguggcccauuuaac

SEQ ID NO: 46492 - RNA, 19 nt, Homo sapiens
  misc_RNA (1)...(19): siRNA sense strand
ggcuguacuuuguauauuc

SEQ ID NO: 46493 - RNA, 19 nt, Homo sapiens
  misc_RNA (1)...(19): siRNA sense strand
aaaaggagcugaggaaagu

SEQ ID NO: 46494 - RNA, 19 nt, Homo sapiens
  misc_RNA (1)...(19): siRNA sense strand
caugaggaacucuaaguau

SEQ ID NO: 46495 - RNA, 19 nt, Homo sapiens
  misc_RNA (1)...(19): siRNA sense strand
gguucugguugccuuggua

SEQ ID NO: 46496 - RNA, 19 nt, Homo sapiens
  misc_RNA (1)...(19): siRNA sense strand
cagugcugaucauuuauau

SEQ ID NO: 46497 - RNA, 19 nt, Homo sapiens
  misc_RNA (1)...(19): siRNA sense strand
ucaaugaaacugggcugua

SEQ ID NO: 46498 - RNA, 19 nt, Homo sapiens
  misc_RNA (1)...(19): siRNA sense strand
gccacaaggucuacaugag

SEQ ID NO: 46499 - RNA, 19 nt, Homo sapiens
  misc_RNA (1)...(19): siRNA sense strand
gggcaguguucaaucuuac

SEQ ID NO: 46500 - RNA, 19 nt, Homo sapiens
  misc_RNA (1)...(19): siRNA sense strand
gcagcagcccuucaauuac

SEQ ID NO: 46501 - RNA, 19 nt, Homo sapiens
  misc_RNA (1)...(19): siRNA sense strand
gcacuacugggcagaugug

SEQ ID NO: 46502 - RNA, 19 nt, Homo sapiens
  misc_RNA (1)...(19): siRNA sense strand
cagcaucaucuuuggagaa

SEQ ID NO: 46503 - RNA, 19 nt, Homo sapiens
  misc_RNA (1)...(19): siRNA sense strand
cagcagcccuucaauuacc

SEQ ID NO: 46504 - RNA, 19 nt, Homo sapiens
  misc_RNA (1)...(19): siRNA sense strand
ggggcaguguucaaucuua

SEQ ID NO: 46505 - RNA, 19 nt, Homo sapiens
  misc_RNA (1)...(19): siRNA sense strand
acaugaggaacucuaagua

SEQ ID NO: 46506 - RNA, 19 nt, Homo sapiens
  misc_RNA (1)...(19): siRNA sense strand
gggucaaucuugcaacaac

SEQ ID NO: 46507 - RNA, 19 nt, Homo sapiens
  misc_RNA (1)...(19): siRNA sense strand
uuaccagugcugaucauuu

SEQ ID NO: 46508 - RNA, 19 nt, Homo sapiens
  misc_RNA (1)...(19): siRNA sense strand
augaggaacucuaaguauc

SEQ ID NO: 46509 - RNA, 19 nt, Homo sapiens
  misc_RNA (1)...(19): siRNA sense strand
ggccuugugaucaaugaaa

SEQ ID NO: 46510 - RNA, 19 nt, Homo sapiens
  misc_RNA (1)...(19): siRNA sense strand
guucuucccuguccaaccu

SEQ ID NO: 46511 - RNA, 19 nt, Homo sapiens
  misc_RNA (1)...(19): siRNA sense strand
ugagcucucucuggucaau

SEQ ID NO: 46512 - RNA, 19 nt, Homo sapiens
  misc_RNA (1)...(19): siRNA sense strand
cuauggaauuguccugcuu

SEQ ID NO: 46513 - RNA, 19 nt, Homo sapiens
  misc_RNA (1)...(19): siRNA sense strand
uaacaggcaaguccaacuc

SEQ ID NO: 46514 - RNA, 19 nt, Homo sapiens
  misc_RNA (1)...(19): siRNA sense strand
aggaaaguggcccauuuaa

SEQ ID NO: 46515 - RNA, 19 nt, Homo sapiens
  misc_RNA (1)...(19): siRNA sense strand
acaggcaaguccaacucaa

SEQ ID NO: 46516 - RNA, 19 nt, Homo sapiens
  misc_RNA (1)...(19): siRNA sense strand
gagccacaaggucuacaug

SEQ ID NO: 46517 - RNA, 19 nt, Homo sapiens
  misc_RNA (1)...(19): siRNA sense strand
agcucucucuggucaauuu

SEQ ID NO: 46518 - RNA, 19 nt, Homo sapiens
  misc_RNA (1)...(19): siRNA sense strand
gcugaagacucggcuguga

SEQ ID NO: 46519 - RNA, 19 nt, Homo sapiens
  misc_RNA (1)...(19): siRNA sense strand
ggacugcugcugcugaaga

SEQ ID NO: 46520 - RNA, 19 nt, Homo sapiens
  misc_RNA (1)...(19): siRNA sense strand
gggcugcaccugacacuug

SEQ ID NO: 46521 - RNA, 19 nt, Homo sapiens
  misc_RNA (1)...(19): siRNA sense strand
ggcugcaccugacacuuga

SEQ ID NO: 46522 - RNA, 19 nt, Homo sapiens
  misc_RNA (1)...(19): siRNA sense strand
gcacagcugagggacaaau

SEQ ID NO: 46523 - RNA, 19 nt, Homo sapiens
  misc_RNA (1)...(19): siRNA sense strand
cugcacagcugagggacaa

SEQ ID NO: 46524 - RNA, 19 nt, Homo sapiens
  misc_RNA (1)...(19): siRNA sense strand
cugagccuguggccagaua

SEQ ID NO: 46525 - RNA, 19 nt, Homo sapiens
  misc_RNA (1)...(19): siRNA sense strand
ggcugcagcuccugauguc

SEQ ID NO: 46526 - RNA, 19 nt, Homo sapiens
  misc_RNA (1)...(19): siRNA sense strand
gcucccaggugugcugaca

SEQ ID NO: 46527 - RNA, 19 nt, Homo sapiens
  misc_RNA (1)...(19): siRNA sense strand
gaaaucaucugacacaauu

SEQ ID NO: 46528 - RNA, 19 nt, Homo sapiens
  misc_RNA (1)...(19): siRNA sense strand
gcaacaaucugguucauuu

SEQ ID NO: 46529 - RNA, 19 nt, Homo sapiens
  misc_RNA (1)...(19): siRNA sense strand
caaugcagauccuauauua

SEQ ID NO: 46530 - RNA, 19 nt, Homo sapiens
  misc_RNA (1)...(19): siRNA sense strand
gggaauaccugcuuugauu

SEQ ID NO: 46531 - RNA, 19 nt, Homo sapiens
  misc_RNA (1)...(19): siRNA sense strand
gggagacaguguuaaauua

SEQ ID NO: 46532 - RNA, 19 nt, Homo sapiens
  misc_RNA (1)...(19): siRNA sense strand
ccaaguagaugucaacaaa

SEQ ID NO: 46533 - RNA, 19 nt, Homo sapiens
  misc_RNA (1)...(19): siRNA sense strand
gaaauaagaccaaagaaug

SEQ ID NO: 46534 - RNA, 19 nt, Homo sapiens
  misc_RNA (1)...(19): siRNA sense strand
gauaaugaguguccuauug

SEQ ID NO: 46535 - RNA, 19 nt, Homo sapiens
  misc_RNA (1)...(19): siRNA sense strand
gaagggaaauacaaagaaa

SEQ ID NO: 46536 - RNA, 19 nt, Homo sapiens
  misc_RNA (1)...(19): siRNA sense strand
gaagagggcagauuaguuu

SEQ ID NO: 46537 - RNA, 19 nt, Homo sapiens
  misc_RNA (1)...(19): siRNA sense strand
gcaaugagugcauauaaua

SEQ ID NO: 46538 - RNA, 19 nt, Homo sapiens
  misc_RNA (1)...(19): siRNA sense strand
gagaacauauucagcuuaa

SEQ ID NO: 46539 - RNA, 19 nt, Homo sapiens
  misc_RNA (1)...(19): siRNA sense strand
ggacgaagguuuuaauaua

SEQ ID NO: 46540 - RNA, 19 nt, Homo sapiens
  misc_RNA (1)...(19): siRNA sense strand
ugacagagcuagaaacaga

SEQ ID NO: 46541 - RNA, 19 nt, Homo sapiens
  misc_RNA (1)...(19): siRNA sense strand
ggagaaacauuuaauagag

SEQ ID NO: 46542 - RNA, 19 nt, Homo sapiens
  misc_RNA (1)...(19): siRNA sense strand
gagauuggaugauugacua

SEQ ID NO: 46543 - RNA, 19 nt, Homo sapiens
  misc_RNA (1)...(19): siRNA sense strand
guagaagccaggaauauua

SEQ ID NO: 46544 - RNA, 19 nt, Homo sapiens
  misc_RNA (1)...(19): siRNA sense strand
ccagauagaucgaaacaug

SEQ ID NO: 46545 - RNA, 19 nt, Homo sapiens
  misc_RNA (1)...(19): siRNA sense strand
gugaagaucuggacaaugu

SEQ ID NO: 46546 - RNA, 19 nt, Homo sapiens
  misc_RNA (1)...(19): siRNA sense strand
cuauaaaggucucauauga

SEQ ID NO: 46547 - RNA, 19 nt, Homo sapiens
  misc_RNA (1)...(19): siRNA sense strand
gcaaggaagugccucaaau

SEQ ID NO: 46548 - RNA, 19 nt, Homo sapiens
  misc_RNA (1)...(19): siRNA sense strand
gaaaguauaccuggaauga

SEQ ID NO: 46549 - RNA, 19 nt, Homo sapiens
  misc_RNA (1)...(19): siRNA sense strand
ugaagcagaucccacguua

SEQ ID NO: 46550 - RNA, 19 nt, Homo sapiens
  misc_RNA (1)...(19): siRNA sense strand
gcagauuaguuuaccgaua

SEQ ID NO: 46551 - RNA, 19 nt, Homo sapiens
  misc_RNA (1)...(19): siRNA sense strand
gaagaaugcuguaauuggu

SEQ ID NO: 46552 - RNA, 19 nt, Homo sapiens
  misc_RNA (1)...(19): siRNA sense strand
ggaauggaauguuauuugu

SEQ ID NO: 46553 - RNA, 19 nt, Homo sapiens
  misc_RNA (1)...(19): siRNA sense strand
gaaugugccuauaaucuug

SEQ ID NO: 46554 - RNA, 19 nt, Homo sapiens
  misc_RNA (1)...(19): siRNA sense strand
acacaagccuggucaauug

SEQ ID NO: 46555 - RNA, 19 nt, Homo sapiens
  misc_RNA (1)...(19): siRNA sense strand
ccuauaaucuugugaauuc

SEQ ID NO: 46556 - RNA, 19 nt, Homo sapiens
  misc_RNA (1)...(19): siRNA sense strand
gaacauauucagcuuaaug

SEQ ID NO: 46557 - RNA, 19 nt, Homo sapiens
  misc_RNA (1)...(19): siRNA sense strand
caacuacaaucuugcuaaa

SEQ ID NO: 46558 - RNA, 19 nt, Homo sapiens
  misc_RNA (1)...(19): siRNA sense strand
gaaaggacuuccagaacug

SEQ ID NO: 46559 - RNA, 19 nt, Homo sapiens
  misc_RNA (1)...(19): siRNA sense strand
gaaucaggcuacaacauga

SEQ ID NO: 46560 - RNA, 19 nt, Homo sapiens
  misc_RNA (1)...(19): siRNA sense strand
acaagucgcuguuggaauu

SEQ ID NO: 46561 - RNA, 19 nt, Homo sapiens
  misc_RNA (1)...(19): siRNA sense strand
aaacacaggugaaguuaau

SEQ ID NO: 46562 - RNA, 19 nt, Homo sapiens
  misc_RNA (1)...(19): siRNA sense strand
aagaggcuaugaugaauua

SEQ ID NO: 46563 - RNA, 19 nt, Homo sapiens
  misc_RNA (1)...(19): siRNA sense strand
guaaauggauccaggaaca

SEQ ID NO: 46564 - RNA, 19 nt, Homo sapiens
  misc_RNA (1)...(19): siRNA sense strand
ugauucaucugccaaauaa

SEQ ID NO: 46565 - RNA, 19 nt, Homo sapiens
  misc_RNA (1)...(19): siRNA sense strand
gaugagaauucaaucaaug

SEQ ID NO: 46566 - RNA, 19 nt, Homo sapiens
  misc_RNA (1)...(19): siRNA sense strand
gcaacccaauuuauaugua

SEQ ID NO: 46567 - RNA, 19 nt, Homo sapiens
  misc_RNA (1)...(19): siRNA sense strand
acaaagcgguugagcaauu

SEQ ID NO: 46568 - RNA, 19 nt, Homo sapiens
  misc_RNA (1)...(19): siRNA sense strand
gagaagcaucgacucauua

SEQ ID NO: 46569 - RNA, 19 nt, Homo sapiens
  misc_RNA (1)...(19): siRNA sense strand
guaaaugguugcaggcuau

SEQ ID NO: 46570 - RNA, 19 nt, Homo sapiens
  misc_RNA (1)...(19): siRNA sense strand
gaagaacgguuuuacacua

SEQ ID NO: 46571 - RNA, 19 nt, Homo sapiens
  misc_RNA (1)...(19): siRNA sense strand
cagauuaguuuaccgauau

SEQ ID NO: 46572 - RNA, 19 nt, Homo sapiens
  misc_RNA (1)...(19): siRNA sense strand
gagaugauccucuucgaaa

SEQ ID NO: 46573 - RNA, 19 nt, Homo sapiens
  misc_RNA (1)...(19): siRNA sense strand
gcagaaauaagaccaaaga

SEQ ID NO: 46574 - RNA, 19 nt, Homo sapiens
  misc_RNA (1)...(19): siRNA sense strand
ucacaaacguggcauauac

SEQ ID NO: 46575 - RNA, 19 nt, Homo sapiens
  misc_RNA (1)...(19): siRNA sense strand
gcacauggauggauaaaau

SEQ ID NO: 46576 - RNA, 19 nt, Homo sapiens
  misc_RNA (1)...(19): siRNA sense strand
ucacguagcugaguacaug

SEQ ID NO: 46577 - RNA, 19 nt, Homo sapiens
  misc_RNA (1)...(19): siRNA sense strand
gcacaugcccuguuuaugg

SEQ ID NO: 46578 - RNA, 19 nt, Homo sapiens
  misc_RNA (1)...(19): siRNA sense strand
gauccaaaccaacaccuua

SEQ ID NO: 46579 - RNA, 19 nt, Homo sapiens
  misc_RNA (1)...(19): siRNA sense strand
gaaaagcaguuaccgugua

SEQ ID NO: 46580 - RNA, 19 nt, Homo sapiens
  misc_RNA (1)...(19): siRNA sense strand
gauaugaacauugcacuaa

SEQ ID NO: 46581 - RNA, 19 nt, Homo sapiens
  misc_RNA (1)...(19): siRNA sense strand
gaaauugugggccugagua

SEQ ID NO: 46582 - RNA, 19 nt, Homo sapiens
  misc_RNA (1)...(19): siRNA sense strand
caaaagggcccaaugaaua

SEQ ID NO: 46583 - RNA, 19 nt, Homo sapiens
  misc_RNA (1)...(19): siRNA sense strand
caaagcgguugagcaauuu

SEQ ID NO: 46584 - RNA, 19 nt, Homo sapiens
  misc_RNA (1)...(19): siRNA sense strand
gcuaaagguuucaauuauc

SEQ ID NO: 46585 - RNA, 19 nt, Homo sapiens
  misc_RNA (1)...(19): siRNA sense strand
gaucagccauuguuugaag

SEQ ID NO: 46586 - RNA, 19 nt, Homo sapiens
  misc_RNA (1)...(19): siRNA sense strand
ggugguggcugcaguguau

SEQ ID NO: 46587 - RNA, 19 nt, Homo sapiens
  misc_RNA (1)...(19): siRNA sense strand
ggcauggucucauuccuaa

SEQ ID NO: 46588 - RNA, 19 nt, Homo sapiens
  misc_RNA (1)...(19): siRNA sense strand
gcaauguuguguuucucua

SEQ ID NO: 46589 - RNA, 19 nt, Homo sapiens
  misc_RNA (1)...(19): siRNA sense strand
ggucagcccuuaaauaugc

SEQ ID NO: 46590 - RNA, 19 nt, Homo sapiens
  misc_RNA (1)...(19): siRNA sense strand
acaauucaguccucacuuu

SEQ ID NO: 46591 - RNA, 19 nt, Homo sapiens
  misc_RNA (1)...(19): siRNA sense strand
cuagaacuauugagagaaa

SEQ ID NO: 46592 - RNA, 19 nt, Homo sapiens
  misc_RNA (1)...(19): siRNA sense strand
gaaugggaaagcagacuua

SEQ ID NO: 46593 - RNA, 19 nt, Homo sapiens
  misc_RNA (1)...(19): siRNA sense strand
auaaaggucucauaugaug

SEQ ID NO: 46594 - RNA, 19 nt, Homo sapiens
  misc_RNA (1)...(19): siRNA sense strand
gcaguuaccguguauacaa

SEQ ID NO: 46595 - RNA, 19 nt, Homo sapiens
  misc_RNA (1)...(19): siRNA sense strand
gccaaucaguuagaauuaa

SEQ ID NO: 46596 - RNA, 19 nt, Homo sapiens
  misc_RNA (1)...(19): siRNA sense strand
caacagaaagagaagauga

SEQ ID NO: 46597 - RNA, 19 nt, Homo sapiens
  misc_RNA (1)...(19): siRNA sense strand
gaagcuagaacuauugaga

SEQ ID NO: 46598 - RNA, 19 nt, Homo sapiens
  misc_RNA (1)...(19): siRNA sense strand
gagaggcaaugagugcaua

SEQ ID NO: 46599 - RNA, 19 nt, Homo sapiens
  misc_RNA (1)...(19): siRNA sense strand
ccaaugagaaugcccagua

SEQ ID NO: 46600 - RNA, 19 nt, Homo sapiens
  misc_RNA (1)...(19): siRNA sense strand
gaaagugacagagcuagaa

SEQ ID NO: 46601 - RNA, 19 nt, Homo sapiens
  misc_RNA (1)...(19): siRNA sense strand
gcugcaggcuuaccucauu

SEQ ID NO: 46602 - RNA, 19 nt, Homo sapiens
  misc_RNA (1)...(19): siRNA sense strand
ucucuugccuccagauuaa

SEQ ID NO: 46603 - RNA, 19 nt, Homo sapiens
  misc_RNA (1)...(19): siRNA sense strand
ggaugagaauucaaucaau

SEQ ID NO: 46604 - RNA, 19 nt, Homo sapiens
  misc_RNA (1)...(19): siRNA sense strand
agagaaacacgaaaccuua

SEQ ID NO: 46605 - RNA, 19 nt, Homo sapiens
  misc_RNA (1)...(19): siRNA sense strand
cagcagcaauugaagaaug

SEQ ID NO: 46606 - RNA, 19 nt, Homo sapiens
  misc_RNA (1)...(19): siRNA sense strand
gccauuguuugaagucaua

SEQ ID NO: 46607 - RNA, 19 nt, Homo sapiens
  misc_RNA (1)...(19): siRNA sense strand
gagcuacaguuccgauuag

SEQ ID NO: 46608 - RNA, 19 nt, Homo sapiens
  misc_RNA (1)...(19): siRNA sense strand
gcuacucccuugccaauca

SEQ ID NO: 46609 - RNA, 19 nt, Homo sapiens
  misc_RNA (1)...(19): siRNA sense strand
uuccagaacugaccaauga

SEQ ID NO: 46610 - RNA, 19 nt, Homo sapiens
  misc_RNA (1)...(19): siRNA sense strand
agagguauacugcugauua

SEQ ID NO: 46611 - RNA, 19 nt, Homo sapiens
  misc_RNA (1)...(19): siRNA sense strand
gucaguaaccggcuuauuu

SEQ ID NO: 46612 - RNA, 19 nt, Homo sapiens
  misc_RNA (1)...(19): siRNA sense strand
uccaggaaguguuauuaua

SEQ ID NO: 46613 - RNA, 19 nt, Homo sapiens
  misc_RNA (1)...(19): siRNA sense strand
gaaugauguuggacagcua

SEQ ID NO: 46614 - RNA, 19 nt, Homo sapiens
  misc_RNA (1)...(19): siRNA sense strand
ccgauuaggcccaacuuua

SEQ ID NO: 46615 - RNA, 19 nt, Homo sapiens
  misc_RNA (1)...(19): siRNA sense strand
cagaugauaugguuuacug

SEQ ID NO: 46616 - RNA, 19 nt, Homo sapiens
  misc_RNA (1)...(19): siRNA sense strand
ggaaggaugagaauucaau

SEQ ID NO: 46617 - RNA, 19 nt, Homo sapiens
  misc_RNA (1)...(19): siRNA sense strand
gaagacauaguggcaguaa

SEQ ID NO: 46618 - RNA, 19 nt, Homo sapiens
  misc_RNA (1)...(19): siRNA sense strand
aaauuacgcuaugggaaua

SEQ ID NO: 46619 - RNA, 19 nt, Homo sapiens
  misc_RNA (1)...(19): siRNA sense strand
ucaagauccugaauacaga

SEQ ID NO: 46620 - RNA, 19 nt, Homo sapiens
  misc_RNA (1)...(19): siRNA sense strand
caucagauuucagugguuu

SEQ ID NO: 46621 - RNA, 19 nt, Homo sapiens
  misc_RNA (1)...(19): siRNA sense strand
gaauaccugcuuugauuga

SEQ ID NO: 46622 - RNA, 19 nt, Homo sapiens
  misc_RNA (1)...(19): siRNA sense strand
ggaaagcuuuggagauugc

SEQ ID NO: 46623 - RNA, 19 nt, Homo sapiens
  misc_RNA (1)...(19): siRNA sense strand
ggagcaauguuguguuucu

SEQ ID NO: 46624 - RNA, 19 nt, Homo sapiens
  misc_RNA (1)...(19): siRNA sense strand
ugacaaugcagauccuaua

SEQ ID NO: 46625 - RNA, 19 nt, Homo sapiens
  misc_RNA (1)...(19): siRNA sense strand
aaccaacaccuuacgauua

SEQ ID NO: 46626 - RNA, 19 nt, Homo sapiens
  misc_RNA (1)...(19): siRNA sense strand
aaggagcaauguuguguuu

SEQ ID NO: 46627 - RNA, 19 nt, Homo sapiens
  misc_RNA (1)...(19): siRNA sense strand
gaaaucaucugacacaauu

SEQ ID NO: 46628 - RNA, 19 nt, Homo sapiens
  misc_RNA (1)...(19): siRNA sense strand
gcaacaaucugguucauuu

SEQ ID NO: 46629 - RNA, 19 nt, Homo sapiens
  misc_RNA (1)...(19): siRNA sense strand
caaugcagauccuauauua

SEQ ID NO: 46630 - RNA, 19 nt, Homo sapiens
  misc_RNA (1)...(19): siRNA sense strand
gggaauaccugcuuugauu

SEQ ID NO: 46631 - RNA, 19 nt, Homo sapiens
  misc_RNA (1)...(19): siRNA sense strand
gggagacaguguuaaauua

SEQ ID NO: 46632 - RNA, 19 nt, Homo sapiens
  misc_RNA (1)...(19): siRNA sense strand
ccaaguagaugucaacaaa

SEQ ID NO: 46633 - RNA, 19 nt, Homo sapiens
  misc_RNA (1)...(19): siRNA sense strand
gaaauaagaccaaagaaug

SEQ ID NO: 46634 - RNA, 19 nt, Homo sapiens
  misc_RNA (1)...(19): siRNA sense strand
gauaaugaguguccuauug

SEQ ID NO: 46635 - RNA, 19 nt, Homo sapiens
  misc_RNA (1)...(19): siRNA sense strand
gaagggaaauacaaagaaa

SEQ ID NO: 46636 - RNA, 19 nt, Homo sapiens
  misc_RNA (1)...(19): siRNA sense strand
gaagagggcagauuaguuu

SEQ ID NO: 46637 - RNA, 19 nt, Homo sapiens
  misc_RNA (1)...(19): siRNA sense strand
gcaaugagugcauauaaua

SEQ ID NO: 46638 - RNA, 19 nt, Homo sapiens
  misc_RNA (1)...(19): siRNA sense strand
gagaacauauucagcuuaa

SEQ ID NO: 46639 - RNA, 19 nt, Homo sapiens
  misc_RNA (1)...(19): siRNA sense strand
ggacgaagguuuuaauaua

SEQ ID NO: 46640 - RNA, 19 nt, Homo sapiens
  misc_RNA (1)...(19): siRNA sense strand
ugacagagcuagaaacaga

SEQ ID NO: 46641 - RNA, 19 nt, Homo sapiens
  misc_RNA (1)...(19): siRNA sense strand
ggagaaacauuuaauagag

SEQ ID NO: 46642 - RNA, 19 nt, Homo sapiens
  misc_RNA (1)...(19): siRNA sense strand
gagauuggaugauugacua

SEQ ID NO: 46643 - RNA, 19 nt, Homo sapiens
  misc_RNA (1)...(19): siRNA sense strand
guagaagccaggaauauua

SEQ ID NO: 46644 - RNA, 19 nt, Homo sapiens
  misc_RNA (1)...(19): siRNA sense strand
ccagauagaucgaaacaug

SEQ ID NO: 46645 - RNA, 19 nt, Homo sapiens
  misc_RNA (1)...(19): siRNA sense strand
gugaagaucuggacaaugu

SEQ ID NO: 46646 - RNA, 19 nt, Homo sapiens
  misc_RNA (1)...(19): siRNA sense strand
cuauaaaggucucauauga

SEQ ID NO: 46647 - RNA, 19 nt, Homo sapiens
  misc_RNA (1)...(19): siRNA sense strand
gcaaggaagugccucaaau

SEQ ID NO: 46648 - RNA, 19 nt, Homo sapiens
  misc_RNA (1)...(19): siRNA sense strand
gaaaguauaccuggaauga

SEQ ID NO: 46649 - RNA, 19 nt, Homo sapiens
  misc_RNA (1)...(19): siRNA sense strand
ugaagcagaucccacguua

SEQ ID NO: 46650 - RNA, 19 nt, Homo sapiens
  misc_RNA (1)...(19): siRNA sense strand
gcagauuaguuuaccgaua

SEQ ID NO: 46651 - RNA, 19 nt, Homo sapiens
  misc_RNA (1)...(19): siRNA sense strand
gaagaaugcuguaauuggu

SEQ ID NO: 46652 - RNA, 19 nt, Homo sapiens
  misc_RNA (1)...(19): siRNA sense strand
ggaauggaauguuauuugu

SEQ ID NO: 46653 - RNA, 19 nt, Homo sapiens
  misc_RNA (1)...(19): siRNA sense strand
gaaugugccuauaaucuug

SEQ ID NO: 46654 - RNA, 19 nt, Homo sapiens
  misc_RNA (1)...(19): siRNA sense strand
acacaagccuggucaauug

SEQ ID NO: 46655 - RNA, 19 nt, Homo sapiens
  misc_RNA (1)...(19): siRNA sense strand
ccuauaaucuugugaauuc

SEQ ID NO: 46656 - RNA, 19 nt, Homo sapiens
  misc_RNA (1)...(19): siRNA sense strand
gaacauauucagcuuaaug

SEQ ID NO: 46657 - RNA, 19 nt, Homo sapiens
  misc_RNA (1)...(19): siRNA sense strand
caacuacaaucuugcuaaa

SEQ ID NO: 46658 - RNA, 19 nt, Homo sapiens
  misc_RNA (1)...(19): siRNA sense strand
gaaaggacuuccagaacug

SEQ ID NO: 46659 - RNA, 19 nt, Homo sapiens
  misc_RNA (1)...(19): siRNA sense strand
gaaucaggcuacaacauga

SEQ ID NO: 46660 - RNA, 19 nt, Homo sapiens
  misc_RNA (1)...(19): siRNA sense strand
acaagucgcuguuggaauu

SEQ ID NO: 46661 - RNA, 19 nt, Homo sapiens
  misc_RNA (1)...(19): siRNA sense strand
aaacacaggugaaguuaau

SEQ ID NO: 46662 - RNA, 19 nt, Homo sapiens
  misc_RNA (1)...(19): siRNA sense strand
aagaggcuaugaugaauua

SEQ ID NO: 46663 - RNA, 19 nt, Homo sapiens
  misc_RNA (1)...(19): siRNA sense strand
guaaauggauccaggaaca

SEQ ID NO: 46664 - RNA, 19 nt, Homo sapiens
  misc_RNA (1)...(19): siRNA sense strand
ugauucaucugccaaauaa

SEQ ID NO: 46665 - RNA, 19 nt, Homo sapiens
  misc_RNA (1)...(19): siRNA sense strand
gaugagaauucaaucaaug

SEQ ID NO: 46666 - RNA, 19 nt, Homo sapiens
  misc_RNA (1)...(19): siRNA sense strand
gcaacccaauuuauaugua

SEQ ID NO: 46667 - RNA, 19 nt, Homo sapiens
  misc_RNA (1)...(19): siRNA sense strand
acaaagcgguugagcaauu

SEQ ID NO: 46668 - RNA, 19 nt, Homo sapiens
  misc_RNA (1)...(19): siRNA sense strand
gagaagcaucgacucauua

SEQ ID NO: 46669 - RNA, 19 nt, Homo sapiens
  misc_RNA (1)...(19): siRNA sense strand
guaaaugguugcaggcuau

SEQ ID NO: 46670 - RNA, 19 nt, Homo sapiens
  misc_RNA (1)...(19): siRNA sense strand
gaagaacgguuuuacacua

SEQ ID NO: 46671 - RNA, 19 nt, Homo sapiens
  misc_RNA (1)...(19): siRNA sense strand
cagauuaguuuaccgauau

SEQ ID NO: 46672 - RNA, 19 nt, Homo sapiens
  misc_RNA (1)...(19): siRNA sense strand
gagaugauccucuucgaaa

SEQ ID NO: 46673 - RNA, 19 nt, Homo sapiens
  misc_RNA (1)...(19): siRNA sense strand
gcagaaauaagaccaaaga

SEQ ID NO: 46674 - RNA, 19 nt, Homo sapiens
  misc_RNA (1)...(19): siRNA sense strand
ucacaaacguggcauauac

SEQ ID NO: 46675 - RNA, 19 nt, Homo sapiens
  misc_RNA (1)...(19): siRNA sense strand
gcacauggauggauaaaau

SEQ ID NO: 46676 - RNA, 19 nt, Homo sapiens
  misc_RNA (1)...(19): siRNA sense strand
ucacguagcugaguacaug

SEQ ID NO: 46677 - RNA, 19 nt, Homo sapiens
  misc_RNA (1)...(19): siRNA sense strand
gcacaugcccuguuuaugg

SEQ ID NO: 46678 - RNA, 19 nt, Homo sapiens
  misc_RNA (1)...(19): siRNA sense strand
gauccaaaccaacaccuua

SEQ ID NO: 46679 - RNA, 19 nt, Homo sapiens
  misc_RNA (1)...(19): siRNA sense strand
gaaaagcaguuaccgugua

SEQ ID NO: 46680 - RNA, 19 nt, Homo sapiens
  misc_RNA (1)...(19): siRNA sense strand
gauaugaacauugcacuaa

SEQ ID NO: 46681 - RNA, 19 nt, Homo sapiens
  misc_RNA (1)...(19): siRNA sense strand
gaaauugugggccugagua

SEQ ID NO: 46682 - RNA, 19 nt, Homo sapiens
  misc_RNA (1)...(19): siRNA sense strand
caaaagggcccaaugaaua

SEQ ID NO: 46683 - RNA, 19 nt, Homo sapiens
  misc_RNA (1)...(19): siRNA sense strand
caaagcgguugagcaauuu

SEQ ID NO: 46684 - RNA, 19 nt, Homo sapiens
  misc_RNA (1)...(19): siRNA sense strand
gcuaaagguuucaauuauc

SEQ ID NO: 46685 - RNA, 19 nt, Homo sapiens
  misc_RNA (1)...(19): siRNA sense strand
gaucagccauuguuugaag

SEQ ID NO: 46686 - RNA, 19 nt, Homo sapiens
  misc_RNA (1)...(19): siRNA sense strand
ggugguggcugcaguguau

SEQ ID NO: 46687 - RNA, 19 nt, Homo sapiens
  misc_RNA (1)...(19): siRNA sense strand
ggcauggucucauuccuaa

SEQ ID NO: 46688 - RNA, 19 nt, Homo sapiens
  misc_RNA (1)...(19): siRNA sense strand
gcaauguuguguuucucua

SEQ ID NO: 46689 - RNA, 19 nt, Homo sapiens
  misc_RNA (1)...(19): siRNA sense strand
ggucagcccuuaaauaugc

SEQ ID NO: 46690 - RNA, 19 nt, Homo sapiens
  misc_RNA (1)...(19): siRNA sense strand
acaauucaguccucacuuu

SEQ ID NO: 46691 - RNA, 19 nt, Homo sapiens
  misc_RNA (1)...(19): siRNA sense strand
cuagaacuauugagagaaa

SEQ ID NO: 46692 - RNA, 19 nt, Homo sapiens
  misc_RNA (1)...(19): siRNA sense strand
gaaugggaaagcagacuua

SEQ ID NO: 46693 - RNA, 19 nt, Homo sapiens
  misc_RNA (1)...(19): siRNA sense strand
auaaaggucucauaugaug

SEQ ID NO: 46694 - RNA, 19 nt, Homo sapiens
  misc_RNA (1)...(19): siRNA sense strand
gcaguuaccguguauacaa

SEQ ID NO: 46695 - RNA, 19 nt, Homo sapiens
  misc_RNA (1)...(19): siRNA sense strand
gccaaucaguuagaauuaa

SEQ ID NO: 46696 - RNA, 19 nt, Homo sapiens
  misc_RNA (1)...(19): siRNA sense strand
caacagaaagagaagauga

SEQ ID NO: 46697 - RNA, 19 nt, Homo sapiens
  misc_RNA (1)...(19): siRNA sense strand
gaagcuagaacuauugaga

SEQ ID NO: 46698 - RNA, 19 nt, Homo sapiens
  misc_RNA (1)...(19): siRNA sense strand
gagaggcaaugagugcaua

SEQ ID NO: 46699 - RNA, 19 nt, Homo sapiens
  misc_RNA (1)...(19): siRNA sense strand
ccaaugagaaugcccagua

SEQ ID NO: 46700 - RNA, 19 nt, Homo sapiens
  misc_RNA (1)...(19): siRNA sense strand
gaaagugacagagcuagaa

SEQ ID NO: 46701 - RNA, 19 nt, Homo sapiens
  misc_RNA (1)...(19): siRNA sense strand
gcugcaggcuuaccucauu

SEQ ID NO: 46702 - RNA, 19 nt, Homo sapiens
  misc_RNA (1)...(19): siRNA sense strand
ucucuugccuccagauuaa

SEQ ID NO: 46703 - RNA, 19 nt, Homo sapiens
  misc_RNA (1)...(19): siRNA sense strand
ggaugagaauucaaucaau

SEQ ID NO: 46704 - RNA, 19 nt, Homo sapiens
  misc_RNA (1)...(19): siRNA sense strand
agagaaacacgaaaccuua

SEQ ID NO: 46705 - RNA, 19 nt, Homo sapiens
  misc_RNA (1)...(19): siRNA sense strand
cagcagcaauugaagaaug

SEQ ID NO: 46706 - RNA, 19 nt, Homo sapiens
  misc_RNA (1)...(19): siRNA sense strand
gccauuguuugaagucaua

SEQ ID NO: 46707 - RNA, 19 nt, Homo sapiens
  misc_RNA (1)...(19): siRNA sense strand
gagcuacaguuccgauuag

SEQ ID NO: 46708 - RNA, 19 nt, Homo sapiens
  misc_RNA (1)...(19): siRNA sense strand
gcuacucccuugccaauca

SEQ ID NO: 46709 - RNA, 19 nt, Homo sapiens
  misc_RNA (1)...(19): siRNA sense strand
uuccagaacugaccaauga

SEQ ID NO: 46710 - RNA, 19 nt, Homo sapiens
  misc_RNA (1)...(19): siRNA sense strand
agagguauacugcugauua

SEQ ID NO: 46711 - RNA, 19 nt, Homo sapiens
  misc_RNA (1)...(19): siRNA sense strand
gucaguaaccggcuuauuu

SEQ ID NO: 46712 - RNA, 19 nt, Homo sapiens
  misc_RNA (1)...(19): siRNA sense strand
uccaggaaguguuauuaua

SEQ ID NO: 46713 - RNA, 19 nt, Homo sapiens
  misc_RNA (1)...(19): siRNA sense strand
gaaugauguuggacagcua

SEQ ID NO: 46714 - RNA, 19 nt, Homo sapiens
  misc_RNA (1)...(19): siRNA sense strand
ccgauuaggcccaacuuua

SEQ ID NO: 46715 - RNA, 19 nt, Homo sapiens
  misc_RNA (1)...(19): siRNA sense strand
cagaugauaugguuuacug

SEQ ID NO: 46716 - RNA, 19 nt, Homo sapiens
  misc_RNA (1)...(19): siRNA sense strand
ggaaggaugagaauucaau

SEQ ID NO: 46717 - RNA, 19 nt, Homo sapiens
  misc_RNA (1)...(19): siRNA sense strand
gaagacauaguggcaguaa

SEQ ID NO: 46718 - RNA, 19 nt, Homo sapiens
  misc_RNA (1)...(19): siRNA sense strand
aaauuacgcuaugggaaua

SEQ ID NO: 46719 - RNA, 19 nt, Homo sapiens
  misc_RNA (1)...(19): siRNA sense strand
ucaagauccugaauacaga

SEQ ID NO: 46720 - RNA, 19 nt, Homo sapiens
  misc_RNA (1)...(19): siRNA sense strand
caucagauuucagugguuu

SEQ ID NO: 46721 - RNA, 19 nt, Homo sapiens
  misc_RNA (1)...(19): siRNA sense strand
gaauaccugcuuugauuga

SEQ ID NO: 46722 - RNA, 19 nt, Homo sapiens
  misc_RNA (1)...(19): siRNA sense strand
ggaaagcuuuggagauugc

SEQ ID NO: 46723 - RNA, 19 nt, Homo sapiens
  misc_RNA (1)...(19): siRNA sense strand
ggagcaauguuguguuucu

SEQ ID NO: 46724 - RNA, 19 nt, Homo sapiens
  misc_RNA (1)...(19): siRNA sense strand
ugacaaugcagauccuaua

SEQ ID NO: 46725 - RNA, 19 nt, Homo sapiens
  misc_RNA (1)...(19): siRNA sense strand
aaccaacaccuuacgauua

SEQ ID NO: 46726 - RNA, 19 nt, Homo sapiens
  misc_RNA (1)...(19): siRNA sense strand
aaggagcaauguuguguuu

SEQ ID NO: 46727 - RNA, 19 nt, Homo sapiens
  misc_RNA (1)...(19): siRNA sense strand
gaaaucaucugacacaauu

SEQ ID NO: 46728 - RNA, 19 nt, Homo sapiens
  misc_RNA (1)...(19): siRNA sense strand
gcaacaaucugguucauuu

SEQ ID NO: 46729 - RNA, 19 nt, Homo sapiens
  misc_RNA (1)...(19): siRNA sense strand
caaugcagauccuauauua

SEQ ID NO: 46730 - RNA, 19 nt, Homo sapiens
  misc_RNA (1)...(19): siRNA sense strand
gggaauaccugcuuugauu

SEQ ID NO: 46731 - RNA, 19 nt, Homo sapiens
  misc_RNA (1)...(19): siRNA sense strand
gggagacaguguuaaauua

SEQ ID NO: 46732 - RNA, 19 nt, Homo sapiens
  misc_RNA (1)...(19): siRNA sense strand
ccaaguagaugucaacaaa

SEQ ID NO: 46733 - RNA, 19 nt, Homo sapiens
  misc_RNA (1)...(19): siRNA sense strand
gaaauaagaccaaagaaug

SEQ ID NO: 46734 - RNA, 19 nt, Homo sapiens
  misc_RNA (1)...(19): siRNA sense strand
gauaaugaguguccuauug

SEQ ID NO: 46735 - RNA, 19 nt, Homo sapiens
  misc_RNA (1)...(19): siRNA sense strand
gaagggaaauacaaagaaa

SEQ ID NO: 46736 - RNA, 19 nt, Homo sapiens
  misc_RNA (1)...(19): siRNA sense strand
gaagagggcagauuaguuu

SEQ ID NO: 46737 - RNA, 19 nt, Homo sapiens
  misc_RNA (1)...(19): siRNA sense strand
gcaaugagugcauauaaua

SEQ ID NO: 46738 - RNA, 19 nt, Homo sapiens
  misc_RNA (1)...(19): siRNA sense strand
gagaacauauucagcuuaa

SEQ ID NO: 46739 - RNA, 19 nt, Homo sapiens
  misc_RNA (1)...(19): siRNA sense strand
ggacgaagguuuuaauaua

SEQ ID NO: 46740 - RNA, 19 nt, Homo sapiens
  misc_RNA (1)...(19): siRNA sense strand
ugacagagcuagaaacaga

SEQ ID NO: 46741 - RNA, 19 nt, Homo sapiens
  misc_RNA (1)...(19): siRNA sense strand
ggagaaacauuuaauagag

SEQ ID NO: 46742 - RNA, 19 nt, Homo sapiens
  misc_RNA (1)...(19): siRNA sense strand
gagauuggaugauugacua

SEQ ID NO: 46743 - RNA, 19 nt, Homo sapiens
  misc_RNA (1)...(19): siRNA sense strand
guagaagccaggaauauua

SEQ ID NO: 46744 - RNA, 19 nt, Homo sapiens
  misc_RNA (1)...(19): siRNA sense strand
ccagauagaucgaaacaug

SEQ ID NO: 46745 - RNA, 19 nt, Homo sapiens
  misc_RNA (1)...(19): siRNA sense strand
gugaagaucuggacaaugu

SEQ ID NO: 46746 - RNA, 19 nt, Homo sapiens
  misc_RNA (1)...(19): siRNA sense strand
cuauaaaggucucauauga

SEQ ID NO: 46747 - RNA, 19 nt, Homo sapiens
  misc_RNA (1)...(19): siRNA sense strand
gcaaggaagugccucaaau

SEQ ID NO: 46748 - RNA, 19 nt, Homo sapiens
  misc_RNA (1)...(19): siRNA sense strand
gaaaguauaccuggaauga

SEQ ID NO: 46749 - RNA, 19 nt, Homo sapiens
  misc_RNA (1)...(19): siRNA sense strand
ugaagcagaucccacguua

SEQ ID NO: 46750 - RNA, 19 nt, Homo sapiens
  misc_RNA (1)...(19): siRNA sense strand
gcagauuaguuuaccgaua

SEQ ID NO: 46751 - RNA, 19 nt, Homo sapiens
  misc_RNA (1)...(19): siRNA sense strand
gaagaaugcuguaauuggu

SEQ ID NO: 46752 - RNA, 19 nt, Homo sapiens
  misc_RNA (1)...(19): siRNA sense strand
ggaauggaauguuauuugu

SEQ ID NO: 46753 - RNA, 19 nt, Homo sapiens
  misc_RNA (1)...(19): siRNA sense strand
gaaugugccuauaaucuug

SEQ ID NO: 46754 - RNA, 19 nt, Homo sapiens
  misc_RNA (1)...(19): siRNA sense strand
acacaagccuggucaauug

SEQ ID NO: 46755 - RNA, 19 nt, Homo sapiens
  misc_RNA (1)...(19): siRNA sense strand
ccuauaaucuugugaauuc

SEQ ID NO: 46756 - RNA, 19 nt, Homo sapiens
  misc_RNA (1)...(19): siRNA sense strand
gaacauauucagcuuaaug

SEQ ID NO: 46757 - RNA, 19 nt, Homo sapiens
  misc_RNA (1)...(19): siRNA sense strand
caacuacaaucuugcuaaa

SEQ ID NO: 46758 - RNA, 19 nt, Homo sapiens
  misc_RNA (1)...(19): siRNA sense strand
gaaaggacuuccagaacug

SEQ ID NO: 46759 - RNA, 19 nt, Homo sapiens
  misc_RNA (1)...(19): siRNA sense strand
gaaucaggcuacaacauga

SEQ ID NO: 46760 - RNA, 19 nt, Homo sapiens
  misc_RNA (1)...(19): siRNA sense strand
acaagucgcuguuggaauu

SEQ ID NO: 46761 - RNA, 19 nt, Homo sapiens
  misc_RNA (1)...(19): siRNA sense strand
aaacacaggugaaguuaau

SEQ ID NO: 46762 - RNA, 19 nt, Homo sapiens
  misc_RNA (1)...(19): siRNA sense strand
aagaggcuaugaugaauua

SEQ ID NO: 46763 - RNA, 19 nt, Homo sapiens
  misc_RNA (1)...(19): siRNA sense strand
guaaauggauccaggaaca

SEQ ID NO: 46764 - RNA, 19 nt, Homo sapiens
  misc_RNA (1)...(19): siRNA sense strand
ugauucaucugccaaauaa

SEQ ID NO: 46765 - RNA, 19 nt, Homo sapiens
  misc_RNA (1)...(19): siRNA sense strand
gaugagaauucaaucaaug

SEQ ID NO: 46766 - RNA, 19 nt, Homo sapiens
  misc_RNA (1)...(19): siRNA sense strand
gcaacccaauuuauaugua

SEQ ID NO: 46767 - RNA, 19 nt, Homo sapiens
  misc_RNA (1)...(19): siRNA sense strand
acaaagcgguugagcaauu

SEQ ID NO: 46768 - RNA, 19 nt, Homo sapiens
  misc_RNA (1)...(19): siRNA sense strand
gagaagcaucgacucauua

SEQ ID NO: 46769 - RNA, 19 nt, Homo sapiens
  misc_RNA (1)...(19): siRNA sense strand
guaaaugguugcaggcuau

SEQ ID NO: 46770 - RNA, 19 nt, Homo sapiens
  misc_RNA (1)...(19): siRNA sense strand
gaagaacgguuuuacacua

SEQ ID NO: 46771 - RNA, 19 nt, Homo sapiens
  misc_RNA (1)...(19): siRNA sense strand
cagauuaguuuaccgauau

SEQ ID NO: 46772 - RNA, 19 nt, Homo sapiens
  misc_RNA (1)...(19): siRNA sense strand
gagaugauccucuucgaaa

SEQ ID NO: 46773 - RNA, 19 nt, Homo sapiens
  misc_RNA (1)...(19): siRNA sense strand
gcagaaauaagaccaaaga

SEQ ID NO: 46774 - RNA, 19 nt, Homo sapiens
  misc_RNA (1)...(19): siRNA sense strand
ucacaaacguggcauauac

SEQ ID NO: 46775 - RNA, 19 nt, Homo sapiens
  misc_RNA (1)...(19): siRNA sense strand
gcacauggauggauaaaau

SEQ ID NO: 46776 - RNA, 19 nt, Homo sapiens
  misc_RNA (1)...(19): siRNA sense strand
ucacguagcugaguacaug

SEQ ID NO: 46777 - RNA, 19 nt, Homo sapiens
  misc_RNA (1)...(19): siRNA sense strand
gcacaugcccuguuuaugg

SEQ ID NO: 46778 - RNA, 19 nt, Homo sapiens
  misc_RNA (1)...(19): siRNA sense strand
gauccaaaccaacaccuua

SEQ ID NO: 46779 - RNA, 19 nt, Homo sapiens
  misc_RNA (1)...(19): siRNA sense strand
gaaaagcaguuaccgugua

SEQ ID NO: 46780 - RNA, 19 nt, Homo sapiens
  misc_RNA (1)...(19): siRNA sense strand
gauaugaacauugcacuaa

SEQ ID NO: 46781 - RNA, 19 nt, Homo sapiens
  misc_RNA (1)...(19): siRNA sense strand
gaaauugugggccugagua

SEQ ID NO: 46782 - RNA, 19 nt, Homo sapiens
  misc_RNA (1)...(19): siRNA sense strand
caaaagggcccaaugaaua

SEQ ID NO: 46783 - RNA, 19 nt, Homo sapiens
  misc_RNA (1)...(19): siRNA sense strand
caaagcgguugagcaauuu

SEQ ID NO: 46784 - RNA, 19 nt, Homo sapiens
  misc_RNA (1)...(19): siRNA sense strand
gcuaaagguuucaauuauc

SEQ ID NO: 46785 - RNA, 19 nt, Homo sapiens
  misc_RNA (1)...(19): siRNA sense strand
gaucagccauuguuugaag

SEQ ID NO: 46786 - RNA, 19 nt, Homo sapiens
  misc_RNA (1)...(19): siRNA sense strand
ggugguggcugcaguguau

SEQ ID NO: 46787 - RNA, 19 nt, Homo sapiens
  misc_RNA (1)...(19): siRNA sense strand
ggcauggucucauuccuaa

SEQ ID NO: 46788 - RNA, 19 nt, Homo sapiens
  misc_RNA (1)...(19): siRNA sense strand
gcaauguuguguuucucua

SEQ ID NO: 46789 - RNA, 19 nt, Homo sapiens
  misc_RNA (1)...(19): siRNA sense strand
ggucagcccuuaaauaugc

SEQ ID NO: 46790 - RNA, 19 nt, Homo sapiens
  misc_RNA (1)...(19): siRNA sense strand
acaauucaguccucacuuu

SEQ ID NO: 46791 - RNA, 19 nt, Homo sapiens
  misc_RNA (1)...(19): siRNA sense strand
cuagaacuauugagagaaa

SEQ ID NO: 46792 - RNA, 19 nt, Homo sapiens
  misc_RNA (1)...(19): siRNA sense strand
gaaugggaaagcagacuua

SEQ ID NO: 46793 - RNA, 19 nt, Homo sapiens
  misc_RNA (1)...(19): siRNA sense strand
auaaaggucucauaugaug

SEQ ID NO: 46794 - RNA, 19 nt, Homo sapiens
  misc_RNA (1)...(19): siRNA sense strand
gcaguuaccguguauacaa

SEQ ID NO: 46795 - RNA, 19 nt, Homo sapiens
  misc_RNA (1)...(19): siRNA sense strand
gccaaucaguuagaauuaa

SEQ ID NO: 46796 - RNA, 19 nt, Homo sapiens
  misc_RNA (1)...(19): siRNA sense strand
caacagaaagagaagauga

SEQ ID NO: 46797 - RNA, 19 nt, Homo sapiens
  misc_RNA (1)...(19): siRNA sense strand
gaagcuagaacuauugaga

SEQ ID NO: 46798 - RNA, 19 nt, Homo sapiens
  misc_RNA (1)...(19): siRNA sense strand
gagaggcaaugagugcaua

SEQ ID NO: 46799 - RNA, 19 nt, Homo sapiens
  misc_RNA (1)...(19): siRNA sense strand
ccaaugagaaugcccagua

SEQ ID NO: 46800 - RNA, 19 nt, Homo sapiens
  misc_RNA (1)...(19): siRNA sense strand
gaaagugacagagcuagaa

SEQ ID NO: 46801 - RNA, 19 nt, Homo sapiens
  misc_RNA (1)...(19): siRNA sense strand
gcugcaggcuuaccucauu

SEQ ID NO: 46802 - RNA, 19 nt, Homo sapiens
  misc_RNA (1)...(19): siRNA sense strand
ucucuugccuccagauuaa

SEQ ID NO: 46803 - RNA, 19 nt, Homo sapiens
  misc_RNA (1)...(19): siRNA sense strand
ggaugagaauucaaucaau

SEQ ID NO: 46804 - RNA, 19 nt, Homo sapiens
  misc_RNA (1)...(19): siRNA sense strand
agagaaacacgaaaccuua

SEQ ID NO: 46805 - RNA, 19 nt, Homo sapiens
  misc_RNA (1)...(19): siRNA sense strand
cagcagcaauugaagaaug

SEQ ID NO: 46806 - RNA, 19 nt, Homo sapiens
  misc_RNA (1)...(19): siRNA sense strand
gccauuguuugaagucaua

SEQ ID NO: 46807 - RNA, 19 nt, Homo sapiens
  misc_RNA (1)...(19): siRNA sense strand
gagcuacaguuccgauuag

SEQ ID NO: 46808 - RNA, 19 nt, Homo sapiens
  misc_RNA (1)...(19): siRNA sense strand
gcuacucccuugccaauca

SEQ ID NO: 46809 - RNA, 19 nt, Homo sapiens
  misc_RNA (1)...(19): siRNA sense strand
uuccagaacugaccaauga

SEQ ID NO: 46810 - RNA, 19 nt, Homo sapiens
  misc_RNA (1)...(19): siRNA sense strand
agagguauacugcugauua

SEQ ID NO: 46811 - RNA, 19 nt, Homo sapiens
  misc_RNA (1)...(19): siRNA sense strand
gucaguaaccggcuuauuu

SEQ ID NO: 46812 - RNA, 19 nt, Homo sapiens
  misc_RNA (1)...(19): siRNA sense strand
uccaggaaguguuauuaua

SEQ ID NO: 46813 - RNA, 19 nt, Homo sapiens
  misc_RNA (1)...(19): siRNA sense strand
gaaugauguuggacagcua

SEQ ID NO: 46814 - RNA, 19 nt, Homo sapiens
  misc_RNA (1)...(19): siRNA sense strand
ccgauuaggcccaacuuua

SEQ ID NO: 46815 - RNA, 19 nt, Homo sapiens
  misc_RNA (1)...(19): siRNA sense strand
cagaugauaugguuuacug

SEQ ID NO: 46816 - RNA, 19 nt, Homo sapiens
  misc_RNA (1)...(19): siRNA sense strand
ggaaggaugagaauucaau

SEQ ID NO: 46817 - RNA, 19 nt, Homo sapiens
  misc_RNA (1)...(19): siRNA sense strand
gaagacauaguggcaguaa

SEQ ID NO: 46818 - RNA, 19 nt, Homo sapiens
  misc_RNA (1)...(19): siRNA sense strand
aaauuacgcuaugggaaua

SEQ ID NO: 46819 - RNA, 19 nt, Homo sapiens
  misc_RNA (1)...(19): siRNA sense strand
ucaagauccugaauacaga

SEQ ID NO: 46820 - RNA, 19 nt, Homo sapiens
  misc_RNA (1)...(19): siRNA sense strand
caucagauuucagugguuu

SEQ ID NO: 46821 - RNA, 19 nt, Homo sapiens
  misc_RNA (1)...(19): siRNA sense strand
gaauaccugcuuugauuga

SEQ ID NO: 46822 - RNA, 19 nt, Homo sapiens
  misc_RNA (1)...(19): siRNA sense strand
ggaaagcuuuggagauugc

SEQ ID NO: 46823 - RNA, 19 nt, Homo sapiens
  misc_RNA (1)...(19): siRNA sense strand
ggagcaauguuguguuucu

SEQ ID NO: 46824 - RNA, 19 nt, Homo sapiens
  misc_RNA (1)...(19): siRNA sense strand
ugacaaugcagauccuaua

SEQ ID NO: 46825 - RNA, 19 nt, Homo sapiens
  misc_RNA (1)...(19): siRNA sense strand
aaccaacaccuuacgauua

SEQ ID NO: 46826 - RNA, 19 nt, Homo sapiens
  misc_RNA (1)...(19): siRNA sense strand
aaggagcaauguuguguuu

SEQ ID NO: 46827 - RNA, 19 nt, Homo sapiens
  misc_RNA (1)...(19): siRNA sense strand
gaaaucaucugacacaauu

SEQ ID NO: 46828 - RNA, 19 nt, Homo sapiens
  misc_RNA (1)...(19): siRNA sense strand
gcaacaaucugguucauuu

SEQ ID NO: 46829 - RNA, 19 nt, Homo sapiens
  misc_RNA (1)...(19): siRNA sense strand
caaugcagauccuauauua

SEQ ID NO: 46830 - RNA, 19 nt, Homo sapiens
  misc_RNA (1)...(19): siRNA sense strand
gggaauaccugcuuugauu

SEQ ID NO: 46831 - RNA, 19 nt, Homo sapiens
  misc_RNA (1)...(19): siRNA sense strand
gggagacaguguuaaauua

SEQ ID NO: 46832 - RNA, 19 nt, Homo sapiens
  misc_RNA (1)...(19): siRNA sense strand
ccaaguagaugucaacaaa

SEQ ID NO: 46833 - RNA, 19 nt, Homo sapiens
  misc_RNA (1)...(19): siRNA sense strand
gaaauaagaccaaagaaug

SEQ ID NO: 46834 - RNA, 19 nt, Homo sapiens
  misc_RNA (1)...(19): siRNA sense strand
gauaaugaguguccuauug

SEQ ID NO: 46835 - RNA, 19 nt, Homo sapiens
  misc_RNA (1)...(19): siRNA sense strand
gaagggaaauacaaagaaa

SEQ ID NO: 46836 - RNA, 19 nt, Homo sapiens
  misc_RNA (1)...(19): siRNA sense strand
gaagagggcagauuaguuu

SEQ ID NO: 46837 - RNA, 19 nt, Homo sapiens
  misc_RNA (1)...(19): siRNA sense strand
gcaaugagugcauauaaua

SEQ ID NO: 46838 - RNA, 19 nt, Homo sapiens
  misc_RNA (1)...(19): siRNA sense strand
gagaacauauucagcuuaa

SEQ ID NO: 46839 - RNA, 19 nt, Homo sapiens
  misc_RNA (1)...(19): siRNA sense strand
ggacgaagguuuuaauaua

SEQ ID NO: 46840 - RNA, 19 nt, Homo sapiens
  misc_RNA (1)...(19): siRNA sense strand
ugacagagcuagaaacaga

SEQ ID NO: 46841 - RNA, 19 nt, Homo sapiens
  misc_RNA (1)...(19): siRNA sense strand
ggagaaacauuuaauagag

SEQ ID NO: 46842 - RNA, 19 nt, Homo sapiens
  misc_RNA (1)...(19): siRNA sense strand
gagauuggaugauugacua

SEQ ID NO: 46843 - RNA, 19 nt, Homo sapiens
  misc_RNA (1)...(19): siRNA sense strand
guagaagccaggaauauua

SEQ ID NO: 46844 - RNA, 19 nt, Homo sapiens
  misc_RNA (1)...(19): siRNA sense strand
ccagauagaucgaaacaug

SEQ ID NO: 46845 - RNA, 19 nt, Homo sapiens
  misc_RNA (1)...(19): siRNA sense strand
gugaagaucuggacaaugu

SEQ ID NO: 46846 - RNA, 19 nt, Homo sapiens
  misc_RNA (1)...(19): siRNA sense strand
cuauaaaggucucauauga

SEQ ID NO: 46847 - RNA, 19 nt, Homo sapiens
  misc_RNA (1)...(19): siRNA sense strand
gcaaggaagugccucaaau

SEQ ID NO: 46848 - RNA, 19 nt, Homo sapiens
  misc_RNA (1)...(19): siRNA sense strand
gaaaguauaccuggaauga

SEQ ID NO: 46849 - RNA, 19 nt, Homo sapiens
  misc_RNA (1)...(19): siRNA sense strand
ugaagcagaucccacguua

SEQ ID NO: 46850 - RNA, 19 nt, Homo sapiens
  misc_RNA (1)...(19): siRNA sense strand
gcagauuaguuuaccgaua

SEQ ID NO: 46851 - RNA, 19 nt, Homo sapiens
  misc_RNA (1)...(19): siRNA sense strand
gaagaaugcuguaauuggu

SEQ ID NO: 46852 - RNA, 19 nt, Homo sapiens
  misc_RNA (1)...(19): siRNA sense strand
ggaauggaauguuauuugu

SEQ ID NO: 46853 - RNA, 19 nt, Homo sapiens
  misc_RNA (1)...(19): siRNA sense strand
gaaugugccuauaaucuug

SEQ ID NO: 46854 - RNA, 19 nt, Homo sapiens
  misc_RNA (1)...(19): siRNA sense strand
acacaagccuggucaauug

SEQ ID NO: 46855 - RNA, 19 nt, Homo sapiens
  misc_RNA (1)...(19): siRNA sense strand
ccuauaaucuugugaauuc

SEQ ID NO: 46856 - RNA, 19 nt, Homo sapiens
  misc_RNA (1)...(19): siRNA sense strand
gaacauauucagcuuaaug

SEQ ID NO: 46857 - RNA, 19 nt, Homo sapiens
  misc_RNA (1)...(19): siRNA sense strand
caacuacaaucuugcuaaa

SEQ ID NO: 46858 - RNA, 19 nt, Homo sapiens
  misc_RNA (1)...(19): siRNA sense strand
gaaaggacuuccagaacug

SEQ ID NO: 46859 - RNA, 19 nt, Homo sapiens
  misc_RNA (1)...(19): siRNA sense strand
gaaucaggcuacaacauga

SEQ ID NO: 46860 - RNA, 19 nt, Homo sapiens
  misc_RNA (1)...(19): siRNA sense strand
acaagucgcuguuggaauu

SEQ ID NO: 46861 - RNA, 19 nt, Homo sapiens
  misc_RNA (1)...(19): siRNA sense strand
aaacacaggugaaguuaau

SEQ ID NO: 46862 - RNA, 19 nt, Homo sapiens
  misc_RNA (1)...(19): siRNA sense strand
aagaggcuaugaugaauua

SEQ ID NO: 46863 - RNA, 19 nt, Homo sapiens
  misc_RNA (1)...(19): siRNA sense strand
guaaauggauccaggaaca

SEQ ID NO: 46864 - RNA, 19 nt, Homo sapiens
  misc_RNA (1)...(19): siRNA sense strand
ugauucaucugccaaauaa

SEQ ID NO: 46865 - RNA, 19 nt, Homo sapiens
  misc_RNA (1)...(19): siRNA sense strand
gaugagaauucaaucaaug

SEQ ID NO: 46866 - RNA, 19 nt, Homo sapiens
  misc_RNA (1)...(19): siRNA sense strand
gcaacccaauuuauaugua

SEQ ID NO: 46867 - RNA, 19 nt, Homo sapiens
  misc_RNA (1)...(19): siRNA sense strand
acaaagcgguugagcaauu

SEQ ID NO: 46868 - RNA, 19 nt, Homo sapiens
  misc_RNA (1)...(19): siRNA sense strand
gagaagcaucgacucauua

SEQ ID NO: 46869 - RNA, 19 nt, Homo sapiens
  misc_RNA (1)...(19): siRNA sense strand
guaaaugguugcaggcuau

SEQ ID NO: 46870 - RNA, 19 nt, Homo sapiens
  misc_RNA (1)...(19): siRNA sense strand
gaagaacgguuuuacacua

SEQ ID NO: 46871 - RNA, 19 nt, Homo sapiens
  misc_RNA (1)...(19): siRNA sense strand
cagauuaguuuaccgauau

SEQ ID NO: 46872 - RNA, 19 nt, Homo sapiens
  misc_RNA (1)...(19): siRNA sense strand
gagaugauccucuucgaaa

SEQ ID NO: 46873 - RNA, 19 nt, Homo sapiens
  misc_RNA (1)...(19): siRNA sense strand
gcagaaauaagaccaaaga

SEQ ID NO: 46874 - RNA, 19 nt, Homo sapiens
  misc_RNA (1)...(19): siRNA sense strand
ucacaaacguggcauauac

SEQ ID NO: 46875 - RNA, 19 nt, Homo sapiens
  misc_RNA (1)...(19): siRNA sense strand
gcacauggauggauaaaau

SEQ ID NO: 46876 - RNA, 19 nt, Homo sapiens
  misc_RNA (1)...(19): siRNA sense strand
ucacguagcugaguacaug

SEQ ID NO: 46877 - RNA, 19 nt, Homo sapiens
  misc_RNA (1)...(19): siRNA sense strand
gcacaugcccuguuuaugg

SEQ ID NO: 46878 - RNA, 19 nt, Homo sapiens
  misc_RNA (1)...(19): siRNA sense strand
gauccaaaccaacaccuua

SEQ ID NO: 46879 - RNA, 19 nt, Homo sapiens
  misc_RNA (1)...(19): siRNA sense strand
gaaaagcaguuaccgugua

SEQ ID NO: 46880 - RNA, 19 nt, Homo sapiens
  misc_RNA (1)...(19): siRNA sense strand
gauaugaacauugcacuaa

SEQ ID NO: 46881 - RNA, 19 nt, Homo sapiens
  misc_RNA (1)...(19): siRNA sense strand
gaaauugugggccugagua

SEQ ID NO: 46882 - RNA, 19 nt, Homo sapiens
  misc_RNA (1)...(19): siRNA sense strand
caaaagggcccaaugaaua

SEQ ID NO: 46883 - RNA, 19 nt, Homo sapiens
  misc_RNA (1)...(19): siRNA sense strand
caaagcgguugagcaauuu

SEQ ID NO: 46884 - RNA, 19 nt, Homo sapiens
  misc_RNA (1)...(19): siRNA sense strand
gcuaaagguuucaauuauc

SEQ ID NO: 46885 - RNA, 19 nt, Homo sapiens
  misc_RNA (1)...(19): siRNA sense strand
gaucagccauuguuugaag

SEQ ID NO: 46886 - RNA, 19 nt, Homo sapiens
  misc_RNA (1)...(19): siRNA sense strand
ggugguggcugcaguguau

SEQ ID NO: 46887 - RNA, 19 nt, Homo sapiens
  misc_RNA (1)...(19): siRNA sense strand
ggcauggucucauuccuaa

SEQ ID NO: 46888 - RNA, 19 nt, Homo sapiens
  misc_RNA (1)...(19): siRNA sense strand
gcaauguuguguuucucua

SEQ ID NO: 46889 - RNA, 19 nt, Homo sapiens
  misc_RNA (1)...(19): siRNA sense strand
ggucagcccuuaaauaugc

SEQ ID NO: 46890 - RNA, 19 nt, Homo sapiens
  misc_RNA (1)...(19): siRNA sense strand
acaauucaguccucacuuu

SEQ ID NO: 46891 - RNA, 19 nt, Homo sapiens
  misc_RNA (1)...(19): siRNA sense strand
cuagaacuauugagagaaa

SEQ ID NO: 46892 - RNA, 19 nt, Homo sapiens
  misc_RNA (1)...(19): siRNA sense strand
gaaugggaaagcagacuua

SEQ ID NO: 46893 - RNA, 19 nt, Homo sapiens
  misc_RNA (1)...(19): siRNA sense strand
auaaaggucucauaugaug

SEQ ID NO: 46894 - RNA, 19 nt, Homo sapiens
  misc_RNA (1)...(19): siRNA sense strand
gcaguuaccguguauacaa

SEQ ID NO: 46895 - RNA, 19 nt, Homo sapiens
  misc_RNA (1)...(19): siRNA sense strand
gccaaucaguuagaauuaa

SEQ ID NO: 46896 - RNA, 19 nt, Homo sapiens
  misc_RNA (1)...(19): siRNA sense strand
caacagaaagagaagauga

SEQ ID NO: 46897 - RNA, 19 nt, Homo sapiens
  misc_RNA (1)...(19): siRNA sense strand
gaagcuagaacuauugaga

SEQ ID NO: 46898 - RNA, 19 nt, Homo sapiens
  misc_RNA (1)...(19): siRNA sense strand
gagaggcaaugagugcaua

SEQ ID NO: 46899 - RNA, 19 nt, Homo sapiens
  misc_RNA (1)...(19): siRNA sense strand
ccaaugagaaugcccagua

SEQ ID NO: 46900 - RNA, 19 nt, Homo sapiens
  misc_RNA (1)...(19): siRNA sense strand
gaaagugacagagcuagaa

SEQ ID NO: 46901 - RNA, 19 nt, Homo sapiens
  misc_RNA (1)...(19): siRNA sense strand
gcugcaggcuuaccucauu

SEQ ID NO: 46902 - RNA, 19 nt, Homo sapiens
  misc_RNA (1)...(19): siRNA sense strand
ucucuugccuccagauuaa

SEQ ID NO: 46903 - RNA, 19 nt, Homo sapiens
  misc_RNA (1)...(19): siRNA sense strand
ggaugagaauucaaucaau

SEQ ID NO: 46904 - RNA, 19 nt, Homo sapiens
  misc_RNA (1)...(19): siRNA sense strand
agagaaacacgaaaccuua

SEQ ID NO: 46905 - RNA, 19 nt, Homo sapiens
  misc_RNA (1)...(19): siRNA sense strand
cagcagcaauugaagaaug

SEQ ID NO: 46906 - RNA, 19 nt, Homo sapiens
  misc_RNA (1)...(19): siRNA sense strand
gccauuguuugaagucaua

SEQ ID NO: 46907 - RNA, 19 nt, Homo sapiens
  misc_RNA (1)...(19): siRNA sense strand
gagcuacaguuccgauuag

SEQ ID NO: 46908 - RNA, 19 nt, Homo sapiens
  misc_RNA (1)...(19): siRNA sense strand
gcuacucccuugccaauca

SEQ ID NO: 46909 - RNA, 19 nt, Homo sapiens
  misc_RNA (1)...(19): siRNA sense strand
uuccagaacugaccaauga

SEQ ID NO: 46910 - RNA, 19 nt, Homo sapiens
  misc_RNA (1)...(19): siRNA sense strand
agagguauacugcugauua

SEQ ID NO: 46911 - RNA, 19 nt, Homo sapiens
  misc_RNA (1)...(19): siRNA sense strand
gucaguaaccggcuuauuu

SEQ ID NO: 46912 - RNA, 19 nt, Homo sapiens
  misc_RNA (1)...(19): siRNA sense strand
uccaggaaguguuauuaua

SEQ ID NO: 46913 - RNA, 19 nt, Homo sapiens
  misc_RNA (1)...(19): siRNA sense strand
gaaugauguuggacagcua

SEQ ID NO: 46914 - RNA, 19 nt, Homo sapiens
  misc_RNA (1)...(19): siRNA sense strand
ccgauuaggcccaacuuua

SEQ ID NO: 46915 - RNA, 19 nt, Homo sapiens
  misc_RNA (1)...(19): siRNA sense strand
cagaugauaugguuuacug

SEQ ID NO: 46916 - RNA, 19 nt, Homo sapiens
  misc_RNA (1)...(19): siRNA sense strand
ggaaggaugagaauucaau

SEQ ID NO: 46917 - RNA, 19 nt, Homo sapiens
  misc_RNA (1)...(19): siRNA sense strand
gaagacauaguggcaguaa

SEQ ID NO: 46918 - RNA, 19 nt, Homo sapiens
  misc_RNA (1)...(19): siRNA sense strand
aaauuacgcuaugggaaua

SEQ ID NO: 46919 - RNA, 19 nt, Homo sapiens
  misc_RNA (1)...(19): siRNA sense strand
ucaagauccugaauacaga

SEQ ID NO: 46920 - RNA, 19 nt, Homo sapiens
  misc_RNA (1)...(19): siRNA sense strand
caucagauuucagugguuu

SEQ ID NO: 46921 - RNA, 19 nt, Homo sapiens
  misc_RNA (1)...(19): siRNA sense strand
gaauaccugcuuugauuga

SEQ ID NO: 46922 - RNA, 19 nt, Homo sapiens
  misc_RNA (1)...(19): siRNA sense strand
ggaaagcuuuggagauugc

SEQ ID NO: 46923 - RNA, 19 nt, Homo sapiens
  misc_RNA (1)...(19): siRNA sense strand
ggagcaauguuguguuucu

SEQ ID NO: 46924 - RNA, 19 nt, Homo sapiens
  misc_RNA (1)...(19): siRNA sense strand
ugacaaugcagauccuaua

SEQ ID NO: 46925 - RNA, 19 nt, Homo sapiens
  misc_RNA (1)...(19): siRNA sense strand
aaccaacaccuuacgauua

SEQ ID NO: 46926 - RNA, 19 nt, Homo sapiens
  misc_RNA (1)...(19): siRNA sense strand
aaggagcaauguuguguuu

SEQ ID NO: 46927 - RNA, 19 nt, Homo sapiens
  misc_RNA (1)...(19): siRNA sense strand
gaaaucaucugacacaauu

SEQ ID NO: 46928 - RNA, 19 nt, Homo sapiens
  misc_RNA (1)...(19): siRNA sense strand
gcaacaaucugguucauuu

SEQ ID NO: 46929 - RNA, 19 nt, Homo sapiens
  misc_RNA (1)...(19): siRNA sense strand
caaugcagauccuauauua

SEQ ID NO: 46930 - RNA, 19 nt, Homo sapiens
  misc_RNA (1)...(19): siRNA sense strand
gggaauaccugcuuugauu

SEQ ID NO: 46931 - RNA, 19 nt, Homo sapiens
  misc_RNA (1)...(19): siRNA sense strand
gggagacaguguuaaauua

SEQ ID NO: 46932 - RNA, 19 nt, Homo sapiens
  misc_RNA (1)...(19): siRNA sense strand
ccaaguagaugucaacaaa

SEQ ID NO: 46933 - RNA, 19 nt, Homo sapiens
  misc_RNA (1)...(19): siRNA sense strand
gaaauaagaccaaagaaug

SEQ ID NO: 46934 - RNA, 19 nt, Homo sapiens
  misc_RNA (1)...(19): siRNA sense strand
gauaaugaguguccuauug

SEQ ID NO: 46935 - RNA, 19 nt, Homo sapiens
  misc_RNA (1)...(19): siRNA sense strand
gaagggaaauacaaagaaa

SEQ ID NO: 46936 - RNA, 19 nt, Homo sapiens
  misc_RNA (1)...(19): siRNA sense strand
gaagagggcagauuaguuu

SEQ ID NO: 46937 - RNA, 19 nt, Homo sapiens
  misc_RNA (1)...(19): siRNA sense strand
gcaaugagugcauauaaua

SEQ ID NO: 46938 - RNA, 19 nt, Homo sapiens
  misc_RNA (1)...(19): siRNA sense strand
gagaacauauucagcuuaa

SEQ ID NO: 46939 - RNA, 19 nt, Homo sapiens
  misc_RNA (1)...(19): siRNA sense strand
ggacgaagguuuuaauaua

SEQ ID NO: 46940 - RNA, 19 nt, Homo sapiens
  misc_RNA (1)...(19): siRNA sense strand
ugacagagcuagaaacaga

SEQ ID NO: 46941 - RNA, 19 nt, Homo sapiens
  misc_RNA (1)...(19): siRNA sense strand
ggagaaacauuuaauagag

SEQ ID NO: 46942 - RNA, 19 nt, Homo sapiens
  misc_RNA (1)...(19): siRNA sense strand
gagauuggaugauugacua

SEQ ID NO: 46943 - RNA, 19 nt, Homo sapiens
  misc_RNA (1)...(19): siRNA sense strand
guagaagccaggaauauua

SEQ ID NO: 46944 - RNA, 19 nt, Homo sapiens
  misc_RNA (1)...(19): siRNA sense strand
ccagauagaucgaaacaug

SEQ ID NO: 46945 - RNA, 19 nt, Homo sapiens
  misc_RNA (1)...(19): siRNA sense strand
gugaagaucuggacaaugu

SEQ ID NO: 46946 - RNA, 19 nt, Homo sapiens
  misc_RNA (1)...(19): siRNA sense strand
cuauaaaggucucauauga

SEQ ID NO: 46947 - RNA, 19 nt, Homo sapiens
  misc_RNA (1)...(19): siRNA sense strand
gcaaggaagugccucaaau

SEQ ID NO: 46948 - RNA, 19 nt, Homo sapiens
  misc_RNA (1)...(19): siRNA sense strand
gaaaguauaccuggaauga

SEQ ID NO: 46949 - RNA, 19 nt, Homo sapiens
  misc_RNA (1)...(19): siRNA sense strand
ugaagcagaucccacguua

SEQ ID NO: 46950 - RNA, 19 nt, Homo sapiens
  misc_RNA (1)...(19): siRNA sense strand
gcagauuaguuuaccgaua

SEQ ID NO: 46951 - RNA, 19 nt, Homo sapiens
  misc_RNA (1)...(19): siRNA sense strand
gaagaaugcuguaauuggu

SEQ ID NO: 46952 - RNA, 19 nt, Homo sapiens
  misc_RNA (1)...(19): siRNA sense strand
ggaauggaauguuauuugu

SEQ ID NO: 46953 - RNA, 19 nt, Homo sapiens
  misc_RNA (1)...(19): siRNA sense strand
gaaugugccuauaaucuug

SEQ ID NO: 46954 - RNA, 19 nt, Homo sapiens
  misc_RNA (1)...(19): siRNA sense strand
acacaagccuggucaauug

SEQ ID NO: 46955 - RNA, 19 nt, Homo sapiens
  misc_RNA (1)...(19): siRNA sense strand
ccuauaaucuugugaauuc

SEQ ID NO: 46956 - RNA, 19 nt, Homo sapiens
  misc_RNA (1)...(19): siRNA sense strand
gaacauauucagcuuaaug

SEQ ID NO: 46957 - RNA, 19 nt, Homo sapiens
  misc_RNA (1)...(19): siRNA sense strand
caacuacaaucuugcuaaa

SEQ ID NO: 46958 - RNA, 19 nt, Homo sapiens
  misc_RNA (1)...(19): siRNA sense strand
gaaaggacuuccagaacug

SEQ ID NO: 46959 - RNA, 19 nt, Homo sapiens
  misc_RNA (1)...(19): siRNA sense strand
gaaucaggcuacaacauga

SEQ ID NO: 46960 - RNA, 19 nt, Homo sapiens
  misc_RNA (1)...(19): siRNA sense strand
acaagucgcuguuggaauu

SEQ ID NO: 46961 - RNA, 19 nt, Homo sapiens
  misc_RNA (1)...(19): siRNA sense strand
aaacacaggugaaguuaau

SEQ ID NO: 46962 - RNA, 19 nt, Homo sapiens
  misc_RNA (1)...(19): siRNA sense strand
aagaggcuaugaugaauua

SEQ ID NO: 46963 - RNA, 19 nt, Homo sapiens
  misc_RNA (1)...(19): siRNA sense strand
guaaauggauccaggaaca

SEQ ID NO: 46964 - RNA, 19 nt, Homo sapiens
  misc_RNA (1)...(19): siRNA sense strand
ugauucaucugccaaauaa

SEQ ID NO: 46965 - RNA, 19 nt, Homo sapiens
  misc_RNA (1)...(19): siRNA sense strand
gaugagaauucaaucaaug

SEQ ID NO: 46966 - RNA, 19 nt, Homo sapiens
  misc_RNA (1)...(19): siRNA sense strand
gcaacccaauuuauaugua

SEQ ID NO: 46967 - RNA, 19 nt, Homo sapiens
  misc_RNA (1)...(19): siRNA sense strand
acaaagcgguugagcaauu

SEQ ID NO: 46968 - RNA, 19 nt, Homo sapiens
  misc_RNA (1)...(19): siRNA sense strand
gagaagcaucgacucauua

SEQ ID NO: 46969 - RNA, 19 nt, Homo sapiens
  misc_RNA (1)...(19): siRNA sense strand
guaaaugguugcaggcuau

SEQ ID NO: 46970 - RNA, 19 nt, Homo sapiens
  misc_RNA (1)...(19): siRNA sense strand
gaagaacgguuuuacacua

SEQ ID NO: 46971 - RNA, 19 nt, Homo sapiens
  misc_RNA (1)...(19): siRNA sense strand
cagauuaguuuaccgauau

SEQ ID NO: 46972 - RNA, 19 nt, Homo sapiens
  misc_RNA (1)...(19): siRNA sense strand
gagaugauccucuucgaaa

SEQ ID NO: 46973 - RNA, 19 nt, Homo sapiens
  misc_RNA (1)...(19): siRNA sense strand
gcagaaauaagaccaaaga

SEQ ID NO: 46974 - RNA, 19 nt, Homo sapiens
  misc_RNA (1)...(19): siRNA sense strand
ucacaaacguggcauauac

SEQ ID NO: 46975 - RNA, 19 nt, Homo sapiens
  misc_RNA (1)...(19): siRNA sense strand
gcacauggauggauaaaau

SEQ ID NO: 46976 - RNA, 19 nt, Homo sapiens
  misc_RNA (1)...(19): siRNA sense strand
ucacguagcugaguacaug

SEQ ID NO: 46977 - RNA, 19 nt, Homo sapiens
  misc_RNA (1)...(19): siRNA sense strand
gcacaugcccuguuuaugg

SEQ ID NO: 46978 - RNA, 19 nt, Homo sapiens
  misc_RNA (1)...(19): siRNA sense strand
gauccaaaccaacaccuua

SEQ ID NO: 46979 - RNA, 19 nt, Homo sapiens
  misc_RNA (1)...(19): siRNA sense strand
gaaaagcaguuaccgugua

SEQ ID NO: 46980 - RNA, 19 nt, Homo sapiens
  misc_RNA (1)...(19): siRNA sense strand
gauaugaacauugcacuaa

SEQ ID NO: 46981 - RNA, 19 nt, Homo sapiens
  misc_RNA (1)...(19): siRNA sense strand
gaaauugugggccugagua

SEQ ID NO: 46982 - RNA, 19 nt, Homo sapiens
  misc_RNA (1)...(19): siRNA sense strand
caaaagggcccaaugaaua

SEQ ID NO: 46983 - RNA, 19 nt, Homo sapiens
  misc_RNA (1)...(19): siRNA sense strand
caaagcgguugagcaauuu

SEQ ID NO: 46984 - RNA, 19 nt, Homo sapiens
  misc_RNA (1)...(19): siRNA sense strand
gcuaaagguuucaauuauc

SEQ ID NO: 46985 - RNA, 19 nt, Homo sapiens
  misc_RNA (1)...(19): siRNA sense strand
gaucagccauuguuugaag

SEQ ID NO: 46986 - RNA, 19 nt, Homo sapiens
  misc_RNA (1)...(19): siRNA sense strand
ggugguggcugcaguguau

SEQ ID NO: 46987 - RNA, 19 nt, Homo sapiens
  misc_RNA (1)...(19): siRNA sense strand
ggcauggucucauuccuaa

SEQ ID NO: 46988 - RNA, 19 nt, Homo sapiens
  misc_RNA (1)...(19): siRNA sense strand
gcaauguuguguuucucua

SEQ ID NO: 46989 - RNA, 19 nt, Homo sapiens
  misc_RNA (1)...(19): siRNA sense strand
ggucagcccuuaaauaugc

SEQ ID NO: 46990 - RNA, 19 nt, Homo sapiens
  misc_RNA (1)...(19): siRNA sense strand
acaauucaguccucacuuu

SEQ ID NO: 46991 - RNA, 19 nt, Homo sapiens
  misc_RNA (1)...(19): siRNA sense strand
cuagaacuauugagagaaa

SEQ ID NO: 46992 - RNA, 19 nt, Homo sapiens
  misc_RNA (1)...(19): siRNA sense strand
gaaugggaaagcagacuua

SEQ ID NO: 46993 - RNA, 19 nt, Homo sapiens
  misc_RNA (1)...(19): siRNA sense strand
auaaaggucucauaugaug

SEQ ID NO: 46994 - RNA, 19 nt, Homo sapiens
  misc_RNA (1)...(19): siRNA sense strand
gcaguuaccguguauacaa

SEQ ID NO: 46995 - RNA, 19 nt, Homo sapiens
  misc_RNA (1)...(19): siRNA sense strand
gccaaucaguuagaauuaa

SEQ ID NO: 46996 - RNA, 19 nt, Homo sapiens
  misc_RNA (1)...(19): siRNA sense strand
caacagaaagagaagauga

SEQ ID NO: 46997 - RNA, 19 nt, Homo sapiens
  misc_RNA (1)...(19): siRNA sense strand
gaagcuagaacuauugaga

SEQ ID NO: 46998 - RNA, 19 nt, Homo sapiens
  misc_RNA (1)...(19): siRNA sense strand
gagaggcaaugagugcaua

SEQ ID NO: 46999 - RNA, 19 nt, Homo sapiens
  misc_RNA (1)...(19): siRNA sense strand
ccaaugagaaugcccagua

SEQ ID NO: 47000 - RNA, 19 nt, Homo sapiens
  misc_RNA (1)...(19): siRNA sense strand
gaaagugacagagcuagaa

SEQ ID NO: 47001 - RNA, 19 nt, Homo sapiens
  misc_RNA (1)...(19): siRNA sense strand
gcugcaggcuuaccucauu

SEQ ID NO: 47002 - RNA, 19 nt, Homo sapiens
  misc_RNA (1)...(19): siRNA sense strand
ucucuugccuccagauuaa

SEQ ID NO: 47003 - RNA, 19 nt, Homo sapiens
  misc_RNA (1)...(19): siRNA sense strand
ggaugagaauucaaucaau

SEQ ID NO: 47004 - RNA, 19 nt, Homo sapiens
  misc_RNA (1)...(19): siRNA sense strand
agagaaacacgaaaccuua

SEQ ID NO: 47005 - RNA, 19 nt, Homo sapiens
  misc_RNA (1)...(19): siRNA sense strand
cagcagcaauugaagaaug

SEQ ID NO: 47006 - RNA, 19 nt, Homo sapiens
  misc_RNA (1)...(19): siRNA sense strand
gccauuguuugaagucaua

SEQ ID NO: 47007 - RNA, 19 nt, Homo sapiens
  misc_RNA (1)...(19): siRNA sense strand
gagcuacaguuccgauuag

SEQ ID NO: 47008 - RNA, 19 nt, Homo sapiens
  misc_RNA (1)...(19): siRNA sense strand
gcuacucccuugccaauca

SEQ ID NO: 47009 - RNA, 19 nt, Homo sapiens
  misc_RNA (1)...(19): siRNA sense strand
uuccagaacugaccaauga

SEQ ID NO: 47010 - RNA, 19 nt, Homo sapiens
  misc_RNA (1)...(19): siRNA sense strand
agagguauacugcugauua

SEQ ID NO: 47011 - RNA, 19 nt, Homo sapiens
  misc_RNA (1)...(19): siRNA sense strand
gucaguaaccggcuuauuu

SEQ ID NO: 47012 - RNA, 19 nt, Homo sapiens
  misc_RNA (1)...(19): siRNA sense strand
uccaggaaguguuauuaua

SEQ ID NO: 47013 - RNA, 19 nt, Homo sapiens
  misc_RNA (1)...(19): siRNA sense strand
gaaugauguuggacagcua

SEQ ID NO: 47014 - RNA, 19 nt, Homo sapiens
  misc_RNA (1)...(19): siRNA sense strand
ccgauuaggcccaacuuua

SEQ ID NO: 47015 - RNA, 19 nt, Homo sapiens
  misc_RNA (1)...(19): siRNA sense strand
cagaugauaugguuuacug

SEQ ID NO: 47016 - RNA, 19 nt, Homo sapiens
  misc_RNA (1)...(19): siRNA sense strand
ggaaggaugagaauucaau

SEQ ID NO: 47017 - RNA, 19 nt, Homo sapiens
  misc_RNA (1)...(19): siRNA sense strand
gaagacauaguggcaguaa

SEQ ID NO: 47018 - RNA, 19 nt, Homo sapiens
  misc_RNA (1)...(19): siRNA sense strand
aaauuacgcuaugggaaua

SEQ ID NO: 47019 - RNA, 19 nt, Homo sapiens
  misc_RNA (1)...(19): siRNA sense strand
ucaagauccugaauacaga

SEQ ID NO: 47020 - RNA, 19 nt, Homo sapiens
  misc_RNA (1)...(19): siRNA sense strand
caucagauuucagugguuu

SEQ ID NO: 47021 - RNA, 19 nt, Homo sapiens
  misc_RNA (1)...(19): siRNA sense strand
gaauaccugcuuugauuga

SEQ ID NO: 47022 - RNA, 19 nt, Homo sapiens
  misc_RNA (1)...(19): siRNA sense strand
ggaaagcuuuggagauugc

SEQ ID NO: 47023 - RNA, 19 nt, Homo sapiens
  misc_RNA (1)...(19): siRNA sense strand
ggagcaauguuguguuucu

SEQ ID NO: 47024 - RNA, 19 nt, Homo sapiens
  misc_RNA (1)...(19): siRNA sense strand
ugacaaugcagauccuaua

SEQ ID NO: 47025 - RNA, 19 nt, Homo sapiens
  misc_RNA (1)...(19): siRNA sense strand
aaccaacaccuuacgauua

SEQ ID NO: 47026 - RNA, 19 nt, Homo sapiens
  misc_RNA (1)...(19): siRNA sense strand
aaggagcaauguuguguuu

SEQ ID NO: 47027 - RNA, 19 nt, Homo sapiens
  misc_RNA (1)...(19): siRNA sense strand
gaaaucaucugacacaauu

SEQ ID NO: 47028 - RNA, 19 nt, Homo sapiens
  misc_RNA (1)...(19): siRNA sense strand
gcaacaaucugguucauuu

SEQ ID NO: 47029 - RNA, 19 nt, Homo sapiens
  misc_RNA (1)...(19): siRNA sense strand
caaugcagauccuauauua

SEQ ID NO: 47030 - RNA, 19 nt, Homo sapiens
  misc_RNA (1)...(19): siRNA sense strand
gggaauaccugcuuugauu

SEQ ID NO: 47031 - RNA, 19 nt, Homo sapiens
  misc_RNA (1)...(19): siRNA sense strand
gggagacaguguuaaauua

SEQ ID NO: 47032 - RNA, 19 nt, Homo sapiens
  misc_RNA (1)...(19): siRNA sense strand
ccaaguagaugucaacaaa

SEQ ID NO: 47033 - RNA, 19 nt, Homo sapiens
  misc_RNA (1)...(19): siRNA sense strand
gaaauaagaccaaagaaug

SEQ ID NO: 47034 - RNA, 19 nt, Homo sapiens
  misc_RNA (1)...(19): siRNA sense strand
gauaaugaguguccuauug

SEQ ID NO: 47035 - RNA, 19 nt, Homo sapiens
  misc_RNA (1)...(19): siRNA sense strand
gaagggaaauacaaagaaa

SEQ ID NO: 47036 - RNA, 19 nt, Homo sapiens
  misc_RNA (1)...(19): siRNA sense strand
gaagagggcagauuaguuu

SEQ ID NO: 47037 - RNA, 19 nt, Homo sapiens
  misc_RNA (1)...(19): siRNA sense strand
gcaaugagugcauauaaua

SEQ ID NO: 47038 - RNA, 19 nt, Homo sapiens
  misc_RNA (1)...(19): siRNA sense strand
gagaacauauucagcuuaa

SEQ ID NO: 47039 - RNA, 19 nt, Homo sapiens
  misc_RNA (1)...(19): siRNA sense strand
ggacgaagguuuuaauaua

SEQ ID NO: 47040 - RNA, 19 nt, Homo sapiens
  misc_RNA (1)...(19): siRNA sense strand
ugacagagcuagaaacaga

SEQ ID NO: 47041 - RNA, 19 nt, Homo sapiens
  misc_RNA (1)...(19): siRNA sense strand
ggagaaacauuuaauagag

SEQ ID NO: 47042 - RNA, 19 nt, Homo sapiens
  misc_RNA (1)...(19): siRNA sense strand
gagauuggaugauugacua

SEQ ID NO: 47043 - RNA, 19 nt, Homo sapiens
  misc_RNA (1)...(19): siRNA sense strand
guagaagccaggaauauua

SEQ ID NO: 47044 - RNA, 19 nt, Homo sapiens
  misc_RNA (1)...(19): siRNA sense strand
ccagauagaucgaaacaug

SEQ ID NO: 47045 - RNA, 19 nt, Homo sapiens
  misc_RNA (1)...(19): siRNA sense strand
gugaagaucuggacaaugu

SEQ ID NO: 47046 - RNA, 19 nt, Homo sapiens
  misc_RNA (1)...(19): siRNA sense strand
cuauaaaggucucauauga

SEQ ID NO: 47047 - RNA, 19 nt, Homo sapiens
  misc_RNA (1)...(19): siRNA sense strand
gcaaggaagugccucaaau

SEQ ID NO: 47048 - RNA, 19 nt, Homo sapiens
  misc_RNA (1)...(19): siRNA sense strand
gaaaguauaccuggaauga

SEQ ID NO: 47049 - RNA, 19 nt, Homo sapiens
  misc_RNA (1)...(19): siRNA sense strand
ugaagcagaucccacguua

SEQ ID NO: 47050 - RNA, 19 nt, Homo sapiens
  misc_RNA (1)...(19): siRNA sense strand
gcagauuaguuuaccgaua

SEQ ID NO: 47051 - RNA, 19 nt, Homo sapiens
  misc_RNA (1)...(19): siRNA sense strand
gaagaaugcuguaauuggu

SEQ ID NO: 47052 - RNA, 19 nt, Homo sapiens
  misc_RNA (1)...(19): siRNA sense strand
ggaauggaauguuauuugu

SEQ ID NO: 47053 - RNA, 19 nt, Homo sapiens
  misc_RNA (1)...(19): siRNA sense strand
gaaugugccuauaaucuug

SEQ ID NO: 47054 - RNA, 19 nt, Homo sapiens
  misc_RNA (1)...(19): siRNA sense strand
acacaagccuggucaauug

SEQ ID NO: 47055 - RNA, 19 nt, Homo sapiens
  misc_RNA (1)...(19): siRNA sense strand
ccuauaaucuugugaauuc

SEQ ID NO: 47056 - RNA, 19 nt, Homo sapiens
  misc_RNA (1)...(19): siRNA sense strand
gaacauauucagcuuaaug

SEQ ID NO: 47057 - RNA, 19 nt, Homo sapiens
  misc_RNA (1)...(19): siRNA sense strand
caacuacaaucuugcuaaa

SEQ ID NO: 47058 - RNA, 19 nt, Homo sapiens
  misc_RNA (1)...(19): siRNA sense strand
gaaaggacuuccagaacug

SEQ ID NO: 47059 - RNA, 19 nt, Homo sapiens
  misc_RNA (1)...(19): siRNA sense strand
gaaucaggcuacaacauga

SEQ ID NO: 47060 - RNA, 19 nt, Homo sapiens
  misc_RNA (1)...(19): siRNA sense strand
acaagucgcuguuggaauu

SEQ ID NO: 47061 - RNA, 19 nt, Homo sapiens
  misc_RNA (1)...(19): siRNA sense strand
aaacacaggugaaguuaau

SEQ ID NO: 47062 - RNA, 19 nt, Homo sapiens
  misc_RNA (1)...(19): siRNA sense strand
aagaggcuaugaugaauua

SEQ ID NO: 47063 - RNA, 19 nt, Homo sapiens
  misc_RNA (1)...(19): siRNA sense strand
guaaauggauccaggaaca

SEQ ID NO: 47064 - RNA, 19 nt, Homo sapiens
  misc_RNA (1)...(19): siRNA sense strand
ugauucaucugccaaauaa

SEQ ID NO: 47065 - RNA, 19 nt, Homo sapiens
  misc_RNA (1)...(19): siRNA sense strand
gaugagaauucaaucaaug

SEQ ID NO: 47066 - RNA, 19 nt, Homo sapiens
  misc_RNA (1)...(19): siRNA sense strand
gcaacccaauuuauaugua

SEQ ID NO: 47067 - RNA, 19 nt, Homo sapiens
  misc_RNA (1)...(19): siRNA sense strand
acaaagcgguugagcaauu

SEQ ID NO: 47068 - RNA, 19 nt, Homo sapiens
  misc_RNA (1)...(19): siRNA sense strand
gagaagcaucgacucauua

SEQ ID NO: 47069 - RNA, 19 nt, Homo sapiens
  misc_RNA (1)...(19): siRNA sense strand
guaaaugguugcaggcuau

SEQ ID NO: 47070 - RNA, 19 nt, Homo sapiens
  misc_RNA (1)...(19): siRNA sense strand
gaagaacgguuuuacacua

SEQ ID NO: 47071 - RNA, 19 nt, Homo sapiens
  misc_RNA (1)...(19): siRNA sense strand
cagauuaguuuaccgauau

SEQ ID NO: 47072 - RNA, 19 nt, Homo sapiens
  misc_RNA (1)...(19): siRNA sense strand
gagaugauccucuucgaaa

SEQ ID NO: 47073 - RNA, 19 nt, Homo sapiens
  misc_RNA (1)...(19): siRNA sense strand
gcagaaauaagaccaaaga

SEQ ID NO: 47074 - RNA, 19 nt, Homo sapiens
  misc_RNA (1)...(19): siRNA sense strand
ucacaaacguggcauauac

SEQ ID NO: 47075 - RNA, 19 nt, Homo sapiens
  misc_RNA (1)...(19): siRNA sense strand
gcacauggauggauaaaau

SEQ ID NO: 47076 - RNA, 19 nt, Homo sapiens
  misc_RNA (1)...(19): siRNA sense strand
ucacguagcugaguacaug

SEQ ID NO: 47077 - RNA, 19 nt, Homo sapiens
  misc_RNA (1)...(19): siRNA sense strand
gcacaugcccuguuuaugg

SEQ ID NO: 47078 - RNA, 19 nt, Homo sapiens
  misc_RNA (1)...(19): siRNA sense strand
gauccaaaccaacaccuua

SEQ ID NO: 47079 - RNA, 19 nt, Homo sapiens
  misc_RNA (1)...(19): siRNA sense strand
gaaaagcaguuaccgugua

SEQ ID NO: 47080 - RNA, 19 nt, Homo sapiens
  misc_RNA (1)...(19): siRNA sense strand
gauaugaacauugcacuaa

SEQ ID NO: 47081 - RNA, 19 nt, Homo sapiens
  misc_RNA (1)...(19): siRNA sense strand
gaaauugugggccugagua

SEQ ID NO: 47082 - RNA, 19 nt, Homo sapiens
  misc_RNA (1)...(19): siRNA sense strand
caaaagggcccaaugaaua

SEQ ID NO: 47083 - RNA, 19 nt, Homo sapiens
  misc_RNA (1)...(19): siRNA sense strand
caaagcgguugagcaauuu

SEQ ID NO: 47084 - RNA, 19 nt, Homo sapiens
  misc_RNA (1)...(19): siRNA sense strand
gcuaaagguuucaauuauc

SEQ ID NO: 47085 - RNA, 19 nt, Homo sapiens
  misc_RNA (1)...(19): siRNA sense strand
gaucagccauuguuugaag

SEQ ID NO: 47086 - RNA, 19 nt, Homo sapiens
  misc_RNA (1)...(19): siRNA sense strand
ggugguggcugcaguguau

SEQ ID NO: 47087 - RNA, 19 nt, Homo sapiens
  misc_RNA (1)...(19): siRNA sense strand
ggcauggucucauuccuaa

SEQ ID NO: 47088 - RNA, 19 nt, Homo sapiens
  misc_RNA (1)...(19): siRNA sense strand
gcaauguuguguuucucua

SEQ ID NO: 47089 - RNA, 19 nt, Homo sapiens
  misc_RNA (1)...(19): siRNA sense strand
ggucagcccuuaaauaugc

SEQ ID NO: 47090 - RNA, 19 nt, Homo sapiens
  misc_RNA (1)...(19): siRNA sense strand
acaauucaguccucacuuu

SEQ ID NO: 47091 - RNA, 19 nt, Homo sapiens
  misc_RNA (1)...(19): siRNA sense strand
cuagaacuauugagagaaa

SEQ ID NO: 47092 - RNA, 19 nt, Homo sapiens
  misc_RNA (1)...(19): siRNA sense strand
gaaugggaaagcagacuua

SEQ ID NO: 47093 - RNA, 19 nt, Homo sapiens
  misc_RNA (1)...(19): siRNA sense strand
auaaaggucucauaugaug

SEQ ID NO: 47094 - RNA, 19 nt, Homo sapiens
  misc_RNA (1)...(19): siRNA sense strand
gcaguuaccguguauacaa

SEQ ID NO: 47095 - RNA, 19 nt, Homo sapiens
  misc_RNA (1)...(19): siRNA sense strand
gccaaucaguuagaauuaa

SEQ ID NO: 47096 - RNA, 19 nt, Homo sapiens
  misc_RNA (1)...(19): siRNA sense strand
caacagaaagagaagauga

SEQ ID NO: 47097 - RNA, 19 nt, Homo sapiens
  misc_RNA (1)...(19): siRNA sense strand
gaagcuagaacuauugaga

SEQ ID NO: 47098 - RNA, 19 nt, Homo sapiens
  misc_RNA (1)...(19): siRNA sense strand
gagaggcaaugagugcaua

SEQ ID NO: 47099 - RNA, 19 nt, Homo sapiens
  misc_RNA (1)...(19): siRNA sense strand
ccaaugagaaugcccagua

SEQ ID NO: 47100 - RNA, 19 nt, Homo sapiens
  misc_RNA (1)...(19): siRNA sense strand
gaaagugacagagcuagaa

SEQ ID NO: 47101 - RNA, 19 nt, Homo sapiens
  misc_RNA (1)...(19): siRNA sense strand
gcugcaggcuuaccucauu

SEQ ID NO: 47102 - RNA, 19 nt, Homo sapiens
  misc_RNA (1)...(19): siRNA sense strand
ucucuugccuccagauuaa

SEQ ID NO: 47103 - RNA, 19 nt, Homo sapiens
  misc_RNA (1)...(19): siRNA sense strand
ggaugagaauucaaucaau

SEQ ID NO: 47104 - RNA, 19 nt, Homo sapiens
  misc_RNA (1)...(19): siRNA sense strand
agagaaacacgaaaccuua

SEQ ID NO: 47105 - RNA, 19 nt, Homo sapiens
  misc_RNA (1)...(19): siRNA sense strand
cagcagcaauugaagaaug

SEQ ID NO: 47106 - RNA, 19 nt, Homo sapiens
  misc_RNA (1)...(19): siRNA sense strand
gccauuguuugaagucaua

SEQ ID NO: 47107 - RNA, 19 nt, Homo sapiens
  misc_RNA (1)...(19): siRNA sense strand
gagcuacaguuccgauuag

SEQ ID NO: 47108 - RNA, 19 nt, Homo sapiens
  misc_RNA (1)...(19): siRNA sense strand
gcuacucccuugccaauca

SEQ ID NO: 47109 - RNA, 19 nt, Homo sapiens
  misc_RNA (1)...(19): siRNA sense strand
uuccagaacugaccaauga

SEQ ID NO: 47110 - RNA, 19 nt, Homo sapiens
  misc_RNA (1)...(19): siRNA sense strand
agagguauacugcugauua

SEQ ID NO: 47111 - RNA, 19 nt, Homo sapiens
  misc_RNA (1)...(19): siRNA sense strand
gucaguaaccggcuuauuu

SEQ ID NO: 47112 - RNA, 19 nt, Homo sapiens
  misc_RNA (1)...(19): siRNA sense strand
uccaggaaguguuauuaua

SEQ ID NO: 47113 - RNA, 19 nt, Homo sapiens
  misc_RNA (1)...(19): siRNA sense strand
gaaugauguuggacagcua

SEQ ID NO: 47114 - RNA, 19 nt, Homo sapiens
  misc_RNA (1)...(19): siRNA sense strand
ccgauuaggcccaacuuua

SEQ ID NO: 47115 - RNA, 19 nt, Homo sapiens
  misc_RNA (1)...(19): siRNA sense strand
cagaugauaugguuuacug

SEQ ID NO: 47116 - RNA, 19 nt, Homo sapiens
  misc_RNA (1)...(19): siRNA sense strand
ggaaggaugagaauucaau

SEQ ID NO: 47117 - RNA, 19 nt, Homo sapiens
  misc_RNA (1)...(19): siRNA sense strand
gaagacauaguggcaguaa

SEQ ID NO: 47118 - RNA, 19 nt, Homo sapiens
  misc_RNA (1)...(19): siRNA sense strand
aaauuacgcuaugggaaua

SEQ ID NO: 47119 - RNA, 19 nt, Homo sapiens
  misc_RNA (1)...(19): siRNA sense strand
ucaagauccugaauacaga

SEQ ID NO: 47120 - RNA, 19 nt, Homo sapiens
  misc_RNA (1)...(19): siRNA sense strand
caucagauuucagugguuu

SEQ ID NO: 47121 - RNA, 19 nt, Homo sapiens
  misc_RNA (1)...(19): siRNA sense strand
gaauaccugcuuugauuga

SEQ ID NO: 47122 - RNA, 19 nt, Homo sapiens
  misc_RNA (1)...(19): siRNA sense strand
ggaaagcuuuggagauugc

SEQ ID NO: 47123 - RNA, 19 nt, Homo sapiens
  misc_RNA (1)...(19): siRNA sense strand
ggagcaauguuguguuucu

SEQ ID NO: 47124 - RNA, 19 nt, Homo sapiens
  misc_RNA (1)...(19): siRNA sense strand
ugacaaugcagauccuaua

SEQ ID NO: 47125 - RNA, 19 nt, Homo sapiens
  misc_RNA (1)...(19): siRNA sense strand
aaccaacaccuuacgauua

SEQ ID NO: 47126 - RNA, 19 nt, Homo sapiens
  misc_RNA (1)...(19): siRNA sense strand
aaggagcaauguuguguuu

SEQ ID NO: 47127 - RNA, 19 nt, Homo sapiens
  misc_RNA (1)...(19): siRNA sense strand
gaaaucaucugacacaauu

SEQ ID NO: 47128 - RNA, 19 nt, Homo sapiens
  misc_RNA (1)...(19): siRNA sense strand
gcaacaaucugguucauuu

SEQ ID NO: 47129 - RNA, 19 nt, Homo sapiens
  misc_RNA (1)...(19): siRNA sense strand
caaugcagauccuauauua

SEQ ID NO: 47130 - RNA, 19 nt, Homo sapiens
  misc_RNA (1)...(19): siRNA sense strand
gggaauaccugcuuugauu

SEQ ID NO: 47131 - RNA, 19 nt, Homo sapiens
  misc_RNA (1)...(19): siRNA sense strand
gggagacaguguuaaauua

SEQ ID NO: 47132 - RNA, 19 nt, Homo sapiens
  misc_RNA (1)...(19): siRNA sense strand
ccaaguagaugucaacaaa

SEQ ID NO: 47133 - RNA, 19 nt, Homo sapiens
  misc_RNA (1)...(19): siRNA sense strand
gaaauaagaccaaagaaug

SEQ ID NO: 47134 - RNA, 19 nt, Homo sapiens
  misc_RNA (1)...(19): siRNA sense strand
gauaaugaguguccuauug

SEQ ID NO: 47135 - RNA, 19 nt, Homo sapiens
  misc_RNA (1)...(19): siRNA sense strand
gaagggaaauacaaagaaa

SEQ ID NO: 47136 - RNA, 19 nt, Homo sapiens
  misc_RNA (1)...(19): siRNA sense strand
gaagagggcagauuaguuu

SEQ ID NO: 47137 - RNA, 19 nt, Homo sapiens
  misc_RNA (1)...(19): siRNA sense strand
gcaaugagugcauauaaua

SEQ ID NO: 47138 - RNA, 19 nt, Homo sapiens
  misc_RNA (1)...(19): siRNA sense strand
gagaacauauucagcuuaa

SEQ ID NO: 47139 - RNA, 19 nt, Homo sapiens
  misc_RNA (1)...(19): siRNA sense strand
ggacgaagguuuuaauaua

SEQ ID NO: 47140 - RNA, 19 nt, Homo sapiens
  misc_RNA (1)...(19): siRNA sense strand
ugacagagcuagaaacaga

SEQ ID NO: 47141 - RNA, 19 nt, Homo sapiens
  misc_RNA (1)...(19): siRNA sense strand
ggagaaacauuuaauagag

SEQ ID NO: 47142 - RNA, 19 nt, Homo sapiens
  misc_RNA (1)...(19): siRNA sense strand
gagauuggaugauugacua

SEQ ID NO: 47143 - RNA, 19 nt, Homo sapiens
  misc_RNA (1)...(19): siRNA sense strand
guagaagccaggaauauua

SEQ ID NO: 47144 - RNA, 19 nt, Homo sapiens
  misc_RNA (1)...(19): siRNA sense strand
ccagauagaucgaaacaug

SEQ ID NO: 47145 - RNA, 19 nt, Homo sapiens
  misc_RNA (1)...(19): siRNA sense strand
gugaagaucuggacaaugu

SEQ ID NO: 47146 - RNA, 19 nt, Homo sapiens
  misc_RNA (1)...(19): siRNA sense strand
cuauaaaggucucauauga

SEQ ID NO: 47147 - RNA, 19 nt, Homo sapiens
  misc_RNA (1)...(19): siRNA sense strand
gcaaggaagugccucaaau

SEQ ID NO: 47148 - RNA, 19 nt, Homo sapiens
  misc_RNA (1)...(19): siRNA sense strand
gaaaguauaccuggaauga

SEQ ID NO: 47149 - RNA, 19 nt, Homo sapiens
  misc_RNA (1)...(19): siRNA sense strand
ugaagcagaucccacguua

SEQ ID NO: 47150 - RNA, 19 nt, Homo sapiens
  misc_RNA (1)...(19): siRNA sense strand
gcagauuaguuuaccgaua

SEQ ID NO: 47151 - RNA, 19 nt, Homo sapiens
  misc_RNA (1)...(19): siRNA sense strand
gaagaaugcuguaauuggu

SEQ ID NO: 47152 - RNA, 19 nt, Homo sapiens
  misc_RNA (1)...(19): siRNA sense strand
ggaauggaauguuauuugu

SEQ ID NO: 47153 - RNA, 19 nt, Homo sapiens
  misc_RNA (1)...(19): siRNA sense strand
gaaugugccuauaaucuug

SEQ ID NO: 47154 - RNA, 19 nt, Homo sapiens
  misc_RNA (1)...(19): siRNA sense strand
acacaagccuggucaauug

SEQ ID NO: 47155 - RNA, 19 nt, Homo sapiens
  misc_RNA (1)...(19): siRNA sense strand
ccuauaaucuugugaauuc

SEQ ID NO: 47156 - RNA, 19 nt, Homo sapiens
  misc_RNA (1)...(19): siRNA sense strand
gaacauauucagcuuaaug

SEQ ID NO: 47157 - RNA, 19 nt, Homo sapiens
  misc_RNA (1)...(19): siRNA sense strand
caacuacaaucuugcuaaa

SEQ ID NO: 47158 - RNA, 19 nt, Homo sapiens
  misc_RNA (1)...(19): siRNA sense strand
gaaaggacuuccagaacug

SEQ ID NO: 47159 - RNA, 19 nt, Homo sapiens
  misc_RNA (1)...(19): siRNA sense strand
gaaucaggcuacaacauga

SEQ ID NO: 47160 - RNA, 19 nt, Homo sapiens
  misc_RNA (1)...(19): siRNA sense strand
acaagucgcuguuggaauu

SEQ ID NO: 47161 - RNA, 19 nt, Homo sapiens
  misc_RNA (1)...(19): siRNA sense strand
aaacacaggugaaguuaau

SEQ ID NO: 47162 - RNA, 19 nt, Homo sapiens
  misc_RNA (1)...(19): siRNA sense strand
aagaggcuaugaugaauua

SEQ ID NO: 47163 - RNA, 19 nt, Homo sapiens
  misc_RNA (1)...(19): siRNA sense strand
guaaauggauccaggaaca

SEQ ID NO: 47164 - RNA, 19 nt, Homo sapiens
  misc_RNA (1)...(19): siRNA sense strand
ugauucaucugccaaauaa

SEQ ID NO: 47165 - RNA, 19 nt, Homo sapiens
  misc_RNA (1)...(19): siRNA sense strand
gaugagaauucaaucaaug

SEQ ID NO: 47166 - RNA, 19 nt, Homo sapiens
  misc_RNA (1)...(19): siRNA sense strand
gcaacccaauuuauaugua

SEQ ID NO: 47167 - RNA, 19 nt, Homo sapiens
  misc_RNA (1)...(19): siRNA sense strand
acaaagcgguugagcaauu

SEQ ID NO: 47168 - RNA, 19 nt, Homo sapiens
  misc_RNA (1)...(19): siRNA sense strand
gagaagcaucgacucauua

SEQ ID NO: 47169 - RNA, 19 nt, Homo sapiens
  misc_RNA (1)...(19): siRNA sense strand
guaaaugguugcaggcuau

SEQ ID NO: 47170 - RNA, 19 nt, Homo sapiens
  misc_RNA (1)...(19): siRNA sense strand
gaagaacgguuuuacacua

SEQ ID NO: 47171 - RNA, 19 nt, Homo sapiens
  misc_RNA (1)...(19): siRNA sense strand
cagauuaguuuaccgauau

SEQ ID NO: 47172 - RNA, 19 nt, Homo sapiens
  misc_RNA (1)...(19): siRNA sense strand
gagaugauccucuucgaaa

SEQ ID NO: 47173 - RNA, 19 nt, Homo sapiens
  misc_RNA (1)...(19): siRNA sense strand
gcagaaauaagaccaaaga

SEQ ID NO: 47174 - RNA, 19 nt, Homo sapiens
  misc_RNA (1)...(19): siRNA sense strand
ucacaaacguggcauauac

SEQ ID NO: 47175 - RNA, 19 nt, Homo sapiens
  misc_RNA (1)...(19): siRNA sense strand
gcacauggauggauaaaau

SEQ ID NO: 47176 - RNA, 19 nt, Homo sapiens
  misc_RNA (1)...(19): siRNA sense strand
ucacguagcugaguacaug

SEQ ID NO: 47177 - RNA, 19 nt, Homo sapiens
  misc_RNA (1)...(19): siRNA sense strand
gcacaugcccuguuuaugg

SEQ ID NO: 47178 - RNA, 19 nt, Homo sapiens
  misc_RNA (1)...(19): siRNA sense strand
gauccaaaccaacaccuua

SEQ ID NO: 47179 - RNA, 19 nt, Homo sapiens
  misc_RNA (1)...(19): siRNA sense strand
gaaaagcaguuaccgugua

SEQ ID NO: 47180 - RNA, 19 nt, Homo sapiens
  misc_RNA (1)...(19): siRNA sense strand
gauaugaacauugcacuaa

SEQ ID NO: 47181 - RNA, 19 nt, Homo sapiens
  misc_RNA (1)...(19): siRNA sense strand
gaaauugugggccugagua

SEQ ID NO: 47182 - RNA, 19 nt, Homo sapiens
  misc_RNA (1)...(19): siRNA sense strand
caaaagggcccaaugaaua

SEQ ID NO: 47183 - RNA, 19 nt, Homo sapiens
  misc_RNA (1)...(19): siRNA sense strand
caaagcgguugagcaauuu

SEQ ID NO: 47184 - RNA, 19 nt, Homo sapiens
  misc_RNA (1)...(19): siRNA sense strand
gcuaaagguuucaauuauc

SEQ ID NO: 47185 - RNA, 19 nt, Homo sapiens
  misc_RNA (1)...(19): siRNA sense strand
gaucagccauuguuugaag

SEQ ID NO: 47186 - RNA, 19 nt, Homo sapiens
  misc_RNA (1)...(19): siRNA sense strand
ggugguggcugcaguguau

SEQ ID NO: 47187 - RNA, 19 nt, Homo sapiens
  misc_RNA (1)...(19): siRNA sense strand
ggcauggucucauuccuaa

SEQ ID NO: 47188 - RNA, 19 nt, Homo sapiens
  misc_RNA (1)...(19): siRNA sense strand
gcaauguuguguuucucua

SEQ ID NO: 47189 - RNA, 19 nt, Homo sapiens
  misc_RNA (1)...(19): siRNA sense strand
ggucagcccuuaaauaugc

SEQ ID NO: 47190 - RNA, 19 nt, Homo sapiens
  misc_RNA (1)...(19): siRNA sense strand
acaauucaguccucacuuu

SEQ ID NO: 47191 - RNA, 19 nt, Homo sapiens
  misc_RNA (1)...(19): siRNA sense strand
cuagaacuauugagagaaa

SEQ ID NO: 47192 - RNA, 19 nt, Homo sapiens
  misc_RNA (1)...(19): siRNA sense strand
gaaugggaaagcagacuua

SEQ ID NO: 47193 - RNA, 19 nt, Homo sapiens
  misc_RNA (1)...(19): siRNA sense strand
auaaaggucucauaugaug

SEQ ID NO: 47194 - RNA, 19 nt, Homo sapiens
  misc_RNA (1)...(19): siRNA sense strand
gcaguuaccguguauacaa

SEQ ID NO: 47195 - RNA, 19 nt, Homo sapiens
  misc_RNA (1)...(19): siRNA sense strand
gccaaucaguuagaauuaa

SEQ ID NO: 47196 - RNA, 19 nt, Homo sapiens
  misc_RNA (1)...(19): siRNA sense strand
caacagaaagagaagauga

SEQ ID NO: 47197 - RNA, 19 nt, Homo sapiens
  misc_RNA (1)...(19): siRNA sense strand
gaagcuagaacuauugaga

SEQ ID NO: 47198 - RNA, 19 nt, Homo sapiens
  misc_RNA (1)...(19): siRNA sense strand
gagaggcaaugagugcaua

SEQ ID NO: 47199 - RNA, 19 nt, Homo sapiens
  misc_RNA (1)...(19): siRNA sense strand
ccaaugagaaugcccagua

SEQ ID NO: 47200 - RNA, 19 nt, Homo sapiens
  misc_RNA (1)...(19): siRNA sense strand
gaaagugacagagcuagaa

SEQ ID NO: 47201 - RNA, 19 nt, Homo sapiens
  misc_RNA (1)...(19): siRNA sense strand
gcugcaggcuuaccucauu

SEQ ID NO: 47202 - RNA, 19 nt, Homo sapiens
  misc_RNA (1)...(19): siRNA sense strand
ucucuugccuccagauuaa

SEQ ID NO: 47203 - RNA, 19 nt, Homo sapiens
  misc_RNA (1)...(19): siRNA sense strand
ggaugagaauucaaucaau

SEQ ID NO: 47204 - RNA, 19 nt, Homo sapiens
  misc_RNA (1)...(19): siRNA sense strand
agagaaacacgaaaccuua

SEQ ID NO: 47205 - RNA, 19 nt, Homo sapiens
  misc_RNA (1)...(19): siRNA sense strand
cagcagcaauugaagaaug

SEQ ID NO: 47206 - RNA, 19 nt, Homo sapiens
  misc_RNA (1)...(19): siRNA sense strand
gccauuguuugaagucaua

SEQ ID NO: 47207 - RNA, 19 nt, Homo sapiens
  misc_RNA (1)...(19): siRNA sense strand
gagcuacaguuccgauuag

SEQ ID NO: 47208 - RNA, 19 nt, Homo sapiens
  misc_RNA (1)...(19): siRNA sense strand
gcuacucccuugccaauca

SEQ ID NO: 47209 - RNA, 19 nt, Homo sapiens
  misc_RNA (1)...(19): siRNA sense strand
uuccagaacugaccaauga

SEQ ID NO: 47210 - RNA, 19 nt, Homo sapiens
  misc_RNA (1)...(19): siRNA sense strand
agagguauacugcugauua

SEQ ID NO: 47211 - RNA, 19 nt, Homo sapiens
  misc_RNA (1)...(19): siRNA sense strand
gucaguaaccggcuuauuu

SEQ ID NO: 47212 - RNA, 19 nt, Homo sapiens
  misc_RNA (1)...(19): siRNA sense strand
uccaggaaguguuauuaua

SEQ ID NO: 47213 - RNA, 19 nt, Homo sapiens
  misc_RNA (1)...(19): siRNA sense strand
gaaugauguuggacagcua

SEQ ID NO: 47214 - RNA, 19 nt, Homo sapiens
  misc_RNA (1)...(19): siRNA sense strand
ccgauuaggcccaacuuua

SEQ ID NO: 47215 - RNA, 19 nt, Homo sapiens
  misc_RNA (1)...(19): siRNA sense strand
cagaugauaugguuuacug

SEQ ID NO: 47216 - RNA, 19 nt, Homo sapiens
  misc_RNA (1)...(19): siRNA sense strand
ggaaggaugagaauucaau

SEQ ID NO: 47217 - RNA, 19 nt, Homo sapiens
  misc_RNA (1)...(19): siRNA sense strand
gaagacauaguggcaguaa

SEQ ID NO: 47218 - RNA, 19 nt, Homo sapiens
  misc_RNA (1)...(19): siRNA sense strand
aaauuacgcuaugggaaua

SEQ ID NO: 47219 - RNA, 19 nt, Homo sapiens
  misc_RNA (1)...(19): siRNA sense strand
ucaagauccugaauacaga

SEQ ID NO: 47220 - RNA, 19 nt, Homo sapiens
  misc_RNA (1)...(19): siRNA sense strand
caucagauuucagugguuu

SEQ ID NO: 47221 - RNA, 19 nt, Homo sapiens
  misc_RNA (1)...(19): siRNA sense strand
gaauaccugcuuugauuga

SEQ ID NO: 47222 - RNA, 19 nt, Homo sapiens
  misc_RNA (1)...(19): siRNA sense strand
ggaaagcuuuggagauugc

SEQ ID NO: 47223 - RNA, 19 nt, Homo sapiens
  misc_RNA (1)...(19): siRNA sense strand
ggagcaauguuguguuucu

SEQ ID NO: 47224 - RNA, 19 nt, Homo sapiens
  misc_RNA (1)...(19): siRNA sense strand
ugacaaugcagauccuaua

SEQ ID NO: 47225 - RNA, 19 nt, Homo sapiens
  misc_RNA (1)...(19): siRNA sense strand
aaccaacaccuuacgauua

SEQ ID NO: 47226 - RNA, 19 nt, Homo sapiens
  misc_RNA (1)...(19): siRNA sense strand
aaggagcaauguuguguuu

SEQ ID NO: 47227 - RNA, 19 nt, Homo sapiens
  misc_RNA (1)...(19): siRNA sense strand
gaaaucaucugacacaauu

SEQ ID NO: 47228 - RNA, 19 nt, Homo sapiens
  misc_RNA (1)...(19): siRNA sense strand
gcaacaaucugguucauuu

SEQ ID NO: 47229 - RNA, 19 nt, Homo sapiens
  misc_RNA (1)...(19): siRNA sense strand
caaugcagauccuauauua

SEQ ID NO: 47230 - RNA, 19 nt, Homo sapiens
  misc_RNA (1)...(19): siRNA sense strand
gggaauaccugcuuugauu

SEQ ID NO: 47231 - RNA, 19 nt, Homo sapiens
  misc_RNA (1)...(19): siRNA sense strand
gggagacaguguuaaauua

SEQ ID NO: 47232 - RNA, 19 nt, Homo sapiens
  misc_RNA (1)...(19): siRNA sense strand
ccaaguagaugucaacaaa

SEQ ID NO: 47233 - RNA, 19 nt, Homo sapiens
  misc_RNA (1)...(19): siRNA sense strand
gaaauaagaccaaagaaug

SEQ ID NO: 47234 - RNA, 19 nt, Homo sapiens
  misc_RNA (1)...(19): siRNA sense strand
gauaaugaguguccuauug

SEQ ID NO: 47235 - RNA, 19 nt, Homo sapiens
  misc_RNA (1)...(19): siRNA sense strand
gaagggaaauacaaagaaa

SEQ ID NO: 47236 - RNA, 19 nt, Homo sapiens
  misc_RNA (1)...(19): siRNA sense strand
gaagagggcagauuaguuu

SEQ ID NO: 47237 - RNA, 19 nt, Homo sapiens
  misc_RNA (1)...(19): siRNA sense strand
gcaaugagugcauauaaua

SEQ ID NO: 47238 - RNA, 19 nt, Homo sapiens
  misc_RNA (1)...(19): siRNA sense strand
gagaacauauucagcuuaa

SEQ ID NO: 47239 - RNA, 19 nt, Homo sapiens
  misc_RNA (1)...(19): siRNA sense strand
ggacgaagguuuuaauaua

SEQ ID NO: 47240 - RNA, 19 nt, Homo sapiens
  misc_RNA (1)...(19): siRNA sense strand
ugacagagcuagaaacaga

SEQ ID NO: 47241 - RNA, 19 nt, Homo sapiens
  misc_RNA (1)...(19): siRNA sense strand
ggagaaacauuuaauagag

SEQ ID NO: 47242 - RNA, 19 nt, Homo sapiens
  misc_RNA (1)...(19): siRNA sense strand
gagauuggaugauugacua

SEQ ID NO: 47243 - RNA, 19 nt, Homo sapiens
  misc_RNA (1)...(19): siRNA sense strand
guagaagccaggaauauua

SEQ ID NO: 47244 - RNA, 19 nt, Homo sapiens
  misc_RNA (1)...(19): siRNA sense strand
ccagauagaucgaaacaug

SEQ ID NO: 47245 - RNA, 19 nt, Homo sapiens
  misc_RNA (1)...(19): siRNA sense strand
gugaagaucuggacaaugu

SEQ ID NO: 47246 - RNA, 19 nt, Homo sapiens
  misc_RNA (1)...(19): siRNA sense strand
cuauaaaggucucauauga

SEQ ID NO: 47247 - RNA, 19 nt, Homo sapiens
  misc_RNA (1)...(19): siRNA sense strand
gcaaggaagugccucaaau

SEQ ID NO: 47248 - RNA, 19 nt, Homo sapiens
  misc_RNA (1)...(19): siRNA sense strand
gaaaguauaccuggaauga

SEQ ID NO: 47249 - RNA, 19 nt, Homo sapiens
  misc_RNA (1)...(19): siRNA sense strand
ugaagcagaucccacguua

SEQ ID NO: 47250 - RNA, 19 nt, Homo sapiens
  misc_RNA (1)...(19): siRNA sense strand
gcagauuaguuuaccgaua

SEQ ID NO: 47251 - RNA, 19 nt, Homo sapiens
  misc_RNA (1)...(19): siRNA sense strand
gaagaaugcuguaauuggu

SEQ ID NO: 47252 - RNA, 19 nt, Homo sapiens
  misc_RNA (1)...(19): siRNA sense strand
ggaauggaauguuauuugu

SEQ ID NO: 47253 - RNA, 19 nt, Homo sapiens
  misc_RNA (1)...(19): siRNA sense strand
gaaugugccuauaaucuug

SEQ ID NO: 47254 - RNA, 19 nt, Homo sapiens
  misc_RNA (1)...(19): siRNA sense strand
acacaagccuggucaauug

SEQ ID NO: 47255 - RNA, 19 nt, Homo sapiens
  misc_RNA (1)...(19): siRNA sense strand
ccuauaaucuugugaauuc

SEQ ID NO: 47256 - RNA, 19 nt, Homo sapiens
  misc_RNA (1)...(19): siRNA sense strand
gaacauauucagcuuaaug

SEQ ID NO: 47257 - RNA, 19 nt, Homo sapiens
  misc_RNA (1)...(19): siRNA sense strand
caacuacaaucuugcuaaa

SEQ ID NO: 47258 - RNA, 19 nt, Homo sapiens
  misc_RNA (1)...(19): siRNA sense strand
gaaaggacuuccagaacug

SEQ ID NO: 47259 - RNA, 19 nt, Homo sapiens
  misc_RNA (1)...(19): siRNA sense strand
gaaucaggcuacaacauga

SEQ ID NO: 47260 - RNA, 19 nt, Homo sapiens
  misc_RNA (1)...(19): siRNA sense strand
acaagucgcuguuggaauu

SEQ ID NO: 47261 - RNA, 19 nt, Homo sapiens
  misc_RNA (1)...(19): siRNA sense strand
aaacacaggugaaguuaau

SEQ ID NO: 47262 - RNA, 19 nt, Homo sapiens
  misc_RNA (1)...(19): siRNA sense strand
aagaggcuaugaugaauua

SEQ ID NO: 47263 - RNA, 19 nt, Homo sapiens
  misc_RNA (1)...(19): siRNA sense strand
guaaauggauccaggaaca

SEQ ID NO: 47264 - RNA, 19 nt, Homo sapiens
  misc_RNA (1)...(19): siRNA sense strand
ugauucaucugccaaauaa

SEQ ID NO: 47265 - RNA, 19 nt, Homo sapiens
  misc_RNA (1)...(19): siRNA sense strand
gaugagaauucaaucaaug

SEQ ID NO: 47266 - RNA, 19 nt, Homo sapiens
  misc_RNA (1)...(19): siRNA sense strand
gcaacccaauuuauaugua

SEQ ID NO: 47267 - RNA, 19 nt, Homo sapiens
  misc_RNA (1)...(19): siRNA sense strand
acaaagcgguugagcaauu

SEQ ID NO: 47268 - RNA, 19 nt, Homo sapiens
  misc_RNA (1)...(19): siRNA sense strand
gagaagcaucgacucauua

SEQ ID NO: 47269 - RNA, 19 nt, Homo sapiens
  misc_RNA (1)...(19): siRNA sense strand
guaaaugguugcaggcuau

SEQ ID NO: 47270 - RNA, 19 nt, Homo sapiens
  misc_RNA (1)...(19): siRNA sense strand
gaagaacgguuuuacacua

SEQ ID NO: 47271 - RNA, 19 nt, Homo sapiens
  misc_RNA (1)...(19): siRNA sense strand
cagauuaguuuaccgauau

SEQ ID NO: 47272 - RNA, 19 nt, Homo sapiens
  misc_RNA (1)...(19): siRNA sense strand
gagaugauccucuucgaaa

SEQ ID NO: 47273 - RNA, 19 nt, Homo sapiens
  misc_RNA (1)...(19): siRNA sense strand
gcagaaauaagaccaaaga

SEQ ID NO: 47274 - RNA, 19 nt, Homo sapiens
  misc_RNA (1)...(19): siRNA sense strand
ucacaaacguggcauauac

SEQ ID NO: 47275 - RNA, 19 nt, Homo sapiens
  misc_RNA (1)...(19): siRNA sense strand
gcacauggauggauaaaau

SEQ ID NO: 47276 - RNA, 19 nt, Homo sapiens
  misc_RNA (1)...(19): siRNA sense strand
ucacguagcugaguacaug

SEQ ID NO: 47277 - RNA, 19 nt, Homo sapiens
  misc_RNA (1)...(19): siRNA sense strand
gcacaugcccuguuuaugg

SEQ ID NO: 47278 - RNA, 19 nt, Homo sapiens
  misc_RNA (1)...(19): siRNA sense strand
gauccaaaccaacaccuua

SEQ ID NO: 47279 - RNA, 19 nt, Homo sapiens
  misc_RNA (1)...(19): siRNA sense strand
gaaaagcaguuaccgugua

SEQ ID NO: 47280 - RNA, 19 nt, Homo sapiens
  misc_RNA (1)...(19): siRNA sense strand
gauaugaacauugcacuaa

SEQ ID NO: 47281 - RNA, 19 nt, Homo sapiens
  misc_RNA (1)...(19): siRNA sense strand
gaaauugugggccugagua

SEQ ID NO: 47282 - RNA, 19 nt, Homo sapiens
  misc_RNA (1)...(19): siRNA sense strand
caaaagggcccaaugaaua

SEQ ID NO: 47283 - RNA, 19 nt, Homo sapiens
  misc_RNA (1)...(19): siRNA sense strand
caaagcgguugagcaauuu

SEQ ID NO: 47284 - RNA, 19 nt, Homo sapiens
  misc_RNA (1)...(19): siRNA sense strand
gcuaaagguuucaauuauc

SEQ ID NO: 47285 - RNA, 19 nt, Homo sapiens
  misc_RNA (1)...(19): siRNA sense strand
gaucagccauuguuugaag

SEQ ID NO: 47286 - RNA, 19 nt, Homo sapiens
  misc_RNA (1)...(19): siRNA sense strand
ggugguggcugcaguguau

SEQ ID NO: 47287 - RNA, 19 nt, Homo sapiens
  misc_RNA (1)...(19): siRNA sense strand
ggcauggucucauuccuaa

SEQ ID NO: 47288 - RNA, 19 nt, Homo sapiens
  misc_RNA (1)...(19): siRNA sense strand
gcaauguuguguuucucua

SEQ ID NO: 47289 - RNA, 19 nt, Homo sapiens
  misc_RNA (1)...(19): siRNA sense strand
ggucagcccuuaaauaugc

SEQ ID NO: 47290 - RNA, 19 nt, Homo sapiens
  misc_RNA (1)...(19): siRNA sense strand
acaauucaguccucacuuu

SEQ ID NO: 47291 - RNA, 19 nt, Homo sapiens
  misc_RNA (1)...(19): siRNA sense strand
cuagaacuauugagagaaa

SEQ ID NO: 47292 - RNA, 19 nt, Homo sapiens
  misc_RNA (1)...(19): siRNA sense strand
gaaugggaaagcagacuua

SEQ ID NO: 47293 - RNA, 19 nt, Homo sapiens
  misc_RNA (1)...(19): siRNA sense strand
auaaaggucucauaugaug

SEQ ID NO: 47294 - RNA, 19 nt, Homo sapiens
  misc_RNA (1)...(19): siRNA sense strand
gcaguuaccguguauacaa

SEQ ID NO: 47295 - RNA, 19 nt, Homo sapiens
  misc_RNA (1)...(19): siRNA sense strand
gccaaucaguuagaauuaa

SEQ ID NO: 47296 - RNA, 19 nt, Homo sapiens
  misc_RNA (1)...(19): siRNA sense strand
caacagaaagagaagauga

SEQ ID NO: 47297 - RNA, 19 nt, Homo sapiens
  misc_RNA (1)...(19): siRNA sense strand
gaagcuagaacuauugaga

SEQ ID NO: 47298 - RNA, 19 nt, Homo sapiens
  misc_RNA (1)...(19): siRNA sense strand
gagaggcaaugagugcaua

SEQ ID NO: 47299 - RNA, 19 nt, Homo sapiens
  misc_RNA (1)...(19): siRNA sense strand
ccaaugagaaugcccagua

SEQ ID NO: 47300 - RNA, 19 nt, Homo sapiens
  misc_RNA (1)...(19): siRNA sense strand
gaaagugacagagcuagaa

SEQ ID NO: 47301 - RNA, 19 nt, Homo sapiens
  misc_RNA (1)...(19): siRNA sense strand
gcugcaggcuuaccucauu

SEQ ID NO: 47302 - RNA, 19 nt, Homo sapiens
  misc_RNA (1)...(19): siRNA sense strand
ucucuugccuccagauuaa

SEQ ID NO: 47303 - RNA, 19 nt, Homo sapiens
  misc_RNA (1)...(19): siRNA sense strand
ggaugagaauucaaucaau

SEQ ID NO: 47304 - RNA, 19 nt, Homo sapiens
  misc_RNA (1)...(19): siRNA sense strand
agagaaacacgaaaccuua

SEQ ID NO: 47305 - RNA, 19 nt, Homo sapiens
  misc_RNA (1)...(19): siRNA sense strand
cagcagcaauugaagaaug

SEQ ID NO: 47306 - RNA, 19 nt, Homo sapiens
  misc_RNA (1)...(19): siRNA sense strand
gccauuguuugaagucaua

SEQ ID NO: 47307 - RNA, 19 nt, Homo sapiens
  misc_RNA (1)...(19): siRNA sense strand
gagcuacaguuccgauuag

SEQ ID NO: 47308 - RNA, 19 nt, Homo sapiens
  misc_RNA (1)...(19): siRNA sense strand
gcuacucccuugccaauca

SEQ ID NO: 47309 - RNA, 19 nt, Homo sapiens
  misc_RNA (1)...(19): siRNA sense strand
uuccagaacugaccaauga

SEQ ID NO: 47310 - RNA, 19 nt, Homo sapiens
  misc_RNA (1)...(19): siRNA sense strand
agagguauacugcugauua

SEQ ID NO: 47311 - RNA, 19 nt, Homo sapiens
  misc_RNA (1)...(19): siRNA sense strand
gucaguaaccggcuuauuu

SEQ ID NO: 47312 - RNA, 19 nt, Homo sapiens
  misc_RNA (1)...(19): siRNA sense strand
uccaggaaguguuauuaua

SEQ ID NO: 47313 - RNA, 19 nt, Homo sapiens
  misc_RNA (1)...(19): siRNA sense strand
gaaugauguuggacagcua

SEQ ID NO: 47314 - RNA, 19 nt, Homo sapiens
  misc_RNA (1)...(19): siRNA sense strand
ccgauuaggcccaacuuua

SEQ ID NO: 47315 - RNA, 19 nt, Homo sapiens
  misc_RNA (1)...(19): siRNA sense strand
cagaugauaugguuuacug

SEQ ID NO: 47316 - RNA, 19 nt, Homo sapiens
  misc_RNA (1)...(19): siRNA sense strand
ggaaggaugagaauucaau

SEQ ID NO: 47317 - RNA, 19 nt, Homo sapiens
  misc_RNA (1)...(19): siRNA sense strand
gaagacauaguggcaguaa

SEQ ID NO: 47318 - RNA, 19 nt, Homo sapiens
  misc_RNA (1)...(19): siRNA sense strand
aaauuacgcuaugggaaua

SEQ ID NO: 47319 - RNA, 19 nt, Homo sapiens
  misc_RNA (1)...(19): siRNA sense strand
ucaagauccugaauacaga

SEQ ID NO: 47320 - RNA, 19 nt, Homo sapiens
  misc_RNA (1)...(19): siRNA sense strand
caucagauuucagugguuu

SEQ ID NO: 47321 - RNA, 19 nt, Homo sapiens
  misc_RNA (1)...(19): siRNA sense strand
gaauaccugcuuugauuga

SEQ ID NO: 47322 - RNA, 19 nt, Homo sapiens
  misc_RNA (1)...(19): siRNA sense strand
ggaaagcuuuggagauugc

SEQ ID NO: 47323 - RNA, 19 nt, Homo sapiens
  misc_RNA (1)...(19): siRNA sense strand
ggagcaauguuguguuucu

SEQ ID NO: 47324 - RNA, 19 nt, Homo sapiens
  misc_RNA (1)...(19): siRNA sense strand
ugacaaugcagauccuaua

SEQ ID NO: 47325 - RNA, 19 nt, Homo sapiens
  misc_RNA (1)...(19): siRNA sense strand
aaccaacaccuuacgauua

SEQ ID NO: 47326 - RNA, 19 nt, Homo sapiens
  misc_RNA (1)...(19): siRNA sense strand
aaggagcaauguuguguuu

SEQ ID NO: 47327 - RNA, 19 nt, Homo sapiens
  misc_RNA (1)...(19): siRNA sense strand
gaaaucaucugacacaauu

SEQ ID NO: 47328 - RNA, 19 nt, Homo sapiens
  misc_RNA (1)...(19): siRNA sense strand
gcaacaaucugguucauuu

SEQ ID NO: 47329 - RNA, 19 nt, Homo sapiens
  misc_RNA (1)...(19): siRNA sense strand
caaugcagauccuauauua

SEQ ID NO: 47330 - RNA, 19 nt, Homo sapiens
  misc_RNA (1)...(19): siRNA sense strand
gggaauaccugcuuugauu

SEQ ID NO: 47331 - RNA, 19 nt, Homo sapiens
  misc_RNA (1)...(19): siRNA sense strand
gggagacaguguuaaauua

SEQ ID NO: 47332 - RNA, 19 nt, Homo sapiens
  misc_RNA (1)...(19): siRNA sense strand
ccaaguagaugucaacaaa

SEQ ID NO: 47333 - RNA, 19 nt, Homo sapiens
  misc_RNA (1)...(19): siRNA sense strand
gaaauaagaccaaagaaug

SEQ ID NO: 47334 - RNA, 19 nt, Homo sapiens
  misc_RNA (1)...(19): siRNA sense strand
gauaaugaguguccuauug

SEQ ID NO: 47335 - RNA, 19 nt, Homo sapiens
  misc_RNA (1)...(19): siRNA sense strand
gaagggaaauacaaagaaa

SEQ ID NO: 47336 - RNA, 19 nt, Homo sapiens
  misc_RNA (1)...(19): siRNA sense strand
gaagagggcagauuaguuu

SEQ ID NO: 47337 - RNA, 19 nt, Homo sapiens
  misc_RNA (1)...(19): siRNA sense strand
gcaaugagugcauauaaua

SEQ ID NO: 47338 - RNA, 19 nt, Homo sapiens
  misc_RNA (1)...(19): siRNA sense strand
gagaacauauucagcuuaa

SEQ ID NO: 47339 - RNA, 19 nt, Homo sapiens
  misc_RNA (1)...(19): siRNA sense strand
ggacgaagguuuuaauaua

SEQ ID NO: 47340 - RNA, 19 nt, Homo sapiens
  misc_RNA (1)...(19): siRNA sense strand
ugacagagcuagaaacaga

SEQ ID NO: 47341 - RNA, 19 nt, Homo sapiens
  misc_RNA (1)...(19): siRNA sense strand
ggagaaacauuuaauagag

SEQ ID NO: 47342 - RNA, 19 nt, Homo sapiens
  misc_RNA (1)...(19): siRNA sense strand
gagauuggaugauugacua

SEQ ID NO: 47343 - RNA, 19 nt, Homo sapiens
  misc_RNA (1)...(19): siRNA sense strand
guagaagccaggaauauua

SEQ ID NO: 47344 - RNA, 19 nt, Homo sapiens
  misc_RNA (1)...(19): siRNA sense strand
ccagauagaucgaaacaug

SEQ ID NO: 47345 - RNA, 19 nt, Homo sapiens
  misc_RNA (1)...(19): siRNA sense strand
gugaagaucuggacaaugu

SEQ ID NO: 47346 - RNA, 19 nt, Homo sapiens
  misc_RNA (1)...(19): siRNA sense strand
cuauaaaggucucauauga

SEQ ID NO: 47347 - RNA, 19 nt, Homo sapiens
  misc_RNA (1)...(19): siRNA sense strand
gcaaggaagugccucaaau

SEQ ID NO: 47348 - RNA, 19 nt, Homo sapiens
  misc_RNA (1)...(19): siRNA sense strand
gaaaguauaccuggaauga

SEQ ID NO: 47349 - RNA, 19 nt, Homo sapiens
  misc_RNA (1)...(19): siRNA sense strand
ugaagcagaucccacguua

SEQ ID NO: 47350 - RNA, 19 nt, Homo sapiens
  misc_RNA (1)...(19): siRNA sense strand
gcagauuaguuuaccgaua

SEQ ID NO: 47351 - RNA, 19 nt, Homo sapiens
  misc_RNA (1)...(19): siRNA sense strand
gaagaaugcuguaauuggu

SEQ ID NO: 47352 - RNA, 19 nt, Homo sapiens
  misc_RNA (1)...(19): siRNA sense strand
ggaauggaauguuauuugu

SEQ ID NO: 47353 - RNA, 19 nt, Homo sapiens
  misc_RNA (1)...(19): siRNA sense strand
gaaugugccuauaaucuug

SEQ ID NO: 47354 - RNA, 19 nt, Homo sapiens
  misc_RNA (1)...(19): siRNA sense strand
acacaagccuggucaauug

SEQ ID NO: 47355 - RNA, 19 nt, Homo sapiens
  misc_RNA (1)...(19): siRNA sense strand
ccuauaaucuugugaauuc

SEQ ID NO: 47356 - RNA, 19 nt, Homo sapiens
  misc_RNA (1)...(19): siRNA sense strand
gaacauauucagcuuaaug

SEQ ID NO: 47357 - RNA, 19 nt, Homo sapiens
  misc_RNA (1)...(19): siRNA sense strand
caacuacaaucuugcuaaa

SEQ ID NO: 47358 - RNA, 19 nt, Homo sapiens
  misc_RNA (1)...(19): siRNA sense strand
gaaaggacuuccagaacug

SEQ ID NO: 47359 - RNA, 19 nt, Homo sapiens
  misc_RNA (1)...(19): siRNA sense strand
gaaucaggcuacaacauga

SEQ ID NO: 47360 - RNA, 19 nt, Homo sapiens
  misc_RNA (1)...(19): siRNA sense strand
acaagucgcuguuggaauu

SEQ ID NO: 47361 - RNA, 19 nt, Homo sapiens
  misc_RNA (1)...(19): siRNA sense strand
aaacacaggugaaguuaau

SEQ ID NO: 47362 - RNA, 19 nt, Homo sapiens
  misc_RNA (1)...(19): siRNA sense strand
aagaggcuaugaugaauua

SEQ ID NO: 47363 - RNA, 19 nt, Homo sapiens
  misc_RNA (1)...(19): siRNA sense strand
guaaauggauccaggaaca

SEQ ID NO: 47364 - RNA, 19 nt, Homo sapiens
  misc_RNA (1)...(19): siRNA sense strand
ugauucaucugccaaauaa

SEQ ID NO: 47365 - RNA, 19 nt, Homo sapiens
  misc_RNA (1)...(19): siRNA sense strand
gaugagaauucaaucaaug

SEQ ID NO: 47366 - RNA, 19 nt, Homo sapiens
  misc_RNA (1)...(19): siRNA sense strand
gcaacccaauuuauaugua

SEQ ID NO: 47367 - RNA, 19 nt, Homo sapiens
  misc_RNA (1)...(19): siRNA sense strand
acaaagcgguugagcaauu

SEQ ID NO: 47368 - RNA, 19 nt, Homo sapiens
  misc_RNA (1)...(19): siRNA sense strand
gagaagcaucgacucauua

SEQ ID NO: 47369 - RNA, 19 nt, Homo sapiens
  misc_RNA (1)...(19): siRNA sense strand
guaaaugguugcaggcuau

SEQ ID NO: 47370 - RNA, 19 nt, Homo sapiens
  misc_RNA (1)...(19): siRNA sense strand
gaagaacgguuuuacacua

SEQ ID NO: 47371 - RNA, 19 nt, Homo sapiens
  misc_RNA (1)...(19): siRNA sense strand
cagauuaguuuaccgauau

SEQ ID NO: 47372 - RNA, 19 nt, Homo sapiens
  misc_RNA (1)...(19): siRNA sense strand
gagaugauccucuucgaaa

SEQ ID NO: 47373 - RNA, 19 nt, Homo sapiens
  misc_RNA (1)...(19): siRNA sense strand
gcagaaauaagaccaaaga

SEQ ID NO: 47374 - RNA, 19 nt, Homo sapiens
  misc_RNA (1)...(19): siRNA sense strand
ucacaaacguggcauauac

SEQ ID NO: 47375 - RNA, 19 nt, Homo sapiens
  misc_RNA (1)...(19): siRNA sense strand
gcacauggauggauaaaau

SEQ ID NO: 47376 - RNA, 19 nt, Homo sapiens
  misc_RNA (1)...(19): siRNA sense strand
ucacguagcugaguacaug

SEQ ID NO: 47377 - RNA, 19 nt, Homo sapiens
  misc_RNA (1)...(19): siRNA sense strand
gcacaugcccuguuuaugg

SEQ ID NO: 47378 - RNA, 19 nt, Homo sapiens
  misc_RNA (1)...(19): siRNA sense strand
gauccaaaccaacaccuua

SEQ ID NO: 47379 - RNA, 19 nt, Homo sapiens
  misc_RNA (1)...(19): siRNA sense strand
gaaaagcaguuaccgugua

SEQ ID NO: 47380 - RNA, 19 nt, Homo sapiens
  misc_RNA (1)...(19): siRNA sense strand
gauaugaacauugcacuaa

SEQ ID NO: 47381 - RNA, 19 nt, Homo sapiens
  misc_RNA (1)...(19): siRNA sense strand
gaaauugugggccugagua

SEQ ID NO: 47382 - RNA, 19 nt, Homo sapiens
  misc_RNA (1)...(19): siRNA sense strand
caaaagggcccaaugaaua

SEQ ID NO: 47383 - RNA, 19 nt, Homo sapiens
  misc_RNA (1)...(19): siRNA sense strand
caaagcgguugagcaauuu

SEQ ID NO: 47384 - RNA, 19 nt, Homo sapiens
  misc_RNA (1)...(19): siRNA sense strand
gcuaaagguuucaauuauc

SEQ ID NO: 47385 - RNA, 19 nt, Homo sapiens
  misc_RNA (1)...(19): siRNA sense strand
gaucagccauuguuugaag

SEQ ID NO: 47386 - RNA, 19 nt, Homo sapiens
  misc_RNA (1)...(19): siRNA sense strand
ggugguggcugcaguguau

SEQ ID NO: 47387 - RNA, 19 nt, Homo sapiens
  misc_RNA (1)...(19): siRNA sense strand
ggcauggucucauuccuaa

SEQ ID NO: 47388 - RNA, 19 nt, Homo sapiens
  misc_RNA (1)...(19): siRNA sense strand
gcaauguuguguuucucua

SEQ ID NO: 47389 - RNA, 19 nt, Homo sapiens
  misc_RNA (1)...(19): siRNA sense strand
ggucagcccuuaaauaugc

SEQ ID NO: 47390 - RNA, 19 nt, Homo sapiens
  misc_RNA (1)...(19): siRNA sense strand
acaauucaguccucacuuu

SEQ ID NO: 47391 - RNA, 19 nt, Homo sapiens
  misc_RNA (1)...(19): siRNA sense strand
cuagaacuauugagagaaa

SEQ ID NO: 47392 - RNA, 19 nt, Homo sapiens
  misc_RNA (1)...(19): siRNA sense strand
gaaugggaaagcagacuua

SEQ ID NO: 47393 - RNA, 19 nt, Homo sapiens
  misc_RNA (1)...(19): siRNA sense strand
auaaaggucucauaugaug

SEQ ID NO: 47394 - RNA, 19 nt, Homo sapiens
  misc_RNA (1)...(19): siRNA sense strand
gcaguuaccguguauacaa

SEQ ID NO: 47395 - RNA, 19 nt, Homo sapiens
  misc_RNA (1)...(19): siRNA sense strand
gccaaucaguuagaauuaa

SEQ ID NO: 47396 - RNA, 19 nt, Homo sapiens
  misc_RNA (1)...(19): siRNA sense strand
caacagaaagagaagauga

SEQ ID NO: 47397 - RNA, 19 nt, Homo sapiens
  misc_RNA (1)...(19): siRNA sense strand
gaagcuagaacuauugaga

SEQ ID NO: 47398 - RNA, 19 nt, Homo sapiens
  misc_RNA (1)...(19): siRNA sense strand
gagaggcaaugagugcaua

SEQ ID NO: 47399 - RNA, 19 nt, Homo sapiens
  misc_RNA (1)...(19): siRNA sense strand
ccaaugagaaugcccagua

SEQ ID NO: 47400 - RNA, 19 nt, Homo sapiens
  misc_RNA (1)...(19): siRNA sense strand
gaaagugacagagcuagaa

SEQ ID NO: 47401 - RNA, 19 nt, Homo sapiens
  misc_RNA (1)...(19): siRNA sense strand
gcugcaggcuuaccucauu

SEQ ID NO: 47402 - RNA, 19 nt, Homo sapiens
  misc_RNA (1)...(19): siRNA sense strand
ucucuugccuccagauuaa

SEQ ID NO: 47403 - RNA, 19 nt, Homo sapiens
  misc_RNA (1)...(19): siRNA sense strand
ggaugagaauucaaucaau

SEQ ID NO: 47404 - RNA, 19 nt, Homo sapiens
  misc_RNA (1)...(19): siRNA sense strand
agagaaacacgaaaccuua

SEQ ID NO: 47405 - RNA, 19 nt, Homo sapiens
  misc_RNA (1)...(19): siRNA sense strand
cagcagcaauugaagaaug

SEQ ID NO: 47406 - RNA, 19 nt, Homo sapiens
  misc_RNA (1)...(19): siRNA sense strand
gccauuguuugaagucaua

SEQ ID NO: 47407 - RNA, 19 nt, Homo sapiens
  misc_RNA (1)...(19): siRNA sense strand
gagcuacaguuccgauuag

SEQ ID NO: 47408 - RNA, 19 nt, Homo sapiens
  misc_RNA (1)...(19): siRNA sense strand
gcuacucccuugccaauca

SEQ ID NO: 47409 - RNA, 19 nt, Homo sapiens
  misc_RNA (1)...(19): siRNA sense strand
uuccagaacugaccaauga

SEQ ID NO: 47410 - RNA, 19 nt, Homo sapiens
  misc_RNA (1)...(19): siRNA sense strand
agagguauacugcugauua

SEQ ID NO: 47411 - RNA, 19 nt, Homo sapiens
  misc_RNA (1)...(19): siRNA sense strand
gucaguaaccggcuuauuu

SEQ ID NO: 47412 - RNA, 19 nt, Homo sapiens
  misc_RNA (1)...(19): siRNA sense strand
uccaggaaguguuauuaua

SEQ ID NO: 47413 - RNA, 19 nt, Homo sapiens
  misc_RNA (1)...(19): siRNA sense strand
gaaugauguuggacagcua

SEQ ID NO: 47414 - RNA, 19 nt, Homo sapiens
  misc_RNA (1)...(19): siRNA sense strand
ccgauuaggcccaacuuua

SEQ ID NO: 47415 - RNA, 19 nt, Homo sapiens
  misc_RNA (1)...(19): siRNA sense strand
cagaugauaugguuuacug

SEQ ID NO: 47416 - RNA, 19 nt, Homo sapiens
  misc_RNA (1)...(19): siRNA sense strand
ggaaggaugagaauucaau

SEQ ID NO: 47417 - RNA, 19 nt, Homo sapiens
  misc_RNA (1)...(19): siRNA sense strand
gaagacauaguggcaguaa

SEQ ID NO: 47418 - RNA, 19 nt, Homo sapiens
  misc_RNA (1)...(19): siRNA sense strand
aaauuacgcuaugggaaua

SEQ ID NO: 47419 - RNA, 19 nt, Homo sapiens
  misc_RNA (1)...(19): siRNA sense strand
ucaagauccugaauacaga

SEQ ID NO: 47420 - RNA, 19 nt, Homo sapiens
  misc_RNA (1)...(19): siRNA sense strand
caucagauuucagugguuu

SEQ ID NO: 47421 - RNA, 19 nt, Homo sapiens
  misc_RNA (1)...(19): siRNA sense strand
gaauaccugcuuugauuga

SEQ ID NO: 47422 - RNA, 19 nt, Homo sapiens
  misc_RNA (1)...(19): siRNA sense strand
ggaaagcuuuggagauugc

SEQ ID NO: 47423 - RNA, 19 nt, Homo sapiens
  misc_RNA (1)...(19): siRNA sense strand
ggagcaauguuguguuucu

SEQ ID NO: 47424 - RNA, 19 nt, Homo sapiens
  misc_RNA (1)...(19): siRNA sense strand
ugacaaugcagauccuaua

SEQ ID NO: 47425 - RNA, 19 nt, Homo sapiens
  misc_RNA (1)...(19): siRNA sense strand
aaccaacaccuuacgauua

SEQ ID NO: 47426 - RNA, 19 nt, Homo sapiens
  misc_RNA (1)...(19): siRNA sense strand
aaggagcaauguuguguuu

SEQ ID NO: 47427 - RNA, 19 nt, Homo sapiens
  misc_RNA (1)...(19): siRNA sense strand
gaaaucaucugacacaauu

SEQ ID NO: 47428 - RNA, 19 nt, Homo sapiens
  misc_RNA (1)...(19): siRNA sense strand
gcaacaaucugguucauuu

SEQ ID NO: 47429 - RNA, 19 nt, Homo sapiens
  misc_RNA (1)...(19): siRNA sense strand
caaugcagauccuauauua

SEQ ID NO: 47430 - RNA, 19 nt, Homo sapiens
  misc_RNA (1)...(19): siRNA sense strand
gggaauaccugcuuugauu

SEQ ID NO: 47431 - RNA, 19 nt, Homo sapiens
  misc_RNA (1)...(19): siRNA sense strand
gggagacaguguuaaauua

SEQ ID NO: 47432 - RNA, 19 nt, Homo sapiens
  misc_RNA (1)...(19): siRNA sense strand
ccaaguagaugucaacaaa

SEQ ID NO: 47433 - RNA, 19 nt, Homo sapiens
  misc_RNA (1)...(19): siRNA sense strand
gaaauaagaccaaagaaug

SEQ ID NO: 47434 - RNA, 19 nt, Homo sapiens
  misc_RNA (1)...(19): siRNA sense strand
gauaaugaguguccuauug

SEQ ID NO: 47435 - RNA, 19 nt, Homo sapiens
  misc_RNA (1)...(19): siRNA sense strand
gaagggaaauacaaagaaa

SEQ ID NO: 47436 - RNA, 19 nt, Homo sapiens
  misc_RNA (1)...(19): siRNA sense strand
gaagagggcagauuaguuu

SEQ ID NO: 47437 - RNA, 19 nt, Homo sapiens
  misc_RNA (1)...(19): siRNA sense strand
gcaaugagugcauauaaua

SEQ ID NO: 47438 - RNA, 19 nt, Homo sapiens
  misc_RNA (1)...(19): siRNA sense strand
gagaacauauucagcuuaa

SEQ ID NO: 47439 - RNA, 19 nt, Homo sapiens
  misc_RNA (1)...(19): siRNA sense strand
ggacgaagguuuuaauaua

SEQ ID NO: 47440 - RNA, 19 nt, Homo sapiens
  misc_RNA (1)...(19): siRNA sense strand
ugacagagcuagaaacaga

SEQ ID NO: 47441 - RNA, 19 nt, Homo sapiens
  misc_RNA (1)...(19): siRNA sense strand
ggagaaacauuuaauagag

SEQ ID NO: 47442 - RNA, 19 nt, Homo sapiens
  misc_RNA (1)...(19): siRNA sense strand
gagauuggaugauugacua

SEQ ID NO: 47443 - RNA, 19 nt, Homo sapiens
  misc_RNA (1)...(19): siRNA sense strand
guagaagccaggaauauua

SEQ ID NO: 47444 - RNA, 19 nt, Homo sapiens
  misc_RNA (1)...(19): siRNA sense strand
ccagauagaucgaaacaug

SEQ ID NO: 47445 - RNA, 19 nt, Homo sapiens
  misc_RNA (1)...(19): siRNA sense strand
gugaagaucuggacaaugu

SEQ ID NO: 47446 - RNA, 19 nt, Homo sapiens
  misc_RNA (1)...(19): siRNA sense strand
cuauaaaggucucauauga

SEQ ID NO: 47447 - RNA, 19 nt, Homo sapiens
  misc_RNA (1)...(19): siRNA sense strand
gcaaggaagugccucaaau

SEQ ID NO: 47448 - RNA, 19 nt, Homo sapiens
  misc_RNA (1)...(19): siRNA sense strand
gaaaguauaccuggaauga

SEQ ID NO: 47449 - RNA, 19 nt, Homo sapiens
  misc_RNA (1)...(19): siRNA sense strand
ugaagcagaucccacguua

SEQ ID NO: 47450 - RNA, 19 nt, Homo sapiens
  misc_RNA (1)...(19): siRNA sense strand
gcagauuaguuuaccgaua

SEQ ID NO: 47451 - RNA, 19 nt, Homo sapiens
  misc_RNA (1)...(19): siRNA sense strand
gaagaaugcuguaauuggu

SEQ ID NO: 47452 - RNA, 19 nt, Homo sapiens
  misc_RNA (1)...(19): siRNA sense strand
ggaauggaauguuauuugu

SEQ ID NO: 47453 - RNA, 19 nt, Homo sapiens
  misc_RNA (1)...(19): siRNA sense strand
gaaugugccuauaaucuug

SEQ ID NO: 47454 - RNA, 19 nt, Homo sapiens
  misc_RNA (1)...(19): siRNA sense strand
acacaagccuggucaauug

SEQ ID NO: 47455 - RNA, 19 nt, Homo sapiens
  misc_RNA (1)...(19): siRNA sense strand
ccuauaaucuugugaauuc

SEQ ID NO: 47456 - RNA, 19 nt, Homo sapiens
  misc_RNA (1)...(19): siRNA sense strand
gaacauauucagcuuaaug

SEQ ID NO: 47457 - RNA, 19 nt, Homo sapiens
  misc_RNA (1)...(19): siRNA sense strand
caacuacaaucuugcuaaa

SEQ ID NO: 47458 - RNA, 19 nt, Homo sapiens
  misc_RNA (1)...(19): siRNA sense strand
gaaaggacuuccagaacug

SEQ ID NO: 47459 - RNA, 19 nt, Homo sapiens
  misc_RNA (1)...(19): siRNA sense strand
gaaucaggcuacaacauga

SEQ ID NO: 47460 - RNA, 19 nt, Homo sapiens
  misc_RNA (1)...(19): siRNA sense strand
acaagucgcuguuggaauu

SEQ ID NO: 47461 - RNA, 19 nt, Homo sapiens
  misc_RNA (1)...(19): siRNA sense strand
aaacacaggugaaguuaau

SEQ ID NO: 47462 - RNA, 19 nt, Homo sapiens
  misc_RNA (1)...(19): siRNA sense strand
aagaggcuaugaugaauua

SEQ ID NO: 47463 - RNA, 19 nt, Homo sapiens
  misc_RNA (1)...(19): siRNA sense strand
guaaauggauccaggaaca

SEQ ID NO: 47464 - RNA, 19 nt, Homo sapiens
  misc_RNA (1)...(19): siRNA sense strand
ugauucaucugccaaauaa

SEQ ID NO: 47465 - RNA, 19 nt, Homo sapiens
  misc_RNA (1)...(19): siRNA sense strand
gaugagaauucaaucaaug

SEQ ID NO: 47466 - RNA, 19 nt, Homo sapiens
  misc_RNA (1)...(19): siRNA sense strand
gcaacccaauuuauaugua

SEQ ID NO: 47467 - RNA, 19 nt, Homo sapiens
  misc_RNA (1)...(19): siRNA sense strand
acaaagcgguugagcaauu

SEQ ID NO: 47468 - RNA, 19 nt, Homo sapiens
  misc_RNA (1)...(19): siRNA sense strand
gagaagcaucgacucauua

SEQ ID NO: 47469 - RNA, 19 nt, Homo sapiens
  misc_RNA (1)...(19): siRNA sense strand
guaaaugguugcaggcuau

SEQ ID NO: 47470 - RNA, 19 nt, Homo sapiens
  misc_RNA (1)...(19): siRNA sense strand
gaagaacgguuuuacacua

SEQ ID NO: 47471 - RNA, 19 nt, Homo sapiens
  misc_RNA (1)...(19): siRNA sense strand
cagauuaguuuaccgauau

SEQ ID NO: 47472 - RNA, 19 nt, Homo sapiens
  misc_RNA (1)...(19): siRNA sense strand
gagaugauccucuucgaaa

SEQ ID NO: 47473 - RNA, 19 nt, Homo sapiens
  misc_RNA (1)...(19): siRNA sense strand
gcagaaauaagaccaaaga

SEQ ID NO: 47474 - RNA, 19 nt, Homo sapiens
  misc_RNA (1)...(19): siRNA sense strand
ucacaaacguggcauauac

SEQ ID NO: 47475 - RNA, 19 nt, Homo sapiens
  misc_RNA (1)...(19): siRNA sense strand
gcacauggauggauaaaau

SEQ ID NO: 47476 - RNA, 19 nt, Homo sapiens
  misc_RNA (1)...(19): siRNA sense strand
ucacguagcugaguacaug

SEQ ID NO: 47477 - RNA, 19 nt, Homo sapiens
  misc_RNA (1)...(19): siRNA sense strand
gcacaugcccuguuuaugg

SEQ ID NO: 47478 - RNA, 19 nt, Homo sapiens
  misc_RNA (1)...(19): siRNA sense strand
gauccaaaccaacaccuua

SEQ ID NO: 47479 - RNA, 19 nt, Homo sapiens
  misc_RNA (1)...(19): siRNA sense strand
gaaaagcaguuaccgugua

SEQ ID NO: 47480 - RNA, 19 nt, Homo sapiens
  misc_RNA (1)...(19): siRNA sense strand
gauaugaacauugcacuaa

SEQ ID NO: 47481 - RNA, 19 nt, Homo sapiens
  misc_RNA (1)...(19): siRNA sense strand
gaaauugugggccugagua

SEQ ID NO: 47482 - RNA, 19 nt, Homo sapiens
  misc_RNA (1)...(19): siRNA sense strand
caaaagggcccaaugaaua

SEQ ID NO: 47483 - RNA, 19 nt, Homo sapiens
  misc_RNA (1)...(19): siRNA sense strand
caaagcgguugagcaauuu

SEQ ID NO: 47484 - RNA, 19 nt, Homo sapiens
  misc_RNA (1)...(19): siRNA sense strand
gcuaaagguuucaauuauc

SEQ ID NO: 47485 - RNA, 19 nt, Homo sapiens
  misc_RNA (1)...(19): siRNA sense strand
gaucagccauuguuugaag

SEQ ID NO: 47486 - RNA, 19 nt, Homo sapiens
  misc_RNA (1)...(19): siRNA sense strand
ggugguggcugcaguguau

SEQ ID NO: 47487 - RNA, 19 nt, Homo sapiens
  misc_RNA (1)...(19): siRNA sense strand
ggcauggucucauuccuaa

SEQ ID NO: 47488 - RNA, 19 nt, Homo sapiens
  misc_RNA (1)...(19): siRNA sense strand
gcaauguuguguuucucua

SEQ ID NO: 47489 - RNA, 19 nt, Homo sapiens
  misc_RNA (1)...(19): siRNA sense strand
ggucagcccuuaaauaugc

SEQ ID NO: 47490 - RNA, 19 nt, Homo sapiens
  misc_RNA (1)...(19): siRNA sense strand
acaauucaguccucacuuu

SEQ ID NO: 47491 - RNA, 19 nt, Homo sapiens
  misc_RNA (1)...(19): siRNA sense strand
cuagaacuauugagagaaa

SEQ ID NO: 47492 - RNA, 19 nt, Homo sapiens
  misc_RNA (1)...(19): siRNA sense strand
gaaugggaaagcagacuua

SEQ ID NO: 47493 - RNA, 19 nt, Homo sapiens
  misc_RNA (1)...(19): siRNA sense strand
auaaaggucucauaugaug

SEQ ID NO: 47494 - RNA, 19 nt, Homo sapiens
  misc_RNA (1)...(19): siRNA sense strand
gcaguuaccguguauacaa

SEQ ID NO: 47495 - RNA, 19 nt, Homo sapiens
  misc_RNA (1)...(19): siRNA sense strand
gccaaucaguuagaauuaa

SEQ ID NO: 47496 - RNA, 19 nt, Homo sapiens
  misc_RNA (1)...(19): siRNA sense strand
caacagaaagagaagauga

SEQ ID NO: 47497 - RNA, 19 nt, Homo sapiens
  misc_RNA (1)...(19): siRNA sense strand
gaagcuagaacuauugaga

SEQ ID NO: 47498 - RNA, 19 nt, Homo sapiens
  misc_RNA (1)...(19): siRNA sense strand
gagaggcaaugagugcaua

SEQ ID NO: 47499 - RNA, 19 nt, Homo sapiens
  misc_RNA (1)...(19): siRNA sense strand
ccaaugagaaugcccagua

SEQ ID NO: 47500 - RNA, 19 nt, Homo sapiens
  misc_RNA (1)...(19): siRNA sense strand
gaaagugacagagcuagaa

SEQ ID NO: 47501 - RNA, 19 nt, Homo sapiens
  misc_RNA (1)...(19): siRNA sense strand
gcugcaggcuuaccucauu

SEQ ID NO: 47502 - RNA, 19 nt, Homo sapiens
  misc_RNA (1)...(19): siRNA sense strand
ucucuugccuccagauuaa

SEQ ID NO: 47503 - RNA, 19 nt, Homo sapiens
  misc_RNA (1)...(19): siRNA sense strand
ggaugagaauucaaucaau

SEQ ID NO: 47504 - RNA, 19 nt, Homo sapiens
  misc_RNA (1)...(19): siRNA sense strand
agagaaacacgaaaccuua

SEQ ID NO: 47505 - RNA, 19 nt, Homo sapiens
  misc_RNA (1)...(19): siRNA sense strand
cagcagcaauugaagaaug

SEQ ID NO: 47506 - RNA, 19 nt, Homo sapiens
  misc_RNA (1)...(19): siRNA sense strand
gccauuguuugaagucaua

SEQ ID NO: 47507 - RNA, 19 nt, Homo sapiens
  misc_RNA (1)...(19): siRNA sense strand
gagcuacaguuccgauuag

SEQ ID NO: 47508 - RNA, 19 nt, Homo sapiens
  misc_RNA (1)...(19): siRNA sense strand
gcuacucccuugccaauca

SEQ ID NO: 47509 - RNA, 19 nt, Homo sapiens
  misc_RNA (1)...(19): siRNA sense strand
uuccagaacugaccaauga

SEQ ID NO: 47510 - RNA, 19 nt, Homo sapiens
  misc_RNA (1)...(19): siRNA sense strand
agagguauacugcugauua

SEQ ID NO: 47511 - RNA, 19 nt, Homo sapiens
  misc_RNA (1)...(19): siRNA sense strand
gucaguaaccggcuuauuu

SEQ ID NO: 47512 - RNA, 19 nt, Homo sapiens
  misc_RNA (1)...(19): siRNA sense strand
uccaggaaguguuauuaua

SEQ ID NO: 47513 - RNA, 19 nt, Homo sapiens
  misc_RNA (1)...(19): siRNA sense strand
gaaugauguuggacagcua

SEQ ID NO: 47514 - RNA, 19 nt, Homo sapiens
  misc_RNA (1)...(19): siRNA sense strand
ccgauuaggcccaacuuua

SEQ ID NO: 47515 - RNA, 19 nt, Homo sapiens
  misc_RNA (1)...(19): siRNA sense strand
cagaugauaugguuuacug

SEQ ID NO: 47516 - RNA, 19 nt, Homo sapiens
  misc_RNA (1)...(19): siRNA sense strand
ggaaggaugagaauucaau

SEQ ID NO: 47517 - RNA, 19 nt, Homo sapiens
  misc_RNA (1)...(19): siRNA sense strand
gaagacauaguggcaguaa

SEQ ID NO: 47518 - RNA, 19 nt, Homo sapiens
  misc_RNA (1)...(19): siRNA sense strand
aaauuacgcuaugggaaua

SEQ ID NO: 47519 - RNA, 19 nt, Homo sapiens
  misc_RNA (1)...(19): siRNA sense strand
ucaagauccugaauacaga

SEQ ID NO: 47520 - RNA, 19 nt, Homo sapiens
  misc_RNA (1)...(19): siRNA sense strand
caucagauuucagugguuu

SEQ ID NO: 47521 - RNA, 19 nt, Homo sapiens
  misc_RNA (1)...(19): siRNA sense strand
gaauaccugcuuugauuga

SEQ ID NO: 47522 - RNA, 19 nt, Homo sapiens
  misc_RNA (1)...(19): siRNA sense strand
ggaaagcuuuggagauugc

SEQ ID NO: 47523 - RNA, 19 nt, Homo sapiens
  misc_RNA (1)...(19): siRNA sense strand
ggagcaauguuguguuucu

SEQ ID NO: 47524 - RNA, 19 nt, Homo sapiens
  misc_RNA (1)...(19): siRNA sense strand
ugacaaugcagauccuaua

SEQ ID NO: 47525 - RNA, 19 nt, Homo sapiens
  misc_RNA (1)...(19): siRNA sense strand
aaccaacaccuuacgauua

SEQ ID NO: 47526 - RNA, 19 nt, Homo sapiens
  misc_RNA (1)...(19): siRNA sense strand
aaggagcaauguuguguuu

SEQ ID NO: 47527 - RNA, 19 nt, Homo sapiens
  misc_RNA (1)...(19): siRNA sense strand
gaaaucaucugacacaauu

SEQ ID NO: 47528 - RNA, 19 nt, Homo sapiens
  misc_RNA (1)...(19): siRNA sense strand
gcaacaaucugguucauuu

SEQ ID NO: 47529 - RNA, 19 nt, Homo sapiens
  misc_RNA (1)...(19): siRNA sense strand
caaugcagauccuauauua

SEQ ID NO: 47530 - RNA, 19 nt, Homo sapiens
  misc_RNA (1)...(19): siRNA sense strand
gggaauaccugcuuugauu

SEQ ID NO: 47531 - RNA, 19 nt, Homo sapiens
  misc_RNA (1)...(19): siRNA sense strand
gggagacaguguuaaauua

SEQ ID NO: 47532 - RNA, 19 nt, Homo sapiens
  misc_RNA (1)...(19): siRNA sense strand
ccaaguagaugucaacaaa

SEQ ID NO: 47533 - RNA, 19 nt, Homo sapiens
  misc_RNA (1)...(19): siRNA sense strand
gaaauaagaccaaagaaug

SEQ ID NO: 47534 - RNA, 19 nt, Homo sapiens
  misc_RNA (1)...(19): siRNA sense strand
gauaaugaguguccuauug

SEQ ID NO: 47535 - RNA, 19 nt, Homo sapiens
  misc_RNA (1)...(19): siRNA sense strand
gaagggaaauacaaagaaa

SEQ ID NO: 47536 - RNA, 19 nt, Homo sapiens
  misc_RNA (1)...(19): siRNA sense strand
gaagagggcagauuaguuu

SEQ ID NO: 47537 - RNA, 19 nt, Homo sapiens
  misc_RNA (1)...(19): siRNA sense strand
gcaaugagugcauauaaua

SEQ ID NO: 47538 - RNA, 19 nt, Homo sapiens
  misc_RNA (1)...(19): siRNA sense strand
gagaacauauucagcuuaa

SEQ ID NO: 47539 - RNA, 19 nt, Homo sapiens
  misc_RNA (1)...(19): siRNA sense strand
ggacgaagguuuuaauaua

SEQ ID NO: 47540 - RNA, 19 nt, Homo sapiens
  misc_RNA (1)...(19): siRNA sense strand
ugacagagcuagaaacaga

SEQ ID NO: 47541 - RNA, 19 nt, Homo sapiens
  misc_RNA (1)...(19): siRNA sense strand
ggagaaacauuuaauagag

SEQ ID NO: 47542 - RNA, 19 nt, Homo sapiens
  misc_RNA (1)...(19): siRNA sense strand
gagauuggaugauugacua

SEQ ID NO: 47543 - RNA, 19 nt, Homo sapiens
  misc_RNA (1)...(19): siRNA sense strand
guagaagccaggaauauua

SEQ ID NO: 47544 - RNA, 19 nt, Homo sapiens
  misc_RNA (1)...(19): siRNA sense strand
ccagauagaucgaaacaug

SEQ ID NO: 47545 - RNA, 19 nt, Homo sapiens
  misc_RNA (1)...(19): siRNA sense strand
gugaagaucuggacaaugu

SEQ ID NO: 47546 - RNA, 19 nt, Homo sapiens
  misc_RNA (1)...(19): siRNA sense strand
cuauaaaggucucauauga

SEQ ID NO: 47547 - RNA, 19 nt, Homo sapiens
  misc_RNA (1)...(19): siRNA sense strand
gcaaggaagugccucaaau

SEQ ID NO: 47548 - RNA, 19 nt, Homo sapiens
  misc_RNA (1)...(19): siRNA sense strand
gaaaguauaccuggaauga

SEQ ID NO: 47549 - RNA, 19 nt, Homo sapiens
  misc_RNA (1)...(19): siRNA sense strand
ugaagcagaucccacguua

SEQ ID NO: 47550 - RNA, 19 nt, Homo sapiens
  misc_RNA (1)...(19): siRNA sense strand
gcagauuaguuuaccgaua

SEQ ID NO: 47551 - RNA, 19 nt, Homo sapiens
  misc_RNA (1)...(19): siRNA sense strand
gaagaaugcuguaauuggu

SEQ ID NO: 47552 - RNA, 19 nt, Homo sapiens
  misc_RNA (1)...(19): siRNA sense strand
ggaauggaauguuauuugu

SEQ ID NO: 47553 - RNA, 19 nt, Homo sapiens
  misc_RNA (1)...(19): siRNA sense strand
gaaugugccuauaaucuug

SEQ ID NO: 47554 - RNA, 19 nt, Homo sapiens
  misc_RNA (1)...(19): siRNA sense strand
acacaagccuggucaauug

SEQ ID NO: 47555 - RNA, 19 nt, Homo sapiens
  misc_RNA (1)...(19): siRNA sense strand
ccuauaaucuugugaauuc

SEQ ID NO: 47556 - RNA, 19 nt, Homo sapiens
  misc_RNA (1)...(19): siRNA sense strand
gaacauauucagcuuaaug

SEQ ID NO: 47557 - RNA, 19 nt, Homo sapiens
  misc_RNA (1)...(19): siRNA sense strand
caacuacaaucuugcuaaa

SEQ ID NO: 47558 - RNA, 19 nt, Homo sapiens
  misc_RNA (1)...(19): siRNA sense strand
gaaaggacuuccagaacug

SEQ ID NO: 47559 - RNA, 19 nt, Homo sapiens
  misc_RNA (1)...(19): siRNA sense strand
gaaucaggcuacaacauga

SEQ ID NO: 47560 - RNA, 19 nt, Homo sapiens
  misc_RNA (1)...(19): siRNA sense strand
acaagucgcuguuggaauu

SEQ ID NO: 47561 - RNA, 19 nt, Homo sapiens
  misc_RNA (1)...(19): siRNA sense strand
aaacacaggugaaguuaau

SEQ ID NO: 47562 - RNA, 19 nt, Homo sapiens
  misc_RNA (1)...(19): siRNA sense strand
aagaggcuaugaugaauua

SEQ ID NO: 47563 - RNA, 19 nt, Homo sapiens
  misc_RNA (1)...(19): siRNA sense strand
guaaauggauccaggaaca

SEQ ID NO: 47564 - RNA, 19 nt, Homo sapiens
  misc_RNA (1)...(19): siRNA sense strand
ugauucaucugccaaauaa

SEQ ID NO: 47565 - RNA, 19 nt, Homo sapiens
  misc_RNA (1)...(19): siRNA sense strand
gaugagaauucaaucaaug

SEQ ID NO: 47566 - RNA, 19 nt, Homo sapiens
  misc_RNA (1)...(19): siRNA sense strand
gcaacccaauuuauaugua

SEQ ID NO: 47567 - RNA, 19 nt, Homo sapiens
  misc_RNA (1)...(19): siRNA sense strand
acaaagcgguugagcaauu

SEQ ID NO: 47568 - RNA, 19 nt, Homo sapiens
  misc_RNA (1)...(19): siRNA sense strand
gagaagcaucgacucauua

SEQ ID NO: 47569 - RNA, 19 nt, Homo sapiens
  misc_RNA (1)...(19): siRNA sense strand
guaaaugguugcaggcuau

SEQ ID NO: 47570 - RNA, 19 nt, Homo sapiens
  misc_RNA (1)...(19): siRNA sense strand
gaagaacgguuuuacacua

SEQ ID NO: 47571 - RNA, 19 nt, Homo sapiens
  misc_RNA (1)...(19): siRNA sense strand
cagauuaguuuaccgauau

SEQ ID NO: 47572 - RNA, 19 nt, Homo sapiens
  misc_RNA (1)...(19): siRNA sense strand
gagaugauccucuucgaaa

SEQ ID NO: 47573 - RNA, 19 nt, Homo sapiens
  misc_RNA (1)...(19): siRNA sense strand
gcagaaauaagaccaaaga

SEQ ID NO: 47574 - RNA, 19 nt, Homo sapiens
  misc_RNA (1)...(19): siRNA sense strand
ucacaaacguggcauauac

SEQ ID NO: 47575 - RNA, 19 nt, Homo sapiens
  misc_RNA (1)...(19): siRNA sense strand
gcacauggauggauaaaau

SEQ ID NO: 47576 - RNA, 19 nt, Homo sapiens
  misc_RNA (1)...(19): siRNA sense strand
ucacguagcugaguacaug

SEQ ID NO: 47577 - RNA, 19 nt, Homo sapiens
  misc_RNA (1)...(19): siRNA sense strand
gcacaugcccuguuuaugg

SEQ ID NO: 47578 - RNA, 19 nt, Homo sapiens
  misc_RNA (1)...(19): siRNA sense strand
gauccaaaccaacaccuua

SEQ ID NO: 47579 - RNA, 19 nt, Homo sapiens
  misc_RNA (1)...(19): siRNA sense strand
gaaaagcaguuaccgugua

SEQ ID NO: 47580 - RNA, 19 nt, Homo sapiens
  misc_RNA (1)...(19): siRNA sense strand
gauaugaacauugcacuaa

SEQ ID NO: 47581 - RNA, 19 nt, Homo sapiens
  misc_RNA (1)...(19): siRNA sense strand
gaaauugugggccugagua

SEQ ID NO: 47582 - RNA, 19 nt, Homo sapiens
  misc_RNA (1)...(19): siRNA sense strand
caaaagggcccaaugaaua

SEQ ID NO: 47583 - RNA, 19 nt, Homo sapiens
  misc_RNA (1)...(19): siRNA sense strand
caaagcgguugagcaauuu

SEQ ID NO: 47584 - RNA, 19 nt, Homo sapiens
  misc_RNA (1)...(19): siRNA sense strand
gcuaaagguuucaauuauc

SEQ ID NO: 47585 - RNA, 19 nt, Homo sapiens
  misc_RNA (1)...(19): siRNA sense strand
gaucagccauuguuugaag

SEQ ID NO: 47586 - RNA, 19 nt, Homo sapiens
  misc_RNA (1)...(19): siRNA sense strand
ggugguggcugcaguguau

SEQ ID NO: 47587 - RNA, 19 nt, Homo sapiens
  misc_RNA (1)...(19): siRNA sense strand
ggcauggucucauuccuaa

SEQ ID NO: 47588 - RNA, 19 nt, Homo sapiens
  misc_RNA (1)...(19): siRNA sense strand
gcaauguuguguuucucua

SEQ ID NO: 47589 - RNA, 19 nt, Homo sapiens
  misc_RNA (1)...(19): siRNA sense strand
ggucagcccuuaaauaugc

SEQ ID NO: 47590 - RNA, 19 nt, Homo sapiens
  misc_RNA (1)...(19): siRNA sense strand
acaauucaguccucacuuu

SEQ ID NO: 47591 - RNA, 19 nt, Homo sapiens
  misc_RNA (1)...(19): siRNA sense strand
cuagaacuauugagagaaa

SEQ ID NO: 47592 - RNA, 19 nt, Homo sapiens
  misc_RNA (1)...(19): siRNA sense strand
gaaugggaaagcagacuua

SEQ ID NO: 47593 - RNA, 19 nt, Homo sapiens
  misc_RNA (1)...(19): siRNA sense strand
auaaaggucucauaugaug

SEQ ID NO: 47594 - RNA, 19 nt, Homo sapiens
  misc_RNA (1)...(19): siRNA sense strand
gcaguuaccguguauacaa

SEQ ID NO: 47595 - RNA, 19 nt, Homo sapiens
  misc_RNA (1)...(19): siRNA sense strand
gccaaucaguuagaauuaa

SEQ ID NO: 47596 - RNA, 19 nt, Homo sapiens
  misc_RNA (1)...(19): siRNA sense strand
caacagaaagagaagauga

SEQ ID NO: 47597 - RNA, 19 nt, Homo sapiens
  misc_RNA (1)...(19): siRNA sense strand
gaagcuagaacuauugaga

SEQ ID NO: 47598 - RNA, 19 nt, Homo sapiens
  misc_RNA (1)...(19): siRNA sense strand
gagaggcaaugagugcaua

SEQ ID NO: 47599 - RNA, 19 nt, Homo sapiens
  misc_RNA (1)...(19): siRNA sense strand
ccaaugagaaugcccagua

SEQ ID NO: 47600 - RNA, 19 nt, Homo sapiens
  misc_RNA (1)...(19): siRNA sense strand
gaaagugacagagcuagaa

SEQ ID NO: 47601 - RNA, 19 nt, Homo sapiens
  misc_RNA (1)...(19): siRNA sense strand
gcugcaggcuuaccucauu

SEQ ID NO: 47602 - RNA, 19 nt, Homo sapiens
  misc_RNA (1)...(19): siRNA sense strand
ucucuugccuccagauuaa

SEQ ID NO: 47603 - RNA, 19 nt, Homo sapiens
  misc_RNA (1)...(19): siRNA sense strand
ggaugagaauucaaucaau

SEQ ID NO: 47604 - RNA, 19 nt, Homo sapiens
  misc_RNA (1)...(19): siRNA sense strand
agagaaacacgaaaccuua

SEQ ID NO: 47605 - RNA, 19 nt, Homo sapiens
  misc_RNA (1)...(19): siRNA sense strand
cagcagcaauugaagaaug

SEQ ID NO: 47606 - RNA, 19 nt, Homo sapiens
  misc_RNA (1)...(19): siRNA sense strand
gccauuguuugaagucaua

SEQ ID NO: 47607 - RNA, 19 nt, Homo sapiens
  misc_RNA (1)...(19): siRNA sense strand
gagcuacaguuccgauuag

SEQ ID NO: 47608 - RNA, 19 nt, Homo sapiens
  misc_RNA (1)...(19): siRNA sense strand
gcuacucccuugccaauca

SEQ ID NO: 47609 - RNA, 19 nt, Homo sapiens
  misc_RNA (1)...(19): siRNA sense strand
uuccagaacugaccaauga

SEQ ID NO: 47610 - RNA, 19 nt, Homo sapiens
  misc_RNA (1)...(19): siRNA sense strand
agagguauacugcugauua

SEQ ID NO: 47611 - RNA, 19 nt, Homo sapiens
  misc_RNA (1)...(19): siRNA sense strand
gucaguaaccggcuuauuu

SEQ ID NO: 47612 - RNA, 19 nt, Homo sapiens
  misc_RNA (1)...(19): siRNA sense strand
uccaggaaguguuauuaua

SEQ ID NO: 47613 - RNA, 19 nt, Homo sapiens
  misc_RNA (1)...(19): siRNA sense strand
gaaugauguuggacagcua

SEQ ID NO: 47614 - RNA, 19 nt, Homo sapiens
  misc_RNA (1)...(19): siRNA sense strand
ccgauuaggcccaacuuua

SEQ ID NO: 47615 - RNA, 19 nt, Homo sapiens
  misc_RNA (1)...(19): siRNA sense strand
cagaugauaugguuuacug

SEQ ID NO: 47616 - RNA, 19 nt, Homo sapiens
  misc_RNA (1)...(19): siRNA sense strand
ggaaggaugagaauucaau

SEQ ID NO: 47617 - RNA, 19 nt, Homo sapiens
  misc_RNA (1)...(19): siRNA sense strand
gaagacauaguggcaguaa

SEQ ID NO: 47618 - RNA, 19 nt, Homo sapiens
  misc_RNA (1)...(19): siRNA sense strand
aaauuacgcuaugggaaua

SEQ ID NO: 47619 - RNA, 19 nt, Homo sapiens
  misc_RNA (1)...(19): siRNA sense strand
ucaagauccugaauacaga

SEQ ID NO: 47620 - RNA, 19 nt, Homo sapiens
  misc_RNA (1)...(19): siRNA sense strand
caucagauuucagugguuu

SEQ ID NO: 47621 - RNA, 19 nt, Homo sapiens
  misc_RNA (1)...(19): siRNA sense strand
gaauaccugcuuugauuga

SEQ ID NO: 47622 - RNA, 19 nt, Homo sapiens
  misc_RNA (1)...(19): siRNA sense strand
ggaaagcuuuggagauugc

SEQ ID NO: 47623 - RNA, 19 nt, Homo sapiens
  misc_RNA (1)...(19): siRNA sense strand
ggagcaauguuguguuucu

SEQ ID NO: 47624 - RNA, 19 nt, Homo sapiens
  misc_RNA (1)...(19): siRNA sense strand
ugacaaugcagauccuaua

SEQ ID NO: 47625 - RNA, 19 nt, Homo sapiens
  misc_RNA (1)...(19): siRNA sense strand
aaccaacaccuuacgauua

SEQ ID NO: 47626 - RNA, 19 nt, Homo sapiens
  misc_RNA (1)...(19): siRNA sense strand
aaggagcaauguuguguuu

SEQ ID NO: 47627 - RNA, 19 nt, Homo sapiens
  misc_RNA (1)...(19): siRNA sense strand
gaaaucaucugacacaauu

SEQ ID NO: 47628 - RNA, 19 nt, Homo sapiens
  misc_RNA (1)...(19): siRNA sense strand
gcaacaaucugguucauuu

SEQ ID NO: 47629 - RNA, 19 nt, Homo sapiens
  misc_RNA (1)...(19): siRNA sense strand
caaugcagauccuauauua

SEQ ID NO: 47630 - RNA, 19 nt, Homo sapiens
  misc_RNA (1)...(19): siRNA sense strand
gggaauaccugcuuugauu

SEQ ID NO: 47631 - RNA, 19 nt, Homo sapiens
  misc_RNA (1)...(19): siRNA sense strand
gggagacaguguuaaauua

SEQ ID NO: 47632 - RNA, 19 nt, Homo sapiens
  misc_RNA (1)...(19): siRNA sense strand
ccaaguagaugucaacaaa

SEQ ID NO: 47633 - RNA, 19 nt, Homo sapiens
  misc_RNA (1)...(19): siRNA sense strand
gaaauaagaccaaagaaug

SEQ ID NO: 47634 - RNA, 19 nt, Homo sapiens
  misc_RNA (1)...(19): siRNA sense strand
gauaaugaguguccuauug

SEQ ID NO: 47635 - RNA, 19 nt, Homo sapiens
  misc_RNA (1)...(19): siRNA sense strand
gaagggaaauacaaagaaa

SEQ ID NO: 47636 - RNA, 19 nt, Homo sapiens
  misc_RNA (1)...(19): siRNA sense strand
gaagagggcagauuaguuu

SEQ ID NO: 47637 - RNA, 19 nt, Homo sapiens
  misc_RNA (1)...(19): siRNA sense strand
gcaaugagugcauauaaua

SEQ ID NO: 47638 - RNA, 19 nt, Homo sapiens
  misc_RNA (1)...(19): siRNA sense strand
gagaacauauucagcuuaa

SEQ ID NO: 47639 - RNA, 19 nt, Homo sapiens
  misc_RNA (1)...(19): siRNA sense strand
ggacgaagguuuuaauaua

SEQ ID NO: 47640 - RNA, 19 nt, Homo sapiens
  misc_RNA (1)...(19): siRNA sense strand
ugacagagcuagaaacaga

SEQ ID NO: 47641 - RNA, 19 nt, Homo sapiens
  misc_RNA (1)...(19): siRNA sense strand
ggagaaacauuuaauagag

SEQ ID NO: 47642 - RNA, 19 nt, Homo sapiens
  misc_RNA (1)...(19): siRNA sense strand
gagauuggaugauugacua

SEQ ID NO: 47643 - RNA, 19 nt, Homo sapiens
  misc_RNA (1)...(19): siRNA sense strand
guagaagccaggaauauua

SEQ ID NO: 47644 - RNA, 19 nt, Homo sapiens
  misc_RNA (1)...(19): siRNA sense strand
ccagauagaucgaaacaug

SEQ ID NO: 47645 - RNA, 19 nt, Homo sapiens
  misc_RNA (1)...(19): siRNA sense strand
gugaagaucuggacaaugu

SEQ ID NO: 47646 - RNA, 19 nt, Homo sapiens
  misc_RNA (1)...(19): siRNA sense strand
cuauaaaggucucauauga

SEQ ID NO: 47647 - RNA, 19 nt, Homo sapiens
  misc_RNA (1)...(19): siRNA sense strand
gcaaggaagugccucaaau

SEQ ID NO: 47648 - RNA, 19 nt, Homo sapiens
  misc_RNA (1)...(19): siRNA sense strand
gaaaguauaccuggaauga

SEQ ID NO: 47649 - RNA, 19 nt, Homo sapiens
  misc_RNA (1)...(19): siRNA sense strand
ugaagcagaucccacguua

SEQ ID NO: 47650 - RNA, 19 nt, Homo sapiens
  misc_RNA (1)...(19): siRNA sense strand
gcagauuaguuuaccgaua

SEQ ID NO: 47651 - RNA, 19 nt, Homo sapiens
  misc_RNA (1)...(19): siRNA sense strand
gaagaaugcuguaauuggu

SEQ ID NO: 47652 - RNA, 19 nt, Homo sapiens
  misc_RNA (1)...(19): siRNA sense strand
ggaauggaauguuauuugu

SEQ ID NO: 47653 - RNA, 19 nt, Homo sapiens
  misc_RNA (1)...(19): siRNA sense strand
gaaugugccuauaaucuug

SEQ ID NO: 47654 - RNA, 19 nt, Homo sapiens
  misc_RNA (1)...(19): siRNA sense strand
acacaagccuggucaauug

SEQ ID NO: 47655 - RNA, 19 nt, Homo sapiens
  misc_RNA (1)...(19): siRNA sense strand
ccuauaaucuugugaauuc

SEQ ID NO: 47656 - RNA, 19 nt, Homo sapiens
  misc_RNA (1)...(19): siRNA sense strand
gaacauauucagcuuaaug

SEQ ID NO: 47657 - RNA, 19 nt, Homo sapiens
  misc_RNA (1)...(19): siRNA sense strand
caacuacaaucuugcuaaa

SEQ ID NO: 47658 - RNA, 19 nt, Homo sapiens
  misc_RNA (1)...(19): siRNA sense strand
gaaaggacuuccagaacug

SEQ ID NO: 47659 - RNA, 19 nt, Homo sapiens
  misc_RNA (1)...(19): siRNA sense strand
gaaucaggcuacaacauga

SEQ ID NO: 47660 - RNA, 19 nt, Homo sapiens
  misc_RNA (1)...(19): siRNA sense strand
acaagucgcuguuggaauu

SEQ ID NO: 47661 - RNA, 19 nt, Homo sapiens
  misc_RNA (1)...(19): siRNA sense strand
aaacacaggugaaguuaau

SEQ ID NO: 47662 - RNA, 19 nt, Homo sapiens
  misc_RNA (1)...(19): siRNA sense strand
aagaggcuaugaugaauua

SEQ ID NO: 47663 - RNA, 19 nt, Homo sapiens
  misc_RNA (1)...(19): siRNA sense strand
guaaauggauccaggaaca

SEQ ID NO: 47664 - RNA, 19 nt, Homo sapiens
  misc_RNA (1)...(19): siRNA sense strand
ugauucaucugccaaauaa

SEQ ID NO: 47665 - RNA, 19 nt, Homo sapiens
  misc_RNA (1)...(19): siRNA sense strand
gaugagaauucaaucaaug

SEQ ID NO: 47666 - RNA, 19 nt, Homo sapiens
  misc_RNA (1)...(19): siRNA sense strand
gcaacccaauuuauaugua

SEQ ID NO: 47667 - RNA, 19 nt, Homo sapiens
  misc_RNA (1)...(19): siRNA sense strand
acaaagcgguugagcaauu

SEQ ID NO: 47668 - RNA, 19 nt, Homo sapiens
  misc_RNA (1)...(19): siRNA sense strand
gagaagcaucgacucauua

SEQ ID NO: 47669 - RNA, 19 nt, Homo sapiens
  misc_RNA (1)...(19): siRNA sense strand
guaaaugguugcaggcuau

SEQ ID NO: 47670 - RNA, 19 nt, Homo sapiens
  misc_RNA (1)...(19): siRNA sense strand
gaagaacgguuuuacacua

SEQ ID NO: 47671 - RNA, 19 nt, Homo sapiens
  misc_RNA (1)...(19): siRNA sense strand
cagauuaguuuaccgauau

SEQ ID NO: 47672 - RNA, 19 nt, Homo sapiens
  misc_RNA (1)...(19): siRNA sense strand
gagaugauccucuucgaaa

SEQ ID NO: 47673 - RNA, 19 nt, Homo sapiens
  misc_RNA (1)...(19): siRNA sense strand
gcagaaauaagaccaaaga

SEQ ID NO: 47674 - RNA, 19 nt, Homo sapiens
  misc_RNA (1)...(19): siRNA sense strand
ucacaaacguggcauauac

SEQ ID NO: 47675 - RNA, 19 nt, Homo sapiens
  misc_RNA (1)...(19): siRNA sense strand
gcacauggauggauaaaau

SEQ ID NO: 47676 - RNA, 19 nt, Homo sapiens
  misc_RNA (1)...(19): siRNA sense strand
ucacguagcugaguacaug

SEQ ID NO: 47677 - RNA, 19 nt, Homo sapiens
  misc_RNA (1)...(19): siRNA sense strand
gcacaugcccuguuuaugg

SEQ ID NO: 47678 - RNA, 19 nt, Homo sapiens
  misc_RNA (1)...(19): siRNA sense strand
gauccaaaccaacaccuua

SEQ ID NO: 47679 - RNA, 19 nt, Homo sapiens
  misc_RNA (1)...(19): siRNA sense strand
gaaaagcaguuaccgugua

SEQ ID NO: 47680 - RNA, 19 nt, Homo sapiens
  misc_RNA (1)...(19): siRNA sense strand
gauaugaacauugcacuaa

SEQ ID NO: 47681 - RNA, 19 nt, Homo sapiens
  misc_RNA (1)...(19): siRNA sense strand
gaaauugugggccugagua

SEQ ID NO: 47682 - RNA, 19 nt, Homo sapiens
  misc_RNA (1)...(19): siRNA sense strand
caaaagggcccaaugaaua

SEQ ID NO: 47683 - RNA, 19 nt, Homo sapiens
  misc_RNA (1)...(19): siRNA sense strand
caaagcgguugagcaauuu

SEQ ID NO: 47684 - RNA, 19 nt, Homo sapiens
  misc_RNA (1)...(19): siRNA sense strand
gcuaaagguuucaauuauc

SEQ ID NO: 47685 - RNA, 19 nt, Homo sapiens
  misc_RNA (1)...(19): siRNA sense strand
gaucagccauuguuugaag

SEQ ID NO: 47686 - RNA, 19 nt, Homo sapiens
  misc_RNA (1)...(19): siRNA sense strand
ggugguggcugcaguguau

SEQ ID NO: 47687 - RNA, 19 nt, Homo sapiens
  misc_RNA (1)...(19): siRNA sense strand
ggcauggucucauuccuaa

SEQ ID NO: 47688 - RNA, 19 nt, Homo sapiens
  misc_RNA (1)...(19): siRNA sense strand
gcaauguuguguuucucua

SEQ ID NO: 47689 - RNA, 19 nt, Homo sapiens
  misc_RNA (1)...(19): siRNA sense strand
ggucagcccuuaaauaugc

SEQ ID NO: 47690 - RNA, 19 nt, Homo sapiens
  misc_RNA (1)...(19): siRNA sense strand
acaauucaguccucacuuu

SEQ ID NO: 47691 - RNA, 19 nt, Homo sapiens
  misc_RNA (1)...(19): siRNA sense strand
cuagaacuauugagagaaa

SEQ ID NO: 47692 - RNA, 19 nt, Homo sapiens
  misc_RNA (1)...(19): siRNA sense strand
gaaugggaaagcagacuua

SEQ ID NO: 47693 - RNA, 19 nt, Homo sapiens
  misc_RNA (1)...(19): siRNA sense strand
auaaaggucucauaugaug

SEQ ID NO: 47694 - RNA, 19 nt, Homo sapiens
  misc_RNA (1)...(19): siRNA sense strand
gcaguuaccguguauacaa

SEQ ID NO: 47695 - RNA, 19 nt, Homo sapiens
  misc_RNA (1)...(19): siRNA sense strand
gccaaucaguuagaauuaa

SEQ ID NO: 47696 - RNA, 19 nt, Homo sapiens
  misc_RNA (1)...(19): siRNA sense strand
caacagaaagagaagauga

SEQ ID NO: 47697 - RNA, 19 nt, Homo sapiens
  misc_RNA (1)...(19): siRNA sense strand
gaagcuagaacuauugaga

SEQ ID NO: 47698 - RNA, 19 nt, Homo sapiens
  misc_RNA (1)...(19): siRNA sense strand
gagaggcaaugagugcaua

SEQ ID NO: 47699 - RNA, 19 nt, Homo sapiens
  misc_RNA (1)...(19): siRNA sense strand
ccaaugagaaugcccagua

SEQ ID NO: 47700 - RNA, 19 nt, Homo sapiens
  misc_RNA (1)...(19): siRNA sense strand
gaaagugacagagcuagaa

SEQ ID NO: 47701 - RNA, 19 nt, Homo sapiens
  misc_RNA (1)...(19): siRNA sense strand
gcugcaggcuuaccucauu

SEQ ID NO: 47702 - RNA, 19 nt, Homo sapiens
  misc_RNA (1)...(19): siRNA sense strand
ucucuugccuccagauuaa

SEQ ID NO: 47703 - RNA, 19 nt, Homo sapiens
  misc_RNA (1)...(19): siRNA sense strand
ggaugagaauucaaucaau

SEQ ID NO: 47704 - RNA, 19 nt, Homo sapiens
  misc_RNA (1)...(19): siRNA sense strand
agagaaacacgaaaccuua

SEQ ID NO: 47705 - RNA, 19 nt, Homo sapiens
  misc_RNA (1)...(19): siRNA sense strand
cagcagcaauugaagaaug

SEQ ID NO: 47706 - RNA, 19 nt, Homo sapiens
  misc_RNA (1)...(19): siRNA sense strand
gccauuguuugaagucaua

SEQ ID NO: 47707 - RNA, 19 nt, Homo sapiens
  misc_RNA (1)...(19): siRNA sense strand
gagcuacaguuccgauuag

SEQ ID NO: 47708 - RNA, 19 nt, Homo sapiens
  misc_RNA (1)...(19): siRNA sense strand
gcuacucccuugccaauca

SEQ ID NO: 47709 - RNA, 19 nt, Homo sapiens
  misc_RNA (1)...(19): siRNA sense strand
uuccagaacugaccaauga

SEQ ID NO: 47710 - RNA, 19 nt, Homo sapiens
  misc_RNA (1)...(19): siRNA sense strand
agagguauacugcugauua

SEQ ID NO: 47711 - RNA, 19 nt, Homo sapiens
  misc_RNA (1)...(19): siRNA sense strand
gucaguaaccggcuuauuu

SEQ ID NO: 47712 - RNA, 19 nt, Homo sapiens
  misc_RNA (1)...(19): siRNA sense strand
uccaggaaguguuauuaua

SEQ ID NO: 47713 - RNA, 19 nt, Homo sapiens
  misc_RNA (1)...(19): siRNA sense strand
gaaugauguuggacagcua

SEQ ID NO: 47714 - RNA, 19 nt, Homo sapiens
  misc_RNA (1)...(19): siRNA sense strand
ccgauuaggcccaacuuua

SEQ ID NO: 47715 - RNA, 19 nt, Homo sapiens
  misc_RNA (1)...(19): siRNA sense strand
cagaugauaugguuuacug

SEQ ID NO: 47716 - RNA, 19 nt, Homo sapiens
  misc_RNA (1)...(19): siRNA sense strand
ggaaggaugagaauucaau

SEQ ID NO: 47717 - RNA, 19 nt, Homo sapiens
  misc_RNA (1)...(19): siRNA sense strand
gaagacauaguggcaguaa

SEQ ID NO: 47718 - RNA, 19 nt, Homo sapiens
  misc_RNA (1)...(19): siRNA sense strand
aaauuacgcuaugggaaua

SEQ ID NO: 47719 - RNA, 19 nt, Homo sapiens
  misc_RNA (1)...(19): siRNA sense strand
ucaagauccugaauacaga

SEQ ID NO: 47720 - RNA, 19 nt, Homo sapiens
  misc_RNA (1)...(19): siRNA sense strand
caucagauuucagugguuu

SEQ ID NO: 47721 - RNA, 19 nt, Homo sapiens
  misc_RNA (1)...(19): siRNA sense strand
gaauaccugcuuugauuga

SEQ ID NO: 47722 - RNA, 19 nt, Homo sapiens
  misc_RNA (1)...(19): siRNA sense strand
ggaaagcuuuggagauugc

SEQ ID NO: 47723 - RNA, 19 nt, Homo sapiens
  misc_RNA (1)...(19): siRNA sense strand
ggagcaauguuguguuucu

SEQ ID NO: 47724 - RNA, 19 nt, Homo sapiens
  misc_RNA (1)...(19): siRNA sense strand
ugacaaugcagauccuaua

SEQ ID NO: 47725 - RNA, 19 nt, Homo sapiens
  misc_RNA (1)...(19): siRNA sense strand
aaccaacaccuuacgauua

SEQ ID NO: 47726 - RNA, 19 nt, Homo sapiens
  misc_RNA (1)...(19): siRNA sense strand
aaggagcaauguuguguuu

SEQ ID NO: 47727 - RNA, 19 nt, Homo sapiens
  misc_RNA (1)...(19): siRNA sense strand
gaaaucaucugacacaauu

SEQ ID NO: 47728 - RNA, 19 nt, Homo sapiens
  misc_RNA (1)...(19): siRNA sense strand
gcaacaaucugguucauuu

SEQ ID NO: 47729 - RNA, 19 nt, Homo sapiens
  misc_RNA (1)...(19): siRNA sense strand
caaugcagauccuauauua

SEQ ID NO: 47730 - RNA, 19 nt, Homo sapiens
  misc_RNA (1)...(19): siRNA sense strand
gggaauaccugcuuugauu

SEQ ID NO: 47731 - RNA, 19 nt, Homo sapiens
  misc_RNA (1)...(19): siRNA sense strand
gggagacaguguuaaauua

SEQ ID NO: 47732 - RNA, 19 nt, Homo sapiens
  misc_RNA (1)...(19): siRNA sense strand
ccaaguagaugucaacaaa

SEQ ID NO: 47733 - RNA, 19 nt, Homo sapiens
  misc_RNA (1)...(19): siRNA sense strand
gaaauaagaccaaagaaug

SEQ ID NO: 47734 - RNA, 19 nt, Homo sapiens
  misc_RNA (1)...(19): siRNA sense strand
gauaaugaguguccuauug

SEQ ID NO: 47735 - RNA, 19 nt, Homo sapiens
  misc_RNA (1)...(19): siRNA sense strand
gaagggaaauacaaagaaa

SEQ ID NO: 47736 - RNA, 19 nt, Homo sapiens
  misc_RNA (1)...(19): siRNA sense strand
gaagagggcagauuaguuu

SEQ ID NO: 47737 - RNA, 19 nt, Homo sapiens
  misc_RNA (1)...(19): siRNA sense strand
gcaaugagugcauauaaua

SEQ ID NO: 47738 - RNA, 19 nt, Homo sapiens
  misc_RNA (1)...(19): siRNA sense strand
gagaacauauucagcuuaa

SEQ ID NO: 47739 - RNA, 19 nt, Homo sapiens
  misc_RNA (1)...(19): siRNA sense strand
ggacgaagguuuuaauaua

SEQ ID NO: 47740 - RNA, 19 nt, Homo sapiens
  misc_RNA (1)...(19): siRNA sense strand
ugacagagcuagaaacaga

SEQ ID NO: 47741 - RNA, 19 nt, Homo sapiens
  misc_RNA (1)...(19): siRNA sense strand
ggagaaacauuuaauagag

SEQ ID NO: 47742 - RNA, 19 nt, Homo sapiens
  misc_RNA (1)...(19): siRNA sense strand
gagauuggaugauugacua

SEQ ID NO: 47743 - RNA, 19 nt, Homo sapiens
  misc_RNA (1)...(19): siRNA sense strand
guagaagccaggaauauua

SEQ ID NO: 47744 - RNA, 19 nt, Homo sapiens
  misc_RNA (1)...(19): siRNA sense strand
ccagauagaucgaaacaug

SEQ ID NO: 47745 - RNA, 19 nt, Homo sapiens
  misc_RNA (1)...(19): siRNA sense strand
gugaagaucuggacaaugu

SEQ ID NO: 47746 - RNA, 19 nt, Homo sapiens
  misc_RNA (1)...(19): siRNA sense strand
cuauaaaggucucauauga

SEQ ID NO: 47747 - RNA, 19 nt, Homo sapiens
  misc_RNA (1)...(19): siRNA sense strand
gcaaggaagugccucaaau

SEQ ID NO: 47748 - RNA, 19 nt, Homo sapiens
  misc_RNA (1)...(19): siRNA sense strand
gaaaguauaccuggaauga

SEQ ID NO: 47749 - RNA, 19 nt, Homo sapiens
  misc_RNA (1)...(19): siRNA sense strand
ugaagcagaucccacguua

SEQ ID NO: 47750 - RNA, 19 nt, Homo sapiens
  misc_RNA (1)...(19): siRNA sense strand
gcagauuaguuuaccgaua

SEQ ID NO: 47751 - RNA, 19 nt, Homo sapiens
  misc_RNA (1)...(19): siRNA sense strand
gaagaaugcuguaauuggu

SEQ ID NO: 47752 - RNA, 19 nt, Homo sapiens
  misc_RNA (1)...(19): siRNA sense strand
ggaauggaauguuauuugu

SEQ ID NO: 47753 - RNA, 19 nt, Homo sapiens
  misc_RNA (1)...(19): siRNA sense strand
gaaugugccuauaaucuug

SEQ ID NO: 47754 - RNA, 19 nt, Homo sapiens
  misc_RNA (1)...(19): siRNA sense strand
acacaagccuggucaauug

SEQ ID NO: 47755 - RNA, 19 nt, Homo sapiens
  misc_RNA (1)...(19): siRNA sense strand
ccuauaaucuugugaauuc

SEQ ID NO: 47756 - RNA, 19 nt, Homo sapiens
  misc_RNA (1)...(19): siRNA sense strand
gaacauauucagcuuaaug

SEQ ID NO: 47757 - RNA, 19 nt, Homo sapiens
  misc_RNA (1)...(19): siRNA sense strand
caacuacaaucuugcuaaa

SEQ ID NO: 47758 - RNA, 19 nt, Homo sapiens
  misc_RNA (1)...(19): siRNA sense strand
gaaaggacuuccagaacug

SEQ ID NO: 47759 - RNA, 19 nt, Homo sapiens
  misc_RNA (1)...(19): siRNA sense strand
gaaucaggcuacaacauga

SEQ ID NO: 47760 - RNA, 19 nt, Homo sapiens
  misc_RNA (1)...(19): siRNA sense strand
acaagucgcuguuggaauu

SEQ ID NO: 47761 - RNA, 19 nt, Homo sapiens
  misc_RNA (1)...(19): siRNA sense strand
aaacacaggugaaguuaau

SEQ ID NO: 47762 - RNA, 19 nt, Homo sapiens
  misc_RNA (1)...(19): siRNA sense strand
aagaggcuaugaugaauua

SEQ ID NO: 47763 - RNA, 19 nt, Homo sapiens
  misc_RNA (1)...(19): siRNA sense strand
guaaauggauccaggaaca

SEQ ID NO: 47764 - RNA, 19 nt, Homo sapiens
  misc_RNA (1)...(19): siRNA sense strand
ugauucaucugccaaauaa

SEQ ID NO: 47765 - RNA, 19 nt, Homo sapiens
  misc_RNA (1)...(19): siRNA sense strand
gaugagaauucaaucaaug

SEQ ID NO: 47766 - RNA, 19 nt, Homo sapiens
  misc_RNA (1)...(19): siRNA sense strand
gcaacccaauuuauaugua

SEQ ID NO: 47767 - RNA, 19 nt, Homo sapiens
  misc_RNA (1)...(19): siRNA sense strand
acaaagcgguugagcaauu

SEQ ID NO: 47768 - RNA, 19 nt, Homo sapiens
  misc_RNA (1)...(19): siRNA sense strand
gagaagcaucgacucauua

SEQ ID NO: 47769 - RNA, 19 nt, Homo sapiens
  misc_RNA (1)...(19): siRNA sense strand
guaaaugguugcaggcuau

SEQ ID NO: 47770 - RNA, 19 nt, Homo sapiens
  misc_RNA (1)...(19): siRNA sense strand
gaagaacgguuuuacacua

SEQ ID NO: 47771 - RNA, 19 nt, Homo sapiens
  misc_RNA (1)...(19): siRNA sense strand
cagauuaguuuaccgauau

SEQ ID NO: 47772 - RNA, 19 nt, Homo sapiens
  misc_RNA (1)...(19): siRNA sense strand
gagaugauccucuucgaaa

SEQ ID NO: 47773 - RNA, 19 nt, Homo sapiens
  misc_RNA (1)...(19): siRNA sense strand
gcagaaauaagaccaaaga

SEQ ID NO: 47774 - RNA, 19 nt, Homo sapiens
  misc_RNA (1)...(19): siRNA sense strand
ucacaaacguggcauauac

SEQ ID NO: 47775 - RNA, 19 nt, Homo sapiens
  misc_RNA (1)...(19): siRNA sense strand
gcacauggauggauaaaau

SEQ ID NO: 47776 - RNA, 19 nt, Homo sapiens
  misc_RNA (1)...(19): siRNA sense strand
ucacguagcugaguacaug

SEQ ID NO: 47777 - RNA, 19 nt, Homo sapiens
  misc_RNA (1)...(19): siRNA sense strand
gcacaugcccuguuuaugg

SEQ ID NO: 47778 - RNA, 19 nt, Homo sapiens
  misc_RNA (1)...(19): siRNA sense strand
gauccaaaccaacaccuua

SEQ ID NO: 47779 - RNA, 19 nt, Homo sapiens
  misc_RNA (1)...(19): siRNA sense strand
gaaaagcaguuaccgugua

SEQ ID NO: 47780 - RNA, 19 nt, Homo sapiens
  misc_RNA (1)...(19): siRNA sense strand
gauaugaacauugcacuaa

SEQ ID NO: 47781 - RNA, 19 nt, Homo sapiens
  misc_RNA (1)...(19): siRNA sense strand
gaaauugugggccugagua

SEQ ID NO: 47782 - RNA, 19 nt, Homo sapiens
  misc_RNA (1)...(19): siRNA sense strand
caaaagggcccaaugaaua

SEQ ID NO: 47783 - RNA, 19 nt, Homo sapiens
  misc_RNA (1)...(19): siRNA sense strand
caaagcgguugagcaauuu

SEQ ID NO: 47784 - RNA, 19 nt, Homo sapiens
  misc_RNA (1)...(19): siRNA sense strand
gcuaaagguuucaauuauc

SEQ ID NO: 47785 - RNA, 19 nt, Homo sapiens
  misc_RNA (1)...(19): siRNA sense strand
gaucagccauuguuugaag

SEQ ID NO: 47786 - RNA, 19 nt, Homo sapiens
  misc_RNA (1)...(19): siRNA sense strand
ggugguggcugcaguguau

SEQ ID NO: 47787 - RNA, 19 nt, Homo sapiens
  misc_RNA (1)...(19): siRNA sense strand
ggcauggucucauuccuaa

SEQ ID NO: 47788 - RNA, 19 nt, Homo sapiens
  misc_RNA (1)...(19): siRNA sense strand
gcaauguuguguuucucua

SEQ ID NO: 47789 - RNA, 19 nt, Homo sapiens
  misc_RNA (1)...(19): siRNA sense strand
ggucagcccuuaaauaugc

SEQ ID NO: 47790 - RNA, 19 nt, Homo sapiens
  misc_RNA (1)...(19): siRNA sense strand
acaauucaguccucacuuu

SEQ ID NO: 47791 - RNA, 19 nt, Homo sapiens
  misc_RNA (1)...(19): siRNA sense strand
cuagaacuauugagagaaa

SEQ ID NO: 47792 - RNA, 19 nt, Homo sapiens
  misc_RNA (1)...(19): siRNA sense strand
gaaugggaaagcagacuua

SEQ ID NO: 47793 - RNA, 19 nt, Homo sapiens
  misc_RNA (1)...(19): siRNA sense strand
auaaaggucucauaugaug

SEQ ID NO: 47794 - RNA, 19 nt, Homo sapiens
  misc_RNA (1)...(19): siRNA sense strand
gcaguuaccguguauacaa

SEQ ID NO: 47795 - RNA, 19 nt, Homo sapiens
  misc_RNA (1)...(19): siRNA sense strand
gccaaucaguuagaauuaa

SEQ ID NO: 47796 - RNA, 19 nt, Homo sapiens
  misc_RNA (1)...(19): siRNA sense strand
caacagaaagagaagauga

SEQ ID NO: 47797 - RNA, 19 nt, Homo sapiens
  misc_RNA (1)...(19): siRNA sense strand
gaagcuagaacuauugaga

SEQ ID NO: 47798 - RNA, 19 nt, Homo sapiens
  misc_RNA (1)...(19): siRNA sense strand
gagaggcaaugagugcaua

SEQ ID NO: 47799 - RNA, 19 nt, Homo sapiens
  misc_RNA (1)...(19): siRNA sense strand
ccaaugagaaugcccagua

SEQ ID NO: 47800 - RNA, 19 nt, Homo sapiens
  misc_RNA (1)...(19): siRNA sense strand
gaaagugacagagcuagaa

SEQ ID NO: 47801 - RNA, 19 nt, Homo sapiens
  misc_RNA (1)...(19): siRNA sense strand
gcugcaggcuuaccucauu

SEQ ID NO: 47802 - RNA, 19 nt, Homo sapiens
  misc_RNA (1)...(19): siRNA sense strand
ucucuugccuccagauuaa

SEQ ID NO: 47803 - RNA, 19 nt, Homo sapiens
  misc_RNA (1)...(19): siRNA sense strand
ggaugagaauucaaucaau

SEQ ID NO: 47804 - RNA, 19 nt, Homo sapiens
  misc_RNA (1)...(19): siRNA sense strand
agagaaacacgaaaccuua

SEQ ID NO: 47805 - RNA, 19 nt, Homo sapiens
  misc_RNA (1)...(19): siRNA sense strand
cagcagcaauugaagaaug

SEQ ID NO: 47806 - RNA, 19 nt, Homo sapiens
  misc_RNA (1)...(19): siRNA sense strand
gccauuguuugaagucaua

SEQ ID NO: 47807 - RNA, 19 nt, Homo sapiens
  misc_RNA (1)...(19): siRNA sense strand
gagcuacaguuccgauuag

SEQ ID NO: 47808 - RNA, 19 nt, Homo sapiens
  misc_RNA (1)...(19): siRNA sense strand
gcuacucccuugccaauca

SEQ ID NO: 47809 - RNA, 19 nt, Homo sapiens
  misc_RNA (1)...(19): siRNA sense strand
uuccagaacugaccaauga

SEQ ID NO: 47810 - RNA, 19 nt, Homo sapiens
  misc_RNA (1)...(19): siRNA sense strand
agagguauacugcugauua

SEQ ID NO: 47811 - RNA, 19 nt, Homo sapiens
  misc_RNA (1)...(19): siRNA sense strand
gucaguaaccggcuuauuu

SEQ ID NO: 47812 - RNA, 19 nt, Homo sapiens
  misc_RNA (1)...(19): siRNA sense strand
uccaggaaguguuauuaua

SEQ ID NO: 47813 - RNA, 19 nt, Homo sapiens
  misc_RNA (1)...(19): siRNA sense strand
gaaugauguuggacagcua

SEQ ID NO: 47814 - RNA, 19 nt, Homo sapiens
  misc_RNA (1)...(19): siRNA sense strand
ccgauuaggcccaacuuua

SEQ ID NO: 47815 - RNA, 19 nt, Homo sapiens
  misc_RNA (1)...(19): siRNA sense strand
cagaugauaugguuuacug

SEQ ID NO: 47816 - RNA, 19 nt, Homo sapiens
  misc_RNA (1)...(19): siRNA sense strand
ggaaggaugagaauucaau

SEQ ID NO: 47817 - RNA, 19 nt, Homo sapiens
  misc_RNA (1)...(19): siRNA sense strand
gaagacauaguggcaguaa

SEQ ID NO: 47818 - RNA, 19 nt, Homo sapiens
  misc_RNA (1)...(19): siRNA sense strand
aaauuacgcuaugggaaua

SEQ ID NO: 47819 - RNA, 19 nt, Homo sapiens
  misc_RNA (1)...(19): siRNA sense strand
ucaagauccugaauacaga

SEQ ID NO: 47820 - RNA, 19 nt, Homo sapiens
  misc_RNA (1)...(19): siRNA sense strand
caucagauuucagugguuu

SEQ ID NO: 47821 - RNA, 19 nt, Homo sapiens
  misc_RNA (1)...(19): siRNA sense strand
gaauaccugcuuugauuga

SEQ ID NO: 47822 - RNA, 19 nt, Homo sapiens
  misc_RNA (1)...(19): siRNA sense strand
ggaaagcuuuggagauugc

SEQ ID NO: 47823 - RNA, 19 nt, Homo sapiens
  misc_RNA (1)...(19): siRNA sense strand
ggagcaauguuguguuucu

SEQ ID NO: 47824 - RNA, 19 nt, Homo sapiens
  misc_RNA (1)...(19): siRNA sense strand
ugacaaugcagauccuaua

SEQ ID NO: 47825 - RNA, 19 nt, Homo sapiens
  misc_RNA (1)...(19): siRNA sense strand
aaccaacaccuuacgauua

SEQ ID NO: 47826 - RNA, 19 nt, Homo sapiens
  misc_RNA (1)...(19): siRNA sense strand
aaggagcaauguuguguuu

SEQ ID NO: 47827 - RNA, 19 nt, Homo sapiens
  misc_RNA (1)...(19): siRNA sense strand
gaaaucaucugacacaauu

SEQ ID NO: 47828 - RNA, 19 nt, Homo sapiens
  misc_RNA (1)...(19): siRNA sense strand
gcaacaaucugguucauuu

SEQ ID NO: 47829 - RNA, 19 nt, Homo sapiens
  misc_RNA (1)...(19): siRNA sense strand
caaugcagauccuauauua

SEQ ID NO: 47830 - RNA, 19 nt, Homo sapiens
  misc_RNA (1)...(19): siRNA sense strand
gggaauaccugcuuugauu

SEQ ID NO: 47831 - RNA, 19 nt, Homo sapiens
  misc_RNA (1)...(19): siRNA sense strand
gggagacaguguuaaauua

SEQ ID NO: 47832 - RNA, 19 nt, Homo sapiens
  misc_RNA (1)...(19): siRNA sense strand
ccaaguagaugucaacaaa

SEQ ID NO: 47833 - RNA, 19 nt, Homo sapiens
  misc_RNA (1)...(19): siRNA sense strand
gaaauaagaccaaagaaug

SEQ ID NO: 47834 - RNA, 19 nt, Homo sapiens
  misc_RNA (1)...(19): siRNA sense strand
gauaaugaguguccuauug

SEQ ID NO: 47835 - RNA, 19 nt, Homo sapiens
  misc_RNA (1)...(19): siRNA sense strand
gaagggaaauacaaagaaa

SEQ ID NO: 47836 - RNA, 19 nt, Homo sapiens
  misc_RNA (1)...(19): siRNA sense strand
gaagagggcagauuaguuu

SEQ ID NO: 47837 - RNA, 19 nt, Homo sapiens
  misc_RNA (1)...(19): siRNA sense strand
gcaaugagugcauauaaua

SEQ ID NO: 47838 - RNA, 19 nt, Homo sapiens
  misc_RNA (1)...(19): siRNA sense strand
gagaacauauucagcuuaa

SEQ ID NO: 47839 - RNA, 19 nt, Homo sapiens
  misc_RNA (1)...(19): siRNA sense strand
ggacgaagguuuuaauaua

SEQ ID NO: 47840 - RNA, 19 nt, Homo sapiens
  misc_RNA (1)...(19): siRNA sense strand
ugacagagcuagaaacaga

SEQ ID NO: 47841 - RNA, 19 nt, Homo sapiens
  misc_RNA (1)...(19): siRNA sense strand
ggagaaacauuuaauagag

SEQ ID NO: 47842 - RNA, 19 nt, Homo sapiens
  misc_RNA (1)...(19): siRNA sense strand
gagauuggaugauugacua

SEQ ID NO: 47843 - RNA, 19 nt, Homo sapiens
  misc_RNA (1)...(19): siRNA sense strand
guagaagccaggaauauua

SEQ ID NO: 47844 - RNA, 19 nt, Homo sapiens
  misc_RNA (1)...(19): siRNA sense strand
ccagauagaucgaaacaug

SEQ ID NO: 47845 - RNA, 19 nt, Homo sapiens
  misc_RNA (1)...(19): siRNA sense strand
gugaagaucuggacaaugu

SEQ ID NO: 47846 - RNA, 19 nt, Homo sapiens
  misc_RNA (1)...(19): siRNA sense strand
cuauaaaggucucauauga

SEQ ID NO: 47847 - RNA, 19 nt, Homo sapiens
  misc_RNA (1)...(19): siRNA sense strand
gcaaggaagugccucaaau

SEQ ID NO: 47848 - RNA, 19 nt, Homo sapiens
  misc_RNA (1)...(19): siRNA sense strand
gaaaguauaccuggaauga

SEQ ID NO: 47849 - RNA, 19 nt, Homo sapiens
  misc_RNA (1)...(19): siRNA sense strand
ugaagcagaucccacguua

SEQ ID NO: 47850 - RNA, 19 nt, Homo sapiens
  misc_RNA (1)...(19): siRNA sense strand
gcagauuaguuuaccgaua

SEQ ID NO: 47851 - RNA, 19 nt, Homo sapiens
  misc_RNA (1)...(19): siRNA sense strand
gaagaaugcuguaauuggu

SEQ ID NO: 47852 - RNA, 19 nt, Homo sapiens
  misc_RNA (1)...(19): siRNA sense strand
ggaauggaauguuauuugu

SEQ ID NO: 47853 - RNA, 19 nt, Homo sapiens
  misc_RNA (1)...(19): siRNA sense strand
gaaugugccuauaaucuug

SEQ ID NO: 47854 - RNA, 19 nt, Homo sapiens
  misc_RNA (1)...(19): siRNA sense strand
acacaagccuggucaauug

SEQ ID NO: 47855 - RNA, 19 nt, Homo sapiens
  misc_RNA (1)...(19): siRNA sense strand
ccuauaaucuugugaauuc

SEQ ID NO: 47856 - RNA, 19 nt, Homo sapiens
  misc_RNA (1)...(19): siRNA sense strand
gaacauauucagcuuaaug

SEQ ID NO: 47857 - RNA, 19 nt, Homo sapiens
  misc_RNA (1)...(19): siRNA sense strand
caacuacaaucuugcuaaa

SEQ ID NO: 47858 - RNA, 19 nt, Homo sapiens
  misc_RNA (1)...(19): siRNA sense strand
gaaaggacuuccagaacug

SEQ ID NO: 47859 - RNA, 19 nt, Homo sapiens
  misc_RNA (1)...(19): siRNA sense strand
gaaucaggcuacaacauga

SEQ ID NO: 47860 - RNA, 19 nt, Homo sapiens
  misc_RNA (1)...(19): siRNA sense strand
acaagucgcuguuggaauu

SEQ ID NO: 47861 - RNA, 19 nt, Homo sapiens
  misc_RNA (1)...(19): siRNA sense strand
aaacacaggugaaguuaau

SEQ ID NO: 47862 - RNA, 19 nt, Homo sapiens
  misc_RNA (1)...(19): siRNA sense strand
aagaggcuaugaugaauua

SEQ ID NO: 47863 - RNA, 19 nt, Homo sapiens
  misc_RNA (1)...(19): siRNA sense strand
guaaauggauccaggaaca

SEQ ID NO: 47864 - RNA, 19 nt, Homo sapiens
  misc_RNA (1)...(19): siRNA sense strand
ugauucaucugccaaauaa

SEQ ID NO: 47865 - RNA, 19 nt, Homo sapiens
  misc_RNA (1)...(19): siRNA sense strand
gaugagaauucaaucaaug

SEQ ID NO: 47866 - RNA, 19 nt, Homo sapiens
  misc_RNA (1)...(19): siRNA sense strand
gcaacccaauuuauaugua

SEQ ID NO: 47867 - RNA, 19 nt, Homo sapiens
  misc_RNA (1)...(19): siRNA sense strand
acaaagcgguugagcaauu

SEQ ID NO: 47868 - RNA, 19 nt, Homo sapiens
  misc_RNA (1)...(19): siRNA sense strand
gagaagcaucgacucauua

SEQ ID NO: 47869 - RNA, 19 nt, Homo sapiens
  misc_RNA (1)...(19): siRNA sense strand
guaaaugguugcaggcuau

SEQ ID NO: 47870 - RNA, 19 nt, Homo sapiens
  misc_RNA (1)...(19): siRNA sense strand
gaagaacgguuuuacacua

SEQ ID NO: 47871 - RNA, 19 nt, Homo sapiens
  misc_RNA (1)...(19): siRNA sense strand
cagauuaguuuaccgauau

SEQ ID NO: 47872 - RNA, 19 nt, Homo sapiens
  misc_RNA (1)...(19): siRNA sense strand
gagaugauccucuucgaaa

SEQ ID NO: 47873 - RNA, 19 nt, Homo sapiens
  misc_RNA (1)...(19): siRNA sense strand
gcagaaauaagaccaaaga

SEQ ID NO: 47874 - RNA, 19 nt, Homo sapiens
  misc_RNA (1)...(19): siRNA sense strand
ucacaaacguggcauauac

SEQ ID NO: 47875 - RNA, 19 nt, Homo sapiens
  misc_RNA (1)...(19): siRNA sense strand
gcacauggauggauaaaau

SEQ ID NO: 47876 - RNA, 19 nt, Homo sapiens
  misc_RNA (1)...(19): siRNA sense strand
ucacguagcugaguacaug

SEQ ID NO: 47877 - RNA, 19 nt, Homo sapiens
  misc_RNA (1)...(19): siRNA sense strand
gcacaugcccuguuuaugg

SEQ ID NO: 47878 - RNA, 19 nt, Homo sapiens
  misc_RNA (1)...(19): siRNA sense strand
gauccaaaccaacaccuua

SEQ ID NO: 47879 - RNA, 19 nt, Homo sapiens
  misc_RNA (1)...(19): siRNA sense strand
gaaaagcaguuaccgugua

SEQ ID NO: 47880 - RNA, 19 nt, Homo sapiens
  misc_RNA (1)...(19): siRNA sense strand
gauaugaacauugcacuaa

SEQ ID NO: 47881 - RNA, 19 nt, Homo sapiens
  misc_RNA (1)...(19): siRNA sense strand
gaaauugugggccugagua

SEQ ID NO: 47882 - RNA, 19 nt, Homo sapiens
  misc_RNA (1)...(19): siRNA sense strand
caaaagggcccaaugaaua

SEQ ID NO: 47883 - RNA, 19 nt, Homo sapiens
  misc_RNA (1)...(19): siRNA sense strand
caaagcgguugagcaauuu

SEQ ID NO: 47884 - RNA, 19 nt, Homo sapiens
  misc_RNA (1)...(19): siRNA sense strand
gcuaaagguuucaauuauc

SEQ ID NO: 47885 - RNA, 19 nt, Homo sapiens
  misc_RNA (1)...(19): siRNA sense strand
gaucagccauuguuugaag

SEQ ID NO: 47886 - RNA, 19 nt, Homo sapiens
  misc_RNA (1)...(19): siRNA sense strand
ggugguggcugcaguguau

SEQ ID NO: 47887 - RNA, 19 nt, Homo sapiens
  misc_RNA (1)...(19): siRNA sense strand
ggcauggucucauuccuaa

SEQ ID NO: 47888 - RNA, 19 nt, Homo sapiens
  misc_RNA (1)...(19): siRNA sense strand
gcaauguuguguuucucua

SEQ ID NO: 47889 - RNA, 19 nt, Homo sapiens
  misc_RNA (1)...(19): siRNA sense strand
ggucagcccuuaaauaugc

SEQ ID NO: 47890 - RNA, 19 nt, Homo sapiens
  misc_RNA (1)...(19): siRNA sense strand
acaauucaguccucacuuu

SEQ ID NO: 47891 - RNA, 19 nt, Homo sapiens
  misc_RNA (1)...(19): siRNA sense strand
cuagaacuauugagagaaa

SEQ ID NO: 47892 - RNA, 19 nt, Homo sapiens
  misc_RNA (1)...(19): siRNA sense strand
gaaugggaaagcagacuua

SEQ ID NO: 47893 - RNA, 19 nt, Homo sapiens
  misc_RNA (1)...(19): siRNA sense strand
auaaaggucucauaugaug

SEQ ID NO: 47894 - RNA, 19 nt, Homo sapiens
  misc_RNA (1)...(19): siRNA sense strand
gcaguuaccguguauacaa

SEQ ID NO: 47895 - RNA, 19 nt, Homo sapiens
  misc_RNA (1)...(19): siRNA sense strand
gccaaucaguuagaauuaa

SEQ ID NO: 47896 - RNA, 19 nt, Homo sapiens
  misc_RNA (1)...(19): siRNA sense strand
caacagaaagagaagauga

SEQ ID NO: 47897 - RNA, 19 nt, Homo sapiens
  misc_RNA (1)...(19): siRNA sense strand
gaagcuagaacuauugaga

SEQ ID NO: 47898 - RNA, 19 nt, Homo sapiens
  misc_RNA (1)...(19): siRNA sense strand
gagaggcaaugagugcaua

SEQ ID NO: 47899 - RNA, 19 nt, Homo sapiens
  misc_RNA (1)...(19): siRNA sense strand
ccaaugagaaugcccagua

SEQ ID NO: 47900 - RNA, 19 nt, Homo sapiens
  misc_RNA (1)...(19): siRNA sense strand
gaaagugacagagcuagaa

SEQ ID NO: 47901 - RNA, 19 nt, Homo sapiens
  misc_RNA (1)...(19): siRNA sense strand
gcugcaggcuuaccucauu

SEQ ID NO: 47902 - RNA, 19 nt, Homo sapiens
  misc_RNA (1)...(19): siRNA sense strand
ucucuugccuccagauuaa

SEQ ID NO: 47903 - RNA, 19 nt, Homo sapiens
  misc_RNA (1)...(19): siRNA sense strand
ggaugagaauucaaucaau

SEQ ID NO: 47904 - RNA, 19 nt, Homo sapiens
  misc_RNA (1)...(19): siRNA sense strand
agagaaacacgaaaccuua

SEQ ID NO: 47905 - RNA, 19 nt, Homo sapiens
  misc_RNA (1)...(19): siRNA sense strand
cagcagcaauugaagaaug

SEQ ID NO: 47906 - RNA, 19 nt, Homo sapiens
  misc_RNA (1)...(19): siRNA sense strand
gccauuguuugaagucaua

SEQ ID NO: 47907 - RNA, 19 nt, Homo sapiens
  misc_RNA (1)...(19): siRNA sense strand
gagcuacaguuccgauuag

SEQ ID NO: 47908 - RNA, 19 nt, Homo sapiens
  misc_RNA (1)...(19): siRNA sense strand
gcuacucccuugccaauca

SEQ ID NO: 47909 - RNA, 19 nt, Homo sapiens
  misc_RNA (1)...(19): siRNA sense strand
uuccagaacugaccaauga

SEQ ID NO: 47910 - RNA, 19 nt, Homo sapiens
  misc_RNA (1)...(19): siRNA sense strand
agagguauacugcugauua

SEQ ID NO: 47911 - RNA, 19 nt, Homo sapiens
  misc_RNA (1)...(19): siRNA sense strand
gucaguaaccggcuuauuu

SEQ ID NO: 47912 - RNA, 19 nt, Homo sapiens
  misc_RNA (1)...(19): siRNA sense strand
uccaggaaguguuauuaua

SEQ ID NO: 47913 - RNA, 19 nt, Homo sapiens
  misc_RNA (1)...(19): siRNA sense strand
gaaugauguuggacagcua

SEQ ID NO: 47914 - RNA, 19 nt, Homo sapiens
  misc_RNA (1)...(19): siRNA sense strand
ccgauuaggcccaacuuua

SEQ ID NO: 47915 - RNA, 19 nt, Homo sapiens
  misc_RNA (1)...(19): siRNA sense strand
cagaugauaugguuuacug

SEQ ID NO: 47916 - RNA, 19 nt, Homo sapiens
  misc_RNA (1)...(19): siRNA sense strand
ggaaggaugagaauucaau

SEQ ID NO: 47917 - RNA, 19 nt, Homo sapiens
  misc_RNA (1)...(19): siRNA sense strand
gaagacauaguggcaguaa

SEQ ID NO: 47918 - RNA, 19 nt, Homo sapiens
  misc_RNA (1)...(19): siRNA sense strand
aaauuacgcuaugggaaua

SEQ ID NO: 47919 - RNA, 19 nt, Homo sapiens
  misc_RNA (1)...(19): siRNA sense strand
ucaagauccugaauacaga

SEQ ID NO: 47920 - RNA, 19 nt, Homo sapiens
  misc_RNA (1)...(19): siRNA sense strand
caucagauuucagugguuu

SEQ ID NO: 47921 - RNA, 19 nt, Homo sapiens
  misc_RNA (1)...(19): siRNA sense strand
gaauaccugcuuugauuga

SEQ ID NO: 47922 - RNA, 19 nt, Homo sapiens
  misc_RNA (1)...(19): siRNA sense strand
ggaaagcuuuggagauugc

SEQ ID NO: 47923 - RNA, 19 nt, Homo sapiens
  misc_RNA (1)...(19): siRNA sense strand
ggagcaauguuguguuucu

SEQ ID NO: 47924 - RNA, 19 nt, Homo sapiens
  misc_RNA (1)...(19): siRNA sense strand
ugacaaugcagauccuaua

SEQ ID NO: 47925 - RNA, 19 nt, Homo sapiens
  misc_RNA (1)...(19): siRNA sense strand
aaccaacaccuuacgauua

SEQ ID NO: 47926 - RNA, 19 nt, Homo sapiens
  misc_RNA (1)...(19): siRNA sense strand
aaggagcaauguuguguuu

SEQ ID NO: 47927 - RNA, 19 nt, Homo sapiens
  misc_RNA (1)...(19): siRNA sense strand
gaaaucaucugacacaauu

SEQ ID NO: 47928 - RNA, 19 nt, Homo sapiens
  misc_RNA (1)...(19): siRNA sense strand
gcaacaaucugguucauuu

SEQ ID NO: 47929 - RNA, 19 nt, Homo sapiens
  misc_RNA (1)...(19): siRNA sense strand
caaugcagauccuauauua

SEQ ID NO: 47930 - RNA, 19 nt, Homo sapiens
  misc_RNA (1)...(19): siRNA sense strand
gggaauaccugcuuugauu

SEQ ID NO: 47931 - RNA, 19 nt, Homo sapiens
  misc_RNA (1)...(19): siRNA sense strand
gggagacaguguuaaauua

SEQ ID NO: 47932 - RNA, 19 nt, Homo sapiens
  misc_RNA (1)...(19): siRNA sense strand
ccaaguagaugucaacaaa

SEQ ID NO: 47933 - RNA, 19 nt, Homo sapiens
  misc_RNA (1)...(19): siRNA sense strand
gaaauaagaccaaagaaug

SEQ ID NO: 47934 - RNA, 19 nt, Homo sapiens
  misc_RNA (1)...(19): siRNA sense strand
gauaaugaguguccuauug

SEQ ID NO: 47935 - RNA, 19 nt, Homo sapiens
  misc_RNA (1)...(19): siRNA sense strand
gaagggaaauacaaagaaa

SEQ ID NO: 47936 - RNA, 19 nt, Homo sapiens
  misc_RNA (1)...(19): siRNA sense strand
gaagagggcagauuaguuu

SEQ ID NO: 47937 - RNA, 19 nt, Homo sapiens
  misc_RNA (1)...(19): siRNA sense strand
gcaaugagugcauauaaua

SEQ ID NO: 47938 - RNA, 19 nt, Homo sapiens
  misc_RNA (1)...(19): siRNA sense strand
gagaacauauucagcuuaa

SEQ ID NO: 47939 - RNA, 19 nt, Homo sapiens
  misc_RNA (1)...(19): siRNA sense strand
ggacgaagguuuuaauaua

SEQ ID NO: 47940 - RNA, 19 nt, Homo sapiens
  misc_RNA (1)...(19): siRNA sense strand
ugacagagcuagaaacaga

SEQ ID NO: 47941 - RNA, 19 nt, Homo sapiens
  misc_RNA (1)...(19): siRNA sense strand
ggagaaacauuuaauagag

SEQ ID NO: 47942 - RNA, 19 nt, Homo sapiens
  misc_RNA (1)...(19): siRNA sense strand
gagauuggaugauugacua

SEQ ID NO: 47943 - RNA, 19 nt, Homo sapiens
  misc_RNA (1)...(19): siRNA sense strand
guagaagccaggaauauua

SEQ ID NO: 47944 - RNA, 19 nt, Homo sapiens
  misc_RNA (1)...(19): siRNA sense strand
ccagauagaucgaaacaug

SEQ ID NO: 47945 - RNA, 19 nt, Homo sapiens
  misc_RNA (1)...(19): siRNA sense strand
gugaagaucuggacaaugu

SEQ ID NO: 47946 - RNA, 19 nt, Homo sapiens
  misc_RNA (1)...(19): siRNA sense strand
cuauaaaggucucauauga

SEQ ID NO: 47947 - RNA, 19 nt, Homo sapiens
  misc_RNA (1)...(19): siRNA sense strand
gcaaggaagugccucaaau

SEQ ID NO: 47948 - RNA, 19 nt, Homo sapiens
  misc_RNA (1)...(19): siRNA sense strand
gaaaguauaccuggaauga

SEQ ID NO: 47949 - RNA, 19 nt, Homo sapiens
  misc_RNA (1)...(19): siRNA sense strand
ugaagcagaucccacguua

SEQ ID NO: 47950 - RNA, 19 nt, Homo sapiens
  misc_RNA (1)...(19): siRNA sense strand
gcagauuaguuuaccgaua

SEQ ID NO: 47951 - RNA, 19 nt, Homo sapiens
  misc_RNA (1)...(19): siRNA sense strand
gaagaaugcuguaauuggu

SEQ ID NO: 47952 - RNA, 19 nt, Homo sapiens
  misc_RNA (1)...(19): siRNA sense strand
ggaauggaauguuauuugu

SEQ ID NO: 47953 - RNA, 19 nt, Homo sapiens
  misc_RNA (1)...(19): siRNA sense strand
gaaugugccuauaaucuug

SEQ ID NO: 47954 - RNA, 19 nt, Homo sapiens
  misc_RNA (1)...(19): siRNA sense strand
acacaagccuggucaauug

SEQ ID NO: 47955 - RNA, 19 nt, Homo sapiens
  misc_RNA (1)...(19): siRNA sense strand
ccuauaaucuugugaauuc

SEQ ID NO: 47956 - RNA, 19 nt, Homo sapiens
  misc_RNA (1)...(19): siRNA sense strand
gaacauauucagcuuaaug

SEQ ID NO: 47957 - RNA, 19 nt, Homo sapiens
  misc_RNA (1)...(19): siRNA sense strand
caacuacaaucuugcuaaa

SEQ ID NO: 47958 - RNA, 19 nt, Homo sapiens
  misc_RNA (1)...(19): siRNA sense strand
gaaaggacuuccagaacug

SEQ ID NO: 47959 - RNA, 19 nt, Homo sapiens
  misc_RNA (1)...(19): siRNA sense strand
gaaucaggcuacaacauga

SEQ ID NO: 47960 - RNA, 19 nt, Homo sapiens
  misc_RNA (1)...(19): siRNA sense strand
acaagucgcuguuggaauu

SEQ ID NO: 47961 - RNA, 19 nt, Homo sapiens
  misc_RNA (1)...(19): siRNA sense strand
aaacacaggugaaguuaau

SEQ ID NO: 47962 - RNA, 19 nt, Homo sapiens
  misc_RNA (1)...(19): siRNA sense strand
aagaggcuaugaugaauua

SEQ ID NO: 47963 - RNA, 19 nt, Homo sapiens
  misc_RNA (1)...(19): siRNA sense strand
guaaauggauccaggaaca

SEQ ID NO: 47964 - RNA, 19 nt, Homo sapiens
  misc_RNA (1)...(19): siRNA sense strand
ugauucaucugccaaauaa

SEQ ID NO: 47965 - RNA, 19 nt, Homo sapiens
  misc_RNA (1)...(19): siRNA sense strand
gaugagaauucaaucaaug

SEQ ID NO: 47966 - RNA, 19 nt, Homo sapiens
  misc_RNA (1)...(19): siRNA sense strand
gcaacccaauuuauaugua

SEQ ID NO: 47967 - RNA, 19 nt, Homo sapiens
  misc_RNA (1)...(19): siRNA sense strand
acaaagcgguugagcaauu

SEQ ID NO: 47968 - RNA, 19 nt, Homo sapiens
  misc_RNA (1)...(19): siRNA sense strand
gagaagcaucgacucauua

SEQ ID NO: 47969 - RNA, 19 nt, Homo sapiens
  misc_RNA (1)...(19): siRNA sense strand
guaaaugguugcaggcuau

SEQ ID NO: 47970 - RNA, 19 nt, Homo sapiens
  misc_RNA (1)...(19): siRNA sense strand
gaagaacgguuuuacacua

SEQ ID NO: 47971 - RNA, 19 nt, Homo sapiens
  misc_RNA (1)...(19): siRNA sense strand
cagauuaguuuaccgauau

SEQ ID NO: 47972 - RNA, 19 nt, Homo sapiens
  misc_RNA (1)...(19): siRNA sense strand
gagaugauccucuucgaaa

SEQ ID NO: 47973 - RNA, 19 nt, Homo sapiens
  misc_RNA (1)...(19): siRNA sense strand
gcagaaauaagaccaaaga

SEQ ID NO: 47974 - RNA, 19 nt, Homo sapiens
  misc_RNA (1)...(19): siRNA sense strand
ucacaaacguggcauauac

SEQ ID NO: 47975 - RNA, 19 nt, Homo sapiens
  misc_RNA (1)...(19): siRNA sense strand
gcacauggauggauaaaau

SEQ ID NO: 47976 - RNA, 19 nt, Homo sapiens
  misc_RNA (1)...(19): siRNA sense strand
ucacguagcugaguacaug

SEQ ID NO: 47977 - RNA, 19 nt, Homo sapiens
  misc_RNA (1)...(19): siRNA sense strand
gcacaugcccuguuuaugg

SEQ ID NO: 47978 - RNA, 19 nt, Homo sapiens
  misc_RNA (1)...(19): siRNA sense strand
gauccaaaccaacaccuua

SEQ ID NO: 47979 - RNA, 19 nt, Homo sapiens
  misc_RNA (1)...(19): siRNA sense strand
gaaaagcaguuaccgugua

SEQ ID NO: 47980 - RNA, 19 nt, Homo sapiens
  misc_RNA (1)...(19): siRNA sense strand
gauaugaacauugcacuaa

SEQ ID NO: 47981 - RNA, 19 nt, Homo sapiens
  misc_RNA (1)...(19): siRNA sense strand
gaaauugugggccugagua

SEQ ID NO: 47982 - RNA, 19 nt, Homo sapiens
  misc_RNA (1)...(19): siRNA sense strand
caaaagggcccaaugaaua

SEQ ID NO: 47983 - RNA, 19 nt, Homo sapiens
  misc_RNA (1)...(19): siRNA sense strand
caaagcgguugagcaauuu

SEQ ID NO: 47984 - RNA, 19 nt, Homo sapiens
  misc_RNA (1)...(19): siRNA sense strand
gcuaaagguuucaauuauc

SEQ ID NO: 47985 - RNA, 19 nt, Homo sapiens
  misc_RNA (1)...(19): siRNA sense strand
gaucagccauuguuugaag

SEQ ID NO: 47986 - RNA, 19 nt, Homo sapiens
  misc_RNA (1)...(19): siRNA sense strand
ggugguggcugcaguguau

SEQ ID NO: 47987 - RNA, 19 nt, Homo sapiens
  misc_RNA (1)...(19): siRNA sense strand
ggcauggucucauuccuaa

SEQ ID NO: 47988 - RNA, 19 nt, Homo sapiens
  misc_RNA (1)...(19): siRNA sense strand
gcaauguuguguuucucua

SEQ ID NO: 47989 - RNA, 19 nt, Homo sapiens
  misc_RNA (1)...(19): siRNA sense strand
ggucagcccuuaaauaugc

SEQ ID NO: 47990 - RNA, 19 nt, Homo sapiens
  misc_RNA (1)...(19): siRNA sense strand
acaauucaguccucacuuu

SEQ ID NO: 47991 - RNA, 19 nt, Homo sapiens
  misc_RNA (1)...(19): siRNA sense strand
cuagaacuauugagagaaa

SEQ ID NO: 47992 - RNA, 19 nt, Homo sapiens
  misc_RNA (1)...(19): siRNA sense strand
gaaugggaaagcagacuua

SEQ ID NO: 47993 - RNA, 19 nt, Homo sapiens
  misc_RNA (1)...(19): siRNA sense strand
auaaaggucucauaugaug

SEQ ID NO: 47994 - RNA, 19 nt, Homo sapiens
  misc_RNA (1)...(19): siRNA sense strand
gcaguuaccguguauacaa

SEQ ID NO: 47995 - RNA, 19 nt, Homo sapiens
  misc_RNA (1)...(19): siRNA sense strand
gccaaucaguuagaauuaa

SEQ ID NO: 47996 - RNA, 19 nt, Homo sapiens
  misc_RNA (1)...(19): siRNA sense strand
caacagaaagagaagauga

SEQ ID NO: 47997 - RNA, 19 nt, Homo sapiens
  misc_RNA (1)...(19): siRNA sense strand
gaagcuagaacuauugaga

SEQ ID NO: 47998 - RNA, 19 nt, Homo sapiens
  misc_RNA (1)...(19): siRNA sense strand
gagaggcaaugagugcaua

SEQ ID NO: 47999 - RNA, 19 nt, Homo sapiens
  misc_RNA (1)...(19): siRNA sense strand
ccaaugagaaugcccagua

SEQ ID NO: 48000 - RNA, 19 nt, Homo sapiens
  misc_RNA (1)...(19): siRNA sense strand
gaaagugacagagcuagaa

SEQ ID NO: 48001 - RNA, 19 nt, Homo sapiens
  misc_RNA (1)...(19): siRNA sense strand
gcugcaggcuuaccucauu

SEQ ID NO: 48002 - RNA, 19 nt, Homo sapiens
  misc_RNA (1)...(19): siRNA sense strand
ucucuugccuccagauuaa

SEQ ID NO: 48003 - RNA, 19 nt, Homo sapiens
  misc_RNA (1)...(19): siRNA sense strand
ggaugagaauucaaucaau

SEQ ID NO: 48004 - RNA, 19 nt, Homo sapiens
  misc_RNA (1)...(19): siRNA sense strand
agagaaacacgaaaccuua

SEQ ID NO: 48005 - RNA, 19 nt, Homo sapiens
  misc_RNA (1)...(19): siRNA sense strand
cagcagcaauugaagaaug

SEQ ID NO: 48006 - RNA, 19 nt, Homo sapiens
  misc_RNA (1)...(19): siRNA sense strand
gccauuguuugaagucaua

SEQ ID NO: 48007 - RNA, 19 nt, Homo sapiens
  misc_RNA (1)...(19): siRNA sense strand
gagcuacaguuccgauuag

SEQ ID NO: 48008 - RNA, 19 nt, Homo sapiens
  misc_RNA (1)...(19): siRNA sense strand
gcuacucccuugccaauca

SEQ ID NO: 48009 - RNA, 19 nt, Homo sapiens
  misc_RNA (1)...(19): siRNA sense strand
uuccagaacugaccaauga

SEQ ID NO: 48010 - RNA, 19 nt, Homo sapiens
  misc_RNA (1)...(19): siRNA sense strand
agagguauacugcugauua

SEQ ID NO: 48011 - RNA, 19 nt, Homo sapiens
  misc_RNA (1)...(19): siRNA sense strand
gucaguaaccggcuuauuu

SEQ ID NO: 48012 - RNA, 19 nt, Homo sapiens
  misc_RNA (1)...(19): siRNA sense strand
uccaggaaguguuauuaua

SEQ ID NO: 48013 - RNA, 19 nt, Homo sapiens
  misc_RNA (1)...(19): siRNA sense strand
gaaugauguuggacagcua

SEQ ID NO: 48014 - RNA, 19 nt, Homo sapiens
  misc_RNA (1)...(19): siRNA sense strand
ccgauuaggcccaacuuua

SEQ ID NO: 48015 - RNA, 19 nt, Homo sapiens
  misc_RNA (1)...(19): siRNA sense strand
cagaugauaugguuuacug

SEQ ID NO: 48016 - RNA, 19 nt, Homo sapiens
  misc_RNA (1)...(19): siRNA sense strand
ggaaggaugagaauucaau

SEQ ID NO: 48017 - RNA, 19 nt, Homo sapiens
  misc_RNA (1)...(19): siRNA sense strand
gaagacauaguggcaguaa

SEQ ID NO: 48018 - RNA, 19 nt, Homo sapiens
  misc_RNA (1)...(19): siRNA sense strand
aaauuacgcuaugggaaua

SEQ ID NO: 48019 - RNA, 19 nt, Homo sapiens
  misc_RNA (1)...(19): siRNA sense strand
ucaagauccugaauacaga

SEQ ID NO: 48020 - RNA, 19 nt, Homo sapiens
  misc_RNA (1)...(19): siRNA sense strand
caucagauuucagugguuu

SEQ ID NO: 48021 - RNA, 19 nt, Homo sapiens
  misc_RNA (1)...(19): siRNA sense strand
gaauaccugcuuugauuga

SEQ ID NO: 48022 - RNA, 19 nt, Homo sapiens
  misc_RNA (1)...(19): siRNA sense strand
ggaaagcuuuggagauugc

SEQ ID NO: 48023 - RNA, 19 nt, Homo sapiens
  misc_RNA (1)...(19): siRNA sense strand
ggagcaauguuguguuucu

SEQ ID NO: 48024 - RNA, 19 nt, Homo sapiens
  misc_RNA (1)...(19): siRNA sense strand
ugacaaugcagauccuaua

SEQ ID NO: 48025 - RNA, 19 nt, Homo sapiens
  misc_RNA (1)...(19): siRNA sense strand
aaccaacaccuuacgauua

SEQ ID NO: 48026 - RNA, 19 nt, Homo sapiens
  misc_RNA (1)...(19): siRNA sense strand
aaggagcaauguuguguuu

SEQ ID NO: 48027 - RNA, 19 nt, Homo sapiens
  misc_RNA (1)...(19): siRNA sense strand
gaaaucaucugacacaauu

SEQ ID NO: 48028 - RNA, 19 nt, Homo sapiens
  misc_RNA (1)...(19): siRNA sense strand
gcaacaaucugguucauuu

SEQ ID NO: 48029 - RNA, 19 nt, Homo sapiens
  misc_RNA (1)...(19): siRNA sense strand
caaugcagauccuauauua

SEQ ID NO: 48030 - RNA, 19 nt, Homo sapiens
  misc_RNA (1)...(19): siRNA sense strand
gggaauaccugcuuugauu

SEQ ID NO: 48031 - RNA, 19 nt, Homo sapiens
  misc_RNA (1)...(19): siRNA sense strand
gggagacaguguuaaauua

SEQ ID NO: 48032 - RNA, 19 nt, Homo sapiens
  misc_RNA (1)...(19): siRNA sense strand
ccaaguagaugucaacaaa

SEQ ID NO: 48033 - RNA, 19 nt, Homo sapiens
  misc_RNA (1)...(19): siRNA sense strand
gaaauaagaccaaagaaug

SEQ ID NO: 48034 - RNA, 19 nt, Homo sapiens
  misc_RNA (1)...(19): siRNA sense strand
gauaaugaguguccuauug

SEQ ID NO: 48035 - RNA, 19 nt, Homo sapiens
  misc_RNA (1)...(19): siRNA sense strand
gaagggaaauacaaagaaa

SEQ ID NO: 48036 - RNA, 19 nt, Homo sapiens
  misc_RNA (1)...(19): siRNA sense strand
gaagagggcagauuaguuu

SEQ ID NO: 48037 - RNA, 19 nt, Homo sapiens
  misc_RNA (1)...(19): siRNA sense strand
gcaaugagugcauauaaua

SEQ ID NO: 48038 - RNA, 19 nt, Homo sapiens
  misc_RNA (1)...(19): siRNA sense strand
gagaacauauucagcuuaa

SEQ ID NO: 48039 - RNA, 19 nt, Homo sapiens
  misc_RNA (1)...(19): siRNA sense strand
ggacgaagguuuuaauaua

SEQ ID NO: 48040 - RNA, 19 nt, Homo sapiens
  misc_RNA (1)...(19): siRNA sense strand
ugacagagcuagaaacaga

SEQ ID NO: 48041 - RNA, 19 nt, Homo sapiens
  misc_RNA (1)...(19): siRNA sense strand
ggagaaacauuuaauagag

SEQ ID NO: 48042 - RNA, 19 nt, Homo sapiens
  misc_RNA (1)...(19): siRNA sense strand
gagauuggaugauugacua

SEQ ID NO: 48043 - RNA, 19 nt, Homo sapiens
  misc_RNA (1)...(19): siRNA sense strand
guagaagccaggaauauua

SEQ ID NO: 48044 - RNA, 19 nt, Homo sapiens
  misc_RNA (1)...(19): siRNA sense strand
ccagauagaucgaaacaug

SEQ ID NO: 48045 - RNA, 19 nt, Homo sapiens
  misc_RNA (1)...(19): siRNA sense strand
gugaagaucuggacaaugu

SEQ ID NO: 48046 - RNA, 19 nt, Homo sapiens
  misc_RNA (1)...(19): siRNA sense strand
cuauaaaggucucauauga

SEQ ID NO: 48047 - RNA, 19 nt, Homo sapiens
  misc_RNA (1)...(19): siRNA sense strand
gcaaggaagugccucaaau

SEQ ID NO: 48048 - RNA, 19 nt, Homo sapiens
  misc_RNA (1)...(19): siRNA sense strand
gaaaguauaccuggaauga

SEQ ID NO: 48049 - RNA, 19 nt, Homo sapiens
  misc_RNA (1)...(19): siRNA sense strand
ugaagcagaucccacguua

SEQ ID NO: 48050 - RNA, 19 nt, Homo sapiens
  misc_RNA (1)...(19): siRNA sense strand
gcagauuaguuuaccgaua

SEQ ID NO: 48051 - RNA, 19 nt, Homo sapiens
  misc_RNA (1)...(19): siRNA sense strand
gaagaaugcuguaauuggu

SEQ ID NO: 48052 - RNA, 19 nt, Homo sapiens
  misc_RNA (1)...(19): siRNA sense strand
ggaauggaauguuauuugu

SEQ ID NO: 48053 - RNA, 19 nt, Homo sapiens
  misc_RNA (1)...(19): siRNA sense strand
gaaugugccuauaaucuug

SEQ ID NO: 48054 - RNA, 19 nt, Homo sapiens
  misc_RNA (1)...(19): siRNA sense strand
acacaagccuggucaauug

SEQ ID NO: 48055 - RNA, 19 nt, Homo sapiens
  misc_RNA (1)...(19): siRNA sense strand
ccuauaaucuugugaauuc

SEQ ID NO: 48056 - RNA, 19 nt, Homo sapiens
  misc_RNA (1)...(19): siRNA sense strand
gaacauauucagcuuaaug

SEQ ID NO: 48057 - RNA, 19 nt, Homo sapiens
  misc_RNA (1)...(19): siRNA sense strand
caacuacaaucuugcuaaa

SEQ ID NO: 48058 - RNA, 19 nt, Homo sapiens
  misc_RNA (1)...(19): siRNA sense strand
gaaaggacuuccagaacug

SEQ ID NO: 48059 - RNA, 19 nt, Homo sapiens
  misc_RNA (1)...(19): siRNA sense strand
gaaucaggcuacaacauga

SEQ ID NO: 48060 - RNA, 19 nt, Homo sapiens
  misc_RNA (1)...(19): siRNA sense strand
acaagucgcuguuggaauu

SEQ ID NO: 48061 - RNA, 19 nt, Homo sapiens
  misc_RNA (1)...(19): siRNA sense strand
aaacacaggugaaguuaau

SEQ ID NO: 48062 - RNA, 19 nt, Homo sapiens
  misc_RNA (1)...(19): siRNA sense strand
aagaggcuaugaugaauua

SEQ ID NO: 48063 - RNA, 19 nt, Homo sapiens
  misc_RNA (1)...(19): siRNA sense strand
guaaauggauccaggaaca

SEQ ID NO: 48064 - RNA, 19 nt, Homo sapiens
  misc_RNA (1)...(19): siRNA sense strand
ugauucaucugccaaauaa

SEQ ID NO: 48065 - RNA, 19 nt, Homo sapiens
  misc_RNA (1)...(19): siRNA sense strand
gaugagaauucaaucaaug

SEQ ID NO: 48066 - RNA, 19 nt, Homo sapiens
  misc_RNA (1)...(19): siRNA sense strand
gcaacccaauuuauaugua

SEQ ID NO: 48067 - RNA, 19 nt, Homo sapiens
  misc_RNA (1)...(19): siRNA sense strand
acaaagcgguugagcaauu

SEQ ID NO: 48068 - RNA, 19 nt, Homo sapiens
  misc_RNA (1)...(19): siRNA sense strand
gagaagcaucgacucauua

SEQ ID NO: 48069 - RNA, 19 nt, Homo sapiens
  misc_RNA (1)...(19): siRNA sense strand
guaaaugguugcaggcuau

SEQ ID NO: 48070 - RNA, 19 nt, Homo sapiens
  misc_RNA (1)...(19): siRNA sense strand
gaagaacgguuuuacacua

SEQ ID NO: 48071 - RNA, 19 nt, Homo sapiens
  misc_RNA (1)...(19): siRNA sense strand
cagauuaguuuaccgauau

SEQ ID NO: 48072 - RNA, 19 nt, Homo sapiens
  misc_RNA (1)...(19): siRNA sense strand
gagaugauccucuucgaaa

SEQ ID NO: 48073 - RNA, 19 nt, Homo sapiens
  misc_RNA (1)...(19): siRNA sense strand
gcagaaauaagaccaaaga

SEQ ID NO: 48074 - RNA, 19 nt, Homo sapiens
  misc_RNA (1)...(19): siRNA sense strand
ucacaaacguggcauauac

SEQ ID NO: 48075 - RNA, 19 nt, Homo sapiens
  misc_RNA (1)...(19): siRNA sense strand
gcacauggauggauaaaau

SEQ ID NO: 48076 - RNA, 19 nt, Homo sapiens
  misc_RNA (1)...(19): siRNA sense strand
ucacguagcugaguacaug

SEQ ID NO: 48077 - RNA, 19 nt, Homo sapiens
  misc_RNA (1)...(19): siRNA sense strand
gcacaugcccuguuuaugg

SEQ ID NO: 48078 - RNA, 19 nt, Homo sapiens
  misc_RNA (1)...(19): siRNA sense strand
gauccaaaccaacaccuua

SEQ ID NO: 48079 - RNA, 19 nt, Homo sapiens
  misc_RNA (1)...(19): siRNA sense strand
gaaaagcaguuaccgugua

SEQ ID NO: 48080 - RNA, 19 nt, Homo sapiens
  misc_RNA (1)...(19): siRNA sense strand
gauaugaacauugcacuaa

SEQ ID NO: 48081 - RNA, 19 nt, Homo sapiens
  misc_RNA (1)...(19): siRNA sense strand
gaaauugugggccugagua

SEQ ID NO: 48082 - RNA, 19 nt, Homo sapiens
  misc_RNA (1)...(19): siRNA sense strand
caaaagggcccaaugaaua

SEQ ID NO: 48083 - RNA, 19 nt, Homo sapiens
  misc_RNA (1)...(19): siRNA sense strand
caaagcgguugagcaauuu

SEQ ID NO: 48084 - RNA, 19 nt, Homo sapiens
  misc_RNA (1)...(19): siRNA sense strand
gcuaaagguuucaauuauc

SEQ ID NO: 48085 - RNA, 19 nt, Homo sapiens
  misc_RNA (1)...(19): siRNA sense strand
gaucagccauuguuugaag

SEQ ID NO: 48086 - RNA, 19 nt, Homo sapiens
  misc_RNA (1)...(19): siRNA sense strand
ggugguggcugcaguguau

SEQ ID NO: 48087 - RNA, 19 nt, Homo sapiens
  misc_RNA (1)...(19): siRNA sense strand
ggcauggucucauuccuaa

SEQ ID NO: 48088 - RNA, 19 nt, Homo sapiens
  misc_RNA (1)...(19): siRNA sense strand
gcaauguuguguuucucua

SEQ ID NO: 48089 - RNA, 19 nt, Homo sapiens
  misc_RNA (1)...(19): siRNA sense strand
ggucagcccuuaaauaugc

SEQ ID NO: 48090 - RNA, 19 nt, Homo sapiens
  misc_RNA (1)...(19): siRNA sense strand
acaauucaguccucacuuu

SEQ ID NO: 48091 - RNA, 19 nt, Homo sapiens
  misc_RNA (1)...(19): siRNA sense strand
cuagaacuauugagagaaa

SEQ ID NO: 48092 - RNA, 19 nt, Homo sapiens
  misc_RNA (1)...(19): siRNA sense strand
gaaugggaaagcagacuua

SEQ ID NO: 48093 - RNA, 19 nt, Homo sapiens
  misc_RNA (1)...(19): siRNA sense strand
auaaaggucucauaugaug

SEQ ID NO: 48094 - RNA, 19 nt, Homo sapiens
  misc_RNA (1)...(19): siRNA sense strand
gcaguuaccguguauacaa

SEQ ID NO: 48095 - RNA, 19 nt, Homo sapiens
  misc_RNA (1)...(19): siRNA sense strand
gccaaucaguuagaauuaa

SEQ ID NO: 48096 - RNA, 19 nt, Homo sapiens
  misc_RNA (1)...(19): siRNA sense strand
caacagaaagagaagauga

SEQ ID NO: 48097 - RNA, 19 nt, Homo sapiens
  misc_RNA (1)...(19): siRNA sense strand
gaagcuagaacuauugaga

SEQ ID NO: 48098 - RNA, 19 nt, Homo sapiens
  misc_RNA (1)...(19): siRNA sense strand
gagaggcaaugagugcaua

SEQ ID NO: 48099 - RNA, 19 nt, Homo sapiens
  misc_RNA (1)...(19): siRNA sense strand
ccaaugagaaugcccagua

SEQ ID NO: 48100 - RNA, 19 nt, Homo sapiens
  misc_RNA (1)...(19): siRNA sense strand
gaaagugacagagcuagaa

SEQ ID NO: 48101 - RNA, 19 nt, Homo sapiens
  misc_RNA (1)...(19): siRNA sense strand
gcugcaggcuuaccucauu

SEQ ID NO: 48102 - RNA, 19 nt, Homo sapiens
  misc_RNA (1)...(19): siRNA sense strand
ucucuugccuccagauuaa

SEQ ID NO: 48103 - RNA, 19 nt, Homo sapiens
  misc_RNA (1)...(19): siRNA sense strand
ggaugagaauucaaucaau

SEQ ID NO: 48104 - RNA, 19 nt, Homo sapiens
  misc_RNA (1)...(19): siRNA sense strand
agagaaacacgaaaccuua

SEQ ID NO: 48105 - RNA, 19 nt, Homo sapiens
  misc_RNA (1)...(19): siRNA sense strand
cagcagcaauugaagaaug

SEQ ID NO: 48106 - RNA, 19 nt, Homo sapiens
  misc_RNA (1)...(19): siRNA sense strand
gccauuguuugaagucaua

SEQ ID NO: 48107 - RNA, 19 nt, Homo sapiens
  misc_RNA (1)...(19): siRNA sense strand
gagcuacaguuccgauuag

SEQ ID NO: 48108 - RNA, 19 nt, Homo sapiens
  misc_RNA (1)...(19): siRNA sense strand
gcuacucccuugccaauca

SEQ ID NO: 48109 - RNA, 19 nt, Homo sapiens
  misc_RNA (1)...(19): siRNA sense strand
uuccagaacugaccaauga

SEQ ID NO: 48110 - RNA, 19 nt, Homo sapiens
  misc_RNA (1)...(19): siRNA sense strand
agagguauacugcugauua

SEQ ID NO: 48111 - RNA, 19 nt, Homo sapiens
  misc_RNA (1)...(19): siRNA sense strand
gucaguaaccggcuuauuu

SEQ ID NO: 48112 - RNA, 19 nt, Homo sapiens
  misc_RNA (1)...(19): siRNA sense strand
uccaggaaguguuauuaua

SEQ ID NO: 48113 - RNA, 19 nt, Homo sapiens
  misc_RNA (1)...(19): siRNA sense strand
gaaugauguuggacagcua

SEQ ID NO: 48114 - RNA, 19 nt, Homo sapiens
  misc_RNA (1)...(19): siRNA sense strand
ccgauuaggcccaacuuua

SEQ ID NO: 48115 - RNA, 19 nt, Homo sapiens
  misc_RNA (1)...(19): siRNA sense strand
cagaugauaugguuuacug

SEQ ID NO: 48116 - RNA, 19 nt, Homo sapiens
  misc_RNA (1)...(19): siRNA sense strand
ggaaggaugagaauucaau

SEQ ID NO: 48117 - RNA, 19 nt, Homo sapiens
  misc_RNA (1)...(19): siRNA sense strand
gaagacauaguggcaguaa

SEQ ID NO: 48118 - RNA, 19 nt, Homo sapiens
  misc_RNA (1)...(19): siRNA sense strand
aaauuacgcuaugggaaua

SEQ ID NO: 48119 - RNA, 19 nt, Homo sapiens
  misc_RNA (1)...(19): siRNA sense strand
ucaagauccugaauacaga

SEQ ID NO: 48120 - RNA, 19 nt, Homo sapiens
  misc_RNA (1)...(19): siRNA sense strand
caucagauuucagugguuu

SEQ ID NO: 48121 - RNA, 19 nt, Homo sapiens
  misc_RNA (1)...(19): siRNA sense strand
gaauaccugcuuugauuga

SEQ ID NO: 48122 - RNA, 19 nt, Homo sapiens
  misc_RNA (1)...(19): siRNA sense strand
ggaaagcuuuggagauugc

SEQ ID NO: 48123 - RNA, 19 nt, Homo sapiens
  misc_RNA (1)...(19): siRNA sense strand
ggagcaauguuguguuucu

SEQ ID NO: 48124 - RNA, 19 nt, Homo sapiens
  misc_RNA (1)...(19): siRNA sense strand
ugacaaugcagauccuaua

SEQ ID NO: 48125 - RNA, 19 nt, Homo sapiens
  misc_RNA (1)...(19): siRNA sense strand
aaccaacaccuuacgauua

SEQ ID NO: 48126 - RNA, 19 nt, Homo sapiens
  misc_RNA (1)...(19): siRNA sense strand
aaggagcaauguuguguuu

SEQ ID NO: 48127 - RNA, 19 nt, Homo sapiens
  misc_RNA (1)...(19): siRNA sense strand
gaaaucaucugacacaauu

SEQ ID NO: 48128 - RNA, 19 nt, Homo sapiens
  misc_RNA (1)...(19): siRNA sense strand
gcaacaaucugguucauuu

SEQ ID NO: 48129 - RNA, 19 nt, Homo sapiens
  misc_RNA (1)...(19): siRNA sense strand
caaugcagauccuauauua

SEQ ID NO: 48130 - RNA, 19 nt, Homo sapiens
  misc_RNA (1)...(19): siRNA sense strand
gggaauaccugcuuugauu

SEQ ID NO: 48131 - RNA, 19 nt, Homo sapiens
  misc_RNA (1)...(19): siRNA sense strand
gggagacaguguuaaauua

SEQ ID NO: 48132 - RNA, 19 nt, Homo sapiens
  misc_RNA (1)...(19): siRNA sense strand
ccaaguagaugucaacaaa

SEQ ID NO: 48133 - RNA, 19 nt, Homo sapiens
  misc_RNA (1)...(19): siRNA sense strand
gaaauaagaccaaagaaug

SEQ ID NO: 48134 - RNA, 19 nt, Homo sapiens
  misc_RNA (1)...(19): siRNA sense strand
gauaaugaguguccuauug

SEQ ID NO: 48135 - RNA, 19 nt, Homo sapiens
  misc_RNA (1)...(19): siRNA sense strand
gaagggaaauacaaagaaa

SEQ ID NO: 48136 - RNA, 19 nt, Homo sapiens
  misc_RNA (1)...(19): siRNA sense strand
gaagagggcagauuaguuu

SEQ ID NO: 48137 - RNA, 19 nt, Homo sapiens
  misc_RNA (1)...(19): siRNA sense strand
gcaaugagugcauauaaua

SEQ ID NO: 48138 - RNA, 19 nt, Homo sapiens
  misc_RNA (1)...(19): siRNA sense strand
gagaacauauucagcuuaa

SEQ ID NO: 48139 - RNA, 19 nt, Homo sapiens
  misc_RNA (1)...(19): siRNA sense strand
ggacgaagguuuuaauaua

SEQ ID NO: 48140 - RNA, 19 nt, Homo sapiens
  misc_RNA (1)...(19): siRNA sense strand
ugacagagcuagaaacaga

SEQ ID NO: 48141 - RNA, 19 nt, Homo sapiens
  misc_RNA (1)...(19): siRNA sense strand
ggagaaacauuuaauagag

SEQ ID NO: 48142 - RNA, 19 nt, Homo sapiens
  misc_RNA (1)...(19): siRNA sense strand
gagauuggaugauugacua

SEQ ID NO: 48143 - RNA, 19 nt, Homo sapiens
  misc_RNA (1)...(19): siRNA sense strand
guagaagccaggaauauua

SEQ ID NO: 48144 - RNA, 19 nt, Homo sapiens
  misc_RNA (1)...(19): siRNA sense strand
ccagauagaucgaaacaug

SEQ ID NO: 48145 - RNA, 19 nt, Homo sapiens
  misc_RNA (1)...(19): siRNA sense strand
gugaagaucuggacaaugu

SEQ ID NO: 48146 - RNA, 19 nt, Homo sapiens
  misc_RNA (1)...(19): siRNA sense strand
cuauaaaggucucauauga

SEQ ID NO: 48147 - RNA, 19 nt, Homo sapiens
  misc_RNA (1)...(19): siRNA sense strand
gcaaggaagugccucaaau

SEQ ID NO: 48148 - RNA, 19 nt, Homo sapiens
  misc_RNA (1)...(19): siRNA sense strand
gaaaguauaccuggaauga

SEQ ID NO: 48149 - RNA, 19 nt, Homo sapiens
  misc_RNA (1)...(19): siRNA sense strand
ugaagcagaucccacguua

SEQ ID NO: 48150 - RNA, 19 nt, Homo sapiens
  misc_RNA (1)...(19): siRNA sense strand
gcagauuaguuuaccgaua

SEQ ID NO: 48151 - RNA, 19 nt, Homo sapiens
  misc_RNA (1)...(19): siRNA sense strand
gaagaaugcuguaauuggu

SEQ ID NO: 48152 - RNA, 19 nt, Homo sapiens
  misc_RNA (1)...(19): siRNA sense strand
ggaauggaauguuauuugu

SEQ ID NO: 48153 - RNA, 19 nt, Homo sapiens
  misc_RNA (1)...(19): siRNA sense strand
gaaugugccuauaaucuug

SEQ ID NO: 48154 - RNA, 19 nt, Homo sapiens
  misc_RNA (1)...(19): siRNA sense strand
acacaagccuggucaauug

SEQ ID NO: 48155 - RNA, 19 nt, Homo sapiens
  misc_RNA (1)...(19): siRNA sense strand
ccuauaaucuugugaauuc

SEQ ID NO: 48156 - RNA, 19 nt, Homo sapiens
  misc_RNA (1)...(19): siRNA sense strand
gaacauauucagcuuaaug

SEQ ID NO: 48157 - RNA, 19 nt, Homo sapiens
  misc_RNA (1)...(19): siRNA sense strand
caacuacaaucuugcuaaa

SEQ ID NO: 48158 - RNA, 19 nt, Homo sapiens
  misc_RNA (1)...(19): siRNA sense strand
gaaaggacuuccagaacug

SEQ ID NO: 48159 - RNA, 19 nt, Homo sapiens
  misc_RNA (1)...(19): siRNA sense strand
gaaucaggcuacaacauga

SEQ ID NO: 48160 - RNA, 19 nt, Homo sapiens
  misc_RNA (1)...(19): siRNA sense strand
acaagucgcuguuggaauu

SEQ ID NO: 48161 - RNA, 19 nt, Homo sapiens
  misc_RNA (1)...(19): siRNA sense strand
aaacacaggugaaguuaau

SEQ ID NO: 48162 - RNA, 19 nt, Homo sapiens
  misc_RNA (1)...(19): siRNA sense strand
aagaggcuaugaugaauua

SEQ ID NO: 48163 - RNA, 19 nt, Homo sapiens
  misc_RNA (1)...(19): siRNA sense strand
guaaauggauccaggaaca

SEQ ID NO: 48164 - RNA, 19 nt, Homo sapiens
  misc_RNA (1)...(19): siRNA sense strand
ugauucaucugccaaauaa

SEQ ID NO: 48165 - RNA, 19 nt, Homo sapiens
  misc_RNA (1)...(19): siRNA sense strand
gaugagaauucaaucaaug

SEQ ID NO: 48166 - RNA, 19 nt, Homo sapiens
  misc_RNA (1)...(19): siRNA sense strand
gcaacccaauuuauaugua

SEQ ID NO: 48167 - RNA, 19 nt, Homo sapiens
  misc_RNA (1)...(19): siRNA sense strand
acaaagcgguugagcaauu

SEQ ID NO: 48168 - RNA, 19 nt, Homo sapiens
  misc_RNA (1)...(19): siRNA sense strand
gagaagcaucgacucauua

SEQ ID NO: 48169 - RNA, 19 nt, Homo sapiens
  misc_RNA (1)...(19): siRNA sense strand
guaaaugguugcaggcuau

SEQ ID NO: 48170 - RNA, 19 nt, Homo sapiens
  misc_RNA (1)...(19): siRNA sense strand
gaagaacgguuuuacacua

SEQ ID NO: 48171 - RNA, 19 nt, Homo sapiens
  misc_RNA (1)...(19): siRNA sense strand
cagauuaguuuaccgauau

SEQ ID NO: 48172 - RNA, 19 nt, Homo sapiens
  misc_RNA (1)...(19): siRNA sense strand
gagaugauccucuucgaaa

SEQ ID NO: 48173 - RNA, 19 nt, Homo sapiens
  misc_RNA (1)...(19): siRNA sense strand
gcagaaauaagaccaaaga

SEQ ID NO: 48174 - RNA, 19 nt, Homo sapiens
  misc_RNA (1)...(19): siRNA sense strand
ucacaaacguggcauauac

SEQ ID NO: 48175 - RNA, 19 nt, Homo sapiens
  misc_RNA (1)...(19): siRNA sense strand
gcacauggauggauaaaau

SEQ ID NO: 48176 - RNA, 19 nt, Homo sapiens
  misc_RNA (1)...(19): siRNA sense strand
ucacguagcugaguacaug

SEQ ID NO: 48177 - RNA, 19 nt, Homo sapiens
  misc_RNA (1)...(19): siRNA sense strand
gcacaugcccuguuuaugg

SEQ ID NO: 48178 - RNA, 19 nt, Homo sapiens
  misc_RNA (1)...(19): siRNA sense strand
gauccaaaccaacaccuua

SEQ ID NO: 48179 - RNA, 19 nt, Homo sapiens
  misc_RNA (1)...(19): siRNA sense strand
gaaaagcaguuaccgugua

SEQ ID NO: 48180 - RNA, 19 nt, Homo sapiens
  misc_RNA (1)...(19): siRNA sense strand
gauaugaacauugcacuaa

SEQ ID NO: 48181 - RNA, 19 nt, Homo sapiens
  misc_RNA (1)...(19): siRNA sense strand
gaaauugugggccugagua

SEQ ID NO: 48182 - RNA, 19 nt, Homo sapiens
  misc_RNA (1)...(19): siRNA sense strand
caaaagggcccaaugaaua

SEQ ID NO: 48183 - RNA, 19 nt, Homo sapiens
  misc_RNA (1)...(19): siRNA sense strand
caaagcgguugagcaauuu

SEQ ID NO: 48184 - RNA, 19 nt, Homo sapiens
  misc_RNA (1)...(19): siRNA sense strand
gcuaaagguuucaauuauc

SEQ ID NO: 48185 - RNA, 19 nt, Homo sapiens
  misc_RNA (1)...(19): siRNA sense strand
gaucagccauuguuugaag

SEQ ID NO: 48186 - RNA, 19 nt, Homo sapiens
  misc_RNA (1)...(19): siRNA sense strand
ggugguggcugcaguguau

SEQ ID NO: 48187 - RNA, 19 nt, Homo sapiens
  misc_RNA (1)...(19): siRNA sense strand
ggcauggucucauuccuaa

SEQ ID NO: 48188 - RNA, 19 nt, Homo sapiens
  misc_RNA (1)...(19): siRNA sense strand
gcaauguuguguuucucua

SEQ ID NO: 48189 - RNA, 19 nt, Homo sapiens
  misc_RNA (1)...(19): siRNA sense strand
ggucagcccuuaaauaugc

SEQ ID NO: 48190 - RNA, 19 nt, Homo sapiens
  misc_RNA (1)...(19): siRNA sense strand
acaauucaguccucacuuu

SEQ ID NO: 48191 - RNA, 19 nt, Homo sapiens
  misc_RNA (1)...(19): siRNA sense strand
cuagaacuauugagagaaa

SEQ ID NO: 48192 - RNA, 19 nt, Homo sapiens
  misc_RNA (1)...(19): siRNA sense strand
gaaugggaaagcagacuua

SEQ ID NO: 48193 - RNA, 19 nt, Homo sapiens
  misc_RNA (1)...(19): siRNA sense strand
auaaaggucucauaugaug

SEQ ID NO: 48194 - RNA, 19 nt, Homo sapiens
  misc_RNA (1)...(19): siRNA sense strand
gcaguuaccguguauacaa

SEQ ID NO: 48195 - RNA, 19 nt, Homo sapiens
  misc_RNA (1)...(19): siRNA sense strand
gccaaucaguuagaauuaa

SEQ ID NO: 48196 - RNA, 19 nt, Homo sapiens
  misc_RNA (1)...(19): siRNA sense strand
caacagaaagagaagauga

SEQ ID NO: 48197 - RNA, 19 nt, Homo sapiens
  misc_RNA (1)...(19): siRNA sense strand
gaagcuagaacuauugaga

SEQ ID NO: 48198 - RNA, 19 nt, Homo sapiens
  misc_RNA (1)...(19): siRNA sense strand
gagaggcaaugagugcaua

SEQ ID NO: 48199 - RNA, 19 nt, Homo sapiens
  misc_RNA (1)...(19): siRNA sense strand
ccaaugagaaugcccagua

SEQ ID NO: 48200 - RNA, 19 nt, Homo sapiens
  misc_RNA (1)...(19): siRNA sense strand
gaaagugacagagcuagaa

SEQ ID NO: 48201 - RNA, 19 nt, Homo sapiens
  misc_RNA (1)...(19): siRNA sense strand
gcugcaggcuuaccucauu

SEQ ID NO: 48202 - RNA, 19 nt, Homo sapiens
  misc_RNA (1)...(19): siRNA sense strand
ucucuugccuccagauuaa

SEQ ID NO: 48203 - RNA, 19 nt, Homo sapiens
  misc_RNA (1)...(19): siRNA sense strand
ggaugagaauucaaucaau

SEQ ID NO: 48204 - RNA, 19 nt, Homo sapiens
  misc_RNA (1)...(19): siRNA sense strand
agagaaacacgaaaccuua

SEQ ID NO: 48205 - RNA, 19 nt, Homo sapiens
  misc_RNA (1)...(19): siRNA sense strand
cagcagcaauugaagaaug

SEQ ID NO: 48206 - RNA, 19 nt, Homo sapiens
  misc_RNA (1)...(19): siRNA sense strand
gccauuguuugaagucaua

SEQ ID NO: 48207 - RNA, 19 nt, Homo sapiens
  misc_RNA (1)...(19): siRNA sense strand
gagcuacaguuccgauuag

SEQ ID NO: 48208 - RNA, 19 nt, Homo sapiens
  misc_RNA (1)...(19): siRNA sense strand
gcuacucccuugccaauca

SEQ ID NO: 48209 - RNA, 19 nt, Homo sapiens
  misc_RNA (1)...(19): siRNA sense strand
uuccagaacugaccaauga

SEQ ID NO: 48210 - RNA, 19 nt, Homo sapiens
  misc_RNA (1)...(19): siRNA sense strand
agagguauacugcugauua

SEQ ID NO: 48211 - RNA, 19 nt, Homo sapiens
  misc_RNA (1)...(19): siRNA sense strand
gucaguaaccggcuuauuu

SEQ ID NO: 48212 - RNA, 19 nt, Homo sapiens
  misc_RNA (1)...(19): siRNA sense strand
uccaggaaguguuauuaua

SEQ ID NO: 48213 - RNA, 19 nt, Homo sapiens
  misc_RNA (1)...(19): siRNA sense strand
gaaugauguuggacagcua

SEQ ID NO: 48214 - RNA, 19 nt, Homo sapiens
  misc_RNA (1)...(19): siRNA sense strand
ccgauuaggcccaacuuua

SEQ ID NO: 48215 - RNA, 19 nt, Homo sapiens
  misc_RNA (1)...(19): siRNA sense strand
cagaugauaugguuuacug

SEQ ID NO: 48216 - RNA, 19 nt, Homo sapiens
  misc_RNA (1)...(19): siRNA sense strand
ggaaggaugagaauucaau

SEQ ID NO: 48217 - RNA, 19 nt, Homo sapiens
  misc_RNA (1)...(19): siRNA sense strand
gaagacauaguggcaguaa

SEQ ID NO: 48218 - RNA, 19 nt, Homo sapiens
  misc_RNA (1)...(19): siRNA sense strand
aaauuacgcuaugggaaua

SEQ ID NO: 48219 - RNA, 19 nt, Homo sapiens
  misc_RNA (1)...(19): siRNA sense strand
ucaagauccugaauacaga

SEQ ID NO: 48220 - RNA, 19 nt, Homo sapiens
  misc_RNA (1)...(19): siRNA sense strand
caucagauuucagugguuu

SEQ ID NO: 48221 - RNA, 19 nt, Homo sapiens
  misc_RNA (1)...(19): siRNA sense strand
gaauaccugcuuugauuga

SEQ ID NO: 48222 - RNA, 19 nt, Homo sapiens
  misc_RNA (1)...(19): siRNA sense strand
ggaaagcuuuggagauugc

SEQ ID NO: 48223 - RNA, 19 nt, Homo sapiens
  misc_RNA (1)...(19): siRNA sense strand
ggagcaauguuguguuucu

SEQ ID NO: 48224 - RNA, 19 nt, Homo sapiens
  misc_RNA (1)...(19): siRNA sense strand
ugacaaugcagauccuaua

SEQ ID NO: 48225 - RNA, 19 nt, Homo sapiens
  misc_RNA (1)...(19): siRNA sense strand
aaccaacaccuuacgauua

SEQ ID NO: 48226 - RNA, 19 nt, Homo sapiens
  misc_RNA (1)...(19): siRNA sense strand
aaggagcaauguuguguuu

SEQ ID NO: 48227 - RNA, 19 nt, Homo sapiens
  misc_RNA (1)...(19): siRNA sense strand
gaaaucaucugacacaauu

SEQ ID NO: 48228 - RNA, 19 nt, Homo sapiens
  misc_RNA (1)...(19): siRNA sense strand
gcaacaaucugguucauuu

SEQ ID NO: 48229 - RNA, 19 nt, Homo sapiens
  misc_RNA (1)...(19): siRNA sense strand
caaugcagauccuauauua

SEQ ID NO: 48230 - RNA, 19 nt, Homo sapiens
  misc_RNA (1)...(19): siRNA sense strand
gggaauaccugcuuugauu

SEQ ID NO: 48231 - RNA, 19 nt, Homo sapiens
  misc_RNA (1)...(19): siRNA sense strand
gggagacaguguuaaauua

SEQ ID NO: 48232 - RNA, 19 nt, Homo sapiens
  misc_RNA (1)...(19): siRNA sense strand
ccaaguagaugucaacaaa

SEQ ID NO: 48233 - RNA, 19 nt, Homo sapiens
  misc_RNA (1)...(19): siRNA sense strand
gaaauaagaccaaagaaug

SEQ ID NO: 48234 - RNA, 19 nt, Homo sapiens
  misc_RNA (1)...(19): siRNA sense strand
gauaaugaguguccuauug

SEQ ID NO: 48235 - RNA, 19 nt, Homo sapiens
  misc_RNA (1)...(19): siRNA sense strand
gaagggaaauacaaagaaa

SEQ ID NO: 48236 - RNA, 19 nt, Homo sapiens
  misc_RNA (1)...(19): siRNA sense strand
gaagagggcagauuaguuu

SEQ ID NO: 48237 - RNA, 19 nt, Homo sapiens
  misc_RNA (1)...(19): siRNA sense strand
gcaaugagugcauauaaua

SEQ ID NO: 48238 - RNA, 19 nt, Homo sapiens
  misc_RNA (1)...(19): siRNA sense strand
gagaacauauucagcuuaa

SEQ ID NO: 48239 - RNA, 19 nt, Homo sapiens
  misc_RNA (1)...(19): siRNA sense strand
ggacgaagguuuuaauaua

SEQ ID NO: 48240 - RNA, 19 nt, Homo sapiens
  misc_RNA (1)...(19): siRNA sense strand
ugacagagcuagaaacaga

SEQ ID NO: 48241 - RNA, 19 nt, Homo sapiens
  misc_RNA (1)...(19): siRNA sense strand
ggagaaacauuuaauagag

SEQ ID NO: 48242 - RNA, 19 nt, Homo sapiens
  misc_RNA (1)...(19): siRNA sense strand
gagauuggaugauugacua

SEQ ID NO: 48243 - RNA, 19 nt, Homo sapiens
  misc_RNA (1)...(19): siRNA sense strand
guagaagccaggaauauua

SEQ ID NO: 48244 - RNA, 19 nt, Homo sapiens
  misc_RNA (1)...(19): siRNA sense strand
ccagauagaucgaaacaug

SEQ ID NO: 48245 - RNA, 19 nt, Homo sapiens
  misc_RNA (1)...(19): siRNA sense strand
gugaagaucuggacaaugu

SEQ ID NO: 48246 - RNA, 19 nt, Homo sapiens
  misc_RNA (1)...(19): siRNA sense strand
cuauaaaggucucauauga

SEQ ID NO: 48247 - RNA, 19 nt, Homo sapiens
  misc_RNA (1)...(19): siRNA sense strand
gcaaggaagugccucaaau

SEQ ID NO: 48248 - RNA, 19 nt, Homo sapiens
  misc_RNA (1)...(19): siRNA sense strand
gaaaguauaccuggaauga

SEQ ID NO: 48249 - RNA, 19 nt, Homo sapiens
  misc_RNA (1)...(19): siRNA sense strand
ugaagcagaucccacguua

SEQ ID NO: 48250 - RNA, 19 nt, Homo sapiens
  misc_RNA (1)...(19): siRNA sense strand
gcagauuaguuuaccgaua

SEQ ID NO: 48251 - RNA, 19 nt, Homo sapiens
  misc_RNA (1)...(19): siRNA sense strand
gaagaaugcuguaauuggu

SEQ ID NO: 48252 - RNA, 19 nt, Homo sapiens
  misc_RNA (1)...(19): siRNA sense strand
ggaauggaauguuauuugu

SEQ ID NO: 48253 - RNA, 19 nt, Homo sapiens
  misc_RNA (1)...(19): siRNA sense strand
gaaugugccuauaaucuug

SEQ ID NO: 48254 - RNA, 19 nt, Homo sapiens
  misc_RNA (1)...(19): siRNA sense strand
acacaagccuggucaauug

SEQ ID NO: 48255 - RNA, 19 nt, Homo sapiens
  misc_RNA (1)...(19): siRNA sense strand
ccuauaaucuugugaauuc

SEQ ID NO: 48256 - RNA, 19 nt, Homo sapiens
  misc_RNA (1)...(19): siRNA sense strand
gaacauauucagcuuaaug

SEQ ID NO: 48257 - RNA, 19 nt, Homo sapiens
  misc_RNA (1)...(19): siRNA sense strand
caacuacaaucuugcuaaa

SEQ ID NO: 48258 - RNA, 19 nt, Homo sapiens
  misc_RNA (1)...(19): siRNA sense strand
gaaaggacuuccagaacug

SEQ ID NO: 48259 - RNA, 19 nt, Homo sapiens
  misc_RNA (1)...(19): siRNA sense strand
gaaucaggcuacaacauga

SEQ ID NO: 48260 - RNA, 19 nt, Homo sapiens
  misc_RNA (1)...(19): siRNA sense strand
acaagucgcuguuggaauu

SEQ ID NO: 48261 - RNA, 19 nt, Homo sapiens
  misc_RNA (1)...(19): siRNA sense strand
aaacacaggugaaguuaau

SEQ ID NO: 48262 - RNA, 19 nt, Homo sapiens
  misc_RNA (1)...(19): siRNA sense strand
aagaggcuaugaugaauua

SEQ ID NO: 48263 - RNA, 19 nt, Homo sapiens
  misc_RNA (1)...(19): siRNA sense strand
guaaauggauccaggaaca

SEQ ID NO: 48264 - RNA, 19 nt, Homo sapiens
  misc_RNA (1)...(19): siRNA sense strand
ugauucaucugccaaauaa

SEQ ID NO: 48265 - RNA, 19 nt, Homo sapiens
  misc_RNA (1)...(19): siRNA sense strand
gaugagaauucaaucaaug

SEQ ID NO: 48266 - RNA, 19 nt, Homo sapiens
  misc_RNA (1)...(19): siRNA sense strand
gcaacccaauuuauaugua

SEQ ID NO: 48267 - RNA, 19 nt, Homo sapiens
  misc_RNA (1)...(19): siRNA sense strand
acaaagcgguugagcaauu

SEQ ID NO: 48268 - RNA, 19 nt, Homo sapiens
  misc_RNA (1)...(19): siRNA sense strand
gagaagcaucgacucauua

SEQ ID NO: 48269 - RNA, 19 nt, Homo sapiens
  misc_RNA (1)...(19): siRNA sense strand
guaaaugguugcaggcuau

SEQ ID NO: 48270 - RNA, 19 nt, Homo sapiens
  misc_RNA (1)...(19): siRNA sense strand
gaagaacgguuuuacacua

SEQ ID NO: 48271 - RNA, 19 nt, Homo sapiens
  misc_RNA (1)...(19): siRNA sense strand
cagauuaguuuaccgauau

SEQ ID NO: 48272 - RNA, 19 nt, Homo sapiens
  misc_RNA (1)...(19): siRNA sense strand
gagaugauccucuucgaaa

SEQ ID NO: 48273 - RNA, 19 nt, Homo sapiens
  misc_RNA (1)...(19): siRNA sense strand
gcagaaauaagaccaaaga

SEQ ID NO: 48274 - RNA, 19 nt, Homo sapiens
  misc_RNA (1)...(19): siRNA sense strand
ucacaaacguggcauauac

SEQ ID NO: 48275 - RNA, 19 nt, Homo sapiens
  misc_RNA (1)...(19): siRNA sense strand
gcacauggauggauaaaau

SEQ ID NO: 48276 - RNA, 19 nt, Homo sapiens
  misc_RNA (1)...(19): siRNA sense strand
ucacguagcugaguacaug

SEQ ID NO: 48277 - RNA, 19 nt, Homo sapiens
  misc_RNA (1)...(19): siRNA sense strand
gcacaugcccuguuuaugg

SEQ ID NO: 48278 - RNA, 19 nt, Homo sapiens
  misc_RNA (1)...(19): siRNA sense strand
gauccaaaccaacaccuua

SEQ ID NO: 48279 - RNA, 19 nt, Homo sapiens
  misc_RNA (1)...(19): siRNA sense strand
gaaaagcaguuaccgugua

SEQ ID NO: 48280 - RNA, 19 nt, Homo sapiens
  misc_RNA (1)...(19): siRNA sense strand
gauaugaacauugcacuaa

SEQ ID NO: 48281 - RNA, 19 nt, Homo sapiens
  misc_RNA (1)...(19): siRNA sense strand
gaaauugugggccugagua

SEQ ID NO: 48282 - RNA, 19 nt, Homo sapiens
  misc_RNA (1)...(19): siRNA sense strand
caaaagggcccaaugaaua

SEQ ID NO: 48283 - RNA, 19 nt, Homo sapiens
  misc_RNA (1)...(19): siRNA sense strand
caaagcgguugagcaauuu

SEQ ID NO: 48284 - RNA, 19 nt, Homo sapiens
  misc_RNA (1)...(19): siRNA sense strand
gcuaaagguuucaauuauc

SEQ ID NO: 48285 - RNA, 19 nt, Homo sapiens
  misc_RNA (1)...(19): siRNA sense strand
gaucagccauuguuugaag

SEQ ID NO: 48286 - RNA, 19 nt, Homo sapiens
  misc_RNA (1)...(19): siRNA sense strand
ggugguggcugcaguguau

SEQ ID NO: 48287 - RNA, 19 nt, Homo sapiens
  misc_RNA (1)...(19): siRNA sense strand
ggcauggucucauuccuaa

SEQ ID NO: 48288 - RNA, 19 nt, Homo sapiens
  misc_RNA (1)...(19): siRNA sense strand
gcaauguuguguuucucua

SEQ ID NO: 48289 - RNA, 19 nt, Homo sapiens
  misc_RNA (1)...(19): siRNA sense strand
ggucagcccuuaaauaugc

SEQ ID NO: 48290 - RNA, 19 nt, Homo sapiens
  misc_RNA (1)...(19): siRNA sense strand
acaauucaguccucacuuu

SEQ ID NO: 48291 - RNA, 19 nt, Homo sapiens
  misc_RNA (1)...(19): siRNA sense strand
cuagaacuauugagagaaa

SEQ ID NO: 48292 - RNA, 19 nt, Homo sapiens
  misc_RNA (1)...(19): siRNA sense strand
gaaugggaaagcagacuua

SEQ ID NO: 48293 - RNA, 19 nt, Homo sapiens
  misc_RNA (1)...(19): siRNA sense strand
auaaaggucucauaugaug

SEQ ID NO: 48294 - RNA, 19 nt, Homo sapiens
  misc_RNA (1)...(19): siRNA sense strand
gcaguuaccguguauacaa

SEQ ID NO: 48295 - RNA, 19 nt, Homo sapiens
  misc_RNA (1)...(19): siRNA sense strand
gccaaucaguuagaauuaa

SEQ ID NO: 48296 - RNA, 19 nt, Homo sapiens
  misc_RNA (1)...(19): siRNA sense strand
caacagaaagagaagauga

SEQ ID NO: 48297 - RNA, 19 nt, Homo sapiens
  misc_RNA (1)...(19): siRNA sense strand
gaagcuagaacuauugaga

SEQ ID NO: 48298 - RNA, 19 nt, Homo sapiens
  misc_RNA (1)...(19): siRNA sense strand
gagaggcaaugagugcaua

SEQ ID NO: 48299 - RNA, 19 nt, Homo sapiens
  misc_RNA (1)...(19): siRNA sense strand
ccaaugagaaugcccagua

SEQ ID NO: 48300 - RNA, 19 nt, Homo sapiens
  misc_RNA (1)...(19): siRNA sense strand
gaaagugacagagcuagaa

SEQ ID NO: 48301 - RNA, 19 nt, Homo sapiens
  misc_RNA (1)...(19): siRNA sense strand
gcugcaggcuuaccucauu

SEQ ID NO: 48302 - RNA, 19 nt, Homo sapiens
  misc_RNA (1)...(19): siRNA sense strand
ucucuugccuccagauuaa

SEQ ID NO: 48303 - RNA, 19 nt, Homo sapiens
  misc_RNA (1)...(19): siRNA sense strand
ggaugagaauucaaucaau

SEQ ID NO: 48304 - RNA, 19 nt, Homo sapiens
  misc_RNA (1)...(19): siRNA sense strand
agagaaacacgaaaccuua

SEQ ID NO: 48305 - RNA, 19 nt, Homo sapiens
  misc_RNA (1)...(19): siRNA sense strand
cagcagcaauugaagaaug

SEQ ID NO: 48306 - RNA, 19 nt, Homo sapiens
  misc_RNA (1)...(19): siRNA sense strand
gccauuguuugaagucaua

SEQ ID NO: 48307 - RNA, 19 nt, Homo sapiens
  misc_RNA (1)...(19): siRNA sense strand
gagcuacaguuccgauuag

SEQ ID NO: 48308 - RNA, 19 nt, Homo sapiens
  misc_RNA (1)...(19): siRNA sense strand
gcuacucccuugccaauca

SEQ ID NO: 48309 - RNA, 19 nt, Homo sapiens
  misc_RNA (1)...(19): siRNA sense strand
uuccagaacugaccaauga

SEQ ID NO: 48310 - RNA, 19 nt, Homo sapiens
  misc_RNA (1)...(19): siRNA sense strand
agagguauacugcugauua

SEQ ID NO: 48311 - RNA, 19 nt, Homo sapiens
  misc_RNA (1)...(19): siRNA sense strand
gucaguaaccggcuuauuu

SEQ ID NO: 48312 - RNA, 19 nt, Homo sapiens
  misc_RNA (1)...(19): siRNA sense strand
uccaggaaguguuauuaua

SEQ ID NO: 48313 - RNA, 19 nt, Homo sapiens
  misc_RNA (1)...(19): siRNA sense strand
gaaugauguuggacagcua

SEQ ID NO: 48314 - RNA, 19 nt, Homo sapiens
  misc_RNA (1)...(19): siRNA sense strand
ccgauuaggcccaacuuua

SEQ ID NO: 48315 - RNA, 19 nt, Homo sapiens
  misc_RNA (1)...(19): siRNA sense strand
cagaugauaugguuuacug

SEQ ID NO: 48316 - RNA, 19 nt, Homo sapiens
  misc_RNA (1)...(19): siRNA sense strand
ggaaggaugagaauucaau

SEQ ID NO: 48317 - RNA, 19 nt, Homo sapiens
  misc_RNA (1)...(19): siRNA sense strand
gaagacauaguggcaguaa

SEQ ID NO: 48318 - RNA, 19 nt, Homo sapiens
  misc_RNA (1)...(19): siRNA sense strand
aaauuacgcuaugggaaua

SEQ ID NO: 48319 - RNA, 19 nt, Homo sapiens
  misc_RNA (1)...(19): siRNA sense strand
ucaagauccugaauacaga

SEQ ID NO: 48320 - RNA, 19 nt, Homo sapiens
  misc_RNA (1)...(19): siRNA sense strand
caucagauuucagugguuu

SEQ ID NO: 48321 - RNA, 19 nt, Homo sapiens
  misc_RNA (1)...(19): siRNA sense strand
gaauaccugcuuugauuga

SEQ ID NO: 48322 - RNA, 19 nt, Homo sapiens
  misc_RNA (1)...(19): siRNA sense strand
ggaaagcuuuggagauugc

SEQ ID NO: 48323 - RNA, 19 nt, Homo sapiens
  misc_RNA (1)...(19): siRNA sense strand
ggagcaauguuguguuucu

SEQ ID NO: 48324 - RNA, 19 nt, Homo sapiens
  misc_RNA (1)...(19): siRNA sense strand
ugacaaugcagauccuaua

SEQ ID NO: 48325 - RNA, 19 nt, Homo sapiens
  misc_RNA (1)...(19): siRNA sense strand
aaccaacaccuuacgauua

SEQ ID NO: 48326 - RNA, 19 nt, Homo sapiens
  misc_RNA (1)...(19): siRNA sense strand
aaggagcaauguuguguuu

SEQ ID NO: 48327 - RNA, 19 nt, Homo sapiens
  misc_RNA (1)...(19): siRNA sense strand
gaaaucaucugacacaauu

SEQ ID NO: 48328 - RNA, 19 nt, Homo sapiens
  misc_RNA (1)...(19): siRNA sense strand
gcaacaaucugguucauuu

SEQ ID NO: 48329 - RNA, 19 nt, Homo sapiens
  misc_RNA (1)...(19): siRNA sense strand
caaugcagauccuauauua

SEQ ID NO: 48330 - RNA, 19 nt, Homo sapiens
  misc_RNA (1)...(19): siRNA sense strand
gggaauaccugcuuugauu

SEQ ID NO: 48331 - RNA, 19 nt, Homo sapiens
  misc_RNA (1)...(19): siRNA sense strand
gggagacaguguuaaauua

SEQ ID NO: 48332 - RNA, 19 nt, Homo sapiens
  misc_RNA (1)...(19): siRNA sense strand
ccaaguagaugucaacaaa

SEQ ID NO: 48333 - RNA, 19 nt, Homo sapiens
  misc_RNA (1)...(19): siRNA sense strand
gaaauaagaccaaagaaug

SEQ ID NO: 48334 - RNA, 19 nt, Homo sapiens
  misc_RNA (1)...(19): siRNA sense strand
gauaaugaguguccuauug

SEQ ID NO: 48335 - RNA, 19 nt, Homo sapiens
  misc_RNA (1)...(19): siRNA sense strand
gaagggaaauacaaagaaa

SEQ ID NO: 48336 - RNA, 19 nt, Homo sapiens
  misc_RNA (1)...(19): siRNA sense strand
gaagagggcagauuaguuu

SEQ ID NO: 48337 - RNA, 19 nt, Homo sapiens
  misc_RNA (1)...(19): siRNA sense strand
gcaaugagugcauauaaua

SEQ ID NO: 48338 - RNA, 19 nt, Homo sapiens
  misc_RNA (1)...(19): siRNA sense strand
gagaacauauucagcuuaa

SEQ ID NO: 48339 - RNA, 19 nt, Homo sapiens
  misc_RNA (1)...(19): siRNA sense strand
ggacgaagguuuuaauaua

SEQ ID NO: 48340 - RNA, 19 nt, Homo sapiens
  misc_RNA (1)...(19): siRNA sense strand
ugacagagcuagaaacaga

SEQ ID NO: 48341 - RNA, 19 nt, Homo sapiens
  misc_RNA (1)...(19): siRNA sense strand
ggagaaacauuuaauagag

SEQ ID NO: 48342 - RNA, 19 nt, Homo sapiens
  misc_RNA (1)...(19): siRNA sense strand
gagauuggaugauugacua

SEQ ID NO: 48343 - RNA, 19 nt, Homo sapiens
  misc_RNA (1)...(19): siRNA sense strand
guagaagccaggaauauua

SEQ ID NO: 48344 - RNA, 19 nt, Homo sapiens
  misc_RNA (1)...(19): siRNA sense strand
ccagauagaucgaaacaug

SEQ ID NO: 48345 - RNA, 19 nt, Homo sapiens
  misc_RNA (1)...(19): siRNA sense strand
gugaagaucuggacaaugu

SEQ ID NO: 48346 - RNA, 19 nt, Homo sapiens
  misc_RNA (1)...(19): siRNA sense strand
cuauaaaggucucauauga

SEQ ID NO: 48347 - RNA, 19 nt, Homo sapiens
  misc_RNA (1)...(19): siRNA sense strand
gcaaggaagugccucaaau

SEQ ID NO: 48348 - RNA, 19 nt, Homo sapiens
  misc_RNA (1)...(19): siRNA sense strand
gaaaguauaccuggaauga

SEQ ID NO: 48349 - RNA, 19 nt, Homo sapiens
  misc_RNA (1)...(19): siRNA sense strand
ugaagcagaucccacguua

SEQ ID NO: 48350 - RNA, 19 nt, Homo sapiens
  misc_RNA (1)...(19): siRNA sense strand
gcagauuaguuuaccgaua

SEQ ID NO: 48351 - RNA, 19 nt, Homo sapiens
  misc_RNA (1)...(19): siRNA sense strand
gaagaaugcuguaauuggu

SEQ ID NO: 48352 - RNA, 19 nt, Homo sapiens
  misc_RNA (1)...(19): siRNA sense strand
ggaauggaauguuauuugu

SEQ ID NO: 48353 - RNA, 19 nt, Homo sapiens
  misc_RNA (1)...(19): siRNA sense strand
gaaugugccuauaaucuug

SEQ ID NO: 48354 - RNA, 19 nt, Homo sapiens
  misc_RNA (1)...(19): siRNA sense strand
acacaagccuggucaauug

SEQ ID NO: 48355 - RNA, 19 nt, Homo sapiens
  misc_RNA (1)...(19): siRNA sense strand
ccuauaaucuugugaauuc

SEQ ID NO: 48356 - RNA, 19 nt, Homo sapiens
  misc_RNA (1)...(19): siRNA sense strand
gaacauauucagcuuaaug

SEQ ID NO: 48357 - RNA, 19 nt, Homo sapiens
  misc_RNA (1)...(19): siRNA sense strand
caacuacaaucuugcuaaa

SEQ ID NO: 48358 - RNA, 19 nt, Homo sapiens
  misc_RNA (1)...(19): siRNA sense strand
gaaaggacuuccagaacug

SEQ ID NO: 48359 - RNA, 19 nt, Homo sapiens
  misc_RNA (1)...(19): siRNA sense strand
gaaucaggcuacaacauga

SEQ ID NO: 48360 - RNA, 19 nt, Homo sapiens
  misc_RNA (1)...(19): siRNA sense strand
acaagucgcuguuggaauu

SEQ ID NO: 48361 - RNA, 19 nt, Homo sapiens
  misc_RNA (1)...(19): siRNA sense strand
aaacacaggugaaguuaau

SEQ ID NO: 48362 - RNA, 19 nt, Homo sapiens
  misc_RNA (1)...(19): siRNA sense strand
aagaggcuaugaugaauua

SEQ ID NO: 48363 - RNA, 19 nt, Homo sapiens
  misc_RNA (1)...(19): siRNA sense strand
guaaauggauccaggaaca

SEQ ID NO: 48364 - RNA, 19 nt, Homo sapiens
  misc_RNA (1)...(19): siRNA sense strand
ugauucaucugccaaauaa

SEQ ID NO: 48365 - RNA, 19 nt, Homo sapiens
  misc_RNA (1)...(19): siRNA sense strand
gaugagaauucaaucaaug

SEQ ID NO: 48366 - RNA, 19 nt, Homo sapiens
  misc_RNA (1)...(19): siRNA sense strand
gcaacccaauuuauaugua

SEQ ID NO: 48367 - RNA, 19 nt, Homo sapiens
  misc_RNA (1)...(19): siRNA sense strand
acaaagcgguugagcaauu

SEQ ID NO: 48368 - RNA, 19 nt, Homo sapiens
  misc_RNA (1)...(19): siRNA sense strand
gagaagcaucgacucauua

SEQ ID NO: 48369 - RNA, 19 nt, Homo sapiens
  misc_RNA (1)...(19): siRNA sense strand
guaaaugguugcaggcuau

SEQ ID NO: 48370 - RNA, 19 nt, Homo sapiens
  misc_RNA (1)...(19): siRNA sense strand
gaagaacgguuuuacacua

SEQ ID NO: 48371 - RNA, 19 nt, Homo sapiens
  misc_RNA (1)...(19): siRNA sense strand
cagauuaguuuaccgauau

SEQ ID NO: 48372 - RNA, 19 nt, Homo sapiens
  misc_RNA (1)...(19): siRNA sense strand
gagaugauccucuucgaaa

SEQ ID NO: 48373 - RNA, 19 nt, Homo sapiens
  misc_RNA (1)...(19): siRNA sense strand
gcagaaauaagaccaaaga

SEQ ID NO: 48374 - RNA, 19 nt, Homo sapiens
  misc_RNA (1)...(19): siRNA sense strand
ucacaaacguggcauauac

SEQ ID NO: 48375 - RNA, 19 nt, Homo sapiens
  misc_RNA (1)...(19): siRNA sense strand
gcacauggauggauaaaau

SEQ ID NO: 48376 - RNA, 19 nt, Homo sapiens
  misc_RNA (1)...(19): siRNA sense strand
ucacguagcugaguacaug

SEQ ID NO: 48377 - RNA, 19 nt, Homo sapiens
  misc_RNA (1)...(19): siRNA sense strand
gcacaugcccuguuuaugg

SEQ ID NO: 48378 - RNA, 19 nt, Homo sapiens
  misc_RNA (1)...(19): siRNA sense strand
gauccaaaccaacaccuua

SEQ ID NO: 48379 - RNA, 19 nt, Homo sapiens
  misc_RNA (1)...(19): siRNA sense strand
gaaaagcaguuaccgugua

SEQ ID NO: 48380 - RNA, 19 nt, Homo sapiens
  misc_RNA (1)...(19): siRNA sense strand
gauaugaacauugcacuaa

SEQ ID NO: 48381 - RNA, 19 nt, Homo sapiens
  misc_RNA (1)...(19): siRNA sense strand
gaaauugugggccugagua

SEQ ID NO: 48382 - RNA, 19 nt, Homo sapiens
  misc_RNA (1)...(19): siRNA sense strand
caaaagggcccaaugaaua

SEQ ID NO: 48383 - RNA, 19 nt, Homo sapiens
  misc_RNA (1)...(19): siRNA sense strand
caaagcgguugagcaauuu

SEQ ID NO: 48384 - RNA, 19 nt, Homo sapiens
  misc_RNA (1)...(19): siRNA sense strand
gcuaaagguuucaauuauc

SEQ ID NO: 48385 - RNA, 19 nt, Homo sapiens
  misc_RNA (1)...(19): siRNA sense strand
gaucagccauuguuugaag

SEQ ID NO: 48386 - RNA, 19 nt, Homo sapiens
  misc_RNA (1)...(19): siRNA sense strand
ggugguggcugcaguguau

SEQ ID NO: 48387 - RNA, 19 nt, Homo sapiens
  misc_RNA (1)...(19): siRNA sense strand
ggcauggucucauuccuaa

SEQ ID NO: 48388 - RNA, 19 nt, Homo sapiens
  misc_RNA (1)...(19): siRNA sense strand
gcaauguuguguuucucua

SEQ ID NO: 48389 - RNA, 19 nt, Homo sapiens
  misc_RNA (1)...(19): siRNA sense strand
ggucagcccuuaaauaugc

SEQ ID NO: 48390 - RNA, 19 nt, Homo sapiens
  misc_RNA (1)...(19): siRNA sense strand
acaauucaguccucacuuu

SEQ ID NO: 48391 - RNA, 19 nt, Homo sapiens
  misc_RNA (1)...(19): siRNA sense strand
cuagaacuauugagagaaa

SEQ ID NO: 48392 - RNA, 19 nt, Homo sapiens
  misc_RNA (1)...(19): siRNA sense strand
gaaugggaaagcagacuua

SEQ ID NO: 48393 - RNA, 19 nt, Homo sapiens
  misc_RNA (1)...(19): siRNA sense strand
auaaaggucucauaugaug

SEQ ID NO: 48394 - RNA, 19 nt, Homo sapiens
  misc_RNA (1)...(19): siRNA sense strand
gcaguuaccguguauacaa

SEQ ID NO: 48395 - RNA, 19 nt, Homo sapiens
  misc_RNA (1)...(19): siRNA sense strand
gccaaucaguuagaauuaa

SEQ ID NO: 48396 - RNA, 19 nt, Homo sapiens
  misc_RNA (1)...(19): siRNA sense strand
caacagaaagagaagauga

SEQ ID NO: 48397 - RNA, 19 nt, Homo sapiens
  misc_RNA (1)...(19): siRNA sense strand
gaagcuagaacuauugaga

SEQ ID NO: 48398 - RNA, 19 nt, Homo sapiens
  misc_RNA (1)...(19): siRNA sense strand
gagaggcaaugagugcaua

SEQ ID NO: 48399 - RNA, 19 nt, Homo sapiens
  misc_RNA (1)...(19): siRNA sense strand
ccaaugagaaugcccagua

SEQ ID NO: 48400 - RNA, 19 nt, Homo sapiens
  misc_RNA (1)...(19): siRNA sense strand
gaaagugacagagcuagaa

SEQ ID NO: 48401 - RNA, 19 nt, Homo sapiens
  misc_RNA (1)...(19): siRNA sense strand
gcugcaggcuuaccucauu

SEQ ID NO: 48402 - RNA, 19 nt, Homo sapiens
  misc_RNA (1)...(19): siRNA sense strand
ucucuugccuccagauuaa

SEQ ID NO: 48403 - RNA, 19 nt, Homo sapiens
  misc_RNA (1)...(19): siRNA sense strand
ggaugagaauucaaucaau

SEQ ID NO: 48404 - RNA, 19 nt, Homo sapiens
  misc_RNA (1)...(19): siRNA sense strand
agagaaacacgaaaccuua

SEQ ID NO: 48405 - RNA, 19 nt, Homo sapiens
  misc_RNA (1)...(19): siRNA sense strand
cagcagcaauugaagaaug

SEQ ID NO: 48406 - RNA, 19 nt, Homo sapiens
  misc_RNA (1)...(19): siRNA sense strand
gccauuguuugaagucaua

SEQ ID NO: 48407 - RNA, 19 nt, Homo sapiens
  misc_RNA (1)...(19): siRNA sense strand
gagcuacaguuccgauuag

SEQ ID NO: 48408 - RNA, 19 nt, Homo sapiens
  misc_RNA (1)...(19): siRNA sense strand
gcuacucccuugccaauca

SEQ ID NO: 48409 - RNA, 19 nt, Homo sapiens
  misc_RNA (1)...(19): siRNA sense strand
uuccagaacugaccaauga

SEQ ID NO: 48410 - RNA, 19 nt, Homo sapiens
  misc_RNA (1)...(19): siRNA sense strand
agagguauacugcugauua

SEQ ID NO: 48411 - RNA, 19 nt, Homo sapiens
  misc_RNA (1)...(19): siRNA sense strand
gucaguaaccggcuuauuu

SEQ ID NO: 48412 - RNA, 19 nt, Homo sapiens
  misc_RNA (1)...(19): siRNA sense strand
uccaggaaguguuauuaua

SEQ ID NO: 48413 - RNA, 19 nt, Homo sapiens
  misc_RNA (1)...(19): siRNA sense strand
gaaugauguuggacagcua

SEQ ID NO: 48414 - RNA, 19 nt, Homo sapiens
  misc_RNA (1)...(19): siRNA sense strand
ccgauuaggcccaacuuua

SEQ ID NO: 48415 - RNA, 19 nt, Homo sapiens
  misc_RNA (1)...(19): siRNA sense strand
cagaugauaugguuuacug

SEQ ID NO: 48416 - RNA, 19 nt, Homo sapiens
  misc_RNA (1)...(19): siRNA sense strand
ggaaggaugagaauucaau

SEQ ID NO: 48417 - RNA, 19 nt, Homo sapiens
  misc_RNA (1)...(19): siRNA sense strand
gaagacauaguggcaguaa

SEQ ID NO: 48418 - RNA, 19 nt, Homo sapiens
  misc_RNA (1)...(19): siRNA sense strand
aaauuacgcuaugggaaua

SEQ ID NO: 48419 - RNA, 19 nt, Homo sapiens
  misc_RNA (1)...(19): siRNA sense strand
ucaagauccugaauacaga

SEQ ID NO: 48420 - RNA, 19 nt, Homo sapiens
  misc_RNA (1)...(19): siRNA sense strand
caucagauuucagugguuu

SEQ ID NO: 48421 - RNA, 19 nt, Homo sapiens
  misc_RNA (1)...(19): siRNA sense strand
gaauaccugcuuugauuga

SEQ ID NO: 48422 - RNA, 19 nt, Homo sapiens
  misc_RNA (1)...(19): siRNA sense strand
ggaaagcuuuggagauugc

SEQ ID NO: 48423 - RNA, 19 nt, Homo sapiens
  misc_RNA (1)...(19): siRNA sense strand
ggagcaauguuguguuucu

SEQ ID NO: 48424 - RNA, 19 nt, Homo sapiens
  misc_RNA (1)...(19): siRNA sense strand
ugacaaugcagauccuaua

SEQ ID NO: 48425 - RNA, 19 nt, Homo sapiens
  misc_RNA (1)...(19): siRNA sense strand
aaccaacaccuuacgauua

SEQ ID NO: 48426 - RNA, 19 nt, Homo sapiens
  misc_RNA (1)...(19): siRNA sense strand
aaggagcaauguuguguuu

SEQ ID NO: 48427 - RNA, 19 nt, Homo sapiens
  misc_RNA (1)...(19): siRNA sense strand
gaaaucaucugacacaauu

SEQ ID NO: 48428 - RNA, 19 nt, Homo sapiens
  misc_RNA (1)...(19): siRNA sense strand
gcaacaaucugguucauuu

SEQ ID NO: 48429 - RNA, 19 nt, Homo sapiens
  misc_RNA (1)...(19): siRNA sense strand
caaugcagauccuauauua

SEQ ID NO: 48430 - RNA, 19 nt, Homo sapiens
  misc_RNA (1)...(19): siRNA sense strand
gggaauaccugcuuugauu

SEQ ID NO: 48431 - RNA, 19 nt, Homo sapiens
  misc_RNA (1)...(19): siRNA sense strand
gggagacaguguuaaauua

SEQ ID NO: 48432 - RNA, 19 nt, Homo sapiens
  misc_RNA (1)...(19): siRNA sense strand
ccaaguagaugucaacaaa

SEQ ID NO: 48433 - RNA, 19 nt, Homo sapiens
  misc_RNA (1)...(19): siRNA sense strand
gaaauaagaccaaagaaug

SEQ ID NO: 48434 - RNA, 19 nt, Homo sapiens
  misc_RNA (1)...(19): siRNA sense strand
gauaaugaguguccuauug

SEQ ID NO: 48435 - RNA, 19 nt, Homo sapiens
  misc_RNA (1)...(19): siRNA sense strand
gaagggaaauacaaagaaa

SEQ ID NO: 48436 - RNA, 19 nt, Homo sapiens
  misc_RNA (1)...(19): siRNA sense strand
gaagagggcagauuaguuu

SEQ ID NO: 48437 - RNA, 19 nt, Homo sapiens
  misc_RNA (1)...(19): siRNA sense strand
gcaaugagugcauauaaua

SEQ ID NO: 48438 - RNA, 19 nt, Homo sapiens
  misc_RNA (1)...(19): siRNA sense strand
gagaacauauucagcuuaa

SEQ ID NO: 48439 - RNA, 19 nt, Homo sapiens
  misc_RNA (1)...(19): siRNA sense strand
ggacgaagguuuuaauaua

SEQ ID NO: 48440 - RNA, 19 nt, Homo sapiens
  misc_RNA (1)...(19): siRNA sense strand
ugacagagcuagaaacaga

SEQ ID NO: 48441 - RNA, 19 nt, Homo sapiens
  misc_RNA (1)...(19): siRNA sense strand
ggagaaacauuuaauagag

SEQ ID NO: 48442 - RNA, 19 nt, Homo sapiens
  misc_RNA (1)...(19): siRNA sense strand
gagauuggaugauugacua

SEQ ID NO: 48443 - RNA, 19 nt, Homo sapiens
  misc_RNA (1)...(19): siRNA sense strand
guagaagccaggaauauua

SEQ ID NO: 48444 - RNA, 19 nt, Homo sapiens
  misc_RNA (1)...(19): siRNA sense strand
ccagauagaucgaaacaug

SEQ ID NO: 48445 - RNA, 19 nt, Homo sapiens
  misc_RNA (1)...(19): siRNA sense strand
gugaagaucuggacaaugu

SEQ ID NO: 48446 - RNA, 19 nt, Homo sapiens
  misc_RNA (1)...(19): siRNA sense strand
cuauaaaggucucauauga

SEQ ID NO: 48447 - RNA, 19 nt, Homo sapiens
  misc_RNA (1)...(19): siRNA sense strand
gcaaggaagugccucaaau

SEQ ID NO: 48448 - RNA, 19 nt, Homo sapiens
  misc_RNA (1)...(19): siRNA sense strand
gaaaguauaccuggaauga

SEQ ID NO: 48449 - RNA, 19 nt, Homo sapiens
  misc_RNA (1)...(19): siRNA sense strand
ugaagcagaucccacguua

SEQ ID NO: 48450 - RNA, 19 nt, Homo sapiens
  misc_RNA (1)...(19): siRNA sense strand
gcagauuaguuuaccgaua

SEQ ID NO: 48451 - RNA, 19 nt, Homo sapiens
  misc_RNA (1)...(19): siRNA sense strand
gaagaaugcuguaauuggu

SEQ ID NO: 48452 - RNA, 19 nt, Homo sapiens
  misc_RNA (1)...(19): siRNA sense strand
ggaauggaauguuauuugu

SEQ ID NO: 48453 - RNA, 19 nt, Homo sapiens
  misc_RNA (1)...(19): siRNA sense strand
gaaugugccuauaaucuug

SEQ ID NO: 48454 - RNA, 19 nt, Homo sapiens
  misc_RNA (1)...(19): siRNA sense strand
acacaagccuggucaauug

SEQ ID NO: 48455 - RNA, 19 nt, Homo sapiens
  misc_RNA (1)...(19): siRNA sense strand
ccuauaaucuugugaauuc

SEQ ID NO: 48456 - RNA, 19 nt, Homo sapiens
  misc_RNA (1)...(19): siRNA sense strand
gaacauauucagcuuaaug

SEQ ID NO: 48457 - RNA, 19 nt, Homo sapiens
  misc_RNA (1)...(19): siRNA sense strand
caacuacaaucuugcuaaa

SEQ ID NO: 48458 - RNA, 19 nt, Homo sapiens
  misc_RNA (1)...(19): siRNA sense strand
gaaaggacuuccagaacug

SEQ ID NO: 48459 - RNA, 19 nt, Homo sapiens
  misc_RNA (1)...(19): siRNA sense strand
gaaucaggcuacaacauga

SEQ ID NO: 48460 - RNA, 19 nt, Homo sapiens
  misc_RNA (1)...(19): siRNA sense strand
acaagucgcuguuggaauu

SEQ ID NO: 48461 - RNA, 19 nt, Homo sapiens
  misc_RNA (1)...(19): siRNA sense strand
aaacacaggugaaguuaau

SEQ ID NO: 48462 - RNA, 19 nt, Homo sapiens
  misc_RNA (1)...(19): siRNA sense strand
aagaggcuaugaugaauua

SEQ ID NO: 48463 - RNA, 19 nt, Homo sapiens
  misc_RNA (1)...(19): siRNA sense strand
guaaauggauccaggaaca

SEQ ID NO: 48464 - RNA, 19 nt, Homo sapiens
  misc_RNA (1)...(19): siRNA sense strand
ugauucaucugccaaauaa

SEQ ID NO: 48465 - RNA, 19 nt, Homo sapiens
  misc_RNA (1)...(19): siRNA sense strand
gaugagaauucaaucaaug

SEQ ID NO: 48466 - RNA, 19 nt, Homo sapiens
  misc_RNA (1)...(19): siRNA sense strand
gcaacccaauuuauaugua

SEQ ID NO: 48467 - RNA, 19 nt, Homo sapiens
  misc_RNA (1)...(19): siRNA sense strand
acaaagcgguugagcaauu

SEQ ID NO: 48468 - RNA, 19 nt, Homo sapiens
  misc_RNA (1)...(19): siRNA sense strand
gagaagcaucgacucauua

SEQ ID NO: 48469 - RNA, 19 nt, Homo sapiens
  misc_RNA (1)...(19): siRNA sense strand
guaaaugguugcaggcuau

SEQ ID NO: 48470 - RNA, 19 nt, Homo sapiens
  misc_RNA (1)...(19): siRNA sense strand
gaagaacgguuuuacacua

SEQ ID NO: 48471 - RNA, 19 nt, Homo sapiens
  misc_RNA (1)...(19): siRNA sense strand
cagauuaguuuaccgauau

SEQ ID NO: 48472 - RNA, 19 nt, Homo sapiens
  misc_RNA (1)...(19): siRNA sense strand
gagaugauccucuucgaaa

SEQ ID NO: 48473 - RNA, 19 nt, Homo sapiens
  misc_RNA (1)...(19): siRNA sense strand
gcagaaauaagaccaaaga

SEQ ID NO: 48474 - RNA, 19 nt, Homo sapiens
  misc_RNA (1)...(19): siRNA sense strand
ucacaaacguggcauauac

SEQ ID NO: 48475 - RNA, 19 nt, Homo sapiens
  misc_RNA (1)...(19): siRNA sense strand
gcacauggauggauaaaau

SEQ ID NO: 48476 - RNA, 19 nt, Homo sapiens
  misc_RNA (1)...(19): siRNA sense strand
ucacguagcugaguacaug

SEQ ID NO: 48477 - RNA, 19 nt, Homo sapiens
  misc_RNA (1)...(19): siRNA sense strand
gcacaugcccuguuuaugg

SEQ ID NO: 48478 - RNA, 19 nt, Homo sapiens
  misc_RNA (1)...(19): siRNA sense strand
gauccaaaccaacaccuua

SEQ ID NO: 48479 - RNA, 19 nt, Homo sapiens
  misc_RNA (1)...(19): siRNA sense strand
gaaaagcaguuaccgugua

SEQ ID NO: 48480 - RNA, 19 nt, Homo sapiens
  misc_RNA (1)...(19): siRNA sense strand
gauaugaacauugcacuaa

SEQ ID NO: 48481 - RNA, 19 nt, Homo sapiens
  misc_RNA (1)...(19): siRNA sense strand
gaaauugugggccugagua

SEQ ID NO: 48482 - RNA, 19 nt, Homo sapiens
  misc_RNA (1)...(19): siRNA sense strand
caaaagggcccaaugaaua

SEQ ID NO: 48483 - RNA, 19 nt, Homo sapiens
  misc_RNA (1)...(19): siRNA sense strand
caaagcgguugagcaauuu

SEQ ID NO: 48484 - RNA, 19 nt, Homo sapiens
  misc_RNA (1)...(19): siRNA sense strand
gcuaaagguuucaauuauc

SEQ ID NO: 48485 - RNA, 19 nt, Homo sapiens
  misc_RNA (1)...(19): siRNA sense strand
gaucagccauuguuugaag

SEQ ID NO: 48486 - RNA, 19 nt, Homo sapiens
  misc_RNA (1)...(19): siRNA sense strand
ggugguggcugcaguguau

SEQ ID NO: 48487 - RNA, 19 nt, Homo sapiens
  misc_RNA (1)...(19): siRNA sense strand
ggcauggucucauuccuaa

SEQ ID NO: 48488 - RNA, 19 nt, Homo sapiens
  misc_RNA (1)...(19): siRNA sense strand
gcaauguuguguuucucua

SEQ ID NO: 48489 - RNA, 19 nt, Homo sapiens
  misc_RNA (1)...(19): siRNA sense strand
ggucagcccuuaaauaugc

SEQ ID NO: 48490 - RNA, 19 nt, Homo sapiens
  misc_RNA (1)...(19): siRNA sense strand
acaauucaguccucacuuu

SEQ ID NO: 48491 - RNA, 19 nt, Homo sapiens
  misc_RNA (1)...(19): siRNA sense strand
cuagaacuauugagagaaa

SEQ ID NO: 48492 - RNA, 19 nt, Homo sapiens
  misc_RNA (1)...(19): siRNA sense strand
gaaugggaaagcagacuua

SEQ ID NO: 48493 - RNA, 19 nt, Homo sapiens
  misc_RNA (1)...(19): siRNA sense strand
auaaaggucucauaugaug

SEQ ID NO: 48494 - RNA, 19 nt, Homo sapiens
  misc_RNA (1)...(19): siRNA sense strand
gcaguuaccguguauacaa

SEQ ID NO: 48495 - RNA, 19 nt, Homo sapiens
  misc_RNA (1)...(19): siRNA sense strand
gccaaucaguuagaauuaa

SEQ ID NO: 48496 - RNA, 19 nt, Homo sapiens
  misc_RNA (1)...(19): siRNA sense strand
caacagaaagagaagauga

SEQ ID NO: 48497 - RNA, 19 nt, Homo sapiens
  misc_RNA (1)...(19): siRNA sense strand
gaagcuagaacuauugaga

SEQ ID NO: 48498 - RNA, 19 nt, Homo sapiens
  misc_RNA (1)...(19): siRNA sense strand
gagaggcaaugagugcaua

SEQ ID NO: 48499 - RNA, 19 nt, Homo sapiens
  misc_RNA (1)...(19): siRNA sense strand
ccaaugagaaugcccagua

SEQ ID NO: 48500 - RNA, 19 nt, Homo sapiens
  misc_RNA (1)...(19): siRNA sense strand
gaaagugacagagcuagaa

SEQ ID NO: 48501 - RNA, 19 nt, Homo sapiens
  misc_RNA (1)...(19): siRNA sense strand
gcugcaggcuuaccucauu

SEQ ID NO: 48502 - RNA, 19 nt, Homo sapiens
  misc_RNA (1)...(19): siRNA sense strand
ucucuugccuccagauuaa

SEQ ID NO: 48503 - RNA, 19 nt, Homo sapiens
  misc_RNA (1)...(19): siRNA sense strand
ggaugagaauucaaucaau

SEQ ID NO: 48504 - RNA, 19 nt, Homo sapiens
  misc_RNA (1)...(19): siRNA sense strand
agagaaacacgaaaccuua

SEQ ID NO: 48505 - RNA, 19 nt, Homo sapiens
  misc_RNA (1)...(19): siRNA sense strand
cagcagcaauugaagaaug

SEQ ID NO: 48506 - RNA, 19 nt, Homo sapiens
  misc_RNA (1)...(19): siRNA sense strand
gccauuguuugaagucaua

SEQ ID NO: 48507 - RNA, 19 nt, Homo sapiens
  misc_RNA (1)...(19): siRNA sense strand
gagcuacaguuccgauuag

SEQ ID NO: 48508 - RNA, 19 nt, Homo sapiens
  misc_RNA (1)...(19): siRNA sense strand
gcuacucccuugccaauca

SEQ ID NO: 48509 - RNA, 19 nt, Homo sapiens
  misc_RNA (1)...(19): siRNA sense strand
uuccagaacugaccaauga

SEQ ID NO: 48510 - RNA, 19 nt, Homo sapiens
  misc_RNA (1)...(19): siRNA sense strand
agagguauacugcugauua

SEQ ID NO: 48511 - RNA, 19 nt, Homo sapiens
  misc_RNA (1)...(19): siRNA sense strand
gucaguaaccggcuuauuu

SEQ ID NO: 48512 - RNA, 19 nt, Homo sapiens
  misc_RNA (1)...(19): siRNA sense strand
uccaggaaguguuauuaua

SEQ ID NO: 48513 - RNA, 19 nt, Homo sapiens
  misc_RNA (1)...(19): siRNA sense strand
gaaugauguuggacagcua

SEQ ID NO: 48514 - RNA, 19 nt, Homo sapiens
  misc_RNA (1)...(19): siRNA sense strand
ccgauuaggcccaacuuua

SEQ ID NO: 48515 - RNA, 19 nt, Homo sapiens
  misc_RNA (1)...(19): siRNA sense strand
cagaugauaugguuuacug

SEQ ID NO: 48516 - RNA, 19 nt, Homo sapiens
  misc_RNA (1)...(19): siRNA sense strand
ggaaggaugagaauucaau

SEQ ID NO: 48517 - RNA, 19 nt, Homo sapiens
  misc_RNA (1)...(19): siRNA sense strand
gaagacauaguggcaguaa

SEQ ID NO: 48518 - RNA, 19 nt, Homo sapiens
  misc_RNA (1)...(19): siRNA sense strand
aaauuacgcuaugggaaua

SEQ ID NO: 48519 - RNA, 19 nt, Homo sapiens
  misc_RNA (1)...(19): siRNA sense strand
ucaagauccugaauacaga

SEQ ID NO: 48520 - RNA, 19 nt, Homo sapiens
  misc_RNA (1)...(19): siRNA sense strand
caucagauuucagugguuu

SEQ ID NO: 48521 - RNA, 19 nt, Homo sapiens
  misc_RNA (1)...(19): siRNA sense strand
gaauaccugcuuugauuga

SEQ ID NO: 48522 - RNA, 19 nt, Homo sapiens
  misc_RNA (1)...(19): siRNA sense strand
ggaaagcuuuggagauugc

SEQ ID NO: 48523 - RNA, 19 nt, Homo sapiens
  misc_RNA (1)...(19): siRNA sense strand
ggagcaauguuguguuucu

SEQ ID NO: 48524 - RNA, 19 nt, Homo sapiens
  misc_RNA (1)...(19): siRNA sense strand
ugacaaugcagauccuaua

SEQ ID NO: 48525 - RNA, 19 nt, Homo sapiens
  misc_RNA (1)...(19): siRNA sense strand
aaccaacaccuuacgauua

SEQ ID NO: 48526 - RNA, 19 nt, Homo sapiens
  misc_RNA (1)...(19): siRNA sense strand
aaggagcaauguuguguuu

SEQ ID NO: 48527 - RNA, 19 nt, Homo sapiens
  misc_RNA (1)...(19): siRNA sense strand
gaaaucaucugacacaauu

SEQ ID NO: 48528 - RNA, 19 nt, Homo sapiens
  misc_RNA (1)...(19): siRNA sense strand
gcaacaaucugguucauuu

SEQ ID NO: 48529 - RNA, 19 nt, Homo sapiens
  misc_RNA (1)...(19): siRNA sense strand
caaugcagauccuauauua

SEQ ID NO: 48530 - RNA, 19 nt, Homo sapiens
  misc_RNA (1)...(19): siRNA sense strand
gggaauaccugcuuugauu

SEQ ID NO: 48531 - RNA, 19 nt, Homo sapiens
  misc_RNA (1)...(19): siRNA sense strand
gggagacaguguuaaauua

SEQ ID NO: 48532 - RNA, 19 nt, Homo sapiens
  misc_RNA (1)...(19): siRNA sense strand
ccaaguagaugucaacaaa

SEQ ID NO: 48533 - RNA, 19 nt, Homo sapiens
  misc_RNA (1)...(19): siRNA sense strand
gaaauaagaccaaagaaug

SEQ ID NO: 48534 - RNA, 19 nt, Homo sapiens
  misc_RNA (1)...(19): siRNA sense strand
gauaaugaguguccuauug

SEQ ID NO: 48535 - RNA, 19 nt, Homo sapiens
  misc_RNA (1)...(19): siRNA sense strand
gaagggaaauacaaagaaa

SEQ ID NO: 48536 - RNA, 19 nt, Homo sapiens
  misc_RNA (1)...(19): siRNA sense strand
gaagagggcagauuaguuu

SEQ ID NO: 48537 - RNA, 19 nt, Homo sapiens
  misc_RNA (1)...(19): siRNA sense strand
gcaaugagugcauauaaua

SEQ ID NO: 48538 - RNA, 19 nt, Homo sapiens
  misc_RNA (1)...(19): siRNA sense strand
gagaacauauucagcuuaa

SEQ ID NO: 48539 - RNA, 19 nt, Homo sapiens
  misc_RNA (1)...(19): siRNA sense strand
ggacgaagguuuuaauaua

SEQ ID NO: 48540 - RNA, 19 nt, Homo sapiens
  misc_RNA (1)...(19): siRNA sense strand
ugacagagcuagaaacaga

SEQ ID NO: 48541 - RNA, 19 nt, Homo sapiens
  misc_RNA (1)...(19): siRNA sense strand
ggagaaacauuuaauagag

SEQ ID NO: 48542 - RNA, 19 nt, Homo sapiens
  misc_RNA (1)...(19): siRNA sense strand
gagauuggaugauugacua

SEQ ID NO: 48543 - RNA, 19 nt, Homo sapiens
  misc_RNA (1)...(19): siRNA sense strand
guagaagccaggaauauua

SEQ ID NO: 48544 - RNA, 19 nt, Homo sapiens
  misc_RNA (1)...(19): siRNA sense strand
ccagauagaucgaaacaug

SEQ ID NO: 48545 - RNA, 19 nt, Homo sapiens
  misc_RNA (1)...(19): siRNA sense strand
gugaagaucuggacaaugu

SEQ ID NO: 48546 - RNA, 19 nt, Homo sapiens
  misc_RNA (1)...(19): siRNA sense strand
cuauaaaggucucauauga

SEQ ID NO: 48547 - RNA, 19 nt, Homo sapiens
  misc_RNA (1)...(19): siRNA sense strand
gcaaggaagugccucaaau

SEQ ID NO: 48548 - RNA, 19 nt, Homo sapiens
  misc_RNA (1)...(19): siRNA sense strand
gaaaguauaccuggaauga

SEQ ID NO: 48549 - RNA, 19 nt, Homo sapiens
  misc_RNA (1)...(19): siRNA sense strand
ugaagcagaucccacguua

SEQ ID NO: 48550 - RNA, 19 nt, Homo sapiens
  misc_RNA (1)...(19): siRNA sense strand
gcagauuaguuuaccgaua

SEQ ID NO: 48551 - RNA, 19 nt, Homo sapiens
  misc_RNA (1)...(19): siRNA sense strand
gaagaaugcuguaauuggu

SEQ ID NO: 48552 - RNA, 19 nt, Homo sapiens
  misc_RNA (1)...(19): siRNA sense strand
ggaauggaauguuauuugu

SEQ ID NO: 48553 - RNA, 19 nt, Homo sapiens
  misc_RNA (1)...(19): siRNA sense strand
gaaugugccuauaaucuug

SEQ ID NO: 48554 - RNA, 19 nt, Homo sapiens
  misc_RNA (1)...(19): siRNA sense strand
acacaagccuggucaauug

SEQ ID NO: 48555 - RNA, 19 nt, Homo sapiens
  misc_RNA (1)...(19): siRNA sense strand
ccuauaaucuugugaauuc

SEQ ID NO: 48556 - RNA, 19 nt, Homo sapiens
  misc_RNA (1)...(19): siRNA sense strand
gaacauauucagcuuaaug

SEQ ID NO: 48557 - RNA, 19 nt, Homo sapiens
  misc_RNA (1)...(19): siRNA sense strand
caacuacaaucuugcuaaa

SEQ ID NO: 48558 - RNA, 19 nt, Homo sapiens
  misc_RNA (1)...(19): siRNA sense strand
gaaaggacuuccagaacug

SEQ ID NO: 48559 - RNA, 19 nt, Homo sapiens
  misc_RNA (1)...(19): siRNA sense strand
gaaucaggcuacaacauga

SEQ ID NO: 48560 - RNA, 19 nt, Homo sapiens
  misc_RNA (1)...(19): siRNA sense strand
acaagucgcuguuggaauu

SEQ ID NO: 48561 - RNA, 19 nt, Homo sapiens
  misc_RNA (1)...(19): siRNA sense strand
aaacacaggugaaguuaau

SEQ ID NO: 48562 - RNA, 19 nt, Homo sapiens
  misc_RNA (1)...(19): siRNA sense strand
aagaggcuaugaugaauua

SEQ ID NO: 48563 - RNA, 19 nt, Homo sapiens
  misc_RNA (1)...(19): siRNA sense strand
guaaauggauccaggaaca

SEQ ID NO: 48564 - RNA, 19 nt, Homo sapiens
  misc_RNA (1)...(19): siRNA sense strand
ugauucaucugccaaauaa

SEQ ID NO: 48565 - RNA, 19 nt, Homo sapiens
  misc_RNA (1)...(19): siRNA sense strand
gaugagaauucaaucaaug

SEQ ID NO: 48566 - RNA, 19 nt, Homo sapiens
  misc_RNA (1)...(19): siRNA sense strand
gcaacccaauuuauaugua

SEQ ID NO: 48567 - RNA, 19 nt, Homo sapiens
  misc_RNA (1)...(19): siRNA sense strand
acaaagcgguugagcaauu

SEQ ID NO: 48568 - RNA, 19 nt, Homo sapiens
  misc_RNA (1)...(19): siRNA sense strand
gagaagcaucgacucauua

SEQ ID NO: 48569 - RNA, 19 nt, Homo sapiens
  misc_RNA (1)...(19): siRNA sense strand
guaaaugguugcaggcuau

SEQ ID NO: 48570 - RNA, 19 nt, Homo sapiens
  misc_RNA (1)...(19): siRNA sense strand
gaagaacgguuuuacacua

SEQ ID NO: 48571 - RNA, 19 nt, Homo sapiens
  misc_RNA (1)...(19): siRNA sense strand
cagauuaguuuaccgauau

SEQ ID NO: 48572 - RNA, 19 nt, Homo sapiens
  misc_RNA (1)...(19): siRNA sense strand
gagaugauccucuucgaaa

SEQ ID NO: 48573 - RNA, 19 nt, Homo sapiens
  misc_RNA (1)...(19): siRNA sense strand
gcagaaauaagaccaaaga

SEQ ID NO: 48574 - RNA, 19 nt, Homo sapiens
  misc_RNA (1)...(19): siRNA sense strand
ucacaaacguggcauauac

SEQ ID NO: 48575 - RNA, 19 nt, Homo sapiens
  misc_RNA (1)...(19): siRNA sense strand
gcacauggauggauaaaau

SEQ ID NO: 48576 - RNA, 19 nt, Homo sapiens
  misc_RNA (1)...(19): siRNA sense strand
ucacguagcugaguacaug

SEQ ID NO: 48577 - RNA, 19 nt, Homo sapiens
  misc_RNA (1)...(19): siRNA sense strand
gcacaugcccuguuuaugg

SEQ ID NO: 48578 - RNA, 19 nt, Homo sapiens
  misc_RNA (1)...(19): siRNA sense strand
gauccaaaccaacaccuua

SEQ ID NO: 48579 - RNA, 19 nt, Homo sapiens
  misc_RNA (1)...(19): siRNA sense strand
gaaaagcaguuaccgugua

SEQ ID NO: 48580 - RNA, 19 nt, Homo sapiens
  misc_RNA (1)...(19): siRNA sense strand
gauaugaacauugcacuaa

SEQ ID NO: 48581 - RNA, 19 nt, Homo sapiens
  misc_RNA (1)...(19): siRNA sense strand
gaaauugugggccugagua

SEQ ID NO: 48582 - RNA, 19 nt, Homo sapiens
  misc_RNA (1)...(19): siRNA sense strand
caaaagggcccaaugaaua

SEQ ID NO: 48583 - RNA, 19 nt, Homo sapiens
  misc_RNA (1)...(19): siRNA sense strand
caaagcgguugagcaauuu

SEQ ID NO: 48584 - RNA, 19 nt, Homo sapiens
  misc_RNA (1)...(19): siRNA sense strand
gcuaaagguuucaauuauc

SEQ ID NO: 48585 - RNA, 19 nt, Homo sapiens
  misc_RNA (1)...(19): siRNA sense strand
gaucagccauuguuugaag

SEQ ID NO: 48586 - RNA, 19 nt, Homo sapiens
  misc_RNA (1)...(19): siRNA sense strand
ggugguggcugcaguguau

SEQ ID NO: 48587 - RNA, 19 nt, Homo sapiens
  misc_RNA (1)...(19): siRNA sense strand
ggcauggucucauuccuaa

SEQ ID NO: 48588 - RNA, 19 nt, Homo sapiens
  misc_RNA (1)...(19): siRNA sense strand
gcaauguuguguuucucua

SEQ ID NO: 48589 - RNA, 19 nt, Homo sapiens
  misc_RNA (1)...(19): siRNA sense strand
ggucagcccuuaaauaugc

SEQ ID NO: 48590 - RNA, 19 nt, Homo sapiens
  misc_RNA (1)...(19): siRNA sense strand
acaauucaguccucacuuu

SEQ ID NO: 48591 - RNA, 19 nt, Homo sapiens
  misc_RNA (1)...(19): siRNA sense strand
cuagaacuauugagagaaa

SEQ ID NO: 48592 - RNA, 19 nt, Homo sapiens
  misc_RNA (1)...(19): siRNA sense strand
gaaugggaaagcagacuua

SEQ ID NO: 48593 - RNA, 19 nt, Homo sapiens
  misc_RNA (1)...(19): siRNA sense strand
auaaaggucucauaugaug

SEQ ID NO: 48594 - RNA, 19 nt, Homo sapiens
  misc_RNA (1)...(19): siRNA sense strand
gcaguuaccguguauacaa

SEQ ID NO: 48595 - RNA, 19 nt, Homo sapiens
  misc_RNA (1)...(19): siRNA sense strand
gccaaucaguuagaauuaa

SEQ ID NO: 48596 - RNA, 19 nt, Homo sapiens
  misc_RNA (1)...(19): siRNA sense strand
caacagaaagagaagauga

SEQ ID NO: 48597 - RNA, 19 nt, Homo sapiens
  misc_RNA (1)...(19): siRNA sense strand
gaagcuagaacuauugaga

SEQ ID NO: 48598 - RNA, 19 nt, Homo sapiens
  misc_RNA (1)...(19): siRNA sense strand
gagaggcaaugagugcaua

SEQ ID NO: 48599 - RNA, 19 nt, Homo sapiens
  misc_RNA (1)...(19): siRNA sense strand
ccaaugagaaugcccagua

SEQ ID NO: 48600 - RNA, 19 nt, Homo sapiens
  misc_RNA (1)...(19): siRNA sense strand
gaaagugacagagcuagaa

SEQ ID NO: 48601 - RNA, 19 nt, Homo sapiens
  misc_RNA (1)...(19): siRNA sense strand
gcugcaggcuuaccucauu

SEQ ID NO: 48602 - RNA, 19 nt, Homo sapiens
  misc_RNA (1)...(19): siRNA sense strand
ucucuugccuccagauuaa

SEQ ID NO: 48603 - RNA, 19 nt, Homo sapiens
  misc_RNA (1)...(19): siRNA sense strand
ggaugagaauucaaucaau

SEQ ID NO: 48604 - RNA, 19 nt, Homo sapiens
  misc_RNA (1)...(19): siRNA sense strand
agagaaacacgaaaccuua

SEQ ID NO: 48605 - RNA, 19 nt, Homo sapiens
  misc_RNA (1)...(19): siRNA sense strand
cagcagcaauugaagaaug

SEQ ID NO: 48606 - RNA, 19 nt, Homo sapiens
  misc_RNA (1)...(19): siRNA sense strand
gccauuguuugaagucaua

SEQ ID NO: 48607 - RNA, 19 nt, Homo sapiens
  misc_RNA (1)...(19): siRNA sense strand
gagcuacaguuccgauuag

SEQ ID NO: 48608 - RNA, 19 nt, Homo sapiens
  misc_RNA (1)...(19): siRNA sense strand
gcuacucccuugccaauca

SEQ ID NO: 48609 - RNA, 19 nt, Homo sapiens
  misc_RNA (1)...(19): siRNA sense strand
uuccagaacugaccaauga

SEQ ID NO: 48610 - RNA, 19 nt, Homo sapiens
  misc_RNA (1)...(19): siRNA sense strand
agagguauacugcugauua

SEQ ID NO: 48611 - RNA, 19 nt, Homo sapiens
  misc_RNA (1)...(19): siRNA sense strand
gucaguaaccggcuuauuu

SEQ ID NO: 48612 - RNA, 19 nt, Homo sapiens
  misc_RNA (1)...(19): siRNA sense strand
uccaggaaguguuauuaua

SEQ ID NO: 48613 - RNA, 19 nt, Homo sapiens
  misc_RNA (1)...(19): siRNA sense strand
gaaugauguuggacagcua

SEQ ID NO: 48614 - RNA, 19 nt, Homo sapiens
  misc_RNA (1)...(19): siRNA sense strand
ccgauuaggcccaacuuua

SEQ ID NO: 48615 - RNA, 19 nt, Homo sapiens
  misc_RNA (1)...(19): siRNA sense strand
cagaugauaugguuuacug

SEQ ID NO: 48616 - RNA, 19 nt, Homo sapiens
  misc_RNA (1)...(19): siRNA sense strand
ggaaggaugagaauucaau

SEQ ID NO: 48617 - RNA, 19 nt, Homo sapiens
  misc_RNA (1)...(19): siRNA sense strand
gaagacauaguggcaguaa

SEQ ID NO: 48618 - RNA, 19 nt, Homo sapiens
  misc_RNA (1)...(19): siRNA sense strand
aaauuacgcuaugggaaua

SEQ ID NO: 48619 - RNA, 19 nt, Homo sapiens
  misc_RNA (1)...(19): siRNA sense strand
ucaagauccugaauacaga

SEQ ID NO: 48620 - RNA, 19 nt, Homo sapiens
  misc_RNA (1)...(19): siRNA sense strand
caucagauuucagugguuu

SEQ ID NO: 48621 - RNA, 19 nt, Homo sapiens
  misc_RNA (1)...(19): siRNA sense strand
gaauaccugcuuugauuga

SEQ ID NO: 48622 - RNA, 19 nt, Homo sapiens
  misc_RNA (1)...(19): siRNA sense strand
ggaaagcuuuggagauugc

SEQ ID NO: 48623 - RNA, 19 nt, Homo sapiens
  misc_RNA (1)...(19): siRNA sense strand
ggagcaauguuguguuucu

SEQ ID NO: 48624 - RNA, 19 nt, Homo sapiens
  misc_RNA (1)...(19): siRNA sense strand
ugacaaugcagauccuaua

SEQ ID NO: 48625 - RNA, 19 nt, Homo sapiens
  misc_RNA (1)...(19): siRNA sense strand
aaccaacaccuuacgauua

SEQ ID NO: 48626 - RNA, 19 nt, Homo sapiens
  misc_RNA (1)...(19): siRNA sense strand
aaggagcaauguuguguuu

SEQ ID NO: 48627 - RNA, 19 nt, Homo sapiens
  misc_RNA (1)...(19): siRNA sense strand
gaaaucaucugacacaauu

SEQ ID NO: 48628 - RNA, 19 nt, Homo sapiens
  misc_RNA (1)...(19): siRNA sense strand
gcaacaaucugguucauuu

SEQ ID NO: 48629 - RNA, 19 nt, Homo sapiens
  misc_RNA (1)...(19): siRNA sense strand
caaugcagauccuauauua

SEQ ID NO: 48630 - RNA, 19 nt, Homo sapiens
  misc_RNA (1)...(19): siRNA sense strand
gggaauaccugcuuugauu

SEQ ID NO: 48631 - RNA, 19 nt, Homo sapiens
  misc_RNA (1)...(19): siRNA sense strand
gggagacaguguuaaauua

SEQ ID NO: 48632 - RNA, 19 nt, Homo sapiens
  misc_RNA (1)...(19): siRNA sense strand
ccaaguagaugucaacaaa

SEQ ID NO: 48633 - RNA, 19 nt, Homo sapiens
  misc_RNA (1)...(19): siRNA sense strand
gaaauaagaccaaagaaug

SEQ ID NO: 48634 - RNA, 19 nt, Homo sapiens
  misc_RNA (1)...(19): siRNA sense strand
gauaaugaguguccuauug

SEQ ID NO: 48635 - RNA, 19 nt, Homo sapiens
  misc_RNA (1)...(19): siRNA sense strand
gaagggaaauacaaagaaa

SEQ ID NO: 48636 - RNA, 19 nt, Homo sapiens
  misc_RNA (1)...(19): siRNA sense strand
gaagagggcagauuaguuu

SEQ ID NO: 48637 - RNA, 19 nt, Homo sapiens
  misc_RNA (1)...(19): siRNA sense strand
gcaaugagugcauauaaua

SEQ ID NO: 48638 - RNA, 19 nt, Homo sapiens
  misc_RNA (1)...(19): siRNA sense strand
gagaacauauucagcuuaa

SEQ ID NO: 48639 - RNA, 19 nt, Homo sapiens
  misc_RNA (1)...(19): siRNA sense strand
ggacgaagguuuuaauaua

SEQ ID NO: 48640 - RNA, 19 nt, Homo sapiens
  misc_RNA (1)...(19): siRNA sense strand
ugacagagcuagaaacaga

SEQ ID NO: 48641 - RNA, 19 nt, Homo sapiens
  misc_RNA (1)...(19): siRNA sense strand
ggagaaacauuuaauagag

SEQ ID NO: 48642 - RNA, 19 nt, Homo sapiens
  misc_RNA (1)...(19): siRNA sense strand
gagauuggaugauugacua

SEQ ID NO: 48643 - RNA, 19 nt, Homo sapiens
  misc_RNA (1)...(19): siRNA sense strand
guagaagccaggaauauua

SEQ ID NO: 48644 - RNA, 19 nt, Homo sapiens
  misc_RNA (1)...(19): siRNA sense strand
ccagauagaucgaaacaug

SEQ ID NO: 48645 - RNA, 19 nt, Homo sapiens
  misc_RNA (1)...(19): siRNA sense strand
gugaagaucuggacaaugu

SEQ ID NO: 48646 - RNA, 19 nt, Homo sapiens
  misc_RNA (1)...(19): siRNA sense strand
cuauaaaggucucauauga

SEQ ID NO: 48647 - RNA, 19 nt, Homo sapiens
  misc_RNA (1)...(19): siRNA sense strand
gcaaggaagugccucaaau

SEQ ID NO: 48648 - RNA, 19 nt, Homo sapiens
  misc_RNA (1)...(19): siRNA sense strand
gaaaguauaccuggaauga

SEQ ID NO: 48649 - RNA, 19 nt, Homo sapiens
  misc_RNA (1)...(19): siRNA sense strand
ugaagcagaucccacguua

SEQ ID NO: 48650 - RNA, 19 nt, Homo sapiens
  misc_RNA (1)...(19): siRNA sense strand
gcagauuaguuuaccgaua

SEQ ID NO: 48651 - RNA, 19 nt, Homo sapiens
  misc_RNA (1)...(19): siRNA sense strand
gaagaaugcuguaauuggu

SEQ ID NO: 48652 - RNA, 19 nt, Homo sapiens
  misc_RNA (1)...(19): siRNA sense strand
ggaauggaauguuauuugu

SEQ ID NO: 48653 - RNA, 19 nt, Homo sapiens
  misc_RNA (1)...(19): siRNA sense strand
gaaugugccuauaaucuug

SEQ ID NO: 48654 - RNA, 19 nt, Homo sapiens
  misc_RNA (1)...(19): siRNA sense strand
acacaagccuggucaauug

SEQ ID NO: 48655 - RNA, 19 nt, Homo sapiens
  misc_RNA (1)...(19): siRNA sense strand
ccuauaaucuugugaauuc

SEQ ID NO: 48656 - RNA, 19 nt, Homo sapiens
  misc_RNA (1)...(19): siRNA sense strand
gaacauauucagcuuaaug

SEQ ID NO: 48657 - RNA, 19 nt, Homo sapiens
  misc_RNA (1)...(19): siRNA sense strand
caacuacaaucuugcuaaa

SEQ ID NO: 48658 - RNA, 19 nt, Homo sapiens
  misc_RNA (1)...(19): siRNA sense strand
gaaaggacuuccagaacug

SEQ ID NO: 48659 - RNA, 19 nt, Homo sapiens
  misc_RNA (1)...(19): siRNA sense strand
gaaucaggcuacaacauga

SEQ ID NO: 48660 - RNA, 19 nt, Homo sapiens
  misc_RNA (1)...(19): siRNA sense strand
acaagucgcuguuggaauu

SEQ ID NO: 48661 - RNA, 19 nt, Homo sapiens
  misc_RNA (1)...(19): siRNA sense strand
aaacacaggugaaguuaau

SEQ ID NO: 48662 - RNA, 19 nt, Homo sapiens
  misc_RNA (1)...(19): siRNA sense strand
aagaggcuaugaugaauua

SEQ ID NO: 48663 - RNA, 19 nt, Homo sapiens
  misc_RNA (1)...(19): siRNA sense strand
guaaauggauccaggaaca

SEQ ID NO: 48664 - RNA, 19 nt, Homo sapiens
  misc_RNA (1)...(19): siRNA sense strand
ugauucaucugccaaauaa

SEQ ID NO: 48665 - RNA, 19 nt, Homo sapiens
  misc_RNA (1)...(19): siRNA sense strand
gaugagaauucaaucaaug

SEQ ID NO: 48666 - RNA, 19 nt, Homo sapiens
  misc_RNA (1)...(19): siRNA sense strand
gcaacccaauuuauaugua

SEQ ID NO: 48667 - RNA, 19 nt, Homo sapiens
  misc_RNA (1)...(19): siRNA sense strand
acaaagcgguugagcaauu

SEQ ID NO: 48668 - RNA, 19 nt, Homo sapiens
  misc_RNA (1)...(19): siRNA sense strand
gagaagcaucgacucauua

SEQ ID NO: 48669 - RNA, 19 nt, Homo sapiens
  misc_RNA (1)...(19): siRNA sense strand
guaaaugguugcaggcuau

SEQ ID NO: 48670 - RNA, 19 nt, Homo sapiens
  misc_RNA (1)...(19): siRNA sense strand
gaagaacgguuuuacacua

SEQ ID NO: 48671 - RNA, 19 nt, Homo sapiens
  misc_RNA (1)...(19): siRNA sense strand
cagauuaguuuaccgauau

SEQ ID NO: 48672 - RNA, 19 nt, Homo sapiens
  misc_RNA (1)...(19): siRNA sense strand
gagaugauccucuucgaaa

SEQ ID NO: 48673 - RNA, 19 nt, Homo sapiens
  misc_RNA (1)...(19): siRNA sense strand
gcagaaauaagaccaaaga

SEQ ID NO: 48674 - RNA, 19 nt, Homo sapiens
  misc_RNA (1)...(19): siRNA sense strand
ucacaaacguggcauauac

SEQ ID NO: 48675 - RNA, 19 nt, Homo sapiens
  misc_RNA (1)...(19): siRNA sense strand
gcacauggauggauaaaau

SEQ ID NO: 48676 - RNA, 19 nt, Homo sapiens
  misc_RNA (1)...(19): siRNA sense strand
ucacguagcugaguacaug

SEQ ID NO: 48677 - RNA, 19 nt, Homo sapiens
  misc_RNA (1)...(19): siRNA sense strand
gcacaugcccuguuuaugg

SEQ ID NO: 48678 - RNA, 19 nt, Homo sapiens
  misc_RNA (1)...(19): siRNA sense strand
gauccaaaccaacaccuua

SEQ ID NO: 48679 - RNA, 19 nt, Homo sapiens
  misc_RNA (1)...(19): siRNA sense strand
gaaaagcaguuaccgugua

SEQ ID NO: 48680 - RNA, 19 nt, Homo sapiens
  misc_RNA (1)...(19): siRNA sense strand
gauaugaacauugcacuaa

SEQ ID NO: 48681 - RNA, 19 nt, Homo sapiens
  misc_RNA (1)...(19): siRNA sense strand
gaaauugugggccugagua

SEQ ID NO: 48682 - RNA, 19 nt, Homo sapiens
  misc_RNA (1)...(19): siRNA sense strand
caaaagggcccaaugaaua

SEQ ID NO: 48683 - RNA, 19 nt, Homo sapiens
  misc_RNA (1)...(19): siRNA sense strand
caaagcgguugagcaauuu

SEQ ID NO: 48684 - RNA, 19 nt, Homo sapiens
  misc_RNA (1)...(19): siRNA sense strand
gcuaaagguuucaauuauc

SEQ ID NO: 48685 - RNA, 19 nt, Homo sapiens
  misc_RNA (1)...(19): siRNA sense strand
gaucagccauuguuugaag

SEQ ID NO: 48686 - RNA, 19 nt, Homo sapiens
  misc_RNA (1)...(19): siRNA sense strand
ggugguggcugcaguguau

SEQ ID NO: 48687 - RNA, 19 nt, Homo sapiens
  misc_RNA (1)...(19): siRNA sense strand
ggcauggucucauuccuaa

SEQ ID NO: 48688 - RNA, 19 nt, Homo sapiens
  misc_RNA (1)...(19): siRNA sense strand
gcaauguuguguuucucua

SEQ ID NO: 48689 - RNA, 19 nt, Homo sapiens
  misc_RNA (1)...(19): siRNA sense strand
ggucagcccuuaaauaugc

SEQ ID NO: 48690 - RNA, 19 nt, Homo sapiens
  misc_RNA (1)...(19): siRNA sense strand
acaauucaguccucacuuu

SEQ ID NO: 48691 - RNA, 19 nt, Homo sapiens
  misc_RNA (1)...(19): siRNA sense strand
cuagaacuauugagagaaa

SEQ ID NO: 48692 - RNA, 19 nt, Homo sapiens
  misc_RNA (1)...(19): siRNA sense strand
gaaugggaaagcagacuua

SEQ ID NO: 48693 - RNA, 19 nt, Homo sapiens
  misc_RNA (1)...(19): siRNA sense strand
auaaaggucucauaugaug

SEQ ID NO: 48694 - RNA, 19 nt, Homo sapiens
  misc_RNA (1)...(19): siRNA sense strand
gcaguuaccguguauacaa

SEQ ID NO: 48695 - RNA, 19 nt, Homo sapiens
  misc_RNA (1)...(19): siRNA sense strand
gccaaucaguuagaauuaa

SEQ ID NO: 48696 - RNA, 19 nt, Homo sapiens
  misc_RNA (1)...(19): siRNA sense strand
caacagaaagagaagauga

SEQ ID NO: 48697 - RNA, 19 nt, Homo sapiens
  misc_RNA (1)...(19): siRNA sense strand
gaagcuagaacuauugaga

SEQ ID NO: 48698 - RNA, 19 nt, Homo sapiens
  misc_RNA (1)...(19): siRNA sense strand
gagaggcaaugagugcaua

SEQ ID NO: 48699 - RNA, 19 nt, Homo sapiens
  misc_RNA (1)...(19): siRNA sense strand
ccaaugagaaugcccagua

SEQ ID NO: 48700 - RNA, 19 nt, Homo sapiens
  misc_RNA (1)...(19): siRNA sense strand
gaaagugacagagcuagaa

SEQ ID NO: 48701 - RNA, 19 nt, Homo sapiens
  misc_RNA (1)...(19): siRNA sense strand
gcugcaggcuuaccucauu

SEQ ID NO: 48702 - RNA, 19 nt, Homo sapiens
  misc_RNA (1)...(19): siRNA sense strand
ucucuugccuccagauuaa

SEQ ID NO: 48703 - RNA, 19 nt, Homo sapiens
  misc_RNA (1)...(19): siRNA sense strand
ggaugagaauucaaucaau

SEQ ID NO: 48704 - RNA, 19 nt, Homo sapiens
  misc_RNA (1)...(19): siRNA sense strand
agagaaacacgaaaccuua

SEQ ID NO: 48705 - RNA, 19 nt, Homo sapiens
  misc_RNA (1)...(19): siRNA sense strand
cagcagcaauugaagaaug

SEQ ID NO: 48706 - RNA, 19 nt, Homo sapiens
  misc_RNA (1)...(19): siRNA sense strand
gccauuguuugaagucaua

SEQ ID NO: 48707 - RNA, 19 nt, Homo sapiens
  misc_RNA (1)...(19): siRNA sense strand
gagcuacaguuccgauuag

SEQ ID NO: 48708 - RNA, 19 nt, Homo sapiens
  misc_RNA (1)...(19): siRNA sense strand
gcuacucccuugccaauca

SEQ ID NO: 48709 - RNA, 19 nt, Homo sapiens
  misc_RNA (1)...(19): siRNA sense strand
uuccagaacugaccaauga

SEQ ID NO: 48710 - RNA, 19 nt, Homo sapiens
  misc_RNA (1)...(19): siRNA sense strand
agagguauacugcugauua

SEQ ID NO: 48711 - RNA, 19 nt, Homo sapiens
  misc_RNA (1)...(19): siRNA sense strand
gucaguaaccggcuuauuu

SEQ ID NO: 48712 - RNA, 19 nt, Homo sapiens
  misc_RNA (1)...(19): siRNA sense strand
uccaggaaguguuauuaua

SEQ ID NO: 48713 - RNA, 19 nt, Homo sapiens
  misc_RNA (1)...(19): siRNA sense strand
gaaugauguuggacagcua

SEQ ID NO: 48714 - RNA, 19 nt, Homo sapiens
  misc_RNA (1)...(19): siRNA sense strand
ccgauuaggcccaacuuua

SEQ ID NO: 48715 - RNA, 19 nt, Homo sapiens
  misc_RNA (1)...(19): siRNA sense strand
cagaugauaugguuuacug

SEQ ID NO: 48716 - RNA, 19 nt, Homo sapiens
  misc_RNA (1)...(19): siRNA sense strand
ggaaggaugagaauucaau

SEQ ID NO: 48717 - RNA, 19 nt, Homo sapiens
  misc_RNA (1)...(19): siRNA sense strand
gaagacauaguggcaguaa

SEQ ID NO: 48718 - RNA, 19 nt, Homo sapiens
  misc_RNA (1)...(19): siRNA sense strand
aaauuacgcuaugggaaua

SEQ ID NO: 48719 - RNA, 19 nt, Homo sapiens
  misc_RNA (1)...(19): siRNA sense strand
ucaagauccugaauacaga

SEQ ID NO: 48720 - RNA, 19 nt, Homo sapiens
  misc_RNA (1)...(19): siRNA sense strand
caucagauuucagugguuu

SEQ ID NO: 48721 - RNA, 19 nt, Homo sapiens
  misc_RNA (1)...(19): siRNA sense strand
gaauaccugcuuugauuga

SEQ ID NO: 48722 - RNA, 19 nt, Homo sapiens
  misc_RNA (1)...(19): siRNA sense strand
ggaaagcuuuggagauugc

SEQ ID NO: 48723 - RNA, 19 nt, Homo sapiens
  misc_RNA (1)...(19): siRNA sense strand
ggagcaauguuguguuucu

SEQ ID NO: 48724 - RNA, 19 nt, Homo sapiens
  misc_RNA (1)...(19): siRNA sense strand
ugacaaugcagauccuaua

SEQ ID NO: 48725 - RNA, 19 nt, Homo sapiens
  misc_RNA (1)...(19): siRNA sense strand
aaccaacaccuuacgauua

SEQ ID NO: 48726 - RNA, 19 nt, Homo sapiens
  misc_RNA (1)...(19): siRNA sense strand
aaggagcaauguuguguuu

SEQ ID NO: 48727 - RNA, 19 nt, Homo sapiens
  misc_RNA (1)...(19): siRNA sense strand
gaaaucaucugacacaauu

SEQ ID NO: 48728 - RNA, 19 nt, Homo sapiens
  misc_RNA (1)...(19): siRNA sense strand
gcaacaaucugguucauuu

SEQ ID NO: 48729 - RNA, 19 nt, Homo sapiens
  misc_RNA (1)...(19): siRNA sense strand
caaugcagauccuauauua

SEQ ID NO: 48730 - RNA, 19 nt, Homo sapiens
  misc_RNA (1)...(19): siRNA sense strand
gggaauaccugcuuugauu

SEQ ID NO: 48731 - RNA, 19 nt, Homo sapiens
  misc_RNA (1)...(19): siRNA sense strand
gggagacaguguuaaauua

SEQ ID NO: 48732 - RNA, 19 nt, Homo sapiens
  misc_RNA (1)...(19): siRNA sense strand
ccaaguagaugucaacaaa

SEQ ID NO: 48733 - RNA, 19 nt, Homo sapiens
  misc_RNA (1)...(19): siRNA sense strand
gaaauaagaccaaagaaug

SEQ ID NO: 48734 - RNA, 19 nt, Homo sapiens
  misc_RNA (1)...(19): siRNA sense strand
gauaaugaguguccuauug

SEQ ID NO: 48735 - RNA, 19 nt, Homo sapiens
  misc_RNA (1)...(19): siRNA sense strand
gaagggaaauacaaagaaa

SEQ ID NO: 48736 - RNA, 19 nt, Homo sapiens
  misc_RNA (1)...(19): siRNA sense strand
gaagagggcagauuaguuu

SEQ ID NO: 48737 - RNA, 19 nt, Homo sapiens
  misc_RNA (1)...(19): siRNA sense strand
gcaaugagugcauauaaua

SEQ ID NO: 48738 - RNA, 19 nt, Homo sapiens
  misc_RNA (1)...(19): siRNA sense strand
gagaacauauucagcuuaa

SEQ ID NO: 48739 - RNA, 19 nt, Homo sapiens
  misc_RNA (1)...(19): siRNA sense strand
ggacgaagguuuuaauaua

SEQ ID NO: 48740 - RNA, 19 nt, Homo sapiens
  misc_RNA (1)...(19): siRNA sense strand
ugacagagcuagaaacaga

SEQ ID NO: 48741 - RNA, 19 nt, Homo sapiens
  misc_RNA (1)...(19): siRNA sense strand
ggagaaacauuuaauagag

SEQ ID NO: 48742 - RNA, 19 nt, Homo sapiens
  misc_RNA (1)...(19): siRNA sense strand
gagauuggaugauugacua

SEQ ID NO: 48743 - RNA, 19 nt, Homo sapiens
  misc_RNA (1)...(19): siRNA sense strand
guagaagccaggaauauua

SEQ ID NO: 48744 - RNA, 19 nt, Homo sapiens
  misc_RNA (1)...(19): siRNA sense strand
ccagauagaucgaaacaug

SEQ ID NO: 48745 - RNA, 19 nt, Homo sapiens
  misc_RNA (1)...(19): siRNA sense strand
gugaagaucuggacaaugu

SEQ ID NO: 48746 - RNA, 19 nt, Homo sapiens
  misc_RNA (1)...(19): siRNA sense strand
cuauaaaggucucauauga

SEQ ID NO: 48747 - RNA, 19 nt, Homo sapiens
  misc_RNA (1)...(19): siRNA sense strand
gcaaggaagugccucaaau

SEQ ID NO: 48748 - RNA, 19 nt, Homo sapiens
  misc_RNA (1)...(19): siRNA sense strand
gaaaguauaccuggaauga

SEQ ID NO: 48749 - RNA, 19 nt, Homo sapiens
  misc_RNA (1)...(19): siRNA sense strand
ugaagcagaucccacguua

SEQ ID NO: 48750 - RNA, 19 nt, Homo sapiens
  misc_RNA (1)...(19): siRNA sense strand
gcagauuaguuuaccgaua

SEQ ID NO: 48751 - RNA, 19 nt, Homo sapiens
  misc_RNA (1)...(19): siRNA sense strand
gaagaaugcuguaauuggu

SEQ ID NO: 48752 - RNA, 19 nt, Homo sapiens
  misc_RNA (1)...(19): siRNA sense strand
ggaauggaauguuauuugu

SEQ ID NO: 48753 - RNA, 19 nt, Homo sapiens
  misc_RNA (1)...(19): siRNA sense strand
gaaugugccuauaaucuug

SEQ ID NO: 48754 - RNA, 19 nt, Homo sapiens
  misc_RNA (1)...(19): siRNA sense strand
acacaagccuggucaauug

SEQ ID NO: 48755 - RNA, 19 nt, Homo sapiens
  misc_RNA (1)...(19): siRNA sense strand
ccuauaaucuugugaauuc

SEQ ID NO: 48756 - RNA, 19 nt, Homo sapiens
  misc_RNA (1)...(19): siRNA sense strand
gaacauauucagcuuaaug

SEQ ID NO: 48757 - RNA, 19 nt, Homo sapiens
  misc_RNA (1)...(19): siRNA sense strand
caacuacaaucuugcuaaa

SEQ ID NO: 48758 - RNA, 19 nt, Homo sapiens
  misc_RNA (1)...(19): siRNA sense strand
gaaaggacuuccagaacug

SEQ ID NO: 48759 - RNA, 19 nt, Homo sapiens
  misc_RNA (1)...(19): siRNA sense strand
gaaucaggcuacaacauga

SEQ ID NO: 48760 - RNA, 19 nt, Homo sapiens
  misc_RNA (1)...(19): siRNA sense strand
acaagucgcuguuggaauu

SEQ ID NO: 48761 - RNA, 19 nt, Homo sapiens
  misc_RNA (1)...(19): siRNA sense strand
aaacacaggugaaguuaau

SEQ ID NO: 48762 - RNA, 19 nt, Homo sapiens
  misc_RNA (1)...(19): siRNA sense strand
aagaggcuaugaugaauua

SEQ ID NO: 48763 - RNA, 19 nt, Homo sapiens
  misc_RNA (1)...(19): siRNA sense strand
guaaauggauccaggaaca

SEQ ID NO: 48764 - RNA, 19 nt, Homo sapiens
  misc_RNA (1)...(19): siRNA sense strand
ugauucaucugccaaauaa

SEQ ID NO: 48765 - RNA, 19 nt, Homo sapiens
  misc_RNA (1)...(19): siRNA sense strand
gaugagaauucaaucaaug

SEQ ID NO: 48766 - RNA, 19 nt, Homo sapiens
  misc_RNA (1)...(19): siRNA sense strand
gcaacccaauuuauaugua

SEQ ID NO: 48767 - RNA, 19 nt, Homo sapiens
  misc_RNA (1)...(19): siRNA sense strand
acaaagcgguugagcaauu

SEQ ID NO: 48768 - RNA, 19 nt, Homo sapiens
  misc_RNA (1)...(19): siRNA sense strand
gagaagcaucgacucauua

SEQ ID NO: 48769 - RNA, 19 nt, Homo sapiens
  misc_RNA (1)...(19): siRNA sense strand
guaaaugguugcaggcuau

SEQ ID NO: 48770 - RNA, 19 nt, Homo sapiens
  misc_RNA (1)...(19): siRNA sense strand
gaagaacgguuuuacacua

SEQ ID NO: 48771 - RNA, 19 nt, Homo sapiens
  misc_RNA (1)...(19): siRNA sense strand
cagauuaguuuaccgauau

SEQ ID NO: 48772 - RNA, 19 nt, Homo sapiens
  misc_RNA (1)...(19): siRNA sense strand
gagaugauccucuucgaaa

SEQ ID NO: 48773 - RNA, 19 nt, Homo sapiens
  misc_RNA (1)...(19): siRNA sense strand
gcagaaauaagaccaaaga

SEQ ID NO: 48774 - RNA, 19 nt, Homo sapiens
  misc_RNA (1)...(19): siRNA sense strand
ucacaaacguggcauauac

SEQ ID NO: 48775 - RNA, 19 nt, Homo sapiens
  misc_RNA (1)...(19): siRNA sense strand
gcacauggauggauaaaau

SEQ ID NO: 48776 - RNA, 19 nt, Homo sapiens
  misc_RNA (1)...(19): siRNA sense strand
ucacguagcugaguacaug

SEQ ID NO: 48777 - RNA, 19 nt, Homo sapiens
  misc_RNA (1)...(19): siRNA sense strand
gcacaugcccuguuuaugg

SEQ ID NO: 48778 - RNA, 19 nt, Homo sapiens
  misc_RNA (1)...(19): siRNA sense strand
gauccaaaccaacaccuua

SEQ ID NO: 48779 - RNA, 19 nt, Homo sapiens
  misc_RNA (1)...(19): siRNA sense strand
gaaaagcaguuaccgugua

SEQ ID NO: 48780 - RNA, 19 nt, Homo sapiens
  misc_RNA (1)...(19): siRNA sense strand
gauaugaacauugcacuaa

SEQ ID NO: 48781 - RNA, 19 nt, Homo sapiens
  misc_RNA (1)...(19): siRNA sense strand
gaaauugugggccugagua

SEQ ID NO: 48782 - RNA, 19 nt, Homo sapiens
  misc_RNA (1)...(19): siRNA sense strand
caaaagggcccaaugaaua

SEQ ID NO: 48783 - RNA, 19 nt, Homo sapiens
  misc_RNA (1)...(19): siRNA sense strand
caaagcgguugagcaauuu

SEQ ID NO: 48784 - RNA, 19 nt, Homo sapiens
  misc_RNA (1)...(19): siRNA sense strand
gcuaaagguuucaauuauc

SEQ ID NO: 48785 - RNA, 19 nt, Homo sapiens
  misc_RNA (1)...(19): siRNA sense strand
gaucagccauuguuugaag

SEQ ID NO: 48786 - RNA, 19 nt, Homo sapiens
  misc_RNA (1)...(19): siRNA sense strand
ggugguggcugcaguguau

SEQ ID NO: 48787 - RNA, 19 nt, Homo sapiens
  misc_RNA (1)...(19): siRNA sense strand
ggcauggucucauuccuaa

SEQ ID NO: 48788 - RNA, 19 nt, Homo sapiens
  misc_RNA (1)...(19): siRNA sense strand
gcaauguuguguuucucua

SEQ ID NO: 48789 - RNA, 19 nt, Homo sapiens
  misc_RNA (1)...(19): siRNA sense strand
ggucagcccuuaaauaugc

SEQ ID NO: 48790 - RNA, 19 nt, Homo sapiens
  misc_RNA (1)...(19): siRNA sense strand
acaauucaguccucacuuu

SEQ ID NO: 48791 - RNA, 19 nt, Homo sapiens
  misc_RNA (1)...(19): siRNA sense strand
cuagaacuauugagagaaa

SEQ ID NO: 48792 - RNA, 19 nt, Homo sapiens
  misc_RNA (1)...(19): siRNA sense strand
gaaugggaaagcagacuua

SEQ ID NO: 48793 - RNA, 19 nt, Homo sapiens
  misc_RNA (1)...(19): siRNA sense strand
auaaaggucucauaugaug

SEQ ID NO: 48794 - RNA, 19 nt, Homo sapiens
  misc_RNA (1)...(19): siRNA sense strand
gcaguuaccguguauacaa

SEQ ID NO: 48795 - RNA, 19 nt, Homo sapiens
  misc_RNA (1)...(19): siRNA sense strand
gccaaucaguuagaauuaa

SEQ ID NO: 48796 - RNA, 19 nt, Homo sapiens
  misc_RNA (1)...(19): siRNA sense strand
caacagaaagagaagauga

SEQ ID NO: 48797 - RNA, 19 nt, Homo sapiens
  misc_RNA (1)...(19): siRNA sense strand
gaagcuagaacuauugaga

SEQ ID NO: 48798 - RNA, 19 nt, Homo sapiens
  misc_RNA (1)...(19): siRNA sense strand
gagaggcaaugagugcaua

SEQ ID NO: 48799 - RNA, 19 nt, Homo sapiens
  misc_RNA (1)...(19): siRNA sense strand
ccaaugagaaugcccagua

SEQ ID NO: 48800 - RNA, 19 nt, Homo sapiens
  misc_RNA (1)...(19): siRNA sense strand
gaaagugacagagcuagaa

SEQ ID NO: 48801 - RNA, 19 nt, Homo sapiens
  misc_RNA (1)...(19): siRNA sense strand
gcugcaggcuuaccucauu

SEQ ID NO: 48802 - RNA, 19 nt, Homo sapiens
  misc_RNA (1)...(19): siRNA sense strand
ucucuugccuccagauuaa

SEQ ID NO: 48803 - RNA, 19 nt, Homo sapiens
  misc_RNA (1)...(19): siRNA sense strand
ggaugagaauucaaucaau

SEQ ID NO: 48804 - RNA, 19 nt, Homo sapiens
  misc_RNA (1)...(19): siRNA sense strand
agagaaacacgaaaccuua

SEQ ID NO: 48805 - RNA, 19 nt, Homo sapiens
  misc_RNA (1)...(19): siRNA sense strand
cagcagcaauugaagaaug

SEQ ID NO: 48806 - RNA, 19 nt, Homo sapiens
  misc_RNA (1)...(19): siRNA sense strand
gccauuguuugaagucaua

SEQ ID NO: 48807 - RNA, 19 nt, Homo sapiens
  misc_RNA (1)...(19): siRNA sense strand
gagcuacaguuccgauuag

SEQ ID NO: 48808 - RNA, 19 nt, Homo sapiens
  misc_RNA (1)...(19): siRNA sense strand
gcuacucccuugccaauca

SEQ ID NO: 48809 - RNA, 19 nt, Homo sapiens
  misc_RNA (1)...(19): siRNA sense strand
uuccagaacugaccaauga

SEQ ID NO: 48810 - RNA, 19 nt, Homo sapiens
  misc_RNA (1)...(19): siRNA sense strand
agagguauacugcugauua

SEQ ID NO: 48811 - RNA, 19 nt, Homo sapiens
  misc_RNA (1)...(19): siRNA sense strand
gucaguaaccggcuuauuu

SEQ ID NO: 48812 - RNA, 19 nt, Homo sapiens
  misc_RNA (1)...(19): siRNA sense strand
uccaggaaguguuauuaua

SEQ ID NO: 48813 - RNA, 19 nt, Homo sapiens
  misc_RNA (1)...(19): siRNA sense strand
gaaugauguuggacagcua

SEQ ID NO: 48814 - RNA, 19 nt, Homo sapiens
  misc_RNA (1)...(19): siRNA sense strand
ccgauuaggcccaacuuua

SEQ ID NO: 48815 - RNA, 19 nt, Homo sapiens
  misc_RNA (1)...(19): siRNA sense strand
cagaugauaugguuuacug

SEQ ID NO: 48816 - RNA, 19 nt, Homo sapiens
  misc_RNA (1)...(19): siRNA sense strand
ggaaggaugagaauucaau

SEQ ID NO: 48817 - RNA, 19 nt, Homo sapiens
  misc_RNA (1)...(19): siRNA sense strand
gaagacauaguggcaguaa

SEQ ID NO: 48818 - RNA, 19 nt, Homo sapiens
  misc_RNA (1)...(19): siRNA sense strand
aaauuacgcuaugggaaua

SEQ ID NO: 48819 - RNA, 19 nt, Homo sapiens
  misc_RNA (1)...(19): siRNA sense strand
ucaagauccugaauacaga

SEQ ID NO: 48820 - RNA, 19 nt, Homo sapiens
  misc_RNA (1)...(19): siRNA sense strand
caucagauuucagugguuu

SEQ ID NO: 48821 - RNA, 19 nt, Homo sapiens
  misc_RNA (1)...(19): siRNA sense strand
gaauaccugcuuugauuga

SEQ ID NO: 48822 - RNA, 19 nt, Homo sapiens
  misc_RNA (1)...(19): siRNA sense strand
ggaaagcuuuggagauugc

SEQ ID NO: 48823 - RNA, 19 nt, Homo sapiens
  misc_RNA (1)...(19): siRNA sense strand
ggagcaauguuguguuucu

SEQ ID NO: 48824 - RNA, 19 nt, Homo sapiens
  misc_RNA (1)...(19): siRNA sense strand
ugacaaugcagauccuaua

SEQ ID NO: 48825 - RNA, 19 nt, Homo sapiens
  misc_RNA (1)...(19): siRNA sense strand
aaccaacaccuuacgauua

SEQ ID NO: 48826 - RNA, 19 nt, Homo sapiens
  misc_RNA (1)...(19): siRNA sense strand
aaggagcaauguuguguuu

SEQ ID NO: 48827 - RNA, 19 nt, Homo sapiens
  misc_RNA (1)...(19): siRNA sense strand
gaaaucaucugacacaauu

SEQ ID NO: 48828 - RNA, 19 nt, Homo sapiens
  misc_RNA (1)...(19): siRNA sense strand
gcaacaaucugguucauuu

SEQ ID NO: 48829 - RNA, 19 nt, Homo sapiens
  misc_RNA (1)...(19): siRNA sense strand
caaugcagauccuauauua

SEQ ID NO: 48830 - RNA, 19 nt, Homo sapiens
  misc_RNA (1)...(19): siRNA sense strand
gggaauaccugcuuugauu

SEQ ID NO: 48831 - RNA, 19 nt, Homo sapiens
  misc_RNA (1)...(19): siRNA sense strand
gggagacaguguuaaauua

SEQ ID NO: 48832 - RNA, 19 nt, Homo sapiens
  misc_RNA (1)...(19): siRNA sense strand
ccaaguagaugucaacaaa

SEQ ID NO: 48833 - RNA, 19 nt, Homo sapiens
  misc_RNA (1)...(19): siRNA sense strand
gaaauaagaccaaagaaug

SEQ ID NO: 48834 - RNA, 19 nt, Homo sapiens
  misc_RNA (1)...(19): siRNA sense strand
gauaaugaguguccuauug

SEQ ID NO: 48835 - RNA, 19 nt, Homo sapiens
  misc_RNA (1)...(19): siRNA sense strand
gaagggaaauacaaagaaa

SEQ ID NO: 48836 - RNA, 19 nt, Homo sapiens
  misc_RNA (1)...(19): siRNA sense strand
gaagagggcagauuaguuu

SEQ ID NO: 48837 - RNA, 19 nt, Homo sapiens
  misc_RNA (1)...(19): siRNA sense strand
gcaaugagugcauauaaua

SEQ ID NO: 48838 - RNA, 19 nt, Homo sapiens
  misc_RNA (1)...(19): siRNA sense strand
gagaacauauucagcuuaa

SEQ ID NO: 48839 - RNA, 19 nt, Homo sapiens
  misc_RNA (1)...(19): siRNA sense strand
ggacgaagguuuuaauaua

SEQ ID NO: 48840 - RNA, 19 nt, Homo sapiens
  misc_RNA (1)...(19): siRNA sense strand
ugacagagcuagaaacaga

SEQ ID NO: 48841 - RNA, 19 nt, Homo sapiens
  misc_RNA (1)...(19): siRNA sense strand
ggagaaacauuuaauagag

SEQ ID NO: 48842 - RNA, 19 nt, Homo sapiens
  misc_RNA (1)...(19): siRNA sense strand
gagauuggaugauugacua

SEQ ID NO: 48843 - RNA, 19 nt, Homo sapiens
  misc_RNA (1)...(19): siRNA sense strand
guagaagccaggaauauua

SEQ ID NO: 48844 - RNA, 19 nt, Homo sapiens
  misc_RNA (1)...(19): siRNA sense strand
ccagauagaucgaaacaug

SEQ ID NO: 48845 - RNA, 19 nt, Homo sapiens
  misc_RNA (1)...(19): siRNA sense strand
gugaagaucuggacaaugu

SEQ ID NO: 48846 - RNA, 19 nt, Homo sapiens
  misc_RNA (1)...(19): siRNA sense strand
cuauaaaggucucauauga

SEQ ID NO: 48847 - RNA, 19 nt, Homo sapiens
  misc_RNA (1)...(19): siRNA sense strand
gcaaggaagugccucaaau

SEQ ID NO: 48848 - RNA, 19 nt, Homo sapiens
  misc_RNA (1)...(19): siRNA sense strand
gaaaguauaccuggaauga

SEQ ID NO: 48849 - RNA, 19 nt, Homo sapiens
  misc_RNA (1)...(19): siRNA sense strand
ugaagcagaucccacguua

SEQ ID NO: 48850 - RNA, 19 nt, Homo sapiens
  misc_RNA (1)...(19): siRNA sense strand
gcagauuaguuuaccgaua

SEQ ID NO: 48851 - RNA, 19 nt, Homo sapiens
  misc_RNA (1)...(19): siRNA sense strand
gaagaaugcuguaauuggu

SEQ ID NO: 48852 - RNA, 19 nt, Homo sapiens
  misc_RNA (1)...(19): siRNA sense strand
ggaauggaauguuauuugu

SEQ ID NO: 48853 - RNA, 19 nt, Homo sapiens
  misc_RNA (1)...(19): siRNA sense strand
gaaugugccuauaaucuug

SEQ ID NO: 48854 - RNA, 19 nt, Homo sapiens
  misc_RNA (1)...(19): siRNA sense strand
acacaagccuggucaauug

SEQ ID NO: 48855 - RNA, 19 nt, Homo sapiens
  misc_RNA (1)...(19): siRNA sense strand
ccuauaaucuugugaauuc

SEQ ID NO: 48856 - RNA, 19 nt, Homo sapiens
  misc_RNA (1)...(19): siRNA sense strand
gaacauauucagcuuaaug

SEQ ID NO: 48857 - RNA, 19 nt, Homo sapiens
  misc_RNA (1)...(19): siRNA sense strand
caacuacaaucuugcuaaa

SEQ ID NO: 48858 - RNA, 19 nt, Homo sapiens
  misc_RNA (1)...(19): siRNA sense strand
gaaaggacuuccagaacug

SEQ ID NO: 48859 - RNA, 19 nt, Homo sapiens
  misc_RNA (1)...(19): siRNA sense strand
gaaucaggcuacaacauga

SEQ ID NO: 48860 - RNA, 19 nt, Homo sapiens
  misc_RNA (1)...(19): siRNA sense strand
acaagucgcuguuggaauu

SEQ ID NO: 48861 - RNA, 19 nt, Homo sapiens
  misc_RNA (1)...(19): siRNA sense strand
aaacacaggugaaguuaau

SEQ ID NO: 48862 - RNA, 19 nt, Homo sapiens
  misc_RNA (1)...(19): siRNA sense strand
aagaggcuaugaugaauua

SEQ ID NO: 48863 - RNA, 19 nt, Homo sapiens
  misc_RNA (1)...(19): siRNA sense strand
guaaauggauccaggaaca

SEQ ID NO: 48864 - RNA, 19 nt, Homo sapiens
  misc_RNA (1)...(19): siRNA sense strand
ugauucaucugccaaauaa

SEQ ID NO: 48865 - RNA, 19 nt, Homo sapiens
  misc_RNA (1)...(19): siRNA sense strand
gaugagaauucaaucaaug

SEQ ID NO: 48866 - RNA, 19 nt, Homo sapiens
  misc_RNA (1)...(19): siRNA sense strand
gcaacccaauuuauaugua

SEQ ID NO: 48867 - RNA, 19 nt, Homo sapiens
  misc_RNA (1)...(19): siRNA sense strand
acaaagcgguugagcaauu

SEQ ID NO: 48868 - RNA, 19 nt, Homo sapiens
  misc_RNA (1)...(19): siRNA sense strand
gagaagcaucgacucauua

SEQ ID NO: 48869 - RNA, 19 nt, Homo sapiens
  misc_RNA (1)...(19): siRNA sense strand
guaaaugguugcaggcuau

SEQ ID NO: 48870 - RNA, 19 nt, Homo sapiens
  misc_RNA (1)...(19): siRNA sense strand
gaagaacgguuuuacacua

SEQ ID NO: 48871 - RNA, 19 nt, Homo sapiens
  misc_RNA (1)...(19): siRNA sense strand
cagauuaguuuaccgauau

SEQ ID NO: 48872 - RNA, 19 nt, Homo sapiens
  misc_RNA (1)...(19): siRNA sense strand
gagaugauccucuucgaaa

SEQ ID NO: 48873 - RNA, 19 nt, Homo sapiens
  misc_RNA (1)...(19): siRNA sense strand
gcagaaauaagaccaaaga

SEQ ID NO: 48874 - RNA, 19 nt, Homo sapiens
  misc_RNA (1)...(19): siRNA sense strand
ucacaaacguggcauauac

SEQ ID NO: 48875 - RNA, 19 nt, Homo sapiens
  misc_RNA (1)...(19): siRNA sense strand
gcacauggauggauaaaau

SEQ ID NO: 48876 - RNA, 19 nt, Homo sapiens
  misc_RNA (1)...(19): siRNA sense strand
ucacguagcugaguacaug

SEQ ID NO: 48877 - RNA, 19 nt, Homo sapiens
  misc_RNA (1)...(19): siRNA sense strand
gcacaugcccuguuuaugg

SEQ ID NO: 48878 - RNA, 19 nt, Homo sapiens
  misc_RNA (1)...(19): siRNA sense strand
gauccaaaccaacaccuua

SEQ ID NO: 48879 - RNA, 19 nt, Homo sapiens
  misc_RNA (1)...(19): siRNA sense strand
gaaaagcaguuaccgugua

SEQ ID NO: 48880 - RNA, 19 nt, Homo sapiens
  misc_RNA (1)...(19): siRNA sense strand
gauaugaacauugcacuaa

SEQ ID NO: 48881 - RNA, 19 nt, Homo sapiens
  misc_RNA (1)...(19): siRNA sense strand
gaaauugugggccugagua

SEQ ID NO: 48882 - RNA, 19 nt, Homo sapiens
  misc_RNA (1)...(19): siRNA sense strand
caaaagggcccaaugaaua

SEQ ID NO: 48883 - RNA, 19 nt, Homo sapiens
  misc_RNA (1)...(19): siRNA sense strand
caaagcgguugagcaauuu

SEQ ID NO: 48884 - RNA, 19 nt, Homo sapiens
  misc_RNA (1)...(19): siRNA sense strand
gcuaaagguuucaauuauc

SEQ ID NO: 48885 - RNA, 19 nt, Homo sapiens
  misc_RNA (1)...(19): siRNA sense strand
gaucagccauuguuugaag

SEQ ID NO: 48886 - RNA, 19 nt, Homo sapiens
  misc_RNA (1)...(19): siRNA sense strand
ggugguggcugcaguguau

SEQ ID NO: 48887 - RNA, 19 nt, Homo sapiens
  misc_RNA (1)...(19): siRNA sense strand
ggcauggucucauuccuaa

SEQ ID NO: 48888 - RNA, 19 nt, Homo sapiens
  misc_RNA (1)...(19): siRNA sense strand
gcaauguuguguuucucua

SEQ ID NO: 48889 - RNA, 19 nt, Homo sapiens
  misc_RNA (1)...(19): siRNA sense strand
ggucagcccuuaaauaugc

SEQ ID NO: 48890 - RNA, 19 nt, Homo sapiens
  misc_RNA (1)...(19): siRNA sense strand
acaauucaguccucacuuu

SEQ ID NO: 48891 - RNA, 19 nt, Homo sapiens
  misc_RNA (1)...(19): siRNA sense strand
cuagaacuauugagagaaa

SEQ ID NO: 48892 - RNA, 19 nt, Homo sapiens
  misc_RNA (1)...(19): siRNA sense strand
gaaugggaaagcagacuua

SEQ ID NO: 48893 - RNA, 19 nt, Homo sapiens
  misc_RNA (1)...(19): siRNA sense strand
auaaaggucucauaugaug

SEQ ID NO: 48894 - RNA, 19 nt, Homo sapiens
  misc_RNA (1)...(19): siRNA sense strand
gcaguuaccguguauacaa

SEQ ID NO: 48895 - RNA, 19 nt, Homo sapiens
  misc_RNA (1)...(19): siRNA sense strand
gccaaucaguuagaauuaa

SEQ ID NO: 48896 - RNA, 19 nt, Homo sapiens
  misc_RNA (1)...(19): siRNA sense strand
caacagaaagagaagauga

SEQ ID NO: 48897 - RNA, 19 nt, Homo sapiens
  misc_RNA (1)...(19): siRNA sense strand
gaagcuagaacuauugaga

SEQ ID NO: 48898 - RNA, 19 nt, Homo sapiens
  misc_RNA (1)...(19): siRNA sense strand
gagaggcaaugagugcaua

SEQ ID NO: 48899 - RNA, 19 nt, Homo sapiens
  misc_RNA (1)...(19): siRNA sense strand
ccaaugagaaugcccagua

SEQ ID NO: 48900 - RNA, 19 nt, Homo sapiens
  misc_RNA (1)...(19): siRNA sense strand
gaaagugacagagcuagaa

SEQ ID NO: 48901 - RNA, 19 nt, Homo sapiens
  misc_RNA (1)...(19): siRNA sense strand
gcugcaggcuuaccucauu

SEQ ID NO: 48902 - RNA, 19 nt, Homo sapiens
  misc_RNA (1)...(19): siRNA sense strand
ucucuugccuccagauuaa

SEQ ID NO: 48903 - RNA, 19 nt, Homo sapiens
  misc_RNA (1)...(19): siRNA sense strand
ggaugagaauucaaucaau

SEQ ID NO: 48904 - RNA, 19 nt, Homo sapiens
  misc_RNA (1)...(19): siRNA sense strand
agagaaacacgaaaccuua

SEQ ID NO: 48905 - RNA, 19 nt, Homo sapiens
  misc_RNA (1)...(19): siRNA sense strand
cagcagcaauugaagaaug

SEQ ID NO: 48906 - RNA, 19 nt, Homo sapiens
  misc_RNA (1)...(19): siRNA sense strand
gccauuguuugaagucaua

SEQ ID NO: 48907 - RNA, 19 nt, Homo sapiens
  misc_RNA (1)...(19): siRNA sense strand
gagcuacaguuccgauuag

SEQ ID NO: 48908 - RNA, 19 nt, Homo sapiens
  misc_RNA (1)...(19): siRNA sense strand
gcuacucccuugccaauca

SEQ ID NO: 48909 - RNA, 19 nt, Homo sapiens
  misc_RNA (1)...(19): siRNA sense strand
uuccagaacugaccaauga

SEQ ID NO: 48910 - RNA, 19 nt, Homo sapiens
  misc_RNA (1)...(19): siRNA sense strand
agagguauacugcugauua

SEQ ID NO: 48911 - RNA, 19 nt, Homo sapiens
  misc_RNA (1)...(19): siRNA sense strand
gucaguaaccggcuuauuu

SEQ ID NO: 48912 - RNA, 19 nt, Homo sapiens
  misc_RNA (1)...(19): siRNA sense strand
uccaggaaguguuauuaua

SEQ ID NO: 48913 - RNA, 19 nt, Homo sapiens
  misc_RNA (1)...(19): siRNA sense strand
gaaugauguuggacagcua

SEQ ID NO: 48914 - RNA, 19 nt, Homo sapiens
  misc_RNA (1)...(19): siRNA sense strand
ccgauuaggcccaacuuua

SEQ ID NO: 48915 - RNA, 19 nt, Homo sapiens
  misc_RNA (1)...(19): siRNA sense strand
cagaugauaugguuuacug

SEQ ID NO: 48916 - RNA, 19 nt, Homo sapiens
  misc_RNA (1)...(19): siRNA sense strand
ggaaggaugagaauucaau

SEQ ID NO: 48917 - RNA, 19 nt, Homo sapiens
  misc_RNA (1)...(19): siRNA sense strand
gaagacauaguggcaguaa

SEQ ID NO: 48918 - RNA, 19 nt, Homo sapiens
  misc_RNA (1)...(19): siRNA sense strand
aaauuacgcuaugggaaua

SEQ ID NO: 48919 - RNA, 19 nt, Homo sapiens
  misc_RNA (1)...(19): siRNA sense strand
ucaagauccugaauacaga

SEQ ID NO: 48920 - RNA, 19 nt, Homo sapiens
  misc_RNA (1)...(19): siRNA sense strand
caucagauuucagugguuu

SEQ ID NO: 48921 - RNA, 19 nt, Homo sapiens
  misc_RNA (1)...(19): siRNA sense strand
gaauaccugcuuugauuga

SEQ ID NO: 48922 - RNA, 19 nt, Homo sapiens
  misc_RNA (1)...(19): siRNA sense strand
ggaaagcuuuggagauugc

SEQ ID NO: 48923 - RNA, 19 nt, Homo sapiens
  misc_RNA (1)...(19): siRNA sense strand
ggagcaauguuguguuucu

SEQ ID NO: 48924 - RNA, 19 nt, Homo sapiens
  misc_RNA (1)...(19): siRNA sense strand
ugacaaugcagauccuaua

SEQ ID NO: 48925 - RNA, 19 nt, Homo sapiens
  misc_RNA (1)...(19): siRNA sense strand
aaccaacaccuuacgauua

SEQ ID NO: 48926 - RNA, 19 nt, Homo sapiens
  misc_RNA (1)...(19): siRNA sense strand
aaggagcaauguuguguuu

SEQ ID NO: 48927 - RNA, 19 nt, Homo sapiens
  misc_RNA (1)...(19): siRNA sense strand
gaaaucaucugacacaauu

SEQ ID NO: 48928 - RNA, 19 nt, Homo sapiens
  misc_RNA (1)...(19): siRNA sense strand
gcaacaaucugguucauuu

SEQ ID NO: 48929 - RNA, 19 nt, Homo sapiens
  misc_RNA (1)...(19): siRNA sense strand
caaugcagauccuauauua

SEQ ID NO: 48930 - RNA, 19 nt, Homo sapiens
  misc_RNA (1)...(19): siRNA sense strand
gggaauaccugcuuugauu

SEQ ID NO: 48931 - RNA, 19 nt, Homo sapiens
  misc_RNA (1)...(19): siRNA sense strand
gggagacaguguuaaauua

SEQ ID NO: 48932 - RNA, 19 nt, Homo sapiens
  misc_RNA (1)...(19): siRNA sense strand
ccaaguagaugucaacaaa

SEQ ID NO: 48933 - RNA, 19 nt, Homo sapiens
  misc_RNA (1)...(19): siRNA sense strand
gaaauaagaccaaagaaug

SEQ ID NO: 48934 - RNA, 19 nt, Homo sapiens
  misc_RNA (1)...(19): siRNA sense strand
gauaaugaguguccuauug

SEQ ID NO: 48935 - RNA, 19 nt, Homo sapiens
  misc_RNA (1)...(19): siRNA sense strand
gaagggaaauacaaagaaa

SEQ ID NO: 48936 - RNA, 19 nt, Homo sapiens
  misc_RNA (1)...(19): siRNA sense strand
gaagagggcagauuaguuu

SEQ ID NO: 48937 - RNA, 19 nt, Homo sapiens
  misc_RNA (1)...(19): siRNA sense strand
gcaaugagugcauauaaua

SEQ ID NO: 48938 - RNA, 19 nt, Homo sapiens
  misc_RNA (1)...(19): siRNA sense strand
gagaacauauucagcuuaa

SEQ ID NO: 48939 - RNA, 19 nt, Homo sapiens
  misc_RNA (1)...(19): siRNA sense strand
ggacgaagguuuuaauaua

SEQ ID NO: 48940 - RNA, 19 nt, Homo sapiens
  misc_RNA (1)...(19): siRNA sense strand
ugacagagcuagaaacaga

SEQ ID NO: 48941 - RNA, 19 nt, Homo sapiens
  misc_RNA (1)...(19): siRNA sense strand
ggagaaacauuuaauagag

SEQ ID NO: 48942 - RNA, 19 nt, Homo sapiens
  misc_RNA (1)...(19): siRNA sense strand
gagauuggaugauugacua

SEQ ID NO: 48943 - RNA, 19 nt, Homo sapiens
  misc_RNA (1)...(19): siRNA sense strand
guagaagccaggaauauua

SEQ ID NO: 48944 - RNA, 19 nt, Homo sapiens
  misc_RNA (1)...(19): siRNA sense strand
ccagauagaucgaaacaug

SEQ ID NO: 48945 - RNA, 19 nt, Homo sapiens
  misc_RNA (1)...(19): siRNA sense strand
gugaagaucuggacaaugu

SEQ ID NO: 48946 - RNA, 19 nt, Homo sapiens
  misc_RNA (1)...(19): siRNA sense strand
cuauaaaggucucauauga

SEQ ID NO: 48947 - RNA, 19 nt, Homo sapiens
  misc_RNA (1)...(19): siRNA sense strand
gcaaggaagugccucaaau

SEQ ID NO: 48948 - RNA, 19 nt, Homo sapiens
  misc_RNA (1)...(19): siRNA sense strand
gaaaguauaccuggaauga

SEQ ID NO: 48949 - RNA, 19 nt, Homo sapiens
  misc_RNA (1)...(19): siRNA sense strand
ugaagcagaucccacguua

SEQ ID NO: 48950 - RNA, 19 nt, Homo sapiens
  misc_RNA (1)...(19): siRNA sense strand
gcagauuaguuuaccgaua

SEQ ID NO: 48951 - RNA, 19 nt, Homo sapiens
  misc_RNA (1)...(19): siRNA sense strand
gaagaaugcuguaauuggu

SEQ ID NO: 48952 - RNA, 19 nt, Homo sapiens
  misc_RNA (1)...(19): siRNA sense strand
ggaauggaauguuauuugu

SEQ ID NO: 48953 - RNA, 19 nt, Homo sapiens
  misc_RNA (1)...(19): siRNA sense strand
gaaugugccuauaaucuug

SEQ ID NO: 48954 - RNA, 19 nt, Homo sapiens
  misc_RNA (1)...(19): siRNA sense strand
acacaagccuggucaauug

SEQ ID NO: 48955 - RNA, 19 nt, Homo sapiens
  misc_RNA (1)...(19): siRNA sense strand
ccuauaaucuugugaauuc

SEQ ID NO: 48956 - RNA, 19 nt, Homo sapiens
  misc_RNA (1)...(19): siRNA sense strand
gaacauauucagcuuaaug

SEQ ID NO: 48957 - RNA, 19 nt, Homo sapiens
  misc_RNA (1)...(19): siRNA sense strand
caacuacaaucuugcuaaa

SEQ ID NO: 48958 - RNA, 19 nt, Homo sapiens
  misc_RNA (1)...(19): siRNA sense strand
gaaaggacuuccagaacug

SEQ ID NO: 48959 - RNA, 19 nt, Homo sapiens
  misc_RNA (1)...(19): siRNA sense strand
gaaucaggcuacaacauga

SEQ ID NO: 48960 - RNA, 19 nt, Homo sapiens
  misc_RNA (1)...(19): siRNA sense strand
acaagucgcuguuggaauu

SEQ ID NO: 48961 - RNA, 19 nt, Homo sapiens
  misc_RNA (1)...(19): siRNA sense strand
aaacacaggugaaguuaau

SEQ ID NO: 48962 - RNA, 19 nt, Homo sapiens
  misc_RNA (1)...(19): siRNA sense strand
aagaggcuaugaugaauua

SEQ ID NO: 48963 - RNA, 19 nt, Homo sapiens
  misc_RNA (1)...(19): siRNA sense strand
guaaauggauccaggaaca

SEQ ID NO: 48964 - RNA, 19 nt, Homo sapiens
  misc_RNA (1)...(19): siRNA sense strand
ugauucaucugccaaauaa

SEQ ID NO: 48965 - RNA, 19 nt, Homo sapiens
  misc_RNA (1)...(19): siRNA sense strand
gaugagaauucaaucaaug

SEQ ID NO: 48966 - RNA, 19 nt, Homo sapiens
  misc_RNA (1)...(19): siRNA sense strand
gcaacccaauuuauaugua

SEQ ID NO: 48967 - RNA, 19 nt, Homo sapiens
  misc_RNA (1)...(19): siRNA sense strand
acaaagcgguugagcaauu

SEQ ID NO: 48968 - RNA, 19 nt, Homo sapiens
  misc_RNA (1)...(19): siRNA sense strand
gagaagcaucgacucauua

SEQ ID NO: 48969 - RNA, 19 nt, Homo sapiens
  misc_RNA (1)...(19): siRNA sense strand
guaaaugguugcaggcuau

SEQ ID NO: 48970 - RNA, 19 nt, Homo sapiens
  misc_RNA (1)...(19): siRNA sense strand
gaagaacgguuuuacacua

SEQ ID NO: 48971 - RNA, 19 nt, Homo sapiens
  misc_RNA (1)...(19): siRNA sense strand
cagauuaguuuaccgauau

SEQ ID NO: 48972 - RNA, 19 nt, Homo sapiens
  misc_RNA (1)...(19): siRNA sense strand
gagaugauccucuucgaaa

SEQ ID NO: 48973 - RNA, 19 nt, Homo sapiens
  misc_RNA (1)...(19): siRNA sense strand
gcagaaauaagaccaaaga

SEQ ID NO: 48974 - RNA, 19 nt, Homo sapiens
  misc_RNA (1)...(19): siRNA sense strand
ucacaaacguggcauauac

SEQ ID NO: 48975 - RNA, 19 nt, Homo sapiens
  misc_RNA (1)...(19): siRNA sense strand
gcacauggauggauaaaau

SEQ ID NO: 48976 - RNA, 19 nt, Homo sapiens
  misc_RNA (1)...(19): siRNA sense strand
ucacguagcugaguacaug

SEQ ID NO: 48977 - RNA, 19 nt, Homo sapiens
  misc_RNA (1)...(19): siRNA sense strand
gcacaugcccuguuuaugg

SEQ ID NO: 48978 - RNA, 19 nt, Homo sapiens
  misc_RNA (1)...(19): siRNA sense strand
gauccaaaccaacaccuua

SEQ ID NO: 48979 - RNA, 19 nt, Homo sapiens
  misc_RNA (1)...(19): siRNA sense strand
gaaaagcaguuaccgugua

SEQ ID NO: 48980 - RNA, 19 nt, Homo sapiens
  misc_RNA (1)...(19): siRNA sense strand
gauaugaacauugcacuaa

SEQ ID NO: 48981 - RNA, 19 nt, Homo sapiens
  misc_RNA (1)...(19): siRNA sense strand
gaaauugugggccugagua

SEQ ID NO: 48982 - RNA, 19 nt, Homo sapiens
  misc_RNA (1)...(19): siRNA sense strand
caaaagggcccaaugaaua

SEQ ID NO: 48983 - RNA, 19 nt, Homo sapiens
  misc_RNA (1)...(19): siRNA sense strand
caaagcgguugagcaauuu

SEQ ID NO: 48984 - RNA, 19 nt, Homo sapiens
  misc_RNA (1)...(19): siRNA sense strand
gcuaaagguuucaauuauc

SEQ ID NO: 48985 - RNA, 19 nt, Homo sapiens
  misc_RNA (1)...(19): siRNA sense strand
gaucagccauuguuugaag

SEQ ID NO: 48986 - RNA, 19 nt, Homo sapiens
  misc_RNA (1)...(19): siRNA sense strand
ggugguggcugcaguguau

SEQ ID NO: 48987 - RNA, 19 nt, Homo sapiens
  misc_RNA (1)...(19): siRNA sense strand
ggcauggucucauuccuaa

SEQ ID NO: 48988 - RNA, 19 nt, Homo sapiens
  misc_RNA (1)...(19): siRNA sense strand
gcaauguuguguuucucua

SEQ ID NO: 48989 - RNA, 19 nt, Homo sapiens
  misc_RNA (1)...(19): siRNA sense strand
ggucagcccuuaaauaugc

SEQ ID NO: 48990 - RNA, 19 nt, Homo sapiens
  misc_RNA (1)...(19): siRNA sense strand
acaauucaguccucacuuu

SEQ ID NO: 48991 - RNA, 19 nt, Homo sapiens
  misc_RNA (1)...(19): siRNA sense strand
cuagaacuauugagagaaa

SEQ ID NO: 48992 - RNA, 19 nt, Homo sapiens
  misc_RNA (1)...(19): siRNA sense strand
gaaugggaaagcagacuua

SEQ ID NO: 48993 - RNA, 19 nt, Homo sapiens
  misc_RNA (1)...(19): siRNA sense strand
auaaaggucucauaugaug

SEQ ID NO: 48994 - RNA, 19 nt, Homo sapiens
  misc_RNA (1)...(19): siRNA sense strand
gcaguuaccguguauacaa

SEQ ID NO: 48995 - RNA, 19 nt, Homo sapiens
  misc_RNA (1)...(19): siRNA sense strand
gccaaucaguuagaauuaa

SEQ ID NO: 48996 - RNA, 19 nt, Homo sapiens
  misc_RNA (1)...(19): siRNA sense strand
caacagaaagagaagauga

SEQ ID NO: 48997 - RNA, 19 nt, Homo sapiens
  misc_RNA (1)...(19): siRNA sense strand
gaagcuagaacuauugaga

SEQ ID NO: 48998 - RNA, 19 nt, Homo sapiens
  misc_RNA (1)...(19): siRNA sense strand
gagaggcaaugagugcaua

SEQ ID NO: 48999 - RNA, 19 nt, Homo sapiens
  misc_RNA (1)...(19): siRNA sense strand
ccaaugagaaugcccagua

SEQ ID NO: 49000 - RNA, 19 nt, Homo sapiens
  misc_RNA (1)...(19): siRNA sense strand
gaaagugacagagcuagaa

SEQ ID NO: 49001 - RNA, 19 nt, Homo sapiens
  misc_RNA (1)...(19): siRNA sense strand
gcugcaggcuuaccucauu

SEQ ID NO: 49002 - RNA, 19 nt, Homo sapiens
  misc_RNA (1)...(19): siRNA sense strand
ucucuugccuccagauuaa

SEQ ID NO: 49003 - RNA, 19 nt, Homo sapiens
  misc_RNA (1)...(19): siRNA sense strand
ggaugagaauucaaucaau

SEQ ID NO: 49004 - RNA, 19 nt, Homo sapiens
  misc_RNA (1)...(19): siRNA sense strand
agagaaacacgaaaccuua

SEQ ID NO: 49005 - RNA, 19 nt, Homo sapiens
  misc_RNA (1)...(19): siRNA sense strand
cagcagcaauugaagaaug

SEQ ID NO: 49006 - RNA, 19 nt, Homo sapiens
  misc_RNA (1)...(19): siRNA sense strand
gccauuguuugaagucaua

SEQ ID NO: 49007 - RNA, 19 nt, Homo sapiens
  misc_RNA (1)...(19): siRNA sense strand
gagcuacaguuccgauuag

SEQ ID NO: 49008 - RNA, 19 nt, Homo sapiens
  misc_RNA (1)...(19): siRNA sense strand
gcuacucccuugccaauca

SEQ ID NO: 49009 - RNA, 19 nt, Homo sapiens
  misc_RNA (1)...(19): siRNA sense strand
uuccagaacugaccaauga

SEQ ID NO: 49010 - RNA, 19 nt, Homo sapiens
  misc_RNA (1)...(19): siRNA sense strand
agagguauacugcugauua

SEQ ID NO: 49011 - RNA, 19 nt, Homo sapiens
  misc_RNA (1)...(19): siRNA sense strand
gucaguaaccggcuuauuu

SEQ ID NO: 49012 - RNA, 19 nt, Homo sapiens
  misc_RNA (1)...(19): siRNA sense strand
uccaggaaguguuauuaua

SEQ ID NO: 49013 - RNA, 19 nt, Homo sapiens
  misc_RNA (1)...(19): siRNA sense strand
gaaugauguuggacagcua

SEQ ID NO: 49014 - RNA, 19 nt, Homo sapiens
  misc_RNA (1)...(19): siRNA sense strand
ccgauuaggcccaacuuua

SEQ ID NO: 49015 - RNA, 19 nt, Homo sapiens
  misc_RNA (1)...(19): siRNA sense strand
cagaugauaugguuuacug

SEQ ID NO: 49016 - RNA, 19 nt, Homo sapiens
  misc_RNA (1)...(19): siRNA sense strand
ggaaggaugagaauucaau

SEQ ID NO: 49017 - RNA, 19 nt, Homo sapiens
  misc_RNA (1)...(19): siRNA sense strand
gaagacauaguggcaguaa

SEQ ID NO: 49018 - RNA, 19 nt, Homo sapiens
  misc_RNA (1)...(19): siRNA sense strand
aaauuacgcuaugggaaua

SEQ ID NO: 49019 - RNA, 19 nt, Homo sapiens
  misc_RNA (1)...(19): siRNA sense strand
ucaagauccugaauacaga

SEQ ID NO: 49020 - RNA, 19 nt, Homo sapiens
  misc_RNA (1)...(19): siRNA sense strand
caucagauuucagugguuu

SEQ ID NO: 49021 - RNA, 19 nt, Homo sapiens
  misc_RNA (1)...(19): siRNA sense strand
gaauaccugcuuugauuga

SEQ ID NO: 49022 - RNA, 19 nt, Homo sapiens
  misc_RNA (1)...(19): siRNA sense strand
ggaaagcuuuggagauugc

SEQ ID NO: 49023 - RNA, 19 nt, Homo sapiens
  misc_RNA (1)...(19): siRNA sense strand
ggagcaauguuguguuucu

SEQ ID NO: 49024 - RNA, 19 nt, Homo sapiens
  misc_RNA (1)...(19): siRNA sense strand
ugacaaugcagauccuaua

SEQ ID NO: 49025 - RNA, 19 nt, Homo sapiens
  misc_RNA (1)...(19): siRNA sense strand
aaccaacaccuuacgauua

SEQ ID NO: 49026 - RNA, 19 nt, Homo sapiens
  misc_RNA (1)...(19): siRNA sense strand
aaggagcaauguuguguuu

SEQ ID NO: 49027 - RNA, 19 nt, Homo sapiens
  misc_RNA (1)...(19): siRNA sense strand
gaaaucaucugacacaauu

SEQ ID NO: 49028 - RNA, 19 nt, Homo sapiens
  misc_RNA (1)...(19): siRNA sense strand
gcaacaaucugguucauuu

SEQ ID NO: 49029 - RNA, 19 nt, Homo sapiens
  misc_RNA (1)...(19): siRNA sense strand
caaugcagauccuauauua

SEQ ID NO: 49030 - RNA, 19 nt, Homo sapiens
  misc_RNA (1)...(19): siRNA sense strand
gggaauaccugcuuugauu

SEQ ID NO: 49031 - RNA, 19 nt, Homo sapiens
  misc_RNA (1)...(19): siRNA sense strand
gggagacaguguuaaauua

SEQ ID NO: 49032 - RNA, 19 nt, Homo sapiens
  misc_RNA (1)...(19): siRNA sense strand
ccaaguagaugucaacaaa

SEQ ID NO: 49033 - RNA, 19 nt, Homo sapiens
  misc_RNA (1)...(19): siRNA sense strand
gaaauaagaccaaagaaug

SEQ ID NO: 49034 - RNA, 19 nt, Homo sapiens
  misc_RNA (1)...(19): siRNA sense strand
gauaaugaguguccuauug

SEQ ID NO: 49035 - RNA, 19 nt, Homo sapiens
  misc_RNA (1)...(19): siRNA sense strand
gaagggaaauacaaagaaa

SEQ ID NO: 49036 - RNA, 19 nt, Homo sapiens
  misc_RNA (1)...(19): siRNA sense strand
gaagagggcagauuaguuu

SEQ ID NO: 49037 - RNA, 19 nt, Homo sapiens
  misc_RNA (1)...(19): siRNA sense strand
gcaaugagugcauauaaua

SEQ ID NO: 49038 - RNA, 19 nt, Homo sapiens
  misc_RNA (1)...(19): siRNA sense strand
gagaacauauucagcuuaa

SEQ ID NO: 49039 - RNA, 19 nt, Homo sapiens
  misc_RNA (1)...(19): siRNA sense strand
ggacgaagguuuuaauaua

SEQ ID NO: 49040 - RNA, 19 nt, Homo sapiens
  misc_RNA (1)...(19): siRNA sense strand
ugacagagcuagaaacaga

SEQ ID NO: 49041 - RNA, 19 nt, Homo sapiens
  misc_RNA (1)...(19): siRNA sense strand
ggagaaacauuuaauagag

SEQ ID NO: 49042 - RNA, 19 nt, Homo sapiens
  misc_RNA (1)...(19): siRNA sense strand
gagauuggaugauugacua

SEQ ID NO: 49043 - RNA, 19 nt, Homo sapiens
  misc_RNA (1)...(19): siRNA sense strand
guagaagccaggaauauua

SEQ ID NO: 49044 - RNA, 19 nt, Homo sapiens
  misc_RNA (1)...(19): siRNA sense strand
ccagauagaucgaaacaug

SEQ ID NO: 49045 - RNA, 19 nt, Homo sapiens
  misc_RNA (1)...(19): siRNA sense strand
gugaagaucuggacaaugu

SEQ ID NO: 49046 - RNA, 19 nt, Homo sapiens
  misc_RNA (1)...(19): siRNA sense strand
cuauaaaggucucauauga

SEQ ID NO: 49047 - RNA, 19 nt, Homo sapiens
  misc_RNA (1)...(19): siRNA sense strand
gcaaggaagugccucaaau

SEQ ID NO: 49048 - RNA, 19 nt, Homo sapiens
  misc_RNA (1)...(19): siRNA sense strand
gaaaguauaccuggaauga

SEQ ID NO: 49049 - RNA, 19 nt, Homo sapiens
  misc_RNA (1)...(19): siRNA sense strand
ugaagcagaucccacguua

SEQ ID NO: 49050 - RNA, 19 nt, Homo sapiens
  misc_RNA (1)...(19): siRNA sense strand
gcagauuaguuuaccgaua

SEQ ID NO: 49051 - RNA, 19 nt, Homo sapiens
  misc_RNA (1)...(19): siRNA sense strand
gaagaaugcuguaauuggu

SEQ ID NO: 49052 - RNA, 19 nt, Homo sapiens
  misc_RNA (1)...(19): siRNA sense strand
ggaauggaauguuauuugu

SEQ ID NO: 49053 - RNA, 19 nt, Homo sapiens
  misc_RNA (1)...(19): siRNA sense strand
gaaugugccuauaaucuug

SEQ ID NO: 49054 - RNA, 19 nt, Homo sapiens
  misc_RNA (1)...(19): siRNA sense strand
acacaagccuggucaauug

SEQ ID NO: 49055 - RNA, 19 nt, Homo sapiens
  misc_RNA (1)...(19): siRNA sense strand
ccuauaaucuugugaauuc

SEQ ID NO: 49056 - RNA, 19 nt, Homo sapiens
  misc_RNA (1)...(19): siRNA sense strand
gaacauauucagcuuaaug

SEQ ID NO: 49057 - RNA, 19 nt, Homo sapiens
  misc_RNA (1)...(19): siRNA sense strand
caacuacaaucuugcuaaa

SEQ ID NO: 49058 - RNA, 19 nt, Homo sapiens
  misc_RNA (1)...(19): siRNA sense strand
gaaaggacuuccagaacug

SEQ ID NO: 49059 - RNA, 19 nt, Homo sapiens
  misc_RNA (1)...(19): siRNA sense strand
gaaucaggcuacaacauga

SEQ ID NO: 49060 - RNA, 19 nt, Homo sapiens
  misc_RNA (1)...(19): siRNA sense strand
acaagucgcuguuggaauu

SEQ ID NO: 49061 - RNA, 19 nt, Homo sapiens
  misc_RNA (1)...(19): siRNA sense strand
aaacacaggugaaguuaau

SEQ ID NO: 49062 - RNA, 19 nt, Homo sapiens
  misc_RNA (1)...(19): siRNA sense strand
aagaggcuaugaugaauua

SEQ ID NO: 49063 - RNA, 19 nt, Homo sapiens
  misc_RNA (1)...(19): siRNA sense strand
guaaauggauccaggaaca

SEQ ID NO: 49064 - RNA, 19 nt, Homo sapiens
  misc_RNA (1)...(19): siRNA sense strand
ugauucaucugccaaauaa

SEQ ID NO: 49065 - RNA, 19 nt, Homo sapiens
  misc_RNA (1)...(19): siRNA sense strand
gaugagaauucaaucaaug

SEQ ID NO: 49066 - RNA, 19 nt, Homo sapiens
  misc_RNA (1)...(19): siRNA sense strand
gcaacccaauuuauaugua

SEQ ID NO: 49067 - RNA, 19 nt, Homo sapiens
  misc_RNA (1)...(19): siRNA sense strand
acaaagcgguugagcaauu

SEQ ID NO: 49068 - RNA, 19 nt, Homo sapiens
  misc_RNA (1)...(19): siRNA sense strand
gagaagcaucgacucauua

SEQ ID NO: 49069 - RNA, 19 nt, Homo sapiens
  misc_RNA (1)...(19): siRNA sense strand
guaaaugguugcaggcuau

SEQ ID NO: 49070 - RNA, 19 nt, Homo sapiens
  misc_RNA (1)...(19): siRNA sense strand
gaagaacgguuuuacacua

SEQ ID NO: 49071 - RNA, 19 nt, Homo sapiens
  misc_RNA (1)...(19): siRNA sense strand
cagauuaguuuaccgauau

SEQ ID NO: 49072 - RNA, 19 nt, Homo sapiens
  misc_RNA (1)...(19): siRNA sense strand
gagaugauccucuucgaaa

SEQ ID NO: 49073 - RNA, 19 nt, Homo sapiens
  misc_RNA (1)...(19): siRNA sense strand
gcagaaauaagaccaaaga

SEQ ID NO: 49074 - RNA, 19 nt, Homo sapiens
  misc_RNA (1)...(19): siRNA sense strand
ucacaaacguggcauauac

SEQ ID NO: 49075 - RNA, 19 nt, Homo sapiens
  misc_RNA (1)...(19): siRNA sense strand
gcacauggauggauaaaau

SEQ ID NO: 49076 - RNA, 19 nt, Homo sapiens
  misc_RNA (1)...(19): siRNA sense strand
ucacguagcugaguacaug

SEQ ID NO: 49077 - RNA, 19 nt, Homo sapiens
  misc_RNA (1)...(19): siRNA sense strand
gcacaugcccuguuuaugg

SEQ ID NO: 49078 - RNA, 19 nt, Homo sapiens
  misc_RNA (1)...(19): siRNA sense strand
gauccaaaccaacaccuua

SEQ ID NO: 49079 - RNA, 19 nt, Homo sapiens
  misc_RNA (1)...(19): siRNA sense strand
gaaaagcaguuaccgugua

SEQ ID NO: 49080 - RNA, 19 nt, Homo sapiens
  misc_RNA (1)...(19): siRNA sense strand
gauaugaacauugcacuaa

SEQ ID NO: 49081 - RNA, 19 nt, Homo sapiens
  misc_RNA (1)...(19): siRNA sense strand
gaaauugugggccugagua

SEQ ID NO: 49082 - RNA, 19 nt, Homo sapiens
  misc_RNA (1)...(19): siRNA sense strand
caaaagggcccaaugaaua

SEQ ID NO: 49083 - RNA, 19 nt, Homo sapiens
  misc_RNA (1)...(19): siRNA sense strand
caaagcgguugagcaauuu

SEQ ID NO: 49084 - RNA, 19 nt, Homo sapiens
  misc_RNA (1)...(19): siRNA sense strand
gcuaaagguuucaauuauc

SEQ ID NO: 49085 - RNA, 19 nt, Homo sapiens
  misc_RNA (1)...(19): siRNA sense strand
gaucagccauuguuugaag

SEQ ID NO: 49086 - RNA, 19 nt, Homo sapiens
  misc_RNA (1)...(19): siRNA sense strand
ggugguggcugcaguguau

SEQ ID NO: 49087 - RNA, 19 nt, Homo sapiens
  misc_RNA (1)...(19): siRNA sense strand
ggcauggucucauuccuaa

SEQ ID NO: 49088 - RNA, 19 nt, Homo sapiens
  misc_RNA (1)...(19): siRNA sense strand
gcaauguuguguuucucua

SEQ ID NO: 49089 - RNA, 19 nt, Homo sapiens
  misc_RNA (1)...(19): siRNA sense strand
ggucagcccuuaaauaugc

SEQ ID NO: 49090 - RNA, 19 nt, Homo sapiens
  misc_RNA (1)...(19): siRNA sense strand
acaauucaguccucacuuu

SEQ ID NO: 49091 - RNA, 19 nt, Homo sapiens
  misc_RNA (1)...(19): siRNA sense strand
cuagaacuauugagagaaa

SEQ ID NO: 49092 - RNA, 19 nt, Homo sapiens
  misc_RNA (1)...(19): siRNA sense strand
gaaugggaaagcagacuua

SEQ ID NO: 49093 - RNA, 19 nt, Homo sapiens
  misc_RNA (1)...(19): siRNA sense strand
auaaaggucucauaugaug

SEQ ID NO: 49094 - RNA, 19 nt, Homo sapiens
  misc_RNA (1)...(19): siRNA sense strand
gcaguuaccguguauacaa

SEQ ID NO: 49095 - RNA, 19 nt, Homo sapiens
  misc_RNA (1)...(19): siRNA sense strand
gccaaucaguuagaauuaa

SEQ ID NO: 49096 - RNA, 19 nt, Homo sapiens
  misc_RNA (1)...(19): siRNA sense strand
caacagaaagagaagauga

SEQ ID NO: 49097 - RNA, 19 nt, Homo sapiens
  misc_RNA (1)...(19): siRNA sense strand
gaagcuagaacuauugaga

SEQ ID NO: 49098 - RNA, 19 nt, Homo sapiens
  misc_RNA (1)...(19): siRNA sense strand
gagaggcaaugagugcaua

SEQ ID NO: 49099 - RNA, 19 nt, Homo sapiens
  misc_RNA (1)...(19): siRNA sense strand
ccaaugagaaugcccagua

SEQ ID NO: 49100 - RNA, 19 nt, Homo sapiens
  misc_RNA (1)...(19): siRNA sense strand
gaaagugacagagcuagaa

SEQ ID NO: 49101 - RNA, 19 nt, Homo sapiens
  misc_RNA (1)...(19): siRNA sense strand
gcugcaggcuuaccucauu

SEQ ID NO: 49102 - RNA, 19 nt, Homo sapiens
  misc_RNA (1)...(19): siRNA sense strand
ucucuugccuccagauuaa

SEQ ID NO: 49103 - RNA, 19 nt, Homo sapiens
  misc_RNA (1)...(19): siRNA sense strand
ggaugagaauucaaucaau

SEQ ID NO: 49104 - RNA, 19 nt, Homo sapiens
  misc_RNA (1)...(19): siRNA sense strand
agagaaacacgaaaccuua

SEQ ID NO: 49105 - RNA, 19 nt, Homo sapiens
  misc_RNA (1)...(19): siRNA sense strand
cagcagcaauugaagaaug

SEQ ID NO: 49106 - RNA, 19 nt, Homo sapiens
  misc_RNA (1)...(19): siRNA sense strand
gccauuguuugaagucaua

SEQ ID NO: 49107 - RNA, 19 nt, Homo sapiens
  misc_RNA (1)...(19): siRNA sense strand
gagcuacaguuccgauuag

SEQ ID NO: 49108 - RNA, 19 nt, Homo sapiens
  misc_RNA (1)...(19): siRNA sense strand
gcuacucccuugccaauca

SEQ ID NO: 49109 - RNA, 19 nt, Homo sapiens
  misc_RNA (1)...(19): siRNA sense strand
uuccagaacugaccaauga

SEQ ID NO: 49110 - RNA, 19 nt, Homo sapiens
  misc_RNA (1)...(19): siRNA sense strand
agagguauacugcugauua

SEQ ID NO: 49111 - RNA, 19 nt, Homo sapiens
  misc_RNA (1)...(19): siRNA sense strand
gucaguaaccggcuuauuu

SEQ ID NO: 49112 - RNA, 19 nt, Homo sapiens
  misc_RNA (1)...(19): siRNA sense strand
uccaggaaguguuauuaua

SEQ ID NO: 49113 - RNA, 19 nt, Homo sapiens
  misc_RNA (1)...(19): siRNA sense strand
gaaugauguuggacagcua

SEQ ID NO: 49114 - RNA, 19 nt, Homo sapiens
  misc_RNA (1)...(19): siRNA sense strand
ccgauuaggcccaacuuua

SEQ ID NO: 49115 - RNA, 19 nt, Homo sapiens
  misc_RNA (1)...(19): siRNA sense strand
cagaugauaugguuuacug

SEQ ID NO: 49116 - RNA, 19 nt, Homo sapiens
  misc_RNA (1)...(19): siRNA sense strand
ggaaggaugagaauucaau

SEQ ID NO: 49117 - RNA, 19 nt, Homo sapiens
  misc_RNA (1)...(19): siRNA sense strand
gaagacauaguggcaguaa

SEQ ID NO: 49118 - RNA, 19 nt, Homo sapiens
  misc_RNA (1)...(19): siRNA sense strand
aaauuacgcuaugggaaua

SEQ ID NO: 49119 - RNA, 19 nt, Homo sapiens
  misc_RNA (1)...(19): siRNA sense strand
ucaagauccugaauacaga

SEQ ID NO: 49120 - RNA, 19 nt, Homo sapiens
  misc_RNA (1)...(19): siRNA sense strand
caucagauuucagugguuu

SEQ ID NO: 49121 - RNA, 19 nt, Homo sapiens
  misc_RNA (1)...(19): siRNA sense strand
gaauaccugcuuugauuga

SEQ ID NO: 49122 - RNA, 19 nt, Homo sapiens
  misc_RNA (1)...(19): siRNA sense strand
ggaaagcuuuggagauugc

SEQ ID NO: 49123 - RNA, 19 nt, Homo sapiens
  misc_RNA (1)...(19): siRNA sense strand
ggagcaauguuguguuucu

SEQ ID NO: 49124 - RNA, 19 nt, Homo sapiens
  misc_RNA (1)...(19): siRNA sense strand
ugacaaugcagauccuaua

SEQ ID NO: 49125 - RNA, 19 nt, Homo sapiens
  misc_RNA (1)...(19): siRNA sense strand
aaccaacaccuuacgauua

SEQ ID NO: 49126 - RNA, 19 nt, Homo sapiens
  misc_RNA (1)...(19): siRNA sense strand
aaggagcaauguuguguuu

SEQ ID NO: 49127 - RNA, 19 nt, Homo sapiens
  misc_RNA (1)...(19): siRNA sense strand
gaaaucaucugacacaauu

SEQ ID NO: 49128 - RNA, 19 nt, Homo sapiens
  misc_RNA (1)...(19): siRNA sense strand
gcaacaaucugguucauuu

SEQ ID NO: 49129 - RNA, 19 nt, Homo sapiens
  misc_RNA (1)...(19): siRNA sense strand
caaugcagauccuauauua

SEQ ID NO: 49130 - RNA, 19 nt, Homo sapiens
  misc_RNA (1)...(19): siRNA sense strand
gggaauaccugcuuugauu

SEQ ID NO: 49131 - RNA, 19 nt, Homo sapiens
  misc_RNA (1)...(19): siRNA sense strand
gggagacaguguuaaauua

SEQ ID NO: 49132 - RNA, 19 nt, Homo sapiens
  misc_RNA (1)...(19): siRNA sense strand
ccaaguagaugucaacaaa

SEQ ID NO: 49133 - RNA, 19 nt, Homo sapiens
  misc_RNA (1)...(19): siRNA sense strand
gaaauaagaccaaagaaug

SEQ ID NO: 49134 - RNA, 19 nt, Homo sapiens
  misc_RNA (1)...(19): siRNA sense strand
gauaaugaguguccuauug

SEQ ID NO: 49135 - RNA, 19 nt, Homo sapiens
  misc_RNA (1)...(19): siRNA sense strand
gaagggaaauacaaagaaa

SEQ ID NO: 49136 - RNA, 19 nt, Homo sapiens
  misc_RNA (1)...(19): siRNA sense strand
gaagagggcagauuaguuu

SEQ ID NO: 49137 - RNA, 19 nt, Homo sapiens
  misc_RNA (1)...(19): siRNA sense strand
gcaaugagugcauauaaua

SEQ ID NO: 49138 - RNA, 19 nt, Homo sapiens
  misc_RNA (1)...(19): siRNA sense strand
gagaacauauucagcuuaa

SEQ ID NO: 49139 - RNA, 19 nt, Homo sapiens
  misc_RNA (1)...(19): siRNA sense strand
ggacgaagguuuuaauaua

SEQ ID NO: 49140 - RNA, 19 nt, Homo sapiens
  misc_RNA (1)...(19): siRNA sense strand
ugacagagcuagaaacaga

SEQ ID NO: 49141 - RNA, 19 nt, Homo sapiens
  misc_RNA (1)...(19): siRNA sense strand
ggagaaacauuuaauagag

SEQ ID NO: 49142 - RNA, 19 nt, Homo sapiens
  misc_RNA (1)...(19): siRNA sense strand
gagauuggaugauugacua

SEQ ID NO: 49143 - RNA, 19 nt, Homo sapiens
  misc_RNA (1)...(19): siRNA sense strand
guagaagccaggaauauua

SEQ ID NO: 49144 - RNA, 19 nt, Homo sapiens
  misc_RNA (1)...(19): siRNA sense strand
ccagauagaucgaaacaug

SEQ ID NO: 49145 - RNA, 19 nt, Homo sapiens
  misc_RNA (1)...(19): siRNA sense strand
gugaagaucuggacaaugu

SEQ ID NO: 49146 - RNA, 19 nt, Homo sapiens
  misc_RNA (1)...(19): siRNA sense strand
cuauaaaggucucauauga

SEQ ID NO: 49147 - RNA, 19 nt, Homo sapiens
  misc_RNA (1)...(19): siRNA sense strand
gcaaggaagugccucaaau

SEQ ID NO: 49148 - RNA, 19 nt, Homo sapiens
  misc_RNA (1)...(19): siRNA sense strand
gaaaguauaccuggaauga

SEQ ID NO: 49149 - RNA, 19 nt, Homo sapiens
  misc_RNA (1)...(19): siRNA sense strand
ugaagcagaucccacguua

SEQ ID NO: 49150 - RNA, 19 nt, Homo sapiens
  misc_RNA (1)...(19): siRNA sense strand
gcagauuaguuuaccgaua

SEQ ID NO: 49151 - RNA, 19 nt, Homo sapiens
  misc_RNA (1)...(19): siRNA sense strand
gaagaaugcuguaauuggu

SEQ ID NO: 49152 - RNA, 19 nt, Homo sapiens
  misc_RNA (1)...(19): siRNA sense strand
ggaauggaauguuauuugu

SEQ ID NO: 49153 - RNA, 19 nt, Homo sapiens
  misc_RNA (1)...(19): siRNA sense strand
gaaugugccuauaaucuug

SEQ ID NO: 49154 - RNA, 19 nt, Homo sapiens
  misc_RNA (1)...(19): siRNA sense strand
acacaagccuggucaauug

SEQ ID NO: 49155 - RNA, 19 nt, Homo sapiens
  misc_RNA (1)...(19): siRNA sense strand
ccuauaaucuugugaauuc

SEQ ID NO: 49156 - RNA, 19 nt, Homo sapiens
  misc_RNA (1)...(19): siRNA sense strand
gaacauauucagcuuaaug

SEQ ID NO: 49157 - RNA, 19 nt, Homo sapiens
  misc_RNA (1)...(19): siRNA sense strand
caacuacaaucuugcuaaa

SEQ ID NO: 49158 - RNA, 19 nt, Homo sapiens
  misc_RNA (1)...(19): siRNA sense strand
gaaaggacuuccagaacug

SEQ ID NO: 49159 - RNA, 19 nt, Homo sapiens
  misc_RNA (1)...(19): siRNA sense strand
gaaucaggcuacaacauga

SEQ ID NO: 49160 - RNA, 19 nt, Homo sapiens
  misc_RNA (1)...(19): siRNA sense strand
acaagucgcuguuggaauu

SEQ ID NO: 49161 - RNA, 19 nt, Homo sapiens
  misc_RNA (1)...(19): siRNA sense strand
aaacacaggugaaguuaau

SEQ ID NO: 49162 - RNA, 19 nt, Homo sapiens
  misc_RNA (1)...(19): siRNA sense strand
aagaggcuaugaugaauua

SEQ ID NO: 49163 - RNA, 19 nt, Homo sapiens
  misc_RNA (1)...(19): siRNA sense strand
guaaauggauccaggaaca

SEQ ID NO: 49164 - RNA, 19 nt, Homo sapiens
  misc_RNA (1)...(19): siRNA sense strand
ugauucaucugccaaauaa

SEQ ID NO: 49165 - RNA, 19 nt, Homo sapiens
  misc_RNA (1)...(19): siRNA sense strand
gaugagaauucaaucaaug

SEQ ID NO: 49166 - RNA, 19 nt, Homo sapiens
  misc_RNA (1)...(19): siRNA sense strand
gcaacccaauuuauaugua

SEQ ID NO: 49167 - RNA, 19 nt, Homo sapiens
  misc_RNA (1)...(19): siRNA sense strand
acaaagcgguugagcaauu

SEQ ID NO: 49168 - RNA, 19 nt, Homo sapiens
  misc_RNA (1)...(19): siRNA sense strand
gagaagcaucgacucauua

SEQ ID NO: 49169 - RNA, 19 nt, Homo sapiens
  misc_RNA (1)...(19): siRNA sense strand
guaaaugguugcaggcuau

SEQ ID NO: 49170 - RNA, 19 nt, Homo sapiens
  misc_RNA (1)...(19): siRNA sense strand
gaagaacgguuuuacacua

SEQ ID NO: 49171 - RNA, 19 nt, Homo sapiens
  misc_RNA (1)...(19): siRNA sense strand
cagauuaguuuaccgauau

SEQ ID NO: 49172 - RNA, 19 nt, Homo sapiens
  misc_RNA (1)...(19): siRNA sense strand
gagaugauccucuucgaaa

SEQ ID NO: 49173 - RNA, 19 nt, Homo sapiens
  misc_RNA (1)...(19): siRNA sense strand
gcagaaauaagaccaaaga

SEQ ID NO: 49174 - RNA, 19 nt, Homo sapiens
  misc_RNA (1)...(19): siRNA sense strand
ucacaaacguggcauauac

SEQ ID NO: 49175 - RNA, 19 nt, Homo sapiens
  misc_RNA (1)...(19): siRNA sense strand
gcacauggauggauaaaau

SEQ ID NO: 49176 - RNA, 19 nt, Homo sapiens
  misc_RNA (1)...(19): siRNA sense strand
ucacguagcugaguacaug

SEQ ID NO: 49177 - RNA, 19 nt, Homo sapiens
  misc_RNA (1)...(19): siRNA sense strand
gcacaugcccuguuuaugg

SEQ ID NO: 49178 - RNA, 19 nt, Homo sapiens
  misc_RNA (1)...(19): siRNA sense strand
gauccaaaccaacaccuua

SEQ ID NO: 49179 - RNA, 19 nt, Homo sapiens
  misc_RNA (1)...(19): siRNA sense strand
gaaaagcaguuaccgugua

SEQ ID NO: 49180 - RNA, 19 nt, Homo sapiens
  misc_RNA (1)...(19): siRNA sense strand
gauaugaacauugcacuaa

SEQ ID NO: 49181 - RNA, 19 nt, Homo sapiens
  misc_RNA (1)...(19): siRNA sense strand
gaaauugugggccugagua

SEQ ID NO: 49182 - RNA, 19 nt, Homo sapiens
  misc_RNA (1)...(19): siRNA sense strand
caaaagggcccaaugaaua

SEQ ID NO: 49183 - RNA, 19 nt, Homo sapiens
  misc_RNA (1)...(19): siRNA sense strand
caaagcgguugagcaauuu

SEQ ID NO: 49184 - RNA, 19 nt, Homo sapiens
  misc_RNA (1)...(19): siRNA sense strand
gcuaaagguuucaauuauc

SEQ ID NO: 49185 - RNA, 19 nt, Homo sapiens
  misc_RNA (1)...(19): siRNA sense strand
gaucagccauuguuugaag

SEQ ID NO: 49186 - RNA, 19 nt, Homo sapiens
  misc_RNA (1)...(19): siRNA sense strand
ggugguggcugcaguguau

SEQ ID NO: 49187 - RNA, 19 nt, Homo sapiens
  misc_RNA (1)...(19): siRNA sense strand
ggcauggucucauuccuaa

SEQ ID NO: 49188 - RNA, 19 nt, Homo sapiens
  misc_RNA (1)...(19): siRNA sense strand
gcaauguuguguuucucua

SEQ ID NO: 49189 - RNA, 19 nt, Homo sapiens
  misc_RNA (1)...(19): siRNA sense strand
ggucagcccuuaaauaugc

SEQ ID NO: 49190 - RNA, 19 nt, Homo sapiens
  misc_RNA (1)...(19): siRNA sense strand
acaauucaguccucacuuu

SEQ ID NO: 49191 - RNA, 19 nt, Homo sapiens
  misc_RNA (1)...(19): siRNA sense strand
cuagaacuauugagagaaa

SEQ ID NO: 49192 - RNA, 19 nt, Homo sapiens
  misc_RNA (1)...(19): siRNA sense strand
gaaugggaaagcagacuua

SEQ ID NO: 49193 - RNA, 19 nt, Homo sapiens
  misc_RNA (1)...(19): siRNA sense strand
auaaaggucucauaugaug

SEQ ID NO: 49194 - RNA, 19 nt, Homo sapiens
  misc_RNA (1)...(19): siRNA sense strand
gcaguuaccguguauacaa

SEQ ID NO: 49195 - RNA, 19 nt, Homo sapiens
  misc_RNA (1)...(19): siRNA sense strand
gccaaucaguuagaauuaa

SEQ ID NO: 49196 - RNA, 19 nt, Homo sapiens
  misc_RNA (1)...(19): siRNA sense strand
caacagaaagagaagauga

SEQ ID NO: 49197 - RNA, 19 nt, Homo sapiens
  misc_RNA (1)...(19): siRNA sense strand
gaagcuagaacuauugaga

SEQ ID NO: 49198 - RNA, 19 nt, Homo sapiens
  misc_RNA (1)...(19): siRNA sense strand
gagaggcaaugagugcaua

SEQ ID NO: 49199 - RNA, 19 nt, Homo sapiens
  misc_RNA (1)...(19): siRNA sense strand
ccaaugagaaugcccagua

SEQ ID NO: 49200 - RNA, 19 nt, Homo sapiens
  misc_RNA (1)...(19): siRNA sense strand
gaaagugacagagcuagaa

SEQ ID NO: 49201 - RNA, 19 nt, Homo sapiens
  misc_RNA (1)...(19): siRNA sense strand
gcugcaggcuuaccucauu

SEQ ID NO: 49202 - RNA, 19 nt, Homo sapiens
  misc_RNA (1)...(19): siRNA sense strand
ucucuugccuccagauuaa

SEQ ID NO: 49203 - RNA, 19 nt, Homo sapiens
  misc_RNA (1)...(19): siRNA sense strand
ggaugagaauucaaucaau

SEQ ID NO: 49204 - RNA, 19 nt, Homo sapiens
  misc_RNA (1)...(19): siRNA sense strand
agagaaacacgaaaccuua

SEQ ID NO: 49205 - RNA, 19 nt, Homo sapiens
  misc_RNA (1)...(19): siRNA sense strand
cagcagcaauugaagaaug

SEQ ID NO: 49206 - RNA, 19 nt, Homo sapiens
  misc_RNA (1)...(19): siRNA sense strand
gccauuguuugaagucaua

SEQ ID NO: 49207 - RNA, 19 nt, Homo sapiens
  misc_RNA (1)...(19): siRNA sense strand
gagcuacaguuccgauuag

SEQ ID NO: 49208 - RNA, 19 nt, Homo sapiens
  misc_RNA (1)...(19): siRNA sense strand
gcuacucccuugccaauca

SEQ ID NO: 49209 - RNA, 19 nt, Homo sapiens
  misc_RNA (1)...(19): siRNA sense strand
uuccagaacugaccaauga

SEQ ID NO: 49210 - RNA, 19 nt, Homo sapiens
  misc_RNA (1)...(19): siRNA sense strand
agagguauacugcugauua

SEQ ID NO: 49211 - RNA, 19 nt, Homo sapiens
  misc_RNA (1)...(19): siRNA sense strand
gucaguaaccggcuuauuu

SEQ ID NO: 49212 - RNA, 19 nt, Homo sapiens
  misc_RNA (1)...(19): siRNA sense strand
uccaggaaguguuauuaua

SEQ ID NO: 49213 - RNA, 19 nt, Homo sapiens
  misc_RNA (1)...(19): siRNA sense strand
gaaugauguuggacagcua

SEQ ID NO: 49214 - RNA, 19 nt, Homo sapiens
  misc_RNA (1)...(19): siRNA sense strand
ccgauuaggcccaacuuua

SEQ ID NO: 49215 - RNA, 19 nt, Homo sapiens
  misc_RNA (1)...(19): siRNA sense strand
cagaugauaugguuuacug

SEQ ID NO: 49216 - RNA, 19 nt, Homo sapiens
  misc_RNA (1)...(19): siRNA sense strand
ggaaggaugagaauucaau

SEQ ID NO: 49217 - RNA, 19 nt, Homo sapiens
  misc_RNA (1)...(19): siRNA sense strand
gaagacauaguggcaguaa

SEQ ID NO: 49218 - RNA, 19 nt, Homo sapiens
  misc_RNA (1)...(19): siRNA sense strand
aaauuacgcuaugggaaua

SEQ ID NO: 49219 - RNA, 19 nt, Homo sapiens
  misc_RNA (1)...(19): siRNA sense strand
ucaagauccugaauacaga

SEQ ID NO: 49220 - RNA, 19 nt, Homo sapiens
  misc_RNA (1)...(19): siRNA sense strand
caucagauuucagugguuu

SEQ ID NO: 49221 - RNA, 19 nt, Homo sapiens
  misc_RNA (1)...(19): siRNA sense strand
gaauaccugcuuugauuga

SEQ ID NO: 49222 - RNA, 19 nt, Homo sapiens
  misc_RNA (1)...(19): siRNA sense strand
ggaaagcuuuggagauugc

SEQ ID NO: 49223 - RNA, 19 nt, Homo sapiens
  misc_RNA (1)...(19): siRNA sense strand
ggagcaauguuguguuucu

SEQ ID NO: 49224 - RNA, 19 nt, Homo sapiens
  misc_RNA (1)...(19): siRNA sense strand
ugacaaugcagauccuaua

SEQ ID NO: 49225 - RNA, 19 nt, Homo sapiens
  misc_RNA (1)...(19): siRNA sense strand
aaccaacaccuuacgauua

SEQ ID NO: 49226 - RNA, 19 nt, Homo sapiens
  misc_RNA (1)...(19): siRNA sense strand
aaggagcaauguuguguuu

SEQ ID NO: 49227 - RNA, 19 nt, Homo sapiens
  misc_RNA (1)...(19): siRNA sense strand
gaaaucaucugacacaauu

SEQ ID NO: 49228 - RNA, 19 nt, Homo sapiens
  misc_RNA (1)...(19): siRNA sense strand
gcaacaaucugguucauuu

SEQ ID NO: 49229 - RNA, 19 nt, Homo sapiens
  misc_RNA (1)...(19): siRNA sense strand
caaugcagauccuauauua

SEQ ID NO: 49230 - RNA, 19 nt, Homo sapiens
  misc_RNA (1)...(19): siRNA sense strand
gggaauaccugcuuugauu

SEQ ID NO: 49231 - RNA, 19 nt, Homo sapiens
  misc_RNA (1)...(19): siRNA sense strand
gggagacaguguuaaauua

SEQ ID NO: 49232 - RNA, 19 nt, Homo sapiens
  misc_RNA (1)...(19): siRNA sense strand
ccaaguagaugucaacaaa

SEQ ID NO: 49233 - RNA, 19 nt, Homo sapiens
  misc_RNA (1)...(19): siRNA sense strand
gaaauaagaccaaagaaug

SEQ ID NO: 49234 - RNA, 19 nt, Homo sapiens
  misc_RNA (1)...(19): siRNA sense strand
gauaaugaguguccuauug

SEQ ID NO: 49235 - RNA, 19 nt, Homo sapiens
  misc_RNA (1)...(19): siRNA sense strand
gaagggaaauacaaagaaa

SEQ ID NO: 49236 - RNA, 19 nt, Homo sapiens
  misc_RNA (1)...(19): siRNA sense strand
gaagagggcagauuaguuu

SEQ ID NO: 49237 - RNA, 19 nt, Homo sapiens
  misc_RNA (1)...(19): siRNA sense strand
gcaaugagugcauauaaua

SEQ ID NO: 49238 - RNA, 19 nt, Homo sapiens
  misc_RNA (1)...(19): siRNA sense strand
gagaacauauucagcuuaa

SEQ ID NO: 49239 - RNA, 19 nt, Homo sapiens
  misc_RNA (1)...(19): siRNA sense strand
ggacgaagguuuuaauaua

SEQ ID NO: 49240 - RNA, 19 nt, Homo sapiens
  misc_RNA (1)...(19): siRNA sense strand
ugacagagcuagaaacaga

SEQ ID NO: 49241 - RNA, 19 nt, Homo sapiens
  misc_RNA (1)...(19): siRNA sense strand
ggagaaacauuuaauagag

SEQ ID NO: 49242 - RNA, 19 nt, Homo sapiens
  misc_RNA (1)...(19): siRNA sense strand
gagauuggaugauugacua

SEQ ID NO: 49243 - RNA, 19 nt, Homo sapiens
  misc_RNA (1)...(19): siRNA sense strand
guagaagccaggaauauua

SEQ ID NO: 49244 - RNA, 19 nt, Homo sapiens
  misc_RNA (1)...(19): siRNA sense strand
ccagauagaucgaaacaug

SEQ ID NO: 49245 - RNA, 19 nt, Homo sapiens
  misc_RNA (1)...(19): siRNA sense strand
gugaagaucuggacaaugu

SEQ ID NO: 49246 - RNA, 19 nt, Homo sapiens
  misc_RNA (1)...(19): siRNA sense strand
cuauaaaggucucauauga

SEQ ID NO: 49247 - RNA, 19 nt, Homo sapiens
  misc_RNA (1)...(19): siRNA sense strand
gcaaggaagugccucaaau

SEQ ID NO: 49248 - RNA, 19 nt, Homo sapiens
  misc_RNA (1)...(19): siRNA sense strand
gaaaguauaccuggaauga

SEQ ID NO: 49249 - RNA, 19 nt, Homo sapiens
  misc_RNA (1)...(19): siRNA sense strand
ugaagcagaucccacguua

SEQ ID NO: 49250 - RNA, 19 nt, Homo sapiens
  misc_RNA (1)...(19): siRNA sense strand
gcagauuaguuuaccgaua

SEQ ID NO: 49251 - RNA, 19 nt, Homo sapiens
  misc_RNA (1)...(19): siRNA sense strand
gaagaaugcuguaauuggu

SEQ ID NO: 49252 - RNA, 19 nt, Homo sapiens
  misc_RNA (1)...(19): siRNA sense strand
ggaauggaauguuauuugu

SEQ ID NO: 49253 - RNA, 19 nt, Homo sapiens
  misc_RNA (1)...(19): siRNA sense strand
gaaugugccuauaaucuug

SEQ ID NO: 49254 - RNA, 19 nt, Homo sapiens
  misc_RNA (1)...(19): siRNA sense strand
acacaagccuggucaauug

SEQ ID NO: 49255 - RNA, 19 nt, Homo sapiens
  misc_RNA (1)...(19): siRNA sense strand
ccuauaaucuugugaauuc

SEQ ID NO: 49256 - RNA, 19 nt, Homo sapiens
  misc_RNA (1)...(19): siRNA sense strand
gaacauauucagcuuaaug

SEQ ID NO: 49257 - RNA, 19 nt, Homo sapiens
  misc_RNA (1)...(19): siRNA sense strand
caacuacaaucuugcuaaa

SEQ ID NO: 49258 - RNA, 19 nt, Homo sapiens
  misc_RNA (1)...(19): siRNA sense strand
gaaaggacuuccagaacug

SEQ ID NO: 49259 - RNA, 19 nt, Homo sapiens
  misc_RNA (1)...(19): siRNA sense strand
gaaucaggcuacaacauga

SEQ ID NO: 49260 - RNA, 19 nt, Homo sapiens
  misc_RNA (1)...(19): siRNA sense strand
acaagucgcuguuggaauu

SEQ ID NO: 49261 - RNA, 19 nt, Homo sapiens
  misc_RNA (1)...(19): siRNA sense strand
aaacacaggugaaguuaau

SEQ ID NO: 49262 - RNA, 19 nt, Homo sapiens
  misc_RNA (1)...(19): siRNA sense strand
aagaggcuaugaugaauua

SEQ ID NO: 49263 - RNA, 19 nt, Homo sapiens
  misc_RNA (1)...(19): siRNA sense strand
guaaauggauccaggaaca

SEQ ID NO: 49264 - RNA, 19 nt, Homo sapiens
  misc_RNA (1)...(19): siRNA sense strand
ugauucaucugccaaauaa

SEQ ID NO: 49265 - RNA, 19 nt, Homo sapiens
  misc_RNA (1)...(19): siRNA sense strand
gaugagaauucaaucaaug

SEQ ID NO: 49266 - RNA, 19 nt, Homo sapiens
  misc_RNA (1)...(19): siRNA sense strand
gcaacccaauuuauaugua

SEQ ID NO: 49267 - RNA, 19 nt, Homo sapiens
  misc_RNA (1)...(19): siRNA sense strand
acaaagcgguugagcaauu

SEQ ID NO: 49268 - RNA, 19 nt, Homo sapiens
  misc_RNA (1)...(19): siRNA sense strand
gagaagcaucgacucauua

SEQ ID NO: 49269 - RNA, 19 nt, Homo sapiens
  misc_RNA (1)...(19): siRNA sense strand
guaaaugguugcaggcuau

SEQ ID NO: 49270 - RNA, 19 nt, Homo sapiens
  misc_RNA (1)...(19): siRNA sense strand
gaagaacgguuuuacacua

SEQ ID NO: 49271 - RNA, 19 nt, Homo sapiens
  misc_RNA (1)...(19): siRNA sense strand
cagauuaguuuaccgauau

SEQ ID NO: 49272 - RNA, 19 nt, Homo sapiens
  misc_RNA (1)...(19): siRNA sense strand
gagaugauccucuucgaaa

SEQ ID NO: 49273 - RNA, 19 nt, Homo sapiens
  misc_RNA (1)...(19): siRNA sense strand
gcagaaauaagaccaaaga

SEQ ID NO: 49274 - RNA, 19 nt, Homo sapiens
  misc_RNA (1)...(19): siRNA sense strand
ucacaaacguggcauauac

SEQ ID NO: 49275 - RNA, 19 nt, Homo sapiens
  misc_RNA (1)...(19): siRNA sense strand
gcacauggauggauaaaau

SEQ ID NO: 49276 - RNA, 19 nt, Homo sapiens
  misc_RNA (1)...(19): siRNA sense strand
ucacguagcugaguacaug

SEQ ID NO: 49277 - RNA, 19 nt, Homo sapiens
  misc_RNA (1)...(19): siRNA sense strand
gcacaugcccuguuuaugg

SEQ ID NO: 49278 - RNA, 19 nt, Homo sapiens
  misc_RNA (1)...(19): siRNA sense strand
gauccaaaccaacaccuua

SEQ ID NO: 49279 - RNA, 19 nt, Homo sapiens
  misc_RNA (1)...(19): siRNA sense strand
gaaaagcaguuaccgugua

SEQ ID NO: 49280 - RNA, 19 nt, Homo sapiens
  misc_RNA (1)...(19): siRNA sense strand
gauaugaacauugcacuaa

SEQ ID NO: 49281 - RNA, 19 nt, Homo sapiens
  misc_RNA (1)...(19): siRNA sense strand
gaaauugugggccugagua

SEQ ID NO: 49282 - RNA, 19 nt, Homo sapiens
  misc_RNA (1)...(19): siRNA sense strand
caaaagggcccaaugaaua

SEQ ID NO: 49283 - RNA, 19 nt, Homo sapiens
  misc_RNA (1)...(19): siRNA sense strand
caaagcgguugagcaauuu

SEQ ID NO: 49284 - RNA, 19 nt, Homo sapiens
  misc_RNA (1)...(19): siRNA sense strand
gcuaaagguuucaauuauc

SEQ ID NO: 49285 - RNA, 19 nt, Homo sapiens
  misc_RNA (1)...(19): siRNA sense strand
gaucagccauuguuugaag

SEQ ID NO: 49286 - RNA, 19 nt, Homo sapiens
  misc_RNA (1)...(19): siRNA sense strand
ggugguggcugcaguguau

SEQ ID NO: 49287 - RNA, 19 nt, Homo sapiens
  misc_RNA (1)...(19): siRNA sense strand
ggcauggucucauuccuaa

SEQ ID NO: 49288 - RNA, 19 nt, Homo sapiens
  misc_RNA (1)...(19): siRNA sense strand
gcaauguuguguuucucua

SEQ ID NO: 49289 - RNA, 19 nt, Homo sapiens
  misc_RNA (1)...(19): siRNA sense strand
ggucagcccuuaaauaugc

SEQ ID NO: 49290 - RNA, 19 nt, Homo sapiens
  misc_RNA (1)...(19): siRNA sense strand
acaauucaguccucacuuu

SEQ ID NO: 49291 - RNA, 19 nt, Homo sapiens
  misc_RNA (1)...(19): siRNA sense strand
cuagaacuauugagagaaa

SEQ ID NO: 49292 - RNA, 19 nt, Homo sapiens
  misc_RNA (1)...(19): siRNA sense strand
gaaugggaaagcagacuua

SEQ ID NO: 49293 - RNA, 19 nt, Homo sapiens
  misc_RNA (1)...(19): siRNA sense strand
auaaaggucucauaugaug

SEQ ID NO: 49294 - RNA, 19 nt, Homo sapiens
  misc_RNA (1)...(19): siRNA sense strand
gcaguuaccguguauacaa

SEQ ID NO: 49295 - RNA, 19 nt, Homo sapiens
  misc_RNA (1)...(19): siRNA sense strand
gccaaucaguuagaauuaa

SEQ ID NO: 49296 - RNA, 19 nt, Homo sapiens
  misc_RNA (1)...(19): siRNA sense strand
caacagaaagagaagauga

SEQ ID NO: 49297 - RNA, 19 nt, Homo sapiens
  misc_RNA (1)...(19): siRNA sense strand
gaagcuagaacuauugaga

SEQ ID NO: 49298 - RNA, 19 nt, Homo sapiens
  misc_RNA (1)...(19): siRNA sense strand
gagaggcaaugagugcaua

SEQ ID NO: 49299 - RNA, 19 nt, Homo sapiens
  misc_RNA (1)...(19): siRNA sense strand
ccaaugagaaugcccagua

SEQ ID NO: 49300 - RNA, 19 nt, Homo sapiens
  misc_RNA (1)...(19): siRNA sense strand
gaaagugacagagcuagaa

SEQ ID NO: 49301 - RNA, 19 nt, Homo sapiens
  misc_RNA (1)...(19): siRNA sense strand
gcugcaggcuuaccucauu

SEQ ID NO: 49302 - RNA, 19 nt, Homo sapiens
  misc_RNA (1)...(19): siRNA sense strand
ucucuugccuccagauuaa

SEQ ID NO: 49303 - RNA, 19 nt, Homo sapiens
  misc_RNA (1)...(19): siRNA sense strand
ggaugagaauucaaucaau

SEQ ID NO: 49304 - RNA, 19 nt, Homo sapiens
  misc_RNA (1)...(19): siRNA sense strand
agagaaacacgaaaccuua

SEQ ID NO: 49305 - RNA, 19 nt, Homo sapiens
  misc_RNA (1)...(19): siRNA sense strand
cagcagcaauugaagaaug

SEQ ID NO: 49306 - RNA, 19 nt, Homo sapiens
  misc_RNA (1)...(19): siRNA sense strand
gccauuguuugaagucaua

SEQ ID NO: 49307 - RNA, 19 nt, Homo sapiens
  misc_RNA (1)...(19): siRNA sense strand
gagcuacaguuccgauuag

SEQ ID NO: 49308 - RNA, 19 nt, Homo sapiens
  misc_RNA (1)...(19): siRNA sense strand
gcuacucccuugccaauca

SEQ ID NO: 49309 - RNA, 19 nt, Homo sapiens
  misc_RNA (1)...(19): siRNA sense strand
uuccagaacugaccaauga

SEQ ID NO: 49310 - RNA, 19 nt, Homo sapiens
  misc_RNA (1)...(19): siRNA sense strand
agagguauacugcugauua

SEQ ID NO: 49311 - RNA, 19 nt, Homo sapiens
  misc_RNA (1)...(19): siRNA sense strand
gucaguaaccggcuuauuu

SEQ ID NO: 49312 - RNA, 19 nt, Homo sapiens
  misc_RNA (1)...(19): siRNA sense strand
uccaggaaguguuauuaua

SEQ ID NO: 49313 - RNA, 19 nt, Homo sapiens
  misc_RNA (1)...(19): siRNA sense strand
gaaugauguuggacagcua

SEQ ID NO: 49314 - RNA, 19 nt, Homo sapiens
  misc_RNA (1)...(19): siRNA sense strand
ccgauuaggcccaacuuua

SEQ ID NO: 49315 - RNA, 19 nt, Homo sapiens
  misc_RNA (1)...(19): siRNA sense strand
cagaugauaugguuuacug

SEQ ID NO: 49316 - RNA, 19 nt, Homo sapiens
  misc_RNA (1)...(19): siRNA sense strand
ggaaggaugagaauucaau

SEQ ID NO: 49317 - RNA, 19 nt, Homo sapiens
  misc_RNA (1)...(19): siRNA sense strand
gaagacauaguggcaguaa

SEQ ID NO: 49318 - RNA, 19 nt, Homo sapiens
  misc_RNA (1)...(19): siRNA sense strand
aaauuacgcuaugggaaua

SEQ ID NO: 49319 - RNA, 19 nt, Homo sapiens
  misc_RNA (1)...(19): siRNA sense strand
ucaagauccugaauacaga

SEQ ID NO: 49320 - RNA, 19 nt, Homo sapiens
  misc_RNA (1)...(19): siRNA sense strand
caucagauuucagugguuu

SEQ ID NO: 49321 - RNA, 19 nt, Homo sapiens
  misc_RNA (1)...(19): siRNA sense strand
gaauaccugcuuugauuga

SEQ ID NO: 49322 - RNA, 19 nt, Homo sapiens
  misc_RNA (1)...(19): siRNA sense strand
ggaaagcuuuggagauugc

SEQ ID NO: 49323 - RNA, 19 nt, Homo sapiens
  misc_RNA (1)...(19): siRNA sense strand
ggagcaauguuguguuucu

SEQ ID NO: 49324 - RNA, 19 nt, Homo sapiens
  misc_RNA (1)...(19): siRNA sense strand
ugacaaugcagauccuaua

SEQ ID NO: 49325 - RNA, 19 nt, Homo sapiens
  misc_RNA (1)...(19): siRNA sense strand
aaccaacaccuuacgauua

SEQ ID NO: 49326 - RNA, 19 nt, Homo sapiens
  misc_RNA (1)...(19): siRNA sense strand
aaggagcaauguuguguuu

SEQ ID NO: 49327 - RNA, 19 nt, Homo sapiens
  misc_RNA (1)...(19): siRNA sense strand
gaaaucaucugacacaauu

SEQ ID NO: 49328 - RNA, 19 nt, Homo sapiens
  misc_RNA (1)...(19): siRNA sense strand
gcaacaaucugguucauuu

SEQ ID NO: 49329 - RNA, 19 nt, Homo sapiens
  misc_RNA (1)...(19): siRNA sense strand
caaugcagauccuauauua

SEQ ID NO: 49330 - RNA, 19 nt, Homo sapiens
  misc_RNA (1)...(19): siRNA sense strand
gggaauaccugcuuugauu

SEQ ID NO: 49331 - RNA, 19 nt, Homo sapiens
  misc_RNA (1)...(19): siRNA sense strand
gggagacaguguuaaauua

SEQ ID NO: 49332 - RNA, 19 nt, Homo sapiens
  misc_RNA (1)...(19): siRNA sense strand
ccaaguagaugucaacaaa

SEQ ID NO: 49333 - RNA, 19 nt, Homo sapiens
  misc_RNA (1)...(19): siRNA sense strand
gaaauaagaccaaagaaug

SEQ ID NO: 49334 - RNA, 19 nt, Homo sapiens
  misc_RNA (1)...(19): siRNA sense strand
gauaaugaguguccuauug

SEQ ID NO: 49335 - RNA, 19 nt, Homo sapiens
  misc_RNA (1)...(19): siRNA sense strand
gaagggaaauacaaagaaa

SEQ ID NO: 49336 - RNA, 19 nt, Homo sapiens
  misc_RNA (1)...(19): siRNA sense strand
gaagagggcagauuaguuu

SEQ ID NO: 49337 - RNA, 19 nt, Homo sapiens
  misc_RNA (1)...(19): siRNA sense strand
gcaaugagugcauauaaua

SEQ ID NO: 49338 - RNA, 19 nt, Homo sapiens
  misc_RNA (1)...(19): siRNA sense strand
gagaacauauucagcuuaa

SEQ ID NO: 49339 - RNA, 19 nt, Homo sapiens
  misc_RNA (1)...(19): siRNA sense strand
ggacgaagguuuuaauaua

SEQ ID NO: 49340 - RNA, 19 nt, Homo sapiens
  misc_RNA (1)...(19): siRNA sense strand
ugacagagcuagaaacaga

SEQ ID NO: 49341 - RNA, 19 nt, Homo sapiens
  misc_RNA (1)...(19): siRNA sense strand
ggagaaacauuuaauagag

SEQ ID NO: 49342 - RNA, 19 nt, Homo sapiens
  misc_RNA (1)...(19): siRNA sense strand
gagauuggaugauugacua

SEQ ID NO: 49343 - RNA, 19 nt, Homo sapiens
  misc_RNA (1)...(19): siRNA sense strand
guagaagccaggaauauua

SEQ ID NO: 49344 - RNA, 19 nt, Homo sapiens
  misc_RNA (1)...(19): siRNA sense strand
ccagauagaucgaaacaug

SEQ ID NO: 49345 - RNA, 19 nt, Homo sapiens
  misc_RNA (1)...(19): siRNA sense strand
gugaagaucuggacaaugu

SEQ ID NO: 49346 - RNA, 19 nt, Homo sapiens
  misc_RNA (1)...(19): siRNA sense strand
cuauaaaggucucauauga

SEQ ID NO: 49347 - RNA, 19 nt, Homo sapiens
  misc_RNA (1)...(19): siRNA sense strand
gcaaggaagugccucaaau

SEQ ID NO: 49348 - RNA, 19 nt, Homo sapiens
  misc_RNA (1)...(19): siRNA sense strand
gaaaguauaccuggaauga

SEQ ID NO: 49349 - RNA, 19 nt, Homo sapiens
  misc_RNA (1)...(19): siRNA sense strand
ugaagcagaucccacguua

SEQ ID NO: 49350 - RNA, 19 nt, Homo sapiens
  misc_RNA (1)...(19): siRNA sense strand
gcagauuaguuuaccgaua

SEQ ID NO: 49351 - RNA, 19 nt, Homo sapiens
  misc_RNA (1)...(19): siRNA sense strand
gaagaaugcuguaauuggu

SEQ ID NO: 49352 - RNA, 19 nt, Homo sapiens
  misc_RNA (1)...(19): siRNA sense strand
ggaauggaauguuauuugu

SEQ ID NO: 49353 - RNA, 19 nt, Homo sapiens
  misc_RNA (1)...(19): siRNA sense strand
gaaugugccuauaaucuug

SEQ ID NO: 49354 - RNA, 19 nt, Homo sapiens
  misc_RNA (1)...(19): siRNA sense strand
acacaagccuggucaauug

SEQ ID NO: 49355 - RNA, 19 nt, Homo sapiens
  misc_RNA (1)...(19): siRNA sense strand
ccuauaaucuugugaauuc

SEQ ID NO: 49356 - RNA, 19 nt, Homo sapiens
  misc_RNA (1)...(19): siRNA sense strand
gaacauauucagcuuaaug

SEQ ID NO: 49357 - RNA, 19 nt, Homo sapiens
  misc_RNA (1)...(19): siRNA sense strand
caacuacaaucuugcuaaa

SEQ ID NO: 49358 - RNA, 19 nt, Homo sapiens
  misc_RNA (1)...(19): siRNA sense strand
gaaaggacuuccagaacug

SEQ ID NO: 49359 - RNA, 19 nt, Homo sapiens
  misc_RNA (1)...(19): siRNA sense strand
gaaucaggcuacaacauga

SEQ ID NO: 49360 - RNA, 19 nt, Homo sapiens
  misc_RNA (1)...(19): siRNA sense strand
acaagucgcuguuggaauu

SEQ ID NO: 49361 - RNA, 19 nt, Homo sapiens
  misc_RNA (1)...(19): siRNA sense strand
aaacacaggugaaguuaau

SEQ ID NO: 49362 - RNA, 19 nt, Homo sapiens
  misc_RNA (1)...(19): siRNA sense strand
aagaggcuaugaugaauua

SEQ ID NO: 49363 - RNA, 19 nt, Homo sapiens
  misc_RNA (1)...(19): siRNA sense strand
guaaauggauccaggaaca

SEQ ID NO: 49364 - RNA, 19 nt, Homo sapiens
  misc_RNA (1)...(19): siRNA sense strand
ugauucaucugccaaauaa

SEQ ID NO: 49365 - RNA, 19 nt, Homo sapiens
  misc_RNA (1)...(19): siRNA sense strand
gaugagaauucaaucaaug

SEQ ID NO: 49366 - RNA, 19 nt, Homo sapiens
  misc_RNA (1)...(19): siRNA sense strand
gcaacccaauuuauaugua

SEQ ID NO: 49367 - RNA, 19 nt, Homo sapiens
  misc_RNA (1)...(19): siRNA sense strand
acaaagcgguugagcaauu

SEQ ID NO: 49368 - RNA, 19 nt, Homo sapiens
  misc_RNA (1)...(19): siRNA sense strand
gagaagcaucgacucauua

SEQ ID NO: 49369 - RNA, 19 nt, Homo sapiens
  misc_RNA (1)...(19): siRNA sense strand
guaaaugguugcaggcuau

SEQ ID NO: 49370 - RNA, 19 nt, Homo sapiens
  misc_RNA (1)...(19): siRNA sense strand
gaagaacgguuuuacacua

SEQ ID NO: 49371 - RNA, 19 nt, Homo sapiens
  misc_RNA (1)...(19): siRNA sense strand
cagauuaguuuaccgauau

SEQ ID NO: 49372 - RNA, 19 nt, Homo sapiens
  misc_RNA (1)...(19): siRNA sense strand
gagaugauccucuucgaaa

SEQ ID NO: 49373 - RNA, 19 nt, Homo sapiens
  misc_RNA (1)...(19): siRNA sense strand
gcagaaauaagaccaaaga

SEQ ID NO: 49374 - RNA, 19 nt, Homo sapiens
  misc_RNA (1)...(19): siRNA sense strand
ucacaaacguggcauauac

SEQ ID NO: 49375 - RNA, 19 nt, Homo sapiens
  misc_RNA (1)...(19): siRNA sense strand
gcacauggauggauaaaau

SEQ ID NO: 49376 - RNA, 19 nt, Homo sapiens
  misc_RNA (1)...(19): siRNA sense strand
ucacguagcugaguacaug

SEQ ID NO: 49377 - RNA, 19 nt, Homo sapiens
  misc_RNA (1)...(19): siRNA sense strand
gcacaugcccuguuuaugg

SEQ ID NO: 49378 - RNA, 19 nt, Homo sapiens
  misc_RNA (1)...(19): siRNA sense strand
gauccaaaccaacaccuua

SEQ ID NO: 49379 - RNA, 19 nt, Homo sapiens
  misc_RNA (1)...(19): siRNA sense strand
gaaaagcaguuaccgugua

SEQ ID NO: 49380 - RNA, 19 nt, Homo sapiens
  misc_RNA (1)...(19): siRNA sense strand
gauaugaacauugcacuaa

SEQ ID NO: 49381 - RNA, 19 nt, Homo sapiens
  misc_RNA (1)...(19): siRNA sense strand
gaaauugugggccugagua

SEQ ID NO: 49382 - RNA, 19 nt, Homo sapiens
  misc_RNA (1)...(19): siRNA sense strand
caaaagggcccaaugaaua

SEQ ID NO: 49383 - RNA, 19 nt, Homo sapiens
  misc_RNA (1)...(19): siRNA sense strand
caaagcgguugagcaauuu

SEQ ID NO: 49384 - RNA, 19 nt, Homo sapiens
  misc_RNA (1)...(19): siRNA sense strand
gcuaaagguuucaauuauc

SEQ ID NO: 49385 - RNA, 19 nt, Homo sapiens
  misc_RNA (1)...(19): siRNA sense strand
gaucagccauuguuugaag

SEQ ID NO: 49386 - RNA, 19 nt, Homo sapiens
  misc_RNA (1)...(19): siRNA sense strand
ggugguggcugcaguguau

SEQ ID NO: 49387 - RNA, 19 nt, Homo sapiens
  misc_RNA (1)...(19): siRNA sense strand
ggcauggucucauuccuaa

SEQ ID NO: 49388 - RNA, 19 nt, Homo sapiens
  misc_RNA (1)...(19): siRNA sense strand
gcaauguuguguuucucua

SEQ ID NO: 49389 - RNA, 19 nt, Homo sapiens
  misc_RNA (1)...(19): siRNA sense strand
ggucagcccuuaaauaugc

SEQ ID NO: 49390 - RNA, 19 nt, Homo sapiens
  misc_RNA (1)...(19): siRNA sense strand
acaauucaguccucacuuu

SEQ ID NO: 49391 - RNA, 19 nt, Homo sapiens
  misc_RNA (1)...(19): siRNA sense strand
cuagaacuauugagagaaa

SEQ ID NO: 49392 - RNA, 19 nt, Homo sapiens
  misc_RNA (1)...(19): siRNA sense strand
gaaugggaaagcagacuua

SEQ ID NO: 49393 - RNA, 19 nt, Homo sapiens
  misc_RNA (1)...(19): siRNA sense strand
auaaaggucucauaugaug

SEQ ID NO: 49394 - RNA, 19 nt, Homo sapiens
  misc_RNA (1)...(19): siRNA sense strand
gcaguuaccguguauacaa

SEQ ID NO: 49395 - RNA, 19 nt, Homo sapiens
  misc_RNA (1)...(19): siRNA sense strand
gccaaucaguuagaauuaa

SEQ ID NO: 49396 - RNA, 19 nt, Homo sapiens
  misc_RNA (1)...(19): siRNA sense strand
caacagaaagagaagauga

SEQ ID NO: 49397 - RNA, 19 nt, Homo sapiens
  misc_RNA (1)...(19): siRNA sense strand
gaagcuagaacuauugaga

SEQ ID NO: 49398 - RNA, 19 nt, Homo sapiens
  misc_RNA (1)...(19): siRNA sense strand
gagaggcaaugagugcaua

SEQ ID NO: 49399 - RNA, 19 nt, Homo sapiens
  misc_RNA (1)...(19): siRNA sense strand
ccaaugagaaugcccagua

SEQ ID NO: 49400 - RNA, 19 nt, Homo sapiens
  misc_RNA (1)...(19): siRNA sense strand
gaaagugacagagcuagaa

SEQ ID NO: 49401 - RNA, 19 nt, Homo sapiens
  misc_RNA (1)...(19): siRNA sense strand
gcugcaggcuuaccucauu

SEQ ID NO: 49402 - RNA, 19 nt, Homo sapiens
  misc_RNA (1)...(19): siRNA sense strand
ucucuugccuccagauuaa

SEQ ID NO: 49403 - RNA, 19 nt, Homo sapiens
  misc_RNA (1)...(19): siRNA sense strand
ggaugagaauucaaucaau

SEQ ID NO: 49404 - RNA, 19 nt, Homo sapiens
  misc_RNA (1)...(19): siRNA sense strand
agagaaacacgaaaccuua

SEQ ID NO: 49405 - RNA, 19 nt, Homo sapiens
  misc_RNA (1)...(19): siRNA sense strand
cagcagcaauugaagaaug

SEQ ID NO: 49406 - RNA, 19 nt, Homo sapiens
  misc_RNA (1)...(19): siRNA sense strand
gccauuguuugaagucaua

SEQ ID NO: 49407 - RNA, 19 nt, Homo sapiens
  misc_RNA (1)...(19): siRNA sense strand
gagcuacaguuccgauuag

SEQ ID NO: 49408 - RNA, 19 nt, Homo sapiens
  misc_RNA (1)...(19): siRNA sense strand
gcuacucccuugccaauca

SEQ ID NO: 49409 - RNA, 19 nt, Homo sapiens
  misc_RNA (1)...(19): siRNA sense strand
uuccagaacugaccaauga

SEQ ID NO: 49410 - RNA, 19 nt, Homo sapiens
  misc_RNA (1)...(19): siRNA sense strand
agagguauacugcugauua

SEQ ID NO: 49411 - RNA, 19 nt, Homo sapiens
  misc_RNA (1)...(19): siRNA sense strand
gucaguaaccggcuuauuu

SEQ ID NO: 49412 - RNA, 19 nt, Homo sapiens
  misc_RNA (1)...(19): siRNA sense strand
uccaggaaguguuauuaua

SEQ ID NO: 49413 - RNA, 19 nt, Homo sapiens
  misc_RNA (1)...(19): siRNA sense strand
gaaugauguuggacagcua

SEQ ID NO: 49414 - RNA, 19 nt, Homo sapiens
  misc_RNA (1)...(19): siRNA sense strand
ccgauuaggcccaacuuua

SEQ ID NO: 49415 - RNA, 19 nt, Homo sapiens
  misc_RNA (1)...(19): siRNA sense strand
cagaugauaugguuuacug

SEQ ID NO: 49416 - RNA, 19 nt, Homo sapiens
  misc_RNA (1)...(19): siRNA sense strand
ggaaggaugagaauucaau

SEQ ID NO: 49417 - RNA, 19 nt, Homo sapiens
  misc_RNA (1)...(19): siRNA sense strand
gaagacauaguggcaguaa

SEQ ID NO: 49418 - RNA, 19 nt, Homo sapiens
  misc_RNA (1)...(19): siRNA sense strand
aaauuacgcuaugggaaua

SEQ ID NO: 49419 - RNA, 19 nt, Homo sapiens
  misc_RNA (1)...(19): siRNA sense strand
ucaagauccugaauacaga

SEQ ID NO: 49420 - RNA, 19 nt, Homo sapiens
  misc_RNA (1)...(19): siRNA sense strand
caucagauuucagugguuu

SEQ ID NO: 49421 - RNA, 19 nt, Homo sapiens
  misc_RNA (1)...(19): siRNA sense strand
gaauaccugcuuugauuga

SEQ ID NO: 49422 - RNA, 19 nt, Homo sapiens
  misc_RNA (1)...(19): siRNA sense strand
ggaaagcuuuggagauugc

SEQ ID NO: 49423 - RNA, 19 nt, Homo sapiens
  misc_RNA (1)...(19): siRNA sense strand
ggagcaauguuguguuucu

SEQ ID NO: 49424 - RNA, 19 nt, Homo sapiens
  misc_RNA (1)...(19): siRNA sense strand
ugacaaugcagauccuaua

SEQ ID NO: 49425 - RNA, 19 nt, Homo sapiens
  misc_RNA (1)...(19): siRNA sense strand
aaccaacaccuuacgauua

SEQ ID NO: 49426 - RNA, 19 nt, Homo sapiens
  misc_RNA (1)...(19): siRNA sense strand
aaggagcaauguuguguuu

SEQ ID NO: 49427 - RNA, 19 nt, Homo sapiens
  misc_RNA (1)...(19): siRNA sense strand
gaaaucaucugacacaauu

SEQ ID NO: 49428 - RNA, 19 nt, Homo sapiens
  misc_RNA (1)...(19): siRNA sense strand
gcaacaaucugguucauuu

SEQ ID NO: 49429 - RNA, 19 nt, Homo sapiens
  misc_RNA (1)...(19): siRNA sense strand
caaugcagauccuauauua

SEQ ID NO: 49430 - RNA, 19 nt, Homo sapiens
  misc_RNA (1)...(19): siRNA sense strand
gggaauaccugcuuugauu

SEQ ID NO: 49431 - RNA, 19 nt, Homo sapiens
  misc_RNA (1)...(19): siRNA sense strand
gggagacaguguuaaauua

SEQ ID NO: 49432 - RNA, 19 nt, Homo sapiens
  misc_RNA (1)...(19): siRNA sense strand
ccaaguagaugucaacaaa

SEQ ID NO: 49433 - RNA, 19 nt, Homo sapiens
  misc_RNA (1)...(19): siRNA sense strand
gaaauaagaccaaagaaug

SEQ ID NO: 49434 - RNA, 19 nt, Homo sapiens
  misc_RNA (1)...(19): siRNA sense strand
gauaaugaguguccuauug

SEQ ID NO: 49435 - RNA, 19 nt, Homo sapiens
  misc_RNA (1)...(19): siRNA sense strand
gaagggaaauacaaagaaa

SEQ ID NO: 49436 - RNA, 19 nt, Homo sapiens
  misc_RNA (1)...(19): siRNA sense strand
gaagagggcagauuaguuu

SEQ ID NO: 49437 - RNA, 19 nt, Homo sapiens
  misc_RNA (1)...(19): siRNA sense strand
gcaaugagugcauauaaua

SEQ ID NO: 49438 - RNA, 19 nt, Homo sapiens
  misc_RNA (1)...(19): siRNA sense strand
gagaacauauucagcuuaa

SEQ ID NO: 49439 - RNA, 19 nt, Homo sapiens
  misc_RNA (1)...(19): siRNA sense strand
ggacgaagguuuuaauaua

SEQ ID NO: 49440 - RNA, 19 nt, Homo sapiens
  misc_RNA (1)...(19): siRNA sense strand
ugacagagcuagaaacaga

SEQ ID NO: 49441 - RNA, 19 nt, Homo sapiens
  misc_RNA (1)...(19): siRNA sense strand
ggagaaacauuuaauagag

SEQ ID NO: 49442 - RNA, 19 nt, Homo sapiens
  misc_RNA (1)...(19): siRNA sense strand
gagauuggaugauugacua

SEQ ID NO: 49443 - RNA, 19 nt, Homo sapiens
  misc_RNA (1)...(19): siRNA sense strand
guagaagccaggaauauua

SEQ ID NO: 49444 - RNA, 19 nt, Homo sapiens
  misc_RNA (1)...(19): siRNA sense strand
ccagauagaucgaaacaug

SEQ ID NO: 49445 - RNA, 19 nt, Homo sapiens
  misc_RNA (1)...(19): siRNA sense strand
gugaagaucuggacaaugu

SEQ ID NO: 49446 - RNA, 19 nt, Homo sapiens
  misc_RNA (1)...(19): siRNA sense strand
cuauaaaggucucauauga

SEQ ID NO: 49447 - RNA, 19 nt, Homo sapiens
  misc_RNA (1)...(19): siRNA sense strand
gcaaggaagugccucaaau

SEQ ID NO: 49448 - RNA, 19 nt, Homo sapiens
  misc_RNA (1)...(19): siRNA sense strand
gaaaguauaccuggaauga

SEQ ID NO: 49449 - RNA, 19 nt, Homo sapiens
  misc_RNA (1)...(19): siRNA sense strand
ugaagcagaucccacguua

SEQ ID NO: 49450 - RNA, 19 nt, Homo sapiens
  misc_RNA (1)...(19): siRNA sense strand
gcagauuaguuuaccgaua

SEQ ID NO: 49451 - RNA, 19 nt, Homo sapiens
  misc_RNA (1)...(19): siRNA sense strand
gaagaaugcuguaauuggu

SEQ ID NO: 49452 - RNA, 19 nt, Homo sapiens
  misc_RNA (1)...(19): siRNA sense strand
ggaauggaauguuauuugu

SEQ ID NO: 49453 - RNA, 19 nt, Homo sapiens
  misc_RNA (1)...(19): siRNA sense strand
gaaugugccuauaaucuug

SEQ ID NO: 49454 - RNA, 19 nt, Homo sapiens
  misc_RNA (1)...(19): siRNA sense strand
acacaagccuggucaauug

SEQ ID NO: 49455 - RNA, 19 nt, Homo sapiens
  misc_RNA (1)...(19): siRNA sense strand
ccuauaaucuugugaauuc

SEQ ID NO: 49456 - RNA, 19 nt, Homo sapiens
  misc_RNA (1)...(19): siRNA sense strand
gaacauauucagcuuaaug

SEQ ID NO: 49457 - RNA, 19 nt, Homo sapiens
  misc_RNA (1)...(19): siRNA sense strand
caacuacaaucuugcuaaa

SEQ ID NO: 49458 - RNA, 19 nt, Homo sapiens
  misc_RNA (1)...(19): siRNA sense strand
gaaaggacuuccagaacug

SEQ ID NO: 49459 - RNA, 19 nt, Homo sapiens
  misc_RNA (1)...(19): siRNA sense strand
gaaucaggcuacaacauga

SEQ ID NO: 49460 - RNA, 19 nt, Homo sapiens
  misc_RNA (1)...(19): siRNA sense strand
acaagucgcuguuggaauu

SEQ ID NO: 49461 - RNA, 19 nt, Homo sapiens
  misc_RNA (1)...(19): siRNA sense strand
aaacacaggugaaguuaau

SEQ ID NO: 49462 - RNA, 19 nt, Homo sapiens
  misc_RNA (1)...(19): siRNA sense strand
aagaggcuaugaugaauua

SEQ ID NO: 49463 - RNA, 19 nt, Homo sapiens
  misc_RNA (1)...(19): siRNA sense strand
guaaauggauccaggaaca

SEQ ID NO: 49464 - RNA, 19 nt, Homo sapiens
  misc_RNA (1)...(19): siRNA sense strand
ugauucaucugccaaauaa

SEQ ID NO: 49465 - RNA, 19 nt, Homo sapiens
  misc_RNA (1)...(19): siRNA sense strand
gaugagaauucaaucaaug

SEQ ID NO: 49466 - RNA, 19 nt, Homo sapiens
  misc_RNA (1)...(19): siRNA sense strand
gcaacccaauuuauaugua

SEQ ID NO: 49467 - RNA, 19 nt, Homo sapiens
  misc_RNA (1)...(19): siRNA sense strand
acaaagcgguugagcaauu

SEQ ID NO: 49468 - RNA, 19 nt, Homo sapiens
  misc_RNA (1)...(19): siRNA sense strand
gagaagcaucgacucauua

SEQ ID NO: 49469 - RNA, 19 nt, Homo sapiens
  misc_RNA (1)...(19): siRNA sense strand
guaaaugguugcaggcuau

SEQ ID NO: 49470 - RNA, 19 nt, Homo sapiens
  misc_RNA (1)...(19): siRNA sense strand
gaagaacgguuuuacacua

SEQ ID NO: 49471 - RNA, 19 nt, Homo sapiens
  misc_RNA (1)...(19): siRNA sense strand
cagauuaguuuaccgauau

SEQ ID NO: 49472 - RNA, 19 nt, Homo sapiens
  misc_RNA (1)...(19): siRNA sense strand
gagaugauccucuucgaaa

SEQ ID NO: 49473 - RNA, 19 nt, Homo sapiens
  misc_RNA (1)...(19): siRNA sense strand
gcagaaauaagaccaaaga

SEQ ID NO: 49474 - RNA, 19 nt, Homo sapiens
  misc_RNA (1)...(19): siRNA sense strand
ucacaaacguggcauauac

SEQ ID NO: 49475 - RNA, 19 nt, Homo sapiens
  misc_RNA (1)...(19): siRNA sense strand
gcacauggauggauaaaau

SEQ ID NO: 49476 - RNA, 19 nt, Homo sapiens
  misc_RNA (1)...(19): siRNA sense strand
ucacguagcugaguacaug

SEQ ID NO: 49477 - RNA, 19 nt, Homo sapiens
  misc_RNA (1)...(19): siRNA sense strand
gcacaugcccuguuuaugg

SEQ ID NO: 49478 - RNA, 19 nt, Homo sapiens
  misc_RNA (1)...(19): siRNA sense strand
gauccaaaccaacaccuua

SEQ ID NO: 49479 - RNA, 19 nt, Homo sapiens
  misc_RNA (1)...(19): siRNA sense strand
gaaaagcaguuaccgugua

SEQ ID NO: 49480 - RNA, 19 nt, Homo sapiens
  misc_RNA (1)...(19): siRNA sense strand
gauaugaacauugcacuaa

SEQ ID NO: 49481 - RNA, 19 nt, Homo sapiens
  misc_RNA (1)...(19): siRNA sense strand
gaaauugugggccugagua

SEQ ID NO: 49482 - RNA, 19 nt, Homo sapiens
  misc_RNA (1)...(19): siRNA sense strand
caaaagggcccaaugaaua

SEQ ID NO: 49483 - RNA, 19 nt, Homo sapiens
  misc_RNA (1)...(19): siRNA sense strand
caaagcgguugagcaauuu

SEQ ID NO: 49484 - RNA, 19 nt, Homo sapiens
  misc_RNA (1)...(19): siRNA sense strand
gcuaaagguuucaauuauc

SEQ ID NO: 49485 - RNA, 19 nt, Homo sapiens
  misc_RNA (1)...(19): siRNA sense strand
gaucagccauuguuugaag

SEQ ID NO: 49486 - RNA, 19 nt, Homo sapiens
  misc_RNA (1)...(19): siRNA sense strand
ggugguggcugcaguguau

SEQ ID NO: 49487 - RNA, 19 nt, Homo sapiens
  misc_RNA (1)...(19): siRNA sense strand
ggcauggucucauuccuaa

SEQ ID NO: 49488 - RNA, 19 nt, Homo sapiens
  misc_RNA (1)...(19): siRNA sense strand
gcaauguuguguuucucua

SEQ ID NO: 49489 - RNA, 19 nt, Homo sapiens
  misc_RNA (1)...(19): siRNA sense strand
ggucagcccuuaaauaugc

SEQ ID NO: 49490 - RNA, 19 nt, Homo sapiens
  misc_RNA (1)...(19): siRNA sense strand
acaauucaguccucacuuu

SEQ ID NO: 49491 - RNA, 19 nt, Homo sapiens
  misc_RNA (1)...(19): siRNA sense strand
cuagaacuauugagagaaa

SEQ ID NO: 49492 - RNA, 19 nt, Homo sapiens
  misc_RNA (1)...(19): siRNA sense strand
gaaugggaaagcagacuua

SEQ ID NO: 49493 - RNA, 19 nt, Homo sapiens
  misc_RNA (1)...(19): siRNA sense strand
auaaaggucucauaugaug

SEQ ID NO: 49494 - RNA, 19 nt, Homo sapiens
  misc_RNA (1)...(19): siRNA sense strand
gcaguuaccguguauacaa

SEQ ID NO: 49495 - RNA, 19 nt, Homo sapiens
  misc_RNA (1)...(19): siRNA sense strand
gccaaucaguuagaauuaa

SEQ ID NO: 49496 - RNA, 19 nt, Homo sapiens
  misc_RNA (1)...(19): siRNA sense strand
caacagaaagagaagauga

SEQ ID NO: 49497 - RNA, 19 nt, Homo sapiens
  misc_RNA (1)...(19): siRNA sense strand
gaagcuagaacuauugaga

SEQ ID NO: 49498 - RNA, 19 nt, Homo sapiens
  misc_RNA (1)...(19): siRNA sense strand
gagaggcaaugagugcaua

SEQ ID NO: 49499 - RNA, 19 nt, Homo sapiens
  misc_RNA (1)...(19): siRNA sense strand
ccaaugagaaugcccagua

SEQ ID NO: 49500 - RNA, 19 nt, Homo sapiens
  misc_RNA (1)...(19): siRNA sense strand
gaaagugacagagcuagaa

SEQ ID NO: 49501 - RNA, 19 nt, Homo sapiens
  misc_RNA (1)...(19): siRNA sense strand
gcugcaggcuuaccucauu

SEQ ID NO: 49502 - RNA, 19 nt, Homo sapiens
  misc_RNA (1)...(19): siRNA sense strand
ucucuugccuccagauuaa

SEQ ID NO: 49503 - RNA, 19 nt, Homo sapiens
  misc_RNA (1)...(19): siRNA sense strand
ggaugagaauucaaucaau

SEQ ID NO: 49504 - RNA, 19 nt, Homo sapiens
  misc_RNA (1)...(19): siRNA sense strand
agagaaacacgaaaccuua

SEQ ID NO: 49505 - RNA, 19 nt, Homo sapiens
  misc_RNA (1)...(19): siRNA sense strand
cagcagcaauugaagaaug

SEQ ID NO: 49506 - RNA, 19 nt, Homo sapiens
  misc_RNA (1)...(19): siRNA sense strand
gccauuguuugaagucaua

SEQ ID NO: 49507 - RNA, 19 nt, Homo sapiens
  misc_RNA (1)...(19): siRNA sense strand
gagcuacaguuccgauuag

SEQ ID NO: 49508 - RNA, 19 nt, Homo sapiens
  misc_RNA (1)...(19): siRNA sense strand
gcuacucccuugccaauca

SEQ ID NO: 49509 - RNA, 19 nt, Homo sapiens
  misc_RNA (1)...(19): siRNA sense strand
uuccagaacugaccaauga

SEQ ID NO: 49510 - RNA, 19 nt, Homo sapiens
  misc_RNA (1)...(19): siRNA sense strand
agagguauacugcugauua

SEQ ID NO: 49511 - RNA, 19 nt, Homo sapiens
  misc_RNA (1)...(19): siRNA sense strand
gucaguaaccggcuuauuu

SEQ ID NO: 49512 - RNA, 19 nt, Homo sapiens
  misc_RNA (1)...(19): siRNA sense strand
uccaggaaguguuauuaua

SEQ ID NO: 49513 - RNA, 19 nt, Homo sapiens
  misc_RNA (1)...(19): siRNA sense strand
gaaugauguuggacagcua

SEQ ID NO: 49514 - RNA, 19 nt, Homo sapiens
  misc_RNA (1)...(19): siRNA sense strand
ccgauuaggcccaacuuua

SEQ ID NO: 49515 - RNA, 19 nt, Homo sapiens
  misc_RNA (1)...(19): siRNA sense strand
cagaugauaugguuuacug

SEQ ID NO: 49516 - RNA, 19 nt, Homo sapiens
  misc_RNA (1)...(19): siRNA sense strand
ggaaggaugagaauucaau

SEQ ID NO: 49517 - RNA, 19 nt, Homo sapiens
  misc_RNA (1)...(19): siRNA sense strand
gaagacauaguggcaguaa

SEQ ID NO: 49518 - RNA, 19 nt, Homo sapiens
  misc_RNA (1)...(19): siRNA sense strand
aaauuacgcuaugggaaua

SEQ ID NO: 49519 - RNA, 19 nt, Homo sapiens
  misc_RNA (1)...(19): siRNA sense strand
ucaagauccugaauacaga

SEQ ID NO: 49520 - RNA, 19 nt, Homo sapiens
  misc_RNA (1)...(19): siRNA sense strand
caucagauuucagugguuu

SEQ ID NO: 49521 - RNA, 19 nt, Homo sapiens
  misc_RNA (1)...(19): siRNA sense strand
gaauaccugcuuugauuga

SEQ ID NO: 49522 - RNA, 19 nt, Homo sapiens
  misc_RNA (1)...(19): siRNA sense strand
ggaaagcuuuggagauugc

SEQ ID NO: 49523 - RNA, 19 nt, Homo sapiens
  misc_RNA (1)...(19): siRNA sense strand
ggagcaauguuguguuucu

SEQ ID NO: 49524 - RNA, 19 nt, Homo sapiens
  misc_RNA (1)...(19): siRNA sense strand
ugacaaugcagauccuaua

SEQ ID NO: 49525 - RNA, 19 nt, Homo sapiens
  misc_RNA (1)...(19): siRNA sense strand
aaccaacaccuuacgauua

SEQ ID NO: 49526 - RNA, 19 nt, Homo sapiens
  misc_RNA (1)...(19): siRNA sense strand
aaggagcaauguuguguuu

SEQ ID NO: 49527 - RNA, 19 nt, Homo sapiens
  misc_RNA (1)...(19): siRNA sense strand
ccacgaggauggaauaauu

SEQ ID NO: 49528 - RNA, 19 nt, Homo sapiens
  misc_RNA (1)...(19): siRNA sense strand
ccaggaaucaucuuuacua

SEQ ID NO: 49529 - RNA, 19 nt, Homo sapiens
  misc_RNA (1)...(19): siRNA sense strand
caucaucuaugccuucguu

SEQ ID NO: 49530 - RNA, 19 nt, Homo sapiens
  misc_RNA (1)...(19): siRNA sense strand
caggaaucaucuuuacuaa

SEQ ID NO: 49531 - RNA, 19 nt, Homo sapiens
  misc_RNA (1)...(19): siRNA sense strand
ggcggaaucuucuucauca

SEQ ID NO: 49532 - RNA, 19 nt, Homo sapiens
  misc_RNA (1)...(19): siRNA sense strand
caagugugaucaccugguu

SEQ ID NO: 49533 - RNA, 19 nt, Homo sapiens
  misc_RNA (1)...(19): siRNA sense strand
ucaccaucaugauuguuua

SEQ ID NO: 49534 - RNA, 19 nt, Homo sapiens
  misc_RNA (1)...(19): siRNA sense strand
cgagagcggugaagaaguc

SEQ ID NO: 49535 - RNA, 19 nt, Homo sapiens
  misc_RNA (1)...(19): siRNA sense strand
ggccaucucugaucugcuu

SEQ ID NO: 49536 - RNA, 19 nt, Homo sapiens
  misc_RNA (1)...(19): siRNA sense strand
gcaucaaucccaucaucua

SEQ ID NO: 49537 - RNA, 19 nt, Homo sapiens
  misc_RNA (1)...(19): siRNA sense strand
caacgagagcggugaagaa

SEQ ID NO: 49538 - RNA, 19 nt, Homo sapiens
  misc_RNA (1)...(19): siRNA sense strand
ggugcucccugucauaaau

SEQ ID NO: 49539 - RNA, 19 nt, Homo sapiens
  misc_RNA (1)...(19): siRNA sense strand
agagucaucuucaccauca

SEQ ID NO: 49540 - RNA, 19 nt, Homo sapiens
  misc_RNA (1)...(19): siRNA sense strand
gcaaugugcaaauuauuca

SEQ ID NO: 49541 - RNA, 19 nt, Homo sapiens
  misc_RNA (1)...(19): siRNA sense strand
gcagugagagucaucuuca

SEQ ID NO: 49542 - RNA, 19 nt, Homo sapiens
  misc_RNA (1)...(19): siRNA sense strand
gugcuugacugacauuuac

SEQ ID NO: 49543 - RNA, 19 nt, Homo sapiens
  misc_RNA (1)...(19): siRNA sense strand
uguaucacaucgguuauuu

SEQ ID NO: 49544 - RNA, 19 nt, Homo sapiens
  misc_RNA (1)...(19): siRNA sense strand
cuaaaugccagaaagaaga

SEQ ID NO: 49545 - RNA, 19 nt, Homo sapiens
  misc_RNA (1)...(19): siRNA sense strand
gaagaagucaccaccuuuu

SEQ ID NO: 49546 - RNA, 19 nt, Homo sapiens
  misc_RNA (1)...(19): siRNA sense strand
ugaagaagucaccaccuuu

SEQ ID NO: 49547 - RNA, 19 nt, Homo sapiens
  misc_RNA (1)...(19): siRNA sense strand
caucuucaccaucaugauu

SEQ ID NO: 49548 - RNA, 19 nt, Homo sapiens
  misc_RNA (1)...(19): siRNA sense strand
uauuguccaugcuguguuu

SEQ ID NO: 49549 - RNA, 19 nt, Homo sapiens
  misc_RNA (1)...(19): siRNA sense strand
ucauaaauuugacgugaag

SEQ ID NO: 49550 - RNA, 19 nt, Homo sapiens
  misc_RNA (1)...(19): siRNA sense strand
ccaggacggucaccuuugg

SEQ ID NO: 49551 - RNA, 19 nt, Homo sapiens
  misc_RNA (1)...(19): siRNA sense strand
gagugggucuuugggaaug

SEQ ID NO: 49552 - RNA, 19 nt, Homo sapiens
  misc_RNA (1)...(19): siRNA sense strand
ggcuguaucacaucgguua

SEQ ID NO: 49553 - RNA, 19 nt, Homo sapiens
  misc_RNA (1)...(19): siRNA sense strand
cugaagugcuugacugaca

SEQ ID NO: 49554 - RNA, 19 nt, Homo sapiens
  misc_RNA (1)...(19): siRNA sense strand
acaucucguucucgguuua

SEQ ID NO: 49555 - RNA, 19 nt, Homo sapiens
  misc_RNA (1)...(19): siRNA sense strand
gaagugcuugacugacauu

SEQ ID NO: 49556 - RNA, 19 nt, Homo sapiens
  misc_RNA (1)...(19): siRNA sense strand
gaauucuucggccugagua

SEQ ID NO: 49557 - RNA, 19 nt, Homo sapiens
  misc_RNA (1)...(19): siRNA sense strand
ucuuauuacucucccauug

SEQ ID NO: 49558 - RNA, 19 nt, Homo sapiens
  misc_RNA (1)...(19): siRNA sense strand
caucaaucccaucaucuau

SEQ ID NO: 49559 - RNA, 19 nt, Homo sapiens
  misc_RNA (1)...(19): siRNA sense strand
ccaucaugauuguuuacuu

SEQ ID NO: 49560 - RNA, 19 nt, Homo sapiens
  misc_RNA (1)...(19): siRNA sense strand
caugcuguguuugcuuuaa

SEQ ID NO: 49561 - RNA, 19 nt, Homo sapiens
  misc_RNA (1)...(19): siRNA sense strand
ucaaucccaucaucuaugc

SEQ ID NO: 49562 - RNA, 19 nt, Homo sapiens
  misc_RNA (1)...(19): siRNA sense strand
uccaugcuguguuugcuuu

SEQ ID NO: 49563 - RNA, 19 nt, Homo sapiens
  misc_RNA (1)...(19): siRNA sense strand
uuauuacucucccauugug

SEQ ID NO: 49564 - RNA, 19 nt, Homo sapiens
  misc_RNA (1)...(19): siRNA sense strand
ggaauucuucggccugagu

SEQ ID NO: 49565 - RNA, 19 nt, Homo sapiens
  misc_RNA (1)...(19): siRNA sense strand
ucacucugcugcaaaugag

SEQ ID NO: 49566 - RNA, 19 nt, Homo sapiens
  misc_RNA (1)...(19): siRNA sense strand
cugaguaacugugaaagca

SEQ ID NO: 49567 - RNA, 19 nt, Homo sapiens
  misc_RNA (1)...(19): siRNA sense strand
uuacuaaaugccagaaaga

SEQ ID NO: 49568 - RNA, 19 nt, Homo sapiens
  misc_RNA (1)...(19): siRNA sense strand
cugcaucaaucccaucauc

SEQ ID NO: 49569 - RNA, 19 nt, Homo sapiens
  misc_RNA (1)...(19): siRNA sense strand
gaagauucuguuuaugucu

SEQ ID NO: 49570 - RNA, 19 nt, Homo sapiens
  misc_RNA (1)...(19): siRNA sense strand
ugaagugcuugacugacau

SEQ ID NO: 49571 - RNA, 19 nt, Homo sapiens
  misc_RNA (1)...(19): siRNA sense strand
uccugacaaucgauagaua

SEQ ID NO: 49572 - RNA, 19 nt, Homo sapiens
  misc_RNA (1)...(19): siRNA sense strand
caaccuggccaucucugau

SEQ ID NO: 49573 - RNA, 19 nt, Homo sapiens
  misc_RNA (1)...(19): siRNA sense strand
ucaucauggucaucugcua

SEQ ID NO: 49574 - RNA, 19 nt, Homo sapiens
  misc_RNA (1)...(19): siRNA sense strand
cacgaggauggaauaauuu

SEQ ID NO: 49575 - RNA, 19 nt, Homo sapiens
  misc_RNA (1)...(19): siRNA sense strand
uaaaugccagaaagaagau

SEQ ID NO: 49576 - RNA, 19 nt, Homo sapiens
  misc_RNA (1)...(19): siRNA sense strand
uaaauuugacgugaagcaa

SEQ ID NO: 49577 - RNA, 19 nt, Homo sapiens
  misc_RNA (1)...(19): siRNA sense strand
acucacugcugcaucaauc

SEQ ID NO: 49578 - RNA, 19 nt, Homo sapiens
  misc_RNA (1)...(19): siRNA sense strand
acauuuaccugcucaaccu

SEQ ID NO: 49579 - RNA, 19 nt, Homo sapiens
  misc_RNA (1)...(19): siRNA sense strand
ugagagucaucuucaccau

SEQ ID NO: 49580 - RNA, 19 nt, Homo sapiens
  misc_RNA (1)...(19): siRNA sense strand
acacaauaaugaggaacau

SEQ ID NO: 49581 - RNA, 19 nt, Homo sapiens
  misc_RNA (1)...(19): siRNA sense strand
gucccaggaaucaucuuua

SEQ ID NO: 49582 - RNA, 19 nt, Homo sapiens
  misc_RNA (1)...(19): siRNA sense strand
caugauuguuuacuuucuc

SEQ ID NO: 49583 - RNA, 19 nt, Homo sapiens
  misc_RNA (1)...(19): siRNA sense strand
ggccugaguaacugugaaa

SEQ ID NO: 49584 - RNA, 19 nt, Homo sapiens
  misc_RNA (1)...(19): siRNA sense strand
ucccaggaaucaucuuuac

SEQ ID NO: 49585 - RNA, 19 nt, Homo sapiens
  misc_RNA (1)...(19): siRNA sense strand
gauuguuuacuuucucuuc

SEQ ID NO: 49586 - RNA, 19 nt, Homo sapiens
  misc_RNA (1)...(19): siRNA sense strand
cacaucucguucucgguuu

SEQ ID NO: 49587 - RNA, 19 nt, Homo sapiens
  misc_RNA (1)...(19): siRNA sense strand
gggcucacucugcugcaaa

SEQ ID NO: 49588 - RNA, 19 nt, Homo sapiens
  misc_RNA (1)...(19): siRNA sense strand
ccacgaggauggaauaauu

SEQ ID NO: 49589 - RNA, 19 nt, Homo sapiens
  misc_RNA (1)...(19): siRNA sense strand
ccaggaaucaucuuuacua

SEQ ID NO: 49590 - RNA, 19 nt, Homo sapiens
  misc_RNA (1)...(19): siRNA sense strand
caucaucuaugccuucguu

SEQ ID NO: 49591 - RNA, 19 nt, Homo sapiens
  misc_RNA (1)...(19): siRNA sense strand
caggaaucaucuuuacuaa

SEQ ID NO: 49592 - RNA, 19 nt, Homo sapiens
  misc_RNA (1)...(19): siRNA sense strand
ggcggaaucuucuucauca

SEQ ID NO: 49593 - RNA, 19 nt, Homo sapiens
  misc_RNA (1)...(19): siRNA sense strand
caagugugaucaccugguu

SEQ ID NO: 49594 - RNA, 19 nt, Homo sapiens
  misc_RNA (1)...(19): siRNA sense strand
ucaccaucaugauuguuua

SEQ ID NO: 49595 - RNA, 19 nt, Homo sapiens
  misc_RNA (1)...(19): siRNA sense strand
cgagagcggugaagaaguc

SEQ ID NO: 49596 - RNA, 19 nt, Homo sapiens
  misc_RNA (1)...(19): siRNA sense strand
ggccaucucugaucugcuu

SEQ ID NO: 49597 - RNA, 19 nt, Homo sapiens
  misc_RNA (1)...(19): siRNA sense strand
gcaucaaucccaucaucua

SEQ ID NO: 49598 - RNA, 19 nt, Homo sapiens
  misc_RNA (1)...(19): siRNA sense strand
caacgagagcggugaagaa

SEQ ID NO: 49599 - RNA, 19 nt, Homo sapiens
  misc_RNA (1)...(19): siRNA sense strand
ggugcucccugucauaaau

SEQ ID NO: 49600 - RNA, 19 nt, Homo sapiens
  misc_RNA (1)...(19): siRNA sense strand
agagucaucuucaccauca

SEQ ID NO: 49601 - RNA, 19 nt, Homo sapiens
  misc_RNA (1)...(19): siRNA sense strand
gcaaugugcaaauuauuca

SEQ ID NO: 49602 - RNA, 19 nt, Homo sapiens
  misc_RNA (1)...(19): siRNA sense strand
gcagugagagucaucuuca

SEQ ID NO: 49603 - RNA, 19 nt, Homo sapiens
  misc_RNA (1)...(19): siRNA sense strand
gugcuugacugacauuuac

SEQ ID NO: 49604 - RNA, 19 nt, Homo sapiens
  misc_RNA (1)...(19): siRNA sense strand
uguaucacaucgguuauuu

SEQ ID NO: 49605 - RNA, 19 nt, Homo sapiens
  misc_RNA (1)...(19): siRNA sense strand
cuaaaugccagaaagaaga

SEQ ID NO: 49606 - RNA, 19 nt, Homo sapiens
  misc_RNA (1)...(19): siRNA sense strand
gaagaagucaccaccuuuu

SEQ ID NO: 49607 - RNA, 19 nt, Homo sapiens
  misc_RNA (1)...(19): siRNA sense strand
ugaagaagucaccaccuuu

SEQ ID NO: 49608 - RNA, 19 nt, Homo sapiens
  misc_RNA (1)...(19): siRNA sense strand
caucuucaccaucaugauu

SEQ ID NO: 49609 - RNA, 19 nt, Homo sapiens
  misc_RNA (1)...(19): siRNA sense strand
uauuguccaugcuguguuu

SEQ ID NO: 49610 - RNA, 19 nt, Homo sapiens
  misc_RNA (1)...(19): siRNA sense strand
ucauaaauuugacgugaag

SEQ ID NO: 49611 - RNA, 19 nt, Homo sapiens
  misc_RNA (1)...(19): siRNA sense strand
ccaggacggucaccuuugg

SEQ ID NO: 49612 - RNA, 19 nt, Homo sapiens
  misc_RNA (1)...(19): siRNA sense strand
gagugggucuuugggaaug

SEQ ID NO: 49613 - RNA, 19 nt, Homo sapiens
  misc_RNA (1)...(19): siRNA sense strand
ggcuguaucacaucgguua

SEQ ID NO: 49614 - RNA, 19 nt, Homo sapiens
  misc_RNA (1)...(19): siRNA sense strand
cugaagugcuugacugaca

SEQ ID NO: 49615 - RNA, 19 nt, Homo sapiens
  misc_RNA (1)...(19): siRNA sense strand
acaucucguucucgguuua

SEQ ID NO: 49616 - RNA, 19 nt, Homo sapiens
  misc_RNA (1)...(19): siRNA sense strand
gaagugcuugacugacauu

SEQ ID NO: 49617 - RNA, 19 nt, Homo sapiens
  misc_RNA (1)...(19): siRNA sense strand
gaauucuucggccugagua

SEQ ID NO: 49618 - RNA, 19 nt, Homo sapiens
  misc_RNA (1)...(19): siRNA sense strand
ucuuauuacucucccauug

SEQ ID NO: 49619 - RNA, 19 nt, Homo sapiens
  misc_RNA (1)...(19): siRNA sense strand
caucaaucccaucaucuau

SEQ ID NO: 49620 - RNA, 19 nt, Homo sapiens
  misc_RNA (1)...(19): siRNA sense strand
ccaucaugauuguuuacuu

SEQ ID NO: 49621 - RNA, 19 nt, Homo sapiens
  misc_RNA (1)...(19): siRNA sense strand
caugcuguguuugcuuuaa

SEQ ID NO: 49622 - RNA, 19 nt, Homo sapiens
  misc_RNA (1)...(19): siRNA sense strand
ucaaucccaucaucuaugc

SEQ ID NO: 49623 - RNA, 19 nt, Homo sapiens
  misc_RNA (1)...(19): siRNA sense strand
uccaugcuguguuugcuuu

SEQ ID NO: 49624 - RNA, 19 nt, Homo sapiens
  misc_RNA (1)...(19): siRNA sense strand
uuauuacucucccauugug

SEQ ID NO: 49625 - RNA, 19 nt, Homo sapiens
  misc_RNA (1)...(19): siRNA sense strand
ggaauucuucggccugagu

SEQ ID NO: 49626 - RNA, 19 nt, Homo sapiens
  misc_RNA (1)...(19): siRNA sense strand
ucacucugcugcaaaugag

SEQ ID NO: 49627 - RNA, 19 nt, Homo sapiens
  misc_RNA (1)...(19): siRNA sense strand
cugaguaacugugaaagca

SEQ ID NO: 49628 - RNA, 19 nt, Homo sapiens
  misc_RNA (1)...(19): siRNA sense strand
uuacuaaaugccagaaaga

SEQ ID NO: 49629 - RNA, 19 nt, Homo sapiens
  misc_RNA (1)...(19): siRNA sense strand
cugcaucaaucccaucauc

SEQ ID NO: 49630 - RNA, 19 nt, Homo sapiens
  misc_RNA (1)...(19): siRNA sense strand
gaagauucuguuuaugucu

SEQ ID NO: 49631 - RNA, 19 nt, Homo sapiens
  misc_RNA (1)...(19): siRNA sense strand
ugaagugcuugacugacau

SEQ ID NO: 49632 - RNA, 19 nt, Homo sapiens
  misc_RNA (1)...(19): siRNA sense strand
uccugacaaucgauagaua

SEQ ID NO: 49633 - RNA, 19 nt, Homo sapiens
  misc_RNA (1)...(19): siRNA sense strand
caaccuggccaucucugau

SEQ ID NO: 49634 - RNA, 19 nt, Homo sapiens
  misc_RNA (1)...(19): siRNA sense strand
ucaucauggucaucugcua

SEQ ID NO: 49635 - RNA, 19 nt, Homo sapiens
  misc_RNA (1)...(19): siRNA sense strand
cacgaggauggaauaauuu

SEQ ID NO: 49636 - RNA, 19 nt, Homo sapiens
  misc_RNA (1)...(19): siRNA sense strand
uaaaugccagaaagaagau

SEQ ID NO: 49637 - RNA, 19 nt, Homo sapiens
  misc_RNA (1)...(19): siRNA sense strand
uaaauuugacgugaagcaa

SEQ ID NO: 49638 - RNA, 19 nt, Homo sapiens
  misc_RNA (1)...(19): siRNA sense strand
acucacugcugcaucaauc

SEQ ID NO: 49639 - RNA, 19 nt, Homo sapiens
  misc_RNA (1)...(19): siRNA sense strand
acauuuaccugcucaaccu

SEQ ID NO: 49640 - RNA, 19 nt, Homo sapiens
  misc_RNA (1)...(19): siRNA sense strand
ugagagucaucuucaccau

SEQ ID NO: 49641 - RNA, 19 nt, Homo sapiens
  misc_RNA (1)...(19): siRNA sense strand
acacaauaaugaggaacau

SEQ ID NO: 49642 - RNA, 19 nt, Homo sapiens
  misc_RNA (1)...(19): siRNA sense strand
gucccaggaaucaucuuua

SEQ ID NO: 49643 - RNA, 19 nt, Homo sapiens
  misc_RNA (1)...(19): siRNA sense strand
caugauuguuuacuuucuc

SEQ ID NO: 49644 - RNA, 19 nt, Homo sapiens
  misc_RNA (1)...(19): siRNA sense strand
ggccugaguaacugugaaa

SEQ ID NO: 49645 - RNA, 19 nt, Homo sapiens
  misc_RNA (1)...(19): siRNA sense strand
ucccaggaaucaucuuuac

SEQ ID NO: 49646 - RNA, 19 nt, Homo sapiens
  misc_RNA (1)...(19): siRNA sense strand
gauuguuuacuuucucuuc

SEQ ID NO: 49647 - RNA, 19 nt, Homo sapiens
  misc_RNA (1)...(19): siRNA sense strand
cacaucucguucucgguuu

SEQ ID NO: 49648 - RNA, 19 nt, Homo sapiens
  misc_RNA (1)...(19): siRNA sense strand
gggcucacucugcugcaaa

SEQ ID NO: 49649 - RNA, 19 nt, Homo sapiens
  misc_RNA (1)...(19): siRNA sense strand
gaagacaacuguagacgaa

SEQ ID NO: 49650 - RNA, 19 nt, Homo sapiens
  misc_RNA (1)...(19): siRNA sense strand
ggacaucuuugaauuauga

SEQ ID NO: 49651 - RNA, 19 nt, Homo sapiens
  misc_RNA (1)...(19): siRNA sense strand
gguacgaucuucuuuauuu

SEQ ID NO: 49652 - RNA, 19 nt, Homo sapiens
  misc_RNA (1)...(19): siRNA sense strand
ggagaacggucaauauauu

SEQ ID NO: 49653 - RNA, 19 nt, Homo sapiens
  misc_RNA (1)...(19): siRNA sense strand
gaugaaggguuccgauuaa

SEQ ID NO: 49654 - RNA, 19 nt, Homo sapiens
  misc_RNA (1)...(19): siRNA sense strand
cagcaaagaugaucaaguu

SEQ ID NO: 49655 - RNA, 19 nt, Homo sapiens
  misc_RNA (1)...(19): siRNA sense strand
gcaaagaaguaaauuguag

SEQ ID NO: 49656 - RNA, 19 nt, Homo sapiens
  misc_RNA (1)...(19): siRNA sense strand
gaagugaaauccugugaug

SEQ ID NO: 49657 - RNA, 19 nt, Homo sapiens
  misc_RNA (1)...(19): siRNA sense strand
gaagugaaauccugugaug

SEQ ID NO: 49658 - RNA, 19 nt, Homo sapiens
  misc_RNA (1)...(19): siRNA sense strand
aaagaugucuguaaacgua

SEQ ID NO: 49659 - RNA, 19 nt, Homo sapiens
  misc_RNA (1)...(19): siRNA sense strand
agaaguggcuauccauuua

SEQ ID NO: 49660 - RNA, 19 nt, Homo sapiens
  misc_RNA (1)...(19): siRNA sense strand
gcacgaagccgccaauuug

SEQ ID NO: 49661 - RNA, 19 nt, Homo sapiens
  misc_RNA (1)...(19): siRNA sense strand
aaagaugucuguaaacgua

SEQ ID NO: 49662 - RNA, 19 nt, Homo sapiens
  misc_RNA (1)...(19): siRNA sense strand
gcacgaagccgccaauuug

SEQ ID NO: 49663 - RNA, 19 nt, Homo sapiens
  misc_RNA (1)...(19): siRNA sense strand
gaacauaucuuuuguccaa

SEQ ID NO: 49664 - RNA, 19 nt, Homo sapiens
  misc_RNA (1)...(19): siRNA sense strand
gaugaaggguuucgcuuaa

SEQ ID NO: 49665 - RNA, 19 nt, Homo sapiens
  misc_RNA (1)...(19): siRNA sense strand
gagauuaugugacuuugaa

SEQ ID NO: 49666 - RNA, 19 nt, Homo sapiens
  misc_RNA (1)...(19): siRNA sense strand
gauaagaaggcaccuauuu

SEQ ID NO: 49667 - RNA, 19 nt, Homo sapiens
  misc_RNA (1)...(19): siRNA sense strand
uaaaugaaguuguggaguu

SEQ ID NO: 49668 - RNA, 19 nt, Homo sapiens
  misc_RNA (1)...(19): siRNA sense strand
uaaaugaaguuguggaguu

SEQ ID NO: 49669 - RNA, 19 nt, Homo sapiens
  misc_RNA (1)...(19): siRNA sense strand
uaaaugaaguuguggaguu

SEQ ID NO: 49670 - RNA, 19 nt, Homo sapiens
  misc_RNA (1)...(19): siRNA sense strand
gcagugaaauccugugaug

SEQ ID NO: 49671 - RNA, 19 nt, Homo sapiens
  misc_RNA (1)...(19): siRNA sense strand
gaaauccugugaugacuuc

SEQ ID NO: 49672 - RNA, 19 nt, Homo sapiens
  misc_RNA (1)...(19): siRNA sense strand
ucucauaguuggcacuuua

SEQ ID NO: 49673 - RNA, 19 nt, Homo sapiens
  misc_RNA (1)...(19): siRNA sense strand
gaaauccugugaugacuuc

SEQ ID NO: 49674 - RNA, 19 nt, Homo sapiens
  misc_RNA (1)...(19): siRNA sense strand
ugagaagccuuuggaauaa

SEQ ID NO: 49675 - RNA, 19 nt, Homo sapiens
  misc_RNA (1)...(19): siRNA sense strand
gaaauccugugaugacuuc

SEQ ID NO: 49676 - RNA, 19 nt, Homo sapiens
  misc_RNA (1)...(19): siRNA sense strand
gaaauccugugaugacuuc

SEQ ID NO: 49677 - RNA, 19 nt, Homo sapiens
  misc_RNA (1)...(19): siRNA sense strand
ggagccaauuggaucauua

SEQ ID NO: 49678 - RNA, 19 nt, Homo sapiens
  misc_RNA (1)...(19): siRNA sense strand
agacguaaaucaugucgua

SEQ ID NO: 49679 - RNA, 19 nt, Homo sapiens
  misc_RNA (1)...(19): siRNA sense strand
caaaugggagccagaguua

SEQ ID NO: 49680 - RNA, 19 nt, Homo sapiens
  misc_RNA (1)...(19): siRNA sense strand
ccagaacccuucaauggaa

SEQ ID NO: 49681 - RNA, 19 nt, Homo sapiens
  misc_RNA (1)...(19): siRNA sense strand
caguuuggaucaacaguua

SEQ ID NO: 49682 - RNA, 19 nt, Homo sapiens
  misc_RNA (1)...(19): siRNA sense strand
gcaauuagaguaccaggaa

SEQ ID NO: 49683 - RNA, 19 nt, Homo sapiens
  misc_RNA (1)...(19): siRNA sense strand
ucacucaucugcugaaugu

SEQ ID NO: 49684 - RNA, 19 nt, Homo sapiens
  misc_RNA (1)...(19): siRNA sense strand
ucacucaucugcugaaugu

SEQ ID NO: 49685 - RNA, 19 nt, Homo sapiens
  misc_RNA (1)...(19): siRNA sense strand
acacguaucucuauaucuu

SEQ ID NO: 49686 - RNA, 19 nt, Homo sapiens
  misc_RNA (1)...(19): siRNA sense strand
gaggacacguaucucuaua

SEQ ID NO: 49687 - RNA, 19 nt, Homo sapiens
  misc_RNA (1)...(19): siRNA sense strand
ggacacguaucucuauauc

SEQ ID NO: 49688 - RNA, 19 nt, Homo sapiens
  misc_RNA (1)...(19): siRNA sense strand
ccagagcaguuuccauuug

SEQ ID NO: 49689 - RNA, 19 nt, Homo sapiens
  misc_RNA (1)...(19): siRNA sense strand
cgaaggaguuagaaaugaa

SEQ ID NO: 49690 - RNA, 19 nt, Homo sapiens
  misc_RNA (1)...(19): siRNA sense strand
gcaucugacuuucccauug

SEQ ID NO: 49691 - RNA, 19 nt, Homo sapiens
  misc_RNA (1)...(19): siRNA sense strand
ugucuuggcuggaaugaaa

SEQ ID NO: 49692 - RNA, 19 nt, Homo sapiens
  misc_RNA (1)...(19): siRNA sense strand
gcaucugacuuucccauug

SEQ ID NO: 49693 - RNA, 19 nt, Homo sapiens
  misc_RNA (1)...(19): siRNA sense strand
caguucggaucccaaauua

SEQ ID NO: 49694 - RNA, 19 nt, Homo sapiens
  misc_RNA (1)...(19): siRNA sense strand
gaaagguguuugagcuugu

SEQ ID NO: 49695 - RNA, 19 nt, Homo sapiens
  misc_RNA (1)...(19): siRNA sense strand
ggacaucuuuaaaguacga

SEQ ID NO: 49696 - RNA, 19 nt, Homo sapiens
  misc_RNA (1)...(19): siRNA sense strand
gaaagguguuugagcuugu

SEQ ID NO: 49697 - RNA, 19 nt, Homo sapiens
  misc_RNA (1)...(19): siRNA sense strand
ggacaucuuuaaaguacga

SEQ ID NO: 49698 - RNA, 19 nt, Homo sapiens
  misc_RNA (1)...(19): siRNA sense strand
gaaagguguuugagcuugu

SEQ ID NO: 49699 - RNA, 19 nt, Homo sapiens
  misc_RNA (1)...(19): siRNA sense strand
uaaaggauaccgacucauu

SEQ ID NO: 49700 - RNA, 19 nt, Homo sapiens
  misc_RNA (1)...(19): siRNA sense strand
gaucaaaggcauccaguuc

SEQ ID NO: 49701 - RNA, 19 nt, Homo sapiens
  misc_RNA (1)...(19): siRNA sense strand
gaacucugcaaacaaauga

SEQ ID NO: 49702 - RNA, 19 nt, Homo sapiens
  misc_RNA (1)...(19): siRNA sense strand
gcacagcuccagaaguuga

SEQ ID NO: 49703 - RNA, 19 nt, Homo sapiens
  misc_RNA (1)...(19): siRNA sense strand
uuaaagggcaguuccguua

SEQ ID NO: 49704 - RNA, 19 nt, Homo sapiens
  misc_RNA (1)...(19): siRNA sense strand
gaauauugguaucugacaa

SEQ ID NO: 49705 - RNA, 19 nt, Homo sapiens
  misc_RNA (1)...(19): siRNA sense strand
gaauauugguaucugacaa

SEQ ID NO: 49706 - RNA, 19 nt, Homo sapiens
  misc_RNA (1)...(19): siRNA sense strand
gaauauugguaucugacaa

SEQ ID NO: 49707 - RNA, 19 nt, Homo sapiens
  misc_RNA (1)...(19): siRNA sense strand
ucaauggaauggugcauau

SEQ ID NO: 49708 - RNA, 19 nt, Homo sapiens
  misc_RNA (1)...(19): siRNA sense strand
cgugugcuauuuccacuua

SEQ ID NO: 49709 - RNA, 19 nt, Homo sapiens
  misc_RNA (1)...(19): siRNA sense strand
cuaccaaccuaacugauga

SEQ ID NO: 49710 - RNA, 19 nt, Homo sapiens
  misc_RNA (1)...(19): siRNA sense strand
guccuacgaucccaauuaa

SEQ ID NO: 49711 - RNA, 19 nt, Homo sapiens
  misc_RNA (1)...(19): siRNA sense strand
guucggaucccaaauuaaa

SEQ ID NO: 49712 - RNA, 19 nt, Homo sapiens
  misc_RNA (1)...(19): siRNA sense strand
gcaacaauagaacaucuuu

SEQ ID NO: 49713 - RNA, 19 nt, Homo sapiens
  misc_RNA (1)...(19): siRNA sense strand
ggaaugagaagccuuugga

SEQ ID NO: 49714 - RNA, 19 nt, Homo sapiens
  misc_RNA (1)...(19): siRNA sense strand
gcaguuccguuagucauug

SEQ ID NO: 49715 - RNA, 19 nt, Homo sapiens
  misc_RNA (1)...(19): siRNA sense strand
gcaccaacagagagaauuu

SEQ ID NO: 49716 - RNA, 19 nt, Homo sapiens
  misc_RNA (1)...(19): siRNA sense strand
gcaccaacagagagaauuu

SEQ ID NO: 49717 - RNA, 19 nt, Homo sapiens
  misc_RNA (1)...(19): siRNA sense strand
gcaccaacagagagaauuu

SEQ ID NO: 49718 - RNA, 19 nt, Homo sapiens
  misc_RNA (1)...(19): siRNA sense strand
gggaggccauucucuauca

SEQ ID NO: 49719 - RNA, 19 nt, Homo sapiens
  misc_RNA (1)...(19): siRNA sense strand
ccauuuacauucucaagga

SEQ ID NO: 49720 - RNA, 19 nt, Homo sapiens
  misc_RNA (1)...(19): siRNA sense strand
gggaggccauucucuauca

SEQ ID NO: 49721 - RNA, 19 nt, Homo sapiens
  misc_RNA (1)...(19): siRNA sense strand
ucccaaagaugucuguaaa

SEQ ID NO: 49722 - RNA, 19 nt, Homo sapiens
  misc_RNA (1)...(19): siRNA sense strand
cgaugaaggguuccgauua

SEQ ID NO: 49723 - RNA, 19 nt, Homo sapiens
  misc_RNA (1)...(19): siRNA sense strand
gaucccaauuaaugacuuu

SEQ ID NO: 49724 - RNA, 19 nt, Homo sapiens
  misc_RNA (1)...(19): siRNA sense strand
ucccaaagaugucuguaaa

SEQ ID NO: 49725 - RNA, 19 nt, Homo sapiens
  misc_RNA (1)...(19): siRNA sense strand
ugaauggaaucucgaagga

SEQ ID NO: 49726 - RNA, 19 nt, Homo sapiens
  misc_RNA (1)...(19): siRNA sense strand
ugucuuggcuggaauggaa

SEQ ID NO: 49727 - RNA, 19 nt, Homo sapiens
  misc_RNA (1)...(19): siRNA sense strand
guauaucacuauggagauu

SEQ ID NO: 49728 - RNA, 19 nt, Homo sapiens
  misc_RNA (1)...(19): siRNA sense strand
cagguuggauccagaauca

SEQ ID NO: 49729 - RNA, 19 nt, Homo sapiens
  misc_RNA (1)...(19): siRNA sense strand
ugucuuggcuggaauggaa

SEQ ID NO: 49730 - RNA, 19 nt, Homo sapiens
  misc_RNA (1)...(19): siRNA sense strand
cagguuggauccagaauca

SEQ ID NO: 49731 - RNA, 19 nt, Homo sapiens
  misc_RNA (1)...(19): siRNA sense strand
gauacugucauuugggaua

SEQ ID NO: 49732 - RNA, 19 nt, Homo sapiens
  misc_RNA (1)...(19): siRNA sense strand
gaacaucuuuucacaaugg

SEQ ID NO: 49733 - RNA, 19 nt, Homo sapiens
  misc_RNA (1)...(19): siRNA sense strand
uaagaaggcaccuauuugu

SEQ ID NO: 49734 - RNA, 19 nt, Homo sapiens
  misc_RNA (1)...(19): siRNA sense strand
aaaugaaguuguggaguuu

SEQ ID NO: 49735 - RNA, 19 nt, Homo sapiens
  misc_RNA (1)...(19): siRNA sense strand
aaaugaaguuguggaguuu

SEQ ID NO: 49736 - RNA, 19 nt, Homo sapiens
  misc_RNA (1)...(19): siRNA sense strand
aaaugaaguuguggaguuu

SEQ ID NO: 49737 - RNA, 19 nt, Homo sapiens
  misc_RNA (1)...(19): siRNA sense strand
aaggacaggugcagacgua

SEQ ID NO: 49738 - RNA, 19 nt, Homo sapiens
  misc_RNA (1)...(19): siRNA sense strand
gaaggaguuagaaaugaaa

SEQ ID NO: 49739 - RNA, 19 nt, Homo sapiens
  misc_RNA (1)...(19): siRNA sense strand
ggaggacacguaucucuau

SEQ ID NO: 49740 - RNA, 19 nt, Homo sapiens
  misc_RNA (1)...(19): siRNA sense strand
caaagaugaucaaguuggu

SEQ ID NO: 49741 - RNA, 19 nt, Homo sapiens
  misc_RNA (1)...(19): siRNA sense strand
auggaacggugguaacuua

SEQ ID NO: 49742 - RNA, 19 nt, Homo sapiens
  misc_RNA (1)...(19): siRNA sense strand
ugagccaccuccaaccaua

SEQ ID NO: 49743 - RNA, 19 nt, Homo sapiens
  misc_RNA (1)...(19): siRNA sense strand
gcaccuauuugugagauca

SEQ ID NO: 49744 - RNA, 19 nt, Homo sapiens
  misc_RNA (1)...(19): siRNA sense strand
gaaauaucuuacacaugug

SEQ ID NO: 49745 - RNA, 19 nt, Homo sapiens
  misc_RNA (1)...(19): siRNA sense strand
ggucaagucccaaagaugu

SEQ ID NO: 49746 - RNA, 19 nt, Homo sapiens
  misc_RNA (1)...(19): siRNA sense strand
ggucaagucccaaagaugu

SEQ ID NO: 49747 - RNA, 19 nt, Homo sapiens
  misc_RNA (1)...(19): siRNA sense strand
gugcagacguaaaucaugu

SEQ ID NO: 49748 - RNA, 19 nt, Homo sapiens
  misc_RNA (1)...(19): siRNA sense strand
ggaagaccguuuucuauca

SEQ ID NO: 49749 - RNA, 19 nt, Homo sapiens
  misc_RNA (1)...(19): siRNA sense strand
gaagacaacuguagacgaa

SEQ ID NO: 49750 - RNA, 19 nt, Homo sapiens
  misc_RNA (1)...(19): siRNA sense strand
ggacaucuuugaauuauga

SEQ ID NO: 49751 - RNA, 19 nt, Homo sapiens
  misc_RNA (1)...(19): siRNA sense strand
gguacgaucuucuuuauuu

SEQ ID NO: 49752 - RNA, 19 nt, Homo sapiens
  misc_RNA (1)...(19): siRNA sense strand
ggagaacggucaauauauu

SEQ ID NO: 49753 - RNA, 19 nt, Homo sapiens
  misc_RNA (1)...(19): siRNA sense strand
gaugaaggguuccgauuaa

SEQ ID NO: 49754 - RNA, 19 nt, Homo sapiens
  misc_RNA (1)...(19): siRNA sense strand
cagcaaagaugaucaaguu

SEQ ID NO: 49755 - RNA, 19 nt, Homo sapiens
  misc_RNA (1)...(19): siRNA sense strand
gcaaagaaguaaauuguag

SEQ ID NO: 49756 - RNA, 19 nt, Homo sapiens
  misc_RNA (1)...(19): siRNA sense strand
gaagugaaauccugugaug

SEQ ID NO: 49757 - RNA, 19 nt, Homo sapiens
  misc_RNA (1)...(19): siRNA sense strand
gaagugaaauccugugaug

SEQ ID NO: 49758 - RNA, 19 nt, Homo sapiens
  misc_RNA (1)...(19): siRNA sense strand
gaagugaaauccugugaug

SEQ ID NO: 49759 - RNA, 19 nt, Homo sapiens
  misc_RNA (1)...(19): siRNA sense strand
aaagaugucuguaaacgua

SEQ ID NO: 49760 - RNA, 19 nt, Homo sapiens
  misc_RNA (1)...(19): siRNA sense strand
agaaguggcuauccauuua

SEQ ID NO: 49761 - RNA, 19 nt, Homo sapiens
  misc_RNA (1)...(19): siRNA sense strand
gcacgaagccgccaauuug

SEQ ID NO: 49762 - RNA, 19 nt, Homo sapiens
  misc_RNA (1)...(19): siRNA sense strand
aaagaugucuguaaacgua

SEQ ID NO: 49763 - RNA, 19 nt, Homo sapiens
  misc_RNA (1)...(19): siRNA sense strand
gcacgaagccgccaauuug

SEQ ID NO: 49764 - RNA, 19 nt, Homo sapiens
  misc_RNA (1)...(19): siRNA sense strand
aaagaugucuguaaacgua

SEQ ID NO: 49765 - RNA, 19 nt, Homo sapiens
  misc_RNA (1)...(19): siRNA sense strand
gcacgaagccgccaauuug

SEQ ID NO: 49766 - RNA, 19 nt, Homo sapiens
  misc_RNA (1)...(19): siRNA sense strand
gaacauaucuuuuguccaa

SEQ ID NO: 49767 - RNA, 19 nt, Homo sapiens
  misc_RNA (1)...(19): siRNA sense strand
gaugaaggguuucgcuuaa

SEQ ID NO: 49768 - RNA, 19 nt, Homo sapiens
  misc_RNA (1)...(19): siRNA sense strand
gagauuaugugacuuugaa

SEQ ID NO: 49769 - RNA, 19 nt, Homo sapiens
  misc_RNA (1)...(19): siRNA sense strand
gauaagaaggcaccuauuu

SEQ ID NO: 49770 - RNA, 19 nt, Homo sapiens
  misc_RNA (1)...(19): siRNA sense strand
uaaaugaaguuguggaguu

SEQ ID NO: 49771 - RNA, 19 nt, Homo sapiens
  misc_RNA (1)...(19): siRNA sense strand
uaaaugaaguuguggaguu

SEQ ID NO: 49772 - RNA, 19 nt, Homo sapiens
  misc_RNA (1)...(19): siRNA sense strand
uaaaugaaguuguggaguu

SEQ ID NO: 49773 - RNA, 19 nt, Homo sapiens
  misc_RNA (1)...(19): siRNA sense strand
uaaaugaaguuguggaguu

SEQ ID NO: 49774 - RNA, 19 nt, Homo sapiens
  misc_RNA (1)...(19): siRNA sense strand
gcagugaaauccugugaug

SEQ ID NO: 49775 - RNA, 19 nt, Homo sapiens
  misc_RNA (1)...(19): siRNA sense strand
gaaauccugugaugacuuc

SEQ ID NO: 49776 - RNA, 19 nt, Homo sapiens
  misc_RNA (1)...(19): siRNA sense strand
ucucauaguuggcacuuua

SEQ ID NO: 49777 - RNA, 19 nt, Homo sapiens
  misc_RNA (1)...(19): siRNA sense strand
gaaauccugugaugacuuc

SEQ ID NO: 49778 - RNA, 19 nt, Homo sapiens
  misc_RNA (1)...(19): siRNA sense strand
ugagaagccuuuggaauaa

SEQ ID NO: 49779 - RNA, 19 nt, Homo sapiens
  misc_RNA (1)...(19): siRNA sense strand
gaaauccugugaugacuuc

SEQ ID NO: 49780 - RNA, 19 nt, Homo sapiens
  misc_RNA (1)...(19): siRNA sense strand
gaaauccugugaugacuuc

SEQ ID NO: 49781 - RNA, 19 nt, Homo sapiens
  misc_RNA (1)...(19): siRNA sense strand
gaaauccugugaugacuuc

SEQ ID NO: 49782 - RNA, 19 nt, Homo sapiens
  misc_RNA (1)...(19): siRNA sense strand
ggagccaauuggaucauua

SEQ ID NO: 49783 - RNA, 19 nt, Homo sapiens
  misc_RNA (1)...(19): siRNA sense strand
agacguaaaucaugucgua

SEQ ID NO: 49784 - RNA, 19 nt, Homo sapiens
  misc_RNA (1)...(19): siRNA sense strand
caaaugggagccagaguua

SEQ ID NO: 49785 - RNA, 19 nt, Homo sapiens
  misc_RNA (1)...(19): siRNA sense strand
ccagaacccuucaauggaa

SEQ ID NO: 49786 - RNA, 19 nt, Homo sapiens
  misc_RNA (1)...(19): siRNA sense strand
caguuuggaucaacaguua

SEQ ID NO: 49787 - RNA, 19 nt, Homo sapiens
  misc_RNA (1)...(19): siRNA sense strand
gcaauuagaguaccaggaa

SEQ ID NO: 49788 - RNA, 19 nt, Homo sapiens
  misc_RNA (1)...(19): siRNA sense strand
ucacucaucugcugaaugu

SEQ ID NO: 49789 - RNA, 19 nt, Homo sapiens
  misc_RNA (1)...(19): siRNA sense strand
ucacucaucugcugaaugu

SEQ ID NO: 49790 - RNA, 19 nt, Homo sapiens
  misc_RNA (1)...(19): siRNA sense strand
ucacucaucugcugaaugu

SEQ ID NO: 49791 - RNA, 19 nt, Homo sapiens
  misc_RNA (1)...(19): siRNA sense strand
acacguaucucuauaucuu

SEQ ID NO: 49792 - RNA, 19 nt, Homo sapiens
  misc_RNA (1)...(19): siRNA sense strand
gaggacacguaucucuaua

SEQ ID NO: 49793 - RNA, 19 nt, Homo sapiens
  misc_RNA (1)...(19): siRNA sense strand
ggacacguaucucuauauc

SEQ ID NO: 49794 - RNA, 19 nt, Homo sapiens
  misc_RNA (1)...(19): siRNA sense strand
ccagagcaguuuccauuug

SEQ ID NO: 49795 - RNA, 19 nt, Homo sapiens
  misc_RNA (1)...(19): siRNA sense strand
cgaaggaguuagaaaugaa

SEQ ID NO: 49796 - RNA, 19 nt, Homo sapiens
  misc_RNA (1)...(19): siRNA sense strand
gcaucugacuuucccauug

SEQ ID NO: 49797 - RNA, 19 nt, Homo sapiens
  misc_RNA (1)...(19): siRNA sense strand
ugucuuggcuggaaugaaa

SEQ ID NO: 49798 - RNA, 19 nt, Homo sapiens
  misc_RNA (1)...(19): siRNA sense strand
gcaucugacuuucccauug

SEQ ID NO: 49799 - RNA, 19 nt, Homo sapiens
  misc_RNA (1)...(19): siRNA sense strand
gcaucugacuuucccauug

SEQ ID NO: 49800 - RNA, 19 nt, Homo sapiens
  misc_RNA (1)...(19): siRNA sense strand
caguucggaucccaaauua

SEQ ID NO: 49801 - RNA, 19 nt, Homo sapiens
  misc_RNA (1)...(19): siRNA sense strand
gaaagguguuugagcuugu

SEQ ID NO: 49802 - RNA, 19 nt, Homo sapiens
  misc_RNA (1)...(19): siRNA sense strand
ggacaucuuuaaaguacga

SEQ ID NO: 49803 - RNA, 19 nt, Homo sapiens
  misc_RNA (1)...(19): siRNA sense strand
gaaagguguuugagcuugu

SEQ ID NO: 49804 - RNA, 19 nt, Homo sapiens
  misc_RNA (1)...(19): siRNA sense strand
ggacaucuuuaaaguacga

SEQ ID NO: 49805 - RNA, 19 nt, Homo sapiens
  misc_RNA (1)...(19): siRNA sense strand
gaaagguguuugagcuugu

SEQ ID NO: 49806 - RNA, 19 nt, Homo sapiens
  misc_RNA (1)...(19): siRNA sense strand
ggacaucuuuaaaguacga

SEQ ID NO: 49807 - RNA, 19 nt, Homo sapiens
  misc_RNA (1)...(19): siRNA sense strand
gaaagguguuugagcuugu

SEQ ID NO: 49808 - RNA, 19 nt, Homo sapiens
  misc_RNA (1)...(19): siRNA sense strand
uaaaggauaccgacucauu

SEQ ID NO: 49809 - RNA, 19 nt, Homo sapiens
  misc_RNA (1)...(19): siRNA sense strand
gaucaaaggcauccaguuc

SEQ ID NO: 49810 - RNA, 19 nt, Homo sapiens
  misc_RNA (1)...(19): siRNA sense strand
gaacucugcaaacaaauga

SEQ ID NO: 49811 - RNA, 19 nt, Homo sapiens
  misc_RNA (1)...(19): siRNA sense strand
gcacagcuccagaaguuga

SEQ ID NO: 49812 - RNA, 19 nt, Homo sapiens
  misc_RNA (1)...(19): siRNA sense strand
uuaaagggcaguuccguua

SEQ ID NO: 49813 - RNA, 19 nt, Homo sapiens
  misc_RNA (1)...(19): siRNA sense strand
gaauauugguaucugacaa

SEQ ID NO: 49814 - RNA, 19 nt, Homo sapiens
  misc_RNA (1)...(19): siRNA sense strand
gaauauugguaucugacaa

SEQ ID NO: 49815 - RNA, 19 nt, Homo sapiens
  misc_RNA (1)...(19): siRNA sense strand
gaauauugguaucugacaa

SEQ ID NO: 49816 - RNA, 19 nt, Homo sapiens
  misc_RNA (1)...(19): siRNA sense strand
gaauauugguaucugacaa

SEQ ID NO: 49817 - RNA, 19 nt, Homo sapiens
  misc_RNA (1)...(19): siRNA sense strand
ucaauggaauggugcauau

SEQ ID NO: 49818 - RNA, 19 nt, Homo sapiens
  misc_RNA (1)...(19): siRNA sense strand
cuaccaaccuaacugauga

SEQ ID NO: 49819 - RNA, 19 nt, Homo sapiens
  misc_RNA (1)...(19): siRNA sense strand
guccuacgaucccaauuaa

SEQ ID NO: 49820 - RNA, 19 nt, Homo sapiens
  misc_RNA (1)...(19): siRNA sense strand
cgugugcuauuuccacuua

SEQ ID NO: 49821 - RNA, 19 nt, Homo sapiens
  misc_RNA (1)...(19): siRNA sense strand
guucggaucccaaauuaaa

SEQ ID NO: 49822 - RNA, 19 nt, Homo sapiens
  misc_RNA (1)...(19): siRNA sense strand
gcaacaauagaacaucuuu

SEQ ID NO: 49823 - RNA, 19 nt, Homo sapiens
  misc_RNA (1)...(19): siRNA sense strand
ggaaugagaagccuuugga

SEQ ID NO: 49824 - RNA, 19 nt, Homo sapiens
  misc_RNA (1)...(19): siRNA sense strand
gcaguuccguuagucauug

SEQ ID NO: 49825 - RNA, 19 nt, Homo sapiens
  misc_RNA (1)...(19): siRNA sense strand
gcaccaacagagagaauuu

SEQ ID NO: 49826 - RNA, 19 nt, Homo sapiens
  misc_RNA (1)...(19): siRNA sense strand
gcaccaacagagagaauuu

SEQ ID NO: 49827 - RNA, 19 nt, Homo sapiens
  misc_RNA (1)...(19): siRNA sense strand
gcaccaacagagagaauuu

SEQ ID NO: 49828 - RNA, 19 nt, Homo sapiens
  misc_RNA (1)...(19): siRNA sense strand
gcaccaacagagagaauuu

SEQ ID NO: 49829 - RNA, 19 nt, Homo sapiens
  misc_RNA (1)...(19): siRNA sense strand
gggaggccauucucuauca

SEQ ID NO: 49830 - RNA, 19 nt, Homo sapiens
  misc_RNA (1)...(19): siRNA sense strand
ccauuuacauucucaagga

SEQ ID NO: 49831 - RNA, 19 nt, Homo sapiens
  misc_RNA (1)...(19): siRNA sense strand
gggaggccauucucuauca

SEQ ID NO: 49832 - RNA, 19 nt, Homo sapiens
  misc_RNA (1)...(19): siRNA sense strand
gggaggccauucucuauca

SEQ ID NO: 49833 - RNA, 19 nt, Homo sapiens
  misc_RNA (1)...(19): siRNA sense strand
ucccaaagaugucuguaaa

SEQ ID NO: 49834 - RNA, 19 nt, Homo sapiens
  misc_RNA (1)...(19): siRNA sense strand
cgaugaaggguuccgauua

SEQ ID NO: 49835 - RNA, 19 nt, Homo sapiens
  misc_RNA (1)...(19): siRNA sense strand
gaucccaauuaaugacuuu

SEQ ID NO: 49836 - RNA, 19 nt, Homo sapiens
  misc_RNA (1)...(19): siRNA sense strand
ucccaaagaugucuguaaa

SEQ ID NO: 49837 - RNA, 19 nt, Homo sapiens
  misc_RNA (1)...(19): siRNA sense strand
ucccaaagaugucuguaaa

SEQ ID NO: 49838 - RNA, 19 nt, Homo sapiens
  misc_RNA (1)...(19): siRNA sense strand
ugaauggaaucucgaagga

SEQ ID NO: 49839 - RNA, 19 nt, Homo sapiens
  misc_RNA (1)...(19): siRNA sense strand
ugucuuggcuggaauggaa

SEQ ID NO: 49840 - RNA, 19 nt, Homo sapiens
  misc_RNA (1)...(19): siRNA sense strand
guauaucacuauggagauu

SEQ ID NO: 49841 - RNA, 19 nt, Homo sapiens
  misc_RNA (1)...(19): siRNA sense strand
cagguuggauccagaauca

SEQ ID NO: 49842 - RNA, 19 nt, Homo sapiens
  misc_RNA (1)...(19): siRNA sense strand
ugucuuggcuggaauggaa

SEQ ID NO: 49843 - RNA, 19 nt, Homo sapiens
  misc_RNA (1)...(19): siRNA sense strand
cagguuggauccagaauca

SEQ ID NO: 49844 - RNA, 19 nt, Homo sapiens
  misc_RNA (1)...(19): siRNA sense strand
ugucuuggcuggaauggaa

SEQ ID NO: 49845 - RNA, 19 nt, Homo sapiens
  misc_RNA (1)...(19): siRNA sense strand
cagguuggauccagaauca

SEQ ID NO: 49846 - RNA, 19 nt, Homo sapiens
  misc_RNA (1)...(19): siRNA sense strand
aaaugaaguuguggaguuu

SEQ ID NO: 49847 - RNA, 19 nt, Homo sapiens
  misc_RNA (1)...(19): siRNA sense strand
gaacaucuuuucacaaugg

SEQ ID NO: 49848 - RNA, 19 nt, Homo sapiens
  misc_RNA (1)...(19): siRNA sense strand
uaagaaggcaccuauuugu

SEQ ID NO: 49849 - RNA, 19 nt, Homo sapiens
  misc_RNA (1)...(19): siRNA sense strand
gaaccaaccugucaaguga

SEQ ID NO: 49850 - RNA, 19 nt, Homo sapiens
  misc_RNA (1)...(19): siRNA sense strand
gcaaagggcuagaagauuc

SEQ ID NO: 49851 - RNA, 19 nt, Homo sapiens
  misc_RNA (1)...(19): siRNA sense strand
aaacaaagaugcaggcaaa

SEQ ID NO: 49852 - RNA, 19 nt, Homo sapiens
  misc_RNA (1)...(19): siRNA sense strand
ggacuuaccauuauucuga

SEQ ID NO: 49853 - RNA, 19 nt, Homo sapiens
  misc_RNA (1)...(19): siRNA sense strand
gaagauaggaggaauaugg

SEQ ID NO: 49854 - RNA, 19 nt, Homo sapiens
  misc_RNA (1)...(19): siRNA sense strand
ggagaucuauaucaagaga

SEQ ID NO: 49855 - RNA, 19 nt, Homo sapiens
  misc_RNA (1)...(19): siRNA sense strand
aaacuuaacugggauugaa

SEQ ID NO: 49856 - RNA, 19 nt, Homo sapiens
  misc_RNA (1)...(19): siRNA sense strand
ggaaucuggucaaauccua

SEQ ID NO: 49857 - RNA, 19 nt, Homo sapiens
  misc_RNA (1)...(19): siRNA sense strand
ggacaaaaguuucucaaug

SEQ ID NO: 49858 - RNA, 19 nt, Homo sapiens
  misc_RNA (1)...(19): siRNA sense strand
uaaaggcagcccucuguua

SEQ ID NO: 49859 - RNA, 19 nt, Homo sapiens
  misc_RNA (1)...(19): siRNA sense strand
gacaaaaguuucucaauga

SEQ ID NO: 49860 - RNA, 19 nt, Homo sapiens
  misc_RNA (1)...(19): siRNA sense strand
guggagaucuauaucaaga

SEQ ID NO: 49861 - RNA, 19 nt, Homo sapiens
  misc_RNA (1)...(19): siRNA sense strand
uuaaggagggugauuauaa

SEQ ID NO: 49862 - RNA, 19 nt, Homo sapiens
  misc_RNA (1)...(19): siRNA sense strand
ggagaagacucugccuuuc

SEQ ID NO: 49863 - RNA, 19 nt, Homo sapiens
  misc_RNA (1)...(19): siRNA sense strand
uauggaacaucuucaaguu

SEQ ID NO: 49864 - RNA, 19 nt, Homo sapiens
  misc_RNA (1)...(19): siRNA sense strand
uaacugggauugaagaaac

SEQ ID NO: 49865 - RNA, 19 nt, Homo sapiens
  misc_RNA (1)...(19): siRNA sense strand
ggguuggcauuuaucauuu

SEQ ID NO: 49866 - RNA, 19 nt, Homo sapiens
  misc_RNA (1)...(19): siRNA sense strand
gaaaaccauuugugaauca

SEQ ID NO: 49867 - RNA, 19 nt, Homo sapiens
  misc_RNA (1)...(19): siRNA sense strand
gucaaauccuaguccaaua

SEQ ID NO: 49868 - RNA, 19 nt, Homo sapiens
  misc_RNA (1)...(19): siRNA sense strand
ggacgugggugggaaccaa

SEQ ID NO: 49869 - RNA, 19 nt, Homo sapiens
  misc_RNA (1)...(19): siRNA sense strand
gaaccgacugcuggacuua

SEQ ID NO: 49870 - RNA, 19 nt, Homo sapiens
  misc_RNA (1)...(19): siRNA sense strand
gagaauguguagaaaucau

SEQ ID NO: 49871 - RNA, 19 nt, Homo sapiens
  misc_RNA (1)...(19): siRNA sense strand
gcguggagaucuauaucaa

SEQ ID NO: 49872 - RNA, 19 nt, Homo sapiens
  misc_RNA (1)...(19): siRNA sense strand
ggaaccgacugcuggacuu

SEQ ID NO: 49873 - RNA, 19 nt, Homo sapiens
  misc_RNA (1)...(19): siRNA sense strand
ccaagagaaguaugaauga

SEQ ID NO: 49874 - RNA, 19 nt, Homo sapiens
  misc_RNA (1)...(19): siRNA sense strand
gguggacaaugcucuguug

SEQ ID NO: 49875 - RNA, 19 nt, Homo sapiens
  misc_RNA (1)...(19): siRNA sense strand
cagagggacuuauggaaca

SEQ ID NO: 49876 - RNA, 19 nt, Homo sapiens
  misc_RNA (1)...(19): siRNA sense strand
gauaggaauccggaagaua

SEQ ID NO: 49877 - RNA, 19 nt, Homo sapiens
  misc_RNA (1)...(19): siRNA sense strand
gagaagacucugccuuuca

SEQ ID NO: 49878 - RNA, 19 nt, Homo sapiens
  misc_RNA (1)...(19): siRNA sense strand
cgagacaauuacacagauu

SEQ ID NO: 49879 - RNA, 19 nt, Homo sapiens
  misc_RNA (1)...(19): siRNA sense strand
gucaagugauucaguguga

SEQ ID NO: 49880 - RNA, 19 nt, Homo sapiens
  misc_RNA (1)...(19): siRNA sense strand
ggacuuauggaacaucuuc

SEQ ID NO: 49881 - RNA, 19 nt, Homo sapiens
  misc_RNA (1)...(19): siRNA sense strand
gagacaauuacacagauuu

SEQ ID NO: 49882 - RNA, 19 nt, Homo sapiens
  misc_RNA (1)...(19): siRNA sense strand
uaaggagggugauuauaac

SEQ ID NO: 49883 - RNA, 19 nt, Homo sapiens
  misc_RNA (1)...(19): siRNA sense strand
ucuggaaucuggucaaauc

SEQ ID NO: 49884 - RNA, 19 nt, Homo sapiens
  misc_RNA (1)...(19): siRNA sense strand
cagcugcucugaaggaaca

SEQ ID NO: 49885 - RNA, 19 nt, Homo sapiens
  misc_RNA (1)...(19): siRNA sense strand
uggagaauguguagaaauc

SEQ ID NO: 49886 - RNA, 19 nt, Homo sapiens
  misc_RNA (1)...(19): siRNA sense strand
uggaacaucuucaaguugu

SEQ ID NO: 49887 - RNA, 19 nt, Homo sapiens
  misc_RNA (1)...(19): siRNA sense strand
agauuuaguugccauacaa

SEQ ID NO: 49888 - RNA, 19 nt, Homo sapiens
  misc_RNA (1)...(19): siRNA sense strand
gaagaaaaccauuugugaa

SEQ ID NO: 49889 - RNA, 19 nt, Homo sapiens
  misc_RNA (1)...(19): siRNA sense strand
cugcuggacuuaccauuau

SEQ ID NO: 49890 - RNA, 19 nt, Homo sapiens
  misc_RNA (1)...(19): siRNA sense strand
gcagagaacuggggagaug

SEQ ID NO: 49891 - RNA, 19 nt, Homo sapiens
  misc_RNA (1)...(19): siRNA sense strand
ggucaaauccuaguccaau

SEQ ID NO: 49892 - RNA, 19 nt, Homo sapiens
  misc_RNA (1)...(19): siRNA sense strand
caucuggaaucuggucaaa

SEQ ID NO: 49893 - RNA, 19 nt, Homo sapiens
  misc_RNA (1)...(19): siRNA sense strand
gaaggaacaaacuuaacug

SEQ ID NO: 49894 - RNA, 19 nt, Homo sapiens
  misc_RNA (1)...(19): siRNA sense strand
caaagaugcaggcaaaugg

SEQ ID NO: 49895 - RNA, 19 nt, Homo sapiens
  misc_RNA (1)...(19): siRNA sense strand
gauuaaggagggugauuau

SEQ ID NO: 49896 - RNA, 19 nt, Homo sapiens
  misc_RNA (1)...(19): siRNA sense strand
gauucugccgagacaauua

SEQ ID NO: 49897 - RNA, 19 nt, Homo sapiens
  misc_RNA (1)...(19): siRNA sense strand
cgaugacgccugccacaaa

SEQ ID NO: 49898 - RNA, 19 nt, Homo sapiens
  misc_RNA (1)...(19): siRNA sense strand
gaugacgccugccacaaac

SEQ ID NO: 49899 - RNA, 19 nt, Homo sapiens
  misc_RNA (1)...(19): siRNA sense strand
ccauggagaauguguagaa

SEQ ID NO: 49900 - RNA, 19 nt, Homo sapiens
  misc_RNA (1)...(19): siRNA sense strand
aaacaaggcggaaauugag

SEQ ID NO: 49901 - RNA, 19 nt, Homo sapiens
  misc_RNA (1)...(19): siRNA sense strand
gguuggcauuuaucauuug

SEQ ID NO: 49902 - RNA, 19 nt, Homo sapiens
  misc_RNA (1)...(19): siRNA sense strand
ugauuaaggagggugauua

SEQ ID NO: 49903 - RNA, 19 nt, Homo sapiens
  misc_RNA (1)...(19): siRNA sense strand
ucaaauccuaguccaauau

SEQ ID NO: 49904 - RNA, 19 nt, Homo sapiens
  misc_RNA (1)...(19): siRNA sense strand
uggagaagacucugccuuu

SEQ ID NO: 49905 - RNA, 19 nt, Homo sapiens
  misc_RNA (1)...(19): siRNA sense strand
cauggagaauguguagaaa

SEQ ID NO: 49906 - RNA, 19 nt, Homo sapiens
  misc_RNA (1)...(19): siRNA sense strand
gacuuaccauuauucugaa

SEQ ID NO: 49907 - RNA, 19 nt, Homo sapiens
  misc_RNA (1)...(19): siRNA sense strand
ucucuggguuggcauuuau

SEQ ID NO: 49908 - RNA, 19 nt, Homo sapiens
  misc_RNA (1)...(19): siRNA sense strand
ccaguggcagucaugguua

SEQ ID NO: 49909 - RNA, 19 nt, Homo sapiens
  misc_RNA (1)...(19): siRNA sense strand
gcacccagagggacuuaug

SEQ ID NO: 49910 - RNA, 19 nt, Homo sapiens
  misc_RNA (1)...(19): siRNA sense strand
ggaacaucuucaaguugug

SEQ ID NO: 49911 - RNA, 19 nt, Homo sapiens
  misc_RNA (1)...(19): siRNA sense strand
caagagaaacaaagaugca

SEQ ID NO: 49912 - RNA, 19 nt, Homo sapiens
  misc_RNA (1)...(19): siRNA sense strand
ccaacaacaagaagaacaa

SEQ ID NO: 49913 - RNA, 19 nt, Homo sapiens
  misc_RNA (1)...(19): siRNA sense strand
ggaagaagaaaaccauuug

SEQ ID NO: 49914 - RNA, 19 nt, Homo sapiens
  misc_RNA (1)...(19): siRNA sense strand
uaauuacaccugcaacugu

SEQ ID NO: 49915 - RNA, 19 nt, Homo sapiens
  misc_RNA (1)...(19): siRNA sense strand
ggcaaagggcuagaagauu

SEQ ID NO: 49916 - RNA, 19 nt, Homo sapiens
  misc_RNA (1)...(19): siRNA sense strand
aggcggaaauugaguaucu

SEQ ID NO: 49917 - RNA, 19 nt, Homo sapiens
  misc_RNA (1)...(19): siRNA sense strand
caagagaaguaugaaugac

SEQ ID NO: 49918 - RNA, 19 nt, Homo sapiens
  misc_RNA (1)...(19): siRNA sense strand
caaauccuaguccaauaug

SEQ ID NO: 49919 - RNA, 19 nt, Homo sapiens
  misc_RNA (1)...(19): siRNA sense strand
ucuaucagcaccagauuug

SEQ ID NO: 49920 - RNA, 19 nt, Homo sapiens
  misc_RNA (1)...(19): siRNA sense strand
gaauguguagaaaucauca

SEQ ID NO: 49921 - RNA, 19 nt, Homo sapiens
  misc_RNA (1)...(19): siRNA sense strand
ggugggaaccaacaaaucu

SEQ ID NO: 49922 - RNA, 19 nt, Homo sapiens
  misc_RNA (1)...(19): siRNA sense strand
ccgagacaauuacacagau

SEQ ID NO: 49923 - RNA, 19 nt, Homo sapiens
  misc_RNA (1)...(19): siRNA sense strand
cagauuuaguugccauaca

SEQ ID NO: 49924 - RNA, 19 nt, Homo sapiens
  misc_RNA (1)...(19): siRNA sense strand
acaacaagaagaacaagga

SEQ ID NO: 49925 - RNA, 19 nt, Homo sapiens
  misc_RNA (1)...(19): siRNA sense strand
agaagacucugccuuucag

SEQ ID NO: 49926 - RNA, 19 nt, Homo sapiens
  misc_RNA (1)...(19): siRNA sense strand
ggacugcguggagaucuau

SEQ ID NO: 49927 - RNA, 19 nt, Homo sapiens
  misc_RNA (1)...(19): siRNA sense strand
gagauggugagcccaacaa

SEQ ID NO: 49928 - RNA, 19 nt, Homo sapiens
  misc_RNA (1)...(19): siRNA sense strand
ggagaauguguagaaauca

SEQ ID NO: 49929 - RNA, 19 nt, Homo sapiens
  misc_RNA (1)...(19): siRNA sense strand
caguggccauggagaaugu

SEQ ID NO: 49930 - RNA, 19 nt, Homo sapiens
  misc_RNA (1)...(19): siRNA sense strand
caugguuacugcauucucu

SEQ ID NO: 49931 - RNA, 19 nt, Homo sapiens
  misc_RNA (1)...(19): siRNA sense strand
caaccugucaagugauuca

SEQ ID NO: 49932 - RNA, 19 nt, Homo sapiens
  misc_RNA (1)...(19): siRNA sense strand
ugaaggaacaaacuuaacu

SEQ ID NO: 49933 - RNA, 19 nt, Homo sapiens
  misc_RNA (1)...(19): siRNA sense strand
ucugaaggaacaaacuuaa

SEQ ID NO: 49934 - RNA, 19 nt, Homo sapiens
  misc_RNA (1)...(19): siRNA sense strand
gcucugaaggaacaaacuu

SEQ ID NO: 49935 - RNA, 19 nt, Homo sapiens
  misc_RNA (1)...(19): siRNA sense strand
acaaggcggaaauugagua

SEQ ID NO: 49936 - RNA, 19 nt, Homo sapiens
  misc_RNA (1)...(19): siRNA sense strand
uugggaaacuucagcuuca

SEQ ID NO: 49937 - RNA, 19 nt, Homo sapiens
  misc_RNA (1)...(19): siRNA sense strand
uugaguaucuggagaagac

SEQ ID NO: 49938 - RNA, 19 nt, Homo sapiens
  misc_RNA (1)...(19): siRNA sense strand
uggguuggcauuuaucauu

SEQ ID NO: 49939 - RNA, 19 nt, Homo sapiens
  misc_RNA (1)...(19): siRNA sense strand
uggcaaagggcuagaagau

SEQ ID NO: 49940 - RNA, 19 nt, Homo sapiens
  misc_RNA (1)...(19): siRNA sense strand
ugacgccugccacaaacua

SEQ ID NO: 49941 - RNA, 19 nt, Homo sapiens
  misc_RNA (1)...(19): siRNA sense strand
acaaagaugcaggcaaaug

SEQ ID NO: 49942 - RNA, 19 nt, Homo sapiens
  misc_RNA (1)...(19): siRNA sense strand
cggaagauaggaggaauau

SEQ ID NO: 49943 - RNA, 19 nt, Homo sapiens
  misc_RNA (1)...(19): siRNA sense strand
auaggaauccggaagauag

SEQ ID NO: 49944 - RNA, 19 nt, Homo sapiens
  misc_RNA (1)...(19): siRNA sense strand
uccaagagaaguaugaaug

SEQ ID NO: 49945 - RNA, 19 nt, Homo sapiens
  misc_RNA (1)...(19): siRNA sense strand
agucaugguuacugcauuc

SEQ ID NO: 49946 - RNA, 19 nt, Homo sapiens
  misc_RNA (1)...(19): siRNA sense strand
gagcacccagagggacuua

SEQ ID NO: 49947 - RNA, 19 nt, Homo sapiens
  misc_RNA (1)...(19): siRNA sense strand
gccgagacaauuacacaga

SEQ ID NO: 49948 - RNA, 19 nt, Homo sapiens
  misc_RNA (1)...(19): siRNA sense strand
gcaguggccauggagaaug

SEQ ID NO: 49949 - RNA, 19 nt, Homo sapiens
  misc_RNA (1)...(19): siRNA sense strand
gggagauagugaugaagua

SEQ ID NO: 49950 - RNA, 19 nt, Homo sapiens
  misc_RNA (1)...(19): siRNA sense strand
gaaguacauccauuauaag

SEQ ID NO: 49951 - RNA, 19 nt, Homo sapiens
  misc_RNA (1)...(19): siRNA sense strand
ggaggauuguggccuucuu

SEQ ID NO: 49952 - RNA, 19 nt, Homo sapiens
  misc_RNA (1)...(19): siRNA sense strand
ggauuguggccuucuuuga

SEQ ID NO: 49953 - RNA, 19 nt, Homo sapiens
  misc_RNA (1)...(19): siRNA sense strand
gaggauuguggccuucuuu

SEQ ID NO: 49954 - RNA, 19 nt, Homo sapiens
  misc_RNA (1)...(19): siRNA sense strand
agauagugaugaaguacau

SEQ ID NO: 49955 - RNA, 19 nt, Homo sapiens
  misc_RNA (1)...(19): siRNA sense strand
gauuguggccuucuuugag

SEQ ID NO: 49956 - RNA, 19 nt, Homo sapiens
  misc_RNA (1)...(19): siRNA sense strand
cccuguggaugacugagua

SEQ ID NO: 49957 - RNA, 19 nt, Homo sapiens
  misc_RNA (1)...(19): siRNA sense strand
cgagugggaugcgggagau

SEQ ID NO: 49958 - RNA, 19 nt, Homo sapiens
  misc_RNA (1)...(19): siRNA sense strand
gagauagugaugaaguaca

SEQ ID NO: 49959 - RNA, 19 nt, Homo sapiens
  misc_RNA (1)...(19): siRNA sense strand
ggagauagugaugaaguac

SEQ ID NO: 49960 - RNA, 19 nt, Homo sapiens
  misc_RNA (1)...(19): siRNA sense strand
gggagauagugaugaagua

SEQ ID NO: 49961 - RNA, 19 nt, Homo sapiens
  misc_RNA (1)...(19): siRNA sense strand
gaaguacauccauuauaag

SEQ ID NO: 49962 - RNA, 19 nt, Homo sapiens
  misc_RNA (1)...(19): siRNA sense strand
ggaggauuguggccuucuu

SEQ ID NO: 49963 - RNA, 19 nt, Homo sapiens
  misc_RNA (1)...(19): siRNA sense strand
ggauuguggccuucuuuga

SEQ ID NO: 49964 - RNA, 19 nt, Homo sapiens
  misc_RNA (1)...(19): siRNA sense strand
gaggauuguggccuucuuu

SEQ ID NO: 49965 - RNA, 19 nt, Homo sapiens
  misc_RNA (1)...(19): siRNA sense strand
agauagugaugaaguacau

SEQ ID NO: 49966 - RNA, 19 nt, Homo sapiens
  misc_RNA (1)...(19): siRNA sense strand
gauuguggccuucuuugag

SEQ ID NO: 49967 - RNA, 19 nt, Homo sapiens
  misc_RNA (1)...(19): siRNA sense strand
cccuguggaugacugagua

SEQ ID NO: 49968 - RNA, 19 nt, Homo sapiens
  misc_RNA (1)...(19): siRNA sense strand
cgagugggaugcgggagau

SEQ ID NO: 49969 - RNA, 19 nt, Homo sapiens
  misc_RNA (1)...(19): siRNA sense strand
gagauagugaugaaguaca

SEQ ID NO: 49970 - RNA, 19 nt, Homo sapiens
  misc_RNA (1)...(19): siRNA sense strand
ggagauagugaugaaguac

SEQ ID NO: 49971 - RNA, 19 nt, Homo sapiens
  misc_RNA (1)...(19): siRNA sense strand
ggacgagugugccgugugu

SEQ ID NO: 49972 - RNA, 19 nt, Homo sapiens
  misc_RNA (1)...(19): siRNA sense strand
gaccuggagucccuucuga

SEQ ID NO: 49973 - RNA, 19 nt, Homo sapiens
  misc_RNA (1)...(19): siRNA sense strand
gaagaaugaggacgagugu

SEQ ID NO: 49974 - RNA, 19 nt, Homo sapiens
  misc_RNA (1)...(19): siRNA sense strand
gugcugcgguguacucacu

SEQ ID NO: 49975 - RNA, 19 nt, Homo sapiens
  misc_RNA (1)...(19): siRNA sense strand
ggacgagugugccgugugu

SEQ ID NO: 49976 - RNA, 19 nt, Homo sapiens
  misc_RNA (1)...(19): siRNA sense strand
gaccuggagucccuucuga

SEQ ID NO: 49977 - RNA, 19 nt, Homo sapiens
  misc_RNA (1)...(19): siRNA sense strand
gaagaaugaggacgagugu

SEQ ID NO: 49978 - RNA, 19 nt, Homo sapiens
  misc_RNA (1)...(19): siRNA sense strand
gugcugcgguguacucacu

SEQ ID NO: 49979 - RNA, 19 nt, Homo sapiens
  misc_RNA (1)...(19): siRNA sense strand
ggacgagugugccgugugu

SEQ ID NO: 49980 - RNA, 19 nt, Homo sapiens
  misc_RNA (1)...(19): siRNA sense strand
gaagaaugaggacgagugu

SEQ ID NO: 49981 - RNA, 19 nt, Homo sapiens
  misc_RNA (1)...(19): siRNA sense strand
gugcugcgguguacucacu

SEQ ID NO: 49982 - RNA, 19 nt, Homo sapiens
  misc_RNA (1)...(19): siRNA sense strand
ggacgagugugccgugugu

SEQ ID NO: 49983 - RNA, 19 nt, Homo sapiens
  misc_RNA (1)...(19): siRNA sense strand
gaccuggagucccuucuga

SEQ ID NO: 49984 - RNA, 19 nt, Homo sapiens
  misc_RNA (1)...(19): siRNA sense strand
gaagaaugaggacgagugu

SEQ ID NO: 49985 - RNA, 19 nt, Homo sapiens
  misc_RNA (1)...(19): siRNA sense strand
gugcugcgguguacucacu

SEQ ID NO: 49986 - RNA, 19 nt, Homo sapiens
  misc_RNA (1)...(19): siRNA sense strand
ggacgagugugccgugugu

SEQ ID NO: 49987 - RNA, 19 nt, Homo sapiens
  misc_RNA (1)...(19): siRNA sense strand
gaccuggagucccuucuga

SEQ ID NO: 49988 - RNA, 19 nt, Homo sapiens
  misc_RNA (1)...(19): siRNA sense strand
gaagaaugaggacgagugu

SEQ ID NO: 49989 - RNA, 19 nt, Homo sapiens
  misc_RNA (1)...(19): siRNA sense strand
gugcugcgguguacucacu

SEQ ID NO: 49990 - RNA, 19 nt, Homo sapiens
  misc_RNA (1)...(19): siRNA sense strand
ggacgagugugccgugugu

SEQ ID NO: 49991 - RNA, 19 nt, Homo sapiens
  misc_RNA (1)...(19): siRNA sense strand
gaagaaugaggacgagugu

SEQ ID NO: 49992 - RNA, 19 nt, Homo sapiens
  misc_RNA (1)...(19): siRNA sense strand
gugcugcgguguacucacu

SEQ ID NO: 49993 - RNA, 19 nt, Homo sapiens
  misc_RNA (1)...(19): siRNA sense strand
gaacaucccguccuucauu

SEQ ID NO: 49994 - RNA, 19 nt, Homo sapiens
  misc_RNA (1)...(19): siRNA sense strand
gcaagaugaagcuggauua

SEQ ID NO: 49995 - RNA, 19 nt, Homo sapiens
  misc_RNA (1)...(19): siRNA sense strand
gauagaggauuucuuagag

SEQ ID NO: 49996 - RNA, 19 nt, Homo sapiens
  misc_RNA (1)...(19): siRNA sense strand
gcaagcagguggugaacau

SEQ ID NO: 49997 - RNA, 19 nt, Homo sapiens
  misc_RNA (1)...(19): siRNA sense strand
gcggagacccuucgagaaa

SEQ ID NO: 49998 - RNA, 19 nt, Homo sapiens
  misc_RNA (1)...(19): siRNA sense strand
gggaacugcugacgcuuga

SEQ ID NO: 49999 - RNA, 19 nt, Homo sapiens
  misc_RNA (1)...(19): siRNA sense strand
gaaaucucgucucgaccaa

SEQ ID NO: 50000 - RNA, 19 nt, Homo sapiens
  misc_RNA (1)...(19): siRNA sense strand
agaugaagcuggauuacau

SEQ ID NO: 50001 - RNA, 19 nt, Homo sapiens
  misc_RNA (1)...(19): siRNA sense strand
gccugaagauagaggauuu

SEQ ID NO: 50002 - RNA, 19 nt, Homo sapiens
  misc_RNA (1)...(19): siRNA sense strand
ggagacccuucgagaaauc

SEQ ID NO: 50003 - RNA, 19 nt, Homo sapiens
  misc_RNA (1)...(19): siRNA sense strand
gaacugcugacgcuugaug

SEQ ID NO: 50004 - RNA, 19 nt, Homo sapiens
  misc_RNA (1)...(19): siRNA sense strand
ggucuggagggucaaauuu

SEQ ID NO: 50005 - RNA, 19 nt, Homo sapiens
  misc_RNA (1)...(19): siRNA sense strand
aaucucgucucgaccaaga

SEQ ID NO: 50006 - RNA, 19 nt, Homo sapiens
  misc_RNA (1)...(19): siRNA sense strand
agauagaggauuucuuaga

SEQ ID NO: 50007 - RNA, 19 nt, Homo sapiens
  misc_RNA (1)...(19): siRNA sense strand
auagaggauuucuuagaga

SEQ ID NO: 50008 - RNA, 19 nt, Homo sapiens
  misc_RNA (1)...(19): siRNA sense strand
gaagcugaucggcgaguau

SEQ ID NO: 50009 - RNA, 19 nt, Homo sapiens
  misc_RNA (1)...(19): siRNA sense strand
gucuggagggucaaauuua

SEQ ID NO: 50010 - RNA, 19 nt, Homo sapiens
  misc_RNA (1)...(19): siRNA sense strand
ugaagcugaucggcgagua

SEQ ID NO: 50011 - RNA, 19 nt, Homo sapiens
  misc_RNA (1)...(19): siRNA sense strand
aguaugggcuccggaacaa

SEQ ID NO: 50012 - RNA, 19 nt, Homo sapiens
  misc_RNA (1)...(19): siRNA sense strand
cggagacccuucgagaaau

SEQ ID NO: 50013 - RNA, 19 nt, Homo sapiens
  misc_RNA (1)...(19): siRNA sense strand
gaguaugggcuccggaaca

SEQ ID NO: 50014 - RNA, 19 nt, Homo sapiens
  misc_RNA (1)...(19): siRNA sense strand
aaauuuacccuggccaaga

SEQ ID NO: 50015 - RNA, 19 nt, Homo sapiens
  misc_RNA (1)...(19): siRNA sense strand
aauuuacccuggccaagau

SEQ ID NO: 50016 - RNA, 19 nt, Homo sapiens
  misc_RNA (1)...(19): siRNA sense strand
ucuggagggucaaauuuac

SEQ ID NO: 50017 - RNA, 19 nt, Homo sapiens
  misc_RNA (1)...(19): siRNA sense strand
ugcugacgcuugaugagaa

SEQ ID NO: 50018 - RNA, 19 nt, Homo sapiens
  misc_RNA (1)...(19): siRNA sense strand
uggaugagggcaagaugaa

SEQ ID NO: 50019 - RNA, 19 nt, Homo sapiens
  misc_RNA (1)...(19): siRNA sense strand
ggcaagaugaagcuggauu

SEQ ID NO: 50020 - RNA, 19 nt, Homo sapiens
  misc_RNA (1)...(19): siRNA sense strand
gcugacgcuugaugagaag

SEQ ID NO: 50021 - RNA, 19 nt, Homo sapiens
  misc_RNA (1)...(19): siRNA sense strand
aacaucccguccuucauug

SEQ ID NO: 50022 - RNA, 19 nt, Homo sapiens
  misc_RNA (1)...(19): siRNA sense strand
gaagaucgaucgccacaug

SEQ ID NO: 50023 - RNA, 19 nt, Homo sapiens
  misc_RNA (1)...(19): siRNA sense strand
ggaagagaccaagaaauaa

SEQ ID NO: 50024 - RNA, 19 nt, Homo sapiens
  misc_RNA (1)...(19): siRNA sense strand
gcaagaagaaggucugguu

SEQ ID NO: 50025 - RNA, 19 nt, Homo sapiens
  misc_RNA (1)...(19): siRNA sense strand
aggaagagaccaagaaaua

SEQ ID NO: 50026 - RNA, 19 nt, Homo sapiens
  misc_RNA (1)...(19): siRNA sense strand
gagaaggucacauggauga

SEQ ID NO: 50027 - RNA, 19 nt, Homo sapiens
  misc_RNA (1)...(19): siRNA sense strand
caagaagaaggucugguua

SEQ ID NO: 50028 - RNA, 19 nt, Homo sapiens
  misc_RNA (1)...(19): siRNA sense strand
ccaaugagaccaaugaaau

SEQ ID NO: 50029 - RNA, 19 nt, Homo sapiens
  misc_RNA (1)...(19): siRNA sense strand
ccaaugaaaucgccaaugc

SEQ ID NO: 50030 - RNA, 19 nt, Homo sapiens
  misc_RNA (1)...(19): siRNA sense strand
cagagaaggucacauggau

SEQ ID NO: 50031 - RNA, 19 nt, Homo sapiens
  misc_RNA (1)...(19): siRNA sense strand
ggaggaagagaccaagaaa

SEQ ID NO: 50032 - RNA, 19 nt, Homo sapiens
  misc_RNA (1)...(19): siRNA sense strand
agaagaaggucugguuaga

SEQ ID NO: 50033 - RNA, 19 nt, Homo sapiens
  misc_RNA (1)...(19): siRNA sense strand
ucacauggaugaggagaau

SEQ ID NO: 50034 - RNA, 19 nt, Homo sapiens
  misc_RNA (1)...(19): siRNA sense strand
uccggaagcucaucaaaga

SEQ ID NO: 50035 - RNA, 19 nt, Homo sapiens
  misc_RNA (1)...(19): siRNA sense strand
gaggagaucaucaagacuu

SEQ ID NO: 50036 - RNA, 19 nt, Homo sapiens
  misc_RNA (1)...(19): siRNA sense strand
gagaucaucaagacuuuau

SEQ ID NO: 50037 - RNA, 19 nt, Homo sapiens
  misc_RNA (1)...(19): siRNA sense strand
ggagaucaucaagacuuua

SEQ ID NO: 50038 - RNA, 19 nt, Homo sapiens
  misc_RNA (1)...(19): siRNA sense strand
gcacaugggcauagguaag

SEQ ID NO: 50039 - RNA, 19 nt, Homo sapiens
  misc_RNA (1)...(19): siRNA sense strand
caagcggauucucauggaa

SEQ ID NO: 50040 - RNA, 19 nt, Homo sapiens
  misc_RNA (1)...(19): siRNA sense strand
gcucagaagauaccgugaa

SEQ ID NO: 50041 - RNA, 19 nt, Homo sapiens
  misc_RNA (1)...(19): siRNA sense strand
ucaagacuuuauccaagga

SEQ ID NO: 50042 - RNA, 19 nt, Homo sapiens
  misc_RNA (1)...(19): siRNA sense strand
gaaggggaauguguucaaa

SEQ ID NO: 50043 - RNA, 19 nt, Homo sapiens
  misc_RNA (1)...(19): siRNA sense strand
gcggaaggguacagccaau

SEQ ID NO: 50044 - RNA, 19 nt, Homo sapiens
  misc_RNA (1)...(19): siRNA sense strand
acaagcggauucucaugga

SEQ ID NO: 50045 - RNA, 19 nt, Homo sapiens
  misc_RNA (1)...(19): siRNA sense strand
uaccgugaaucuaagaaga

SEQ ID NO: 50046 - RNA, 19 nt, Homo sapiens
  misc_RNA (1)...(19): siRNA sense strand
gaucgaucgccacauguau

SEQ ID NO: 50047 - RNA, 19 nt, Homo sapiens
  misc_RNA (1)...(19): siRNA sense strand
gaaggaggagaucaucaag

SEQ ID NO: 50048 - RNA, 19 nt, Homo sapiens
  misc_RNA (1)...(19): siRNA sense strand
caaugagaccaaugaaauc

SEQ ID NO: 50049 - RNA, 19 nt, Homo sapiens
  misc_RNA (1)...(19): siRNA sense strand
aggagaucaucaagacuuu

SEQ ID NO: 50050 - RNA, 19 nt, Homo sapiens
  misc_RNA (1)...(19): siRNA sense strand
gaggaagagaccaagaaau

SEQ ID NO: 50051 - RNA, 19 nt, Homo sapiens
  misc_RNA (1)...(19): siRNA sense strand
gauccggaagcucaucaaa

SEQ ID NO: 50052 - RNA, 19 nt, Homo sapiens
  misc_RNA (1)...(19): siRNA sense strand
ccagagaaggucacaugga

SEQ ID NO: 50053 - RNA, 19 nt, Homo sapiens
  misc_RNA (1)...(19): siRNA sense strand
agaaggaggagaucaucaa

SEQ ID NO: 50054 - RNA, 19 nt, Homo sapiens
  misc_RNA (1)...(19): siRNA sense strand
gccggcugcucagaagaua

SEQ ID NO: 50055 - RNA, 19 nt, Homo sapiens
  misc_RNA (1)...(19): siRNA sense strand
ccaagaaggaggagaucau

SEQ ID NO: 50056 - RNA, 19 nt, Homo sapiens
  misc_RNA (1)...(19): siRNA sense strand
ccaaggaggaagagaccaa

SEQ ID NO: 50057 - RNA, 19 nt, Homo sapiens
  misc_RNA (1)...(19): siRNA sense strand
guacagccaaugcccgaau

SEQ ID NO: 50058 - RNA, 19 nt, Homo sapiens
  misc_RNA (1)...(19): siRNA sense strand
aggaggagaucaucaagac

SEQ ID NO: 50059 - RNA, 19 nt, Homo sapiens
  misc_RNA (1)...(19): siRNA sense strand
caacucccgucagcagauc

SEQ ID NO: 50060 - RNA, 19 nt, Homo sapiens
  misc_RNA (1)...(19): siRNA sense strand
ggaaggguacagccaaugc

SEQ ID NO: 50061 - RNA, 19 nt, Homo sapiens
  misc_RNA (1)...(19): siRNA sense strand
gaucgccacauguaucaca

SEQ ID NO: 50062 - RNA, 19 nt, Homo sapiens
  misc_RNA (1)...(19): siRNA sense strand
ucaaagaugggcugaucau

SEQ ID NO: 50063 - RNA, 19 nt, Homo sapiens
  misc_RNA (1)...(19): siRNA sense strand
caagaaggaggagaucauc

SEQ ID NO: 50064 - RNA, 19 nt, Homo sapiens
  misc_RNA (1)...(19): siRNA sense strand
aaacaagcggauucucaug

SEQ ID NO: 50065 - RNA, 19 nt, Homo sapiens
  misc_RNA (1)...(19): siRNA sense strand
cucagaagauaccgugaau

SEQ ID NO: 50066 - RNA, 19 nt, Homo sapiens
  misc_RNA (1)...(19): siRNA sense strand
acauggaugaggagaauga

SEQ ID NO: 50067 - RNA, 19 nt, Homo sapiens
  misc_RNA (1)...(19): siRNA sense strand
ucaucaagacuuuauccaa

SEQ ID NO: 50068 - RNA, 19 nt, Homo sapiens
  misc_RNA (1)...(19): siRNA sense strand
augaggagaaugaggauuu

SEQ ID NO: 50069 - RNA, 19 nt, Homo sapiens
  misc_RNA (1)...(19): siRNA sense strand
gcaggcacaugggcauagg

SEQ ID NO: 50070 - RNA, 19 nt, Homo sapiens
  misc_RNA (1)...(19): siRNA sense strand
gggcaggcacaugggcaua

SEQ ID NO: 50071 - RNA, 19 nt, Homo sapiens
  misc_RNA (1)...(19): siRNA sense strand
guccuccgcuguggcaaga

SEQ ID NO: 50072 - RNA, 19 nt, Homo sapiens
  misc_RNA (1)...(19): siRNA sense strand
gcaaaguaguccagguuua

SEQ ID NO: 50073 - RNA, 19 nt, Homo sapiens
  misc_RNA (1)...(19): siRNA sense strand
ccaaagagcugagacagaa

SEQ ID NO: 50074 - RNA, 19 nt, Homo sapiens
  misc_RNA (1)...(19): siRNA sense strand
gcaaggugguuaucacuag

SEQ ID NO: 50075 - RNA, 19 nt, Homo sapiens
  misc_RNA (1)...(19): siRNA sense strand
gaagaaaccauugagaaga

SEQ ID NO: 50076 - RNA, 19 nt, Homo sapiens
  misc_RNA (1)...(19): siRNA sense strand
ccgaaaggaugaugaaguu

SEQ ID NO: 50077 - RNA, 19 nt, Homo sapiens
  misc_RNA (1)...(19): siRNA sense strand
uugagaagaugcaggaaua

SEQ ID NO: 50078 - RNA, 19 nt, Homo sapiens
  misc_RNA (1)...(19): siRNA sense strand
cuauaaaggucagcaaauu

SEQ ID NO: 50079 - RNA, 19 nt, Homo sapiens
  misc_RNA (1)...(19): siRNA sense strand
agccaaaucucgccaagua

SEQ ID NO: 50080 - RNA, 19 nt, Homo sapiens
  misc_RNA (1)...(19): siRNA sense strand
gaaguuuaaucccuuugug

SEQ ID NO: 50081 - RNA, 19 nt, Homo sapiens
  misc_RNA (1)...(19): siRNA sense strand
uggcacaacuguccacgua

SEQ ID NO: 50082 - RNA, 19 nt, Homo sapiens
  misc_RNA (1)...(19): siRNA sense strand
ggaagaaaccauugagaag

SEQ ID NO: 50083 - RNA, 19 nt, Homo sapiens
  misc_RNA (1)...(19): siRNA sense strand
ucagcaaauuggcaaagua

SEQ ID NO: 50084 - RNA, 19 nt, Homo sapiens
  misc_RNA (1)...(19): siRNA sense strand
gcaaauacaaggaagaaac

SEQ ID NO: 50085 - RNA, 19 nt, Homo sapiens
  misc_RNA (1)...(19): siRNA sense strand
cacauucgaaggaagauua

SEQ ID NO: 50086 - RNA, 19 nt, Homo sapiens
  misc_RNA (1)...(19): siRNA sense strand
gaaaggaaaagggcaaaua

SEQ ID NO: 50087 - RNA, 19 nt, Homo sapiens
  misc_RNA (1)...(19): siRNA sense strand
aagaaaccauugagaagau

SEQ ID NO: 50088 - RNA, 19 nt, Homo sapiens
  misc_RNA (1)...(19): siRNA sense strand
gcaaauuggcaaaguaguc

SEQ ID NO: 50089 - RNA, 19 nt, Homo sapiens
  misc_RNA (1)...(19): siRNA sense strand
gaacgggugcagcgggaaa

SEQ ID NO: 50090 - RNA, 19 nt, Homo sapiens
  misc_RNA (1)...(19): siRNA sense strand
gaacggaaagccaaaucuc

SEQ ID NO: 50091 - RNA, 19 nt, Homo sapiens
  misc_RNA (1)...(19): siRNA sense strand
uauaaaggucagcaaauug

SEQ ID NO: 50092 - RNA, 19 nt, Homo sapiens
  misc_RNA (1)...(19): siRNA sense strand
gauccaugcccauccgaaa

SEQ ID NO: 50093 - RNA, 19 nt, Homo sapiens
  misc_RNA (1)...(19): siRNA sense strand
gggcaaauacaaggaagaa

SEQ ID NO: 50094 - RNA, 19 nt, Homo sapiens
  misc_RNA (1)...(19): siRNA sense strand
gugguuaucacuaggcuaa

SEQ ID NO: 50095 - RNA, 19 nt, Homo sapiens
  misc_RNA (1)...(19): siRNA sense strand
gagcugagacagaaguaca

SEQ ID NO: 50096 - RNA, 19 nt, Homo sapiens
  misc_RNA (1)...(19): siRNA sense strand
ggcuaaaacuggacaaaga

SEQ ID NO: 50097 - RNA, 19 nt, Homo sapiens
  misc_RNA (1)...(19): siRNA sense strand
caaaguaguccagguuuac

SEQ ID NO: 50098 - RNA, 19 nt, Homo sapiens
  misc_RNA (1)...(19): siRNA sense strand
ggcaaaguaguccagguuu

SEQ ID NO: 50099 - RNA, 19 nt, Homo sapiens
  misc_RNA (1)...(19): siRNA sense strand
aggaagaaaccauugagaa

SEQ ID NO: 50100 - RNA, 19 nt, Homo sapiens
  misc_RNA (1)...(19): siRNA sense strand
auacaaggaagaaaccauu

SEQ ID NO: 50101 - RNA, 19 nt, Homo sapiens
  misc_RNA (1)...(19): siRNA sense strand
gcaccuucccacauucgaa

SEQ ID NO: 50102 - RNA, 19 nt, Homo sapiens
  misc_RNA (1)...(19): siRNA sense strand
cagcaaauuggcaaaguag

SEQ ID NO: 50103 - RNA, 19 nt, Homo sapiens
  misc_RNA (1)...(19): siRNA sense strand
acaaggaagaaaccauuga

SEQ ID NO: 50104 - RNA, 19 nt, Homo sapiens
  misc_RNA (1)...(19): siRNA sense strand
uuuaaucccuuugugacuu

SEQ ID NO: 50105 - RNA, 19 nt, Homo sapiens
  misc_RNA (1)...(19): siRNA sense strand
aaagauccucgaacggaaa

SEQ ID NO: 50106 - RNA, 19 nt, Homo sapiens
  misc_RNA (1)...(19): siRNA sense strand
uuaaucccuuugugacuuc

SEQ ID NO: 50107 - RNA, 19 nt, Homo sapiens
  misc_RNA (1)...(19): siRNA sense strand
ugagaagaugcaggaauaa

SEQ ID NO: 50108 - RNA, 19 nt, Homo sapiens
  misc_RNA (1)...(19): siRNA sense strand
uaguccagguuuacaggaa

SEQ ID NO: 50109 - RNA, 19 nt, Homo sapiens
  misc_RNA (1)...(19): siRNA sense strand
agaaaccauugagaagaug

SEQ ID NO: 50110 - RNA, 19 nt, Homo sapiens
  misc_RNA (1)...(19): siRNA sense strand
caaaucucgccaaguagga

SEQ ID NO: 50111 - RNA, 19 nt, Homo sapiens
  misc_RNA (1)...(19): siRNA sense strand
ucaaugcaccuucccacau

SEQ ID NO: 50112 - RNA, 19 nt, Homo sapiens
  misc_RNA (1)...(19): siRNA sense strand
ccagcaaggugguuaucac

SEQ ID NO: 50113 - RNA, 19 nt, Homo sapiens
  misc_RNA (1)...(19): siRNA sense strand
caaggaagaaaccauugag

SEQ ID NO: 50114 - RNA, 19 nt, Homo sapiens
  misc_RNA (1)...(19): siRNA sense strand
guccagguuuacaggaaga

SEQ ID NO: 50115 - RNA, 19 nt, Homo sapiens
  misc_RNA (1)...(19): siRNA sense strand
aaagggcaaauacaaggaa

SEQ ID NO: 50116 - RNA, 19 nt, Homo sapiens
  misc_RNA (1)...(19): siRNA sense strand
ggaaaagggcaaauacaag

SEQ ID NO: 50117 - RNA, 19 nt, Homo sapiens
  misc_RNA (1)...(19): siRNA sense strand
agguuuacaggaagaaaua

SEQ ID NO: 50118 - RNA, 19 nt, Homo sapiens
  misc_RNA (1)...(19): siRNA sense strand
gauuaugucuuccccucuu

SEQ ID NO: 50119 - RNA, 19 nt, Homo sapiens
  misc_RNA (1)...(19): siRNA sense strand
uggcaaaguaguccagguu

SEQ ID NO: 50120 - RNA, 19 nt, Homo sapiens
  misc_RNA (1)...(19): siRNA sense strand
gaaaggaugccaaaucugu

SEQ ID NO: 50121 - RNA, 19 nt, Homo sapiens
  misc_RNA (1)...(19): siRNA sense strand
caacgugaaguuuaaaguu

SEQ ID NO: 50122 - RNA, 19 nt, Homo sapiens
  misc_RNA (1)...(19): siRNA sense strand
aggacaacgugaaguuuaa

SEQ ID NO: 50123 - RNA, 19 nt, Homo sapiens
  misc_RNA (1)...(19): siRNA sense strand
gcucacagcccgacgaaag

SEQ ID NO: 50124 - RNA, 19 nt, Homo sapiens
  misc_RNA (1)...(19): siRNA sense strand
gacgaaaggaugccaaauc

SEQ ID NO: 50125 - RNA, 19 nt, Homo sapiens
  misc_RNA (1)...(19): siRNA sense strand
aaggacaacgugaaguuua

SEQ ID NO: 50126 - RNA, 19 nt, Homo sapiens
  misc_RNA (1)...(19): siRNA sense strand
ggacaacgugaaguuuaaa

SEQ ID NO: 50127 - RNA, 19 nt, Homo sapiens
  misc_RNA (1)...(19): siRNA sense strand
acgaaaggaugccaaaucu

SEQ ID NO: 50128 - RNA, 19 nt, Homo sapiens
  misc_RNA (1)...(19): siRNA sense strand
uaaggacaacgugaaguuu

SEQ ID NO: 50129 - RNA, 19 nt, Homo sapiens
  misc_RNA (1)...(19): siRNA sense strand
aacgugaaguuuaaaguuc

SEQ ID NO: 50130 - RNA, 19 nt, Homo sapiens
  misc_RNA (1)...(19): siRNA sense strand
gaugccaaaucugucaaga

SEQ ID NO: 50131 - RNA, 19 nt, Homo sapiens
  misc_RNA (1)...(19): siRNA sense strand
auaaggacaacgugaaguu

SEQ ID NO: 50132 - RNA, 19 nt, Homo sapiens
  misc_RNA (1)...(19): siRNA sense strand
acacccuggucaucacuga

SEQ ID NO: 50133 - RNA, 19 nt, Homo sapiens
  misc_RNA (1)...(19): siRNA sense strand
cuaaagaacuugccacuaa

SEQ ID NO: 50134 - RNA, 19 nt, Homo sapiens
  misc_RNA (1)...(19): siRNA sense strand
gaaagugccuccugcgauu

SEQ ID NO: 50135 - RNA, 19 nt, Homo sapiens
  misc_RNA (1)...(19): siRNA sense strand
gaaagaaggccaagggaaa

SEQ ID NO: 50136 - RNA, 19 nt, Homo sapiens
  misc_RNA (1)...(19): siRNA sense strand
uaaagaacuugccacuaaa

SEQ ID NO: 50137 - RNA, 19 nt, Homo sapiens
  misc_RNA (1)...(19): siRNA sense strand
ccaauuacaaugacagaua

SEQ ID NO: 50138 - RNA, 19 nt, Homo sapiens
  misc_RNA (1)...(19): siRNA sense strand
gaagcuaucaggaccaauu

SEQ ID NO: 50139 - RNA, 19 nt, Homo sapiens
  misc_RNA (1)...(19): siRNA sense strand
ggcaaaggcuaaagaacuu

SEQ ID NO: 50140 - RNA, 19 nt, Homo sapiens
  misc_RNA (1)...(19): siRNA sense strand
gcaauguccuggguccuaa

SEQ ID NO: 50141 - RNA, 19 nt, Homo sapiens
  misc_RNA (1)...(19): siRNA sense strand
agacaaagcaagagaagaa

SEQ ID NO: 50142 - RNA, 19 nt, Homo sapiens
  misc_RNA (1)...(19): siRNA sense strand
gagaaaaggccuaagaauu

SEQ ID NO: 50143 - RNA, 19 nt, Homo sapiens
  misc_RNA (1)...(19): siRNA sense strand
agaaaaggccuaagaauuu

SEQ ID NO: 50144 - RNA, 19 nt, Homo sapiens
  misc_RNA (1)...(19): siRNA sense strand
gaccagagacaaagcaaga

SEQ ID NO: 50145 - RNA, 19 nt, Homo sapiens
  misc_RNA (1)...(19): siRNA sense strand
gaagaagcagagacuguug

SEQ ID NO: 50146 - RNA, 19 nt, Homo sapiens
  misc_RNA (1)...(19): siRNA sense strand
gagaagaagcagagacugu

SEQ ID NO: 50147 - RNA, 19 nt, Homo sapiens
  misc_RNA (1)...(19): siRNA sense strand
caauuacaaugacagauac

SEQ ID NO: 50148 - RNA, 19 nt, Homo sapiens
  misc_RNA (1)...(19): siRNA sense strand
ggugaacucggaagacaaa

SEQ ID NO: 50149 - RNA, 19 nt, Homo sapiens
  misc_RNA (1)...(19): siRNA sense strand
ugacagauacgaugagauc

SEQ ID NO: 50150 - RNA, 19 nt, Homo sapiens
  misc_RNA (1)...(19): siRNA sense strand
gagaccaccuguccuucga

SEQ ID NO: 50151 - RNA, 19 nt, Homo sapiens
  misc_RNA (1)...(19): siRNA sense strand
cgagcugguugucuucuug

SEQ ID NO: 50152 - RNA, 19 nt, Homo sapiens
  misc_RNA (1)...(19): siRNA sense strand
cuaagucuguggcucguau

SEQ ID NO: 50153 - RNA, 19 nt, Homo sapiens
  misc_RNA (1)...(19): siRNA sense strand
ccaucgagcugguugucuu

SEQ ID NO: 50154 - RNA, 19 nt, Homo sapiens
  misc_RNA (1)...(19): siRNA sense strand
guacagaccagagacaaag

SEQ ID NO: 50155 - RNA, 19 nt, Homo sapiens
  misc_RNA (1)...(19): siRNA sense strand
gcuaaagaacuugccacua

SEQ ID NO: 50156 - RNA, 19 nt, Homo sapiens
  misc_RNA (1)...(19): siRNA sense strand
caggugaacucggaagaca

SEQ ID NO: 50157 - RNA, 19 nt, Homo sapiens
  misc_RNA (1)...(19): siRNA sense strand
uaucaggaccaauuacaau

SEQ ID NO: 50158 - RNA, 19 nt, Homo sapiens
  misc_RNA (1)...(19): siRNA sense strand
ucuauaagcggcugaaagu

SEQ ID NO: 50159 - RNA, 19 nt, Homo sapiens
  misc_RNA (1)...(19): siRNA sense strand
ucaggaccaauuacaauga

SEQ ID NO: 50160 - RNA, 19 nt, Homo sapiens
  misc_RNA (1)...(19): siRNA sense strand
caaagcaagagaagaagca

SEQ ID NO: 50161 - RNA, 19 nt, Homo sapiens
  misc_RNA (1)...(19): siRNA sense strand
aagcuaucaggaccaauua

SEQ ID NO: 50162 - RNA, 19 nt, Homo sapiens
  misc_RNA (1)...(19): siRNA sense strand
acaaugacagauacgauga

SEQ ID NO: 50163 - RNA, 19 nt, Homo sapiens
  misc_RNA (1)...(19): siRNA sense strand
ccagagacaaagcaagaga

SEQ ID NO: 50164 - RNA, 19 nt, Homo sapiens
  misc_RNA (1)...(19): siRNA sense strand
aaaggcaaaggcuaaagaa

SEQ ID NO: 50165 - RNA, 19 nt, Homo sapiens
  misc_RNA (1)...(19): siRNA sense strand
gucccuuacugcauuauca

SEQ ID NO: 50166 - RNA, 19 nt, Homo sapiens
  misc_RNA (1)...(19): siRNA sense strand
cuucuugccugcccugugu

SEQ ID NO: 50167 - RNA, 19 nt, Homo sapiens
  misc_RNA (1)...(19): siRNA sense strand
gcuaucaggaccaauuaca

SEQ ID NO: 50168 - RNA, 19 nt, Homo sapiens
  misc_RNA (1)...(19): siRNA sense strand
gcaaaggcuaaagaacuug

SEQ ID NO: 50169 - RNA, 19 nt, Homo sapiens
  misc_RNA (1)...(19): siRNA sense strand
uaagcuggcccacaaguac

SEQ ID NO: 50170 - RNA, 19 nt, Homo sapiens
  misc_RNA (1)...(19): siRNA sense strand
ggcaauguccuggguccua

SEQ ID NO: 50171 - RNA, 19 nt, Homo sapiens
  misc_RNA (1)...(19): siRNA sense strand
agaagaagcagagacuguu

SEQ ID NO: 50172 - RNA, 19 nt, Homo sapiens
  misc_RNA (1)...(19): siRNA sense strand
cuccugcgauuaaccaguu

SEQ ID NO: 50173 - RNA, 19 nt, Homo sapiens
  misc_RNA (1)...(19): siRNA sense strand
ggaagaccugcaccacugu

SEQ ID NO: 50174 - RNA, 19 nt, Homo sapiens
  misc_RNA (1)...(19): siRNA sense strand
ggacauccagcccaaaaga

SEQ ID NO: 50175 - RNA, 19 nt, Homo sapiens
  misc_RNA (1)...(19): siRNA sense strand
aaagugccuccugcgauua

SEQ ID NO: 50176 - RNA, 19 nt, Homo sapiens
  misc_RNA (1)...(19): siRNA sense strand
aaugacagauacgaugaga

SEQ ID NO: 50177 - RNA, 19 nt, Homo sapiens
  misc_RNA (1)...(19): siRNA sense strand
gaccaauuacaaugacaga

SEQ ID NO: 50178 - RNA, 19 nt, Homo sapiens
  misc_RNA (1)...(19): siRNA sense strand
ugcuuaagcuggcccacaa

SEQ ID NO: 50179 - RNA, 19 nt, Homo sapiens
  misc_RNA (1)...(19): siRNA sense strand
ugaauccccuguuugagaa

SEQ ID NO: 50180 - RNA, 19 nt, Homo sapiens
  misc_RNA (1)...(19): siRNA sense strand
cagcugucgugaagaagca

SEQ ID NO: 50181 - RNA, 19 nt, Homo sapiens
  misc_RNA (1)...(19): siRNA sense strand
uuaagcuggcccacaagua

SEQ ID NO: 50182 - RNA, 19 nt, Homo sapiens
  misc_RNA (1)...(19): siRNA sense strand
cagagacaaagcaagagaa

SEQ ID NO: 50183 - RNA, 19 nt, Homo sapiens
  misc_RNA (1)...(19): siRNA sense strand
gagacaaagcaagagaaga

SEQ ID NO: 50184 - RNA, 19 nt, Homo sapiens
  misc_RNA (1)...(19): siRNA sense strand
gcaagagaagaagcagaga

SEQ ID NO: 50185 - RNA, 19 nt, Homo sapiens
  misc_RNA (1)...(19): siRNA sense strand
gaaggccaagggaaagaag

SEQ ID NO: 50186 - RNA, 19 nt, Homo sapiens
  misc_RNA (1)...(19): siRNA sense strand
gcaccacugucgccuucac

SEQ ID NO: 50187 - RNA, 19 nt, Homo sapiens
  misc_RNA (1)...(19): siRNA sense strand
gcucagcugguggugauug

SEQ ID NO: 50188 - RNA, 19 nt, Homo sapiens
  misc_RNA (1)...(19): siRNA sense strand
uuaacaccgucaccaccuu

SEQ ID NO: 50189 - RNA, 19 nt, Homo sapiens
  misc_RNA (1)...(19): siRNA sense strand
caaguacagaccagagaca

SEQ ID NO: 50190 - RNA, 19 nt, Homo sapiens
  misc_RNA (1)...(19): siRNA sense strand
ugccugcccugugucguaa

SEQ ID NO: 50191 - RNA, 19 nt, Homo sapiens
  misc_RNA (1)...(19): siRNA sense strand
gaaaguggaagcaaagaaa

SEQ ID NO: 50192 - RNA, 19 nt, Homo sapiens
  misc_RNA (1)...(19): siRNA sense strand
gacaugggcuuuggucuuu

SEQ ID NO: 50193 - RNA, 19 nt, Homo sapiens
  misc_RNA (1)...(19): siRNA sense strand
uaaagcagccgguguaaau

SEQ ID NO: 50194 - RNA, 19 nt, Homo sapiens
  misc_RNA (1)...(19): siRNA sense strand
agaagaaaguggaagcaaa

SEQ ID NO: 50195 - RNA, 19 nt, Homo sapiens
  misc_RNA (1)...(19): siRNA sense strand
guguaaauguugagccuuu

SEQ ID NO: 50196 - RNA, 19 nt, Homo sapiens
  misc_RNA (1)...(19): siRNA sense strand
gaagaaaguggaagcaaag

SEQ ID NO: 50197 - RNA, 19 nt, Homo sapiens
  misc_RNA (1)...(19): siRNA sense strand
gcacgacgaugaggugaca

SEQ ID NO: 50198 - RNA, 19 nt, Homo sapiens
  misc_RNA (1)...(19): siRNA sense strand
ggagucugaugaugacaug

SEQ ID NO: 50199 - RNA, 19 nt, Homo sapiens
  misc_RNA (1)...(19): siRNA sense strand
ggaagcaaagaaagaagaa

SEQ ID NO: 50200 - RNA, 19 nt, Homo sapiens
  misc_RNA (1)...(19): siRNA sense strand
cauuaaagcagccggugua

SEQ ID NO: 50201 - RNA, 19 nt, Homo sapiens
  misc_RNA (1)...(19): siRNA sense strand
gagaagaaaguggaagcaa

SEQ ID NO: 50202 - RNA, 19 nt, Homo sapiens
  misc_RNA (1)...(19): siRNA sense strand
ccgaggagucugaugauga

SEQ ID NO: 50203 - RNA, 19 nt, Homo sapiens
  misc_RNA (1)...(19): siRNA sense strand
ugacaugggcuuuggucuu

SEQ ID NO: 50204 - RNA, 19 nt, Homo sapiens
  misc_RNA (1)...(19): siRNA sense strand
cgaggagucugaugaugac

SEQ ID NO: 50205 - RNA, 19 nt, Homo sapiens
  misc_RNA (1)...(19): siRNA sense strand
gaugaugacaugggcuuug

SEQ ID NO: 50206 - RNA, 19 nt, Homo sapiens
  misc_RNA (1)...(19): siRNA sense strand
cagccgguguaaauguuga

SEQ ID NO: 50207 - RNA, 19 nt, Homo sapiens
  misc_RNA (1)...(19): siRNA sense strand
gaagcaaagaaagaagaau

SEQ ID NO: 50208 - RNA, 19 nt, Homo sapiens
  misc_RNA (1)...(19): siRNA sense strand
aagcaaagaaagaagaauc

SEQ ID NO: 50209 - RNA, 19 nt, Homo sapiens
  misc_RNA (1)...(19): siRNA sense strand
agaaaguggaagcaaagaa

SEQ ID NO: 50210 - RNA, 19 nt, Homo sapiens
  misc_RNA (1)...(19): siRNA sense strand
aauccgaggagucugauga

SEQ ID NO: 50211 - RNA, 19 nt, Homo sapiens
  misc_RNA (1)...(19): siRNA sense strand
aagaauccgaggagucuga

SEQ ID NO: 50212 - RNA, 19 nt, Homo sapiens
  misc_RNA (1)...(19): siRNA sense strand
ggagaagaaaguggaagca

SEQ ID NO: 50213 - RNA, 19 nt, Homo sapiens
  misc_RNA (1)...(19): siRNA sense strand
gcagccgguguaaauguug

SEQ ID NO: 50214 - RNA, 19 nt, Homo sapiens
  misc_RNA (1)...(19): siRNA sense strand
ggagacauuucuacuggua

SEQ ID NO: 50215 - RNA, 19 nt, Homo sapiens
  misc_RNA (1)...(19): siRNA sense strand
gcaaccgaauuccaguuua

SEQ ID NO: 50216 - RNA, 19 nt, Homo sapiens
  misc_RNA (1)...(19): siRNA sense strand
gaaccggauugccauuuau

SEQ ID NO: 50217 - RNA, 19 nt, Homo sapiens
  misc_RNA (1)...(19): siRNA sense strand
ccaaugaggguauccagua

SEQ ID NO: 50218 - RNA, 19 nt, Homo sapiens
  misc_RNA (1)...(19): siRNA sense strand
agaaccggauugccauuua

SEQ ID NO: 50219 - RNA, 19 nt, Homo sapiens
  misc_RNA (1)...(19): siRNA sense strand
caaccgaauuccaguuuag

SEQ ID NO: 50220 - RNA, 19 nt, Homo sapiens
  misc_RNA (1)...(19): siRNA sense strand
caaugaggguauccaguau

SEQ ID NO: 50221 - RNA, 19 nt, Homo sapiens
  misc_RNA (1)...(19): siRNA sense strand
caguuugccuggagacauu

SEQ ID NO: 50222 - RNA, 19 nt, Homo sapiens
  misc_RNA (1)...(19): siRNA sense strand
gaggcuacgugaaggaaca

SEQ ID NO: 50223 - RNA, 19 nt, Homo sapiens
  misc_RNA (1)...(19): siRNA sense strand
gaagaaccggauugccauu

SEQ ID NO: 50224 - RNA, 19 nt, Homo sapiens
  misc_RNA (1)...(19): siRNA sense strand
cauuucuacugguaccuua

SEQ ID NO: 50225 - RNA, 19 nt, Homo sapiens
  misc_RNA (1)...(19): siRNA sense strand
ggauugccauuuaugaacu

SEQ ID NO: 50226 - RNA, 19 nt, Homo sapiens
  misc_RNA (1)...(19): siRNA sense strand
ggagcuggcagacaagaau

SEQ ID NO: 50227 - RNA, 19 nt, Homo sapiens
  misc_RNA (1)...(19): siRNA sense strand
gagucaugguggccaagaa

SEQ ID NO: 50228 - RNA, 19 nt, Homo sapiens
  misc_RNA (1)...(19): siRNA sense strand
cuacgugaaggaacaguuu

SEQ ID NO: 50229 - RNA, 19 nt, Homo sapiens
  misc_RNA (1)...(19): siRNA sense strand
ugaaggccaugcagucucu

SEQ ID NO: 50230 - RNA, 19 nt, Homo sapiens
  misc_RNA (1)...(19): siRNA sense strand
acccggagcuggcagacaa

SEQ ID NO: 50231 - RNA, 19 nt, Homo sapiens
  misc_RNA (1)...(19): siRNA sense strand
gccaugcagucucucaagu

SEQ ID NO: 50232 - RNA, 19 nt, Homo sapiens
  misc_RNA (1)...(19): siRNA sense strand
acaagaaugugcccaaccu

SEQ ID NO: 50233 - RNA, 19 nt, Homo sapiens
  misc_RNA (1)...(19): siRNA sense strand
gaaugugcccaaccuucau

SEQ ID NO: 50234 - RNA, 19 nt, Homo sapiens
  misc_RNA (1)...(19): siRNA sense strand
ccuaagaagaaccggauug

SEQ ID NO: 50235 - RNA, 19 nt, Homo sapiens
  misc_RNA (1)...(19): siRNA sense strand
agaaugugcccaaccuuca

SEQ ID NO: 50236 - RNA, 19 nt, Homo sapiens
  misc_RNA (1)...(19): siRNA sense strand
gagcuggcagacaagaaug

SEQ ID NO: 50237 - RNA, 19 nt, Homo sapiens
  misc_RNA (1)...(19): siRNA sense strand
ccaguuuagaggcggauuu

SEQ ID NO: 50238 - RNA, 19 nt, Homo sapiens
  misc_RNA (1)...(19): siRNA sense strand
gugcccaaccuucauguca

SEQ ID NO: 50239 - RNA, 19 nt, Homo sapiens
  misc_RNA (1)...(19): siRNA sense strand
ccggauugccauuuaugaa

SEQ ID NO: 50240 - RNA, 19 nt, Homo sapiens
  misc_RNA (1)...(19): siRNA sense strand
gaaaggaccaguucgaaug

SEQ ID NO: 50241 - RNA, 19 nt, Homo sapiens
  misc_RNA (1)...(19): siRNA sense strand
ggugugugcugacuugaua

SEQ ID NO: 50242 - RNA, 19 nt, Homo sapiens
  misc_RNA (1)...(19): siRNA sense strand
gcagauuacuuccaucagu

SEQ ID NO: 50243 - RNA, 19 nt, Homo sapiens
  misc_RNA (1)...(19): siRNA sense strand
gaaaagaaucucaaaguga

SEQ ID NO: 50244 - RNA, 19 nt, Homo sapiens
  misc_RNA (1)...(19): siRNA sense strand
cuaacaagccgcaacguaa

SEQ ID NO: 50245 - RNA, 19 nt, Homo sapiens
  misc_RNA (1)...(19): siRNA sense strand
uaacaagccgcaacguaaa

SEQ ID NO: 50246 - RNA, 19 nt, Homo sapiens
  misc_RNA (1)...(19): siRNA sense strand
aaaggugugugcugacuug

SEQ ID NO: 50247 - RNA, 19 nt, Homo sapiens
  misc_RNA (1)...(19): siRNA sense strand
gauaagaggcgcaaaagaa

SEQ ID NO: 50248 - RNA, 19 nt, Homo sapiens
  misc_RNA (1)...(19): siRNA sense strand
gaaugccuaccaagacuuu

SEQ ID NO: 50249 - RNA, 19 nt, Homo sapiens
  misc_RNA (1)...(19): siRNA sense strand
gagauuguuaagcagauua

SEQ ID NO: 50250 - RNA, 19 nt, Homo sapiens
  misc_RNA (1)...(19): siRNA sense strand
cuucugagauuguuaagca

SEQ ID NO: 50251 - RNA, 19 nt, Homo sapiens
  misc_RNA (1)...(19): siRNA sense strand
ggaagucaccauugcagau

SEQ ID NO: 50252 - RNA, 19 nt, Homo sapiens
  misc_RNA (1)...(19): siRNA sense strand
gaagucaccauugcagaug

SEQ ID NO: 50253 - RNA, 19 nt, Homo sapiens
  misc_RNA (1)...(19): siRNA sense strand
caaagugaaaggaccaguu

SEQ ID NO: 50254 - RNA, 19 nt, Homo sapiens
  misc_RNA (1)...(19): siRNA sense strand
uuaagcagauuacuuccau

SEQ ID NO: 50255 - RNA, 19 nt, Homo sapiens
  misc_RNA (1)...(19): siRNA sense strand
ugggaucguuuccagauga

SEQ ID NO: 50256 - RNA, 19 nt, Homo sapiens
  misc_RNA (1)...(19): siRNA sense strand
cuaccaagacuuugagaau

SEQ ID NO: 50257 - RNA, 19 nt, Homo sapiens
  misc_RNA (1)...(19): siRNA sense strand
accaagacuuugagaauca

SEQ ID NO: 50258 - RNA, 19 nt, Homo sapiens
  misc_RNA (1)...(19): siRNA sense strand
gaucguuuccagaugagaa

SEQ ID NO: 50259 - RNA, 19 nt, Homo sapiens
  misc_RNA (1)...(19): siRNA sense strand
guucgaaugccuaccaaga

SEQ ID NO: 50260 - RNA, 19 nt, Homo sapiens
  misc_RNA (1)...(19): siRNA sense strand
gccaggaguugagguggaa

SEQ ID NO: 50261 - RNA, 19 nt, Homo sapiens
  misc_RNA (1)...(19): siRNA sense strand
uaccaagacuuugagaauc

SEQ ID NO: 50262 - RNA, 19 nt, Homo sapiens
  misc_RNA (1)...(19): siRNA sense strand
ugaaaggaccaguucgaau

SEQ ID NO: 50263 - RNA, 19 nt, Homo sapiens
  misc_RNA (1)...(19): siRNA sense strand
agaaaagaaucucaaagug

SEQ ID NO: 50264 - RNA, 19 nt, Homo sapiens
  misc_RNA (1)...(19): siRNA sense strand
guauugagccaggaguuga

SEQ ID NO: 50265 - RNA, 19 nt, Homo sapiens
  misc_RNA (1)...(19): siRNA sense strand
aaagugaaaggaccaguuc

SEQ ID NO: 50266 - RNA, 19 nt, Homo sapiens
  misc_RNA (1)...(19): siRNA sense strand
ugagauuguuaagcagauu

SEQ ID NO: 50267 - RNA, 19 nt, Homo sapiens
  misc_RNA (1)...(19): siRNA sense strand
gugaaaggaccaguucgaa

SEQ ID NO: 50268 - RNA, 19 nt, Homo sapiens
  misc_RNA (1)...(19): siRNA sense strand
agccggagguggcaauuca

SEQ ID NO: 50269 - RNA, 19 nt, Homo sapiens
  misc_RNA (1)...(19): siRNA sense strand
gaaaaggugugugcugacu

SEQ ID NO: 50270 - RNA, 19 nt, Homo sapiens
  misc_RNA (1)...(19): siRNA sense strand
caacguaaaauccuuggaa

SEQ ID NO: 50271 - RNA, 19 nt, Homo sapiens
  misc_RNA (1)...(19): siRNA sense strand
ucgaaugccuaccaagacu

SEQ ID NO: 50272 - RNA, 19 nt, Homo sapiens
  misc_RNA (1)...(19): siRNA sense strand
ggagagaauuuccgucuga

SEQ ID NO: 50273 - RNA, 19 nt, Homo sapiens
  misc_RNA (1)...(19): siRNA sense strand
gacaggagaugaaguaaag

SEQ ID NO: 50274 - RNA, 19 nt, Homo sapiens
  misc_RNA (1)...(19): siRNA sense strand
uaaauugaccgguguguuu

SEQ ID NO: 50275 - RNA, 19 nt, Homo sapiens
  misc_RNA (1)...(19): siRNA sense strand
gagaugaaguaaagaagau

SEQ ID NO: 50276 - RNA, 19 nt, Homo sapiens
  misc_RNA (1)...(19): siRNA sense strand
ggaacagacuuaaguaugc

SEQ ID NO: 50277 - RNA, 19 nt, Homo sapiens
  misc_RNA (1)...(19): siRNA sense strand
caagauuacugauuucauc

SEQ ID NO: 50278 - RNA, 19 nt, Homo sapiens
  misc_RNA (1)...(19): siRNA sense strand
gcaugcagcgguucauuaa

SEQ ID NO: 50279 - RNA, 19 nt, Homo sapiens
  misc_RNA (1)...(19): siRNA sense strand
ggcaagguccgaacugaua

SEQ ID NO: 50280 - RNA, 19 nt, Homo sapiens
  misc_RNA (1)...(19): siRNA sense strand
uaaagaagauuugcaugca

SEQ ID NO: 50281 - RNA, 19 nt, Homo sapiens
  misc_RNA (1)...(19): siRNA sense strand
ggagaugaaguaaagaaga

SEQ ID NO: 50282 - RNA, 19 nt, Homo sapiens
  misc_RNA (1)...(19): siRNA sense strand
ggcaacaaaccauggauuu

SEQ ID NO: 50283 - RNA, 19 nt, Homo sapiens
  misc_RNA (1)...(19): siRNA sense strand
cuggcaagauuacugauuu

SEQ ID NO: 50284 - RNA, 19 nt, Homo sapiens
  misc_RNA (1)...(19): siRNA sense strand
ccacucgacuuuccaacau

SEQ ID NO: 50285 - RNA, 19 nt, Homo sapiens
  misc_RNA (1)...(19): siRNA sense strand
caacaaaccauggauuucu

SEQ ID NO: 50286 - RNA, 19 nt, Homo sapiens
  misc_RNA (1)...(19): siRNA sense strand
gaggaacagacuuaaguau

SEQ ID NO: 50287 - RNA, 19 nt, Homo sapiens
  misc_RNA (1)...(19): siRNA sense strand
gguggcagcuccaaagcau

SEQ ID NO: 50288 - RNA, 19 nt, Homo sapiens
  misc_RNA (1)...(19): siRNA sense strand
gcaacaaaccauggauuuc

SEQ ID NO: 50289 - RNA, 19 nt, Homo sapiens
  misc_RNA (1)...(19): siRNA sense strand
gcuaaccuaggaagaauug

SEQ ID NO: 50290 - RNA, 19 nt, Homo sapiens
  misc_RNA (1)...(19): siRNA sense strand
gguccgaacugauauaacc

SEQ ID NO: 50291 - RNA, 19 nt, Homo sapiens
  misc_RNA (1)...(19): siRNA sense strand
gugcuaaccuaggaagaau

SEQ ID NO: 50292 - RNA, 19 nt, Homo sapiens
  misc_RNA (1)...(19): siRNA sense strand
caccugaggaggccaagua

SEQ ID NO: 50293 - RNA, 19 nt, Homo sapiens
  misc_RNA (1)...(19): siRNA sense strand
ugaggaacagacuuaagua

SEQ ID NO: 50294 - RNA, 19 nt, Homo sapiens
  misc_RNA (1)...(19): siRNA sense strand
gcaaagugagaaagaucuu

SEQ ID NO: 50295 - RNA, 19 nt, Homo sapiens
  misc_RNA (1)...(19): siRNA sense strand
acaagacgggagagaauuu

SEQ ID NO: 50296 - RNA, 19 nt, Homo sapiens
  misc_RNA (1)...(19): siRNA sense strand
ugacaagacgggagagaau

SEQ ID NO: 50297 - RNA, 19 nt, Homo sapiens
  misc_RNA (1)...(19): siRNA sense strand
caagguccgaacugauaua

SEQ ID NO: 50298 - RNA, 19 nt, Homo sapiens
  misc_RNA (1)...(19): siRNA sense strand
gaaguaaagaagauuugca

SEQ ID NO: 50299 - RNA, 19 nt, Homo sapiens
  misc_RNA (1)...(19): siRNA sense strand
gcaagguccgaacugauau

SEQ ID NO: 50300 - RNA, 19 nt, Homo sapiens
  misc_RNA (1)...(19): siRNA sense strand
auuggaugcuggauaaauu

SEQ ID NO: 50301 - RNA, 19 nt, Homo sapiens
  misc_RNA (1)...(19): siRNA sense strand
acucgacuuuccaacauuu

SEQ ID NO: 50302 - RNA, 19 nt, Homo sapiens
  misc_RNA (1)...(19): siRNA sense strand
ugacaggagaugaaguaaa

SEQ ID NO: 50303 - RNA, 19 nt, Homo sapiens
  misc_RNA (1)...(19): siRNA sense strand
gacaagacgggagagaauu

SEQ ID NO: 50304 - RNA, 19 nt, Homo sapiens
  misc_RNA (1)...(19): siRNA sense strand
ggaagaauuggugugauca

SEQ ID NO: 50305 - RNA, 19 nt, Homo sapiens
  misc_RNA (1)...(19): siRNA sense strand
gggcaacaaaccauggauu

SEQ ID NO: 50306 - RNA, 19 nt, Homo sapiens
  misc_RNA (1)...(19): siRNA sense strand
caggagaugaaguaaagaa

SEQ ID NO: 50307 - RNA, 19 nt, Homo sapiens
  misc_RNA (1)...(19): siRNA sense strand
gcaagauuacugauuucau

SEQ ID NO: 50308 - RNA, 19 nt, Homo sapiens
  misc_RNA (1)...(19): siRNA sense strand
caaguugugcaaagugaga

SEQ ID NO: 50309 - RNA, 19 nt, Homo sapiens
  misc_RNA (1)...(19): siRNA sense strand
ggaggccaaguacaaguug

SEQ ID NO: 50310 - RNA, 19 nt, Homo sapiens
  misc_RNA (1)...(19): siRNA sense strand
aggaagaauuggugugauc

SEQ ID NO: 50311 - RNA, 19 nt, Homo sapiens
  misc_RNA (1)...(19): siRNA sense strand
ggugcuaaccuaggaagaa

SEQ ID NO: 50312 - RNA, 19 nt, Homo sapiens
  misc_RNA (1)...(19): siRNA sense strand
augauaccauucagauuga

SEQ ID NO: 50313 - RNA, 19 nt, Homo sapiens
  misc_RNA (1)...(19): siRNA sense strand
gauaccauucagauugauu

SEQ ID NO: 50314 - RNA, 19 nt, Homo sapiens
  misc_RNA (1)...(19): siRNA sense strand
gaggcacccuggaucuuuu

SEQ ID NO: 50315 - RNA, 19 nt, Homo sapiens
  misc_RNA (1)...(19): siRNA sense strand
ugcaugcagcgguucauua

SEQ ID NO: 50316 - RNA, 19 nt, Homo sapiens
  misc_RNA (1)...(19): siRNA sense strand
agacuggcaagauuacuga

SEQ ID NO: 50317 - RNA, 19 nt, Homo sapiens
  misc_RNA (1)...(19): siRNA sense strand
gagacuggcaagauuacug

SEQ ID NO: 50318 - RNA, 19 nt, Homo sapiens
  misc_RNA (1)...(19): siRNA sense strand
caagggucgcuuugcugua

SEQ ID NO: 50319 - RNA, 19 nt, Homo sapiens
  misc_RNA (1)...(19): siRNA sense strand
gcuuugcuguacaucguau

SEQ ID NO: 50320 - RNA, 19 nt, Homo sapiens
  misc_RNA (1)...(19): siRNA sense strand
uggcagcuccaaagcauug

SEQ ID NO: 50321 - RNA, 19 nt, Homo sapiens
  misc_RNA (1)...(19): siRNA sense strand
gagaggcacccuggaucuu

SEQ ID NO: 50322 - RNA, 19 nt, Homo sapiens
  misc_RNA (1)...(19): siRNA sense strand
cuaggaagaauugguguga

SEQ ID NO: 50323 - RNA, 19 nt, Homo sapiens
  misc_RNA (1)...(19): siRNA sense strand
uggcaagauuacugauuuc

SEQ ID NO: 50324 - RNA, 19 nt, Homo sapiens
  misc_RNA (1)...(19): siRNA sense strand
ugacaccaagggucgcuuu

SEQ ID NO: 50325 - RNA, 19 nt, Homo sapiens
  misc_RNA (1)...(19): siRNA sense strand
cugaggaggccaaguacaa

SEQ ID NO: 50326 - RNA, 19 nt, Homo sapiens
  misc_RNA (1)...(19): siRNA sense strand
agaggcacccuggaucuuu

SEQ ID NO: 50327 - RNA, 19 nt, Homo sapiens
  misc_RNA (1)...(19): siRNA sense strand
aggaacagacuuaaguaug

SEQ ID NO: 50328 - RNA, 19 nt, Homo sapiens
  misc_RNA (1)...(19): siRNA sense strand
caccaagggucgcuuugcu

SEQ ID NO: 50329 - RNA, 19 nt, Homo sapiens
  misc_RNA (1)...(19): siRNA sense strand
gaggaggccaaguacaagu

SEQ ID NO: 50330 - RNA, 19 nt, Homo sapiens
  misc_RNA (1)...(19): siRNA sense strand
augcagcgguucauuaaaa

SEQ ID NO: 50331 - RNA, 19 nt, Homo sapiens
  misc_RNA (1)...(19): siRNA sense strand
ucaaguucgacacugguaa

SEQ ID NO: 50332 - RNA, 19 nt, Homo sapiens
  misc_RNA (1)...(19): siRNA sense strand
caagacgggagagaauuuc

SEQ ID NO: 50333 - RNA, 19 nt, Homo sapiens
  misc_RNA (1)...(19): siRNA sense strand
ccagaaagaugaauuaauc

SEQ ID NO: 50334 - RNA, 19 nt, Homo sapiens
  misc_RNA (1)...(19): siRNA sense strand
ggacuucaaucacaucaau

SEQ ID NO: 50335 - RNA, 19 nt, Homo sapiens
  misc_RNA (1)...(19): siRNA sense strand
aaacaaggauaucaggaaa

SEQ ID NO: 50336 - RNA, 19 nt, Homo sapiens
  misc_RNA (1)...(19): siRNA sense strand
acaaggauaucaggaaauu

SEQ ID NO: 50337 - RNA, 19 nt, Homo sapiens
  misc_RNA (1)...(19): siRNA sense strand
caaucagacugucgacauu

SEQ ID NO: 50338 - RNA, 19 nt, Homo sapiens
  misc_RNA (1)...(19): siRNA sense strand
gaccagguguugcuuguuc

SEQ ID NO: 50339 - RNA, 19 nt, Homo sapiens
  misc_RNA (1)...(19): siRNA sense strand
acacugggcuuccguuaca

SEQ ID NO: 50340 - RNA, 19 nt, Homo sapiens
  misc_RNA (1)...(19): siRNA sense strand
gggcuuccguuacaagaug

SEQ ID NO: 50341 - RNA, 19 nt, Homo sapiens
  misc_RNA (1)...(19): siRNA sense strand
ggagggacuucaaucacau

SEQ ID NO: 50342 - RNA, 19 nt, Homo sapiens
  misc_RNA (1)...(19): siRNA sense strand
gagaccagguguugcuugu

SEQ ID NO: 50343 - RNA, 19 nt, Homo sapiens
  misc_RNA (1)...(19): siRNA sense strand
cugaagggacgcacaguua

SEQ ID NO: 50344 - RNA, 19 nt, Homo sapiens
  misc_RNA (1)...(19): siRNA sense strand
gcaaucagacugucgacau

SEQ ID NO: 50345 - RNA, 19 nt, Homo sapiens
  misc_RNA (1)...(19): siRNA sense strand
gaagacuauucucagcaau

SEQ ID NO: 50346 - RNA, 19 nt, Homo sapiens
  misc_RNA (1)...(19): siRNA sense strand
caagaugaggucuguguau

SEQ ID NO: 50347 - RNA, 19 nt, Homo sapiens
  misc_RNA (1)...(19): siRNA sense strand
gguguugcuuguucaguau

SEQ ID NO: 50348 - RNA, 19 nt, Homo sapiens
  misc_RNA (1)...(19): siRNA sense strand
gaagggacgcacaguuauc

SEQ ID NO: 50349 - RNA, 19 nt, Homo sapiens
  misc_RNA (1)...(19): siRNA sense strand
agacuauucucagcaauca

SEQ ID NO: 50350 - RNA, 19 nt, Homo sapiens
  misc_RNA (1)...(19): siRNA sense strand
cggagggacuucaaucaca

SEQ ID NO: 50351 - RNA, 19 nt, Homo sapiens
  misc_RNA (1)...(19): siRNA sense strand
aaauucagcggcuuugauu

SEQ ID NO: 50352 - RNA, 19 nt, Homo sapiens
  misc_RNA (1)...(19): siRNA sense strand
guuacaagaugaggucugu

SEQ ID NO: 50353 - RNA, 19 nt, Homo sapiens
  misc_RNA (1)...(19): siRNA sense strand
gcuccggguugacaaaugg

SEQ ID NO: 50354 - RNA, 19 nt, Homo sapiens
  misc_RNA (1)...(19): siRNA sense strand
aagaugaggucuguguaug

SEQ ID NO: 50355 - RNA, 19 nt, Homo sapiens
  misc_RNA (1)...(19): siRNA sense strand
gaugaggucuguguaugcu

SEQ ID NO: 50356 - RNA, 19 nt, Homo sapiens
  misc_RNA (1)...(19): siRNA sense strand
uaucucaagcccagaaaga

SEQ ID NO: 50357 - RNA, 19 nt, Homo sapiens
  misc_RNA (1)...(19): siRNA sense strand
ugaagggacgcacaguuau

SEQ ID NO: 50358 - RNA, 19 nt, Homo sapiens
  misc_RNA (1)...(19): siRNA sense strand
gcccagaaagaugaauuaa

SEQ ID NO: 50359 - RNA, 19 nt, Homo sapiens
  misc_RNA (1)...(19): siRNA sense strand
agguguugcuuguucagua

SEQ ID NO: 50360 - RNA, 19 nt, Homo sapiens
  misc_RNA (1)...(19): siRNA sense strand
guaucuaugucucugaaaa

SEQ ID NO: 50361 - RNA, 19 nt, Homo sapiens
  misc_RNA (1)...(19): siRNA sense strand
gacgcacaguuaucgugaa

SEQ ID NO: 50362 - RNA, 19 nt, Homo sapiens
  misc_RNA (1)...(19): siRNA sense strand
aaaagaggcuccggguuga

SEQ ID NO: 50363 - RNA, 19 nt, Homo sapiens
  misc_RNA (1)...(19): siRNA sense strand
gaugagaccagguguugcu

SEQ ID NO: 50364 - RNA, 19 nt, Homo sapiens
  misc_RNA (1)...(19): siRNA sense strand
cggaugagaccagguguug

SEQ ID NO: 50365 - RNA, 19 nt, Homo sapiens
  misc_RNA (1)...(19): siRNA sense strand
gcuaccguucggacuauuu

SEQ ID NO: 50366 - RNA, 19 nt, Homo sapiens
  misc_RNA (1)...(19): siRNA sense strand
ccgcaggguucggaugaga

SEQ ID NO: 50367 - RNA, 19 nt, Homo sapiens
  misc_RNA (1)...(19): siRNA sense strand
uuacacugggcuuccguua

SEQ ID NO: 50368 - RNA, 19 nt, Homo sapiens
  misc_RNA (1)...(19): siRNA sense strand
ucucaagcccagaaagaug

SEQ ID NO: 50369 - RNA, 19 nt, Homo sapiens
  misc_RNA (1)...(19): siRNA sense strand
ugguaucuaugucucugaa

SEQ ID NO: 50370 - RNA, 19 nt, Homo sapiens
  misc_RNA (1)...(19): siRNA sense strand
acaagaugaggucugugua

SEQ ID NO: 50371 - RNA, 19 nt, Homo sapiens
  misc_RNA (1)...(19): siRNA sense strand
caaggauaucaggaaauuu

SEQ ID NO: 50372 - RNA, 19 nt, Homo sapiens
  misc_RNA (1)...(19): siRNA sense strand
gaugaauuaauccuugaag

SEQ ID NO: 50373 - RNA, 19 nt, Homo sapiens
  misc_RNA (1)...(19): siRNA sense strand
gcaagaagcucaugacugu

SEQ ID NO: 50374 - RNA, 19 nt, Homo sapiens
  misc_RNA (1)...(19): siRNA sense strand
acauuucccugcaggauua

SEQ ID NO: 50375 - RNA, 19 nt, Homo sapiens
  misc_RNA (1)...(19): siRNA sense strand
ggagaaguaugccaaguac

SEQ ID NO: 50376 - RNA, 19 nt, Homo sapiens
  misc_RNA (1)...(19): siRNA sense strand
ggaaguggagcaccgauga

SEQ ID NO: 50377 - RNA, 19 nt, Homo sapiens
  misc_RNA (1)...(19): siRNA sense strand
gccaaacgcuuccgcaaag

SEQ ID NO: 50378 - RNA, 19 nt, Homo sapiens
  misc_RNA (1)...(19): siRNA sense strand
gccaagggcuccucgaacu

SEQ ID NO: 50379 - RNA, 19 nt, Homo sapiens
  misc_RNA (1)...(19): siRNA sense strand
aaagcucagugucccauug

SEQ ID NO: 50380 - RNA, 19 nt, Homo sapiens
  misc_RNA (1)...(19): siRNA sense strand
cucacuaacuccaugauga

SEQ ID NO: 50381 - RNA, 19 nt, Homo sapiens
  misc_RNA (1)...(19): siRNA sense strand
gaucauacaccugcucaca

SEQ ID NO: 50382 - RNA, 19 nt, Homo sapiens
  misc_RNA (1)...(19): siRNA sense strand
ggauuacauugcagugaag

SEQ ID NO: 50383 - RNA, 19 nt, Homo sapiens
  misc_RNA (1)...(19): siRNA sense strand
aagcaugccuucgagauca

SEQ ID NO: 50384 - RNA, 19 nt, Homo sapiens
  misc_RNA (1)...(19): siRNA sense strand
aggauuacauugcagugaa

SEQ ID NO: 50385 - RNA, 19 nt, Homo sapiens
  misc_RNA (1)...(19): siRNA sense strand
gacauuucccugcaggauu

SEQ ID NO: 50386 - RNA, 19 nt, Homo sapiens
  misc_RNA (1)...(19): siRNA sense strand
ucgaacuccuaugccauua

SEQ ID NO: 50387 - RNA, 19 nt, Homo sapiens
  misc_RNA (1)...(19): siRNA sense strand
acauugcagugaaggagaa

SEQ ID NO: 50388 - RNA, 19 nt, Homo sapiens
  misc_RNA (1)...(19): siRNA sense strand
ccagacaucaagcucuuug

SEQ ID NO: 50389 - RNA, 19 nt, Homo sapiens
  misc_RNA (1)...(19): siRNA sense strand
gcagugaaggagaaguaug

SEQ ID NO: 50390 - RNA, 19 nt, Homo sapiens
  misc_RNA (1)...(19): siRNA sense strand
gaaguggagcaccgaugau

SEQ ID NO: 50391 - RNA, 19 nt, Homo sapiens
  misc_RNA (1)...(19): siRNA sense strand
aggagaaguaugccaagua

SEQ ID NO: 50392 - RNA, 19 nt, Homo sapiens
  misc_RNA (1)...(19): siRNA sense strand
ucacuaacuccaugaugau

SEQ ID NO: 50393 - RNA, 19 nt, Homo sapiens
  misc_RNA (1)...(19): siRNA sense strand
gcugccuuccggaacauua

SEQ ID NO: 50394 - RNA, 19 nt, Homo sapiens
  misc_RNA (1)...(19): siRNA sense strand
caagcaugccuucgagauc

SEQ ID NO: 50395 - RNA, 19 nt, Homo sapiens
  misc_RNA (1)...(19): siRNA sense strand
cgaacuccuaugccauuaa

SEQ ID NO: 50396 - RNA, 19 nt, Homo sapiens
  misc_RNA (1)...(19): siRNA sense strand
guggagcgccucacuaacu

SEQ ID NO: 50397 - RNA, 19 nt, Homo sapiens
  misc_RNA (1)...(19): siRNA sense strand
ggugaacgccaucaucaac

SEQ ID NO: 50398 - RNA, 19 nt, Homo sapiens
  misc_RNA (1)...(19): siRNA sense strand
cuaacuccaugaugaugca

SEQ ID NO: 50399 - RNA, 19 nt, Homo sapiens
  misc_RNA (1)...(19): siRNA sense strand
cgccaaacgcuuccgcaaa

SEQ ID NO: 50400 - RNA, 19 nt, Homo sapiens
  misc_RNA (1)...(19): siRNA sense strand
ugaacgccaucaucaacag

SEQ ID NO: 50401 - RNA, 19 nt, Homo sapiens
  misc_RNA (1)...(19): siRNA sense strand
gcaacaacggcaagaagcu

SEQ ID NO: 50402 - RNA, 19 nt, Homo sapiens
  misc_RNA (1)...(19): siRNA sense strand
gcagagaccccagacauca

SEQ ID NO: 50403 - RNA, 19 nt, Homo sapiens
  misc_RNA (1)...(19): siRNA sense strand
guggagcaccgaugaugug

SEQ ID NO: 50404 - RNA, 19 nt, Homo sapiens
  misc_RNA (1)...(19): siRNA sense strand
gaacgccaucaucaacagu

SEQ ID NO: 50405 - RNA, 19 nt, Homo sapiens
  misc_RNA (1)...(19): siRNA sense strand
ucaagcaugccuucgagau

SEQ ID NO: 50406 - RNA, 19 nt, Homo sapiens
  misc_RNA (1)...(19): siRNA sense strand
gaugugcagaucaaugaca

SEQ ID NO: 50407 - RNA, 19 nt, Homo sapiens
  misc_RNA (1)...(19): siRNA sense strand
gaagaaauaugaugaaagg

SEQ ID NO: 50408 - RNA, 19 nt, Homo sapiens
  misc_RNA (1)...(19): siRNA sense strand
ccaagacccuggugaagaa

SEQ ID NO: 50409 - RNA, 19 nt, Homo sapiens
  misc_RNA (1)...(19): siRNA sense strand
acaagaagcggaaguauga

SEQ ID NO: 50410 - RNA, 19 nt, Homo sapiens
  misc_RNA (1)...(19): siRNA sense strand
agaaagcccuaccacaaga

SEQ ID NO: 50411 - RNA, 19 nt, Homo sapiens
  misc_RNA (1)...(19): siRNA sense strand
agagaaagcccuaccacaa

SEQ ID NO: 50412 - RNA, 19 nt, Homo sapiens
  misc_RNA (1)...(19): siRNA sense strand
gagaaagcccuaccacaag

SEQ ID NO: 50413 - RNA, 19 nt, Homo sapiens
  misc_RNA (1)...(19): siRNA sense strand
gaagcggaaguaugaguug

SEQ ID NO: 50414 - RNA, 19 nt, Homo sapiens
  misc_RNA (1)...(19): siRNA sense strand
gaaagcccuaccacaagaa

SEQ ID NO: 50415 - RNA, 19 nt, Homo sapiens
  misc_RNA (1)...(19): siRNA sense strand
ccgagcagauggcuaugug

SEQ ID NO: 50416 - RNA, 19 nt, Homo sapiens
  misc_RNA (1)...(19): siRNA sense strand
agacccuggugaagaauug

SEQ ID NO: 50417 - RNA, 19 nt, Homo sapiens
  misc_RNA (1)...(19): siRNA sense strand
gggcaucucucgggacaac

SEQ ID NO: 50418 - RNA, 19 nt, Homo sapiens
  misc_RNA (1)...(19): siRNA sense strand
ugucuacaaugcaucuaau

SEQ ID NO: 50419 - RNA, 19 nt, Homo sapiens
  misc_RNA (1)...(19): siRNA sense strand
cacaagaagcggaaguaug

SEQ ID NO: 50420 - RNA, 19 nt, Homo sapiens
  misc_RNA (1)...(19): siRNA sense strand
gcaagaagggagccaagcu

SEQ ID NO: 50421 - RNA, 19 nt, Homo sapiens
  misc_RNA (1)...(19): siRNA sense strand
gcggggagguaacaagaaa

SEQ ID NO: 50422 - RNA, 19 nt, Homo sapiens
  misc_RNA (1)...(19): siRNA sense strand
uacaaugcaucuaauaacg

SEQ ID NO: 50423 - RNA, 19 nt, Homo sapiens
  misc_RNA (1)...(19): siRNA sense strand
ccacaagaagcggaaguau

SEQ ID NO: 50424 - RNA, 19 nt, Homo sapiens
  misc_RNA (1)...(19): siRNA sense strand
gcaagagaaagcccuacca

SEQ ID NO: 50425 - RNA, 19 nt, Homo sapiens
  misc_RNA (1)...(19): siRNA sense strand
cuacaaugcaucuaauaac

SEQ ID NO: 50426 - RNA, 19 nt, Homo sapiens
  misc_RNA (1)...(19): siRNA sense strand
gcugccaacaccaagauug

SEQ ID NO: 50427 - RNA, 19 nt, Homo sapiens
  misc_RNA (1)...(19): siRNA sense strand
agaauugcaucgugcucau

SEQ ID NO: 50428 - RNA, 19 nt, Homo sapiens
  misc_RNA (1)...(19): siRNA sense strand
ggggagguaacaagaaaua

SEQ ID NO: 50429 - RNA, 19 nt, Homo sapiens
  misc_RNA (1)...(19): siRNA sense strand
ggaagaagagauuuuaaac

SEQ ID NO: 50430 - RNA, 19 nt, Homo sapiens
  misc_RNA (1)...(19): siRNA sense strand
gaacagacaggcccagauu

SEQ ID NO: 50431 - RNA, 19 nt, Homo sapiens
  misc_RNA (1)...(19): siRNA sense strand
ucagugggcuguaauguug

SEQ ID NO: 50432 - RNA, 19 nt, Homo sapiens
  misc_RNA (1)...(19): siRNA sense strand
caucaaagcccucaaggaa

SEQ ID NO: 50433 - RNA, 19 nt, Homo sapiens
  misc_RNA (1)...(19): siRNA sense strand
gaugagauugucaacauug

SEQ ID NO: 50434 - RNA, 19 nt, Homo sapiens
  misc_RNA (1)...(19): siRNA sense strand
acagacaggcccagauuga

SEQ ID NO: 50435 - RNA, 19 nt, Homo sapiens
  misc_RNA (1)...(19): siRNA sense strand
ugaugagauugucaacauu

SEQ ID NO: 50436 - RNA, 19 nt, Homo sapiens
  misc_RNA (1)...(19): siRNA sense strand
gaugcggcaccgauccuua

SEQ ID NO: 50437 - RNA, 19 nt, Homo sapiens
  misc_RNA (1)...(19): siRNA sense strand
aaaaguuggugaugacauu

SEQ ID NO: 50438 - RNA, 19 nt, Homo sapiens
  misc_RNA (1)...(19): siRNA sense strand
gaucaucaaagcccucaag

SEQ ID NO: 50439 - RNA, 19 nt, Homo sapiens
  misc_RNA (1)...(19): siRNA sense strand
cgagaucaaagucguauac

SEQ ID NO: 50440 - RNA, 19 nt, Homo sapiens
  misc_RNA (1)...(19): siRNA sense strand
gugggaauaucacuuuuga

SEQ ID NO: 50441 - RNA, 19 nt, Homo sapiens
  misc_RNA (1)...(19): siRNA sense strand
gucagugggcuguaauguu

SEQ ID NO: 50442 - RNA, 19 nt, Homo sapiens
  misc_RNA (1)...(19): siRNA sense strand
gaccauaacugaugaugug

SEQ ID NO: 50443 - RNA, 19 nt, Homo sapiens
  misc_RNA (1)...(19): siRNA sense strand
uugaagagguuguuuauga

SEQ ID NO: 50444 - RNA, 19 nt, Homo sapiens
  misc_RNA (1)...(19): siRNA sense strand
gaagaaccaacuccacauu

SEQ ID NO: 50445 - RNA, 19 nt, Homo sapiens
  misc_RNA (1)...(19): siRNA sense strand
uaacaaggaccgaaagguu

SEQ ID NO: 50446 - RNA, 19 nt, Homo sapiens
  misc_RNA (1)...(19): siRNA sense strand
gcaagauccucacuuucga

SEQ ID NO: 50447 - RNA, 19 nt, Homo sapiens
  misc_RNA (1)...(19): siRNA sense strand
ggaguggacauccgccaua

SEQ ID NO: 50448 - RNA, 19 nt, Homo sapiens
  misc_RNA (1)...(19): siRNA sense strand
gaguggacauccgccauaa

SEQ ID NO: 50449 - RNA, 19 nt, Homo sapiens
  misc_RNA (1)...(19): siRNA sense strand
gaaccaacuccacauucaa

SEQ ID NO: 50450 - RNA, 19 nt, Homo sapiens
  misc_RNA (1)...(19): siRNA sense strand
ggacauccgccauaacaag

SEQ ID NO: 50451 - RNA, 19 nt, Homo sapiens
  misc_RNA (1)...(19): siRNA sense strand
agaaccaacuccacauuca

SEQ ID NO: 50452 - RNA, 19 nt, Homo sapiens
  misc_RNA (1)...(19): siRNA sense strand
ccaagagccaggauaucua

SEQ ID NO: 50453 - RNA, 19 nt, Homo sapiens
  misc_RNA (1)...(19): siRNA sense strand
ggcuguuggucaaguuaua

SEQ ID NO: 50454 - RNA, 19 nt, Homo sapiens
  misc_RNA (1)...(19): siRNA sense strand
aaacaagacggccgugguu

SEQ ID NO: 50455 - RNA, 19 nt, Homo sapiens
  misc_RNA (1)...(19): siRNA sense strand
cgagagguguaccggcauu

SEQ ID NO: 50456 - RNA, 19 nt, Homo sapiens
  misc_RNA (1)...(19): siRNA sense strand
gcaagggccgagaggugua

SEQ ID NO: 50457 - RNA, 19 nt, Homo sapiens
  misc_RNA (1)...(19): siRNA sense strand
gaagagguuguuuaugagu

SEQ ID NO: 50458 - RNA, 19 nt, Homo sapiens
  misc_RNA (1)...(19): siRNA sense strand
ugaagagguuguuuaugag

SEQ ID NO: 50459 - RNA, 19 nt, Homo sapiens
  misc_RNA (1)...(19): siRNA sense strand
ggucaaguuauacagguuu

SEQ ID NO: 50460 - RNA, 19 nt, Homo sapiens
  misc_RNA (1)...(19): siRNA sense strand
gaaagguucggcgcaagga

SEQ ID NO: 50461 - RNA, 19 nt, Homo sapiens
  misc_RNA (1)...(19): siRNA sense strand
gaggcuguuggucaaguua

SEQ ID NO: 50462 - RNA, 19 nt, Homo sapiens
  misc_RNA (1)...(19): siRNA sense strand
ggaccauaacugaugaugu

SEQ ID NO: 50463 - RNA, 19 nt, Homo sapiens
  misc_RNA (1)...(19): siRNA sense strand
guggacauccgccauaaca

SEQ ID NO: 50464 - RNA, 19 nt, Homo sapiens
  misc_RNA (1)...(19): siRNA sense strand
guguugaagagguuguuua

SEQ ID NO: 50465 - RNA, 19 nt, Homo sapiens
  misc_RNA (1)...(19): siRNA sense strand
gagcccaagagccaggaua

SEQ ID NO: 50466 - RNA, 19 nt, Homo sapiens
  misc_RNA (1)...(19): siRNA sense strand
caagagccaggauaucuac

SEQ ID NO: 50467 - RNA, 19 nt, Homo sapiens
  misc_RNA (1)...(19): siRNA sense strand
gccauaacaaggaccgaaa

SEQ ID NO: 50468 - RNA, 19 nt, Homo sapiens
  misc_RNA (1)...(19): siRNA sense strand
ugaggcuguuggucaaguu

SEQ ID NO: 50469 - RNA, 19 nt, Homo sapiens
  misc_RNA (1)...(19): siRNA sense strand
caagacggccgugguugug

SEQ ID NO: 50470 - RNA, 19 nt, Homo sapiens
  misc_RNA (1)...(19): siRNA sense strand
uuacguuacuuccagauua

SEQ ID NO: 50471 - RNA, 19 nt, Homo sapiens
  misc_RNA (1)...(19): siRNA sense strand
gaaguucacucuugauugc

SEQ ID NO: 50472 - RNA, 19 nt, Homo sapiens
  misc_RNA (1)...(19): siRNA sense strand
ggaggaagacgaggauuaa

SEQ ID NO: 50473 - RNA, 19 nt, Homo sapiens
  misc_RNA (1)...(19): siRNA sense strand
gaagaagaauaaucuacgu

SEQ ID NO: 50474 - RNA, 19 nt, Homo sapiens
  misc_RNA (1)...(19): siRNA sense strand
gaagcaaguucugaaguuc

SEQ ID NO: 50475 - RNA, 19 nt, Homo sapiens
  misc_RNA (1)...(19): siRNA sense strand
cgaggugccuuucuccaaa

SEQ ID NO: 50476 - RNA, 19 nt, Homo sapiens
  misc_RNA (1)...(19): siRNA sense strand
uguagaagauggaaucaug

SEQ ID NO: 50477 - RNA, 19 nt, Homo sapiens
  misc_RNA (1)...(19): siRNA sense strand
gcacccacccuguagaaga

SEQ ID NO: 50478 - RNA, 19 nt, Homo sapiens
  misc_RNA (1)...(19): siRNA sense strand
ggacgaagaagaggaggaa

SEQ ID NO: 50479 - RNA, 19 nt, Homo sapiens
  misc_RNA (1)...(19): siRNA sense strand
ucauggaugcugccaauuu

SEQ ID NO: 50480 - RNA, 19 nt, Homo sapiens
  misc_RNA (1)...(19): siRNA sense strand
uacguuacuuccagauuaa

SEQ ID NO: 50481 - RNA, 19 nt, Homo sapiens
  misc_RNA (1)...(19): siRNA sense strand
aaucauggaugcugccaau

SEQ ID NO: 50482 - RNA, 19 nt, Homo sapiens
  misc_RNA (1)...(19): siRNA sense strand
gauuaaccaggacgaagaa

SEQ ID NO: 50483 - RNA, 19 nt, Homo sapiens
  misc_RNA (1)...(19): siRNA sense strand
ugacauccgaggugccuuu

SEQ ID NO: 50484 - RNA, 19 nt, Homo sapiens
  misc_RNA (1)...(19): siRNA sense strand
cauggaugcugccaauuuu

SEQ ID NO: 50485 - RNA, 19 nt, Homo sapiens
  misc_RNA (1)...(19): siRNA sense strand
aggaggaagacgaggauua

SEQ ID NO: 50486 - RNA, 19 nt, Homo sapiens
  misc_RNA (1)...(19): siRNA sense strand
cacccacccuguagaagau

SEQ ID NO: 50487 - RNA, 19 nt, Homo sapiens
  misc_RNA (1)...(19): siRNA sense strand
cauccgaggugccuuucuc

SEQ ID NO: 50488 - RNA, 19 nt, Homo sapiens
  misc_RNA (1)...(19): siRNA sense strand
uaaccaggacgaagaagag

SEQ ID NO: 50489 - RNA, 19 nt, Homo sapiens
  misc_RNA (1)...(19): siRNA sense strand
ugauugcacccacccugua

SEQ ID NO: 50490 - RNA, 19 nt, Homo sapiens
  misc_RNA (1)...(19): siRNA sense strand
cggaaaagcugggaaccuu

SEQ ID NO: 50491 - RNA, 19 nt, Homo sapiens
  misc_RNA (1)...(19): siRNA sense strand
agauuaaccaggacgaaga

SEQ ID NO: 50492 - RNA, 19 nt, Homo sapiens
  misc_RNA (1)...(19): siRNA sense strand
gaggugccuuucuccaaaa

SEQ ID NO: 50493 - RNA, 19 nt, Homo sapiens
  misc_RNA (1)...(19): siRNA sense strand
gguugcgcguaguugcuaa

SEQ ID NO: 50494 - RNA, 19 nt, Homo sapiens
  misc_RNA (1)...(19): siRNA sense strand
uagaagauggaaucaugga

SEQ ID NO: 50495 - RNA, 19 nt, Homo sapiens
  misc_RNA (1)...(19): siRNA sense strand
uuacgaauuacguuacuuc

SEQ ID NO: 50496 - RNA, 19 nt, Homo sapiens
  misc_RNA (1)...(19): siRNA sense strand
uagaaaggcucaacgagaa

SEQ ID NO: 50497 - RNA, 19 nt, Homo sapiens
  misc_RNA (1)...(19): siRNA sense strand
uaucagggcugcuaaggaa

SEQ ID NO: 50498 - RNA, 19 nt, Homo sapiens
  misc_RNA (1)...(19): siRNA sense strand
ggaauccucggcagauaaa

SEQ ID NO: 50499 - RNA, 19 nt, Homo sapiens
  misc_RNA (1)...(19): siRNA sense strand
cuacaaaggcagcaccuaa

SEQ ID NO: 50500 - RNA, 19 nt, Homo sapiens
  misc_RNA (1)...(19): siRNA sense strand
cggaagaaauucaaaagaa

SEQ ID NO: 50501 - RNA, 19 nt, Homo sapiens
  misc_RNA (1)...(19): siRNA sense strand
cgaaaugcgagucggcuuu

SEQ ID NO: 50502 - RNA, 19 nt, Homo sapiens
  misc_RNA (1)...(19): siRNA sense strand
gggacagucggaagaaauu

SEQ ID NO: 50503 - RNA, 19 nt, Homo sapiens
  misc_RNA (1)...(19): siRNA sense strand
gcucaacgagaacaagcua

SEQ ID NO: 50504 - RNA, 19 nt, Homo sapiens
  misc_RNA (1)...(19): siRNA sense strand
ugugaagccugugaaaguu

SEQ ID NO: 50505 - RNA, 19 nt, Homo sapiens
  misc_RNA (1)...(19): siRNA sense strand
gcgagucggcuuuccuuuc

SEQ ID NO: 50506 - RNA, 19 nt, Homo sapiens
  misc_RNA (1)...(19): siRNA sense strand
gugaagccugugaaaguuu

SEQ ID NO: 50507 - RNA, 19 nt, Homo sapiens
  misc_RNA (1)...(19): siRNA sense strand
gaaaggcucaacgagaaca

SEQ ID NO: 50508 - RNA, 19 nt, Homo sapiens
  misc_RNA (1)...(19): siRNA sense strand
caacgagaacaagcuauca

SEQ ID NO: 50509 - RNA, 19 nt, Homo sapiens
  misc_RNA (1)...(19): siRNA sense strand
aaaggcagcaccuaagcaa

SEQ ID NO: 50510 - RNA, 19 nt, Homo sapiens
  misc_RNA (1)...(19): siRNA sense strand
gcuaaggcaccuacaaagg

SEQ ID NO: 50511 - RNA, 19 nt, Homo sapiens
  misc_RNA (1)...(19): siRNA sense strand
ugcaauggcugcugcuaag

SEQ ID NO: 50512 - RNA, 19 nt, Homo sapiens
  misc_RNA (1)...(19): siRNA sense strand
caagaggaaucagaaaccu

SEQ ID NO: 50513 - RNA, 19 nt, Homo sapiens
  misc_RNA (1)...(19): siRNA sense strand
cgagucggcuuuccuuucc

SEQ ID NO: 50514 - RNA, 19 nt, Homo sapiens
  misc_RNA (1)...(19): siRNA sense strand
gauugugaagccugugaaa

SEQ ID NO: 50515 - RNA, 19 nt, Homo sapiens
  misc_RNA (1)...(19): siRNA sense strand
caagcuaucagggcugcua

SEQ ID NO: 50516 - RNA, 19 nt, Homo sapiens
  misc_RNA (1)...(19): siRNA sense strand
gucgagcugugcaguuuua

SEQ ID NO: 50517 - RNA, 19 nt, Homo sapiens
  misc_RNA (1)...(19): siRNA sense strand
gcugauauaauggccaaga

SEQ ID NO: 50518 - RNA, 19 nt, Homo sapiens
  misc_RNA (1)...(19): siRNA sense strand
cggcuuuccuuuccaagag

SEQ ID NO: 50519 - RNA, 19 nt, Homo sapiens
  misc_RNA (1)...(19): siRNA sense strand
caaaggcagcaccuaagca

SEQ ID NO: 50520 - RNA, 19 nt, Homo sapiens
  misc_RNA (1)...(19): siRNA sense strand
cugcuaaggcaccuacaaa

SEQ ID NO: 50521 - RNA, 19 nt, Homo sapiens
  misc_RNA (1)...(19): siRNA sense strand
gaaguuagaaaggcucaac

SEQ ID NO: 50522 - RNA, 19 nt, Homo sapiens
  misc_RNA (1)...(19): siRNA sense strand
gaaaccugaaguuagaaag

SEQ ID NO: 50523 - RNA, 19 nt, Homo sapiens
  misc_RNA (1)...(19): siRNA sense strand
gacagucggaagaaauuca

SEQ ID NO: 50524 - RNA, 19 nt, Homo sapiens
  misc_RNA (1)...(19): siRNA sense strand
aggucgagcugugcaguuu

SEQ ID NO: 50525 - RNA, 19 nt, Homo sapiens
  misc_RNA (1)...(19): siRNA sense strand
ggacagucggaagaaauuc

SEQ ID NO: 50526 - RNA, 19 nt, Homo sapiens
  misc_RNA (1)...(19): siRNA sense strand
gcaccuaagcaaaagauug

SEQ ID NO: 50527 - RNA, 19 nt, Homo sapiens
  misc_RNA (1)...(19): siRNA sense strand
ggccaagaggaaucagaaa

SEQ ID NO: 50528 - RNA, 19 nt, Homo sapiens
  misc_RNA (1)...(19): siRNA sense strand
uauaauggccaagaggaau

SEQ ID NO: 50529 - RNA, 19 nt, Homo sapiens
  misc_RNA (1)...(19): siRNA sense strand
gcacugagcccaauaacuu

SEQ ID NO: 50530 - RNA, 19 nt, Homo sapiens
  misc_RNA (1)...(19): siRNA sense strand
ggaccaccaucaacaagaa

SEQ ID NO: 50531 - RNA, 19 nt, Homo sapiens
  misc_RNA (1)...(19): siRNA sense strand
ggaauaagcagaccuacag

SEQ ID NO: 50532 - RNA, 19 nt, Homo sapiens
  misc_RNA (1)...(19): siRNA sense strand
gcaauuccuuccgcuacaa

SEQ ID NO: 50533 - RNA, 19 nt, Homo sapiens
  misc_RNA (1)...(19): siRNA sense strand
ggacugauucaccgcaaga

SEQ ID NO: 50534 - RNA, 19 nt, Homo sapiens
  misc_RNA (1)...(19): siRNA sense strand
ccaguuuccugaucaagag

SEQ ID NO: 50535 - RNA, 19 nt, Homo sapiens
  misc_RNA (1)...(19): siRNA sense strand
ggaagccugccaccuccua

SEQ ID NO: 50536 - RNA, 19 nt, Homo sapiens
  misc_RNA (1)...(19): siRNA sense strand
cuacagcacugagcccaau

SEQ ID NO: 50537 - RNA, 19 nt, Homo sapiens
  misc_RNA (1)...(19): siRNA sense strand
gccagaagccugugauggu

SEQ ID NO: 50538 - RNA, 19 nt, Homo sapiens
  misc_RNA (1)...(19): siRNA sense strand
gcuccaguuuccugaucaa

SEQ ID NO: 50539 - RNA, 19 nt, Homo sapiens
  misc_RNA (1)...(19): siRNA sense strand
agaagccugugauggugaa

SEQ ID NO: 50540 - RNA, 19 nt, Homo sapiens
  misc_RNA (1)...(19): siRNA sense strand
cugcgcaucugcaauggau

SEQ ID NO: 50541 - RNA, 19 nt, Homo sapiens
  misc_RNA (1)...(19): siRNA sense strand
agaggaauaagcagaccua

SEQ ID NO: 50542 - RNA, 19 nt, Homo sapiens
  misc_RNA (1)...(19): siRNA sense strand
gugucgugguggucauuaa

SEQ ID NO: 50543 - RNA, 19 nt, Homo sapiens
  misc_RNA (1)...(19): siRNA sense strand
ccgcuacaacggacugauu

SEQ ID NO: 50544 - RNA, 19 nt, Homo sapiens
  misc_RNA (1)...(19): siRNA sense strand
gaagccugccaccuccuau

SEQ ID NO: 50545 - RNA, 19 nt, Homo sapiens
  misc_RNA (1)...(19): siRNA sense strand
gugcggaccaccaucaaca

SEQ ID NO: 50546 - RNA, 19 nt, Homo sapiens
  misc_RNA (1)...(19): siRNA sense strand
ggaaagagcugcccaacug

SEQ ID NO: 50547 - RNA, 19 nt, Homo sapiens
  misc_RNA (1)...(19): siRNA sense strand
caacaggguucguagaaga

SEQ ID NO: 50548 - RNA, 19 nt, Homo sapiens
  misc_RNA (1)...(19): siRNA sense strand
gcaaagccaucguggaaag

SEQ ID NO: 50549 - RNA, 19 nt, Homo sapiens
  misc_RNA (1)...(19): siRNA sense strand
gacaacaggguucguagaa

SEQ ID NO: 50550 - RNA, 19 nt, Homo sapiens
  misc_RNA (1)...(19): siRNA sense strand
gcaccagucagaccgauau

SEQ ID NO: 50551 - RNA, 19 nt, Homo sapiens
  misc_RNA (1)...(19): siRNA sense strand
ccgcaaagccaucguggaa

SEQ ID NO: 50552 - RNA, 19 nt, Homo sapiens
  misc_RNA (1)...(19): siRNA sense strand
gcggaaacccagaggcauu

SEQ ID NO: 50553 - RNA, 19 nt, Homo sapiens
  misc_RNA (1)...(19): siRNA sense strand
uggaagugcugcugaugug

SEQ ID NO: 50554 - RNA, 19 nt, Homo sapiens
  misc_RNA (1)...(19): siRNA sense strand
ccagaggcauugacaacag

SEQ ID NO: 50555 - RNA, 19 nt, Homo sapiens
  misc_RNA (1)...(19): siRNA sense strand
ugaugugcaacaaaucuua

SEQ ID NO: 50556 - RNA, 19 nt, Homo sapiens
  misc_RNA (1)...(19): siRNA sense strand
cugcugaugugcaacaaau

SEQ ID NO: 50557 - RNA, 19 nt, Homo sapiens
  misc_RNA (1)...(19): siRNA sense strand
agaccgauaugucaaaauu

SEQ ID NO: 50558 - RNA, 19 nt, Homo sapiens
  misc_RNA (1)...(19): siRNA sense strand
gaucuugaugcccaacauu

SEQ ID NO: 50559 - RNA, 19 nt, Homo sapiens
  misc_RNA (1)...(19): siRNA sense strand
aagcguaacuggcggaaac

SEQ ID NO: 50560 - RNA, 19 nt, Homo sapiens
  misc_RNA (1)...(19): siRNA sense strand
gugcaacaaaucuuacugu

SEQ ID NO: 50561 - RNA, 19 nt, Homo sapiens
  misc_RNA (1)...(19): siRNA sense strand
ugacaacaggguucguaga

SEQ ID NO: 50562 - RNA, 19 nt, Homo sapiens
  misc_RNA (1)...(19): siRNA sense strand
ggaaacccagaggcauuga

SEQ ID NO: 50563 - RNA, 19 nt, Homo sapiens
  misc_RNA (1)...(19): siRNA sense strand
gcagugaagaaaaugagua

SEQ ID NO: 50564 - RNA, 19 nt, Homo sapiens
  misc_RNA (1)...(19): siRNA sense strand
caacgucaaggagcuggaa

SEQ ID NO: 50565 - RNA, 19 nt, Homo sapiens
  misc_RNA (1)...(19): siRNA sense strand
gaagcccaagaucgucaaa

SEQ ID NO: 50566 - RNA, 19 nt, Homo sapiens
  misc_RNA (1)...(19): siRNA sense strand
gcugaugugcaacaaaucu

SEQ ID NO: 50567 - RNA, 19 nt, Homo sapiens
  misc_RNA (1)...(19): siRNA sense strand
ccagucagaccgauauguc

SEQ ID NO: 50568 - RNA, 19 nt, Homo sapiens
  misc_RNA (1)...(19): siRNA sense strand
gcaauaagacgcacacguu

SEQ ID NO: 50569 - RNA, 19 nt, Homo sapiens
  misc_RNA (1)...(19): siRNA sense strand
ggaaagcgucgcaauaaga

SEQ ID NO: 50570 - RNA, 19 nt, Homo sapiens
  misc_RNA (1)...(19): siRNA sense strand
caccggaacuggucgaaug

SEQ ID NO: 50571 - RNA, 19 nt, Homo sapiens
  misc_RNA (1)...(19): siRNA sense strand
gcaagagaaaguauaacug

SEQ ID NO: 50572 - RNA, 19 nt, Homo sapiens
  misc_RNA (1)...(19): siRNA sense strand
gaaagcgucgcaauaagac

SEQ ID NO: 50573 - RNA, 19 nt, Homo sapiens
  misc_RNA (1)...(19): siRNA sense strand
caagagggcagcuguugca

SEQ ID NO: 50574 - RNA, 19 nt, Homo sapiens
  misc_RNA (1)...(19): siRNA sense strand
cgaaauaccaccggaacug

SEQ ID NO: 50575 - RNA, 19 nt, Homo sapiens
  misc_RNA (1)...(19): siRNA sense strand
uuggaaagcgucgcaauaa

SEQ ID NO: 50576 - RNA, 19 nt, Homo sapiens
  misc_RNA (1)...(19): siRNA sense strand
gcagauucaggcauggauu

SEQ ID NO: 50577 - RNA, 19 nt, Homo sapiens
  misc_RNA (1)...(19): siRNA sense strand
aggcauggauuccgugaag

SEQ ID NO: 50578 - RNA, 19 nt, Homo sapiens
  misc_RNA (1)...(19): siRNA sense strand
uggaaagcgucgcaauaag

SEQ ID NO: 50579 - RNA, 19 nt, Homo sapiens
  misc_RNA (1)...(19): siRNA sense strand
gccaagcgcaagagaaagu

SEQ ID NO: 50580 - RNA, 19 nt, Homo sapiens
  misc_RNA (1)...(19): siRNA sense strand
cugccaagcgcaagagaaa

SEQ ID NO: 50581 - RNA, 19 nt, Homo sapiens
  misc_RNA (1)...(19): siRNA sense strand
uuuggaaagcgucgcaaua

SEQ ID NO: 50582 - RNA, 19 nt, Homo sapiens
  misc_RNA (1)...(19): siRNA sense strand
ccaagcgcaagagaaagua

SEQ ID NO: 50583 - RNA, 19 nt, Homo sapiens
  misc_RNA (1)...(19): siRNA sense strand
aagcgcaagagaaaguaua

SEQ ID NO: 50584 - RNA, 19 nt, Homo sapiens
  misc_RNA (1)...(19): siRNA sense strand
aaggagacauuggagaaga

SEQ ID NO: 50585 - RNA, 19 nt, Homo sapiens
  misc_RNA (1)...(19): siRNA sense strand
ccaguggauucggaugaaa

SEQ ID NO: 50586 - RNA, 19 nt, Homo sapiens
  misc_RNA (1)...(19): siRNA sense strand
ggaugaaaacuggaaauaa

SEQ ID NO: 50587 - RNA, 19 nt, Homo sapiens
  misc_RNA (1)...(19): siRNA sense strand
aggagacauuggagaagaa

SEQ ID NO: 50588 - RNA, 19 nt, Homo sapiens
  misc_RNA (1)...(19): siRNA sense strand
ggaaauaaaaucagguaca

SEQ ID NO: 50589 - RNA, 19 nt, Homo sapiens
  misc_RNA (1)...(19): siRNA sense strand
gcgauuccuggccaagaaa

SEQ ID NO: 50590 - RNA, 19 nt, Homo sapiens
  misc_RNA (1)...(19): siRNA sense strand
cccaguggauucggaugaa

SEQ ID NO: 50591 - RNA, 19 nt, Homo sapiens
  misc_RNA (1)...(19): siRNA sense strand
ggacguuaauacugcuuua

SEQ ID NO: 50592 - RNA, 19 nt, Homo sapiens
  misc_RNA (1)...(19): siRNA sense strand
caccaaaucaaccuaauua

SEQ ID NO: 50593 - RNA, 19 nt, Homo sapiens
  misc_RNA (1)...(19): siRNA sense strand
gaacaccaaaucaaccuaa

SEQ ID NO: 50594 - RNA, 19 nt, Homo sapiens
  misc_RNA (1)...(19): siRNA sense strand
gugaugagccuauguaugu

SEQ ID NO: 50595 - RNA, 19 nt, Homo sapiens
  misc_RNA (1)...(19): siRNA sense strand
caaaucaaccuaauuaagg

SEQ ID NO: 50596 - RNA, 19 nt, Homo sapiens
  misc_RNA (1)...(19): siRNA sense strand
ggaugucauugaagaguau

SEQ ID NO: 50597 - RNA, 19 nt, Homo sapiens
  misc_RNA (1)...(19): siRNA sense strand
gagguguaauggacguuaa

SEQ ID NO: 50598 - RNA, 19 nt, Homo sapiens
  misc_RNA (1)...(19): siRNA sense strand
caacaagaaacuaggagaa

SEQ ID NO: 50599 - RNA, 19 nt, Homo sapiens
  misc_RNA (1)...(19): siRNA sense strand
acaagaaacuaggagaaug

SEQ ID NO: 50600 - RNA, 19 nt, Homo sapiens
  misc_RNA (1)...(19): siRNA sense strand
uaauacugcuuuacaagag

SEQ ID NO: 50601 - RNA, 19 nt, Homo sapiens
  misc_RNA (1)...(19): siRNA sense strand
gcgccaagcccaucuuugu

SEQ ID NO: 50602 - RNA, 19 nt, Homo sapiens
  misc_RNA (1)...(19): siRNA sense strand
guaauggacguuaauacug

SEQ ID NO: 50603 - RNA, 19 nt, Homo sapiens
  misc_RNA (1)...(19): siRNA sense strand
ccaaaucaaccuaauuaag

SEQ ID NO: 50604 - RNA, 19 nt, Homo sapiens
  misc_RNA (1)...(19): siRNA sense strand
gccuauguaugucaaguug

SEQ ID NO: 50605 - RNA, 19 nt, Homo sapiens
  misc_RNA (1)...(19): siRNA sense strand
uacaagagguucugaagac

SEQ ID NO: 50606 - RNA, 19 nt, Homo sapiens
  misc_RNA (1)...(19): siRNA sense strand
cgaagcugccaaagccuua

SEQ ID NO: 50607 - RNA, 19 nt, Homo sapiens
  misc_RNA (1)...(19): siRNA sense strand
caacugugaugagccuaug

SEQ ID NO: 50608 - RNA, 19 nt, Homo sapiens
  misc_RNA (1)...(19): siRNA sense strand
ggagguguaauggacguua

SEQ ID NO: 50609 - RNA, 19 nt, Homo sapiens
  misc_RNA (1)...(19): siRNA sense strand
gaugacaacaagaaacuag

SEQ ID NO: 50610 - RNA, 19 nt, Homo sapiens
  misc_RNA (1)...(19): siRNA sense strand
caagaaacuaggagaaugg

SEQ ID NO: 50611 - RNA, 19 nt, Homo sapiens
  misc_RNA (1)...(19): siRNA sense strand
cguuaauacugcuuuacaa

SEQ ID NO: 50612 - RNA, 19 nt, Homo sapiens
  misc_RNA (1)...(19): siRNA sense strand
gguguaauggacguuaaua

SEQ ID NO: 50613 - RNA, 19 nt, Homo sapiens
  misc_RNA (1)...(19): siRNA sense strand
ugguugcaguuguguagua

SEQ ID NO: 50614 - RNA, 19 nt, Homo sapiens
  misc_RNA (1)...(19): siRNA sense strand
ucugaagacugcccucauc

SEQ ID NO: 50615 - RNA, 19 nt, Homo sapiens
  misc_RNA (1)...(19): siRNA sense strand
ggaggcccuuugugcugaa

SEQ ID NO: 50616 - RNA, 19 nt, Homo sapiens
  misc_RNA (1)...(19): siRNA sense strand
gugcugaacaccaaaucaa

SEQ ID NO: 50617 - RNA, 19 nt, Homo sapiens
  misc_RNA (1)...(19): siRNA sense strand
ugccaaagccuuagacaag

SEQ ID NO: 50618 - RNA, 19 nt, Homo sapiens
  misc_RNA (1)...(19): siRNA sense strand
aggaugucauugaagagua

SEQ ID NO: 50619 - RNA, 19 nt, Homo sapiens
  misc_RNA (1)...(19): siRNA sense strand
gagccuauguaugucaagu

SEQ ID NO: 50620 - RNA, 19 nt, Homo sapiens
  misc_RNA (1)...(19): siRNA sense strand
gccaagcccaucuuugugu

SEQ ID NO: 50621 - RNA, 19 nt, Homo sapiens
  misc_RNA (1)...(19): siRNA sense strand
cauugcugcuggaggugua

SEQ ID NO: 50622 - RNA, 19 nt, Homo sapiens
  misc_RNA (1)...(19): siRNA sense strand
ugacaacaagaaacuagga

SEQ ID NO: 50623 - RNA, 19 nt, Homo sapiens
  misc_RNA (1)...(19): siRNA sense strand
uggccuagcacguggaauu

SEQ ID NO: 50624 - RNA, 19 nt, Homo sapiens
  misc_RNA (1)...(19): siRNA sense strand
acaccaaaucaaccuaauu

SEQ ID NO: 50625 - RNA, 19 nt, Homo sapiens
  misc_RNA (1)...(19): siRNA sense strand
cuauguaugucaaguuggu

SEQ ID NO: 50626 - RNA, 19 nt, Homo sapiens
  misc_RNA (1)...(19): siRNA sense strand
gaugagccuauguauguca

SEQ ID NO: 50627 - RNA, 19 nt, Homo sapiens
  misc_RNA (1)...(19): siRNA sense strand
uuacaagagguucugaaga

SEQ ID NO: 50628 - RNA, 19 nt, Homo sapiens
  misc_RNA (1)...(19): siRNA sense strand
gugguugguugcaguugug

SEQ ID NO: 50629 - RNA, 19 nt, Homo sapiens
  misc_RNA (1)...(19): siRNA sense strand
guuaauacugcuuuacaag

SEQ ID NO: 50630 - RNA, 19 nt, Homo sapiens
  misc_RNA (1)...(19): siRNA sense strand
ccuuugugcugaacaccaa

SEQ ID NO: 50631 - RNA, 19 nt, Homo sapiens
  misc_RNA (1)...(19): siRNA sense strand
gaagaucucuaccauuuaa

SEQ ID NO: 50632 - RNA, 19 nt, Homo sapiens
  misc_RNA (1)...(19): siRNA sense strand
cugaagaucucuaccauuu

SEQ ID NO: 50633 - RNA, 19 nt, Homo sapiens
  misc_RNA (1)...(19): siRNA sense strand
gaugcuaaauuccgucuga

SEQ ID NO: 50634 - RNA, 19 nt, Homo sapiens
  misc_RNA (1)...(19): siRNA sense strand
ugaaggagcagauuuacaa

SEQ ID NO: 50635 - RNA, 19 nt, Homo sapiens
  misc_RNA (1)...(19): siRNA sense strand
gguugaaguugacaucuga

SEQ ID NO: 50636 - RNA, 19 nt, Homo sapiens
  misc_RNA (1)...(19): siRNA sense strand
ccagucggcuuuacccuau

SEQ ID NO: 50637 - RNA, 19 nt, Homo sapiens
  misc_RNA (1)...(19): siRNA sense strand
ccucugcccuggucgcaua

SEQ ID NO: 50638 - RNA, 19 nt, Homo sapiens
  misc_RNA (1)...(19): siRNA sense strand
gaaggagcagauuuacaaa

SEQ ID NO: 50639 - RNA, 19 nt, Homo sapiens
  misc_RNA (1)...(19): siRNA sense strand
ccguuuggcucgauauuau

SEQ ID NO: 50640 - RNA, 19 nt, Homo sapiens
  misc_RNA (1)...(19): siRNA sense strand
uuuacaaacuggccaagaa

SEQ ID NO: 50641 - RNA, 19 nt, Homo sapiens
  misc_RNA (1)...(19): siRNA sense strand
gcuaaauuccgucugauuc

SEQ ID NO: 50642 - RNA, 19 nt, Homo sapiens
  misc_RNA (1)...(19): siRNA sense strand
ugaagaucucuaccauuua

SEQ ID NO: 50643 - RNA, 19 nt, Homo sapiens
  misc_RNA (1)...(19): siRNA sense strand
ggagcagauuuacaaacug

SEQ ID NO: 50644 - RNA, 19 nt, Homo sapiens
  misc_RNA (1)...(19): siRNA sense strand
gggacuugcuccugaucuu

SEQ ID NO: 50645 - RNA, 19 nt, Homo sapiens
  misc_RNA (1)...(19): siRNA sense strand
ccugagagauucacauggu

SEQ ID NO: 50646 - RNA, 19 nt, Homo sapiens
  misc_RNA (1)...(19): siRNA sense strand
gagccggauucaccguuug

SEQ ID NO: 50647 - RNA, 19 nt, Homo sapiens
  misc_RNA (1)...(19): siRNA sense strand
uaagggacuugcuccugau

SEQ ID NO: 50648 - RNA, 19 nt, Homo sapiens
  misc_RNA (1)...(19): siRNA sense strand
gacgugaaggagcagauuu

SEQ ID NO: 50649 - RNA, 19 nt, Homo sapiens
  misc_RNA (1)...(19): siRNA sense strand
gagagauucacaugguguu

SEQ ID NO: 50650 - RNA, 19 nt, Homo sapiens
  misc_RNA (1)...(19): siRNA sense strand
agagccggauucaccguuu

SEQ ID NO: 50651 - RNA, 19 nt, Homo sapiens
  misc_RNA (1)...(19): siRNA sense strand
aggagcagauuuacaaacu

SEQ ID NO: 50652 - RNA, 19 nt, Homo sapiens
  misc_RNA (1)...(19): siRNA sense strand
guuuggcucgauauuauaa

SEQ ID NO: 50653 - RNA, 19 nt, Homo sapiens
  misc_RNA (1)...(19): siRNA sense strand
ggacuugcuccugaucuuc

SEQ ID NO: 50654 - RNA, 19 nt, Homo sapiens
  misc_RNA (1)...(19): siRNA sense strand
caucugacgacgugaagga

SEQ ID NO: 50655 - RNA, 19 nt, Homo sapiens
  misc_RNA (1)...(19): siRNA sense strand
acgugaaggagcagauuua

SEQ ID NO: 50656 - RNA, 19 nt, Homo sapiens
  misc_RNA (1)...(19): siRNA sense strand
ggccuuacuccuucacaga

SEQ ID NO: 50657 - RNA, 19 nt, Homo sapiens
  misc_RNA (1)...(19): siRNA sense strand
ugacaucugacgacgugaa

SEQ ID NO: 50658 - RNA, 19 nt, Homo sapiens
  misc_RNA (1)...(19): siRNA sense strand
cuucacagaucgguguaau

SEQ ID NO: 50659 - RNA, 19 nt, Homo sapiens
  misc_RNA (1)...(19): siRNA sense strand
caucuugagaggaacagaa

SEQ ID NO: 50660 - RNA, 19 nt, Homo sapiens
  misc_RNA (1)...(19): siRNA sense strand
ccucccaauuggaaauaug

SEQ ID NO: 50661 - RNA, 19 nt, Homo sapiens
  misc_RNA (1)...(19): siRNA sense strand
cuucaucccucucaaguaa

SEQ ID NO: 50662 - RNA, 19 nt, Homo sapiens
  misc_RNA (1)...(19): siRNA sense strand
gaaguagagcagaagaaga

SEQ ID NO: 50663 - RNA, 19 nt, Homo sapiens
  misc_RNA (1)...(19): siRNA sense strand
aaguagagcagaagaagaa

SEQ ID NO: 50664 - RNA, 19 nt, Homo sapiens
  misc_RNA (1)...(19): siRNA sense strand
ggagaucaagcccgagaug

SEQ ID NO: 50665 - RNA, 19 nt, Homo sapiens
  misc_RNA (1)...(19): siRNA sense strand
gcagaaguagagcagaaga

SEQ ID NO: 50666 - RNA, 19 nt, Homo sapiens
  misc_RNA (1)...(19): siRNA sense strand
gagaucaagcccgagauga

SEQ ID NO: 50667 - RNA, 19 nt, Homo sapiens
  misc_RNA (1)...(19): siRNA sense strand
gccacuaccugggcgaguu

SEQ ID NO: 50668 - RNA, 19 nt, Homo sapiens
  misc_RNA (1)...(19): siRNA sense strand
ccuacaagcccguaaagca

SEQ ID NO: 50669 - RNA, 19 nt, Homo sapiens
  misc_RNA (1)...(19): siRNA sense strand
cuacaagcccguaaagcau

SEQ ID NO: 50670 - RNA, 19 nt, Homo sapiens
  misc_RNA (1)...(19): siRNA sense strand
gcagcauggugggcgucua

SEQ ID NO: 50671 - RNA, 19 nt, Homo sapiens
  misc_RNA (1)...(19): siRNA sense strand
cagaaguagagcagaagaa

SEQ ID NO: 50672 - RNA, 19 nt, Homo sapiens
  misc_RNA (1)...(19): siRNA sense strand
ccacuccucccgcuucauc

SEQ ID NO: 50673 - RNA, 19 nt, Homo sapiens
  misc_RNA (1)...(19): siRNA sense strand
gcuucaucccucucaagua

SEQ ID NO: 50674 - RNA, 19 nt, Homo sapiens
  misc_RNA (1)...(19): siRNA sense strand
ucaccuacaagcccguaaa

SEQ ID NO: 50675 - RNA, 19 nt, Homo sapiens
  misc_RNA (1)...(19): siRNA sense strand
gcaacgacuuccacacgaa

SEQ ID NO: 50676 - RNA, 19 nt, Homo sapiens
  misc_RNA (1)...(19): siRNA sense strand
ggagauuauugaaguagau

SEQ ID NO: 50677 - RNA, 19 nt, Homo sapiens
  misc_RNA (1)...(19): siRNA sense strand
ugaaguagauccugacacu

SEQ ID NO: 50678 - RNA, 19 nt, Homo sapiens
  misc_RNA (1)...(19): siRNA sense strand
ucaggagauuauugaagua

SEQ ID NO: 50679 - RNA, 19 nt, Homo sapiens
  misc_RNA (1)...(19): siRNA sense strand
aaguagauccugacacuaa

SEQ ID NO: 50680 - RNA, 19 nt, Homo sapiens
  misc_RNA (1)...(19): siRNA sense strand
gaucaggagauuauugaag

SEQ ID NO: 50681 - RNA, 19 nt, Homo sapiens
  misc_RNA (1)...(19): siRNA sense strand
gaaguagauccugacacua

SEQ ID NO: 50682 - RNA, 19 nt, Homo sapiens
  misc_RNA (1)...(19): siRNA sense strand
gcaccaaaaccgugaagaa

SEQ ID NO: 50683 - RNA, 19 nt, Homo sapiens
  misc_RNA (1)...(19): siRNA sense strand
gcaggaggaggagagagaa

SEQ ID NO: 50684 - RNA, 19 nt, Homo sapiens
  misc_RNA (1)...(19): siRNA sense strand
gccauuauccccagcaaaa

SEQ ID NO: 50685 - RNA, 19 nt, Homo sapiens
  misc_RNA (1)...(19): siRNA sense strand
aucaggagauuauugaagu

SEQ ID NO: 50686 - RNA, 19 nt, Homo sapiens
  misc_RNA (1)...(19): siRNA sense strand
ggaucaggagauuauugaa

SEQ ID NO: 50687 - RNA, 19 nt, Homo sapiens
  misc_RNA (1)...(19): siRNA sense strand
ugagucagaugauuccauu

SEQ ID NO: 50688 - RNA, 19 nt, Homo sapiens
  misc_RNA (1)...(19): siRNA sense strand
caaggucacaggcagguuu

SEQ ID NO: 50689 - RNA, 19 nt, Homo sapiens
  misc_RNA (1)...(19): siRNA sense strand
cagguuuaauggccaguuu

SEQ ID NO: 50690 - RNA, 19 nt, Homo sapiens
  misc_RNA (1)...(19): siRNA sense strand
gcgaguucguggaccugua

SEQ ID NO: 50691 - RNA, 19 nt, Homo sapiens
  misc_RNA (1)...(19): siRNA sense strand
ggaugggugagucagauga

SEQ ID NO: 50692 - RNA, 19 nt, Homo sapiens
  misc_RNA (1)...(19): siRNA sense strand
ucacaggcagguuuaaugg

SEQ ID NO: 50693 - RNA, 19 nt, Homo sapiens
  misc_RNA (1)...(19): siRNA sense strand
ccaaggaccacgcauccau

SEQ ID NO: 50694 - RNA, 19 nt, Homo sapiens
  misc_RNA (1)...(19): siRNA sense strand
ggcaucgucucaaagaacu

SEQ ID NO: 50695 - RNA, 19 nt, Homo sapiens
  misc_RNA (1)...(19): siRNA sense strand
uggccgagguugacaaggu

SEQ ID NO: 50696 - RNA, 19 nt, Homo sapiens
  misc_RNA (1)...(19): siRNA sense strand
uaggaugggugagucagau

SEQ ID NO: 50697 - RNA, 19 nt, Homo sapiens
  misc_RNA (1)...(19): siRNA sense strand
ggucacaggcagguuuaau

SEQ ID NO: 50698 - RNA, 19 nt, Homo sapiens
  misc_RNA (1)...(19): siRNA sense strand
ugauuccauucuccgauug

SEQ ID NO: 50699 - RNA, 19 nt, Homo sapiens
  misc_RNA (1)...(19): siRNA sense strand
gucacaggcagguuuaaug

SEQ ID NO: 50700 - RNA, 19 nt, Homo sapiens
  misc_RNA (1)...(19): siRNA sense strand
augauuccauucuccgauu

SEQ ID NO: 50701 - RNA, 19 nt, Homo sapiens
  misc_RNA (1)...(19): siRNA sense strand
guaggaugggugagucaga

SEQ ID NO: 50702 - RNA, 19 nt, Homo sapiens
  misc_RNA (1)...(19): siRNA sense strand
gaccagaaguggcaugaua

SEQ ID NO: 50703 - RNA, 19 nt, Homo sapiens
  misc_RNA (1)...(19): siRNA sense strand
gaucaagaauggcaagaaa

SEQ ID NO: 50704 - RNA, 19 nt, Homo sapiens
  misc_RNA (1)...(19): siRNA sense strand
ggaaagaccaagaucauaa

SEQ ID NO: 50705 - RNA, 19 nt, Homo sapiens
  misc_RNA (1)...(19): siRNA sense strand
gacgguugcuugaacuuua

SEQ ID NO: 50706 - RNA, 19 nt, Homo sapiens
  misc_RNA (1)...(19): siRNA sense strand
caaaguagccaauguuucu

SEQ ID NO: 50707 - RNA, 19 nt, Homo sapiens
  misc_RNA (1)...(19): siRNA sense strand
gaaguggcaugauaaacag

SEQ ID NO: 50708 - RNA, 19 nt, Homo sapiens
  misc_RNA (1)...(19): siRNA sense strand
gaaaaucacagccuuugua

SEQ ID NO: 50709 - RNA, 19 nt, Homo sapiens
  misc_RNA (1)...(19): siRNA sense strand
gaaggaaagaccaagauca

SEQ ID NO: 50710 - RNA, 19 nt, Homo sapiens
  misc_RNA (1)...(19): siRNA sense strand
caaauucugccauuaggaa

SEQ ID NO: 50711 - RNA, 19 nt, Homo sapiens
  misc_RNA (1)...(19): siRNA sense strand
ucgcaaaggucaugcuguu

SEQ ID NO: 50712 - RNA, 19 nt, Homo sapiens
  misc_RNA (1)...(19): siRNA sense strand
cagccaaauucugccauua

SEQ ID NO: 50713 - RNA, 19 nt, Homo sapiens
  misc_RNA (1)...(19): siRNA sense strand
cuaggaagcuccguaguca

SEQ ID NO: 50714 - RNA, 19 nt, Homo sapiens
  misc_RNA (1)...(19): siRNA sense strand
ggguccagcugaucaagaa

SEQ ID NO: 50715 - RNA, 19 nt, Homo sapiens
  misc_RNA (1)...(19): siRNA sense strand
gaagccaaacagccaaauu

SEQ ID NO: 50716 - RNA, 19 nt, Homo sapiens
  misc_RNA (1)...(19): siRNA sense strand
ggaggugcuucucaugcaa

SEQ ID NO: 50717 - RNA, 19 nt, Homo sapiens
  misc_RNA (1)...(19): siRNA sense strand
ggcaugauaaacaguauaa

SEQ ID NO: 50718 - RNA, 19 nt, Homo sapiens
  misc_RNA (1)...(19): siRNA sense strand
aaaggaaucgugcuggaaa

SEQ ID NO: 50719 - RNA, 19 nt, Homo sapiens
  misc_RNA (1)...(19): siRNA sense strand
gccauuaggaaguguguaa

SEQ ID NO: 50720 - RNA, 19 nt, Homo sapiens
  misc_RNA (1)...(19): siRNA sense strand
agaaguggcaugauaaaca

SEQ ID NO: 50721 - RNA, 19 nt, Homo sapiens
  misc_RNA (1)...(19): siRNA sense strand
caagaaggaaagaccaaga

SEQ ID NO: 50722 - RNA, 19 nt, Homo sapiens
  misc_RNA (1)...(19): siRNA sense strand
aguaggaguugaagccaaa

SEQ ID NO: 50723 - RNA, 19 nt, Homo sapiens
  misc_RNA (1)...(19): siRNA sense strand
ccagaaguggcaugauaaa

SEQ ID NO: 50724 - RNA, 19 nt, Homo sapiens
  misc_RNA (1)...(19): siRNA sense strand
ggaaaaugaugaaguucug

SEQ ID NO: 50725 - RNA, 19 nt, Homo sapiens
  misc_RNA (1)...(19): siRNA sense strand
caaugacgguugcuugaac

SEQ ID NO: 50726 - RNA, 19 nt, Homo sapiens
  misc_RNA (1)...(19): siRNA sense strand
guaaggguccagcugauca

SEQ ID NO: 50727 - RNA, 19 nt, Homo sapiens
  misc_RNA (1)...(19): siRNA sense strand
guauaagaaagcucauuug

SEQ ID NO: 50728 - RNA, 19 nt, Homo sapiens
  misc_RNA (1)...(19): siRNA sense strand
ugaggaaaaugaugaaguu

SEQ ID NO: 50729 - RNA, 19 nt, Homo sapiens
  misc_RNA (1)...(19): siRNA sense strand
caaaggucaugcuguuggu

SEQ ID NO: 50730 - RNA, 19 nt, Homo sapiens
  misc_RNA (1)...(19): siRNA sense strand
gccaaauucugccauuagg

SEQ ID NO: 50731 - RNA, 19 nt, Homo sapiens
  misc_RNA (1)...(19): siRNA sense strand
gucaaaguagccaauguuu

SEQ ID NO: 50732 - RNA, 19 nt, Homo sapiens
  misc_RNA (1)...(19): siRNA sense strand
gcuaggaagcuccguaguc

SEQ ID NO: 50733 - RNA, 19 nt, Homo sapiens
  misc_RNA (1)...(19): siRNA sense strand
uauaagaaagcucauuugg

SEQ ID NO: 50734 - RNA, 19 nt, Homo sapiens
  misc_RNA (1)...(19): siRNA sense strand
acagccaaauucugccauu

SEQ ID NO: 50735 - RNA, 19 nt, Homo sapiens
  misc_RNA (1)...(19): siRNA sense strand
ggucaugcuguuggugaua

SEQ ID NO: 50736 - RNA, 19 nt, Homo sapiens
  misc_RNA (1)...(19): siRNA sense strand
cagccuuuguacccaauga

SEQ ID NO: 50737 - RNA, 19 nt, Homo sapiens
  misc_RNA (1)...(19): siRNA sense strand
ggacuucguacugcuagga

SEQ ID NO: 50738 - RNA, 19 nt, Homo sapiens
  misc_RNA (1)...(19): siRNA sense strand
gaggugcuucucaugcaaa

SEQ ID NO: 50739 - RNA, 19 nt, Homo sapiens
  misc_RNA (1)...(19): siRNA sense strand
uacaaaggcaagaaggaaa

SEQ ID NO: 50740 - RNA, 19 nt, Homo sapiens
  misc_RNA (1)...(19): siRNA sense strand
ugucaaaguagccaauguu

SEQ ID NO: 50741 - RNA, 19 nt, Homo sapiens
  misc_RNA (1)...(19): siRNA sense strand
aagccaaacagccaaauuc

SEQ ID NO: 50742 - RNA, 19 nt, Homo sapiens
  misc_RNA (1)...(19): siRNA sense strand
guagccaauguuucucuuu

SEQ ID NO: 50743 - RNA, 19 nt, Homo sapiens
  misc_RNA (1)...(19): siRNA sense strand
ucaaaguagccaauguuuc

SEQ ID NO: 50744 - RNA, 19 nt, Homo sapiens
  misc_RNA (1)...(19): siRNA sense strand
ccaaugacgguugcuugaa

SEQ ID NO: 50745 - RNA, 19 nt, Homo sapiens
  misc_RNA (1)...(19): siRNA sense strand
gucaugcuguuggugauau

SEQ ID NO: 50746 - RNA, 19 nt, Homo sapiens
  misc_RNA (1)...(19): siRNA sense strand
aggaaagaccaagaucaua

SEQ ID NO: 50747 - RNA, 19 nt, Homo sapiens
  misc_RNA (1)...(19): siRNA sense strand
uagccaauguuucucuuuu

SEQ ID NO: 50748 - RNA, 19 nt, Homo sapiens
  misc_RNA (1)...(19): siRNA sense strand
gagaccagaaguggcauga

SEQ ID NO: 50749 - RNA, 19 nt, Homo sapiens
  misc_RNA (1)...(19): siRNA sense strand
caaaggcaagaaggaaaga

SEQ ID NO: 50750 - RNA, 19 nt, Homo sapiens
  misc_RNA (1)...(19): siRNA sense strand
auacaaaggcaagaaggaa

SEQ ID NO: 50751 - RNA, 19 nt, Homo sapiens
  misc_RNA (1)...(19): siRNA sense strand
guguaaggguccagcugau

SEQ ID NO: 50752 - RNA, 19 nt, Homo sapiens
  misc_RNA (1)...(19): siRNA sense strand
aaggaaagaccaagaucau

SEQ ID NO: 50753 - RNA, 19 nt, Homo sapiens
  misc_RNA (1)...(19): siRNA sense strand
uggaggugcuucucaugca

SEQ ID NO: 50754 - RNA, 19 nt, Homo sapiens
  misc_RNA (1)...(19): siRNA sense strand
ccaaauucugccauuagga

SEQ ID NO: 50755 - RNA, 19 nt, Homo sapiens
  misc_RNA (1)...(19): siRNA sense strand
ucaugcuguuggugauauu

SEQ ID NO: 50756 - RNA, 19 nt, Homo sapiens
  misc_RNA (1)...(19): siRNA sense strand
gaaguucugguugcuggau

SEQ ID NO: 50757 - RNA, 19 nt, Homo sapiens
  misc_RNA (1)...(19): siRNA sense strand
ugacgguugcuugaacuuu

SEQ ID NO: 50758 - RNA, 19 nt, Homo sapiens
  misc_RNA (1)...(19): siRNA sense strand
guggcaugauaaacaguau

SEQ ID NO: 50759 - RNA, 19 nt, Homo sapiens
  misc_RNA (1)...(19): siRNA sense strand
gacauggccuguaugagaa

SEQ ID NO: 50760 - RNA, 19 nt, Homo sapiens
  misc_RNA (1)...(19): siRNA sense strand
guaacuauccgcacuagaa

SEQ ID NO: 50761 - RNA, 19 nt, Homo sapiens
  misc_RNA (1)...(19): siRNA sense strand
gaacgcaagaacagaauga

SEQ ID NO: 50762 - RNA, 19 nt, Homo sapiens
  misc_RNA (1)...(19): siRNA sense strand
gaacgacaccguaacuauc

SEQ ID NO: 50763 - RNA, 19 nt, Homo sapiens
  misc_RNA (1)...(19): siRNA sense strand
gcaagaacagaaugaagaa

SEQ ID NO: 50764 - RNA, 19 nt, Homo sapiens
  misc_RNA (1)...(19): siRNA sense strand
gaaaggaacgcaagaacag

SEQ ID NO: 50765 - RNA, 19 nt, Homo sapiens
  misc_RNA (1)...(19): siRNA sense strand
cuagaaaguucaugaccaa

SEQ ID NO: 50766 - RNA, 19 nt, Homo sapiens
  misc_RNA (1)...(19): siRNA sense strand
gcuuuggcaugauuuauga

SEQ ID NO: 50767 - RNA, 19 nt, Homo sapiens
  misc_RNA (1)...(19): siRNA sense strand
agacauggccuguaugaga

SEQ ID NO: 50768 - RNA, 19 nt, Homo sapiens
  misc_RNA (1)...(19): siRNA sense strand
cgacagugccuaagacaga

SEQ ID NO: 50769 - RNA, 19 nt, Homo sapiens
  misc_RNA (1)...(19): siRNA sense strand
caagacauggccuguauga

SEQ ID NO: 50770 - RNA, 19 nt, Homo sapiens
  misc_RNA (1)...(19): siRNA sense strand
acaacuggcuuuggcauga

SEQ ID NO: 50771 - RNA, 19 nt, Homo sapiens
  misc_RNA (1)...(19): siRNA sense strand
caagaaagcaacgaaagga

SEQ ID NO: 50772 - RNA, 19 nt, Homo sapiens
  misc_RNA (1)...(19): siRNA sense strand
caauguuggugcuggcaaa

SEQ ID NO: 50773 - RNA, 19 nt, Homo sapiens
  misc_RNA (1)...(19): siRNA sense strand
ggacugcaaaggccaaugu

SEQ ID NO: 50774 - RNA, 19 nt, Homo sapiens
  misc_RNA (1)...(19): siRNA sense strand
uaacuauccgcacuagaaa

SEQ ID NO: 50775 - RNA, 19 nt, Homo sapiens
  misc_RNA (1)...(19): siRNA sense strand
ugcaagacauggccuguau

SEQ ID NO: 50776 - RNA, 19 nt, Homo sapiens
  misc_RNA (1)...(19): siRNA sense strand
gacagugccuaagacagaa

SEQ ID NO: 50777 - RNA, 19 nt, Homo sapiens
  misc_RNA (1)...(19): siRNA sense strand
caacgaaaggaacgcaaga

SEQ ID NO: 50778 - RNA, 19 nt, Homo sapiens
  misc_RNA (1)...(19): siRNA sense strand
agaacagaaugaagaaagu

SEQ ID NO: 50779 - RNA, 19 nt, Homo sapiens
  misc_RNA (1)...(19): siRNA sense strand
cgaaaggaacgcaagaaca

SEQ ID NO: 50780 - RNA, 19 nt, Homo sapiens
  misc_RNA (1)...(19): siRNA sense strand
guucaugaccaaccgacua

SEQ ID NO: 50781 - RNA, 19 nt, Homo sapiens
  misc_RNA (1)...(19): siRNA sense strand
gaacagaaugaagaaaguc

SEQ ID NO: 50782 - RNA, 19 nt, Homo sapiens
  misc_RNA (1)...(19): siRNA sense strand
gauuuaugauucccuggau

SEQ ID NO: 50783 - RNA, 19 nt, Homo sapiens
  misc_RNA (1)...(19): siRNA sense strand
uuuaugauucccuggauua

SEQ ID NO: 50784 - RNA, 19 nt, Homo sapiens
  misc_RNA (1)...(19): siRNA sense strand
uauccgcacuagaaaguuc

SEQ ID NO: 50785 - RNA, 19 nt, Homo sapiens
  misc_RNA (1)...(19): siRNA sense strand
cgcaagaacagaaugaaga

SEQ ID NO: 50786 - RNA, 19 nt, Homo sapiens
  misc_RNA (1)...(19): siRNA sense strand
ccuggauuaugcaaagaaa

SEQ ID NO: 50787 - RNA, 19 nt, Homo sapiens
  misc_RNA (1)...(19): siRNA sense strand
cuacuucagaggaaacaaa

SEQ ID NO: 50788 - RNA, 19 nt, Homo sapiens
  misc_RNA (1)...(19): siRNA sense strand
caacuggcuuuggcaugau

SEQ ID NO: 50789 - RNA, 19 nt, Homo sapiens
  misc_RNA (1)...(19): siRNA sense strand
agacagaaauucgggaaaa

SEQ ID NO: 50790 - RNA, 19 nt, Homo sapiens
  misc_RNA (1)...(19): siRNA sense strand
caagaacagaaugaagaaa

SEQ ID NO: 50791 - RNA, 19 nt, Homo sapiens
  misc_RNA (1)...(19): siRNA sense strand
ggucauugauguccuucac

SEQ ID NO: 50792 - RNA, 19 nt, Homo sapiens
  misc_RNA (1)...(19): siRNA sense strand
gcaagacaacuggcuuugg

SEQ ID NO: 50793 - RNA, 19 nt, Homo sapiens
  misc_RNA (1)...(19): siRNA sense strand
gcaagacauggccuguaug

SEQ ID NO: 50794 - RNA, 19 nt, Homo sapiens
  misc_RNA (1)...(19): siRNA sense strand
ggaacgcaagaacagaaug

SEQ ID NO: 50795 - RNA, 19 nt, Homo sapiens
  misc_RNA (1)...(19): siRNA sense strand
ucaagaaagcaacgaaagg

SEQ ID NO: 50796 - RNA, 19 nt, Homo sapiens
  misc_RNA (1)...(19): siRNA sense strand
gcacuagaaaguucaugac

SEQ ID NO: 50797 - RNA, 19 nt, Homo sapiens
  misc_RNA (1)...(19): siRNA sense strand
ccucaagaaagcaacgaaa

SEQ ID NO: 50798 - RNA, 19 nt, Homo sapiens
  misc_RNA (1)...(19): siRNA sense strand
aagaacagaaugaagaaag

SEQ ID NO: 50799 - RNA, 19 nt, Homo sapiens
  misc_RNA (1)...(19): siRNA sense strand
aagaaagcaacgaaaggaa

SEQ ID NO: 50800 - RNA, 19 nt, Homo sapiens
  misc_RNA (1)...(19): siRNA sense strand
gacauggccuguaugagaa

SEQ ID NO: 50801 - RNA, 19 nt, Homo sapiens
  misc_RNA (1)...(19): siRNA sense strand
guaacuauccgcacuagaa

SEQ ID NO: 50802 - RNA, 19 nt, Homo sapiens
  misc_RNA (1)...(19): siRNA sense strand
gaacgcaagaacagaauga

SEQ ID NO: 50803 - RNA, 19 nt, Homo sapiens
  misc_RNA (1)...(19): siRNA sense strand
gaacgacaccguaacuauc

SEQ ID NO: 50804 - RNA, 19 nt, Homo sapiens
  misc_RNA (1)...(19): siRNA sense strand
gcaagaacagaaugaagaa

SEQ ID NO: 50805 - RNA, 19 nt, Homo sapiens
  misc_RNA (1)...(19): siRNA sense strand
gaaaggaacgcaagaacag

SEQ ID NO: 50806 - RNA, 19 nt, Homo sapiens
  misc_RNA (1)...(19): siRNA sense strand
cuagaaaguucaugaccaa

SEQ ID NO: 50807 - RNA, 19 nt, Homo sapiens
  misc_RNA (1)...(19): siRNA sense strand
gcuuuggcaugauuuauga

SEQ ID NO: 50808 - RNA, 19 nt, Homo sapiens
  misc_RNA (1)...(19): siRNA sense strand
agacauggccuguaugaga

SEQ ID NO: 50809 - RNA, 19 nt, Homo sapiens
  misc_RNA (1)...(19): siRNA sense strand
cgacagugccuaagacaga

SEQ ID NO: 50810 - RNA, 19 nt, Homo sapiens
  misc_RNA (1)...(19): siRNA sense strand
caagacauggccuguauga

SEQ ID NO: 50811 - RNA, 19 nt, Homo sapiens
  misc_RNA (1)...(19): siRNA sense strand
acaacuggcuuuggcauga

SEQ ID NO: 50812 - RNA, 19 nt, Homo sapiens
  misc_RNA (1)...(19): siRNA sense strand
caagaaagcaacgaaagga

SEQ ID NO: 50813 - RNA, 19 nt, Homo sapiens
  misc_RNA (1)...(19): siRNA sense strand
ggacugcaaaggccaaugu

SEQ ID NO: 50814 - RNA, 19 nt, Homo sapiens
  misc_RNA (1)...(19): siRNA sense strand
uaacuauccgcacuagaaa

SEQ ID NO: 50815 - RNA, 19 nt, Homo sapiens
  misc_RNA (1)...(19): siRNA sense strand
ugcaagacauggccuguau

SEQ ID NO: 50816 - RNA, 19 nt, Homo sapiens
  misc_RNA (1)...(19): siRNA sense strand
gacagugccuaagacagaa

SEQ ID NO: 50817 - RNA, 19 nt, Homo sapiens
  misc_RNA (1)...(19): siRNA sense strand
caacgaaaggaacgcaaga

SEQ ID NO: 50818 - RNA, 19 nt, Homo sapiens
  misc_RNA (1)...(19): siRNA sense strand
agaacagaaugaagaaagu

SEQ ID NO: 50819 - RNA, 19 nt, Homo sapiens
  misc_RNA (1)...(19): siRNA sense strand
cgaaaggaacgcaagaaca

SEQ ID NO: 50820 - RNA, 19 nt, Homo sapiens
  misc_RNA (1)...(19): siRNA sense strand
gauuuaugauucccuggau

SEQ ID NO: 50821 - RNA, 19 nt, Homo sapiens
  misc_RNA (1)...(19): siRNA sense strand
gaacagaaugaagaaaguc

SEQ ID NO: 50822 - RNA, 19 nt, Homo sapiens
  misc_RNA (1)...(19): siRNA sense strand
guucaugaccaaccgacua

SEQ ID NO: 50823 - RNA, 19 nt, Homo sapiens
  misc_RNA (1)...(19): siRNA sense strand
uuuaugauucccuggauua

SEQ ID NO: 50824 - RNA, 19 nt, Homo sapiens
  misc_RNA (1)...(19): siRNA sense strand
uauccgcacuagaaaguuc

SEQ ID NO: 50825 - RNA, 19 nt, Homo sapiens
  misc_RNA (1)...(19): siRNA sense strand
cgcaagaacagaaugaaga

SEQ ID NO: 50826 - RNA, 19 nt, Homo sapiens
  misc_RNA (1)...(19): siRNA sense strand
ccuggauuaugcaaagaaa

SEQ ID NO: 50827 - RNA, 19 nt, Homo sapiens
  misc_RNA (1)...(19): siRNA sense strand
cuacuucagaggaaacaaa

SEQ ID NO: 50828 - RNA, 19 nt, Homo sapiens
  misc_RNA (1)...(19): siRNA sense strand
caacuggcuuuggcaugau

SEQ ID NO: 50829 - RNA, 19 nt, Homo sapiens
  misc_RNA (1)...(19): siRNA sense strand
agacagaaauucgggaaaa

SEQ ID NO: 50830 - RNA, 19 nt, Homo sapiens
  misc_RNA (1)...(19): siRNA sense strand
caagaacagaaugaagaaa

SEQ ID NO: 50831 - RNA, 19 nt, Homo sapiens
  misc_RNA (1)...(19): siRNA sense strand
ggucauugauguccuucac

SEQ ID NO: 50832 - RNA, 19 nt, Homo sapiens
  misc_RNA (1)...(19): siRNA sense strand
gcaagacaacuggcuuugg

SEQ ID NO: 50833 - RNA, 19 nt, Homo sapiens
  misc_RNA (1)...(19): siRNA sense strand
gcaagacauggccuguaug

SEQ ID NO: 50834 - RNA, 19 nt, Homo sapiens
  misc_RNA (1)...(19): siRNA sense strand
ggaacgcaagaacagaaug

SEQ ID NO: 50835 - RNA, 19 nt, Homo sapiens
  misc_RNA (1)...(19): siRNA sense strand
ucaagaaagcaacgaaagg

SEQ ID NO: 50836 - RNA, 19 nt, Homo sapiens
  misc_RNA (1)...(19): siRNA sense strand
gcacuagaaaguucaugac

SEQ ID NO: 50837 - RNA, 19 nt, Homo sapiens
  misc_RNA (1)...(19): siRNA sense strand
ccucaagaaagcaacgaaa

SEQ ID NO: 50838 - RNA, 19 nt, Homo sapiens
  misc_RNA (1)...(19): siRNA sense strand
aagaacagaaugaagaaag

SEQ ID NO: 50839 - RNA, 19 nt, Homo sapiens
  misc_RNA (1)...(19): siRNA sense strand
aagaaagcaacgaaaggaa

SEQ ID NO: 50840 - RNA, 19 nt, Homo sapiens
  misc_RNA (1)...(19): siRNA sense strand
gaaaugcccaggaugcuau

SEQ ID NO: 50841 - RNA, 19 nt, Homo sapiens
  misc_RNA (1)...(19): siRNA sense strand
gagaagaggaaacacaaga

SEQ ID NO: 50842 - RNA, 19 nt, Homo sapiens
  misc_RNA (1)...(19): siRNA sense strand
cagaagaggagaagaggaa

SEQ ID NO: 50843 - RNA, 19 nt, Homo sapiens
  misc_RNA (1)...(19): siRNA sense strand
gaagaggaaacacaagaag

SEQ ID NO: 50844 - RNA, 19 nt, Homo sapiens
  misc_RNA (1)...(19): siRNA sense strand
agaggaaacacaagaagaa

SEQ ID NO: 50845 - RNA, 19 nt, Homo sapiens
  misc_RNA (1)...(19): siRNA sense strand
gaggaaacacaagaagaaa

SEQ ID NO: 50846 - RNA, 19 nt, Homo sapiens
  misc_RNA (1)...(19): siRNA sense strand
gaggagaagaggaaacaca

SEQ ID NO: 50847 - RNA, 19 nt, Homo sapiens
  misc_RNA (1)...(19): siRNA sense strand
ugaaaugcccaggaugcua

SEQ ID NO: 50848 - RNA, 19 nt, Homo sapiens
  misc_RNA (1)...(19): siRNA sense strand
agaagaggaaacacaagaa

SEQ ID NO: 50849 - RNA, 19 nt, Homo sapiens
  misc_RNA (1)...(19): siRNA sense strand
ccaggaugcuauaaaauca

SEQ ID NO: 50850 - RNA, 19 nt, Homo sapiens
  misc_RNA (1)...(19): siRNA sense strand
ggagaagaggaaacacaag

SEQ ID NO: 50851 - RNA, 19 nt, Homo sapiens
  misc_RNA (1)...(19): siRNA sense strand
gaagaggagaagaggaaac

SEQ ID NO: 50852 - RNA, 19 nt, Homo sapiens
  misc_RNA (1)...(19): siRNA sense strand
ucaggaggaagcagcacua

SEQ ID NO: 50853 - RNA, 19 nt, Homo sapiens
  misc_RNA (1)...(19): siRNA sense strand
uaaaaucaccacggucuuu

SEQ ID NO: 50854 - RNA, 19 nt, Homo sapiens
  misc_RNA (1)...(19): siRNA sense strand
aagaggaaacacaagaaga

SEQ ID NO: 50855 - RNA, 19 nt, Homo sapiens
  misc_RNA (1)...(19): siRNA sense strand
gcucuugucgugucuguuc

SEQ ID NO: 50856 - RNA, 19 nt, Homo sapiens
  misc_RNA (1)...(19): siRNA sense strand
ccaggguucucgcucuugu

SEQ ID NO: 50857 - RNA, 19 nt, Homo sapiens
  misc_RNA (1)...(19): siRNA sense strand
caauaugugccgccagugu

SEQ ID NO: 50858 - RNA, 19 nt, Homo sapiens
  misc_RNA (1)...(19): siRNA sense strand
ggccaggguucucgcucuu

SEQ ID NO: 50859 - RNA, 19 nt, Homo sapiens
  misc_RNA (1)...(19): siRNA sense strand
gccaguguuuccgucagua

SEQ ID NO: 50860 - RNA, 19 nt, Homo sapiens
  misc_RNA (1)...(19): siRNA sense strand
cgucaguacgcgaaggaua

SEQ ID NO: 50861 - RNA, 19 nt, Homo sapiens
  misc_RNA (1)...(19): siRNA sense strand
gucaguacgcgaaggauau

SEQ ID NO: 50862 - RNA, 19 nt, Homo sapiens
  misc_RNA (1)...(19): siRNA sense strand
uaaagaagaugaagaaguc

SEQ ID NO: 50863 - RNA, 19 nt, Homo sapiens
  misc_RNA (1)...(19): siRNA sense strand
guacuuuguaucucaguua

SEQ ID NO: 50864 - RNA, 19 nt, Homo sapiens
  misc_RNA (1)...(19): siRNA sense strand
gcuacgagaguacaaggua

SEQ ID NO: 50865 - RNA, 19 nt, Homo sapiens
  misc_RNA (1)...(19): siRNA sense strand
ccaagucccgcuucuggua

SEQ ID NO: 50866 - RNA, 19 nt, Homo sapiens
  misc_RNA (1)...(19): siRNA sense strand
guaucucaguuaaagaaga

SEQ ID NO: 50867 - RNA, 19 nt, Homo sapiens
  misc_RNA (1)...(19): siRNA sense strand
gugggcagguguuugagaa

SEQ ID NO: 50868 - RNA, 19 nt, Homo sapiens
  misc_RNA (1)...(19): siRNA sense strand
ucaugaagguggaggagau

SEQ ID NO: 50869 - RNA, 19 nt, Homo sapiens
  misc_RNA (1)...(19): siRNA sense strand
gggcagguguuugagaagu

SEQ ID NO: 50870 - RNA, 19 nt, Homo sapiens
  misc_RNA (1)...(19): siRNA sense strand
cgagcccacuccauucaga

SEQ ID NO: 50871 - RNA, 19 nt, Homo sapiens
  misc_RNA (1)...(19): siRNA sense strand
ucugguacuuuguaucuca

SEQ ID NO: 50872 - RNA, 19 nt, Homo sapiens
  misc_RNA (1)...(19): siRNA sense strand
gaaucuuugcgccuaauca

SEQ ID NO: 50873 - RNA, 19 nt, Homo sapiens
  misc_RNA (1)...(19): siRNA sense strand
gcgaaucuuugcgccuaau

SEQ ID NO: 50874 - RNA, 19 nt, Homo sapiens
  misc_RNA (1)...(19): siRNA sense strand
gguacuuuguaucucaguu

SEQ ID NO: 50875 - RNA, 19 nt, Homo sapiens
  misc_RNA (1)...(19): siRNA sense strand
ccagugcuaccgagacaug

SEQ ID NO: 50876 - RNA, 19 nt, Homo sapiens
  misc_RNA (1)...(19): siRNA sense strand
ccacuccauucagaucaug

SEQ ID NO: 50877 - RNA, 19 nt, Homo sapiens
  misc_RNA (1)...(19): siRNA sense strand
ccgcuucugguacuuugua

SEQ ID NO: 50878 - RNA, 19 nt, Homo sapiens
  misc_RNA (1)...(19): siRNA sense strand
ggcagguguuugagaaguc

SEQ ID NO: 50879 - RNA, 19 nt, Homo sapiens
  misc_RNA (1)...(19): siRNA sense strand
gcacgcuacgagaguacaa

SEQ ID NO: 50880 - RNA, 19 nt, Homo sapiens
  misc_RNA (1)...(19): siRNA sense strand
ggaucaacuucgacaaaua

SEQ ID NO: 50881 - RNA, 19 nt, Homo sapiens
  misc_RNA (1)...(19): siRNA sense strand
uaugaagcauuaccacuua

SEQ ID NO: 50882 - RNA, 19 nt, Homo sapiens
  misc_RNA (1)...(19): siRNA sense strand
gagcugaggagaagauuaa

SEQ ID NO: 50883 - RNA, 19 nt, Homo sapiens
  misc_RNA (1)...(19): siRNA sense strand
aggaagacccggaaacuua

SEQ ID NO: 50884 - RNA, 19 nt, Homo sapiens
  misc_RNA (1)...(19): siRNA sense strand
cagaagagcugaggagaag

SEQ ID NO: 50885 - RNA, 19 nt, Homo sapiens
  misc_RNA (1)...(19): siRNA sense strand
gcagaagagcugaggagaa

SEQ ID NO: 50886 - RNA, 19 nt, Homo sapiens
  misc_RNA (1)...(19): siRNA sense strand
aaguugguaugaagcauua

SEQ ID NO: 50887 - RNA, 19 nt, Homo sapiens
  misc_RNA (1)...(19): siRNA sense strand
gaagagcugaggagaagau

SEQ ID NO: 50888 - RNA, 19 nt, Homo sapiens
  misc_RNA (1)...(19): siRNA sense strand
aggagaagauuaagagugu

SEQ ID NO: 50889 - RNA, 19 nt, Homo sapiens
  misc_RNA (1)...(19): siRNA sense strand
gggcugcucccaucauuga

SEQ ID NO: 50890 - RNA, 19 nt, Homo sapiens
  misc_RNA (1)...(19): siRNA sense strand
gagaagauuaagaguguug

SEQ ID NO: 50891 - RNA, 19 nt, Homo sapiens
  misc_RNA (1)...(19): siRNA sense strand
gaucaacuucgacaaauac

SEQ ID NO: 50892 - RNA, 19 nt, Homo sapiens
  misc_RNA (1)...(19): siRNA sense strand
guaugaagcauuaccacuu

SEQ ID NO: 50893 - RNA, 19 nt, Homo sapiens
  misc_RNA (1)...(19): siRNA sense strand
ggaagacccggaaacuuag

SEQ ID NO: 50894 - RNA, 19 nt, Homo sapiens
  misc_RNA (1)...(19): siRNA sense strand
gaaaguugguaugaagcau

SEQ ID NO: 50895 - RNA, 19 nt, Homo sapiens
  misc_RNA (1)...(19): siRNA sense strand
ggagaagauuaagaguguu

SEQ ID NO: 50896 - RNA, 19 nt, Homo sapiens
  misc_RNA (1)...(19): siRNA sense strand
ggaaaguugguaugaagca

SEQ ID NO: 50897 - RNA, 19 nt, Homo sapiens
  misc_RNA (1)...(19): siRNA sense strand
gaggaagacccggaaacuu

SEQ ID NO: 50898 - RNA, 19 nt, Homo sapiens
  misc_RNA (1)...(19): siRNA sense strand
cggaucaacuucgacaaau

SEQ ID NO: 50899 - RNA, 19 nt, Homo sapiens
  misc_RNA (1)...(19): siRNA sense strand
uaaagaggaaccagagcuu

SEQ ID NO: 50900 - RNA, 19 nt, Homo sapiens
  misc_RNA (1)...(19): siRNA sense strand
ugggaaaguugguaugaag

SEQ ID NO: 50901 - RNA, 19 nt, Homo sapiens
  misc_RNA (1)...(19): siRNA sense strand
gaagcauuaccacuuaaag

SEQ ID NO: 50902 - RNA, 19 nt, Homo sapiens
  misc_RNA (1)...(19): siRNA sense strand
ugaagcauuaccacuuaaa

SEQ ID NO: 50903 - RNA, 19 nt, Homo sapiens
  misc_RNA (1)...(19): siRNA sense strand
aagcauuaccacuuaaaga

SEQ ID NO: 50904 - RNA, 19 nt, Homo sapiens
  misc_RNA (1)...(19): siRNA sense strand
ccggaucaacuucgacaaa

SEQ ID NO: 50905 - RNA, 19 nt, Homo sapiens
  misc_RNA (1)...(19): siRNA sense strand
caucgugaaggccaaauuc

SEQ ID NO: 50906 - RNA, 19 nt, Homo sapiens
  misc_RNA (1)...(19): siRNA sense strand
gcugaggagaagauuaaga

SEQ ID NO: 50907 - RNA, 19 nt, Homo sapiens
  misc_RNA (1)...(19): siRNA sense strand
aaaguugguaugaagcauu

SEQ ID NO: 50908 - RNA, 19 nt, Homo sapiens
  misc_RNA (1)...(19): siRNA sense strand
ugaggcagagguccaagua

SEQ ID NO: 50909 - RNA, 19 nt, Homo sapiens
  misc_RNA (1)...(19): siRNA sense strand
gaggcagagguccaaguaa

SEQ ID NO: 50910 - RNA, 19 nt, Homo sapiens
  misc_RNA (1)...(19): siRNA sense strand
gagccaaguggaggaagaa

SEQ ID NO: 50911 - RNA, 19 nt, Homo sapiens
  misc_RNA (1)...(19): siRNA sense strand
agagccaaguggaggaaga

SEQ ID NO: 50912 - RNA, 19 nt, Homo sapiens
  misc_RNA (1)...(19): siRNA sense strand
gggaggaccugcuaaauaa

SEQ ID NO: 50913 - RNA, 19 nt, Homo sapiens
  misc_RNA (1)...(19): siRNA sense strand
gcaauuaccugguugaugu

SEQ ID NO: 50914 - RNA, 19 nt, Homo sapiens
  misc_RNA (1)...(19): siRNA sense strand
caaagucgacguugaauuu

SEQ ID NO: 50915 - RNA, 19 nt, Homo sapiens
  misc_RNA (1)...(19): siRNA sense strand
gaagagagccgaggcaauu

SEQ ID NO: 50916 - RNA, 19 nt, Homo sapiens
  misc_RNA (1)...(19): siRNA sense strand
gcucaccuguuccucaaua

SEQ ID NO: 50917 - RNA, 19 nt, Homo sapiens
  misc_RNA (1)...(19): siRNA sense strand
gccuagaucucaggaguua

SEQ ID NO: 50918 - RNA, 19 nt, Homo sapiens
  misc_RNA (1)...(19): siRNA sense strand
gugaugaccuucagcaaga

SEQ ID NO: 50919 - RNA, 19 nt, Homo sapiens
  misc_RNA (1)...(19): siRNA sense strand
ugaaauacccucuggaaga

SEQ ID NO: 50920 - RNA, 19 nt, Homo sapiens
  misc_RNA (1)...(19): siRNA sense strand
uggaagaguuugugaaaga

SEQ ID NO: 50921 - RNA, 19 nt, Homo sapiens
  misc_RNA (1)...(19): siRNA sense strand
cuggagacgugcaugauua

SEQ ID NO: 50922 - RNA, 19 nt, Homo sapiens
  misc_RNA (1)...(19): siRNA sense strand
ugagagacaucgccaggaa

SEQ ID NO: 50923 - RNA, 19 nt, Homo sapiens
  misc_RNA (1)...(19): siRNA sense strand
ggugacaaauccauucguu

SEQ ID NO: 50924 - RNA, 19 nt, Homo sapiens
  misc_RNA (1)...(19): siRNA sense strand
cuaaagccauucacaagau

SEQ ID NO: 50925 - RNA, 19 nt, Homo sapiens
  misc_RNA (1)...(19): siRNA sense strand
cagcagacgugaugaccuu

SEQ ID NO: 50926 - RNA, 19 nt, Homo sapiens
  misc_RNA (1)...(19): siRNA sense strand
ucaccacgcucaccuguuc

SEQ ID NO: 50927 - RNA, 19 nt, Homo sapiens
  misc_RNA (1)...(19): siRNA sense strand
cgggaggaccugcuaaaua

SEQ ID NO: 50928 - RNA, 19 nt, Homo sapiens
  misc_RNA (1)...(19): siRNA sense strand
uggaggaucugauugugaa

SEQ ID NO: 50929 - RNA, 19 nt, Homo sapiens
  misc_RNA (1)...(19): siRNA sense strand
gaucucaggaguuaaugaa

SEQ ID NO: 50930 - RNA, 19 nt, Homo sapiens
  misc_RNA (1)...(19): siRNA sense strand
ugacaaauccauucguuuc

SEQ ID NO: 50931 - RNA, 19 nt, Homo sapiens
  misc_RNA (1)...(19): siRNA sense strand
cgacaucccuuccuuugac

SEQ ID NO: 50932 - RNA, 19 nt, Homo sapiens
  misc_RNA (1)...(19): siRNA sense strand
gcugaaauacccucuggaa

SEQ ID NO: 50933 - RNA, 19 nt, Homo sapiens
  misc_RNA (1)...(19): siRNA sense strand
cagccaaagucgacguuga

SEQ ID NO: 50934 - RNA, 19 nt, Homo sapiens
  misc_RNA (1)...(19): siRNA sense strand
gagaggacgaggcaccuuu

SEQ ID NO: 50935 - RNA, 19 nt, Homo sapiens
  misc_RNA (1)...(19): siRNA sense strand
aggaucugauugugaaaua

SEQ ID NO: 50936 - RNA, 19 nt, Homo sapiens
  misc_RNA (1)...(19): siRNA sense strand
accgaaugcuggaucuuua

SEQ ID NO: 50937 - RNA, 19 nt, Homo sapiens
  misc_RNA (1)...(19): siRNA sense strand
uggaagagguggaggaucu

SEQ ID NO: 50938 - RNA, 19 nt, Homo sapiens
  misc_RNA (1)...(19): siRNA sense strand
uagucaagcugcagccaaa

SEQ ID NO: 50939 - RNA, 19 nt, Homo sapiens
  misc_RNA (1)...(19): siRNA sense strand
ggaagaguuugugaaagag

SEQ ID NO: 50940 - RNA, 19 nt, Homo sapiens
  misc_RNA (1)...(19): siRNA sense strand
caucuuagcagacuucaag

SEQ ID NO: 50941 - RNA, 19 nt, Homo sapiens
  misc_RNA (1)...(19): siRNA sense strand
caccuguuccucaauauuu

SEQ ID NO: 50942 - RNA, 19 nt, Homo sapiens
  misc_RNA (1)...(19): siRNA sense strand
gaggaccugcuaaauaaug

SEQ ID NO: 50943 - RNA, 19 nt, Homo sapiens
  misc_RNA (1)...(19): siRNA sense strand
gaucuccucuguccccaua

SEQ ID NO: 50944 - RNA, 19 nt, Homo sapiens
  misc_RNA (1)...(19): siRNA sense strand
gaucgacaucccuuccuuu

SEQ ID NO: 50945 - RNA, 19 nt, Homo sapiens
  misc_RNA (1)...(19): siRNA sense strand
cggagaacuuuguggagaa

SEQ ID NO: 50946 - RNA, 19 nt, Homo sapiens
  misc_RNA (1)...(19): siRNA sense strand
uggcugaggucaucaacau

SEQ ID NO: 50947 - RNA, 19 nt, Homo sapiens
  misc_RNA (1)...(19): siRNA sense strand
ggagaacuuuguggagaag

SEQ ID NO: 50948 - RNA, 19 nt, Homo sapiens
  misc_RNA (1)...(19): siRNA sense strand
ggaucugauugugaaauau

SEQ ID NO: 50949 - RNA, 19 nt, Homo sapiens
  misc_RNA (1)...(19): siRNA sense strand
gaagaguuugugaaagaga

SEQ ID NO: 50950 - RNA, 19 nt, Homo sapiens
  misc_RNA (1)...(19): siRNA sense strand
gacguugaauuugauuaug

SEQ ID NO: 50951 - RNA, 19 nt, Homo sapiens
  misc_RNA (1)...(19): siRNA sense strand
uaugaugggccucugauga

SEQ ID NO: 50952 - RNA, 19 nt, Homo sapiens
  misc_RNA (1)...(19): siRNA sense strand
uaaagccauucacaagauc

SEQ ID NO: 50953 - RNA, 19 nt, Homo sapiens
  misc_RNA (1)...(19): siRNA sense strand
gcaaccgaaugcuggaucu

SEQ ID NO: 50954 - RNA, 19 nt, Homo sapiens
  misc_RNA (1)...(19): siRNA sense strand
ggguggcuguggugacaaa

SEQ ID NO: 50955 - RNA, 19 nt, Homo sapiens
  misc_RNA (1)...(19): siRNA sense strand
gaucugauugugaaauauc

SEQ ID NO: 50956 - RNA, 19 nt, Homo sapiens
  misc_RNA (1)...(19): siRNA sense strand
cgacguugaauuugauuau

SEQ ID NO: 50957 - RNA, 19 nt, Homo sapiens
  misc_RNA (1)...(19): siRNA sense strand
gauccagacacauuaguca

SEQ ID NO: 50958 - RNA, 19 nt, Homo sapiens
  misc_RNA (1)...(19): siRNA sense strand
ggaggaccauggguugcuu

SEQ ID NO: 50959 - RNA, 19 nt, Homo sapiens
  misc_RNA (1)...(19): siRNA sense strand
ccgaggcaauuaccugguu

SEQ ID NO: 50960 - RNA, 19 nt, Homo sapiens
  misc_RNA (1)...(19): siRNA sense strand
gcugaggucaucaacauca

SEQ ID NO: 50961 - RNA, 19 nt, Homo sapiens
  misc_RNA (1)...(19): siRNA sense strand
gaggaguucaggccuaaug

SEQ ID NO: 50962 - RNA, 19 nt, Homo sapiens
  misc_RNA (1)...(19): siRNA sense strand
gagcuggagacgugcauga

SEQ ID NO: 50963 - RNA, 19 nt, Homo sapiens
  misc_RNA (1)...(19): siRNA sense strand
gaagagguggaggaucuga

SEQ ID NO: 50964 - RNA, 19 nt, Homo sapiens
  misc_RNA (1)...(19): siRNA sense strand
ccaaagucgacguugaauu

SEQ ID NO: 50965 - RNA, 19 nt, Homo sapiens
  misc_RNA (1)...(19): siRNA sense strand
gcuggagacgugcaugauu

SEQ ID NO: 50966 - RNA, 19 nt, Homo sapiens
  misc_RNA (1)...(19): siRNA sense strand
gcauggcugcgccuucuug

SEQ ID NO: 50967 - RNA, 19 nt, Homo sapiens
  misc_RNA (1)...(19): siRNA sense strand
agacgugcaugauuaacca

SEQ ID NO: 50968 - RNA, 19 nt, Homo sapiens
  misc_RNA (1)...(19): siRNA sense strand
aagaguuugugaaagagaa

SEQ ID NO: 50969 - RNA, 19 nt, Homo sapiens
  misc_RNA (1)...(19): siRNA sense strand
uagcgaccacgcacucuaa

SEQ ID NO: 50970 - RNA, 19 nt, Homo sapiens
  misc_RNA (1)...(19): siRNA sense strand
cgaaugcuggaucuuuauu

SEQ ID NO: 50971 - RNA, 19 nt, Homo sapiens
  misc_RNA (1)...(19): siRNA sense strand
gguggaggaucugauugug

SEQ ID NO: 50972 - RNA, 19 nt, Homo sapiens
  misc_RNA (1)...(19): siRNA sense strand
gaggaccauggguugcuua

SEQ ID NO: 50973 - RNA, 19 nt, Homo sapiens
  misc_RNA (1)...(19): siRNA sense strand
ucuaaagccauucacaaga

SEQ ID NO: 50974 - RNA, 19 nt, Homo sapiens
  misc_RNA (1)...(19): siRNA sense strand
cggaauaagcucauuuuaa

SEQ ID NO: 50975 - RNA, 19 nt, Homo sapiens
  misc_RNA (1)...(19): siRNA sense strand
cuagaucucaggaguuaau

SEQ ID NO: 50976 - RNA, 19 nt, Homo sapiens
  misc_RNA (1)...(19): siRNA sense strand
aagucgacguugaauuuga

SEQ ID NO: 50977 - RNA, 19 nt, Homo sapiens
  misc_RNA (1)...(19): siRNA sense strand
gaggucaucaacaucauca

SEQ ID NO: 50978 - RNA, 19 nt, Homo sapiens
  misc_RNA (1)...(19): siRNA sense strand
ucucaggaguuaaugaaac

SEQ ID NO: 50979 - RNA, 19 nt, Homo sapiens
  misc_RNA (1)...(19): siRNA sense strand
ucuggaagaguuugugaaa

SEQ ID NO: 50980 - RNA, 19 nt, Homo sapiens
  misc_RNA (1)...(19): siRNA sense strand
gugacaaauccauucguuu

SEQ ID NO: 50981 - RNA, 19 nt, Homo sapiens
  misc_RNA (1)...(19): siRNA sense strand
aggaggaguucaggccuaa

SEQ ID NO: 50982 - RNA, 19 nt, Homo sapiens
  misc_RNA (1)...(19): siRNA sense strand
gaauccugccuccggagaa

SEQ ID NO: 50983 - RNA, 19 nt, Homo sapiens
  misc_RNA (1)...(19): siRNA sense strand
ggaggaccugcuaaauaau

SEQ ID NO: 50984 - RNA, 19 nt, Homo sapiens
  misc_RNA (1)...(19): siRNA sense strand
ggucaucaacaucaucaag

SEQ ID NO: 50985 - RNA, 19 nt, Homo sapiens
  misc_RNA (1)...(19): siRNA sense strand
ggaagucccagggccuaga

SEQ ID NO: 50986 - RNA, 19 nt, Homo sapiens
  misc_RNA (1)...(19): siRNA sense strand
ugacccagcagacgugaug

SEQ ID NO: 50987 - RNA, 19 nt, Homo sapiens
  misc_RNA (1)...(19): siRNA sense strand
gcaaguucugggcccauga

SEQ ID NO: 50988 - RNA, 19 nt, Homo sapiens
  misc_RNA (1)...(19): siRNA sense strand
gauugugaaauaucggaaa

SEQ ID NO: 50989 - RNA, 19 nt, Homo sapiens
  misc_RNA (1)...(19): siRNA sense strand
gaagucccagggccuagau

SEQ ID NO: 50990 - RNA, 19 nt, Homo sapiens
  misc_RNA (1)...(19): siRNA sense strand
cauacggaauaagcucauu

SEQ ID NO: 50991 - RNA, 19 nt, Homo sapiens
  misc_RNA (1)...(19): siRNA sense strand
cagcauccucuccuucaug

SEQ ID NO: 50992 - RNA, 19 nt, Homo sapiens
  misc_RNA (1)...(19): siRNA sense strand
ugacaucuuagcagacuuc

SEQ ID NO: 50993 - RNA, 19 nt, Homo sapiens
  misc_RNA (1)...(19): siRNA sense strand
ucgauacucccgaugauuc

SEQ ID NO: 50994 - RNA, 19 nt, Homo sapiens
  misc_RNA (1)...(19): siRNA sense strand
caagcgggaggaccugcua

SEQ ID NO: 50995 - RNA, 19 nt, Homo sapiens
  misc_RNA (1)...(19): siRNA sense strand
aagagagccgaggcaauua

SEQ ID NO: 50996 - RNA, 19 nt, Homo sapiens
  misc_RNA (1)...(19): siRNA sense strand
agagguggaggaucugauu

SEQ ID NO: 50997 - RNA, 19 nt, Homo sapiens
  misc_RNA (1)...(19): siRNA sense strand
gauuaugaugggccucuga

SEQ ID NO: 50998 - RNA, 19 nt, Homo sapiens
  misc_RNA (1)...(19): siRNA sense strand
gaugggccucugaugaaga

SEQ ID NO: 50999 - RNA, 19 nt, Homo sapiens
  misc_RNA (1)...(19): siRNA sense strand
guggaggaucugauuguga

SEQ ID NO: 51000 - RNA, 19 nt, Homo sapiens
  misc_RNA (1)...(19): siRNA sense strand
ucaccuguuccucaauauu

SEQ ID NO: 51001 - RNA, 19 nt, Homo sapiens
  misc_RNA (1)...(19): siRNA sense strand
gcagacgugaugaccuuca

SEQ ID NO: 51002 - RNA, 19 nt, Homo sapiens
  misc_RNA (1)...(19): siRNA sense strand
aagcauggcugcgccuucu

SEQ ID NO: 51003 - RNA, 19 nt, Homo sapiens
  misc_RNA (1)...(19): siRNA sense strand
ugucccagcucaucaccau

SEQ ID NO: 51004 - RNA, 19 nt, Homo sapiens
  misc_RNA (1)...(19): siRNA sense strand
gaggaucugauugugaaau

SEQ ID NO: 51005 - RNA, 19 nt, Homo sapiens
  misc_RNA (1)...(19): siRNA sense strand
cgaagagagccgaggcaau

SEQ ID NO: 51006 - RNA, 19 nt, Homo sapiens
  misc_RNA (1)...(19): siRNA sense strand
cucaggaguuaaugaaaca

SEQ ID NO: 51007 - RNA, 19 nt, Homo sapiens
  misc_RNA (1)...(19): siRNA sense strand
uggagacgugcaugauuaa

SEQ ID NO: 51008 - RNA, 19 nt, Homo sapiens
  misc_RNA (1)...(19): siRNA sense strand
acgcucaccuguuccucaa

SEQ ID NO: 51009 - RNA, 19 nt, Homo sapiens
  misc_RNA (1)...(19): siRNA sense strand
uuaauugccagaaacaaag

SEQ ID NO: 51010 - RNA, 19 nt, Homo sapiens
  misc_RNA (1)...(19): siRNA sense strand
agucgacguugaauuugau

SEQ ID NO: 51011 - RNA, 19 nt, Homo sapiens
  misc_RNA (1)...(19): siRNA sense strand
gagguggaggaucugauug

SEQ ID NO: 51012 - RNA, 19 nt, Homo sapiens
  misc_RNA (1)...(19): siRNA sense strand
gggaggaccugcuaaauaa

SEQ ID NO: 51013 - RNA, 19 nt, Homo sapiens
  misc_RNA (1)...(19): siRNA sense strand
gcaauuaccugguugaugu

SEQ ID NO: 51014 - RNA, 19 nt, Homo sapiens
  misc_RNA (1)...(19): siRNA sense strand
caaagucgacguugaauuu

SEQ ID NO: 51015 - RNA, 19 nt, Homo sapiens
  misc_RNA (1)...(19): siRNA sense strand
gaagagagccgaggcaauu

SEQ ID NO: 51016 - RNA, 19 nt, Homo sapiens
  misc_RNA (1)...(19): siRNA sense strand
gcucaccuguuccucaaua

SEQ ID NO: 51017 - RNA, 19 nt, Homo sapiens
  misc_RNA (1)...(19): siRNA sense strand
gccuagaucucaggaguua

SEQ ID NO: 51018 - RNA, 19 nt, Homo sapiens
  misc_RNA (1)...(19): siRNA sense strand
gugaugaccuucagcaaga

SEQ ID NO: 51019 - RNA, 19 nt, Homo sapiens
  misc_RNA (1)...(19): siRNA sense strand
ugaaauacccucuggaaga

SEQ ID NO: 51020 - RNA, 19 nt, Homo sapiens
  misc_RNA (1)...(19): siRNA sense strand
uggaagaguuugugaaaga

SEQ ID NO: 51021 - RNA, 19 nt, Homo sapiens
  misc_RNA (1)...(19): siRNA sense strand
cuggagacgugcaugauua

SEQ ID NO: 51022 - RNA, 19 nt, Homo sapiens
  misc_RNA (1)...(19): siRNA sense strand
ugagagacaucgccaggaa

SEQ ID NO: 51023 - RNA, 19 nt, Homo sapiens
  misc_RNA (1)...(19): siRNA sense strand
ggugacaaauccauucguu

SEQ ID NO: 51024 - RNA, 19 nt, Homo sapiens
  misc_RNA (1)...(19): siRNA sense strand
cuaaagccauucacaagau

SEQ ID NO: 51025 - RNA, 19 nt, Homo sapiens
  misc_RNA (1)...(19): siRNA sense strand
cagcagacgugaugaccuu

SEQ ID NO: 51026 - RNA, 19 nt, Homo sapiens
  misc_RNA (1)...(19): siRNA sense strand
ucaccacgcucaccuguuc

SEQ ID NO: 51027 - RNA, 19 nt, Homo sapiens
  misc_RNA (1)...(19): siRNA sense strand
cgggaggaccugcuaaaua

SEQ ID NO: 51028 - RNA, 19 nt, Homo sapiens
  misc_RNA (1)...(19): siRNA sense strand
uggaggaucugauugugaa

SEQ ID NO: 51029 - RNA, 19 nt, Homo sapiens
  misc_RNA (1)...(19): siRNA sense strand
gaucucaggaguuaaugaa

SEQ ID NO: 51030 - RNA, 19 nt, Homo sapiens
  misc_RNA (1)...(19): siRNA sense strand
ugacaaauccauucguuuc

SEQ ID NO: 51031 - RNA, 19 nt, Homo sapiens
  misc_RNA (1)...(19): siRNA sense strand
cgacaucccuuccuuugac

SEQ ID NO: 51032 - RNA, 19 nt, Homo sapiens
  misc_RNA (1)...(19): siRNA sense strand
gcugaaauacccucuggaa

SEQ ID NO: 51033 - RNA, 19 nt, Homo sapiens
  misc_RNA (1)...(19): siRNA sense strand
cagccaaagucgacguuga

SEQ ID NO: 51034 - RNA, 19 nt, Homo sapiens
  misc_RNA (1)...(19): siRNA sense strand
gagaggacgaggcaccuuu

SEQ ID NO: 51035 - RNA, 19 nt, Homo sapiens
  misc_RNA (1)...(19): siRNA sense strand
aggaucugauugugaaaua

SEQ ID NO: 51036 - RNA, 19 nt, Homo sapiens
  misc_RNA (1)...(19): siRNA sense strand
accgaaugcuggaucuuua

SEQ ID NO: 51037 - RNA, 19 nt, Homo sapiens
  misc_RNA (1)...(19): siRNA sense strand
uggaagagguggaggaucu

SEQ ID NO: 51038 - RNA, 19 nt, Homo sapiens
  misc_RNA (1)...(19): siRNA sense strand
uagucaagcugcagccaaa

SEQ ID NO: 51039 - RNA, 19 nt, Homo sapiens
  misc_RNA (1)...(19): siRNA sense strand
ggaagaguuugugaaagag

SEQ ID NO: 51040 - RNA, 19 nt, Homo sapiens
  misc_RNA (1)...(19): siRNA sense strand
caucuuagcagacuucaag

SEQ ID NO: 51041 - RNA, 19 nt, Homo sapiens
  misc_RNA (1)...(19): siRNA sense strand
caccuguuccucaauauuu

SEQ ID NO: 51042 - RNA, 19 nt, Homo sapiens
  misc_RNA (1)...(19): siRNA sense strand
gaggaccugcuaaauaaug

SEQ ID NO: 51043 - RNA, 19 nt, Homo sapiens
  misc_RNA (1)...(19): siRNA sense strand
gaucuccucuguccccaua

SEQ ID NO: 51044 - RNA, 19 nt, Homo sapiens
  misc_RNA (1)...(19): siRNA sense strand
gaucgacaucccuuccuuu

SEQ ID NO: 51045 - RNA, 19 nt, Homo sapiens
  misc_RNA (1)...(19): siRNA sense strand
cggagaacuuuguggagaa

SEQ ID NO: 51046 - RNA, 19 nt, Homo sapiens
  misc_RNA (1)...(19): siRNA sense strand
uggcugaggucaucaacau

SEQ ID NO: 51047 - RNA, 19 nt, Homo sapiens
  misc_RNA (1)...(19): siRNA sense strand
ggagaacuuuguggagaag

SEQ ID NO: 51048 - RNA, 19 nt, Homo sapiens
  misc_RNA (1)...(19): siRNA sense strand
ggaucugauugugaaauau

SEQ ID NO: 51049 - RNA, 19 nt, Homo sapiens
  misc_RNA (1)...(19): siRNA sense strand
gaagaguuugugaaagaga

SEQ ID NO: 51050 - RNA, 19 nt, Homo sapiens
  misc_RNA (1)...(19): siRNA sense strand
gacguugaauuugauuaug

SEQ ID NO: 51051 - RNA, 19 nt, Homo sapiens
  misc_RNA (1)...(19): siRNA sense strand
uaugaugggccucugauga

SEQ ID NO: 51052 - RNA, 19 nt, Homo sapiens
  misc_RNA (1)...(19): siRNA sense strand
uaaagccauucacaagauc

SEQ ID NO: 51053 - RNA, 19 nt, Homo sapiens
  misc_RNA (1)...(19): siRNA sense strand
gcaaccgaaugcuggaucu

SEQ ID NO: 51054 - RNA, 19 nt, Homo sapiens
  misc_RNA (1)...(19): siRNA sense strand
ggguggcuguggugacaaa

SEQ ID NO: 51055 - RNA, 19 nt, Homo sapiens
  misc_RNA (1)...(19): siRNA sense strand
gaucugauugugaaauauc

SEQ ID NO: 51056 - RNA, 19 nt, Homo sapiens
  misc_RNA (1)...(19): siRNA sense strand
cgacguugaauuugauuau

SEQ ID NO: 51057 - RNA, 19 nt, Homo sapiens
  misc_RNA (1)...(19): siRNA sense strand
gauccagacacauuaguca

SEQ ID NO: 51058 - RNA, 19 nt, Homo sapiens
  misc_RNA (1)...(19): siRNA sense strand
ggaggaccauggguugcuu

SEQ ID NO: 51059 - RNA, 19 nt, Homo sapiens
  misc_RNA (1)...(19): siRNA sense strand
ccgaggcaauuaccugguu

SEQ ID NO: 51060 - RNA, 19 nt, Homo sapiens
  misc_RNA (1)...(19): siRNA sense strand
gcugaggucaucaacauca

SEQ ID NO: 51061 - RNA, 19 nt, Homo sapiens
  misc_RNA (1)...(19): siRNA sense strand
gaggaguucaggccuaaug

SEQ ID NO: 51062 - RNA, 19 nt, Homo sapiens
  misc_RNA (1)...(19): siRNA sense strand
gagcuggagacgugcauga

SEQ ID NO: 51063 - RNA, 19 nt, Homo sapiens
  misc_RNA (1)...(19): siRNA sense strand
gaagagguggaggaucuga

SEQ ID NO: 51064 - RNA, 19 nt, Homo sapiens
  misc_RNA (1)...(19): siRNA sense strand
ccaaagucgacguugaauu

SEQ ID NO: 51065 - RNA, 19 nt, Homo sapiens
  misc_RNA (1)...(19): siRNA sense strand
gcuggagacgugcaugauu

SEQ ID NO: 51066 - RNA, 19 nt, Homo sapiens
  misc_RNA (1)...(19): siRNA sense strand
gcauggcugcgccuucuug

SEQ ID NO: 51067 - RNA, 19 nt, Homo sapiens
  misc_RNA (1)...(19): siRNA sense strand
agacgugcaugauuaacca

SEQ ID NO: 51068 - RNA, 19 nt, Homo sapiens
  misc_RNA (1)...(19): siRNA sense strand
aagaguuugugaaagagaa

SEQ ID NO: 51069 - RNA, 19 nt, Homo sapiens
  misc_RNA (1)...(19): siRNA sense strand
uagcgaccacgcacucuaa

SEQ ID NO: 51070 - RNA, 19 nt, Homo sapiens
  misc_RNA (1)...(19): siRNA sense strand
cgaaugcuggaucuuuauu

SEQ ID NO: 51071 - RNA, 19 nt, Homo sapiens
  misc_RNA (1)...(19): siRNA sense strand
gguggaggaucugauugug

SEQ ID NO: 51072 - RNA, 19 nt, Homo sapiens
  misc_RNA (1)...(19): siRNA sense strand
gaggaccauggguugcuua

SEQ ID NO: 51073 - RNA, 19 nt, Homo sapiens
  misc_RNA (1)...(19): siRNA sense strand
ucuaaagccauucacaaga

SEQ ID NO: 51074 - RNA, 19 nt, Homo sapiens
  misc_RNA (1)...(19): siRNA sense strand
cggaauaagcucauuuuaa

SEQ ID NO: 51075 - RNA, 19 nt, Homo sapiens
  misc_RNA (1)...(19): siRNA sense strand
cuagaucucaggaguuaau

SEQ ID NO: 51076 - RNA, 19 nt, Homo sapiens
  misc_RNA (1)...(19): siRNA sense strand
aagucgacguugaauuuga

SEQ ID NO: 51077 - RNA, 19 nt, Homo sapiens
  misc_RNA (1)...(19): siRNA sense strand
gaggucaucaacaucauca

SEQ ID NO: 51078 - RNA, 19 nt, Homo sapiens
  misc_RNA (1)...(19): siRNA sense strand
ucucaggaguuaaugaaac

SEQ ID NO: 51079 - RNA, 19 nt, Homo sapiens
  misc_RNA (1)...(19): siRNA sense strand
ucuggaagaguuugugaaa

SEQ ID NO: 51080 - RNA, 19 nt, Homo sapiens
  misc_RNA (1)...(19): siRNA sense strand
gugacaaauccauucguuu

SEQ ID NO: 51081 - RNA, 19 nt, Homo sapiens
  misc_RNA (1)...(19): siRNA sense strand
aggaggaguucaggccuaa

SEQ ID NO: 51082 - RNA, 19 nt, Homo sapiens
  misc_RNA (1)...(19): siRNA sense strand
gaauccugccuccggagaa

SEQ ID NO: 51083 - RNA, 19 nt, Homo sapiens
  misc_RNA (1)...(19): siRNA sense strand
ggaggaccugcuaaauaau

SEQ ID NO: 51084 - RNA, 19 nt, Homo sapiens
  misc_RNA (1)...(19): siRNA sense strand
ggucaucaacaucaucaag

SEQ ID NO: 51085 - RNA, 19 nt, Homo sapiens
  misc_RNA (1)...(19): siRNA sense strand
ggaagucccagggccuaga

SEQ ID NO: 51086 - RNA, 19 nt, Homo sapiens
  misc_RNA (1)...(19): siRNA sense strand
ugacccagcagacgugaug

SEQ ID NO: 51087 - RNA, 19 nt, Homo sapiens
  misc_RNA (1)...(19): siRNA sense strand
gcaaguucugggcccauga

SEQ ID NO: 51088 - RNA, 19 nt, Homo sapiens
  misc_RNA (1)...(19): siRNA sense strand
gauugugaaauaucggaaa

SEQ ID NO: 51089 - RNA, 19 nt, Homo sapiens
  misc_RNA (1)...(19): siRNA sense strand
gaagucccagggccuagau

SEQ ID NO: 51090 - RNA, 19 nt, Homo sapiens
  misc_RNA (1)...(19): siRNA sense strand
cauacggaauaagcucauu

SEQ ID NO: 51091 - RNA, 19 nt, Homo sapiens
  misc_RNA (1)...(19): siRNA sense strand
cagcauccucuccuucaug

SEQ ID NO: 51092 - RNA, 19 nt, Homo sapiens
  misc_RNA (1)...(19): siRNA sense strand
ugacaucuuagcagacuuc

SEQ ID NO: 51093 - RNA, 19 nt, Homo sapiens
  misc_RNA (1)...(19): siRNA sense strand
ucgauacucccgaugauuc

SEQ ID NO: 51094 - RNA, 19 nt, Homo sapiens
  misc_RNA (1)...(19): siRNA sense strand
caagcgggaggaccugcua

SEQ ID NO: 51095 - RNA, 19 nt, Homo sapiens
  misc_RNA (1)...(19): siRNA sense strand
aagagagccgaggcaauua

SEQ ID NO: 51096 - RNA, 19 nt, Homo sapiens
  misc_RNA (1)...(19): siRNA sense strand
agagguggaggaucugauu

SEQ ID NO: 51097 - RNA, 19 nt, Homo sapiens
  misc_RNA (1)...(19): siRNA sense strand
gauuaugaugggccucuga

SEQ ID NO: 51098 - RNA, 19 nt, Homo sapiens
  misc_RNA (1)...(19): siRNA sense strand
gaugggccucugaugaaga

SEQ ID NO: 51099 - RNA, 19 nt, Homo sapiens
  misc_RNA (1)...(19): siRNA sense strand
guggaggaucugauuguga

SEQ ID NO: 51100 - RNA, 19 nt, Homo sapiens
  misc_RNA (1)...(19): siRNA sense strand
ucaccuguuccucaauauu

SEQ ID NO: 51101 - RNA, 19 nt, Homo sapiens
  misc_RNA (1)...(19): siRNA sense strand
gcagacgugaugaccuuca

SEQ ID NO: 51102 - RNA, 19 nt, Homo sapiens
  misc_RNA (1)...(19): siRNA sense strand
aagcauggcugcgccuucu

SEQ ID NO: 51103 - RNA, 19 nt, Homo sapiens
  misc_RNA (1)...(19): siRNA sense strand
ugucccagcucaucaccau

SEQ ID NO: 51104 - RNA, 19 nt, Homo sapiens
  misc_RNA (1)...(19): siRNA sense strand
gaggaucugauugugaaau

SEQ ID NO: 51105 - RNA, 19 nt, Homo sapiens
  misc_RNA (1)...(19): siRNA sense strand
cgaagagagccgaggcaau

SEQ ID NO: 51106 - RNA, 19 nt, Homo sapiens
  misc_RNA (1)...(19): siRNA sense strand
cucaggaguuaaugaaaca

SEQ ID NO: 51107 - RNA, 19 nt, Homo sapiens
  misc_RNA (1)...(19): siRNA sense strand
uggagacgugcaugauuaa

SEQ ID NO: 51108 - RNA, 19 nt, Homo sapiens
  misc_RNA (1)...(19): siRNA sense strand
acgcucaccuguuccucaa

SEQ ID NO: 51109 - RNA, 19 nt, Homo sapiens
  misc_RNA (1)...(19): siRNA sense strand
uuaauugccagaaacaaag

SEQ ID NO: 51110 - RNA, 19 nt, Homo sapiens
  misc_RNA (1)...(19): siRNA sense strand
agucgacguugaauuugau

SEQ ID NO: 51111 - RNA, 19 nt, Homo sapiens
  misc_RNA (1)...(19): siRNA sense strand
gagguggaggaucugauug

SEQ ID NO: 51112 - RNA, 19 nt, Homo sapiens
  misc_RNA (1)...(19): siRNA sense strand
caugauggcuucccuguua

SEQ ID NO: 51113 - RNA, 19 nt, Homo sapiens
  misc_RNA (1)...(19): siRNA sense strand
gaagggagcuauucuuggu

SEQ ID NO: 51114 - RNA, 19 nt, Homo sapiens
  misc_RNA (1)...(19): siRNA sense strand
gaugguggcuguaggaauc

SEQ ID NO: 51115 - RNA, 19 nt, Homo sapiens
  misc_RNA (1)...(19): siRNA sense strand
caaaccaggugauaaaguc

SEQ ID NO: 51116 - RNA, 19 nt, Homo sapiens
  misc_RNA (1)...(19): siRNA sense strand
gcccaugaaguucguauua

SEQ ID NO: 51117 - RNA, 19 nt, Homo sapiens
  misc_RNA (1)...(19): siRNA sense strand
gcauuaauaacccauguuu

SEQ ID NO: 51118 - RNA, 19 nt, Homo sapiens
  misc_RNA (1)...(19): siRNA sense strand
caucaacaaggacaaauuu

SEQ ID NO: 51119 - RNA, 19 nt, Homo sapiens
  misc_RNA (1)...(19): siRNA sense strand
caucaacccucaagacuac

SEQ ID NO: 51120 - RNA, 19 nt, Homo sapiens
  misc_RNA (1)...(19): siRNA sense strand
uaaagaaugugucccaaaa

SEQ ID NO: 51121 - RNA, 19 nt, Homo sapiens
  misc_RNA (1)...(19): siRNA sense strand
uggcacaagugucaucgua

SEQ ID NO: 51122 - RNA, 19 nt, Homo sapiens
  misc_RNA (1)...(19): siRNA sense strand
gcaucaacccucaagacua

SEQ ID NO: 51123 - RNA, 19 nt, Homo sapiens
  misc_RNA (1)...(19): siRNA sense strand
guaaagaaugugucccaaa

SEQ ID NO: 51124 - RNA, 19 nt, Homo sapiens
  misc_RNA (1)...(19): siRNA sense strand
uggcuucccuguuauguug

SEQ ID NO: 51125 - RNA, 19 nt, Homo sapiens
  misc_RNA (1)...(19): siRNA sense strand
gcuaugggaguuaaagaaa

SEQ ID NO: 51126 - RNA, 19 nt, Homo sapiens
  misc_RNA (1)...(19): siRNA sense strand
gagcacagcaggaaaagua

SEQ ID NO: 51127 - RNA, 19 nt, Homo sapiens
  misc_RNA (1)...(19): siRNA sense strand
cggccuaucugcuauuaug

SEQ ID NO: 51128 - RNA, 19 nt, Homo sapiens
  misc_RNA (1)...(19): siRNA sense strand
ggaagcccauccaccacuu

SEQ ID NO: 51129 - RNA, 19 nt, Homo sapiens
  misc_RNA (1)...(19): siRNA sense strand
ggacaucaacaaggacaaa

SEQ ID NO: 51130 - RNA, 19 nt, Homo sapiens
  misc_RNA (1)...(19): siRNA sense strand
ugaaggauuugaccugcuu

SEQ ID NO: 51131 - RNA, 19 nt, Homo sapiens
  misc_RNA (1)...(19): siRNA sense strand
cccaugaaguucguauuaa

SEQ ID NO: 51132 - RNA, 19 nt, Homo sapiens
  misc_RNA (1)...(19): siRNA sense strand
caacaaggacaaauuugca

SEQ ID NO: 51133 - RNA, 19 nt, Homo sapiens
  misc_RNA (1)...(19): siRNA sense strand
ccaugaaguucguauuaag

SEQ ID NO: 51134 - RNA, 19 nt, Homo sapiens
  misc_RNA (1)...(19): siRNA sense strand
gaugcagccucgccucuag

SEQ ID NO: 51135 - RNA, 19 nt, Homo sapiens
  misc_RNA (1)...(19): siRNA sense strand
caaaacuuguggcugauuu

SEQ ID NO: 51136 - RNA, 19 nt, Homo sapiens
  misc_RNA (1)...(19): siRNA sense strand
agucaaaccaggugauaaa

SEQ ID NO: 51137 - RNA, 19 nt, Homo sapiens
  misc_RNA (1)...(19): siRNA sense strand
gcugugcuaugggaguuaa

SEQ ID NO: 51138 - RNA, 19 nt, Homo sapiens
  misc_RNA (1)...(19): siRNA sense strand
gcuaagaaguuuucauugg

SEQ ID NO: 51139 - RNA, 19 nt, Homo sapiens
  misc_RNA (1)...(19): siRNA sense strand
ugaaguucguauuaagaug

SEQ ID NO: 51140 - RNA, 19 nt, Homo sapiens
  misc_RNA (1)...(19): siRNA sense strand
gagaaggggugacuacagu

SEQ ID NO: 51141 - RNA, 19 nt, Homo sapiens
  misc_RNA (1)...(19): siRNA sense strand
gcuauuaugggcuguaaag

SEQ ID NO: 51142 - RNA, 19 nt, Homo sapiens
  misc_RNA (1)...(19): siRNA sense strand
caugaaguucguauuaaga

SEQ ID NO: 51143 - RNA, 19 nt, Homo sapiens
  misc_RNA (1)...(19): siRNA sense strand
gguuaugggucugcaguca

SEQ ID NO: 51144 - RNA, 19 nt, Homo sapiens
  misc_RNA (1)...(19): siRNA sense strand
ucagcaccuucucacagua

SEQ ID NO: 51145 - RNA, 19 nt, Homo sapiens
  misc_RNA (1)...(19): siRNA sense strand
uaacccauguuuuaccuuu

SEQ ID NO: 51146 - RNA, 19 nt, Homo sapiens
  misc_RNA (1)...(19): siRNA sense strand
gaaugugucccaaaacuug

SEQ ID NO: 51147 - RNA, 19 nt, Homo sapiens
  misc_RNA (1)...(19): siRNA sense strand
ccucaagacuacaagaaac

SEQ ID NO: 51148 - RNA, 19 nt, Homo sapiens
  misc_RNA (1)...(19): siRNA sense strand
ucauugcgguggacaucaa

SEQ ID NO: 51149 - RNA, 19 nt, Homo sapiens
  misc_RNA (1)...(19): siRNA sense strand
ucucauuggcuguggauuu

SEQ ID NO: 51150 - RNA, 19 nt, Homo sapiens
  misc_RNA (1)...(19): siRNA sense strand
cagccucgccucuagagaa

SEQ ID NO: 51151 - RNA, 19 nt, Homo sapiens
  misc_RNA (1)...(19): siRNA sense strand
uaagaugguggcuguagga

SEQ ID NO: 51152 - RNA, 19 nt, Homo sapiens
  misc_RNA (1)...(19): siRNA sense strand
guaccauucugauguuuug

SEQ ID NO: 51153 - RNA, 19 nt, Homo sapiens
  misc_RNA (1)...(19): siRNA sense strand
caggaaaaguaaucaaaug

SEQ ID NO: 51154 - RNA, 19 nt, Homo sapiens
  misc_RNA (1)...(19): siRNA sense strand
ugacuggacguaccuggaa

SEQ ID NO: 51155 - RNA, 19 nt, Homo sapiens
  misc_RNA (1)...(19): siRNA sense strand
cuaaaggaaaugacugaug

SEQ ID NO: 51156 - RNA, 19 nt, Homo sapiens
  misc_RNA (1)...(19): siRNA sense strand
uuaugggucugcagucaau

SEQ ID NO: 51157 - RNA, 19 nt, Homo sapiens
  misc_RNA (1)...(19): siRNA sense strand
cccaaaaccucucaaugaa

SEQ ID NO: 51158 - RNA, 19 nt, Homo sapiens
  misc_RNA (1)...(19): siRNA sense strand
gucggccuaucugcuauua

SEQ ID NO: 51159 - RNA, 19 nt, Homo sapiens
  misc_RNA (1)...(19): siRNA sense strand
gaaaaugcaguagccaaaa

SEQ ID NO: 51160 - RNA, 19 nt, Homo sapiens
  misc_RNA (1)...(19): siRNA sense strand
aaaaguauccguaccauuc

SEQ ID NO: 51161 - RNA, 19 nt, Homo sapiens
  misc_RNA (1)...(19): siRNA sense strand
cguggagaguguuggagaa

SEQ ID NO: 51162 - RNA, 19 nt, Homo sapiens
  misc_RNA (1)...(19): siRNA sense strand
cuaagaaguuuucauugga

SEQ ID NO: 51163 - RNA, 19 nt, Homo sapiens
  misc_RNA (1)...(19): siRNA sense strand
uggaagggagcuauucuug

SEQ ID NO: 51164 - RNA, 19 nt, Homo sapiens
  misc_RNA (1)...(19): siRNA sense strand
caggaggugcuaaaggaaa

SEQ ID NO: 51165 - RNA, 19 nt, Homo sapiens
  misc_RNA (1)...(19): siRNA sense strand
cgguggacaucaacaagga

SEQ ID NO: 51166 - RNA, 19 nt, Homo sapiens
  misc_RNA (1)...(19): siRNA sense strand
acacagugguggaugaaaa

SEQ ID NO: 51167 - RNA, 19 nt, Homo sapiens
  misc_RNA (1)...(19): siRNA sense strand
guacacagugguggaugaa

SEQ ID NO: 51168 - RNA, 19 nt, Homo sapiens
  misc_RNA (1)...(19): siRNA sense strand
aaugaacccuaugcugcua

SEQ ID NO: 51169 - RNA, 19 nt, Homo sapiens
  misc_RNA (1)...(19): siRNA sense strand
cagcugugcuaugggaguu

SEQ ID NO: 51170 - RNA, 19 nt, Homo sapiens
  misc_RNA (1)...(19): siRNA sense strand
ccuguuauguugucaugag

SEQ ID NO: 51171 - RNA, 19 nt, Homo sapiens
  misc_RNA (1)...(19): siRNA sense strand
ggauuugaccugcuucacu

SEQ ID NO: 51172 - RNA, 19 nt, Homo sapiens
  misc_RNA (1)...(19): siRNA sense strand
acaaggacaaauuugcaaa

SEQ ID NO: 51173 - RNA, 19 nt, Homo sapiens
  misc_RNA (1)...(19): siRNA sense strand
caaggacaaauuugcaaag

SEQ ID NO: 51174 - RNA, 19 nt, Homo sapiens
  misc_RNA (1)...(19): siRNA sense strand
gaaugcaucaacccucaag

SEQ ID NO: 51175 - RNA, 19 nt, Homo sapiens
  misc_RNA (1)...(19): siRNA sense strand
aguacacagugguggauga

SEQ ID NO: 51176 - RNA, 19 nt, Homo sapiens
  misc_RNA (1)...(19): siRNA sense strand
gaaaaguauccguaccauu

SEQ ID NO: 51177 - RNA, 19 nt, Homo sapiens
  misc_RNA (1)...(19): siRNA sense strand
uauucuugguggcuuuaaa

SEQ ID NO: 51178 - RNA, 19 nt, Homo sapiens
  misc_RNA (1)...(19): siRNA sense strand
gcuauucuugguggcuuua

SEQ ID NO: 51179 - RNA, 19 nt, Homo sapiens
  misc_RNA (1)...(19): siRNA sense strand
acagucaaaccaggugaua

SEQ ID NO: 51180 - RNA, 19 nt, Homo sapiens
  misc_RNA (1)...(19): siRNA sense strand
aggaggugcuaaaggaaau

SEQ ID NO: 51181 - RNA, 19 nt, Homo sapiens
  misc_RNA (1)...(19): siRNA sense strand
ccucgccucuagagaaagu

SEQ ID NO: 51182 - RNA, 19 nt, Homo sapiens
  misc_RNA (1)...(19): siRNA sense strand
aaaaugcaguagccaaaau

SEQ ID NO: 51183 - RNA, 19 nt, Homo sapiens
  misc_RNA (1)...(19): siRNA sense strand
gauggcaccagcagguuca

SEQ ID NO: 51184 - RNA, 19 nt, Homo sapiens
  misc_RNA (1)...(19): siRNA sense strand
ucaaaccaggugauaaagu

SEQ ID NO: 51185 - RNA, 19 nt, Homo sapiens
  misc_RNA (1)...(19): siRNA sense strand
gcaggaaaaguaaucaaau

SEQ ID NO: 51186 - RNA, 19 nt, Homo sapiens
  misc_RNA (1)...(19): siRNA sense strand
ggaaaaguauccguaccau

SEQ ID NO: 51187 - RNA, 19 nt, Homo sapiens
  misc_RNA (1)...(19): siRNA sense strand
ugauggagguguggauuuu

SEQ ID NO: 51188 - RNA, 19 nt, Homo sapiens
  misc_RNA (1)...(19): siRNA sense strand
agccucgccucuagagaaa

SEQ ID NO: 51189 - RNA, 19 nt, Homo sapiens
  misc_RNA (1)...(19): siRNA sense strand
caugauggcuucccuguua

SEQ ID NO: 51190 - RNA, 19 nt, Homo sapiens
  misc_RNA (1)...(19): siRNA sense strand
gagaaagucugccucauug

SEQ ID NO: 51191 - RNA, 19 nt, Homo sapiens
  misc_RNA (1)...(19): siRNA sense strand
ggagaaagucugccucauu

SEQ ID NO: 51192 - RNA, 19 nt, Homo sapiens
  misc_RNA (1)...(19): siRNA sense strand
uaugguggcuuuaagagua

SEQ ID NO: 51193 - RNA, 19 nt, Homo sapiens
  misc_RNA (1)...(19): siRNA sense strand
gaugguggcuguaggaauc

SEQ ID NO: 51194 - RNA, 19 nt, Homo sapiens
  misc_RNA (1)...(19): siRNA sense strand
gguuaugggucugcaguua

SEQ ID NO: 51195 - RNA, 19 nt, Homo sapiens
  misc_RNA (1)...(19): siRNA sense strand
caaaccaggugauaaaguc

SEQ ID NO: 51196 - RNA, 19 nt, Homo sapiens
  misc_RNA (1)...(19): siRNA sense strand
cccagaaccucucaauaaa

SEQ ID NO: 51197 - RNA, 19 nt, Homo sapiens
  misc_RNA (1)...(19): siRNA sense strand
guaaagaagguaucccaaa

SEQ ID NO: 51198 - RNA, 19 nt, Homo sapiens
  misc_RNA (1)...(19): siRNA sense strand
caucaacaaggacaaauuu

SEQ ID NO: 51199 - RNA, 19 nt, Homo sapiens
  misc_RNA (1)...(19): siRNA sense strand
caucaacccucaagacuac

SEQ ID NO: 51200 - RNA, 19 nt, Homo sapiens
  misc_RNA (1)...(19): siRNA sense strand
ucccagaaccucucaauaa

SEQ ID NO: 51201 - RNA, 19 nt, Homo sapiens
  misc_RNA (1)...(19): siRNA sense strand
gaagguaucccaaaacuug

SEQ ID NO: 51202 - RNA, 19 nt, Homo sapiens
  misc_RNA (1)...(19): siRNA sense strand
uaaagaagguaucccaaaa

SEQ ID NO: 51203 - RNA, 19 nt, Homo sapiens
  misc_RNA (1)...(19): siRNA sense strand
ggaagcccauucaccacuu

SEQ ID NO: 51204 - RNA, 19 nt, Homo sapiens
  misc_RNA (1)...(19): siRNA sense strand
gcucuuuacuccucagugu

SEQ ID NO: 51205 - RNA, 19 nt, Homo sapiens
  misc_RNA (1)...(19): siRNA sense strand
uggcuucccuguuauguug

SEQ ID NO: 51206 - RNA, 19 nt, Homo sapiens
  misc_RNA (1)...(19): siRNA sense strand
gcaucaacccucaagacua

SEQ ID NO: 51207 - RNA, 19 nt, Homo sapiens
  misc_RNA (1)...(19): siRNA sense strand
gagcacagcaggaaaagua

SEQ ID NO: 51208 - RNA, 19 nt, Homo sapiens
  misc_RNA (1)...(19): siRNA sense strand
ggacaucaacaaggacaaa

SEQ ID NO: 51209 - RNA, 19 nt, Homo sapiens
  misc_RNA (1)...(19): siRNA sense strand
ugaaggauuugaccugcuu

SEQ ID NO: 51210 - RNA, 19 nt, Homo sapiens
  misc_RNA (1)...(19): siRNA sense strand
gcuuaugaaguucgcauua

SEQ ID NO: 51211 - RNA, 19 nt, Homo sapiens
  misc_RNA (1)...(19): siRNA sense strand
cggccuaucugcuguuaug

SEQ ID NO: 51212 - RNA, 19 nt, Homo sapiens
  misc_RNA (1)...(19): siRNA sense strand
cuuaugaaguucgcauuaa

SEQ ID NO: 51213 - RNA, 19 nt, Homo sapiens
  misc_RNA (1)...(19): siRNA sense strand
gcuaugggagguaaagaaa

SEQ ID NO: 51214 - RNA, 19 nt, Homo sapiens
  misc_RNA (1)...(19): siRNA sense strand
gaaaaugcagaguuuguaa

SEQ ID NO: 51215 - RNA, 19 nt, Homo sapiens
  misc_RNA (1)...(19): siRNA sense strand
caacaaggacaaauuugca

SEQ ID NO: 51216 - RNA, 19 nt, Homo sapiens
  misc_RNA (1)...(19): siRNA sense strand
ggagcagccagaaucauug

SEQ ID NO: 51217 - RNA, 19 nt, Homo sapiens
  misc_RNA (1)...(19): siRNA sense strand
gaagugcuaaaggaaauga

SEQ ID NO: 51218 - RNA, 19 nt, Homo sapiens
  misc_RNA (1)...(19): siRNA sense strand
ucacuggaugcguuaauaa

SEQ ID NO: 51219 - RNA, 19 nt, Homo sapiens
  misc_RNA (1)...(19): siRNA sense strand
caaaacuuguggcugauuu

SEQ ID NO: 51220 - RNA, 19 nt, Homo sapiens
  misc_RNA (1)...(19): siRNA sense strand
agucaaaccaggugauaaa

SEQ ID NO: 51221 - RNA, 19 nt, Homo sapiens
  misc_RNA (1)...(19): siRNA sense strand
aauaaacccuaugcugcua

SEQ ID NO: 51222 - RNA, 19 nt, Homo sapiens
  misc_RNA (1)...(19): siRNA sense strand
gcugugcuaugggagguaa

SEQ ID NO: 51223 - RNA, 19 nt, Homo sapiens
  misc_RNA (1)...(19): siRNA sense strand
gagaaggggugacuacagu

SEQ ID NO: 51224 - RNA, 19 nt, Homo sapiens
  misc_RNA (1)...(19): siRNA sense strand
ccagcaccuucucccagua

SEQ ID NO: 51225 - RNA, 19 nt, Homo sapiens
  misc_RNA (1)...(19): siRNA sense strand
guuaugggucugcaguuaa

SEQ ID NO: 51226 - RNA, 19 nt, Homo sapiens
  misc_RNA (1)...(19): siRNA sense strand
uaacccauguuuuaccuuu

SEQ ID NO: 51227 - RNA, 19 nt, Homo sapiens
  misc_RNA (1)...(19): siRNA sense strand
aggaagugcuaaaggaaau

SEQ ID NO: 51228 - RNA, 19 nt, Homo sapiens
  misc_RNA (1)...(19): siRNA sense strand
ccucaagacuacaagaaac

SEQ ID NO: 51229 - RNA, 19 nt, Homo sapiens
  misc_RNA (1)...(19): siRNA sense strand
ucauugcgguggacaucaa

SEQ ID NO: 51230 - RNA, 19 nt, Homo sapiens
  misc_RNA (1)...(19): siRNA sense strand
cagaaccucucaauaaacc

SEQ ID NO: 51231 - RNA, 19 nt, Homo sapiens
  misc_RNA (1)...(19): siRNA sense strand
ggaaaaugcagaguuugua

SEQ ID NO: 51232 - RNA, 19 nt, Homo sapiens
  misc_RNA (1)...(19): siRNA sense strand
cuaaaggaaaugacugaug

SEQ ID NO: 51233 - RNA, 19 nt, Homo sapiens
  misc_RNA (1)...(19): siRNA sense strand
caggaagugcuaaaggaaa

SEQ ID NO: 51234 - RNA, 19 nt, Homo sapiens
  misc_RNA (1)...(19): siRNA sense strand
uaagaugguggcuguagga

SEQ ID NO: 51235 - RNA, 19 nt, Homo sapiens
  misc_RNA (1)...(19): siRNA sense strand
caguuaacguugccaaggu

SEQ ID NO: 51236 - RNA, 19 nt, Homo sapiens
  misc_RNA (1)...(19): siRNA sense strand
ugacuggacgcaccuggaa

SEQ ID NO: 51237 - RNA, 19 nt, Homo sapiens
  misc_RNA (1)...(19): siRNA sense strand
uggcacaagcgucaucgua

SEQ ID NO: 51238 - RNA, 19 nt, Homo sapiens
  misc_RNA (1)...(19): siRNA sense strand
cguggagaguguuggagaa

SEQ ID NO: 51239 - RNA, 19 nt, Homo sapiens
  misc_RNA (1)...(19): siRNA sense strand
uuaugaaguucgcauuaag

SEQ ID NO: 51240 - RNA, 19 nt, Homo sapiens
  misc_RNA (1)...(19): siRNA sense strand
cgguggacaucaacaagga

SEQ ID NO: 51241 - RNA, 19 nt, Homo sapiens
  misc_RNA (1)...(19): siRNA sense strand
uggagcagccagaaucauu

SEQ ID NO: 51242 - RNA, 19 nt, Homo sapiens
  misc_RNA (1)...(19): siRNA sense strand
uaugaaguucgcauuaaga

SEQ ID NO: 51243 - RNA, 19 nt, Homo sapiens
  misc_RNA (1)...(19): siRNA sense strand
ccuguuauguugucaugag

SEQ ID NO: 51244 - RNA, 19 nt, Homo sapiens
  misc_RNA (1)...(19): siRNA sense strand
ggauuugaccugcuucacu

SEQ ID NO: 51245 - RNA, 19 nt, Homo sapiens
  misc_RNA (1)...(19): siRNA sense strand
acaaggacaaauuugcaaa

SEQ ID NO: 51246 - RNA, 19 nt, Homo sapiens
  misc_RNA (1)...(19): siRNA sense strand
gcuguuaugggcuguaaag

SEQ ID NO: 51247 - RNA, 19 nt, Homo sapiens
  misc_RNA (1)...(19): siRNA sense strand
uucacuggaugcguuaaua

SEQ ID NO: 51248 - RNA, 19 nt, Homo sapiens
  misc_RNA (1)...(19): siRNA sense strand
gaaugcaucaacccucaag

SEQ ID NO: 51249 - RNA, 19 nt, Homo sapiens
  misc_RNA (1)...(19): siRNA sense strand
caaggacaaauuugcaaag

SEQ ID NO: 51250 - RNA, 19 nt, Homo sapiens
  misc_RNA (1)...(19): siRNA sense strand
cauugaggauguggagguu

SEQ ID NO: 51251 - RNA, 19 nt, Homo sapiens
  misc_RNA (1)...(19): siRNA sense strand
uguggaaaaugcagaguuu

SEQ ID NO: 51252 - RNA, 19 nt, Homo sapiens
  misc_RNA (1)...(19): siRNA sense strand
acagucaaaccaggugaua

SEQ ID NO: 51253 - RNA, 19 nt, Homo sapiens
  misc_RNA (1)...(19): siRNA sense strand
ucaaaccaggugauaaagu

SEQ ID NO: 51254 - RNA, 19 nt, Homo sapiens
  misc_RNA (1)...(19): siRNA sense strand
uguggauucucgacugguu

SEQ ID NO: 51255 - RNA, 19 nt, Homo sapiens
  misc_RNA (1)...(19): siRNA sense strand
gauggcaccaggagguuca

SEQ ID NO: 51256 - RNA, 19 nt, Homo sapiens
  misc_RNA (1)...(19): siRNA sense strand
ccucauuggcuguggauuc

SEQ ID NO: 51257 - RNA, 19 nt, Homo sapiens
  misc_RNA (1)...(19): siRNA sense strand
ugauggagguguggauuuu

SEQ ID NO: 51258 - RNA, 19 nt, Homo sapiens
  misc_RNA (1)...(19): siRNA sense strand
gucggccuaucugcuguua

SEQ ID NO: 51259 - RNA, 19 nt, Homo sapiens
  misc_RNA (1)...(19): siRNA sense strand
guggauucucgacugguua

SEQ ID NO: 51260 - RNA, 19 nt, Homo sapiens
  misc_RNA (1)...(19): siRNA sense strand
ggcuguuuaugguggcuuu

SEQ ID NO: 51261 - RNA, 19 nt, Homo sapiens
  misc_RNA (1)...(19): siRNA sense strand
ccagaaccucucaauaaac

SEQ ID NO: 51262 - RNA, 19 nt, Homo sapiens
  misc_RNA (1)...(19): siRNA sense strand
caugauggcuucccuguua

SEQ ID NO: 51263 - RNA, 19 nt, Homo sapiens
  misc_RNA (1)...(19): siRNA sense strand
gagaaagucugccucauug

SEQ ID NO: 51264 - RNA, 19 nt, Homo sapiens
  misc_RNA (1)...(19): siRNA sense strand
uaaagaaucugucccgaaa

SEQ ID NO: 51265 - RNA, 19 nt, Homo sapiens
  misc_RNA (1)...(19): siRNA sense strand
ggagaaagucugccucauu

SEQ ID NO: 51266 - RNA, 19 nt, Homo sapiens
  misc_RNA (1)...(19): siRNA sense strand
gcucaugaaguucgcauua

SEQ ID NO: 51267 - RNA, 19 nt, Homo sapiens
  misc_RNA (1)...(19): siRNA sense strand
gaugguggcugcaggaauc

SEQ ID NO: 51268 - RNA, 19 nt, Homo sapiens
  misc_RNA (1)...(19): siRNA sense strand
caaaccaggugauaaaguc

SEQ ID NO: 51269 - RNA, 19 nt, Homo sapiens
  misc_RNA (1)...(19): siRNA sense strand
cccagaaccucucaauaaa

SEQ ID NO: 51270 - RNA, 19 nt, Homo sapiens
  misc_RNA (1)...(19): siRNA sense strand
gcaggaaucugucguucag

SEQ ID NO: 51271 - RNA, 19 nt, Homo sapiens
  misc_RNA (1)...(19): siRNA sense strand
caucaacaaggacaaauuu

SEQ ID NO: 51272 - RNA, 19 nt, Homo sapiens
  misc_RNA (1)...(19): siRNA sense strand
caucaacccucaagacuac

SEQ ID NO: 51273 - RNA, 19 nt, Homo sapiens
  misc_RNA (1)...(19): siRNA sense strand
ucccagaaccucucaauaa

SEQ ID NO: 51274 - RNA, 19 nt, Homo sapiens
  misc_RNA (1)...(19): siRNA sense strand
gaaucugucccgaaacuug

SEQ ID NO: 51275 - RNA, 19 nt, Homo sapiens
  misc_RNA (1)...(19): siRNA sense strand
gcucuuuacuccucagugu

SEQ ID NO: 51276 - RNA, 19 nt, Homo sapiens
  misc_RNA (1)...(19): siRNA sense strand
uuuggaggcuuuaagagua

SEQ ID NO: 51277 - RNA, 19 nt, Homo sapiens
  misc_RNA (1)...(19): siRNA sense strand
uggcuucccuguuauguug

SEQ ID NO: 51278 - RNA, 19 nt, Homo sapiens
  misc_RNA (1)...(19): siRNA sense strand
gcaucaacccucaagacua

SEQ ID NO: 51279 - RNA, 19 nt, Homo sapiens
  misc_RNA (1)...(19): siRNA sense strand
gcuaugggaguuaaagaaa

SEQ ID NO: 51280 - RNA, 19 nt, Homo sapiens
  misc_RNA (1)...(19): siRNA sense strand
gagcacagcaggaaaagua

SEQ ID NO: 51281 - RNA, 19 nt, Homo sapiens
  misc_RNA (1)...(19): siRNA sense strand
cggccuaucuguuguuaug

SEQ ID NO: 51282 - RNA, 19 nt, Homo sapiens
  misc_RNA (1)...(19): siRNA sense strand
ggaagcccauccaccacuu

SEQ ID NO: 51283 - RNA, 19 nt, Homo sapiens
  misc_RNA (1)...(19): siRNA sense strand
ggacaucaacaaggacaaa

SEQ ID NO: 51284 - RNA, 19 nt, Homo sapiens
  misc_RNA (1)...(19): siRNA sense strand
ugaaggauuugaccugcuu

SEQ ID NO: 51285 - RNA, 19 nt, Homo sapiens
  misc_RNA (1)...(19): siRNA sense strand
gaaacuuguggcugacuuu

SEQ ID NO: 51286 - RNA, 19 nt, Homo sapiens
  misc_RNA (1)...(19): siRNA sense strand
caacaaggacaaauuugca

SEQ ID NO: 51287 - RNA, 19 nt, Homo sapiens
  misc_RNA (1)...(19): siRNA sense strand
uggcugacuuuauggcuaa

SEQ ID NO: 51288 - RNA, 19 nt, Homo sapiens
  misc_RNA (1)...(19): siRNA sense strand
ucacuggaugcauuaauaa

SEQ ID NO: 51289 - RNA, 19 nt, Homo sapiens
  misc_RNA (1)...(19): siRNA sense strand
uuaugggucugcagucaaa

SEQ ID NO: 51290 - RNA, 19 nt, Homo sapiens
  misc_RNA (1)...(19): siRNA sense strand
uucacuggaugcauuaaua

SEQ ID NO: 51291 - RNA, 19 nt, Homo sapiens
  misc_RNA (1)...(19): siRNA sense strand
uccuaaggcucaugaaguu

SEQ ID NO: 51292 - RNA, 19 nt, Homo sapiens
  misc_RNA (1)...(19): siRNA sense strand
ggagcagccagaaucauug

SEQ ID NO: 51293 - RNA, 19 nt, Homo sapiens
  misc_RNA (1)...(19): siRNA sense strand
gaagugcuaaaggaaauga

SEQ ID NO: 51294 - RNA, 19 nt, Homo sapiens
  misc_RNA (1)...(19): siRNA sense strand
cagaugagcaugugguuag

SEQ ID NO: 51295 - RNA, 19 nt, Homo sapiens
  misc_RNA (1)...(19): siRNA sense strand
aauaaacccuaugcugcua

SEQ ID NO: 51296 - RNA, 19 nt, Homo sapiens
  misc_RNA (1)...(19): siRNA sense strand
gcugugcuaugggaguuaa

SEQ ID NO: 51297 - RNA, 19 nt, Homo sapiens
  misc_RNA (1)...(19): siRNA sense strand
agucaaaccaggugauaaa

SEQ ID NO: 51298 - RNA, 19 nt, Homo sapiens
  misc_RNA (1)...(19): siRNA sense strand
ccucauuggcuguggauuu

SEQ ID NO: 51299 - RNA, 19 nt, Homo sapiens
  misc_RNA (1)...(19): siRNA sense strand
cugcuucgcucuggaaaga

SEQ ID NO: 51300 - RNA, 19 nt, Homo sapiens
  misc_RNA (1)...(19): siRNA sense strand
ucaugaaguucgcauuaag

SEQ ID NO: 51301 - RNA, 19 nt, Homo sapiens
  misc_RNA (1)...(19): siRNA sense strand
cuggaugcauuaauaacaa

SEQ ID NO: 51302 - RNA, 19 nt, Homo sapiens
  misc_RNA (1)...(19): siRNA sense strand
gagaaggggugacuacagu

SEQ ID NO: 51303 - RNA, 19 nt, Homo sapiens
  misc_RNA (1)...(19): siRNA sense strand
cuuuauggcuaagaaguuu

SEQ ID NO: 51304 - RNA, 19 nt, Homo sapiens
  misc_RNA (1)...(19): siRNA sense strand
cgaaacuuguggcugacuu

SEQ ID NO: 51305 - RNA, 19 nt, Homo sapiens
  misc_RNA (1)...(19): siRNA sense strand
gguuaugggucugcaguca

SEQ ID NO: 51306 - RNA, 19 nt, Homo sapiens
  misc_RNA (1)...(19): siRNA sense strand
ccucaagacuacaagaaac

SEQ ID NO: 51307 - RNA, 19 nt, Homo sapiens
  misc_RNA (1)...(19): siRNA sense strand
aaacuuguggcugacuuua

SEQ ID NO: 51308 - RNA, 19 nt, Homo sapiens
  misc_RNA (1)...(19): siRNA sense strand
aggaagugcuaaaggaaau

SEQ ID NO: 51309 - RNA, 19 nt, Homo sapiens
  misc_RNA (1)...(19): siRNA sense strand
cagaaccucucaauaaacc

SEQ ID NO: 51310 - RNA, 19 nt, Homo sapiens
  misc_RNA (1)...(19): siRNA sense strand
cucaugaaguucgcauuaa

SEQ ID NO: 51311 - RNA, 19 nt, Homo sapiens
  misc_RNA (1)...(19): siRNA sense strand
aaucauugcuguggacauc

SEQ ID NO: 51312 - RNA, 19 nt, Homo sapiens
  misc_RNA (1)...(19): siRNA sense strand
caugaaguucgcauuaaga

SEQ ID NO: 51313 - RNA, 19 nt, Homo sapiens
  misc_RNA (1)...(19): siRNA sense strand
aagaaucugucccgaaacu

SEQ ID NO: 51314 - RNA, 19 nt, Homo sapiens
  misc_RNA (1)...(19): siRNA sense strand
uuggaggcuuuaagaguaa

SEQ ID NO: 51315 - RNA, 19 nt, Homo sapiens
  misc_RNA (1)...(19): siRNA sense strand
cuaaaggaaaugacugaug

SEQ ID NO: 51316 - RNA, 19 nt, Homo sapiens
  misc_RNA (1)...(19): siRNA sense strand
caggaaaaguaaucaaaug

SEQ ID NO: 51317 - RNA, 19 nt, Homo sapiens
  misc_RNA (1)...(19): siRNA sense strand
caggaagugcuaaaggaaa

SEQ ID NO: 51318 - RNA, 19 nt, Homo sapiens
  misc_RNA (1)...(19): siRNA sense strand
ucagcaccuucucccagua

SEQ ID NO: 51319 - RNA, 19 nt, Homo sapiens
  misc_RNA (1)...(19): siRNA sense strand
caaauuugcaaaggcuaaa

SEQ ID NO: 51320 - RNA, 19 nt, Homo sapiens
  misc_RNA (1)...(19): siRNA sense strand
acuuguggcugacuuuaug

SEQ ID NO: 51321 - RNA, 19 nt, Homo sapiens
  misc_RNA (1)...(19): siRNA sense strand
uggagcagccagaaucauu

SEQ ID NO: 51322 - RNA, 19 nt, Homo sapiens
  misc_RNA (1)...(19): siRNA sense strand
ugacuggacgcacguggaa

SEQ ID NO: 51323 - RNA, 19 nt, Homo sapiens
  misc_RNA (1)...(19): siRNA sense strand
ucauugcuguggacaucaa

SEQ ID NO: 51324 - RNA, 19 nt, Homo sapiens
  misc_RNA (1)...(19): siRNA sense strand
ucagaugagcaugugguua

SEQ ID NO: 51325 - RNA, 19 nt, Homo sapiens
  misc_RNA (1)...(19): siRNA sense strand
cagcugugcuaugggaguu

SEQ ID NO: 51326 - RNA, 19 nt, Homo sapiens
  misc_RNA (1)...(19): siRNA sense strand
acaaauuugcaaaggcuaa

SEQ ID NO: 51327 - RNA, 19 nt, Homo sapiens
  misc_RNA (1)...(19): siRNA sense strand
ccuguuauguugucaugag

SEQ ID NO: 51328 - RNA, 19 nt, Homo sapiens
  misc_RNA (1)...(19): siRNA sense strand
gucuaccugugcuguguuu

SEQ ID NO: 51329 - RNA, 19 nt, Homo sapiens
  misc_RNA (1)...(19): siRNA sense strand
acaaggacaaauuugcaaa

SEQ ID NO: 51330 - RNA, 19 nt, Homo sapiens
  misc_RNA (1)...(19): siRNA sense strand
gucggccuaucuguuguua

SEQ ID NO: 51331 - RNA, 19 nt, Homo sapiens
  misc_RNA (1)...(19): siRNA sense strand
gaaugcaucaacccucaag

SEQ ID NO: 51332 - RNA, 19 nt, Homo sapiens
  misc_RNA (1)...(19): siRNA sense strand
caaggacaaauuugcaaag

SEQ ID NO: 51333 - RNA, 19 nt, Homo sapiens
  misc_RNA (1)...(19): siRNA sense strand
gggucuaccugugcugugu

SEQ ID NO: 51334 - RNA, 19 nt, Homo sapiens
  misc_RNA (1)...(19): siRNA sense strand
acagucaaaccaggugaua

SEQ ID NO: 51335 - RNA, 19 nt, Homo sapiens
  misc_RNA (1)...(19): siRNA sense strand
gcacguggaaaggagcuau

SEQ ID NO: 51336 - RNA, 19 nt, Homo sapiens
  misc_RNA (1)...(19): siRNA sense strand
gauggcaccaggagguuca

SEQ ID NO: 51337 - RNA, 19 nt, Homo sapiens
  misc_RNA (1)...(19): siRNA sense strand
ucaaaccaggugauaaagu

SEQ ID NO: 51338 - RNA, 19 nt, Homo sapiens
  misc_RNA (1)...(19): siRNA sense strand
ugauggagguguggauuuu

SEQ ID NO: 51339 - RNA, 19 nt, Homo sapiens
  misc_RNA (1)...(19): siRNA sense strand
gcaggaaaaguaaucaaau

SEQ ID NO: 51340 - RNA, 19 nt, Homo sapiens
  misc_RNA (1)...(19): siRNA sense strand
cuguggacaucaacaagga

SEQ ID NO: 51341 - RNA, 19 nt, Homo sapiens
  misc_RNA (1)...(19): siRNA sense strand
ccagaaccucucaauaaac

SEQ ID NO: 51342 - RNA, 19 nt, Homo sapiens
  misc_RNA (1)...(19): siRNA sense strand
caaaccaggugacaaagua

SEQ ID NO: 51343 - RNA, 19 nt, Homo sapiens
  misc_RNA (1)...(19): siRNA sense strand
gaacaauccucaucuuugg

SEQ ID NO: 51344 - RNA, 19 nt, Homo sapiens
  misc_RNA (1)...(19): siRNA sense strand
gaagaugccaggagcaauu

SEQ ID NO: 51345 - RNA, 19 nt, Homo sapiens
  misc_RNA (1)...(19): siRNA sense strand
gaaguucgcauucagauca

SEQ ID NO: 51346 - RNA, 19 nt, Homo sapiens
  misc_RNA (1)...(19): siRNA sense strand
ucccaaagcuggucacuga

SEQ ID NO: 51347 - RNA, 19 nt, Homo sapiens
  misc_RNA (1)...(19): siRNA sense strand
ccucaauccuagagacuua

SEQ ID NO: 51348 - RNA, 19 nt, Homo sapiens
  misc_RNA (1)...(19): siRNA sense strand
caucaacagugagaaguuu

SEQ ID NO: 51349 - RNA, 19 nt, Homo sapiens
  misc_RNA (1)...(19): siRNA sense strand
gggcaaaguuauuaaaugc

SEQ ID NO: 51350 - RNA, 19 nt, Homo sapiens
  misc_RNA (1)...(19): siRNA sense strand
gaaagcagcccuggacugu

SEQ ID NO: 51351 - RNA, 19 nt, Homo sapiens
  misc_RNA (1)...(19): siRNA sense strand
ccaguguuaucgauucuaa

SEQ ID NO: 51352 - RNA, 19 nt, Homo sapiens
  misc_RNA (1)...(19): siRNA sense strand
gaaauucaaucuggaugca

SEQ ID NO: 51353 - RNA, 19 nt, Homo sapiens
  misc_RNA (1)...(19): siRNA sense strand
gcaggagcuuccagaauca

SEQ ID NO: 51354 - RNA, 19 nt, Homo sapiens
  misc_RNA (1)...(19): siRNA sense strand
caaaauagaugaugaugca

SEQ ID NO: 51355 - RNA, 19 nt, Homo sapiens
  misc_RNA (1)...(19): siRNA sense strand
gggaucauguacuuucauu

SEQ ID NO: 51356 - RNA, 19 nt, Homo sapiens
  misc_RNA (1)...(19): siRNA sense strand
ccaugaggcugcagguauu

SEQ ID NO: 51357 - RNA, 19 nt, Homo sapiens
  misc_RNA (1)...(19): siRNA sense strand
ccaggaaguuaucauugaa

SEQ ID NO: 51358 - RNA, 19 nt, Homo sapiens
  misc_RNA (1)...(19): siRNA sense strand
ccaguacauucucucagua

SEQ ID NO: 51359 - RNA, 19 nt, Homo sapiens
  misc_RNA (1)...(19): siRNA sense strand
gcaaauuuagagagaguuu

SEQ ID NO: 51360 - RNA, 19 nt, Homo sapiens
  misc_RNA (1)...(19): siRNA sense strand
cuaauaaucggccguacua

SEQ ID NO: 51361 - RNA, 19 nt, Homo sapiens
  misc_RNA (1)...(19): siRNA sense strand
aaucauagguauugacauc

SEQ ID NO: 51362 - RNA, 19 nt, Homo sapiens
  misc_RNA (1)...(19): siRNA sense strand
cgaacaauccucaucuuug

SEQ ID NO: 51363 - RNA, 19 nt, Homo sapiens
  misc_RNA (1)...(19): siRNA sense strand
agagagaguuugucugcuu

SEQ ID NO: 51364 - RNA, 19 nt, Homo sapiens
  misc_RNA (1)...(19): siRNA sense strand
gcaccaagggcaaaguuau

SEQ ID NO: 51365 - RNA, 19 nt, Homo sapiens
  misc_RNA (1)...(19): siRNA sense strand
ggaacauucuuuggugguu

SEQ ID NO: 51366 - RNA, 19 nt, Homo sapiens
  misc_RNA (1)...(19): siRNA sense strand
auaaucggccguacuauaa

SEQ ID NO: 51367 - RNA, 19 nt, Homo sapiens
  misc_RNA (1)...(19): siRNA sense strand
aauaaucggccguacuaua

SEQ ID NO: 51368 - RNA, 19 nt, Homo sapiens
  misc_RNA (1)...(19): siRNA sense strand
uguaauggguuguaaagca

SEQ ID NO: 51369 - RNA, 19 nt, Homo sapiens
  misc_RNA (1)...(19): siRNA sense strand
gaucauguacuuucauugg

SEQ ID NO: 51370 - RNA, 19 nt, Homo sapiens
  misc_RNA (1)...(19): siRNA sense strand
agaaguuugugaaggcuaa

SEQ ID NO: 51371 - RNA, 19 nt, Homo sapiens
  misc_RNA (1)...(19): siRNA sense strand
ccuagagacuuacauaaac

SEQ ID NO: 51372 - RNA, 19 nt, Homo sapiens
  misc_RNA (1)...(19): siRNA sense strand
uccaggaaguuaucauuga

SEQ ID NO: 51373 - RNA, 19 nt, Homo sapiens
  misc_RNA (1)...(19): siRNA sense strand
gcagguauuguggaaagua

SEQ ID NO: 51374 - RNA, 19 nt, Homo sapiens
  misc_RNA (1)...(19): siRNA sense strand
cauugaagagguugaagua

SEQ ID NO: 51375 - RNA, 19 nt, Homo sapiens
  misc_RNA (1)...(19): siRNA sense strand
caagggagguguggauuuu

SEQ ID NO: 51376 - RNA, 19 nt, Homo sapiens
  misc_RNA (1)...(19): siRNA sense strand
ggaaguuaucauugaauug

SEQ ID NO: 51377 - RNA, 19 nt, Homo sapiens
  misc_RNA (1)...(19): siRNA sense strand
caagggcaaaguuauuaaa

SEQ ID NO: 51378 - RNA, 19 nt, Homo sapiens
  misc_RNA (1)...(19): siRNA sense strand
gaaccaguacauucucuca

SEQ ID NO: 51379 - RNA, 19 nt, Homo sapiens
  misc_RNA (1)...(19): siRNA sense strand
ugaugcaaauuuagagaga

SEQ ID NO: 51380 - RNA, 19 nt, Homo sapiens
  misc_RNA (1)...(19): siRNA sense strand
gggcugcaaucaacaaugc

SEQ ID NO: 51381 - RNA, 19 nt, Homo sapiens
  misc_RNA (1)...(19): siRNA sense strand
gcagguggaucugaaacca

SEQ ID NO: 51382 - RNA, 19 nt, Homo sapiens
  misc_RNA (1)...(19): siRNA sense strand
ccaagggagguguggauuu

SEQ ID NO: 51383 - RNA, 19 nt, Homo sapiens
  misc_RNA (1)...(19): siRNA sense strand
gaucugaaaccaugaaagc

SEQ ID NO: 51384 - RNA, 19 nt, Homo sapiens
  misc_RNA (1)...(19): siRNA sense strand
ccaagggcaaaguuauuaa

SEQ ID NO: 51385 - RNA, 19 nt, Homo sapiens
  misc_RNA (1)...(19): siRNA sense strand
ggccuagcuuucccaguga

SEQ ID NO: 51386 - RNA, 19 nt, Homo sapiens
  misc_RNA (1)...(19): siRNA sense strand
aagcagcccuggacuguac

SEQ ID NO: 51387 - RNA, 19 nt, Homo sapiens
  misc_RNA (1)...(19): siRNA sense strand
cagguauuguggaaaguau

SEQ ID NO: 51388 - RNA, 19 nt, Homo sapiens
  misc_RNA (1)...(19): siRNA sense strand
agcaggagcuuccagaauc

SEQ ID NO: 51389 - RNA, 19 nt, Homo sapiens
  misc_RNA (1)...(19): siRNA sense strand
gguauuguggaaaguauug

SEQ ID NO: 51390 - RNA, 19 nt, Homo sapiens
  misc_RNA (1)...(19): siRNA sense strand
gccaugaggcugcagguau

SEQ ID NO: 51391 - RNA, 19 nt, Homo sapiens
  misc_RNA (1)...(19): siRNA sense strand
ccgaacaauccucaucuuu

SEQ ID NO: 51392 - RNA, 19 nt, Homo sapiens
  misc_RNA (1)...(19): siRNA sense strand
gcucaugaaguucgcauuc

SEQ ID NO: 51393 - RNA, 19 nt, Homo sapiens
  misc_RNA (1)...(19): siRNA sense strand
gaugaugcaaauuuagaga

SEQ ID NO: 51394 - RNA, 19 nt, Homo sapiens
  misc_RNA (1)...(19): siRNA sense strand
ccagaaucauagguauuga

SEQ ID NO: 51395 - RNA, 19 nt, Homo sapiens
  misc_RNA (1)...(19): siRNA sense strand
ugaagagguugaaguagcu

SEQ ID NO: 51396 - RNA, 19 nt, Homo sapiens
  misc_RNA (1)...(19): siRNA sense strand
caccaagggcaaaguuauu

SEQ ID NO: 51397 - RNA, 19 nt, Homo sapiens
  misc_RNA (1)...(19): siRNA sense strand
agggcaaaguuauuaaaug

SEQ ID NO: 51398 - RNA, 19 nt, Homo sapiens
  misc_RNA (1)...(19): siRNA sense strand
gccacugacugccucaauc

SEQ ID NO: 51399 - RNA, 19 nt, Homo sapiens
  misc_RNA (1)...(19): siRNA sense strand
aaucggccguacuauaaau

SEQ ID NO: 51400 - RNA, 19 nt, Homo sapiens
  misc_RNA (1)...(19): siRNA sense strand
aauccuagagacuuacaua

SEQ ID NO: 51401 - RNA, 19 nt, Homo sapiens
  misc_RNA (1)...(19): siRNA sense strand
ucaaaaguccugcuaguga

SEQ ID NO: 51402 - RNA, 19 nt, Homo sapiens
  misc_RNA (1)...(19): siRNA sense strand
gcugguagcaaaggauuga

SEQ ID NO: 51403 - RNA, 19 nt, Homo sapiens
  misc_RNA (1)...(19): siRNA sense strand
gcagcaggagcuuccagaa

SEQ ID NO: 51404 - RNA, 19 nt, Homo sapiens
  misc_RNA (1)...(19): siRNA sense strand
gggucuuucugcuguaaug

SEQ ID NO: 51405 - RNA, 19 nt, Homo sapiens
  misc_RNA (1)...(19): siRNA sense strand
gaugaugaugcaaauuuag

SEQ ID NO: 51406 - RNA, 19 nt, Homo sapiens
  misc_RNA (1)...(19): siRNA sense strand
gggaaaaucaguaaucuca

SEQ ID NO: 51407 - RNA, 19 nt, Homo sapiens
  misc_RNA (1)...(19): siRNA sense strand
ccccaaggcucaugaaguu

SEQ ID NO: 51408 - RNA, 19 nt, Homo sapiens
  misc_RNA (1)...(19): siRNA sense strand
gagaguuugucugcuugga

SEQ ID NO: 51409 - RNA, 19 nt, Homo sapiens
  misc_RNA (1)...(19): siRNA sense strand
caacaacuaauggaagaca

SEQ ID NO: 51410 - RNA, 19 nt, Homo sapiens
  misc_RNA (1)...(19): siRNA sense strand
gcauugaagagguugaagu

SEQ ID NO: 51411 - RNA, 19 nt, Homo sapiens
  misc_RNA (1)...(19): siRNA sense strand
cagcaggagcuuccagaau

SEQ ID NO: 51412 - RNA, 19 nt, Homo sapiens
  misc_RNA (1)...(19): siRNA sense strand
caaaaguccugcuagugau

SEQ ID NO: 51413 - RNA, 19 nt, Homo sapiens
  misc_RNA (1)...(19): siRNA sense strand
ggcaccaagggcaaaguua

SEQ ID NO: 51414 - RNA, 19 nt, Homo sapiens
  misc_RNA (1)...(19): siRNA sense strand
gaccuaaugaaccaaggaa

SEQ ID NO: 51415 - RNA, 19 nt, Homo sapiens
  misc_RNA (1)...(19): siRNA sense strand
accaagggcaaaguuauua

SEQ ID NO: 51416 - RNA, 19 nt, Homo sapiens
  misc_RNA (1)...(19): siRNA sense strand
gcuguaauggguuguaaag

SEQ ID NO: 51417 - RNA, 19 nt, Homo sapiens
  misc_RNA (1)...(19): siRNA sense strand
acagugagaaguuugugaa

SEQ ID NO: 51418 - RNA, 19 nt, Homo sapiens
  misc_RNA (1)...(19): siRNA sense strand
uccuagagacuuacauaaa

SEQ ID NO: 51419 - RNA, 19 nt, Homo sapiens
  misc_RNA (1)...(19): siRNA sense strand
ggauguggguuuucaacug

SEQ ID NO: 51420 - RNA, 19 nt, Homo sapiens
  misc_RNA (1)...(19): siRNA sense strand
gugaggcauuugaccuaau

SEQ ID NO: 51421 - RNA, 19 nt, Homo sapiens
  misc_RNA (1)...(19): siRNA sense strand
cugcagguauuguggaaag

SEQ ID NO: 51422 - RNA, 19 nt, Homo sapiens
  misc_RNA (1)...(19): siRNA sense strand
uaaucggccguacuauaaa

SEQ ID NO: 51423 - RNA, 19 nt, Homo sapiens
  misc_RNA (1)...(19): siRNA sense strand
ccagaggagcuaauaaucg

SEQ ID NO: 51424 - RNA, 19 nt, Homo sapiens
  misc_RNA (1)...(19): siRNA sense strand
ggccaggagugaccaacgu

SEQ ID NO: 51425 - RNA, 19 nt, Homo sapiens
  misc_RNA (1)...(19): siRNA sense strand
gugggucuuucugcuguaa

SEQ ID NO: 51426 - RNA, 19 nt, Homo sapiens
  misc_RNA (1)...(19): siRNA sense strand
ccaguuuaccauuucuuug

SEQ ID NO: 51427 - RNA, 19 nt, Homo sapiens
  misc_RNA (1)...(19): siRNA sense strand
cagugaggcauuugaccua

SEQ ID NO: 51428 - RNA, 19 nt, Homo sapiens
  misc_RNA (1)...(19): siRNA sense strand
ugacccauacccugccuuu

SEQ ID NO: 51429 - RNA, 19 nt, Homo sapiens
  misc_RNA (1)...(19): siRNA sense strand
gaccaagggagguguggau

SEQ ID NO: 51430 - RNA, 19 nt, Homo sapiens
  misc_RNA (1)...(19): siRNA sense strand
gggcaccaagggcaaaguu

SEQ ID NO: 51431 - RNA, 19 nt, Homo sapiens
  misc_RNA (1)...(19): siRNA sense strand
cgacuugugcugucuuugg

SEQ ID NO: 51432 - RNA, 19 nt, Homo sapiens
  misc_RNA (1)...(19): siRNA sense strand
aaaccaggugacaaaguaa

SEQ ID NO: 51433 - RNA, 19 nt, Homo sapiens
  misc_RNA (1)...(19): siRNA sense strand
aucaacaacuaauggaaga

SEQ ID NO: 51434 - RNA, 19 nt, Homo sapiens
  misc_RNA (1)...(19): siRNA sense strand
ggaagaugccaggagcaau

SEQ ID NO: 51435 - RNA, 19 nt, Homo sapiens
  misc_RNA (1)...(19): siRNA sense strand
acaauccucaucuuuggaa

SEQ ID NO: 51436 - RNA, 19 nt, Homo sapiens
  misc_RNA (1)...(19): siRNA sense strand
ccuaggaggugugggucuu

SEQ ID NO: 51437 - RNA, 19 nt, Homo sapiens
  misc_RNA (1)...(19): siRNA sense strand
guuuaccauuucuuuggaa

SEQ ID NO: 51438 - RNA, 19 nt, Homo sapiens
  misc_RNA (1)...(19): siRNA sense strand
acaacuaauggaagacaaa

SEQ ID NO: 51439 - RNA, 19 nt, Homo sapiens
  misc_RNA (1)...(19): siRNA sense strand
agugaggcauuugaccuaa

SEQ ID NO: 51440 - RNA, 19 nt, Homo sapiens
  misc_RNA (1)...(19): siRNA sense strand
ggcugcagguauuguggaa

SEQ ID NO: 51441 - RNA, 19 nt, Homo sapiens
  misc_RNA (1)...(19): siRNA sense strand
ugacaucaacagugagaag

SEQ ID NO: 51442 - RNA, 19 nt, Homo sapiens
  misc_RNA (1)...(19): siRNA sense strand
gaaagccucucuccauaga

SEQ ID NO: 51443 - RNA, 19 nt, Homo sapiens
  misc_RNA (1)...(19): siRNA sense strand
ggaaagagcauucgaacug

SEQ ID NO: 51444 - RNA, 19 nt, Homo sapiens
  misc_RNA (1)...(19): siRNA sense strand
gaugguaccagcagauuua

SEQ ID NO: 51445 - RNA, 19 nt, Homo sapiens
  misc_RNA (1)...(19): siRNA sense strand
ggagucggauuggcaguua

SEQ ID NO: 51446 - RNA, 19 nt, Homo sapiens
  misc_RNA (1)...(19): siRNA sense strand
gcugauaucucuguugcua

SEQ ID NO: 51447 - RNA, 19 nt, Homo sapiens
  misc_RNA (1)...(19): siRNA sense strand
aaacuaaccuuugccagaa

SEQ ID NO: 51448 - RNA, 19 nt, Homo sapiens
  misc_RNA (1)...(19): siRNA sense strand
gaaagagcauucgaacugu

SEQ ID NO: 51449 - RNA, 19 nt, Homo sapiens
  misc_RNA (1)...(19): siRNA sense strand
cgaacgagguuaucaagug

SEQ ID NO: 51450 - RNA, 19 nt, Homo sapiens
  misc_RNA (1)...(19): siRNA sense strand
ggaguggacuauuccuuug

SEQ ID NO: 51451 - RNA, 19 nt, Homo sapiens
  misc_RNA (1)...(19): siRNA sense strand
gaacugaugcauucuggaa

SEQ ID NO: 51452 - RNA, 19 nt, Homo sapiens
  misc_RNA (1)...(19): siRNA sense strand
guauuaacccucaggauuu

SEQ ID NO: 51453 - RNA, 19 nt, Homo sapiens
  misc_RNA (1)...(19): siRNA sense strand
cccaaaggcucaugaaguu

SEQ ID NO: 51454 - RNA, 19 nt, Homo sapiens
  misc_RNA (1)...(19): siRNA sense strand
ggaagaguguagaaagugu

SEQ ID NO: 51455 - RNA, 19 nt, Homo sapiens
  misc_RNA (1)...(19): siRNA sense strand
ugauaucucuguugcuaaa

SEQ ID NO: 51456 - RNA, 19 nt, Homo sapiens
  misc_RNA (1)...(19): siRNA sense strand
gaaguucgaaucaagauca

SEQ ID NO: 51457 - RNA, 19 nt, Homo sapiens
  misc_RNA (1)...(19): siRNA sense strand
acaugaaggugcuggaauu

SEQ ID NO: 51458 - RNA, 19 nt, Homo sapiens
  misc_RNA (1)...(19): siRNA sense strand
ccagugaucuugggacaug

SEQ ID NO: 51459 - RNA, 19 nt, Homo sapiens
  misc_RNA (1)...(19): siRNA sense strand
gaauguauugguaauguga

SEQ ID NO: 51460 - RNA, 19 nt, Homo sapiens
  misc_RNA (1)...(19): siRNA sense strand
cagauuuacuugcaaagga

SEQ ID NO: 51461 - RNA, 19 nt, Homo sapiens
  misc_RNA (1)...(19): siRNA sense strand
cagcagauuuacuugcaaa

SEQ ID NO: 51462 - RNA, 19 nt, Homo sapiens
  misc_RNA (1)...(19): siRNA sense strand
acacugucaucccacuuua

SEQ ID NO: 51463 - RNA, 19 nt, Homo sapiens
  misc_RNA (1)...(19): siRNA sense strand
ugaaggugcuggaauugug

SEQ ID NO: 51464 - RNA, 19 nt, Homo sapiens
  misc_RNA (1)...(19): siRNA sense strand
uaacaggucgcacauggaa

SEQ ID NO: 51465 - RNA, 19 nt, Homo sapiens
  misc_RNA (1)...(19): siRNA sense strand
ugugaacacugccaaguug

SEQ ID NO: 51466 - RNA, 19 nt, Homo sapiens
  misc_RNA (1)...(19): siRNA sense strand
guaaacccauccaggaagu

SEQ ID NO: 51467 - RNA, 19 nt, Homo sapiens
  misc_RNA (1)...(19): siRNA sense strand
guguggacaucaauaaaga

SEQ ID NO: 51468 - RNA, 19 nt, Homo sapiens
  misc_RNA (1)...(19): siRNA sense strand
gcaguuaucaugggcugua

SEQ ID NO: 51469 - RNA, 19 nt, Homo sapiens
  misc_RNA (1)...(19): siRNA sense strand
ggaaagccucucuccauag

SEQ ID NO: 51470 - RNA, 19 nt, Homo sapiens
  misc_RNA (1)...(19): siRNA sense strand
gaaauugccacucguccau

SEQ ID NO: 51471 - RNA, 19 nt, Homo sapiens
  misc_RNA (1)...(19): siRNA sense strand
gaucauugguguggacauc

SEQ ID NO: 51472 - RNA, 19 nt, Homo sapiens
  misc_RNA (1)...(19): siRNA sense strand
ggaauuguggaaaguguug

SEQ ID NO: 51473 - RNA, 19 nt, Homo sapiens
  misc_RNA (1)...(19): siRNA sense strand
ccuuugaacugaugcauuc

SEQ ID NO: 51474 - RNA, 19 nt, Homo sapiens
  misc_RNA (1)...(19): siRNA sense strand
ggauuaaugccagauggua

SEQ ID NO: 51475 - RNA, 19 nt, Homo sapiens
  misc_RNA (1)...(19): siRNA sense strand
caugggaaccagcacauuu

SEQ ID NO: 51476 - RNA, 19 nt, Homo sapiens
  misc_RNA (1)...(19): siRNA sense strand
gcaaaggaaagacaauuuu

SEQ ID NO: 51477 - RNA, 19 nt, Homo sapiens
  misc_RNA (1)...(19): siRNA sense strand
gcucaugaaguucgaauca

SEQ ID NO: 51478 - RNA, 19 nt, Homo sapiens
  misc_RNA (1)...(19): siRNA sense strand
guggacaucaauaaagaua

SEQ ID NO: 51479 - RNA, 19 nt, Homo sapiens
  misc_RNA (1)...(19): siRNA sense strand
cauucgaacuguuguaaag

SEQ ID NO: 51480 - RNA, 19 nt, Homo sapiens
  misc_RNA (1)...(19): siRNA sense strand
aaagagcauucgaacuguu

SEQ ID NO: 51481 - RNA, 19 nt, Homo sapiens
  misc_RNA (1)...(19): siRNA sense strand
guguggagaaugcaaauuu

SEQ ID NO: 51482 - RNA, 19 nt, Homo sapiens
  misc_RNA (1)...(19): siRNA sense strand
ugacucacaaucugucuuu

SEQ ID NO: 51483 - RNA, 19 nt, Homo sapiens
  misc_RNA (1)...(19): siRNA sense strand
ggagccacugaauguauua

SEQ ID NO: 51484 - RNA, 19 nt, Homo sapiens
  misc_RNA (1)...(19): siRNA sense strand
uaucaugggcuguaaagug

SEQ ID NO: 51485 - RNA, 19 nt, Homo sapiens
  misc_RNA (1)...(19): siRNA sense strand
ggaaagacaauuuugcauu

SEQ ID NO: 51486 - RNA, 19 nt, Homo sapiens
  misc_RNA (1)...(19): siRNA sense strand
uguauuaacccucaggauu

SEQ ID NO: 51487 - RNA, 19 nt, Homo sapiens
  misc_RNA (1)...(19): siRNA sense strand
guucgaaucaagaucauug

SEQ ID NO: 51488 - RNA, 19 nt, Homo sapiens
  misc_RNA (1)...(19): siRNA sense strand
gauggaagaguguagaaag

SEQ ID NO: 51489 - RNA, 19 nt, Homo sapiens
  misc_RNA (1)...(19): siRNA sense strand
uccaggaagugcucauuga

SEQ ID NO: 51490 - RNA, 19 nt, Homo sapiens
  misc_RNA (1)...(19): siRNA sense strand
gguaccagcagauuuacuu

SEQ ID NO: 51491 - RNA, 19 nt, Homo sapiens
  misc_RNA (1)...(19): siRNA sense strand
ucaugaaguucgaaucaag

SEQ ID NO: 51492 - RNA, 19 nt, Homo sapiens
  misc_RNA (1)...(19): siRNA sense strand
ggacaugaaggugcuggaa

SEQ ID NO: 51493 - RNA, 19 nt, Homo sapiens
  misc_RNA (1)...(19): siRNA sense strand
agauuuacuugcaaaggaa

SEQ ID NO: 51494 - RNA, 19 nt, Homo sapiens
  misc_RNA (1)...(19): siRNA sense strand
uggagccacugaauguauu

SEQ ID NO: 51495 - RNA, 19 nt, Homo sapiens
  misc_RNA (1)...(19): siRNA sense strand
uguagaaagugucccaaag

SEQ ID NO: 51496 - RNA, 19 nt, Homo sapiens
  misc_RNA (1)...(19): siRNA sense strand
ucaagggaaaggauuaaug

SEQ ID NO: 51497 - RNA, 19 nt, Homo sapiens
  misc_RNA (1)...(19): siRNA sense strand
gcacuugaggcaugucaca

SEQ ID NO: 51498 - RNA, 19 nt, Homo sapiens
  misc_RNA (1)...(19): siRNA sense strand
ugcaagggccaaagaguuu

SEQ ID NO: 51499 - RNA, 19 nt, Homo sapiens
  misc_RNA (1)...(19): siRNA sense strand
gugcuggaauuguggaaag

SEQ ID NO: 51500 - RNA, 19 nt, Homo sapiens
  misc_RNA (1)...(19): siRNA sense strand
cgaacuguuguaaagauuu

SEQ ID NO: 51501 - RNA, 19 nt, Homo sapiens
  misc_RNA (1)...(19): siRNA sense strand
ucgaacuguuguaaagauu

SEQ ID NO: 51502 - RNA, 19 nt, Homo sapiens
  misc_RNA (1)...(19): siRNA sense strand
gagcauucgaacuguugua

SEQ ID NO: 51503 - RNA, 19 nt, Homo sapiens
  misc_RNA (1)...(19): siRNA sense strand
caagggaaaggauuaaugc

SEQ ID NO: 51504 - RNA, 19 nt, Homo sapiens
  misc_RNA (1)...(19): siRNA sense strand
gaucuugggacaugaaggu

SEQ ID NO: 51505 - RNA, 19 nt, Homo sapiens
  misc_RNA (1)...(19): siRNA sense strand
uaaagucugccuucuaggu

SEQ ID NO: 51506 - RNA, 19 nt, Homo sapiens
  misc_RNA (1)...(19): siRNA sense strand
ggauggaagaguguagaaa

SEQ ID NO: 51507 - RNA, 19 nt, Homo sapiens
  misc_RNA (1)...(19): siRNA sense strand
cggauuggcaguuaucaug

SEQ ID NO: 51508 - RNA, 19 nt, Homo sapiens
  misc_RNA (1)...(19): siRNA sense strand
gcauucgaacuguuguaaa

SEQ ID NO: 51509 - RNA, 19 nt, Homo sapiens
  misc_RNA (1)...(19): siRNA sense strand
ugaauguauugguaaugug

SEQ ID NO: 51510 - RNA, 19 nt, Homo sapiens
  misc_RNA (1)...(19): siRNA sense strand
ccuucuagguuguggcauu

SEQ ID NO: 51511 - RNA, 19 nt, Homo sapiens
  misc_RNA (1)...(19): siRNA sense strand
uugaugaauuugugacuca

SEQ ID NO: 51512 - RNA, 19 nt, Homo sapiens
  misc_RNA (1)...(19): siRNA sense strand
cuucuagguuguggcauuu

SEQ ID NO: 51513 - RNA, 19 nt, Homo sapiens
  misc_RNA (1)...(19): siRNA sense strand
ugcaaaggaaagacaauuu

SEQ ID NO: 51514 - RNA, 19 nt, Homo sapiens
  misc_RNA (1)...(19): siRNA sense strand
caugagagcagcacuugag

SEQ ID NO: 51515 - RNA, 19 nt, Homo sapiens
  misc_RNA (1)...(19): siRNA sense strand
guuuggagccacugaaugu

SEQ ID NO: 51516 - RNA, 19 nt, Homo sapiens
  misc_RNA (1)...(19): siRNA sense strand
ucauugguguggacaucaa

SEQ ID NO: 51517 - RNA, 19 nt, Homo sapiens
  misc_RNA (1)...(19): siRNA sense strand
gguguggacaucaauaaag

SEQ ID NO: 51518 - RNA, 19 nt, Homo sapiens
  misc_RNA (1)...(19): siRNA sense strand
ccagcagauuuacuugcaa

SEQ ID NO: 51519 - RNA, 19 nt, Homo sapiens
  misc_RNA (1)...(19): siRNA sense strand
caaucugucuuuugaugaa

SEQ ID NO: 51520 - RNA, 19 nt, Homo sapiens
  misc_RNA (1)...(19): siRNA sense strand
gaguggacuauuccuuuga

SEQ ID NO: 51521 - RNA, 19 nt, Homo sapiens
  misc_RNA (1)...(19): siRNA sense strand
gcuggugcuucccggauca

SEQ ID NO: 51522 - RNA, 19 nt, Homo sapiens
  misc_RNA (1)...(19): siRNA sense strand
uaaccuuugccagaagaua

SEQ ID NO: 51523 - RNA, 19 nt, Homo sapiens
  misc_RNA (1)...(19): siRNA sense strand
caugaaguucgaaucaaga

SEQ ID NO: 51524 - RNA, 19 nt, Homo sapiens
  misc_RNA (1)...(19): siRNA sense strand
aaagucugccuucuagguu

SEQ ID NO: 51525 - RNA, 19 nt, Homo sapiens
  misc_RNA (1)...(19): siRNA sense strand
ucacucaagggaaaggauu

SEQ ID NO: 51526 - RNA, 19 nt, Homo sapiens
  misc_RNA (1)...(19): siRNA sense strand
gaaaggauuaaugccagau

SEQ ID NO: 51527 - RNA, 19 nt, Homo sapiens
  misc_RNA (1)...(19): siRNA sense strand
gacaugaaggugcuggaau

SEQ ID NO: 51528 - RNA, 19 nt, Homo sapiens
  misc_RNA (1)...(19): siRNA sense strand
cagcgucgugguuggagua

SEQ ID NO: 51529 - RNA, 19 nt, Homo sapiens
  misc_RNA (1)...(19): siRNA sense strand
ccacaccgaugccuauacc

SEQ ID NO: 51530 - RNA, 19 nt, Homo sapiens
  misc_RNA (1)...(19): siRNA sense strand
guaccagcagauuuacuug

SEQ ID NO: 51531 - RNA, 19 nt, Homo sapiens
  misc_RNA (1)...(19): siRNA sense strand
gugagggaguuacuaagcu

SEQ ID NO: 51532 - RNA, 19 nt, Homo sapiens
  misc_RNA (1)...(19): siRNA sense strand
ggucaugagagcagcacuu

SEQ ID NO: 51533 - RNA, 19 nt, Homo sapiens
  misc_RNA (1)...(19): siRNA sense strand
uccuuugaauguauuggua

SEQ ID NO: 51534 - RNA, 19 nt, Homo sapiens
  misc_RNA (1)...(19): siRNA sense strand
aguggacuauuccuuugaa

SEQ ID NO: 51535 - RNA, 19 nt, Homo sapiens
  misc_RNA (1)...(19): siRNA sense strand
uagauccuuuagcaccuuu

SEQ ID NO: 51536 - RNA, 19 nt, Homo sapiens
  misc_RNA (1)...(19): siRNA sense strand
aaccuuugccagaagauaa

SEQ ID NO: 51537 - RNA, 19 nt, Homo sapiens
  misc_RNA (1)...(19): siRNA sense strand
gaggauggaagaguguaga

SEQ ID NO: 51538 - RNA, 19 nt, Homo sapiens
  misc_RNA (1)...(19): siRNA sense strand
guaacaggucgcacaugga

SEQ ID NO: 51539 - RNA, 19 nt, Homo sapiens
  misc_RNA (1)...(19): siRNA sense strand
ugaaggcgggugacacugu

SEQ ID NO: 51540 - RNA, 19 nt, Homo sapiens
  misc_RNA (1)...(19): siRNA sense strand
ccagcacauuuucugaaua

SEQ ID NO: 51541 - RNA, 19 nt, Homo sapiens
  misc_RNA (1)...(19): siRNA sense strand
gaguuuggagccacugaau

SEQ ID NO: 51542 - RNA, 19 nt, Homo sapiens
  misc_RNA (1)...(19): siRNA sense strand
gagaaagucuguuuaauug

SEQ ID NO: 51543 - RNA, 19 nt, Homo sapiens
  misc_RNA (1)...(19): siRNA sense strand
gaacaaugguguccaaguu

SEQ ID NO: 51544 - RNA, 19 nt, Homo sapiens
  misc_RNA (1)...(19): siRNA sense strand
ggauacaccuuugaaguua

SEQ ID NO: 51545 - RNA, 19 nt, Homo sapiens
  misc_RNA (1)...(19): siRNA sense strand
gaaguucgcauuaagauuu

SEQ ID NO: 51546 - RNA, 19 nt, Homo sapiens
  misc_RNA (1)...(19): siRNA sense strand
ccaagaugcucaccuauga

SEQ ID NO: 51547 - RNA, 19 nt, Homo sapiens
  misc_RNA (1)...(19): siRNA sense strand
gaagggaugugucuuugga

SEQ ID NO: 51548 - RNA, 19 nt, Homo sapiens
  misc_RNA (1)...(19): siRNA sense strand
cuaaagaaguucgcauuaa

SEQ ID NO: 51549 - RNA, 19 nt, Homo sapiens
  misc_RNA (1)...(19): siRNA sense strand
gaaaccaggugacaaaguc

SEQ ID NO: 51550 - RNA, 19 nt, Homo sapiens
  misc_RNA (1)...(19): siRNA sense strand
uaaagaaguucgcauuaag

SEQ ID NO: 51551 - RNA, 19 nt, Homo sapiens
  misc_RNA (1)...(19): siRNA sense strand
ggauauggcgcugcuguua

SEQ ID NO: 51552 - RNA, 19 nt, Homo sapiens
  misc_RNA (1)...(19): siRNA sense strand
ugacugaguuccuggcaaa

SEQ ID NO: 51553 - RNA, 19 nt, Homo sapiens
  misc_RNA (1)...(19): siRNA sense strand
gagaaggagugacuacagu

SEQ ID NO: 51554 - RNA, 19 nt, Homo sapiens
  misc_RNA (1)...(19): siRNA sense strand
gauggcaccaccagauuua

SEQ ID NO: 51555 - RNA, 19 nt, Homo sapiens
  misc_RNA (1)...(19): siRNA sense strand
aagcaacccuucuccauug

SEQ ID NO: 51556 - RNA, 19 nt, Homo sapiens
  misc_RNA (1)...(19): siRNA sense strand
ucagugaggugcugucaga

SEQ ID NO: 51557 - RNA, 19 nt, Homo sapiens
  misc_RNA (1)...(19): siRNA sense strand
ggaguuggccugucaguca

SEQ ID NO: 51558 - RNA, 19 nt, Homo sapiens
  misc_RNA (1)...(19): siRNA sense strand
uaagucagcuggugcaucu

SEQ ID NO: 51559 - RNA, 19 nt, Homo sapiens
  misc_RNA (1)...(19): siRNA sense strand
cagccaagaugcucaccua

SEQ ID NO: 51560 - RNA, 19 nt, Homo sapiens
  misc_RNA (1)...(19): siRNA sense strand
gaaguuauugggcaucuug

SEQ ID NO: 51561 - RNA, 19 nt, Homo sapiens
  misc_RNA (1)...(19): siRNA sense strand
gggauacaccuuugaaguu

SEQ ID NO: 51562 - RNA, 19 nt, Homo sapiens
  misc_RNA (1)...(19): siRNA sense strand
gcagagaugaugucccaaa

SEQ ID NO: 51563 - RNA, 19 nt, Homo sapiens
  misc_RNA (1)...(19): siRNA sense strand
caacccagauggcaaccuu

SEQ ID NO: 51564 - RNA, 19 nt, Homo sapiens
  misc_RNA (1)...(19): siRNA sense strand
gaggugcugucagaaauga

SEQ ID NO: 51565 - RNA, 19 nt, Homo sapiens
  misc_RNA (1)...(19): siRNA sense strand
gggaggaguuggccuguca

SEQ ID NO: 51566 - RNA, 19 nt, Homo sapiens
  misc_RNA (1)...(19): siRNA sense strand
ccaguacauuuaccgagua

SEQ ID NO: 51567 - RNA, 19 nt, Homo sapiens
  misc_RNA (1)...(19): siRNA sense strand
guggaugaaucuucuguug

SEQ ID NO: 51568 - RNA, 19 nt, Homo sapiens
  misc_RNA (1)...(19): siRNA sense strand
caacgugggauacaccuuu

SEQ ID NO: 51569 - RNA, 19 nt, Homo sapiens
  misc_RNA (1)...(19): siRNA sense strand
cagaugaccaugugauaaa

SEQ ID NO: 51570 - RNA, 19 nt, Homo sapiens
  misc_RNA (1)...(19): siRNA sense strand
ggaugaaucuucuguugcu

SEQ ID NO: 51571 - RNA, 19 nt, Homo sapiens
  misc_RNA (1)...(19): siRNA sense strand
gaaggagugacuacaguga

SEQ ID NO: 51572 - RNA, 19 nt, Homo sapiens
  misc_RNA (1)...(19): siRNA sense strand
ggaugugucuuuggagguu

SEQ ID NO: 51573 - RNA, 19 nt, Homo sapiens
  misc_RNA (1)...(19): siRNA sense strand
gauauggcgcugcuguuaa

SEQ ID NO: 51574 - RNA, 19 nt, Homo sapiens
  misc_RNA (1)...(19): siRNA sense strand
ugaggcaacugggauugua

SEQ ID NO: 51575 - RNA, 19 nt, Homo sapiens
  misc_RNA (1)...(19): siRNA sense strand
caugaacaccaguacauuu

SEQ ID NO: 51576 - RNA, 19 nt, Homo sapiens
  misc_RNA (1)...(19): siRNA sense strand
gauacaccuuugaaguuau

SEQ ID NO: 51577 - RNA, 19 nt, Homo sapiens
  misc_RNA (1)...(19): siRNA sense strand
ccucaacaaagacaaauuu

SEQ ID NO: 51578 - RNA, 19 nt, Homo sapiens
  misc_RNA (1)...(19): siRNA sense strand
gugaggugcugucagaaau

SEQ ID NO: 51579 - RNA, 19 nt, Homo sapiens
  misc_RNA (1)...(19): siRNA sense strand
cuaccaaacccaucaguga

SEQ ID NO: 51580 - RNA, 19 nt, Homo sapiens
  misc_RNA (1)...(19): siRNA sense strand
auauggcgcugcuguuaaa

SEQ ID NO: 51581 - RNA, 19 nt, Homo sapiens
  misc_RNA (1)...(19): siRNA sense strand
cagcgugguuguaggaguu

SEQ ID NO: 51582 - RNA, 19 nt, Homo sapiens
  misc_RNA (1)...(19): siRNA sense strand
caucaugggcuguaaguca

SEQ ID NO: 51583 - RNA, 19 nt, Homo sapiens
  misc_RNA (1)...(19): siRNA sense strand
acacagugguggaugaauc

SEQ ID NO: 51584 - RNA, 19 nt, Homo sapiens
  misc_RNA (1)...(19): siRNA sense strand
gcuggugcaucuaggauca

SEQ ID NO: 51585 - RNA, 19 nt, Homo sapiens
  misc_RNA (1)...(19): siRNA sense strand
guccaaguuuccagugauu

SEQ ID NO: 51586 - RNA, 19 nt, Homo sapiens
  misc_RNA (1)...(19): siRNA sense strand
gacccgauguugcucuuca

SEQ ID NO: 51587 - RNA, 19 nt, Homo sapiens
  misc_RNA (1)...(19): siRNA sense strand
caccaaagacuaaagaagu

SEQ ID NO: 51588 - RNA, 19 nt, Homo sapiens
  misc_RNA (1)...(19): siRNA sense strand
ccacuugcgucgucuuugg

SEQ ID NO: 51589 - RNA, 19 nt, Homo sapiens
  misc_RNA (1)...(19): siRNA sense strand
ccugagaaagucuguuuaa

SEQ ID NO: 51590 - RNA, 19 nt, Homo sapiens
  misc_RNA (1)...(19): siRNA sense strand
acaaugguguccaaguuuc

SEQ ID NO: 51591 - RNA, 19 nt, Homo sapiens
  misc_RNA (1)...(19): siRNA sense strand
acuaaagaaguucgcauua

SEQ ID NO: 51592 - RNA, 19 nt, Homo sapiens
  misc_RNA (1)...(19): siRNA sense strand
aaagaaguucgcauuaaga

SEQ ID NO: 51593 - RNA, 19 nt, Homo sapiens
  misc_RNA (1)...(19): siRNA sense strand
accaaagacuaaagaaguu

SEQ ID NO: 51594 - RNA, 19 nt, Homo sapiens
  misc_RNA (1)...(19): siRNA sense strand
guagagagcauuggagaag

SEQ ID NO: 51595 - RNA, 19 nt, Homo sapiens
  misc_RNA (1)...(19): siRNA sense strand
gacuaaagaaguucgcauu

SEQ ID NO: 51596 - RNA, 19 nt, Homo sapiens
  misc_RNA (1)...(19): siRNA sense strand
augaacaccaguacauuua

SEQ ID NO: 51597 - RNA, 19 nt, Homo sapiens
  misc_RNA (1)...(19): siRNA sense strand
gaaguugccccaccaaaga

SEQ ID NO: 51598 - RNA, 19 nt, Homo sapiens
  misc_RNA (1)...(19): siRNA sense strand
gaacaccaguacauuuacc

SEQ ID NO: 51599 - RNA, 19 nt, Homo sapiens
  misc_RNA (1)...(19): siRNA sense strand
aggagugacuacagugaaa

SEQ ID NO: 51600 - RNA, 19 nt, Homo sapiens
  misc_RNA (1)...(19): siRNA sense strand
gaugaaucuucuguugcua

SEQ ID NO: 51601 - RNA, 19 nt, Homo sapiens
  misc_RNA (1)...(19): siRNA sense strand
agagagcauuggagaagga

SEQ ID NO: 51602 - RNA, 19 nt, Homo sapiens
  misc_RNA (1)...(19): siRNA sense strand
guuauugggcaucuugaaa

SEQ ID NO: 51603 - RNA, 19 nt, Homo sapiens
  misc_RNA (1)...(19): siRNA sense strand
ggaacaaugguguccaagu

SEQ ID NO: 51604 - RNA, 19 nt, Homo sapiens
  misc_RNA (1)...(19): siRNA sense strand
uggaagggaugugucuuug

SEQ ID NO: 51605 - RNA, 19 nt, Homo sapiens
  misc_RNA (1)...(19): siRNA sense strand
ccaccagauuuacaugcaa

SEQ ID NO: 51606 - RNA, 19 nt, Homo sapiens
  misc_RNA (1)...(19): siRNA sense strand
ugcauuaggagcgauauua

SEQ ID NO: 51607 - RNA, 19 nt, Homo sapiens
  misc_RNA (1)...(19): siRNA sense strand
caauguagagaaugcaaug

SEQ ID NO: 51608 - RNA, 19 nt, Homo sapiens
  misc_RNA (1)...(19): siRNA sense strand
ggagaaggagugacuacag

SEQ ID NO: 51609 - RNA, 19 nt, Homo sapiens
  misc_RNA (1)...(19): siRNA sense strand
caauucaggacaaagcauu

SEQ ID NO: 51610 - RNA, 19 nt, Homo sapiens
  misc_RNA (1)...(19): siRNA sense strand
cugaguuccuggcaaagaa

SEQ ID NO: 51611 - RNA, 19 nt, Homo sapiens
  misc_RNA (1)...(19): siRNA sense strand
gggcacugcuggaaaaguu

SEQ ID NO: 51612 - RNA, 19 nt, Homo sapiens
  misc_RNA (1)...(19): siRNA sense strand
gccaagaugcucaccuaug

SEQ ID NO: 51613 - RNA, 19 nt, Homo sapiens
  misc_RNA (1)...(19): siRNA sense strand
caucuugaaaccaugauug

SEQ ID NO: 51614 - RNA, 19 nt, Homo sapiens
  misc_RNA (1)...(19): siRNA sense strand
acagaugaccaugugauaa

SEQ ID NO: 51615 - RNA, 19 nt, Homo sapiens
  misc_RNA (1)...(19): siRNA sense strand
gagaugaugucccaaaacu

SEQ ID NO: 51616 - RNA, 19 nt, Homo sapiens
  misc_RNA (1)...(19): siRNA sense strand
ucacuggacgcacauggaa

SEQ ID NO: 51617 - RNA, 19 nt, Homo sapiens
  misc_RNA (1)...(19): siRNA sense strand
gacaaagucaucccucucu

SEQ ID NO: 51618 - RNA, 19 nt, Homo sapiens
  misc_RNA (1)...(19): siRNA sense strand
gcaacaacgugggauacac

SEQ ID NO: 51619 - RNA, 19 nt, Homo sapiens
  misc_RNA (1)...(19): siRNA sense strand
aaggaacaaugguguccaa

SEQ ID NO: 51620 - RNA, 19 nt, Homo sapiens
  misc_RNA (1)...(19): siRNA sense strand
uguagagaaugcaaugcuu

SEQ ID NO: 51621 - RNA, 19 nt, Homo sapiens
  misc_RNA (1)...(19): siRNA sense strand
agucaucccucucuuucug

SEQ ID NO: 51622 - RNA, 19 nt, Homo sapiens
  misc_RNA (1)...(19): siRNA sense strand
gcaacugggauuguagaga

SEQ ID NO: 51623 - RNA, 19 nt, Homo sapiens
  misc_RNA (1)...(19): siRNA sense strand
gcugcucaauucaggacaa

SEQ ID NO: 51624 - RNA, 19 nt, Homo sapiens
  misc_RNA (1)...(19): siRNA sense strand
cauccugccacaugaacua

SEQ ID NO: 51625 - RNA, 19 nt, Homo sapiens
  misc_RNA (1)...(19): siRNA sense strand
gagaaggccauggcuguag

SEQ ID NO: 51626 - RNA, 19 nt, Homo sapiens
  misc_RNA (1)...(19): siRNA sense strand
gcugauggcaccaccagau

SEQ ID NO: 51627 - RNA, 19 nt, Homo sapiens
  misc_RNA (1)...(19): siRNA sense strand
agugaaaccaggugacaaa

SEQ ID NO: 51628 - RNA, 19 nt, Homo sapiens
  misc_RNA (1)...(19): siRNA sense strand
gaugugucuuuggagguuu

SEQ ID NO: 51629 - RNA, 19 nt, Homo sapiens
  misc_RNA (1)...(19): siRNA sense strand
acaaagucaucccucucuu

SEQ ID NO: 51630 - RNA, 19 nt, Homo sapiens
  misc_RNA (1)...(19): siRNA sense strand
gcauuaggagcgauauuac

SEQ ID NO: 51631 - RNA, 19 nt, Homo sapiens
  misc_RNA (1)...(19): siRNA sense strand
cccaaggacucuaccaaac

SEQ ID NO: 51632 - RNA, 19 nt, Homo sapiens
  misc_RNA (1)...(19): siRNA sense strand
ugagaaggccauggcugua

SEQ ID NO: 51633 - RNA, 19 nt, Homo sapiens
  misc_RNA (1)...(19): siRNA sense strand
gaguuggccugucagucau

SEQ ID NO: 51634 - RNA, 19 nt, Homo sapiens
  misc_RNA (1)...(19): siRNA sense strand
cugagaaagucuguuuaau

SEQ ID NO: 51635 - RNA, 19 nt, Homo sapiens
  misc_RNA (1)...(19): siRNA sense strand
ugaaucuucuguugcuaag

SEQ ID NO: 51636 - RNA, 19 nt, Homo sapiens
  misc_RNA (1)...(19): siRNA sense strand
guacacagugguggaugaa

SEQ ID NO: 51637 - RNA, 19 nt, Homo sapiens
  misc_RNA (1)...(19): siRNA sense strand
ugauggcaccaccagauuu

SEQ ID NO: 51638 - RNA, 19 nt, Homo sapiens
  misc_RNA (1)...(19): siRNA sense strand
cuugaaaccaugauugaug

SEQ ID NO: 51639 - RNA, 19 nt, Homo sapiens
  misc_RNA (1)...(19): siRNA sense strand
uuaauuggcuguggguuuu

SEQ ID NO: 51640 - RNA, 19 nt, Homo sapiens
  misc_RNA (1)...(19): siRNA sense strand
ccaaguuuccagugauugu

SEQ ID NO: 51641 - RNA, 19 nt, Homo sapiens
  misc_RNA (1)...(19): siRNA sense strand
guuccuggcaaagaaauuu

SEQ ID NO: 51642 - RNA, 19 nt, Homo sapiens
  misc_RNA (1)...(19): siRNA sense strand
gcaagcagcucaacaagaa

SEQ ID NO: 51643 - RNA, 19 nt, Homo sapiens
  misc_RNA (1)...(19): siRNA sense strand
ugacgaggaucucccagaa

SEQ ID NO: 51644 - RNA, 19 nt, Homo sapiens
  misc_RNA (1)...(19): siRNA sense strand
cagaagagaggccugauga

SEQ ID NO: 51645 - RNA, 19 nt, Homo sapiens
  misc_RNA (1)...(19): siRNA sense strand
ucaccuuccuuaagauuug

SEQ ID NO: 51646 - RNA, 19 nt, Homo sapiens
  misc_RNA (1)...(19): siRNA sense strand
ggaacgugcuggugaucug

SEQ ID NO: 51647 - RNA, 19 nt, Homo sapiens
  misc_RNA (1)...(19): siRNA sense strand
agagaggccugaugacuag

SEQ ID NO: 51648 - RNA, 19 nt, Homo sapiens
  misc_RNA (1)...(19): siRNA sense strand
cagcauccuuaccuacauu

SEQ ID NO: 51649 - RNA, 19 nt, Homo sapiens
  misc_RNA (1)...(19): siRNA sense strand
acgaggaucucccagaaga

SEQ ID NO: 51650 - RNA, 19 nt, Homo sapiens
  misc_RNA (1)...(19): siRNA sense strand
gaugccaccuucugcuuca

SEQ ID NO: 51651 - RNA, 19 nt, Homo sapiens
  misc_RNA (1)...(19): siRNA sense strand
gaagagaggccugaugacu

SEQ ID NO: 51652 - RNA, 19 nt, Homo sapiens
  misc_RNA (1)...(19): siRNA sense strand
ccaagucgcuggcccucau

SEQ ID NO: 51653 - RNA, 19 nt, Homo sapiens
  misc_RNA (1)...(19): siRNA sense strand
cacaagcccagcauccuua

SEQ ID NO: 51654 - RNA, 19 nt, Homo sapiens
  misc_RNA (1)...(19): siRNA sense strand
ggacugaccccuauguuug

SEQ ID NO: 51655 - RNA, 19 nt, Homo sapiens
  misc_RNA (1)...(19): siRNA sense strand
aagagaggccugaugacua

SEQ ID NO: 51656 - RNA, 19 nt, Homo sapiens
  misc_RNA (1)...(19): siRNA sense strand
uuaccuacauugccaucuu

SEQ ID NO: 51657 - RNA, 19 nt, Homo sapiens
  misc_RNA (1)...(19): siRNA sense strand
guacauggucuacuucaac

SEQ ID NO: 51658 - RNA, 19 nt, Homo sapiens
  misc_RNA (1)...(19): siRNA sense strand
cgcgucaccuuccuuaaga

SEQ ID NO: 51659 - RNA, 19 nt, Homo sapiens
  misc_RNA (1)...(19): siRNA sense strand
gggagcccgugaucaagug

SEQ ID NO: 51660 - RNA, 19 nt, Homo sapiens
  misc_RNA (1)...(19): siRNA sense strand
ggucuacuucaacuucuuu

SEQ ID NO: 51661 - RNA, 19 nt, Homo sapiens
  misc_RNA (1)...(19): siRNA sense strand
ucgagaaggucaucagcau

SEQ ID NO: 51662 - RNA, 19 nt, Homo sapiens
  misc_RNA (1)...(19): siRNA sense strand
ccacaagcccagcauccuu

SEQ ID NO: 51663 - RNA, 19 nt, Homo sapiens
  misc_RNA (1)...(19): siRNA sense strand
gcugcuggauccucuccuu

SEQ ID NO: 51664 - RNA, 19 nt, Homo sapiens
  misc_RNA (1)...(19): siRNA sense strand
uccuuaagauuuggaauga

SEQ ID NO: 51665 - RNA, 19 nt, Homo sapiens
  misc_RNA (1)...(19): siRNA sense strand
ccucauccucuuccucuuu

SEQ ID NO: 51666 - RNA, 19 nt, Homo sapiens
  misc_RNA (1)...(19): siRNA sense strand
ccacaccugccucaugguu

SEQ ID NO: 51667 - RNA, 19 nt, Homo sapiens
  misc_RNA (1)...(19): siRNA sense strand
gcgacccgcagaaguacua

SEQ ID NO: 51668 - RNA, 19 nt, Homo sapiens
  misc_RNA (1)...(19): siRNA sense strand
uacuucaacuucuuugugu

SEQ ID NO: 51669 - RNA, 19 nt, Homo sapiens
  misc_RNA (1)...(19): siRNA sense strand
gcucaucgcccuggucucu

SEQ ID NO: 51670 - RNA, 19 nt, Homo sapiens
  misc_RNA (1)...(19): siRNA sense strand
ccagcauccuuaccuacau

SEQ ID NO: 51671 - RNA, 19 nt, Homo sapiens
  misc_RNA (1)...(19): siRNA sense strand
caagugcgaguucgagaag

SEQ ID NO: 51672 - RNA, 19 nt, Homo sapiens
  misc_RNA (1)...(19): siRNA sense strand
ucaacugcaucacccucuu

SEQ ID NO: 51673 - RNA, 19 nt, Homo sapiens
  misc_RNA (1)...(19): siRNA sense strand
cuacuucaacuucuuugug

SEQ ID NO: 51674 - RNA, 19 nt, Homo sapiens
  misc_RNA (1)...(19): siRNA sense strand
cacggcaacucggccauga

SEQ ID NO: 51675 - RNA, 19 nt, Homo sapiens
  misc_RNA (1)...(19): siRNA sense strand
ucaucgcccuggucucugu

SEQ ID NO: 51676 - RNA, 19 nt, Homo sapiens
  misc_RNA (1)...(19): siRNA sense strand
gccauccucaucaacauug

SEQ ID NO: 51677 - RNA, 19 nt, Homo sapiens
  misc_RNA (1)...(19): siRNA sense strand
uaccuacauugccaucuuc

SEQ ID NO: 51678 - RNA, 19 nt, Homo sapiens
  misc_RNA (1)...(19): siRNA sense strand
caacugcaucacccucuuc

SEQ ID NO: 51679 - RNA, 19 nt, Homo sapiens
  misc_RNA (1)...(19): siRNA sense strand
ucaagugcgaguucgagaa

SEQ ID NO: 51680 - RNA, 19 nt, Homo sapiens
  misc_RNA (1)...(19): siRNA sense strand
ccagaagagaggccugaug

SEQ ID NO: 51681 - RNA, 19 nt, Homo sapiens
  misc_RNA (1)...(19): siRNA sense strand
cauggucuacuucaacuuc

SEQ ID NO: 51682 - RNA, 19 nt, Homo sapiens
  misc_RNA (1)...(19): siRNA sense strand
gggaugccaccuucugcuu

SEQ ID NO: 51683 - RNA, 19 nt, Homo sapiens
  misc_RNA (1)...(19): siRNA sense strand
ucugggcggugaaggugaa

SEQ ID NO: 51684 - RNA, 19 nt, Homo sapiens
  misc_RNA (1)...(19): siRNA sense strand
gaacgucaccaacuacuuu

SEQ ID NO: 51685 - RNA, 19 nt, Homo sapiens
  misc_RNA (1)...(19): siRNA sense strand
ccaaguggccugucucuuu

SEQ ID NO: 51686 - RNA, 19 nt, Homo sapiens
  misc_RNA (1)...(19): siRNA sense strand
caaguggccugucucuuug

SEQ ID NO: 51687 - RNA, 19 nt, Homo sapiens
  misc_RNA (1)...(19): siRNA sense strand
acgcagagcuccaucuuca

SEQ ID NO: 51688 - RNA, 19 nt, Homo sapiens
  misc_RNA (1)...(19): siRNA sense strand
gguccacacugcagaagga

SEQ ID NO: 51689 - RNA, 19 nt, Homo sapiens
  misc_RNA (1)...(19): siRNA sense strand
ccaagucacuggccaucau

SEQ ID NO: 51690 - RNA, 19 nt, Homo sapiens
  misc_RNA (1)...(19): siRNA sense strand
gguccaugcugccaaguca

SEQ ID NO: 51691 - RNA, 19 nt, Homo sapiens
  misc_RNA (1)...(19): siRNA sense strand
caacuacuuugugguguca

SEQ ID NO: 51692 - RNA, 19 nt, Homo sapiens
  misc_RNA (1)...(19): siRNA sense strand
caugcugggugucuauuug

SEQ ID NO: 51693 - RNA, 19 nt, Homo sapiens
  misc_RNA (1)...(19): siRNA sense strand
ugcagaacgucaccaacua

SEQ ID NO: 51694 - RNA, 19 nt, Homo sapiens
  misc_RNA (1)...(19): siRNA sense strand
gcagagcuccaucuucagu

SEQ ID NO: 51695 - RNA, 19 nt, Homo sapiens
  misc_RNA (1)...(19): siRNA sense strand
gccauugaccgcuacauug

SEQ ID NO: 51696 - RNA, 19 nt, Homo sapiens
  misc_RNA (1)...(19): siRNA sense strand
caaaggagggcaagaacca

SEQ ID NO: 51697 - RNA, 19 nt, Homo sapiens
  misc_RNA (1)...(19): siRNA sense strand
ccacggcugccucuucauu

SEQ ID NO: 51698 - RNA, 19 nt, Homo sapiens
  misc_RNA (1)...(19): siRNA sense strand
cggccugacucccaugcua

SEQ ID NO: 51699 - RNA, 19 nt, Homo sapiens
  misc_RNA (1)...(19): siRNA sense strand
gcagcaagaaccuuucaag

SEQ ID NO: 51700 - RNA, 19 nt, Homo sapiens
  misc_RNA (1)...(19): siRNA sense strand
caucaacugcuucacuuuc

SEQ ID NO: 51701 - RNA, 19 nt, Homo sapiens
  misc_RNA (1)...(19): siRNA sense strand
gcaucccgcuccgguacaa

SEQ ID NO: 51702 - RNA, 19 nt, Homo sapiens
  misc_RNA (1)...(19): siRNA sense strand
ugaggcagcaagaaccuuu

SEQ ID NO: 51703 - RNA, 19 nt, Homo sapiens
  misc_RNA (1)...(19): siRNA sense strand
gcagaacgucaccaacuac

SEQ ID NO: 51704 - RNA, 19 nt, Homo sapiens
  misc_RNA (1)...(19): siRNA sense strand
caggucagccuccgucuca

SEQ ID NO: 51705 - RNA, 19 nt, Homo sapiens
  misc_RNA (1)...(19): siRNA sense strand
caacugcuucacuuucuuc

SEQ ID NO: 51706 - RNA, 19 nt, Homo sapiens
  misc_RNA (1)...(19): siRNA sense strand
ccguguggcucaacagcaa

SEQ ID NO: 51707 - RNA, 19 nt, Homo sapiens
  misc_RNA (1)...(19): siRNA sense strand
ucaacugcuucacuuucuu

SEQ ID NO: 51708 - RNA, 19 nt, Homo sapiens
  misc_RNA (1)...(19): siRNA sense strand
gcugggugcugucguuugc

SEQ ID NO: 51709 - RNA, 19 nt, Homo sapiens
  misc_RNA (1)...(19): siRNA sense strand
ggagggagugcccaagagu

SEQ ID NO: 51710 - RNA, 19 nt, Homo sapiens
  misc_RNA (1)...(19): siRNA sense strand
gguguacuucaacuucuuu

SEQ ID NO: 51711 - RNA, 19 nt, Homo sapiens
  misc_RNA (1)...(19): siRNA sense strand
acagcaaccugcagaacgu

SEQ ID NO: 51712 - RNA, 19 nt, Homo sapiens
  misc_RNA (1)...(19): siRNA sense strand
caagucacuggccaucauu

SEQ ID NO: 51713 - RNA, 19 nt, Homo sapiens
  misc_RNA (1)...(19): siRNA sense strand
gcucaugcugggugucuau

SEQ ID NO: 51714 - RNA, 19 nt, Homo sapiens
  misc_RNA (1)...(19): siRNA sense strand
ucauguaccuggccaucgu

SEQ ID NO: 51715 - RNA, 19 nt, Homo sapiens
  misc_RNA (1)...(19): siRNA sense strand
ugccacggcugccucuuca

SEQ ID NO: 51716 - RNA, 19 nt, Homo sapiens
  misc_RNA (1)...(19): siRNA sense strand
caugguguacuucaacuuc

SEQ ID NO: 51717 - RNA, 19 nt, Homo sapiens
  misc_RNA (1)...(19): siRNA sense strand
gggcuaagggcaucauugc

SEQ ID NO: 51718 - RNA, 19 nt, Homo sapiens
  misc_RNA (1)...(19): siRNA sense strand
gcagaaggagguccaugcu

SEQ ID NO: 51719 - RNA, 19 nt, Homo sapiens
  misc_RNA (1)...(19): siRNA sense strand
ccagacguggagcuccuua

SEQ ID NO: 51720 - RNA, 19 nt, Homo sapiens
  misc_RNA (1)...(19): siRNA sense strand
ucacgcagagcuccaucuu

SEQ ID NO: 51721 - RNA, 19 nt, Homo sapiens
  misc_RNA (1)...(19): siRNA sense strand
gaaagcugcugccuuguga

SEQ ID NO: 51722 - RNA, 19 nt, Homo sapiens
  misc_RNA (1)...(19): siRNA sense strand
ugagcuacaugguauauuu

SEQ ID NO: 51723 - RNA, 19 nt, Homo sapiens
  misc_RNA (1)...(19): siRNA sense strand
gauggaaccacgaaugaaa

SEQ ID NO: 51724 - RNA, 19 nt, Homo sapiens
  misc_RNA (1)...(19): siRNA sense strand
ccaagcagaugucaagagu

SEQ ID NO: 51725 - RNA, 19 nt, Homo sapiens
  misc_RNA (1)...(19): siRNA sense strand
ccaagucacuggccaugau

SEQ ID NO: 51726 - RNA, 19 nt, Homo sapiens
  misc_RNA (1)...(19): siRNA sense strand
acgcagagcuccaucuuca

SEQ ID NO: 51727 - RNA, 19 nt, Homo sapiens
  misc_RNA (1)...(19): siRNA sense strand
uuauaaugcuggugaucua

SEQ ID NO: 51728 - RNA, 19 nt, Homo sapiens
  misc_RNA (1)...(19): siRNA sense strand
ccaagugggcaaugaauau

SEQ ID NO: 51729 - RNA, 19 nt, Homo sapiens
  misc_RNA (1)...(19): siRNA sense strand
guaaagacagugccaccaa

SEQ ID NO: 51730 - RNA, 19 nt, Homo sapiens
  misc_RNA (1)...(19): siRNA sense strand
gggauggaaccacgaauga

SEQ ID NO: 51731 - RNA, 19 nt, Homo sapiens
  misc_RNA (1)...(19): siRNA sense strand
cuggugaucuacauuaaga

SEQ ID NO: 51732 - RNA, 19 nt, Homo sapiens
  misc_RNA (1)...(19): siRNA sense strand
gcugcugccuugugaagug

SEQ ID NO: 51733 - RNA, 19 nt, Homo sapiens
  misc_RNA (1)...(19): siRNA sense strand
ccaauucaguugucaaucc

SEQ ID NO: 51734 - RNA, 19 nt, Homo sapiens
  misc_RNA (1)...(19): siRNA sense strand
ucacaugccaauucaguug

SEQ ID NO: 51735 - RNA, 19 nt, Homo sapiens
  misc_RNA (1)...(19): siRNA sense strand
acagaacccugggauggaa

SEQ ID NO: 51736 - RNA, 19 nt, Homo sapiens
  misc_RNA (1)...(19): siRNA sense strand
ccagccagcucaggguaaa

SEQ ID NO: 51737 - RNA, 19 nt, Homo sapiens
  misc_RNA (1)...(19): siRNA sense strand
aaaauuaucuccagguauc

SEQ ID NO: 51738 - RNA, 19 nt, Homo sapiens
  misc_RNA (1)...(19): siRNA sense strand
gagacuuccgcuacacuuu

SEQ ID NO: 51739 - RNA, 19 nt, Homo sapiens
  misc_RNA (1)...(19): siRNA sense strand
gcaucggauugacuccauu

SEQ ID NO: 51740 - RNA, 19 nt, Homo sapiens
  misc_RNA (1)...(19): siRNA sense strand
cuugugaagugucucuuug

SEQ ID NO: 51741 - RNA, 19 nt, Homo sapiens
  misc_RNA (1)...(19): siRNA sense strand
gcuacaugguauauuucaa

SEQ ID NO: 51742 - RNA, 19 nt, Homo sapiens
  misc_RNA (1)...(19): siRNA sense strand
ccguggcagucgacagaua

SEQ ID NO: 51743 - RNA, 19 nt, Homo sapiens
  misc_RNA (1)...(19): siRNA sense strand
ggauggaaccacgaaugaa

SEQ ID NO: 51744 - RNA, 19 nt, Homo sapiens
  misc_RNA (1)...(19): siRNA sense strand
gagcuacaugguauauuuc

SEQ ID NO: 51745 - RNA, 19 nt, Homo sapiens
  misc_RNA (1)...(19): siRNA sense strand
ccgcuacacuuuucacaaa

SEQ ID NO: 51746 - RNA, 19 nt, Homo sapiens
  misc_RNA (1)...(19): siRNA sense strand
acaaaauuaucuccaggua

SEQ ID NO: 51747 - RNA, 19 nt, Homo sapiens
  misc_RNA (1)...(19): siRNA sense strand
ugaaagcugcugccuugug

SEQ ID NO: 51748 - RNA, 19 nt, Homo sapiens
  misc_RNA (1)...(19): siRNA sense strand
cuucugcacugacuucuac

SEQ ID NO: 51749 - RNA, 19 nt, Homo sapiens
  misc_RNA (1)...(19): siRNA sense strand
gugucccgcucagguauaa

SEQ ID NO: 51750 - RNA, 19 nt, Homo sapiens
  misc_RNA (1)...(19): siRNA sense strand
gauccaugcagccaaguca

SEQ ID NO: 51751 - RNA, 19 nt, Homo sapiens
  misc_RNA (1)...(19): siRNA sense strand
gcucagguauaaaaguuug

SEQ ID NO: 51752 - RNA, 19 nt, Homo sapiens
  misc_RNA (1)...(19): siRNA sense strand
caccaacaacugcacagaa

SEQ ID NO: 51753 - RNA, 19 nt, Homo sapiens
  misc_RNA (1)...(19): siRNA sense strand
caagugggcaaugaauaug

SEQ ID NO: 51754 - RNA, 19 nt, Homo sapiens
  misc_RNA (1)...(19): siRNA sense strand
caagucacuggccaugauu

SEQ ID NO: 51755 - RNA, 19 nt, Homo sapiens
  misc_RNA (1)...(19): siRNA sense strand
ugcagacgcccaccaacua

SEQ ID NO: 51756 - RNA, 19 nt, Homo sapiens
  misc_RNA (1)...(19): siRNA sense strand
guggaacaguaaagacagu

SEQ ID NO: 51757 - RNA, 19 nt, Homo sapiens
  misc_RNA (1)...(19): siRNA sense strand
gcagacgcccaccaacuac

SEQ ID NO: 51758 - RNA, 19 nt, Homo sapiens
  misc_RNA (1)...(19): siRNA sense strand
ucugucacaugccaauuca

SEQ ID NO: 51759 - RNA, 19 nt, Homo sapiens
  misc_RNA (1)...(19): siRNA sense strand
ggcaucggauugacuccau

SEQ ID NO: 51760 - RNA, 19 nt, Homo sapiens
  misc_RNA (1)...(19): siRNA sense strand
caauuucuuuggguguguu

SEQ ID NO: 51761 - RNA, 19 nt, Homo sapiens
  misc_RNA (1)...(19): siRNA sense strand
uaaugcuggugaucuacau

SEQ ID NO: 51762 - RNA, 19 nt, Homo sapiens
  misc_RNA (1)...(19): siRNA sense strand
ugcaugcuguuaacugugu

SEQ ID NO: 51763 - RNA, 19 nt, Homo sapiens
  misc_RNA (1)...(19): siRNA sense strand
ugugcaugcuguuaacugu

SEQ ID NO: 51764 - RNA, 19 nt, Homo sapiens
  misc_RNA (1)...(19): siRNA sense strand
ccucuggguccuugccuuu

SEQ ID NO: 51765 - RNA, 19 nt, Homo sapiens
  misc_RNA (1)...(19): siRNA sense strand
ucacgcagagcuccaucuu

SEQ ID NO: 51766 - RNA, 19 nt, Homo sapiens
  misc_RNA (1)...(19): siRNA sense strand
guuaacugugucacucuuu

SEQ ID NO: 51767 - RNA, 19 nt, Homo sapiens
  misc_RNA (1)...(19): siRNA sense strand
ggguggaacaguaaagaca

SEQ ID NO: 51768 - RNA, 19 nt, Homo sapiens
  misc_RNA (1)...(19): siRNA sense strand
gaacuuaucuaacuccaaa

SEQ ID NO: 51769 - RNA, 19 nt, Homo sapiens
  misc_RNA (1)...(19): siRNA sense strand
gagaauggacuacauggua

SEQ ID NO: 51770 - RNA, 19 nt, Homo sapiens
  misc_RNA (1)...(19): siRNA sense strand
gaugaacccuaucgucuau

SEQ ID NO: 51771 - RNA, 19 nt, Homo sapiens
  misc_RNA (1)...(19): siRNA sense strand
acacaagcauugagaagaa

SEQ ID NO: 51772 - RNA, 19 nt, Homo sapiens
  misc_RNA (1)...(19): siRNA sense strand
caaagagacaggugcauuu

SEQ ID NO: 51773 - RNA, 19 nt, Homo sapiens
  misc_RNA (1)...(19): siRNA sense strand
ggucaccacucacagaaga

SEQ ID NO: 51774 - RNA, 19 nt, Homo sapiens
  misc_RNA (1)...(19): siRNA sense strand
uaaagaaguucaaggaaac

SEQ ID NO: 51775 - RNA, 19 nt, Homo sapiens
  misc_RNA (1)...(19): siRNA sense strand
ggucaugccuuuggccauu

SEQ ID NO: 51776 - RNA, 19 nt, Homo sapiens
  misc_RNA (1)...(19): siRNA sense strand
uaucgucuaugccuauaaa

SEQ ID NO: 51777 - RNA, 19 nt, Homo sapiens
  misc_RNA (1)...(19): siRNA sense strand
ugucauggcugccuuuauc

SEQ ID NO: 51778 - RNA, 19 nt, Homo sapiens
  misc_RNA (1)...(19): siRNA sense strand
gaauggacuacaugguaua

SEQ ID NO: 51779 - RNA, 19 nt, Homo sapiens
  misc_RNA (1)...(19): siRNA sense strand
cuacuuuaauggugaggua

SEQ ID NO: 51780 - RNA, 19 nt, Homo sapiens
  misc_RNA (1)...(19): siRNA sense strand
gcaacgugcuggucaucug

SEQ ID NO: 51781 - RNA, 19 nt, Homo sapiens
  misc_RNA (1)...(19): siRNA sense strand
ugacuugccuacugcuuau

SEQ ID NO: 51782 - RNA, 19 nt, Homo sapiens
  misc_RNA (1)...(19): siRNA sense strand
gcaucacaauccacuucua

SEQ ID NO: 51783 - RNA, 19 nt, Homo sapiens
  misc_RNA (1)...(19): siRNA sense strand
acaagagggucaccacuca

SEQ ID NO: 51784 - RNA, 19 nt, Homo sapiens
  misc_RNA (1)...(19): siRNA sense strand
agaaaugucaccuuccuuu

SEQ ID NO: 51785 - RNA, 19 nt, Homo sapiens
  misc_RNA (1)...(19): siRNA sense strand
caucuaucuugacaucuuu

SEQ ID NO: 51786 - RNA, 19 nt, Homo sapiens
  misc_RNA (1)...(19): siRNA sense strand
ccaucuaucuugacaucuu

SEQ ID NO: 51787 - RNA, 19 nt, Homo sapiens
  misc_RNA (1)...(19): siRNA sense strand
agaauggacuacaugguau

SEQ ID NO: 51788 - RNA, 19 nt, Homo sapiens
  misc_RNA (1)...(19): siRNA sense strand
ccaauuuguuuccgucaug

SEQ ID NO: 51789 - RNA, 19 nt, Homo sapiens
  misc_RNA (1)...(19): siRNA sense strand
caacugcaucaucuacuuu

SEQ ID NO: 51790 - RNA, 19 nt, Homo sapiens
  misc_RNA (1)...(19): siRNA sense strand
ucaacugcaucaucuacuu

SEQ ID NO: 51791 - RNA, 19 nt, Homo sapiens
  misc_RNA (1)...(19): siRNA sense strand
gcagaccaccaccuucuau

SEQ ID NO: 51792 - RNA, 19 nt, Homo sapiens
  misc_RNA (1)...(19): siRNA sense strand
agucugaacuuaucuaacu

SEQ ID NO: 51793 - RNA, 19 nt, Homo sapiens
  misc_RNA (1)...(19): siRNA sense strand
uuaucuaacuccaaagaga

SEQ ID NO: 51794 - RNA, 19 nt, Homo sapiens
  misc_RNA (1)...(19): siRNA sense strand
gaccaccaccuucuauuuc

SEQ ID NO: 51795 - RNA, 19 nt, Homo sapiens
  misc_RNA (1)...(19): siRNA sense strand
ggacacaagcauugagaag

SEQ ID NO: 51796 - RNA, 19 nt, Homo sapiens
  misc_RNA (1)...(19): siRNA sense strand
ccaaagagacaggugcauu

SEQ ID NO: 51797 - RNA, 19 nt, Homo sapiens
  misc_RNA (1)...(19): siRNA sense strand
ggucaagcuuaccgucaga

SEQ ID NO: 51798 - RNA, 19 nt, Homo sapiens
  misc_RNA (1)...(19): siRNA sense strand
cuacaucaccauggaaauu

SEQ ID NO: 51799 - RNA, 19 nt, Homo sapiens
  misc_RNA (1)...(19): siRNA sense strand
uuacaucauucggaacaaa

SEQ ID NO: 51800 - RNA, 19 nt, Homo sapiens
  misc_RNA (1)...(19): siRNA sense strand
ugucauuccuggugggauu

SEQ ID NO: 51801 - RNA, 19 nt, Homo sapiens
  misc_RNA (1)...(19): siRNA sense strand
ggacuacaugguauacuuc

SEQ ID NO: 51802 - RNA, 19 nt, Homo sapiens
  misc_RNA (1)...(19): siRNA sense strand
caauuuguuuccgucauga

SEQ ID NO: 51803 - RNA, 19 nt, Homo sapiens
  misc_RNA (1)...(19): siRNA sense strand
ugcaucaucuacuuuaaug

SEQ ID NO: 51804 - RNA, 19 nt, Homo sapiens
  misc_RNA (1)...(19): siRNA sense strand
uggacuacaugguauacuu

SEQ ID NO: 51805 - RNA, 19 nt, Homo sapiens
  misc_RNA (1)...(19): siRNA sense strand
agaccaccaccuucuauuu

SEQ ID NO: 51806 - RNA, 19 nt, Homo sapiens
  misc_RNA (1)...(19): siRNA sense strand
ccucagaguaccacagaaa

SEQ ID NO: 51807 - RNA, 19 nt, Homo sapiens
  misc_RNA (1)...(19): siRNA sense strand
uuaccuacaucaccaugga

SEQ ID NO: 51808 - RNA, 19 nt, Homo sapiens
  misc_RNA (1)...(19): siRNA sense strand
ugaugaacccuaucgucua

SEQ ID NO: 51809 - RNA, 19 nt, Homo sapiens
  misc_RNA (1)...(19): siRNA sense strand
gacacaagcauugagaaga

SEQ ID NO: 51810 - RNA, 19 nt, Homo sapiens
  misc_RNA (1)...(19): siRNA sense strand
ucaagacggcuaaguccuu

SEQ ID NO: 51811 - RNA, 19 nt, Homo sapiens
  misc_RNA (1)...(19): siRNA sense strand
gggcaucacaauccacuuc

SEQ ID NO: 51812 - RNA, 19 nt, Homo sapiens
  misc_RNA (1)...(19): siRNA sense strand
cagaguaccacagaaaugu

SEQ ID NO: 51813 - RNA, 19 nt, Homo sapiens
  misc_RNA (1)...(19): siRNA sense strand
gaccucagaguaccacaga

SEQ ID NO: 51814 - RNA, 19 nt, Homo sapiens
  misc_RNA (1)...(19): siRNA sense strand
gagggucaccacucacaga

SEQ ID NO: 51815 - RNA, 19 nt, Homo sapiens
  misc_RNA (1)...(19): siRNA sense strand
ggucugccaucccucugau

SEQ ID NO: 51816 - RNA, 19 nt, Homo sapiens
  misc_RNA (1)...(19): siRNA sense strand
uggcugccuuuaucuauca

SEQ ID NO: 51817 - RNA, 19 nt, Homo sapiens
  misc_RNA (1)...(19): siRNA sense strand
agagacaggugcauuuuau

SEQ ID NO: 51818 - RNA, 19 nt, Homo sapiens
  misc_RNA (1)...(19): siRNA sense strand
aaaugucaccuuccuuuca

SEQ ID NO: 51819 - RNA, 19 nt, Homo sapiens
  misc_RNA (1)...(19): siRNA sense strand
ccaucccucugauucuuug

SEQ ID NO: 51820 - RNA, 19 nt, Homo sapiens
  misc_RNA (1)...(19): siRNA sense strand
cgucuaugccuauaaaaua

SEQ ID NO: 51821 - RNA, 19 nt, Homo sapiens
  misc_RNA (1)...(19): siRNA sense strand
cgccaucuaucuugacauc

SEQ ID NO: 51822 - RNA, 19 nt, Homo sapiens
  misc_RNA (1)...(19): siRNA sense strand
ucaagcuuaccgucagaua

SEQ ID NO: 51823 - RNA, 19 nt, Homo sapiens
  misc_RNA (1)...(19): siRNA sense strand
ccuaucgucuaugccuaua

SEQ ID NO: 51824 - RNA, 19 nt, Homo sapiens
  misc_RNA (1)...(19): siRNA sense strand
caccuucuauuucauuguc

SEQ ID NO: 51825 - RNA, 19 nt, Homo sapiens
  misc_RNA (1)...(19): siRNA sense strand
ucagaguaccacagaaaug

SEQ ID NO: 51826 - RNA, 19 nt, Homo sapiens
  misc_RNA (1)...(19): siRNA sense strand
uuugcuggcuggugucauu

SEQ ID NO: 51827 - RNA, 19 nt, Homo sapiens
  misc_RNA (1)...(19): siRNA sense strand
uaucaucaacugcaucauc

SEQ ID NO: 51828 - RNA, 19 nt, Homo sapiens
  misc_RNA (1)...(19): siRNA sense strand
caucaucuacuuuaauggu

SEQ ID NO: 51829 - RNA, 19 nt, Homo sapiens
  misc_RNA (1)...(19): siRNA sense strand
ggcuggaacaugaaacuga

SEQ ID NO: 51830 - RNA, 19 nt, Homo sapiens
  misc_RNA (1)...(19): siRNA sense strand
uacaucaccauggaaauuu

SEQ ID NO: 51831 - RNA, 19 nt, Homo sapiens
  misc_RNA (1)...(19): siRNA sense strand
ucaugagaauggacuacau

SEQ ID NO: 51832 - RNA, 19 nt, Homo sapiens
  misc_RNA (1)...(19): siRNA sense strand
gaguaccacagaaauguca

SEQ ID NO: 51833 - RNA, 19 nt, Homo sapiens
  misc_RNA (1)...(19): siRNA sense strand
ugccuacugcuuaucuuua

SEQ ID NO: 51834 - RNA, 19 nt, Homo sapiens
  misc_RNA (1)...(19): siRNA sense strand
gccuuuaucuaucaucaac

SEQ ID NO: 51835 - RNA, 19 nt, Homo sapiens
  misc_RNA (1)...(19): siRNA sense strand
aaugucaccuuccuuucau

SEQ ID NO: 51836 - RNA, 19 nt, Homo sapiens
  misc_RNA (1)...(19): siRNA sense strand
cuauuucauugucucucua

SEQ ID NO: 51837 - RNA, 19 nt, Homo sapiens
  misc_RNA (1)...(19): siRNA sense strand
gccuacugcuuaucuuuac

SEQ ID NO: 51838 - RNA, 19 nt, Homo sapiens
  misc_RNA (1)...(19): siRNA sense strand
cacaagcauugagaagaau

SEQ ID NO: 51839 - RNA, 19 nt, Homo sapiens
  misc_RNA (1)...(19): siRNA sense strand
cauggcugccuuuaucuau

SEQ ID NO: 51840 - RNA, 19 nt, Homo sapiens
  misc_RNA (1)...(19): siRNA sense strand
ugucaugugcgccaucuau

SEQ ID NO: 51841 - RNA, 19 nt, Homo sapiens
  misc_RNA (1)...(19): siRNA sense strand
acagaaaugucaccuuccu

SEQ ID NO: 51842 - RNA, 19 nt, Homo sapiens
  misc_RNA (1)...(19): siRNA sense strand
gggugcuggucaugccuuu

SEQ ID NO: 51843 - RNA, 19 nt, Homo sapiens
  misc_RNA (1)...(19): siRNA sense strand
ccaccaccuucuauuucau

SEQ ID NO: 51844 - RNA, 19 nt, Homo sapiens
  misc_RNA (1)...(19): siRNA sense strand
aagcuuaccgucagauaca

SEQ ID NO: 51845 - RNA, 19 nt, Homo sapiens
  misc_RNA (1)...(19): siRNA sense strand
caugugcgccaucuaucuu

SEQ ID NO: 51846 - RNA, 19 nt, Homo sapiens
  misc_RNA (1)...(19): siRNA sense strand
gaagaaagcggccaagacu

SEQ ID NO: 51847 - RNA, 19 nt, Homo sapiens
  misc_RNA (1)...(19): siRNA sense strand
uacgggagaccgauauuua

SEQ ID NO: 51848 - RNA, 19 nt, Homo sapiens
  misc_RNA (1)...(19): siRNA sense strand
cugguucccuuucuucuuu

SEQ ID NO: 51849 - RNA, 19 nt, Homo sapiens
  misc_RNA (1)...(19): siRNA sense strand
ccaagacucuggccaucgu

SEQ ID NO: 51850 - RNA, 19 nt, Homo sapiens
  misc_RNA (1)...(19): siRNA sense strand
caaguacccagccaucaug

SEQ ID NO: 51851 - RNA, 19 nt, Homo sapiens
  misc_RNA (1)...(19): siRNA sense strand
gagaagaaagcggccaaga

SEQ ID NO: 51852 - RNA, 19 nt, Homo sapiens
  misc_RNA (1)...(19): siRNA sense strand
cuggcagccuucauccuua

SEQ ID NO: 51853 - RNA, 19 nt, Homo sapiens
  misc_RNA (1)...(19): siRNA sense strand
gagcgcuucugcgguauca

SEQ ID NO: 51854 - RNA, 19 nt, Homo sapiens
  misc_RNA (1)...(19): siRNA sense strand
gcgugaacccgcucaucua

SEQ ID NO: 51855 - RNA, 19 nt, Homo sapiens
  misc_RNA (1)...(19): siRNA sense strand
gcagaccgucaccaacuau

SEQ ID NO: 51856 - RNA, 19 nt, Homo sapiens
  misc_RNA (1)...(19): siRNA sense strand
gaccgucaccaacuauuuc

SEQ ID NO: 51857 - RNA, 19 nt, Homo sapiens
  misc_RNA (1)...(19): siRNA sense strand
ccuacgaauuggccgacua

SEQ ID NO: 51858 - RNA, 19 nt, Homo sapiens
  misc_RNA (1)...(19): siRNA sense strand
ugcagaccgucaccaacua

SEQ ID NO: 51859 - RNA, 19 nt, Homo sapiens
  misc_RNA (1)...(19): siRNA sense strand
gugcgccacucacucaagu

SEQ ID NO: 51860 - RNA, 19 nt, Homo sapiens
  misc_RNA (1)...(19): siRNA sense strand
uggcagccuucauccuuau

SEQ ID NO: 51861 - RNA, 19 nt, Homo sapiens
  misc_RNA (1)...(19): siRNA sense strand
agaaagcggccaagacucu

SEQ ID NO: 51862 - RNA, 19 nt, Homo sapiens
  misc_RNA (1)...(19): siRNA sense strand
uuauggccguggcagguaa

SEQ ID NO: 51863 - RNA, 19 nt, Homo sapiens
  misc_RNA (1)...(19): siRNA sense strand
acgggagaccgauauuuaa

SEQ ID NO: 51864 - RNA, 19 nt, Homo sapiens
  misc_RNA (1)...(19): siRNA sense strand
cugccaggccuacgaauug

SEQ ID NO: 51865 - RNA, 19 nt, Homo sapiens
  misc_RNA (1)...(19): siRNA sense strand
caucggagggcgucuucaa

SEQ ID NO: 51866 - RNA, 19 nt, Homo sapiens
  misc_RNA (1)...(19): siRNA sense strand
agaccgucaccaacuauuu

SEQ ID NO: 51867 - RNA, 19 nt, Homo sapiens
  misc_RNA (1)...(19): siRNA sense strand
ucaaguacccagccaucau

SEQ ID NO: 51868 - RNA, 19 nt, Homo sapiens
  misc_RNA (1)...(19): siRNA sense strand
cuacgggagaccgauauuu

SEQ ID NO: 51869 - RNA, 19 nt, Homo sapiens
  misc_RNA (1)...(19): siRNA sense strand
ggucaucguggucauguac

SEQ ID NO: 51870 - RNA, 19 nt, Homo sapiens
  misc_RNA (1)...(19): siRNA sense strand
uggcucggcuacuucaaca

SEQ ID NO: 51871 - RNA, 19 nt, Homo sapiens
  misc_RNA (1)...(19): siRNA sense strand
ucuccagccugucgcacaa

SEQ ID NO: 51872 - RNA, 19 nt, Homo sapiens
  misc_RNA (1)...(19): siRNA sense strand
guacugccgugucuauaua

SEQ ID NO: 51873 - RNA, 19 nt, Homo sapiens
  misc_RNA (1)...(19): siRNA sense strand
gaggacacccuuagcagua

SEQ ID NO: 51874 - RNA, 19 nt, Homo sapiens
  misc_RNA (1)...(19): siRNA sense strand
gcuaagacguugggcauug

SEQ ID NO: 51875 - RNA, 19 nt, Homo sapiens
  misc_RNA (1)...(19): siRNA sense strand
gggcggaucuucugugaca

SEQ ID NO: 51876 - RNA, 19 nt, Homo sapiens
  misc_RNA (1)...(19): siRNA sense strand
ugaaggagauguccaacuc

SEQ ID NO: 51877 - RNA, 19 nt, Homo sapiens
  misc_RNA (1)...(19): siRNA sense strand
uuccauagcugucaaacuu

SEQ ID NO: 51878 - RNA, 19 nt, Homo sapiens
  misc_RNA (1)...(19): siRNA sense strand
gcaacauccuagucaucuu

SEQ ID NO: 51879 - RNA, 19 nt, Homo sapiens
  misc_RNA (1)...(19): siRNA sense strand
caacauccuagucaucuug

SEQ ID NO: 51880 - RNA, 19 nt, Homo sapiens
  misc_RNA (1)...(19): siRNA sense strand
ccaagagaaccaccaagaa

SEQ ID NO: 51881 - RNA, 19 nt, Homo sapiens
  misc_RNA (1)...(19): siRNA sense strand
gaggauccauuccaagaac

SEQ ID NO: 51882 - RNA, 19 nt, Homo sapiens
  misc_RNA (1)...(19): siRNA sense strand
ggacaccggccacaacaca

SEQ ID NO: 51883 - RNA, 19 nt, Homo sapiens
  misc_RNA (1)...(19): siRNA sense strand
ccaacuacuucauugucaa

SEQ ID NO: 51884 - RNA, 19 nt, Homo sapiens
  misc_RNA (1)...(19): siRNA sense strand
ggaguuccauagcugucaa

SEQ ID NO: 51885 - RNA, 19 nt, Homo sapiens
  misc_RNA (1)...(19): siRNA sense strand
gccaagagaaccaccaaga

SEQ ID NO: 51886 - RNA, 19 nt, Homo sapiens
  misc_RNA (1)...(19): siRNA sense strand
gaccugcuguugagcuuca

SEQ ID NO: 51887 - RNA, 19 nt, Homo sapiens
  misc_RNA (1)...(19): siRNA sense strand
caagagaaccaccaagaac

SEQ ID NO: 51888 - RNA, 19 nt, Homo sapiens
  misc_RNA (1)...(19): siRNA sense strand
gaaaagaaagcagcuaaga

SEQ ID NO: 51889 - RNA, 19 nt, Homo sapiens
  misc_RNA (1)...(19): siRNA sense strand
ggacgcccaccaacuacuu

SEQ ID NO: 51890 - RNA, 19 nt, Homo sapiens
  misc_RNA (1)...(19): siRNA sense strand
gcauuguggucgguauguu

SEQ ID NO: 51891 - RNA, 19 nt, Homo sapiens
  misc_RNA (1)...(19): siRNA sense strand
agaaagcagcuaagacguu

SEQ ID NO: 51892 - RNA, 19 nt, Homo sapiens
  misc_RNA (1)...(19): siRNA sense strand
gaaccaccaagaaccuaga

SEQ ID NO: 51893 - RNA, 19 nt, Homo sapiens
  misc_RNA (1)...(19): siRNA sense strand
uuuaaguucuccagggaaa

SEQ ID NO: 51894 - RNA, 19 nt, Homo sapiens
  misc_RNA (1)...(19): siRNA sense strand
ucucugggcuccuucuaca

SEQ ID NO: 51895 - RNA, 19 nt, Homo sapiens
  misc_RNA (1)...(19): siRNA sense strand
ccgcuuggcuccuuguucu

SEQ ID NO: 51896 - RNA, 19 nt, Homo sapiens
  misc_RNA (1)...(19): siRNA sense strand
gagaaccaccaagaaccua

SEQ ID NO: 51897 - RNA, 19 nt, Homo sapiens
  misc_RNA (1)...(19): siRNA sense strand
aggcaggagucaugaagga

SEQ ID NO: 51898 - RNA, 19 nt, Homo sapiens
  misc_RNA (1)...(19): siRNA sense strand
aaccagaccucgagcaacu

SEQ ID NO: 51899 - RNA, 19 nt, Homo sapiens
  misc_RNA (1)...(19): siRNA sense strand
uggcugggcuacuucaaca

SEQ ID NO: 51900 - RNA, 19 nt, Homo sapiens
  misc_RNA (1)...(19): siRNA sense strand
gcccaccaacuacuucauu

SEQ ID NO: 51901 - RNA, 19 nt, Homo sapiens
  misc_RNA (1)...(19): siRNA sense strand
ccauagcugucaaacuuuu

SEQ ID NO: 51902 - RNA, 19 nt, Homo sapiens
  misc_RNA (1)...(19): siRNA sense strand
caucgugggcaacauccua

SEQ ID NO: 51903 - RNA, 19 nt, Homo sapiens
  misc_RNA (1)...(19): siRNA sense strand
gucgguauguucaucuugu

SEQ ID NO: 51904 - RNA, 19 nt, Homo sapiens
  misc_RNA (1)...(19): siRNA sense strand
cuaagacguugggcauugu

SEQ ID NO: 51905 - RNA, 19 nt, Homo sapiens
  misc_RNA (1)...(19): siRNA sense strand
cccaccaacuacuucauug

SEQ ID NO: 51906 - RNA, 19 nt, Homo sapiens
  misc_RNA (1)...(19): siRNA sense strand
gauccauuccaagaacuuu

SEQ ID NO: 51907 - RNA, 19 nt, Homo sapiens
  misc_RNA (1)...(19): siRNA sense strand
cuccaucgaucgcuacauc

SEQ ID NO: 51908 - RNA, 19 nt, Homo sapiens
  misc_RNA (1)...(19): siRNA sense strand
ccaaccagaccucgagcaa

SEQ ID NO: 51909 - RNA, 19 nt, Homo sapiens
  misc_RNA (1)...(19): siRNA sense strand
caggagucaugaaggagau

SEQ ID NO: 51910 - RNA, 19 nt, Homo sapiens
  misc_RNA (1)...(19): siRNA sense strand
ccuagaggcaggagucaug

SEQ ID NO: 51911 - RNA, 19 nt, Homo sapiens
  misc_RNA (1)...(19): siRNA sense strand
ucuuggcgcugcucagugu

SEQ ID NO: 51912 - RNA, 19 nt, Homo sapiens
  misc_RNA (1)...(19): siRNA sense strand
gggcaacauccuagucauc

SEQ ID NO: 51913 - RNA, 19 nt, Homo sapiens
  misc_RNA (1)...(19): siRNA sense strand
gggaaaagaaagcagcuaa

SEQ ID NO: 51914 - RNA, 19 nt, Homo sapiens
  misc_RNA (1)...(19): siRNA sense strand
ggcggucauucuagucaug

SEQ ID NO: 51915 - RNA, 19 nt, Homo sapiens
  misc_RNA (1)...(19): siRNA sense strand
ggucuuguccaccgucauc

SEQ ID NO: 51916 - RNA, 19 nt, Homo sapiens
  misc_RNA (1)...(19): siRNA sense strand
ugaggauccauuccaagaa

SEQ ID NO: 51917 - RNA, 19 nt, Homo sapiens
  misc_RNA (1)...(19): siRNA sense strand
cuauauaguggccaagaga

SEQ ID NO: 51918 - RNA, 19 nt, Homo sapiens
  misc_RNA (1)...(19): siRNA sense strand
cauguacugccgugucuau

SEQ ID NO: 51919 - RNA, 19 nt, Homo sapiens
  misc_RNA (1)...(19): siRNA sense strand
uagaggugcucggcuacug

SEQ ID NO: 51920 - RNA, 19 nt, Homo sapiens
  misc_RNA (1)...(19): siRNA sense strand
ucaccagggccaucucugu

SEQ ID NO: 51921 - RNA, 19 nt, Homo sapiens
  misc_RNA (1)...(19): siRNA sense strand
cugaggauccauuccaaga

SEQ ID NO: 51922 - RNA, 19 nt, Homo sapiens
  misc_RNA (1)...(19): siRNA sense strand
gcagaaagcagucuuccaa

SEQ ID NO: 51923 - RNA, 19 nt, Homo sapiens
  misc_RNA (1)...(19): siRNA sense strand
gaaagcagucuuccaaaca

SEQ ID NO: 51924 - RNA, 19 nt, Homo sapiens
  misc_RNA (1)...(19): siRNA sense strand
caagacggauggcguuugu

SEQ ID NO: 51925 - RNA, 19 nt, Homo sapiens
  misc_RNA (1)...(19): siRNA sense strand
cagaaugucuugagaaucc

SEQ ID NO: 51926 - RNA, 19 nt, Homo sapiens
  misc_RNA (1)...(19): siRNA sense strand
ggucuuucuucccugauuu

SEQ ID NO: 51927 - RNA, 19 nt, Homo sapiens
  misc_RNA (1)...(19): siRNA sense strand
caagcccucugaaacaguu

SEQ ID NO: 51928 - RNA, 19 nt, Homo sapiens
  misc_RNA (1)...(19): siRNA sense strand
ggauggcguuugugaaugg

SEQ ID NO: 51929 - RNA, 19 nt, Homo sapiens
  misc_RNA (1)...(19): siRNA sense strand
caagagagaccuucuacag

SEQ ID NO: 51930 - RNA, 19 nt, Homo sapiens
  misc_RNA (1)...(19): siRNA sense strand
gaucaagagagaccuucua

SEQ ID NO: 51931 - RNA, 19 nt, Homo sapiens
  misc_RNA (1)...(19): siRNA sense strand
gaacauuuccaaggccauu

SEQ ID NO: 51932 - RNA, 19 nt, Homo sapiens
  misc_RNA (1)...(19): siRNA sense strand
gagagaccuucuacaggau

SEQ ID NO: 51933 - RNA, 19 nt, Homo sapiens
  misc_RNA (1)...(19): siRNA sense strand
ccucaagucuggccucaag

SEQ ID NO: 51934 - RNA, 19 nt, Homo sapiens
  misc_RNA (1)...(19): siRNA sense strand
gaccaauccuccuguacca

SEQ ID NO: 51935 - RNA, 19 nt, Homo sapiens
  misc_RNA (1)...(19): siRNA sense strand
gaccaagacgcacuucuca

SEQ ID NO: 51936 - RNA, 19 nt, Homo sapiens
  misc_RNA (1)...(19): siRNA sense strand
aaagcagucuuccaaacau

SEQ ID NO: 51937 - RNA, 19 nt, Homo sapiens
  misc_RNA (1)...(19): siRNA sense strand
cggcaccggugaacauuuc

SEQ ID NO: 51938 - RNA, 19 nt, Homo sapiens
  misc_RNA (1)...(19): siRNA sense strand
uaucuaaacagcugcauca

SEQ ID NO: 51939 - RNA, 19 nt, Homo sapiens
  misc_RNA (1)...(19): siRNA sense strand
agaaagcagucuuccaaac

SEQ ID NO: 51940 - RNA, 19 nt, Homo sapiens
  misc_RNA (1)...(19): siRNA sense strand
ggugcuggguaacauccua

SEQ ID NO: 51941 - RNA, 19 nt, Homo sapiens
  misc_RNA (1)...(19): siRNA sense strand
ccguggaucugccaggauu

SEQ ID NO: 51942 - RNA, 19 nt, Homo sapiens
  misc_RNA (1)...(19): siRNA sense strand
ccaagacgcacuucucagu

SEQ ID NO: 51943 - RNA, 19 nt, Homo sapiens
  misc_RNA (1)...(19): siRNA sense strand
gcaucaaccccaucauaua

SEQ ID NO: 51944 - RNA, 19 nt, Homo sapiens
  misc_RNA (1)...(19): siRNA sense strand
cagaaagcagucuuccaaa

SEQ ID NO: 51945 - RNA, 19 nt, Homo sapiens
  misc_RNA (1)...(19): siRNA sense strand
agacggauggcguuuguga

SEQ ID NO: 51946 - RNA, 19 nt, Homo sapiens
  misc_RNA (1)...(19): siRNA sense strand
gaagaaagcggccaaaacg

SEQ ID NO: 51947 - RNA, 19 nt, Homo sapiens
  misc_RNA (1)...(19): siRNA sense strand
gggucuuucuucccugauu

SEQ ID NO: 51948 - RNA, 19 nt, Homo sapiens
  misc_RNA (1)...(19): siRNA sense strand
ucucagcgcugggcuccuu

SEQ ID NO: 51949 - RNA, 19 nt, Homo sapiens
  misc_RNA (1)...(19): siRNA sense strand
ggagaagaaagcggccaaa

SEQ ID NO: 51950 - RNA, 19 nt, Homo sapiens
  misc_RNA (1)...(19): siRNA sense strand
uuucuucccugauuucaag

SEQ ID NO: 51951 - RNA, 19 nt, Homo sapiens
  misc_RNA (1)...(19): siRNA sense strand
gcccuucuccgccaucuuc

SEQ ID NO: 51952 - RNA, 19 nt, Homo sapiens
  misc_RNA (1)...(19): siRNA sense strand
gcacuacuacaucgucaac

SEQ ID NO: 51953 - RNA, 19 nt, Homo sapiens
  misc_RNA (1)...(19): siRNA sense strand
uucagaaugucuugagaau

SEQ ID NO: 51954 - RNA, 19 nt, Homo sapiens
  misc_RNA (1)...(19): siRNA sense strand
cccgugggaucaagagaga

SEQ ID NO: 51955 - RNA, 19 nt, Homo sapiens
  misc_RNA (1)...(19): siRNA sense strand
gaucugccaggauuacagu

SEQ ID NO: 51956 - RNA, 19 nt, Homo sapiens
  misc_RNA (1)...(19): siRNA sense strand
aagcagucuuccaaacaug

SEQ ID NO: 51957 - RNA, 19 nt, Homo sapiens
  misc_RNA (1)...(19): siRNA sense strand
uggcguuugugaauggaaa

SEQ ID NO: 51958 - RNA, 19 nt, Homo sapiens
  misc_RNA (1)...(19): siRNA sense strand
uggcucggauaucuaaaca

SEQ ID NO: 51959 - RNA, 19 nt, Homo sapiens
  misc_RNA (1)...(19): siRNA sense strand
cggauggcguuugugaaug

SEQ ID NO: 51960 - RNA, 19 nt, Homo sapiens
  misc_RNA (1)...(19): siRNA sense strand
cuggguaacauccuaguga

SEQ ID NO: 51961 - RNA, 19 nt, Homo sapiens
  misc_RNA (1)...(19): siRNA sense strand
gcagaaagcagucuuccaa

SEQ ID NO: 51962 - RNA, 19 nt, Homo sapiens
  misc_RNA (1)...(19): siRNA sense strand
ggauuacaguguccaaaga

SEQ ID NO: 51963 - RNA, 19 nt, Homo sapiens
  misc_RNA (1)...(19): siRNA sense strand
gaaagcagucuuccaaaca

SEQ ID NO: 51964 - RNA, 19 nt, Homo sapiens
  misc_RNA (1)...(19): siRNA sense strand
caagacggauggcguuugu

SEQ ID NO: 51965 - RNA, 19 nt, Homo sapiens
  misc_RNA (1)...(19): siRNA sense strand
cagaaugucuugagaaucc

SEQ ID NO: 51966 - RNA, 19 nt, Homo sapiens
  misc_RNA (1)...(19): siRNA sense strand
ggucuuucuucccugauuu

SEQ ID NO: 51967 - RNA, 19 nt, Homo sapiens
  misc_RNA (1)...(19): siRNA sense strand
aaagaccaauccuccugua

SEQ ID NO: 51968 - RNA, 19 nt, Homo sapiens
  misc_RNA (1)...(19): siRNA sense strand
caagcccucugaaacaguu

SEQ ID NO: 51969 - RNA, 19 nt, Homo sapiens
  misc_RNA (1)...(19): siRNA sense strand
ggauggcguuugugaaugg

SEQ ID NO: 51970 - RNA, 19 nt, Homo sapiens
  misc_RNA (1)...(19): siRNA sense strand
caagagagaccuucuacag

SEQ ID NO: 51971 - RNA, 19 nt, Homo sapiens
  misc_RNA (1)...(19): siRNA sense strand
gaucaagagagaccuucua

SEQ ID NO: 51972 - RNA, 19 nt, Homo sapiens
  misc_RNA (1)...(19): siRNA sense strand
gaacauuuccaaggccauu

SEQ ID NO: 51973 - RNA, 19 nt, Homo sapiens
  misc_RNA (1)...(19): siRNA sense strand
gagagaccuucuacaggau

SEQ ID NO: 51974 - RNA, 19 nt, Homo sapiens
  misc_RNA (1)...(19): siRNA sense strand
ccucaagucuggccucaag

SEQ ID NO: 51975 - RNA, 19 nt, Homo sapiens
  misc_RNA (1)...(19): siRNA sense strand
gaccaauccuccuguacca

SEQ ID NO: 51976 - RNA, 19 nt, Homo sapiens
  misc_RNA (1)...(19): siRNA sense strand
gaccaagacgcacuucuca

SEQ ID NO: 51977 - RNA, 19 nt, Homo sapiens
  misc_RNA (1)...(19): siRNA sense strand
aaagcagucuuccaaacau

SEQ ID NO: 51978 - RNA, 19 nt, Homo sapiens
  misc_RNA (1)...(19): siRNA sense strand
cggcaccggugaacauuuc

SEQ ID NO: 51979 - RNA, 19 nt, Homo sapiens
  misc_RNA (1)...(19): siRNA sense strand
uaucuaaacagcugcauca

SEQ ID NO: 51980 - RNA, 19 nt, Homo sapiens
  misc_RNA (1)...(19): siRNA sense strand
agaaagcagucuuccaaac

SEQ ID NO: 51981 - RNA, 19 nt, Homo sapiens
  misc_RNA (1)...(19): siRNA sense strand
ggugcuggguaacauccua

SEQ ID NO: 51982 - RNA, 19 nt, Homo sapiens
  misc_RNA (1)...(19): siRNA sense strand
ccguggaucugccaggauu

SEQ ID NO: 51983 - RNA, 19 nt, Homo sapiens
  misc_RNA (1)...(19): siRNA sense strand
ccaagacgcacuucucagu

SEQ ID NO: 51984 - RNA, 19 nt, Homo sapiens
  misc_RNA (1)...(19): siRNA sense strand
gcaucaaccccaucauaua

SEQ ID NO: 51985 - RNA, 19 nt, Homo sapiens
  misc_RNA (1)...(19): siRNA sense strand
cagaaagcagucuuccaaa

SEQ ID NO: 51986 - RNA, 19 nt, Homo sapiens
  misc_RNA (1)...(19): siRNA sense strand
agacggauggcguuuguga

SEQ ID NO: 51987 - RNA, 19 nt, Homo sapiens
  misc_RNA (1)...(19): siRNA sense strand
gaagaaagcggccaaaacg

SEQ ID NO: 51988 - RNA, 19 nt, Homo sapiens
  misc_RNA (1)...(19): siRNA sense strand
gggucuuucuucccugauu

SEQ ID NO: 51989 - RNA, 19 nt, Homo sapiens
  misc_RNA (1)...(19): siRNA sense strand
ucucagcgcugggcuccuu

SEQ ID NO: 51990 - RNA, 19 nt, Homo sapiens
  misc_RNA (1)...(19): siRNA sense strand
ggagaagaaagcggccaaa

SEQ ID NO: 51991 - RNA, 19 nt, Homo sapiens
  misc_RNA (1)...(19): siRNA sense strand
uuucuucccugauuucaag

SEQ ID NO: 51992 - RNA, 19 nt, Homo sapiens
  misc_RNA (1)...(19): siRNA sense strand
gcccuucuccgccaucuuc

SEQ ID NO: 51993 - RNA, 19 nt, Homo sapiens
  misc_RNA (1)...(19): siRNA sense strand
gcacuacuacaucgucaac

SEQ ID NO: 51994 - RNA, 19 nt, Homo sapiens
  misc_RNA (1)...(19): siRNA sense strand
uucagaaugucuugagaau

SEQ ID NO: 51995 - RNA, 19 nt, Homo sapiens
  misc_RNA (1)...(19): siRNA sense strand
cccgugggaucaagagaga

SEQ ID NO: 51996 - RNA, 19 nt, Homo sapiens
  misc_RNA (1)...(19): siRNA sense strand
gaucugccaggauuacagu

SEQ ID NO: 51997 - RNA, 19 nt, Homo sapiens
  misc_RNA (1)...(19): siRNA sense strand
aagcagucuuccaaacaug

SEQ ID NO: 51998 - RNA, 19 nt, Homo sapiens
  misc_RNA (1)...(19): siRNA sense strand
uggcguuugugaauggaaa

SEQ ID NO: 51999 - RNA, 19 nt, Homo sapiens
  misc_RNA (1)...(19): siRNA sense strand
uggcucggauaucuaaaca

SEQ ID NO: 52000 - RNA, 19 nt, Homo sapiens
  misc_RNA (1)...(19): siRNA sense strand
cggauggcguuugugaaug

SEQ ID NO: 52001 - RNA, 19 nt, Homo sapiens
  misc_RNA (1)...(19): siRNA sense strand
cuggguaacauccuaguga

SEQ ID NO: 52002 - RNA, 19 nt, Homo sapiens
  misc_RNA (1)...(19): siRNA sense strand
gcagaaagcagucuuccaa

SEQ ID NO: 52003 - RNA, 19 nt, Homo sapiens
  misc_RNA (1)...(19): siRNA sense strand
ggauuacaguguccaaaga

SEQ ID NO: 52004 - RNA, 19 nt, Homo sapiens
  misc_RNA (1)...(19): siRNA sense strand
gaaagcagucuuccaaaca

SEQ ID NO: 52005 - RNA, 19 nt, Homo sapiens
  misc_RNA (1)...(19): siRNA sense strand
caagacggauggcguuugu

SEQ ID NO: 52006 - RNA, 19 nt, Homo sapiens
  misc_RNA (1)...(19): siRNA sense strand
cagaaugucuugagaaucc

SEQ ID NO: 52007 - RNA, 19 nt, Homo sapiens
  misc_RNA (1)...(19): siRNA sense strand
ggucuuucuucccugauuu

SEQ ID NO: 52008 - RNA, 19 nt, Homo sapiens
  misc_RNA (1)...(19): siRNA sense strand
aaagaccaauccuccugua

SEQ ID NO: 52009 - RNA, 19 nt, Homo sapiens
  misc_RNA (1)...(19): siRNA sense strand
caagcccucugaaacaguu

SEQ ID NO: 52010 - RNA, 19 nt, Homo sapiens
  misc_RNA (1)...(19): siRNA sense strand
ggauggcguuugugaaugg

SEQ ID NO: 52011 - RNA, 19 nt, Homo sapiens
  misc_RNA (1)...(19): siRNA sense strand
caagagagaccuucuacag

SEQ ID NO: 52012 - RNA, 19 nt, Homo sapiens
  misc_RNA (1)...(19): siRNA sense strand
gaucaagagagaccuucua

SEQ ID NO: 52013 - RNA, 19 nt, Homo sapiens
  misc_RNA (1)...(19): siRNA sense strand
gaacauuuccaaggccauu

SEQ ID NO: 52014 - RNA, 19 nt, Homo sapiens
  misc_RNA (1)...(19): siRNA sense strand
gagagaccuucuacaggau

SEQ ID NO: 52015 - RNA, 19 nt, Homo sapiens
  misc_RNA (1)...(19): siRNA sense strand
ccucaagucuggccucaag

SEQ ID NO: 52016 - RNA, 19 nt, Homo sapiens
  misc_RNA (1)...(19): siRNA sense strand
gaccaauccuccuguacca

SEQ ID NO: 52017 - RNA, 19 nt, Homo sapiens
  misc_RNA (1)...(19): siRNA sense strand
gaccaagacgcacuucuca

SEQ ID NO: 52018 - RNA, 19 nt, Homo sapiens
  misc_RNA (1)...(19): siRNA sense strand
aaagcagucuuccaaacau

SEQ ID NO: 52019 - RNA, 19 nt, Homo sapiens
  misc_RNA (1)...(19): siRNA sense strand
cggcaccggugaacauuuc

SEQ ID NO: 52020 - RNA, 19 nt, Homo sapiens
  misc_RNA (1)...(19): siRNA sense strand
uaucuaaacagcugcauca

SEQ ID NO: 52021 - RNA, 19 nt, Homo sapiens
  misc_RNA (1)...(19): siRNA sense strand
agaaagcagucuuccaaac

SEQ ID NO: 52022 - RNA, 19 nt, Homo sapiens
  misc_RNA (1)...(19): siRNA sense strand
ggugcuggguaacauccua

SEQ ID NO: 52023 - RNA, 19 nt, Homo sapiens
  misc_RNA (1)...(19): siRNA sense strand
ccguggaucugccaggauu

SEQ ID NO: 52024 - RNA, 19 nt, Homo sapiens
  misc_RNA (1)...(19): siRNA sense strand
ccaagacgcacuucucagu

SEQ ID NO: 52025 - RNA, 19 nt, Homo sapiens
  misc_RNA (1)...(19): siRNA sense strand
gcaucaaccccaucauaua

SEQ ID NO: 52026 - RNA, 19 nt, Homo sapiens
  misc_RNA (1)...(19): siRNA sense strand
cagaaagcagucuuccaaa

SEQ ID NO: 52027 - RNA, 19 nt, Homo sapiens
  misc_RNA (1)...(19): siRNA sense strand
agacggauggcguuuguga

SEQ ID NO: 52028 - RNA, 19 nt, Homo sapiens
  misc_RNA (1)...(19): siRNA sense strand
gaagaaagcggccaaaacg

SEQ ID NO: 52029 - RNA, 19 nt, Homo sapiens
  misc_RNA (1)...(19): siRNA sense strand
gggucuuucuucccugauu

SEQ ID NO: 52030 - RNA, 19 nt, Homo sapiens
  misc_RNA (1)...(19): siRNA sense strand
ucucagcgcugggcuccuu

SEQ ID NO: 52031 - RNA, 19 nt, Homo sapiens
  misc_RNA (1)...(19): siRNA sense strand
ggagaagaaagcggccaaa

SEQ ID NO: 52032 - RNA, 19 nt, Homo sapiens
  misc_RNA (1)...(19): siRNA sense strand
uuucuucccugauuucaag

SEQ ID NO: 52033 - RNA, 19 nt, Homo sapiens
  misc_RNA (1)...(19): siRNA sense strand
gcccuucuccgccaucuuc

SEQ ID NO: 52034 - RNA, 19 nt, Homo sapiens
  misc_RNA (1)...(19): siRNA sense strand
gcacuacuacaucgucaac

SEQ ID NO: 52035 - RNA, 19 nt, Homo sapiens
  misc_RNA (1)...(19): siRNA sense strand
uucagaaugucuugagaau

SEQ ID NO: 52036 - RNA, 19 nt, Homo sapiens
  misc_RNA (1)...(19): siRNA sense strand
cccgugggaucaagagaga

SEQ ID NO: 52037 - RNA, 19 nt, Homo sapiens
  misc_RNA (1)...(19): siRNA sense strand
gaucugccaggauuacagu

SEQ ID NO: 52038 - RNA, 19 nt, Homo sapiens
  misc_RNA (1)...(19): siRNA sense strand
aagcagucuuccaaacaug

SEQ ID NO: 52039 - RNA, 19 nt, Homo sapiens
  misc_RNA (1)...(19): siRNA sense strand
uggcguuugugaauggaaa

SEQ ID NO: 52040 - RNA, 19 nt, Homo sapiens
  misc_RNA (1)...(19): siRNA sense strand
uggcucggauaucuaaaca

SEQ ID NO: 52041 - RNA, 19 nt, Homo sapiens
  misc_RNA (1)...(19): siRNA sense strand
cggauggcguuugugaaug

SEQ ID NO: 52042 - RNA, 19 nt, Homo sapiens
  misc_RNA (1)...(19): siRNA sense strand
cuggguaacauccuaguga

SEQ ID NO: 52043 - RNA, 19 nt, Homo sapiens
  misc_RNA (1)...(19): siRNA sense strand
gcagaaagcagucuuccaa

SEQ ID NO: 52044 - RNA, 19 nt, Homo sapiens
  misc_RNA (1)...(19): siRNA sense strand
ggauuacaguguccaaaga

SEQ ID NO: 52045 - RNA, 19 nt, Homo sapiens
  misc_RNA (1)...(19): siRNA sense strand
gaaagcagucuuccaaaca

SEQ ID NO: 52046 - RNA, 19 nt, Homo sapiens
  misc_RNA (1)...(19): siRNA sense strand
caagacggauggcguuugu

SEQ ID NO: 52047 - RNA, 19 nt, Homo sapiens
  misc_RNA (1)...(19): siRNA sense strand
cagaaugucuugagaaucc

SEQ ID NO: 52048 - RNA, 19 nt, Homo sapiens
  misc_RNA (1)...(19): siRNA sense strand
ggucuuucuucccugauuu

SEQ ID NO: 52049 - RNA, 19 nt, Homo sapiens
  misc_RNA (1)...(19): siRNA sense strand
aaagaccaauccuccugua

SEQ ID NO: 52050 - RNA, 19 nt, Homo sapiens
  misc_RNA (1)...(19): siRNA sense strand
caagcccucugaaacaguu

SEQ ID NO: 52051 - RNA, 19 nt, Homo sapiens
  misc_RNA (1)...(19): siRNA sense strand
ggauggcguuugugaaugg

SEQ ID NO: 52052 - RNA, 19 nt, Homo sapiens
  misc_RNA (1)...(19): siRNA sense strand
caagagagaccuucuacag

SEQ ID NO: 52053 - RNA, 19 nt, Homo sapiens
  misc_RNA (1)...(19): siRNA sense strand
gaucaagagagaccuucua

SEQ ID NO: 52054 - RNA, 19 nt, Homo sapiens
  misc_RNA (1)...(19): siRNA sense strand
gaacauuuccaaggccauu

SEQ ID NO: 52055 - RNA, 19 nt, Homo sapiens
  misc_RNA (1)...(19): siRNA sense strand
gagagaccuucuacaggau

SEQ ID NO: 52056 - RNA, 19 nt, Homo sapiens
  misc_RNA (1)...(19): siRNA sense strand
ccucaagucuggccucaag

SEQ ID NO: 52057 - RNA, 19 nt, Homo sapiens
  misc_RNA (1)...(19): siRNA sense strand
gaccaauccuccuguacca

SEQ ID NO: 52058 - RNA, 19 nt, Homo sapiens
  misc_RNA (1)...(19): siRNA sense strand
gaccaagacgcacuucuca

SEQ ID NO: 52059 - RNA, 19 nt, Homo sapiens
  misc_RNA (1)...(19): siRNA sense strand
aaagcagucuuccaaacau

SEQ ID NO: 52060 - RNA, 19 nt, Homo sapiens
  misc_RNA (1)...(19): siRNA sense strand
cggcaccggugaacauuuc

SEQ ID NO: 52061 - RNA, 19 nt, Homo sapiens
  misc_RNA (1)...(19): siRNA sense strand
uaucuaaacagcugcauca

SEQ ID NO: 52062 - RNA, 19 nt, Homo sapiens
  misc_RNA (1)...(19): siRNA sense strand
agaaagcagucuuccaaac

SEQ ID NO: 52063 - RNA, 19 nt, Homo sapiens
  misc_RNA (1)...(19): siRNA sense strand
ggugcuggguaacauccua

SEQ ID NO: 52064 - RNA, 19 nt, Homo sapiens
  misc_RNA (1)...(19): siRNA sense strand
ccguggaucugccaggauu

SEQ ID NO: 52065 - RNA, 19 nt, Homo sapiens
  misc_RNA (1)...(19): siRNA sense strand
ccaagacgcacuucucagu

SEQ ID NO: 52066 - RNA, 19 nt, Homo sapiens
  misc_RNA (1)...(19): siRNA sense strand
gcaucaaccccaucauaua

SEQ ID NO: 52067 - RNA, 19 nt, Homo sapiens
  misc_RNA (1)...(19): siRNA sense strand
cagaaagcagucuuccaaa

SEQ ID NO: 52068 - RNA, 19 nt, Homo sapiens
  misc_RNA (1)...(19): siRNA sense strand
agacggauggcguuuguga

SEQ ID NO: 52069 - RNA, 19 nt, Homo sapiens
  misc_RNA (1)...(19): siRNA sense strand
gaagaaagcggccaaaacg

SEQ ID NO: 52070 - RNA, 19 nt, Homo sapiens
  misc_RNA (1)...(19): siRNA sense strand
gggucuuucuucccugauu

SEQ ID NO: 52071 - RNA, 19 nt, Homo sapiens
  misc_RNA (1)...(19): siRNA sense strand
ucucagcgcugggcuccuu

SEQ ID NO: 52072 - RNA, 19 nt, Homo sapiens
  misc_RNA (1)...(19): siRNA sense strand
ggagaagaaagcggccaaa

SEQ ID NO: 52073 - RNA, 19 nt, Homo sapiens
  misc_RNA (1)...(19): siRNA sense strand
uuucuucccugauuucaag

SEQ ID NO: 52074 - RNA, 19 nt, Homo sapiens
  misc_RNA (1)...(19): siRNA sense strand
gcccuucuccgccaucuuc

SEQ ID NO: 52075 - RNA, 19 nt, Homo sapiens
  misc_RNA (1)...(19): siRNA sense strand
gcacuacuacaucgucaac

SEQ ID NO: 52076 - RNA, 19 nt, Homo sapiens
  misc_RNA (1)...(19): siRNA sense strand
uucagaaugucuugagaau

SEQ ID NO: 52077 - RNA, 19 nt, Homo sapiens
  misc_RNA (1)...(19): siRNA sense strand
cccgugggaucaagagaga

SEQ ID NO: 52078 - RNA, 19 nt, Homo sapiens
  misc_RNA (1)...(19): siRNA sense strand
gaucugccaggauuacagu

SEQ ID NO: 52079 - RNA, 19 nt, Homo sapiens
  misc_RNA (1)...(19): siRNA sense strand
aagcagucuuccaaacaug

SEQ ID NO: 52080 - RNA, 19 nt, Homo sapiens
  misc_RNA (1)...(19): siRNA sense strand
uggcguuugugaauggaaa

SEQ ID NO: 52081 - RNA, 19 nt, Homo sapiens
  misc_RNA (1)...(19): siRNA sense strand
uggcucggauaucuaaaca

SEQ ID NO: 52082 - RNA, 19 nt, Homo sapiens
  misc_RNA (1)...(19): siRNA sense strand
cggauggcguuugugaaug

SEQ ID NO: 52083 - RNA, 19 nt, Homo sapiens
  misc_RNA (1)...(19): siRNA sense strand
cuggguaacauccuaguga

SEQ ID NO: 52084 - RNA, 19 nt, Homo sapiens
  misc_RNA (1)...(19): siRNA sense strand
gccaucaccuuccucauuc

SEQ ID NO: 52085 - RNA, 19 nt, Homo sapiens
  misc_RNA (1)...(19): siRNA sense strand
cagcaucggaucuuucuuu

SEQ ID NO: 52086 - RNA, 19 nt, Homo sapiens
  misc_RNA (1)...(19): siRNA sense strand
ggccaucaccuuccucauu

SEQ ID NO: 52087 - RNA, 19 nt, Homo sapiens
  misc_RNA (1)...(19): siRNA sense strand
caucggaucuuucuuugcu

SEQ ID NO: 52088 - RNA, 19 nt, Homo sapiens
  misc_RNA (1)...(19): siRNA sense strand
gggcgugggugcuauaggu

SEQ ID NO: 52089 - RNA, 19 nt, Homo sapiens
  misc_RNA (1)...(19): siRNA sense strand
ccacgcucaucaucccuuu

SEQ ID NO: 52090 - RNA, 19 nt, Homo sapiens
  misc_RNA (1)...(19): siRNA sense strand
cggcaacgcucuggucauc

SEQ ID NO: 52091 - RNA, 19 nt, Homo sapiens
  misc_RNA (1)...(19): siRNA sense strand
ggaggaggaggaagagugu

SEQ ID NO: 52092 - RNA, 19 nt, Homo sapiens
  misc_RNA (1)...(19): siRNA sense strand
ucacugaacccuguuaucu

SEQ ID NO: 52093 - RNA, 19 nt, Homo sapiens
  misc_RNA (1)...(19): siRNA sense strand
gcaacgcucuggucauccu

SEQ ID NO: 52094 - RNA, 19 nt, Homo sapiens
  misc_RNA (1)...(19): siRNA sense strand
cccauggccucuuccaguu

SEQ ID NO: 52095 - RNA, 19 nt, Homo sapiens
  misc_RNA (1)...(19): siRNA sense strand
ccuguuaucuacaccaucu

SEQ ID NO: 52096 - RNA, 19 nt, Homo sapiens
  misc_RNA (1)...(19): siRNA sense strand
ccagaaggaggguguuugu

SEQ ID NO: 52097 - RNA, 19 nt, Homo sapiens
  misc_RNA (1)...(19): siRNA sense strand
acugaacccuguuaucuac

SEQ ID NO: 52098 - RNA, 19 nt, Homo sapiens
  misc_RNA (1)...(19): siRNA sense strand
ucaccuuccucauucucuu

SEQ ID NO: 52099 - RNA, 19 nt, Homo sapiens
  misc_RNA (1)...(19): siRNA sense strand
ggucauccuggcuguguug

SEQ ID NO: 52100 - RNA, 19 nt, Homo sapiens
  misc_RNA (1)...(19): siRNA sense strand
cacugaacccuguuaucua

SEQ ID NO: 52101 - RNA, 19 nt, Homo sapiens
  misc_RNA (1)...(19): siRNA sense strand
cgugcuggcuguggucauu

SEQ ID NO: 52102 - RNA, 19 nt, Homo sapiens
  misc_RNA (1)...(19): siRNA sense strand
ccuccagcaucggaucuuu

SEQ ID NO: 52103 - RNA, 19 nt, Homo sapiens
  misc_RNA (1)...(19): siRNA sense strand
uccagaggaugaagcugaa

SEQ ID NO: 52104 - RNA, 19 nt, Homo sapiens
  misc_RNA (1)...(19): siRNA sense strand
ggaucuuucuuugcuccuu

SEQ ID NO: 52105 - RNA, 19 nt, Homo sapiens
  misc_RNA (1)...(19): siRNA sense strand
ggaggaggaggaggaggaa

SEQ ID NO: 52106 - RNA, 19 nt, Homo sapiens
  misc_RNA (1)...(19): siRNA sense strand
cucauucucuuuaccaucu

SEQ ID NO: 52107 - RNA, 19 nt, Homo sapiens
  misc_RNA (1)...(19): siRNA sense strand
ggaggaggaagagugugaa

SEQ ID NO: 52108 - RNA, 19 nt, Homo sapiens
  misc_RNA (1)...(19): siRNA sense strand
uggaucggcuacugcaaca

SEQ ID NO: 52109 - RNA, 19 nt, Homo sapiens
  misc_RNA (1)...(19): siRNA sense strand
gcaacgugcugguggugau

SEQ ID NO: 52110 - RNA, 19 nt, Homo sapiens
  misc_RNA (1)...(19): siRNA sense strand
gugcaucugugugccauca

SEQ ID NO: 52111 - RNA, 19 nt, Homo sapiens
  misc_RNA (1)...(19): siRNA sense strand
ccucgucgaucgugcaucu

SEQ ID NO: 52112 - RNA, 19 nt, Homo sapiens
  misc_RNA (1)...(19): siRNA sense strand
gcucaacccggucaucuac

SEQ ID NO: 52113 - RNA, 19 nt, Homo sapiens
  misc_RNA (1)...(19): siRNA sense strand
gcucuucaaguucuucuuc

SEQ ID NO: 52114 - RNA, 19 nt, Homo sapiens
  misc_RNA (1)...(19): siRNA sense strand
ucaacgacgagaccuggua

SEQ ID NO: 52115 - RNA, 19 nt, Homo sapiens
  misc_RNA (1)...(19): siRNA sense strand
gcucaucucggccgucauc

SEQ ID NO: 52116 - RNA, 19 nt, Homo sapiens
  misc_RNA (1)...(19): siRNA sense strand
guaccuggcgcucgaugug

SEQ ID NO: 52117 - RNA, 19 nt, Homo sapiens
  misc_RNA (1)...(19): siRNA sense strand
ggcgcucgaugugcuguuu

SEQ ID NO: 52118 - RNA, 19 nt, Homo sapiens
  misc_RNA (1)...(19): siRNA sense strand
ucaaguucuucuucuggau

SEQ ID NO: 52119 - RNA, 19 nt, Homo sapiens
  misc_RNA (1)...(19): siRNA sense strand
cgacgagaccugguacauc

SEQ ID NO: 52120 - RNA, 19 nt, Homo sapiens
  misc_RNA (1)...(19): siRNA sense strand
uggaucggcuacugcaaca

SEQ ID NO: 52121 - RNA, 19 nt, Homo sapiens
  misc_RNA (1)...(19): siRNA sense strand
gcaaugugcuggugaucgu

SEQ ID NO: 52122 - RNA, 19 nt, Homo sapiens
  misc_RNA (1)...(19): siRNA sense strand
agaagcaggugaagaagau

SEQ ID NO: 52123 - RNA, 19 nt, Homo sapiens
  misc_RNA (1)...(19): siRNA sense strand
gggcaugggucugcugaug

SEQ ID NO: 52124 - RNA, 19 nt, Homo sapiens
  misc_RNA (1)...(19): siRNA sense strand
ucaccaaccucuucaucau

SEQ ID NO: 52125 - RNA, 19 nt, Homo sapiens
  misc_RNA (1)...(19): siRNA sense strand
caucauggccuucguguac

SEQ ID NO: 52126 - RNA, 19 nt, Homo sapiens
  misc_RNA (1)...(19): siRNA sense strand
ggacgacgacgacgacgau

SEQ ID NO: 52127 - RNA, 19 nt, Homo sapiens
  misc_RNA (1)...(19): siRNA sense strand
gaguacggcuccuucuucu

SEQ ID NO: 52128 - RNA, 19 nt, Homo sapiens
  misc_RNA (1)...(19): siRNA sense strand
gcaucgagacccugugugu

SEQ ID NO: 52129 - RNA, 19 nt, Homo sapiens
  misc_RNA (1)...(19): siRNA sense strand
ucaagacgcugggcaucau

SEQ ID NO: 52130 - RNA, 19 nt, Homo sapiens
  misc_RNA (1)...(19): siRNA sense strand
cccagaagcaggugaagaa

SEQ ID NO: 52131 - RNA, 19 nt, Homo sapiens
  misc_RNA (1)...(19): siRNA sense strand
gagacccugugugucauug

SEQ ID NO: 52132 - RNA, 19 nt, Homo sapiens
  misc_RNA (1)...(19): siRNA sense strand
cagaagcaggugaagaaga

SEQ ID NO: 52133 - RNA, 19 nt, Homo sapiens
  misc_RNA (1)...(19): siRNA sense strand
ucucggcccugguguccuu

SEQ ID NO: 52134 - RNA, 19 nt, Homo sapiens
  misc_RNA (1)...(19): siRNA sense strand
accaaccucuucaucaugu

SEQ ID NO: 52135 - RNA, 19 nt, Homo sapiens
  misc_RNA (1)...(19): siRNA sense strand
gcugcgacuucgucaccaa

SEQ ID NO: 52136 - RNA, 19 nt, Homo sapiens
  misc_RNA (1)...(19): siRNA sense strand
cgacgacgacgacgauguc

SEQ ID NO: 52137 - RNA, 19 nt, Homo sapiens
  misc_RNA (1)...(19): siRNA sense strand
gcaucauggccuucgugua

SEQ ID NO: 52138 - RNA, 19 nt, Homo sapiens
  misc_RNA (1)...(19): siRNA sense strand
gcucaccaaccucuucauc

SEQ ID NO: 52139 - RNA, 19 nt, Homo sapiens
  misc_RNA (1)...(19): siRNA sense strand
ccucggaauccaaggugua

SEQ ID NO: 52140 - RNA, 19 nt, Homo sapiens
  misc_RNA (1)...(19): siRNA sense strand
gaacaucucuggcaacaau

SEQ ID NO: 52141 - RNA, 19 nt, Homo sapiens
  misc_RNA (1)...(19): siRNA sense strand
gcaagcaucuuauauaguu

SEQ ID NO: 52142 - RNA, 19 nt, Homo sapiens
  misc_RNA (1)...(19): siRNA sense strand
gaacauguuugcaagcauu

SEQ ID NO: 52143 - RNA, 19 nt, Homo sapiens
  misc_RNA (1)...(19): siRNA sense strand
ucacagaaaccaucagaua

SEQ ID NO: 52144 - RNA, 19 nt, Homo sapiens
  misc_RNA (1)...(19): siRNA sense strand
auuaauagcugcgaaguua

SEQ ID NO: 52145 - RNA, 19 nt, Homo sapiens
  misc_RNA (1)...(19): siRNA sense strand
guucuggccuucaucauuu

SEQ ID NO: 52146 - RNA, 19 nt, Homo sapiens
  misc_RNA (1)...(19): siRNA sense strand
cagaaccauugaauacuua

SEQ ID NO: 52147 - RNA, 19 nt, Homo sapiens
  misc_RNA (1)...(19): siRNA sense strand
gcaugaguguugauaggua

SEQ ID NO: 52148 - RNA, 19 nt, Homo sapiens
  misc_RNA (1)...(19): siRNA sense strand
guaccaaucugucaucuac

SEQ ID NO: 52149 - RNA, 19 nt, Homo sapiens
  misc_RNA (1)...(19): siRNA sense strand
gaguaugucuugccggaaa

SEQ ID NO: 52150 - RNA, 19 nt, Homo sapiens
  misc_RNA (1)...(19): siRNA sense strand
gaaaagcaguucucuuaga

SEQ ID NO: 52151 - RNA, 19 nt, Homo sapiens
  misc_RNA (1)...(19): siRNA sense strand
gaaaccgguuccaacagaa

SEQ ID NO: 52152 - RNA, 19 nt, Homo sapiens
  misc_RNA (1)...(19): siRNA sense strand
ugagaaauaugcccaaugg

SEQ ID NO: 52153 - RNA, 19 nt, Homo sapiens
  misc_RNA (1)...(19): siRNA sense strand
ggaugggugucauuaauag

SEQ ID NO: 52154 - RNA, 19 nt, Homo sapiens
  misc_RNA (1)...(19): siRNA sense strand
guuaauccguuucuguauu

SEQ ID NO: 52155 - RNA, 19 nt, Homo sapiens
  misc_RNA (1)...(19): siRNA sense strand
ucagaaccauugaauacuu

SEQ ID NO: 52156 - RNA, 19 nt, Homo sapiens
  misc_RNA (1)...(19): siRNA sense strand
ccugugaugugcaaaguuu

SEQ ID NO: 52157 - RNA, 19 nt, Homo sapiens
  misc_RNA (1)...(19): siRNA sense strand
gggcaaccuauuauucuua

SEQ ID NO: 52158 - RNA, 19 nt, Homo sapiens
  misc_RNA (1)...(19): siRNA sense strand
uaauagcugcgaaguuaua

SEQ ID NO: 52159 - RNA, 19 nt, Homo sapiens
  misc_RNA (1)...(19): siRNA sense strand
gaaguuauagcagucauug

SEQ ID NO: 52160 - RNA, 19 nt, Homo sapiens
  misc_RNA (1)...(19): siRNA sense strand
guguuuaggguuccaauua

SEQ ID NO: 52161 - RNA, 19 nt, Homo sapiens
  misc_RNA (1)...(19): siRNA sense strand
gcauauacaucuucaaccu

SEQ ID NO: 52162 - RNA, 19 nt, Homo sapiens
  misc_RNA (1)...(19): siRNA sense strand
gaaauggagaccuuugugu

SEQ ID NO: 52163 - RNA, 19 nt, Homo sapiens
  misc_RNA (1)...(19): siRNA sense strand
gagucuaccuugaacuguu

SEQ ID NO: 52164 - RNA, 19 nt, Homo sapiens
  misc_RNA (1)...(19): siRNA sense strand
uuaauccguuucuguauug

SEQ ID NO: 52165 - RNA, 19 nt, Homo sapiens
  misc_RNA (1)...(19): siRNA sense strand
cagcugggauugccuuaau

SEQ ID NO: 52166 - RNA, 19 nt, Homo sapiens
  misc_RNA (1)...(19): siRNA sense strand
gauaacccgugaccaaguc

SEQ ID NO: 52167 - RNA, 19 nt, Homo sapiens
  misc_RNA (1)...(19): siRNA sense strand
cacagaaaccaucagauaa

SEQ ID NO: 52168 - RNA, 19 nt, Homo sapiens
  misc_RNA (1)...(19): siRNA sense strand
uggcaagcaucuuauauag

SEQ ID NO: 52169 - RNA, 19 nt, Homo sapiens
  misc_RNA (1)...(19): siRNA sense strand
gaugcaauuccuauucuuu

SEQ ID NO: 52170 - RNA, 19 nt, Homo sapiens
  misc_RNA (1)...(19): siRNA sense strand
uuagagaaauggagaccuu

SEQ ID NO: 52171 - RNA, 19 nt, Homo sapiens
  misc_RNA (1)...(19): siRNA sense strand
gggauugccuuaaugaaaa

SEQ ID NO: 52172 - RNA, 19 nt, Homo sapiens
  misc_RNA (1)...(19): siRNA sense strand
agauaugacuggcucuuug

SEQ ID NO: 52173 - RNA, 19 nt, Homo sapiens
  misc_RNA (1)...(19): siRNA sense strand
ggcaaccuauuauucuuau

SEQ ID NO: 52174 - RNA, 19 nt, Homo sapiens
  misc_RNA (1)...(19): siRNA sense strand
caucagauaagcauuuaga

SEQ ID NO: 52175 - RNA, 19 nt, Homo sapiens
  misc_RNA (1)...(19): siRNA sense strand
cggaaaagcaguucucuua

SEQ ID NO: 52176 - RNA, 19 nt, Homo sapiens
  misc_RNA (1)...(19): siRNA sense strand
agaaaucccuggcaagcau

SEQ ID NO: 52177 - RNA, 19 nt, Homo sapiens
  misc_RNA (1)...(19): siRNA sense strand
ggauuucuggucaauauug

SEQ ID NO: 52178 - RNA, 19 nt, Homo sapiens
  misc_RNA (1)...(19): siRNA sense strand
gcguuaauccguuucugua

SEQ ID NO: 52179 - RNA, 19 nt, Homo sapiens
  misc_RNA (1)...(19): siRNA sense strand
ggucaauauugucgugguu

SEQ ID NO: 52180 - RNA, 19 nt, Homo sapiens
  misc_RNA (1)...(19): siRNA sense strand
cagcugcguuaauccguuu

SEQ ID NO: 52181 - RNA, 19 nt, Homo sapiens
  misc_RNA (1)...(19): siRNA sense strand
uaccagcggucuucacuuc

SEQ ID NO: 52182 - RNA, 19 nt, Homo sapiens
  misc_RNA (1)...(19): siRNA sense strand
acgaauagcuaugggaaga

SEQ ID NO: 52183 - RNA, 19 nt, Homo sapiens
  misc_RNA (1)...(19): siRNA sense strand
agaaaacacuuacugaaga

SEQ ID NO: 52184 - RNA, 19 nt, Homo sapiens
  misc_RNA (1)...(19): siRNA sense strand
gaagcuccgcaguguguuu

SEQ ID NO: 52185 - RNA, 19 nt, Homo sapiens
  misc_RNA (1)...(19): siRNA sense strand
gaaaccaucagauaagcau

SEQ ID NO: 52186 - RNA, 19 nt, Homo sapiens
  misc_RNA (1)...(19): siRNA sense strand
gaauagcuaugggaagaac

SEQ ID NO: 52187 - RNA, 19 nt, Homo sapiens
  misc_RNA (1)...(19): siRNA sense strand
guugauagguaccaaucug

SEQ ID NO: 52188 - RNA, 19 nt, Homo sapiens
  misc_RNA (1)...(19): siRNA sense strand
acaaugagucuaccuugaa

SEQ ID NO: 52189 - RNA, 19 nt, Homo sapiens
  misc_RNA (1)...(19): siRNA sense strand
ucagauaagcauuuagaug

SEQ ID NO: 52190 - RNA, 19 nt, Homo sapiens
  misc_RNA (1)...(19): siRNA sense strand
gugaacaucucuggcaaca

SEQ ID NO: 52191 - RNA, 19 nt, Homo sapiens
  misc_RNA (1)...(19): siRNA sense strand
gcaacaaugagucuaccuu

SEQ ID NO: 52192 - RNA, 19 nt, Homo sapiens
  misc_RNA (1)...(19): siRNA sense strand
aacaaugagucuaccuuga

SEQ ID NO: 52193 - RNA, 19 nt, Homo sapiens
  misc_RNA (1)...(19): siRNA sense strand
uuggauuucuggucaauau

SEQ ID NO: 52194 - RNA, 19 nt, Homo sapiens
  misc_RNA (1)...(19): siRNA sense strand
gagaaauggagaccuuugu

SEQ ID NO: 52195 - RNA, 19 nt, Homo sapiens
  misc_RNA (1)...(19): siRNA sense strand
cagaagcuccgcagugugu

SEQ ID NO: 52196 - RNA, 19 nt, Homo sapiens
  misc_RNA (1)...(19): siRNA sense strand
cgucagaaccauugaauac

SEQ ID NO: 52197 - RNA, 19 nt, Homo sapiens
  misc_RNA (1)...(19): siRNA sense strand
caaccucgcuguggcugau

SEQ ID NO: 52198 - RNA, 19 nt, Homo sapiens
  misc_RNA (1)...(19): siRNA sense strand
aaagguuucuagcauauac

SEQ ID NO: 52199 - RNA, 19 nt, Homo sapiens
  misc_RNA (1)...(19): siRNA sense strand
ugucgugguuacacuguuu

SEQ ID NO: 52200 - RNA, 19 nt, Homo sapiens
  misc_RNA (1)...(19): siRNA sense strand
ccaauggucagcugggauu

SEQ ID NO: 52201 - RNA, 19 nt, Homo sapiens
  misc_RNA (1)...(19): siRNA sense strand
gauuucuggucaauauugu

SEQ ID NO: 52202 - RNA, 19 nt, Homo sapiens
  misc_RNA (1)...(19): siRNA sense strand
uggcuacucuuccucuaug

SEQ ID NO: 52203 - RNA, 19 nt, Homo sapiens
  misc_RNA (1)...(19): siRNA sense strand
uagaugcaauuccuauucu

SEQ ID NO: 52204 - RNA, 19 nt, Homo sapiens
  misc_RNA (1)...(19): siRNA sense strand
cuggaugggugucauuaau

SEQ ID NO: 52205 - RNA, 19 nt, Homo sapiens
  misc_RNA (1)...(19): siRNA sense strand
gauagguaccaaucuguca

SEQ ID NO: 52206 - RNA, 19 nt, Homo sapiens
  misc_RNA (1)...(19): siRNA sense strand
gaaaagagagaguaugucu

SEQ ID NO: 52207 - RNA, 19 nt, Homo sapiens
  misc_RNA (1)...(19): siRNA sense strand
aacagaagcuccgcagugu

SEQ ID NO: 52208 - RNA, 19 nt, Homo sapiens
  misc_RNA (1)...(19): siRNA sense strand
uggaugggugucauuaaua

SEQ ID NO: 52209 - RNA, 19 nt, Homo sapiens
  misc_RNA (1)...(19): siRNA sense strand
ugggauugccuuaaugaaa

SEQ ID NO: 52210 - RNA, 19 nt, Homo sapiens
  misc_RNA (1)...(19): siRNA sense strand
gcugggauugccuuaauga

SEQ ID NO: 52211 - RNA, 19 nt, Homo sapiens
  misc_RNA (1)...(19): siRNA sense strand
cgagacgucagaaccauug

SEQ ID NO: 52212 - RNA, 19 nt, Homo sapiens
  misc_RNA (1)...(19): siRNA sense strand
cuggcaagcaucuuauaua

SEQ ID NO: 52213 - RNA, 19 nt, Homo sapiens
  misc_RNA (1)...(19): siRNA sense strand
caaugagucuaccuugaac

SEQ ID NO: 52214 - RNA, 19 nt, Homo sapiens
  misc_RNA (1)...(19): siRNA sense strand
accaucagauaagcauuua

SEQ ID NO: 52215 - RNA, 19 nt, Homo sapiens
  misc_RNA (1)...(19): siRNA sense strand
acagaaaccaucagauaag

SEQ ID NO: 52216 - RNA, 19 nt, Homo sapiens
  misc_RNA (1)...(19): siRNA sense strand
gaccugugaugugcaaagu

SEQ ID NO: 52217 - RNA, 19 nt, Homo sapiens
  misc_RNA (1)...(19): siRNA sense strand
uuugguguauggccuguuu

SEQ ID NO: 52218 - RNA, 19 nt, Homo sapiens
  misc_RNA (1)...(19): siRNA sense strand
accaacagcugcguuaauc

SEQ ID NO: 52219 - RNA, 19 nt, Homo sapiens
  misc_RNA (1)...(19): siRNA sense strand
gugaccaaguccugaagau

SEQ ID NO: 52220 - RNA, 19 nt, Homo sapiens
  misc_RNA (1)...(19): siRNA sense strand
gaaaacacuuacugaagac

SEQ ID NO: 52221 - RNA, 19 nt, Homo sapiens
  misc_RNA (1)...(19): siRNA sense strand
uaauuggauuucuggucaa

SEQ ID NO: 52222 - RNA, 19 nt, Homo sapiens
  misc_RNA (1)...(19): siRNA sense strand
uggaugcucuggccuggau

SEQ ID NO: 52223 - RNA, 19 nt, Homo sapiens
  misc_RNA (1)...(19): siRNA sense strand
ucaauauugucgugguuac

SEQ ID NO: 52224 - RNA, 19 nt, Homo sapiens
  misc_RNA (1)...(19): siRNA sense strand
cagaaaccaucagauaagc

SEQ ID NO: 52225 - RNA, 19 nt, Homo sapiens
  misc_RNA (1)...(19): siRNA sense strand
ucaccugcaugaguguuga

SEQ ID NO: 52226 - RNA, 19 nt, Homo sapiens
  misc_RNA (1)...(19): siRNA sense strand
uuagaugcaauuccuauuc

SEQ ID NO: 52227 - RNA, 19 nt, Homo sapiens
  misc_RNA (1)...(19): siRNA sense strand
aaccaucagauaagcauuu

SEQ ID NO: 52228 - RNA, 19 nt, Homo sapiens
  misc_RNA (1)...(19): siRNA sense strand
auccguuucuguauuguuu

SEQ ID NO: 52229 - RNA, 19 nt, Homo sapiens
  misc_RNA (1)...(19): siRNA sense strand
guucacagaaaccaucaga

SEQ ID NO: 52230 - RNA, 19 nt, Homo sapiens
  misc_RNA (1)...(19): siRNA sense strand
uuucuuacccugaacaugu

SEQ ID NO: 52231 - RNA, 19 nt, Homo sapiens
  misc_RNA (1)...(19): siRNA sense strand
gauaugacuggcucuuugg

SEQ ID NO: 52232 - RNA, 19 nt, Homo sapiens
  misc_RNA (1)...(19): siRNA sense strand
guggcugauuuacuccuuu

SEQ ID NO: 52233 - RNA, 19 nt, Homo sapiens
  misc_RNA (1)...(19): siRNA sense strand
uaugggcaaccuauuauuc

SEQ ID NO: 52234 - RNA, 19 nt, Homo sapiens
  misc_RNA (1)...(19): siRNA sense strand
gucaauauugucgugguua

SEQ ID NO: 52235 - RNA, 19 nt, Homo sapiens
  misc_RNA (1)...(19): siRNA sense strand
ccucauugccaacauuuua

SEQ ID NO: 52236 - RNA, 19 nt, Homo sapiens
  misc_RNA (1)...(19): siRNA sense strand
caagcaucuuauauaguuc

SEQ ID NO: 52237 - RNA, 19 nt, Homo sapiens
  misc_RNA (1)...(19): siRNA sense strand
gcaauuccuauucuuuacu

SEQ ID NO: 52238 - RNA, 19 nt, Homo sapiens
  misc_RNA (1)...(19): siRNA sense strand
gacgucagaaccauugaau

SEQ ID NO: 52239 - RNA, 19 nt, Homo sapiens
  misc_RNA (1)...(19): siRNA sense strand
uagauaugacuggcucuuu

SEQ ID NO: 52240 - RNA, 19 nt, Homo sapiens
  misc_RNA (1)...(19): siRNA sense strand
gaugaaggaugaugccauu

SEQ ID NO: 52241 - RNA, 19 nt, Homo sapiens
  misc_RNA (1)...(19): siRNA sense strand
ucaaguggcucaacgagaa

SEQ ID NO: 52242 - RNA, 19 nt, Homo sapiens
  misc_RNA (1)...(19): siRNA sense strand
ugaccaagcuaacugagaa

SEQ ID NO: 52243 - RNA, 19 nt, Homo sapiens
  misc_RNA (1)...(19): siRNA sense strand
gaaggaugaugccauugug

SEQ ID NO: 52244 - RNA, 19 nt, Homo sapiens
  misc_RNA (1)...(19): siRNA sense strand
gagcagacccuguacuuca

SEQ ID NO: 52245 - RNA, 19 nt, Homo sapiens
  misc_RNA (1)...(19): siRNA sense strand
caaggugccugccaucaau

SEQ ID NO: 52246 - RNA, 19 nt, Homo sapiens
  misc_RNA (1)...(19): siRNA sense strand
ggacccauccagacaagua

SEQ ID NO: 52247 - RNA, 19 nt, Homo sapiens
  misc_RNA (1)...(19): siRNA sense strand
gcauugagcagacccugua

SEQ ID NO: 52248 - RNA, 19 nt, Homo sapiens
  misc_RNA (1)...(19): siRNA sense strand
gccauuguguguaacauug

SEQ ID NO: 52249 - RNA, 19 nt, Homo sapiens
  misc_RNA (1)...(19): siRNA sense strand
ccaaugggauccucaaggu

SEQ ID NO: 52250 - RNA, 19 nt, Homo sapiens
  misc_RNA (1)...(19): siRNA sense strand
caagcuaacugagaagcaa

SEQ ID NO: 52251 - RNA, 19 nt, Homo sapiens
  misc_RNA (1)...(19): siRNA sense strand
gcgaaacggacgaggagua

SEQ ID NO: 52252 - RNA, 19 nt, Homo sapiens
  misc_RNA (1)...(19): siRNA sense strand
cacaaccucuacaagauga

SEQ ID NO: 52253 - RNA, 19 nt, Homo sapiens
  misc_RNA (1)...(19): siRNA sense strand
uggagaaggugaacaucaa

SEQ ID NO: 52254 - RNA, 19 nt, Homo sapiens
  misc_RNA (1)...(19): siRNA sense strand
gaguaccuguggugcauug

SEQ ID NO: 52255 - RNA, 19 nt, Homo sapiens
  misc_RNA (1)...(19): siRNA sense strand
caagcugaaugugaaguug

SEQ ID NO: 52256 - RNA, 19 nt, Homo sapiens
  misc_RNA (1)...(19): siRNA sense strand
ucaccaagagcaaguuuga

SEQ ID NO: 52257 - RNA, 19 nt, Homo sapiens
  misc_RNA (1)...(19): siRNA sense strand
ugacaaacugcccuacaaa

SEQ ID NO: 52258 - RNA, 19 nt, Homo sapiens
  misc_RNA (1)...(19): siRNA sense strand
uugagcagaugaaggauga

SEQ ID NO: 52259 - RNA, 19 nt, Homo sapiens
  misc_RNA (1)...(19): siRNA sense strand
ccagcuucgugaugaguaa

SEQ ID NO: 52260 - RNA, 19 nt, Homo sapiens
  misc_RNA (1)...(19): siRNA sense strand
gguaucgguugaagaaugg

SEQ ID NO: 52261 - RNA, 19 nt, Homo sapiens
  misc_RNA (1)...(19): siRNA sense strand
caaacugcccuacaaaguc

SEQ ID NO: 52262 - RNA, 19 nt, Homo sapiens
  misc_RNA (1)...(19): siRNA sense strand
gcaagcugaaugugaaguu

SEQ ID NO: 52263 - RNA, 19 nt, Homo sapiens
  misc_RNA (1)...(19): siRNA sense strand
cugacaaacugcccuacaa

SEQ ID NO: 52264 - RNA, 19 nt, Homo sapiens
  misc_RNA (1)...(19): siRNA sense strand
acaagaugauggccaaugg

SEQ ID NO: 52265 - RNA, 19 nt, Homo sapiens
  misc_RNA (1)...(19): siRNA sense strand
ugggcaagcugaaugugaa

SEQ ID NO: 52266 - RNA, 19 nt, Homo sapiens
  misc_RNA (1)...(19): siRNA sense strand
cgguaucgguugaagaaug

SEQ ID NO: 52267 - RNA, 19 nt, Homo sapiens
  misc_RNA (1)...(19): siRNA sense strand
gaugaugccauugugugua

SEQ ID NO: 52268 - RNA, 19 nt, Homo sapiens
  misc_RNA (1)...(19): siRNA sense strand
ccacaaccucuacaagaug

SEQ ID NO: 52269 - RNA, 19 nt, Homo sapiens
  misc_RNA (1)...(19): siRNA sense strand
gagggcaacaucuuuguca

SEQ ID NO: 52270 - RNA, 19 nt, Homo sapiens
  misc_RNA (1)...(19): siRNA sense strand
ucaggagggcaacaucuuu

SEQ ID NO: 52271 - RNA, 19 nt, Homo sapiens
  misc_RNA (1)...(19): siRNA sense strand
augaugccauuguguguaa

SEQ ID NO: 52272 - RNA, 19 nt, Homo sapiens
  misc_RNA (1)...(19): siRNA sense strand
ccaaguacccgcagcuucu

SEQ ID NO: 52273 - RNA, 19 nt, Homo sapiens
  misc_RNA (1)...(19): siRNA sense strand
caaguuugacaaccucuau

SEQ ID NO: 52274 - RNA, 19 nt, Homo sapiens
  misc_RNA (1)...(19): siRNA sense strand
guccacaaccucuacaaga

SEQ ID NO: 52275 - RNA, 19 nt, Homo sapiens
  misc_RNA (1)...(19): siRNA sense strand
uccacaaccucuacaagau

SEQ ID NO: 52276 - RNA, 19 nt, Homo sapiens
  misc_RNA (1)...(19): siRNA sense strand
guucauuuccugcccaaga

SEQ ID NO: 52277 - RNA, 19 nt, Homo sapiens
  misc_RNA (1)...(19): siRNA sense strand
caagguagcggugguagca

SEQ ID NO: 52278 - RNA, 19 nt, Homo sapiens
  misc_RNA (1)...(19): siRNA sense strand
gcaaguuugacaaccucua

SEQ ID NO: 52279 - RNA, 19 nt, Homo sapiens
  misc_RNA (1)...(19): siRNA sense strand
ugaaggaugaugccauugu

SEQ ID NO: 52280 - RNA, 19 nt, Homo sapiens
  misc_RNA (1)...(19): siRNA sense strand
gacaaacugcccuacaaag

SEQ ID NO: 52281 - RNA, 19 nt, Homo sapiens
  misc_RNA (1)...(19): siRNA sense strand
acaaacugcccuacaaagu

SEQ ID NO: 52282 - RNA, 19 nt, Homo sapiens
  misc_RNA (1)...(19): siRNA sense strand
ggaucacuaccgcuacuga

SEQ ID NO: 52283 - RNA, 19 nt, Homo sapiens
  misc_RNA (1)...(19): siRNA sense strand
ggaugaugccauugugugu

SEQ ID NO: 52284 - RNA, 19 nt, Homo sapiens
  misc_RNA (1)...(19): siRNA sense strand
ucaaggugccugccaucaa

SEQ ID NO: 52285 - RNA, 19 nt, Homo sapiens
  misc_RNA (1)...(19): siRNA sense strand
gagcagaugaaggaugaug

SEQ ID NO: 52286 - RNA, 19 nt, Homo sapiens
  misc_RNA (1)...(19): siRNA sense strand
cugagaagcaagcccagua

SEQ ID NO: 52287 - RNA, 19 nt, Homo sapiens
  misc_RNA (1)...(19): siRNA sense strand
guaacuccuucaccaacca

SEQ ID NO: 52288 - RNA, 19 nt, Homo sapiens
  misc_RNA (1)...(19): siRNA sense strand
ccaagagcaaguuugacaa

SEQ ID NO: 52289 - RNA, 19 nt, Homo sapiens
  misc_RNA (1)...(19): siRNA sense strand
caggagggcaacaucuuug

SEQ ID NO: 52290 - RNA, 19 nt, Homo sapiens
  misc_RNA (1)...(19): siRNA sense strand
cgagaacgccguggagaag

SEQ ID NO: 52291 - RNA, 19 nt, Homo sapiens
  misc_RNA (1)...(19): siRNA sense strand
ggagaaggugaacaucaag

SEQ ID NO: 52292 - RNA, 19 nt, Homo sapiens
  misc_RNA (1)...(19): siRNA sense strand
guggagaaggugaacauca

SEQ ID NO: 52293 - RNA, 19 nt, Homo sapiens
  misc_RNA (1)...(19): siRNA sense strand
aggcuggcauuccggugua

SEQ ID NO: 52294 - RNA, 19 nt, Homo sapiens
  misc_RNA (1)...(19): siRNA sense strand
gcuggcugccugcacauga

SEQ ID NO: 52295 - RNA, 19 nt, Homo sapiens
  misc_RNA (1)...(19): siRNA sense strand
caagagcaaguuugacaac

SEQ ID NO: 52296 - RNA, 19 nt, Homo sapiens
  misc_RNA (1)...(19): siRNA sense strand
ccuucaagccggaucacua

SEQ ID NO: 52297 - RNA, 19 nt, Homo sapiens
  misc_RNA (1)...(19): siRNA sense strand
gugaaguugaccaagcuaa

SEQ ID NO: 52298 - RNA, 19 nt, Homo sapiens
  misc_RNA (1)...(19): siRNA sense strand
acgcaaggcccuggacauu

SEQ ID NO: 52299 - RNA, 19 nt, Homo sapiens
  misc_RNA (1)...(19): siRNA sense strand
gcaaauaugugaaguggaa

SEQ ID NO: 52300 - RNA, 19 nt, Homo sapiens
  misc_RNA (1)...(19): siRNA sense strand
gcagagaacuaggugaaua

SEQ ID NO: 52301 - RNA, 19 nt, Homo sapiens
  misc_RNA (1)...(19): siRNA sense strand
gagcagcaauuucuucuca

SEQ ID NO: 52302 - RNA, 19 nt, Homo sapiens
  misc_RNA (1)...(19): siRNA sense strand
cgacaaagcccugaaguug

SEQ ID NO: 52303 - RNA, 19 nt, Homo sapiens
  misc_RNA (1)...(19): siRNA sense strand
cagcagccguguucacaaa

SEQ ID NO: 52304 - RNA, 19 nt, Homo sapiens
  misc_RNA (1)...(19): siRNA sense strand
cuggagggcuguauuagaa

SEQ ID NO: 52305 - RNA, 19 nt, Homo sapiens
  misc_RNA (1)...(19): siRNA sense strand
gaggucaaguucaccaaga

SEQ ID NO: 52306 - RNA, 19 nt, Homo sapiens
  misc_RNA (1)...(19): siRNA sense strand
ggaaauggcagagaacuag

SEQ ID NO: 52307 - RNA, 19 nt, Homo sapiens
  misc_RNA (1)...(19): siRNA sense strand
caaacccacugucuucuca

SEQ ID NO: 52308 - RNA, 19 nt, Homo sapiens
  misc_RNA (1)...(19): siRNA sense strand
ggaacaccaugguccugaa

SEQ ID NO: 52309 - RNA, 19 nt, Homo sapiens
  misc_RNA (1)...(19): siRNA sense strand
cgaauacacagaagugaaa

SEQ ID NO: 52310 - RNA, 19 nt, Homo sapiens
  misc_RNA (1)...(19): siRNA sense strand
caaguucaccaagauauuu

SEQ ID NO: 52311 - RNA, 19 nt, Homo sapiens
  misc_RNA (1)...(19): siRNA sense strand
gcucagccauggaagacaa

SEQ ID NO: 52312 - RNA, 19 nt, Homo sapiens
  misc_RNA (1)...(19): siRNA sense strand
gaccuggagggcuguauua

SEQ ID NO: 52313 - RNA, 19 nt, Homo sapiens
  misc_RNA (1)...(19): siRNA sense strand
ggaacggucuggaucaacu

SEQ ID NO: 52314 - RNA, 19 nt, Homo sapiens
  misc_RNA (1)...(19): siRNA sense strand
uaucucggcucucugauca

SEQ ID NO: 52315 - RNA, 19 nt, Homo sapiens
  misc_RNA (1)...(19): siRNA sense strand
gaacaggggccucagauug

SEQ ID NO: 52316 - RNA, 19 nt, Homo sapiens
  misc_RNA (1)...(19): siRNA sense strand
gaacauugugccaggauuc

SEQ ID NO: 52317 - RNA, 19 nt, Homo sapiens
  misc_RNA (1)...(19): siRNA sense strand
guauuagaacccucagaua

SEQ ID NO: 52318 - RNA, 19 nt, Homo sapiens
  misc_RNA (1)...(19): siRNA sense strand
ucucagaagucacagacaa

SEQ ID NO: 52319 - RNA, 19 nt, Homo sapiens
  misc_RNA (1)...(19): siRNA sense strand
caucaaacccacugucuuc

SEQ ID NO: 52320 - RNA, 19 nt, Homo sapiens
  misc_RNA (1)...(19): siRNA sense strand
gagcgaauagcaccgacua

SEQ ID NO: 52321 - RNA, 19 nt, Homo sapiens
  misc_RNA (1)...(19): siRNA sense strand
gcaguucgacaaaaucuua

SEQ ID NO: 52322 - RNA, 19 nt, Homo sapiens
  misc_RNA (1)...(19): siRNA sense strand
gucaggaaauggcagagaa

SEQ ID NO: 52323 - RNA, 19 nt, Homo sapiens
  misc_RNA (1)...(19): siRNA sense strand
ggucaaguucaccaagaua

SEQ ID NO: 52324 - RNA, 19 nt, Homo sapiens
  misc_RNA (1)...(19): siRNA sense strand
caaaagcaguucgacaaaa

SEQ ID NO: 52325 - RNA, 19 nt, Homo sapiens
  misc_RNA (1)...(19): siRNA sense strand
gaaguggaagaaggagaua

SEQ ID NO: 52326 - RNA, 19 nt, Homo sapiens
  misc_RNA (1)...(19): siRNA sense strand
ggacuuggcaguggagugu

SEQ ID NO: 52327 - RNA, 19 nt, Homo sapiens
  misc_RNA (1)...(19): siRNA sense strand
uuagaacccucagauacuu

SEQ ID NO: 52328 - RNA, 19 nt, Homo sapiens
  misc_RNA (1)...(19): siRNA sense strand
caggaguggugaacauugu

SEQ ID NO: 52329 - RNA, 19 nt, Homo sapiens
  misc_RNA (1)...(19): siRNA sense strand
aggagcaggucuacucuga

SEQ ID NO: 52330 - RNA, 19 nt, Homo sapiens
  misc_RNA (1)...(19): siRNA sense strand
cguggaguaugccaagaaa

SEQ ID NO: 52331 - RNA, 19 nt, Homo sapiens
  misc_RNA (1)...(19): siRNA sense strand
gcaagaccauccccacaga

SEQ ID NO: 52332 - RNA, 19 nt, Homo sapiens
  misc_RNA (1)...(19): siRNA sense strand
cuacaacgcccucuaugca

SEQ ID NO: 52333 - RNA, 19 nt, Homo sapiens
  misc_RNA (1)...(19): siRNA sense strand
guucaaaaguaucgaagaa

SEQ ID NO: 52334 - RNA, 19 nt, Homo sapiens
  misc_RNA (1)...(19): siRNA sense strand
caacaugcggauugccaaa

SEQ ID NO: 52335 - RNA, 19 nt, Homo sapiens
  misc_RNA (1)...(19): siRNA sense strand
agccauuucuucaugcuuu

SEQ ID NO: 52336 - RNA, 19 nt, Homo sapiens
  misc_RNA (1)...(19): siRNA sense strand
ucucggcucucugaucaaa

SEQ ID NO: 52337 - RNA, 19 nt, Homo sapiens
  misc_RNA (1)...(19): siRNA sense strand
caacucgggagcaaauaug

SEQ ID NO: 52338 - RNA, 19 nt, Homo sapiens
  misc_RNA (1)...(19): siRNA sense strand
aauacgcuuuggccgaaua

SEQ ID NO: 52339 - RNA, 19 nt, Homo sapiens
  misc_RNA (1)...(19): siRNA sense strand
gaucgagagugggaagaag

SEQ ID NO: 52340 - RNA, 19 nt, Homo sapiens
  misc_RNA (1)...(19): siRNA sense strand
acagacaacaugcggauug

SEQ ID NO: 52341 - RNA, 19 nt, Homo sapiens
  misc_RNA (1)...(19): siRNA sense strand
ggauacagggaagccauuu

SEQ ID NO: 52342 - RNA, 19 nt, Homo sapiens
  misc_RNA (1)...(19): siRNA sense strand
ucaaguucaccaagauauu

SEQ ID NO: 52343 - RNA, 19 nt, Homo sapiens
  misc_RNA (1)...(19): siRNA sense strand
aaaagcaguucgacaaaau

SEQ ID NO: 52344 - RNA, 19 nt, Homo sapiens
  misc_RNA (1)...(19): siRNA sense strand
ggccucagauugaucaaaa

SEQ ID NO: 52345 - RNA, 19 nt, Homo sapiens
  misc_RNA (1)...(19): siRNA sense strand
ucggcucucugaucaaaga

SEQ ID NO: 52346 - RNA, 19 nt, Homo sapiens
  misc_RNA (1)...(19): siRNA sense strand
acaugcggauugccaaaga

SEQ ID NO: 52347 - RNA, 19 nt, Homo sapiens
  misc_RNA (1)...(19): siRNA sense strand
ugaacauugugccaggauu

SEQ ID NO: 52348 - RNA, 19 nt, Homo sapiens
  misc_RNA (1)...(19): siRNA sense strand
uccauuugguggcuuuaaa

SEQ ID NO: 52349 - RNA, 19 nt, Homo sapiens
  misc_RNA (1)...(19): siRNA sense strand
ggagcaaauaugugaagug

SEQ ID NO: 52350 - RNA, 19 nt, Homo sapiens
  misc_RNA (1)...(19): siRNA sense strand
ccaucaaacuuggcgacaa

SEQ ID NO: 52351 - RNA, 19 nt, Homo sapiens
  misc_RNA (1)...(19): siRNA sense strand
agaagucacagacaacaug

SEQ ID NO: 52352 - RNA, 19 nt, Homo sapiens
  misc_RNA (1)...(19): siRNA sense strand
gaacaccaugguccugaag

SEQ ID NO: 52353 - RNA, 19 nt, Homo sapiens
  misc_RNA (1)...(19): siRNA sense strand
caucagggaguguucuuca

SEQ ID NO: 52354 - RNA, 19 nt, Homo sapiens
  misc_RNA (1)...(19): siRNA sense strand
uauuagaacccucagauac

SEQ ID NO: 52355 - RNA, 19 nt, Homo sapiens
  misc_RNA (1)...(19): siRNA sense strand
uuggaaaacugguuaaaga

SEQ ID NO: 52356 - RNA, 19 nt, Homo sapiens
  misc_RNA (1)...(19): siRNA sense strand
ucaacaagaucgccuucac

SEQ ID NO: 52357 - RNA, 19 nt, Homo sapiens
  misc_RNA (1)...(19): siRNA sense strand
ccacagagguuggaaaacu

SEQ ID NO: 52358 - RNA, 19 nt, Homo sapiens
  misc_RNA (1)...(19): siRNA sense strand
ugaaaacugucaccaucaa

SEQ ID NO: 52359 - RNA, 19 nt, Homo sapiens
  misc_RNA (1)...(19): siRNA sense strand
gaauacgcuuuggccgaau

SEQ ID NO: 52360 - RNA, 19 nt, Homo sapiens
  misc_RNA (1)...(19): siRNA sense strand
aaaguuugcuacauguaac

SEQ ID NO: 52361 - RNA, 19 nt, Homo sapiens
  misc_RNA (1)...(19): siRNA sense strand
ucaaaaguaucgaagaagu

SEQ ID NO: 52362 - RNA, 19 nt, Homo sapiens
  misc_RNA (1)...(19): siRNA sense strand
acaaggggcucuucaucaa

SEQ ID NO: 52363 - RNA, 19 nt, Homo sapiens
  misc_RNA (1)...(19): siRNA sense strand
ggacgcugacuuggacuug

SEQ ID NO: 52364 - RNA, 19 nt, Homo sapiens
  misc_RNA (1)...(19): siRNA sense strand
gacaacgucguaugcuuca

SEQ ID NO: 52365 - RNA, 19 nt, Homo sapiens
  misc_RNA (1)...(19): siRNA sense strand
gcuuuaaaaugucaggaaa

SEQ ID NO: 52366 - RNA, 19 nt, Homo sapiens
  misc_RNA (1)...(19): siRNA sense strand
caccgacuauggacucaca

SEQ ID NO: 52367 - RNA, 19 nt, Homo sapiens
  misc_RNA (1)...(19): siRNA sense strand
ccaggaguggugaacauug

SEQ ID NO: 52368 - RNA, 19 nt, Homo sapiens
  misc_RNA (1)...(19): siRNA sense strand
caccaggcaugagcccauu

SEQ ID NO: 52369 - RNA, 19 nt, Homo sapiens
  misc_RNA (1)...(19): siRNA sense strand
ccgaauacacagaagugaa

SEQ ID NO: 52370 - RNA, 19 nt, Homo sapiens
  misc_RNA (1)...(19): siRNA sense strand
uggcagagaacuaggugaa

SEQ ID NO: 52371 - RNA, 19 nt, Homo sapiens
  misc_RNA (1)...(19): siRNA sense strand
acccucagaucaacaagau

SEQ ID NO: 52372 - RNA, 19 nt, Homo sapiens
  misc_RNA (1)...(19): siRNA sense strand
ugaaguggaagaaggagau

SEQ ID NO: 52373 - RNA, 19 nt, Homo sapiens
  misc_RNA (1)...(19): siRNA sense strand
ucaacucgggagcaaauau

SEQ ID NO: 52374 - RNA, 19 nt, Homo sapiens
  misc_RNA (1)...(19): siRNA sense strand
acagugggagcagcaauuu

SEQ ID NO: 52375 - RNA, 19 nt, Homo sapiens
  misc_RNA (1)...(19): siRNA sense strand
gggagcaaauaugugaagu

SEQ ID NO: 52376 - RNA, 19 nt, Homo sapiens
  misc_RNA (1)...(19): siRNA sense strand
cagaugacaacgucguaug

SEQ ID NO: 52377 - RNA, 19 nt, Homo sapiens
  misc_RNA (1)...(19): siRNA sense strand
ggccgaauacacagaagug

SEQ ID NO: 52378 - RNA, 19 nt, Homo sapiens
  misc_RNA (1)...(19): siRNA sense strand
gauacagggaagccauuuc

SEQ ID NO: 52379 - RNA, 19 nt, Homo sapiens
  misc_RNA (1)...(19): siRNA sense strand
gaacggucuggaucaacug

SEQ ID NO: 52380 - RNA, 19 nt, Homo sapiens
  misc_RNA (1)...(19): siRNA sense strand
ugcaaccaauacugaaguu

SEQ ID NO: 52381 - RNA, 19 nt, Homo sapiens
  misc_RNA (1)...(19): siRNA sense strand
ggagaccccuucgauguca

SEQ ID NO: 52382 - RNA, 19 nt, Homo sapiens
  misc_RNA (1)...(19): siRNA sense strand
gcguggaguaugccaagaa

SEQ ID NO: 52383 - RNA, 19 nt, Homo sapiens
  misc_RNA (1)...(19): siRNA sense strand
cgaccuggagggcuguauu

SEQ ID NO: 52384 - RNA, 19 nt, Homo sapiens
  misc_RNA (1)...(19): siRNA sense strand
cacagugggagcagcaauu

SEQ ID NO: 52385 - RNA, 19 nt, Homo sapiens
  misc_RNA (1)...(19): siRNA sense strand
gcccuggagacgauggaua

SEQ ID NO: 52386 - RNA, 19 nt, Homo sapiens
  misc_RNA (1)...(19): siRNA sense strand
cggucuggaucaacugcua

SEQ ID NO: 52387 - RNA, 19 nt, Homo sapiens
  misc_RNA (1)...(19): siRNA sense strand
gucaaguucaccaagauau

SEQ ID NO: 52388 - RNA, 19 nt, Homo sapiens
  misc_RNA (1)...(19): siRNA sense strand
gcaagaacgucgagaagau

SEQ ID NO: 52389 - RNA, 19 nt, Homo sapiens
  misc_RNA (1)...(19): siRNA sense strand
caucggagauuagcaagaa

SEQ ID NO: 52390 - RNA, 19 nt, Homo sapiens
  misc_RNA (1)...(19): siRNA sense strand
ggacgaggccaucgaguuc

SEQ ID NO: 52391 - RNA, 19 nt, Homo sapiens
  misc_RNA (1)...(19): siRNA sense strand
ggaacuguguggugcugaa

SEQ ID NO: 52392 - RNA, 19 nt, Homo sapiens
  misc_RNA (1)...(19): siRNA sense strand
ggagauggagccugugaug

SEQ ID NO: 52393 - RNA, 19 nt, Homo sapiens
  misc_RNA (1)...(19): siRNA sense strand
gagcacagguucgacuaca

SEQ ID NO: 52394 - RNA, 19 nt, Homo sapiens
  misc_RNA (1)...(19): siRNA sense strand
cugaagccaucggagauua

SEQ ID NO: 52395 - RNA, 19 nt, Homo sapiens
  misc_RNA (1)...(19): siRNA sense strand
gcacagguucgacuacauc

SEQ ID NO: 52396 - RNA, 19 nt, Homo sapiens
  misc_RNA (1)...(19): siRNA sense strand
caccaucacccguuucuau

SEQ ID NO: 52397 - RNA, 19 nt, Homo sapiens
  misc_RNA (1)...(19): siRNA sense strand
ggccugguccucaucauug

SEQ ID NO: 52398 - RNA, 19 nt, Homo sapiens
  misc_RNA (1)...(19): siRNA sense strand
gggcaagauuguuaugacu

SEQ ID NO: 52399 - RNA, 19 nt, Homo sapiens
  misc_RNA (1)...(19): siRNA sense strand
cgugugggcaagauuguua

SEQ ID NO: 52400 - RNA, 19 nt, Homo sapiens
  misc_RNA (1)...(19): siRNA sense strand
ggaacuauccgcugaaccu

SEQ ID NO: 52401 - RNA, 19 nt, Homo sapiens
  misc_RNA (1)...(19): siRNA sense strand
agagcaccaucacccguuu

SEQ ID NO: 52402 - RNA, 19 nt, Homo sapiens
  misc_RNA (1)...(19): siRNA sense strand
cagguucgacuacaucuuc

SEQ ID NO: 52403 - RNA, 19 nt, Homo sapiens
  misc_RNA (1)...(19): siRNA sense strand
cagcuggacuccgccuuca

SEQ ID NO: 52404 - RNA, 19 nt, Homo sapiens
  misc_RNA (1)...(19): siRNA sense strand
ucauugcgcccuggaacua

SEQ ID NO: 52405 - RNA, 19 nt, Homo sapiens
  misc_RNA (1)...(19): siRNA sense strand
gcugaagccaucggagauu

SEQ ID NO: 52406 - RNA, 19 nt, Homo sapiens
  misc_RNA (1)...(19): siRNA sense strand
caagaacgucgagaagauc

SEQ ID NO: 52407 - RNA, 19 nt, Homo sapiens
  misc_RNA (1)...(19): siRNA sense strand
ccgguaccauggcaaguuc

SEQ ID NO: 52408 - RNA, 19 nt, Homo sapiens
  misc_RNA (1)...(19): siRNA sense strand
ccgaggugcugccccaaua

SEQ ID NO: 52409 - RNA, 19 nt, Homo sapiens
  misc_RNA (1)...(19): siRNA sense strand
cgacuacaucuucuucaca

SEQ ID NO: 52410 - RNA, 19 nt, Homo sapiens
  misc_RNA (1)...(19): siRNA sense strand
ggaacgacggcuucaugca

SEQ ID NO: 52411 - RNA, 19 nt, Homo sapiens
  misc_RNA (1)...(19): siRNA sense strand
gcuggacuccgccuucauc

SEQ ID NO: 52412 - RNA, 19 nt, Homo sapiens
  misc_RNA (1)...(19): siRNA sense strand
ucaucaaccagaaacaguu

SEQ ID NO: 52413 - RNA, 19 nt, Homo sapiens
  misc_RNA (1)...(19): siRNA sense strand
caucaaccagaaacaguuc

SEQ ID NO: 52414 - RNA, 19 nt, Homo sapiens
  misc_RNA (1)...(19): siRNA sense strand
gcaaugagggcuucaccua

SEQ ID NO: 52415 - RNA, 19 nt, Homo sapiens
  misc_RNA (1)...(19): siRNA sense strand
ggacgaggccaucaaguuc

SEQ ID NO: 52416 - RNA, 19 nt, Homo sapiens
  misc_RNA (1)...(19): siRNA sense strand
gagcugcacccuccuguga

SEQ ID NO: 52417 - RNA, 19 nt, Homo sapiens
  misc_RNA (1)...(19): siRNA sense strand
caaguuggacuacaucuuc

SEQ ID NO: 52418 - RNA, 19 nt, Homo sapiens
  misc_RNA (1)...(19): siRNA sense strand
gagcacaaguuggacuaca

SEQ ID NO: 52419 - RNA, 19 nt, Homo sapiens
  misc_RNA (1)...(19): siRNA sense strand
caccaucacccguuucuau

SEQ ID NO: 52420 - RNA, 19 nt, Homo sapiens
  misc_RNA (1)...(19): siRNA sense strand
gggcuucaccuacauaucu

SEQ ID NO: 52421 - RNA, 19 nt, Homo sapiens
  misc_RNA (1)...(19): siRNA sense strand
ggacuacaucuucuucaca

SEQ ID NO: 52422 - RNA, 19 nt, Homo sapiens
  misc_RNA (1)...(19): siRNA sense strand
aaugagggcuucaccuaca

SEQ ID NO: 52423 - RNA, 19 nt, Homo sapiens
  misc_RNA (1)...(19): siRNA sense strand
gcacaaguuggacuacauc

SEQ ID NO: 52424 - RNA, 19 nt, Homo sapiens
  misc_RNA (1)...(19): siRNA sense strand
ggagacagggcagcugcua

SEQ ID NO: 52425 - RNA, 19 nt, Homo sapiens
  misc_RNA (1)...(19): siRNA sense strand
ggagacggagccugugaug

SEQ ID NO: 52426 - RNA, 19 nt, Homo sapiens
  misc_RNA (1)...(19): siRNA sense strand
gggcaagauugucaugacu

SEQ ID NO: 52427 - RNA, 19 nt, Homo sapiens
  misc_RNA (1)...(19): siRNA sense strand
agacggagccugugaugca

SEQ ID NO: 52428 - RNA, 19 nt, Homo sapiens
  misc_RNA (1)...(19): siRNA sense strand
agacagggcagcugcuaga

SEQ ID NO: 52429 - RNA, 19 nt, Homo sapiens
  misc_RNA (1)...(19): siRNA sense strand
agagcaccaucacccguuu

SEQ ID NO: 52430 - RNA, 19 nt, Homo sapiens
  misc_RNA (1)...(19): siRNA sense strand
uggacgaggccaucaaguu

SEQ ID NO: 52431 - RNA, 19 nt, Homo sapiens
  misc_RNA (1)...(19): siRNA sense strand
gacgaggccaucaaguuca

SEQ ID NO: 52432 - RNA, 19 nt, Homo sapiens
  misc_RNA (1)...(19): siRNA sense strand
gauccgcuacccacccuau

SEQ ID NO: 52433 - RNA, 19 nt, Homo sapiens
  misc_RNA (1)...(19): siRNA sense strand
uggagaaauuaaaggagau

SEQ ID NO: 52434 - RNA, 19 nt, Homo sapiens
  misc_RNA (1)...(19): siRNA sense strand
ucaucaaccagaaacaguu

SEQ ID NO: 52435 - RNA, 19 nt, Homo sapiens
  misc_RNA (1)...(19): siRNA sense strand
ugagggcuucaccuacaua

SEQ ID NO: 52436 - RNA, 19 nt, Homo sapiens
  misc_RNA (1)...(19): siRNA sense strand
caucaaccagaaacaguuc

SEQ ID NO: 52437 - RNA, 19 nt, Homo sapiens
  misc_RNA (1)...(19): siRNA sense strand
caugagaccuuguguauua

SEQ ID NO: 52438 - RNA, 19 nt, Homo sapiens
  misc_RNA (1)...(19): siRNA sense strand
gaagucggcuccagcauua

SEQ ID NO: 52439 - RNA, 19 nt, Homo sapiens
  misc_RNA (1)...(19): siRNA sense strand
gcagggugcuaaaguguua

SEQ ID NO: 52440 - RNA, 19 nt, Homo sapiens
  misc_RNA (1)...(19): siRNA sense strand
aaacagacccaaaggauua

SEQ ID NO: 52441 - RNA, 19 nt, Homo sapiens
  misc_RNA (1)...(19): siRNA sense strand
guaaugccauggucuuuaa

SEQ ID NO: 52442 - RNA, 19 nt, Homo sapiens
  misc_RNA (1)...(19): siRNA sense strand
ggagaugggugauguggaa

SEQ ID NO: 52443 - RNA, 19 nt, Homo sapiens
  misc_RNA (1)...(19): siRNA sense strand
gcugggacgugcuucauua

SEQ ID NO: 52444 - RNA, 19 nt, Homo sapiens
  misc_RNA (1)...(19): siRNA sense strand
ggauggauauuacaugaga

SEQ ID NO: 52445 - RNA, 19 nt, Homo sapiens
  misc_RNA (1)...(19): siRNA sense strand
ggaaguaaauuuggcuguu

SEQ ID NO: 52446 - RNA, 19 nt, Homo sapiens
  misc_RNA (1)...(19): siRNA sense strand
ggacgugcuucauuaacaa

SEQ ID NO: 52447 - RNA, 19 nt, Homo sapiens
  misc_RNA (1)...(19): siRNA sense strand
gaaguaaauuuggcuguuc

SEQ ID NO: 52448 - RNA, 19 nt, Homo sapiens
  misc_RNA (1)...(19): siRNA sense strand
gaccuuguguauuaacuaa

SEQ ID NO: 52449 - RNA, 19 nt, Homo sapiens
  misc_RNA (1)...(19): siRNA sense strand
gaaacagacccaaaggauu

SEQ ID NO: 52450 - RNA, 19 nt, Homo sapiens
  misc_RNA (1)...(19): siRNA sense strand
gugugacaaucgaauauua

SEQ ID NO: 52451 - RNA, 19 nt, Homo sapiens
  misc_RNA (1)...(19): siRNA sense strand
ucauggagaugucagcuaa

SEQ ID NO: 52452 - RNA, 19 nt, Homo sapiens
  misc_RNA (1)...(19): siRNA sense strand
gauauaagaagucaggauu

SEQ ID NO: 52453 - RNA, 19 nt, Homo sapiens
  misc_RNA (1)...(19): siRNA sense strand
guuaugugguggagauaua

SEQ ID NO: 52454 - RNA, 19 nt, Homo sapiens
  misc_RNA (1)...(19): siRNA sense strand
cuagaaagagccaaugaua

SEQ ID NO: 52455 - RNA, 19 nt, Homo sapiens
  misc_RNA (1)...(19): siRNA sense strand
gaugucagcuaaaggaauc

SEQ ID NO: 52456 - RNA, 19 nt, Homo sapiens
  misc_RNA (1)...(19): siRNA sense strand
ugucgcagccgcucaauua

SEQ ID NO: 52457 - RNA, 19 nt, Homo sapiens
  misc_RNA (1)...(19): siRNA sense strand
aaaggaaucaaaccuguua

SEQ ID NO: 52458 - RNA, 19 nt, Homo sapiens
  misc_RNA (1)...(19): siRNA sense strand
uauaagaagucaggauuug

SEQ ID NO: 52459 - RNA, 19 nt, Homo sapiens
  misc_RNA (1)...(19): siRNA sense strand
ggaacgggaggaugaaauu

SEQ ID NO: 52460 - RNA, 19 nt, Homo sapiens
  misc_RNA (1)...(19): siRNA sense strand
acuagcagcuggcgucuuu

SEQ ID NO: 52461 - RNA, 19 nt, Homo sapiens
  misc_RNA (1)...(19): siRNA sense strand
gagacgacaugaccugugu

SEQ ID NO: 52462 - RNA, 19 nt, Homo sapiens
  misc_RNA (1)...(19): siRNA sense strand
ggagaugucagcuaaagga

SEQ ID NO: 52463 - RNA, 19 nt, Homo sapiens
  misc_RNA (1)...(19): siRNA sense strand
ggaagucggcuccagcauu

SEQ ID NO: 52464 - RNA, 19 nt, Homo sapiens
  misc_RNA (1)...(19): siRNA sense strand
gagcguugccgaauccuuu

SEQ ID NO: 52465 - RNA, 19 nt, Homo sapiens
  misc_RNA (1)...(19): siRNA sense strand
cagaggaaguggugaaaca

SEQ ID NO: 52466 - RNA, 19 nt, Homo sapiens
  misc_RNA (1)...(19): siRNA sense strand
ccagguggaucguuugguu

SEQ ID NO: 52467 - RNA, 19 nt, Homo sapiens
  misc_RNA (1)...(19): siRNA sense strand
ggaugaaauugcuacuaug

SEQ ID NO: 52468 - RNA, 19 nt, Homo sapiens
  misc_RNA (1)...(19): siRNA sense strand
gauaugaacaaugcuguaa

SEQ ID NO: 52469 - RNA, 19 nt, Homo sapiens
  misc_RNA (1)...(19): siRNA sense strand
gauagcuacuuucacaugu

SEQ ID NO: 52470 - RNA, 19 nt, Homo sapiens
  misc_RNA (1)...(19): siRNA sense strand
gcuacuggcugaaaucuac

SEQ ID NO: 52471 - RNA, 19 nt, Homo sapiens
  misc_RNA (1)...(19): siRNA sense strand
gcucccagguggaucguuu

SEQ ID NO: 52472 - RNA, 19 nt, Homo sapiens
  misc_RNA (1)...(19): siRNA sense strand
gaaucaaaccuguuaccuu

SEQ ID NO: 52473 - RNA, 19 nt, Homo sapiens
  misc_RNA (1)...(19): siRNA sense strand
gaacggccgugugacaauc

SEQ ID NO: 52474 - RNA, 19 nt, Homo sapiens
  misc_RNA (1)...(19): siRNA sense strand
cugaagaucccaaauuaaa

SEQ ID NO: 52475 - RNA, 19 nt, Homo sapiens
  misc_RNA (1)...(19): siRNA sense strand
accugaagaucccaaauua

SEQ ID NO: 52476 - RNA, 19 nt, Homo sapiens
  misc_RNA (1)...(19): siRNA sense strand
gaguauuugugcagaaaga

SEQ ID NO: 52477 - RNA, 19 nt, Homo sapiens
  misc_RNA (1)...(19): siRNA sense strand
cuuuaaaccuucucccuuu

SEQ ID NO: 52478 - RNA, 19 nt, Homo sapiens
  misc_RNA (1)...(19): siRNA sense strand
gaacuaccccuuucagauu

SEQ ID NO: 52479 - RNA, 19 nt, Homo sapiens
  misc_RNA (1)...(19): siRNA sense strand
caagaguauuugugcagaa

SEQ ID NO: 52480 - RNA, 19 nt, Homo sapiens
  misc_RNA (1)...(19): siRNA sense strand
gccauggucuuuaaaccuu

SEQ ID NO: 52481 - RNA, 19 nt, Homo sapiens
  misc_RNA (1)...(19): siRNA sense strand
gguaaugccauggucuuua

SEQ ID NO: 52482 - RNA, 19 nt, Homo sapiens
  misc_RNA (1)...(19): siRNA sense strand
aaggauggauauuacauga

SEQ ID NO: 52483 - RNA, 19 nt, Homo sapiens
  misc_RNA (1)...(19): siRNA sense strand
gggacgugcuucauuaaca

SEQ ID NO: 52484 - RNA, 19 nt, Homo sapiens
  misc_RNA (1)...(19): siRNA sense strand
gagccaaugauaccacuuu

SEQ ID NO: 52485 - RNA, 19 nt, Homo sapiens
  misc_RNA (1)...(19): siRNA sense strand
uaagggaacgggaggauga

SEQ ID NO: 52486 - RNA, 19 nt, Homo sapiens
  misc_RNA (1)...(19): siRNA sense strand
gaagaucccaaauuaaagg

SEQ ID NO: 52487 - RNA, 19 nt, Homo sapiens
  misc_RNA (1)...(19): siRNA sense strand
aggaugaaauugcuacuau

SEQ ID NO: 52488 - RNA, 19 nt, Homo sapiens
  misc_RNA (1)...(19): siRNA sense strand
aggcaaaucuccacucauc

SEQ ID NO: 52489 - RNA, 19 nt, Homo sapiens
  misc_RNA (1)...(19): siRNA sense strand
cagauugccucuuggaagu

SEQ ID NO: 52490 - RNA, 19 nt, Homo sapiens
  misc_RNA (1)...(19): siRNA sense strand
gaggcugccaggauaauaa

SEQ ID NO: 52491 - RNA, 19 nt, Homo sapiens
  misc_RNA (1)...(19): siRNA sense strand
gcaaaucuccacucaucau

SEQ ID NO: 52492 - RNA, 19 nt, Homo sapiens
  misc_RNA (1)...(19): siRNA sense strand
ggccagguuugcuguaaug

SEQ ID NO: 52493 - RNA, 19 nt, Homo sapiens
  misc_RNA (1)...(19): siRNA sense strand
aagcugagguucuagaaag

SEQ ID NO: 52494 - RNA, 19 nt, Homo sapiens
  misc_RNA (1)...(19): siRNA sense strand
ggagcgaguccuuggguuu

SEQ ID NO: 52495 - RNA, 19 nt, Homo sapiens
  misc_RNA (1)...(19): siRNA sense strand
ucaaaccuguuaccuugga

SEQ ID NO: 52496 - RNA, 19 nt, Homo sapiens
  misc_RNA (1)...(19): siRNA sense strand
gaagcugagguucuagaaa

SEQ ID NO: 52497 - RNA, 19 nt, Homo sapiens
  misc_RNA (1)...(19): siRNA sense strand
ccaaauuaaaggauggaua

SEQ ID NO: 52498 - RNA, 19 nt, Homo sapiens
  misc_RNA (1)...(19): siRNA sense strand
uaugaacaaugcuguaaag

SEQ ID NO: 52499 - RNA, 19 nt, Homo sapiens
  misc_RNA (1)...(19): siRNA sense strand
ccuguuaccuuggaacuug

SEQ ID NO: 52500 - RNA, 19 nt, Homo sapiens
  misc_RNA (1)...(19): siRNA sense strand
gccgagugauagcuacuuu

SEQ ID NO: 52501 - RNA, 19 nt, Homo sapiens
  misc_RNA (1)...(19): siRNA sense strand
cgacaugaccugugugaag

SEQ ID NO: 52502 - RNA, 19 nt, Homo sapiens
  misc_RNA (1)...(19): siRNA sense strand
uuacaccuguuucugcauu

SEQ ID NO: 52503 - RNA, 19 nt, Homo sapiens
  misc_RNA (1)...(19): siRNA sense strand
ccaguggaguugcccuuug

SEQ ID NO: 52504 - RNA, 19 nt, Homo sapiens
  misc_RNA (1)...(19): siRNA sense strand
gaacgggaggaugaaauug

SEQ ID NO: 52505 - RNA, 19 nt, Homo sapiens
  misc_RNA (1)...(19): siRNA sense strand
ugguggagauauauaugua

SEQ ID NO: 52506 - RNA, 19 nt, Homo sapiens
  misc_RNA (1)...(19): siRNA sense strand
uuuggaggcugccaggaua

SEQ ID NO: 52507 - RNA, 19 nt, Homo sapiens
  misc_RNA (1)...(19): siRNA sense strand
ugaccugugugaaggaaga

SEQ ID NO: 52508 - RNA, 19 nt, Homo sapiens
  misc_RNA (1)...(19): siRNA sense strand
ugaaacagacccaaaggau

SEQ ID NO: 52509 - RNA, 19 nt, Homo sapiens
  misc_RNA (1)...(19): siRNA sense strand
uaauggcacaagaguauuu

SEQ ID NO: 52510 - RNA, 19 nt, Homo sapiens
  misc_RNA (1)...(19): siRNA sense strand
uguaauggcacaagaguau

SEQ ID NO: 52511 - RNA, 19 nt, Homo sapiens
  misc_RNA (1)...(19): siRNA sense strand
gaacuuggaggcaaaucuc

SEQ ID NO: 52512 - RNA, 19 nt, Homo sapiens
  misc_RNA (1)...(19): siRNA sense strand
gaauaggagcauggaacua

SEQ ID NO: 52513 - RNA, 19 nt, Homo sapiens
  misc_RNA (1)...(19): siRNA sense strand
agagagaacggccguguga

SEQ ID NO: 52514 - RNA, 19 nt, Homo sapiens
  misc_RNA (1)...(19): siRNA sense strand
gaugaaauugcuacuaugg

SEQ ID NO: 52515 - RNA, 19 nt, Homo sapiens
  misc_RNA (1)...(19): siRNA sense strand
ggaggcugccaggauaaua

SEQ ID NO: 52516 - RNA, 19 nt, Homo sapiens
  misc_RNA (1)...(19): siRNA sense strand
gguggaucguuugguuaua

SEQ ID NO: 52517 - RNA, 19 nt, Homo sapiens
  misc_RNA (1)...(19): siRNA sense strand
cuccugggcucuucaaugu

SEQ ID NO: 52518 - RNA, 19 nt, Homo sapiens
  misc_RNA (1)...(19): siRNA sense strand
cacugaagcugagguucua

SEQ ID NO: 52519 - RNA, 19 nt, Homo sapiens
  misc_RNA (1)...(19): siRNA sense strand
ccuuucagauugccucuug

SEQ ID NO: 52520 - RNA, 19 nt, Homo sapiens
  misc_RNA (1)...(19): siRNA sense strand
uagcuacuuucacauguuc

SEQ ID NO: 52521 - RNA, 19 nt, Homo sapiens
  misc_RNA (1)...(19): siRNA sense strand
aagaguauuugugcagaaa

SEQ ID NO: 52522 - RNA, 19 nt, Homo sapiens
  misc_RNA (1)...(19): siRNA sense strand
aaagucuccuucacuggaa

SEQ ID NO: 52523 - RNA, 19 nt, Homo sapiens
  misc_RNA (1)...(19): siRNA sense strand
uuucacauguucaggagaa

SEQ ID NO: 52524 - RNA, 19 nt, Homo sapiens
  misc_RNA (1)...(19): siRNA sense strand
gugcuucauuaacaacuau

SEQ ID NO: 52525 - RNA, 19 nt, Homo sapiens
  misc_RNA (1)...(19): siRNA sense strand
gaggaugaaauugcuacua

SEQ ID NO: 52526 - RNA, 19 nt, Homo sapiens
  misc_RNA (1)...(19): siRNA sense strand
gaggaaguggugaaacaga

SEQ ID NO: 52527 - RNA, 19 nt, Homo sapiens
  misc_RNA (1)...(19): siRNA sense strand
ggaauaggagcauggaacu

SEQ ID NO: 52528 - RNA, 19 nt, Homo sapiens
  misc_RNA (1)...(19): siRNA sense strand
gagaacggccgugugacaa

SEQ ID NO: 52529 - RNA, 19 nt, Homo sapiens
  misc_RNA (1)...(19): siRNA sense strand
gagcgaguccuuggguuug

SEQ ID NO: 52530 - RNA, 19 nt, Homo sapiens
  misc_RNA (1)...(19): siRNA sense strand
aaucuccacucaucaucuu

SEQ ID NO: 52531 - RNA, 19 nt, Homo sapiens
  misc_RNA (1)...(19): siRNA sense strand
cgagugauagcuacuuuca

SEQ ID NO: 52532 - RNA, 19 nt, Homo sapiens
  misc_RNA (1)...(19): siRNA sense strand
gaagaucauggagauguca

SEQ ID NO: 52533 - RNA, 19 nt, Homo sapiens
  misc_RNA (1)...(19): siRNA sense strand
ggauauuacaugagaccuu

SEQ ID NO: 52534 - RNA, 19 nt, Homo sapiens
  misc_RNA (1)...(19): siRNA sense strand
uaaaggaaucaaaccuguu

SEQ ID NO: 52535 - RNA, 19 nt, Homo sapiens
  misc_RNA (1)...(19): siRNA sense strand
gaucuuugggccuguuaug

SEQ ID NO: 52536 - RNA, 19 nt, Homo sapiens
  misc_RNA (1)...(19): siRNA sense strand
gaugggugauguggaaucu

SEQ ID NO: 52537 - RNA, 19 nt, Homo sapiens
  misc_RNA (1)...(19): siRNA sense strand
caaaggagauuaugagaaa

SEQ ID NO: 52538 - RNA, 19 nt, Homo sapiens
  misc_RNA (1)...(19): siRNA sense strand
gaagagagaucuggccaaa

SEQ ID NO: 52539 - RNA, 19 nt, Homo sapiens
  misc_RNA (1)...(19): siRNA sense strand
gagaggaacugaagagaga

SEQ ID NO: 52540 - RNA, 19 nt, Homo sapiens
  misc_RNA (1)...(19): siRNA sense strand
gcaauuugaugcugaugaa

SEQ ID NO: 52541 - RNA, 19 nt, Homo sapiens
  misc_RNA (1)...(19): siRNA sense strand
gaagauacucuaauugaga

SEQ ID NO: 52542 - RNA, 19 nt, Homo sapiens
  misc_RNA (1)...(19): siRNA sense strand
agagagaucuggccaaaga

SEQ ID NO: 52543 - RNA, 19 nt, Homo sapiens
  misc_RNA (1)...(19): siRNA sense strand
ccaaagacauaaccucaga

SEQ ID NO: 52544 - RNA, 19 nt, Homo sapiens
  misc_RNA (1)...(19): siRNA sense strand
gcaggaauauguucaaacu

SEQ ID NO: 52545 - RNA, 19 nt, Homo sapiens
  misc_RNA (1)...(19): siRNA sense strand
aagcaggccugguuuauug

SEQ ID NO: 52546 - RNA, 19 nt, Homo sapiens
  misc_RNA (1)...(19): siRNA sense strand
ggaugaaacacuuaagaaa

SEQ ID NO: 52547 - RNA, 19 nt, Homo sapiens
  misc_RNA (1)...(19): siRNA sense strand
agaaaugccucacagcuau

SEQ ID NO: 52548 - RNA, 19 nt, Homo sapiens
  misc_RNA (1)...(19): siRNA sense strand
gagaaaugccucacagcua

SEQ ID NO: 52549 - RNA, 19 nt, Homo sapiens
  misc_RNA (1)...(19): siRNA sense strand
guucugaaauugacaugaa

SEQ ID NO: 52550 - RNA, 19 nt, Homo sapiens
  misc_RNA (1)...(19): siRNA sense strand
gaaaggugacauugagaaa

SEQ ID NO: 52551 - RNA, 19 nt, Homo sapiens
  misc_RNA (1)...(19): siRNA sense strand
gaagugcgccacaagcaaa

SEQ ID NO: 52552 - RNA, 19 nt, Homo sapiens
  misc_RNA (1)...(19): siRNA sense strand
ugaccgaucugaggacuuu

SEQ ID NO: 52553 - RNA, 19 nt, Homo sapiens
  misc_RNA (1)...(19): siRNA sense strand
gagcaggaauauguucaaa

SEQ ID NO: 52554 - RNA, 19 nt, Homo sapiens
  misc_RNA (1)...(19): siRNA sense strand
gaaaucagagacauuaaca

SEQ ID NO: 52555 - RNA, 19 nt, Homo sapiens
  misc_RNA (1)...(19): siRNA sense strand
cagcauaucuccaggaaac

SEQ ID NO: 52556 - RNA, 19 nt, Homo sapiens
  misc_RNA (1)...(19): siRNA sense strand
ggacuuuggugugaaugaa

SEQ ID NO: 52557 - RNA, 19 nt, Homo sapiens
  misc_RNA (1)...(19): siRNA sense strand
cagaagcuauccacaacuu

SEQ ID NO: 52558 - RNA, 19 nt, Homo sapiens
  misc_RNA (1)...(19): siRNA sense strand
caaagguggucccggauca

SEQ ID NO: 52559 - RNA, 19 nt, Homo sapiens
  misc_RNA (1)...(19): siRNA sense strand
gaucaaagcagcauaucuc

SEQ ID NO: 52560 - RNA, 19 nt, Homo sapiens
  misc_RNA (1)...(19): siRNA sense strand
gcagagaagcuucaucaag

SEQ ID NO: 52561 - RNA, 19 nt, Homo sapiens
  misc_RNA (1)...(19): siRNA sense strand
gaacucgccauaaggcauu

SEQ ID NO: 52562 - RNA, 19 nt, Homo sapiens
  misc_RNA (1)...(19): siRNA sense strand
gguuaaagguguggaugaa

SEQ ID NO: 52563 - RNA, 19 nt, Homo sapiens
  misc_RNA (1)...(19): siRNA sense strand
caaagaaaucagagacauu

SEQ ID NO: 52564 - RNA, 19 nt, Homo sapiens
  misc_RNA (1)...(19): siRNA sense strand
caucaagaacuaacaaaga

SEQ ID NO: 52565 - RNA, 19 nt, Homo sapiens
  misc_RNA (1)...(19): siRNA sense strand
gaugaaacacuuaagaaag

SEQ ID NO: 52566 - RNA, 19 nt, Homo sapiens
  misc_RNA (1)...(19): siRNA sense strand
ggaugucgcugccuugcau

SEQ ID NO: 52567 - RNA, 19 nt, Homo sapiens
  misc_RNA (1)...(19): siRNA sense strand
ccaaguacaguaagcauga

SEQ ID NO: 52568 - RNA, 19 nt, Homo sapiens
  misc_RNA (1)...(19): siRNA sense strand
gaagcaaccaucauugaca

SEQ ID NO: 52569 - RNA, 19 nt, Homo sapiens
  misc_RNA (1)...(19): siRNA sense strand
uaucagaagauguauggua

SEQ ID NO: 52570 - RNA, 19 nt, Homo sapiens
  misc_RNA (1)...(19): siRNA sense strand
caugaaagguguuggaacu

SEQ ID NO: 52571 - RNA, 19 nt, Homo sapiens
  misc_RNA (1)...(19): siRNA sense strand
guaaacguguucaauacca

SEQ ID NO: 52572 - RNA, 19 nt, Homo sapiens
  misc_RNA (1)...(19): siRNA sense strand
aggaauauguucaaacugu

SEQ ID NO: 52573 - RNA, 19 nt, Homo sapiens
  misc_RNA (1)...(19): siRNA sense strand
agacauaaccucagacaca

SEQ ID NO: 52574 - RNA, 19 nt, Homo sapiens
  misc_RNA (1)...(19): siRNA sense strand
gaauauguucaaacuguga

SEQ ID NO: 52575 - RNA, 19 nt, Homo sapiens
  misc_RNA (1)...(19): siRNA sense strand
guugaaaggugacauugag

SEQ ID NO: 52576 - RNA, 19 nt, Homo sapiens
  misc_RNA (1)...(19): siRNA sense strand
uaacuaagcgaaacaaugc

SEQ ID NO: 52577 - RNA, 19 nt, Homo sapiens
  misc_RNA (1)...(19): siRNA sense strand
gcauugaucaggauuaugg

SEQ ID NO: 52578 - RNA, 19 nt, Homo sapiens
  misc_RNA (1)...(19): siRNA sense strand
uaucagaauuccucaagca

SEQ ID NO: 52579 - RNA, 19 nt, Homo sapiens
  misc_RNA (1)...(19): siRNA sense strand
gaugaagauacucuaauug

SEQ ID NO: 52580 - RNA, 19 nt, Homo sapiens
  misc_RNA (1)...(19): siRNA sense strand
gcacagcgucaacagauca

SEQ ID NO: 52581 - RNA, 19 nt, Homo sapiens
  misc_RNA (1)...(19): siRNA sense strand
gaacugaugaagauacucu

SEQ ID NO: 52582 - RNA, 19 nt, Homo sapiens
  misc_RNA (1)...(19): siRNA sense strand
gaagagcaggaauauguuc

SEQ ID NO: 52583 - RNA, 19 nt, Homo sapiens
  misc_RNA (1)...(19): siRNA sense strand
gacauaaccucagacacau

SEQ ID NO: 52584 - RNA, 19 nt, Homo sapiens
  misc_RNA (1)...(19): siRNA sense strand
ggaguugaaaggugacauu

SEQ ID NO: 52585 - RNA, 19 nt, Homo sapiens
  misc_RNA (1)...(19): siRNA sense strand
gaacuucgugcugccauga

SEQ ID NO: 52586 - RNA, 19 nt, Homo sapiens
  misc_RNA (1)...(19): siRNA sense strand
ccaaaggagauuaugagaa

SEQ ID NO: 52587 - RNA, 19 nt, Homo sapiens
  misc_RNA (1)...(19): siRNA sense strand
gaaauacaccaaguacagu

SEQ ID NO: 52588 - RNA, 19 nt, Homo sapiens
  misc_RNA (1)...(19): siRNA sense strand
aaugaagacuuggcugauu

SEQ ID NO: 52589 - RNA, 19 nt, Homo sapiens
  misc_RNA (1)...(19): siRNA sense strand
gaugaaaccaaaggagauu

SEQ ID NO: 52590 - RNA, 19 nt, Homo sapiens
  misc_RNA (1)...(19): siRNA sense strand
uuaacagggucuacagaga

SEQ ID NO: 52591 - RNA, 19 nt, Homo sapiens
  misc_RNA (1)...(19): siRNA sense strand
ccuuggaacugaugaagau

SEQ ID NO: 52592 - RNA, 19 nt, Homo sapiens
  misc_RNA (1)...(19): siRNA sense strand
ggaacgcuuugcuuucucu

SEQ ID NO: 52593 - RNA, 19 nt, Homo sapiens
  misc_RNA (1)...(19): siRNA sense strand
ugaagauacucuaauugag

SEQ ID NO: 52594 - RNA, 19 nt, Homo sapiens
  misc_RNA (1)...(19): siRNA sense strand
uauccuaccuucaauccau

SEQ ID NO: 52595 - RNA, 19 nt, Homo sapiens
  misc_RNA (1)...(19): siRNA sense strand
acaaagaaaucagagacau

SEQ ID NO: 52596 - RNA, 19 nt, Homo sapiens
  misc_RNA (1)...(19): siRNA sense strand
gccagggccuuguaugaag

SEQ ID NO: 52597 - RNA, 19 nt, Homo sapiens
  misc_RNA (1)...(19): siRNA sense strand
ggaugaaaccaaaggagau

SEQ ID NO: 52598 - RNA, 19 nt, Homo sapiens
  misc_RNA (1)...(19): siRNA sense strand
caagcaggccugguuuauu

SEQ ID NO: 52599 - RNA, 19 nt, Homo sapiens
  misc_RNA (1)...(19): siRNA sense strand
gaucuggccaaagacauaa

SEQ ID NO: 52600 - RNA, 19 nt, Homo sapiens
  misc_RNA (1)...(19): siRNA sense strand
aaaccaaaggagauuauga

SEQ ID NO: 52601 - RNA, 19 nt, Homo sapiens
  misc_RNA (1)...(19): siRNA sense strand
gaacuaacaaagaaaucag

SEQ ID NO: 52602 - RNA, 19 nt, Homo sapiens
  misc_RNA (1)...(19): siRNA sense strand
ugaaaggugacauugagaa

SEQ ID NO: 52603 - RNA, 19 nt, Homo sapiens
  misc_RNA (1)...(19): siRNA sense strand
ucugaggacuuugguguga

SEQ ID NO: 52604 - RNA, 19 nt, Homo sapiens
  misc_RNA (1)...(19): siRNA sense strand
caaccaucauugacauucu

SEQ ID NO: 52605 - RNA, 19 nt, Homo sapiens
  misc_RNA (1)...(19): siRNA sense strand
gauuaugguuucccguucu

SEQ ID NO: 52606 - RNA, 19 nt, Homo sapiens
  misc_RNA (1)...(19): siRNA sense strand
caacuucgcagaguguuuc

SEQ ID NO: 52607 - RNA, 19 nt, Homo sapiens
  misc_RNA (1)...(19): siRNA sense strand
cuacagagaggaacugaag

SEQ ID NO: 52608 - RNA, 19 nt, Homo sapiens
  misc_RNA (1)...(19): siRNA sense strand
gcaaugguaucagaauucc

SEQ ID NO: 52609 - RNA, 19 nt, Homo sapiens
  misc_RNA (1)...(19): siRNA sense strand
uguaugguaucucccuuug

SEQ ID NO: 52610 - RNA, 19 nt, Homo sapiens
  misc_RNA (1)...(19): siRNA sense strand
uaucaaagcauucuaucag

SEQ ID NO: 52611 - RNA, 19 nt, Homo sapiens
  misc_RNA (1)...(19): siRNA sense strand
caugaaugauaucaaagca

SEQ ID NO: 52612 - RNA, 19 nt, Homo sapiens
  misc_RNA (1)...(19): siRNA sense strand
gguguuggaacucgccaua

SEQ ID NO: 52613 - RNA, 19 nt, Homo sapiens
  misc_RNA (1)...(19): siRNA sense strand
aaauacaccaaguacagua

SEQ ID NO: 52614 - RNA, 19 nt, Homo sapiens
  misc_RNA (1)...(19): siRNA sense strand
gaagcaggagaaaggagaa

SEQ ID NO: 52615 - RNA, 19 nt, Homo sapiens
  misc_RNA (1)...(19): siRNA sense strand
guaugaagcaggagaaagg

SEQ ID NO: 52616 - RNA, 19 nt, Homo sapiens
  misc_RNA (1)...(19): siRNA sense strand
aaccaucauugacauucua

SEQ ID NO: 52617 - RNA, 19 nt, Homo sapiens
  misc_RNA (1)...(19): siRNA sense strand
gcuuugcuuucucuugcua

SEQ ID NO: 52618 - RNA, 19 nt, Homo sapiens
  misc_RNA (1)...(19): siRNA sense strand
gaaaccaaaggagauuaug

SEQ ID NO: 52619 - RNA, 19 nt, Homo sapiens
  misc_RNA (1)...(19): siRNA sense strand
augaagagcaggaauaugu

SEQ ID NO: 52620 - RNA, 19 nt, Homo sapiens
  misc_RNA (1)...(19): siRNA sense strand
gcaaccaucauugacauuc

SEQ ID NO: 52621 - RNA, 19 nt, Homo sapiens
  misc_RNA (1)...(19): siRNA sense strand
gaaugaagacuuggcugau

SEQ ID NO: 52622 - RNA, 19 nt, Homo sapiens
  misc_RNA (1)...(19): siRNA sense strand
cuaacuaagcgaaacaaug

SEQ ID NO: 52623 - RNA, 19 nt, Homo sapiens
  misc_RNA (1)...(19): siRNA sense strand
ggcaaugguaucagaauuc

SEQ ID NO: 52624 - RNA, 19 nt, Homo sapiens
  misc_RNA (1)...(19): siRNA sense strand
aaacuccagcgcaauuuga

SEQ ID NO: 52625 - RNA, 19 nt, Homo sapiens
  misc_RNA (1)...(19): siRNA sense strand
ggaaagccccuggaugaaa

SEQ ID NO: 52626 - RNA, 19 nt, Homo sapiens
  misc_RNA (1)...(19): siRNA sense strand
agaaauacaccaaguacag

SEQ ID NO: 52627 - RNA, 19 nt, Homo sapiens
  misc_RNA (1)...(19): siRNA sense strand
ugaggacuuuggugugaau

SEQ ID NO: 52628 - RNA, 19 nt, Homo sapiens
  misc_RNA (1)...(19): siRNA sense strand
gaaagccccuggaugaaac

SEQ ID NO: 52629 - RNA, 19 nt, Homo sapiens
  misc_RNA (1)...(19): siRNA sense strand
ugaaaccaaaggagauuau

SEQ ID NO: 52630 - RNA, 19 nt, Homo sapiens
  misc_RNA (1)...(19): siRNA sense strand
aagcaaccaucauugacau

SEQ ID NO: 52631 - RNA, 19 nt, Homo sapiens
  misc_RNA (1)...(19): siRNA sense strand
ccacaacuucgcagagugu

SEQ ID NO: 52632 - RNA, 19 nt, Homo sapiens
  misc_RNA (1)...(19): siRNA sense strand
gcaucaagaacuaacaaag

SEQ ID NO: 52633 - RNA, 19 nt, Homo sapiens
  misc_RNA (1)...(19): siRNA sense strand
gaaaggggacagacguaaa

SEQ ID NO: 52634 - RNA, 19 nt, Homo sapiens
  misc_RNA (1)...(19): siRNA sense strand
aucagaagauguaugguau

SEQ ID NO: 52635 - RNA, 19 nt, Homo sapiens
  misc_RNA (1)...(19): siRNA sense strand
ugaucaggauuaugguuuc

SEQ ID NO: 52636 - RNA, 19 nt, Homo sapiens
  misc_RNA (1)...(19): siRNA sense strand
caccagaagcuauccacaa

SEQ ID NO: 52637 - RNA, 19 nt, Homo sapiens
  misc_RNA (1)...(19): siRNA sense strand
ggaaagccauguuuuauua

SEQ ID NO: 52638 - RNA, 19 nt, Homo sapiens
  misc_RNA (1)...(19): siRNA sense strand
ggagaaaggccuggaaauu

SEQ ID NO: 52639 - RNA, 19 nt, Homo sapiens
  misc_RNA (1)...(19): siRNA sense strand
gagaaaggccuggaaauug

SEQ ID NO: 52640 - RNA, 19 nt, Homo sapiens
  misc_RNA (1)...(19): siRNA sense strand
cagcgaagcuccucaacau

SEQ ID NO: 52641 - RNA, 19 nt, Homo sapiens
  misc_RNA (1)...(19): siRNA sense strand
agaaaggccuggaaauugu

SEQ ID NO: 52642 - RNA, 19 nt, Homo sapiens
  misc_RNA (1)...(19): siRNA sense strand
gaaggaaagccauguuuua

SEQ ID NO: 52643 - RNA, 19 nt, Homo sapiens
  misc_RNA (1)...(19): siRNA sense strand
gcacgugaccuucaacaau

SEQ ID NO: 52644 - RNA, 19 nt, Homo sapiens
  misc_RNA (1)...(19): siRNA sense strand
ugaacaggaucgucaaguu

SEQ ID NO: 52645 - RNA, 19 nt, Homo sapiens
  misc_RNA (1)...(19): siRNA sense strand
gaagaaggaaagccauguu

SEQ ID NO: 52646 - RNA, 19 nt, Homo sapiens
  misc_RNA (1)...(19): siRNA sense strand
ucuacaacgucucugauaa

SEQ ID NO: 52647 - RNA, 19 nt, Homo sapiens
  misc_RNA (1)...(19): siRNA sense strand
caaguucuccugcaaguuc

SEQ ID NO: 52648 - RNA, 19 nt, Homo sapiens
  misc_RNA (1)...(19): siRNA sense strand
ugcacuacuucccuuauua

SEQ ID NO: 52649 - RNA, 19 nt, Homo sapiens
  misc_RNA (1)...(19): siRNA sense strand
cagauaugcugcagaacug

SEQ ID NO: 52650 - RNA, 19 nt, Homo sapiens
  misc_RNA (1)...(19): siRNA sense strand
ccuuaaggccggauguuua

SEQ ID NO: 52651 - RNA, 19 nt, Homo sapiens
  misc_RNA (1)...(19): siRNA sense strand
gaucccaacuucggcuuug

SEQ ID NO: 52652 - RNA, 19 nt, Homo sapiens
  misc_RNA (1)...(19): siRNA sense strand
ggugaugacugggcucuuc

SEQ ID NO: 52653 - RNA, 19 nt, Homo sapiens
  misc_RNA (1)...(19): siRNA sense strand
ggacuaccaagaccagcua

SEQ ID NO: 52654 - RNA, 19 nt, Homo sapiens
  misc_RNA (1)...(19): siRNA sense strand
guacacaccggacuaccaa

SEQ ID NO: 52655 - RNA, 19 nt, Homo sapiens
  misc_RNA (1)...(19): siRNA sense strand
gcaaguucacggcagauau

SEQ ID NO: 52656 - RNA, 19 nt, Homo sapiens
  misc_RNA (1)...(19): siRNA sense strand
cacgugaccuucaacaauc

SEQ ID NO: 52657 - RNA, 19 nt, Homo sapiens
  misc_RNA (1)...(19): siRNA sense strand
gcagagcacgugaccuuca

SEQ ID NO: 52658 - RNA, 19 nt, Homo sapiens
  misc_RNA (1)...(19): siRNA sense strand
caaguucacggcagauaug

SEQ ID NO: 52659 - RNA, 19 nt, Homo sapiens
  misc_RNA (1)...(19): siRNA sense strand
acaccaaguucuccugcaa

SEQ ID NO: 52660 - RNA, 19 nt, Homo sapiens
  misc_RNA (1)...(19): siRNA sense strand
cagagcacgugaccuucaa

SEQ ID NO: 52661 - RNA, 19 nt, Homo sapiens
  misc_RNA (1)...(19): siRNA sense strand
gcacuacuucccuuauuac

SEQ ID NO: 52662 - RNA, 19 nt, Homo sapiens
  misc_RNA (1)...(19): siRNA sense strand
ggaucagccuguacuacgu

SEQ ID NO: 52663 - RNA, 19 nt, Homo sapiens
  misc_RNA (1)...(19): siRNA sense strand
cgacccguaugaagggaaa

SEQ ID NO: 52664 - RNA, 19 nt, Homo sapiens
  misc_RNA (1)...(19): siRNA sense strand
uguacuacguggccuucua

SEQ ID NO: 52665 - RNA, 19 nt, Homo sapiens
  misc_RNA (1)...(19): siRNA sense strand
aagaaggaaagccauguuu

SEQ ID NO: 52666 - RNA, 19 nt, Homo sapiens
  misc_RNA (1)...(19): siRNA sense strand
gaagggaaaguggaguuca

SEQ ID NO: 52667 - RNA, 19 nt, Homo sapiens
  misc_RNA (1)...(19): siRNA sense strand
cugcacuacuucccuuauu

SEQ ID NO: 52668 - RNA, 19 nt, Homo sapiens
  misc_RNA (1)...(19): siRNA sense strand
aagggaaaguggaguucaa

SEQ ID NO: 52669 - RNA, 19 nt, Homo sapiens
  misc_RNA (1)...(19): siRNA sense strand
gcagcgaagcuccucaaca

SEQ ID NO: 52670 - RNA, 19 nt, Homo sapiens
  misc_RNA (1)...(19): siRNA sense strand
gggagaaaggccuggaaau

SEQ ID NO: 52671 - RNA, 19 nt, Homo sapiens
  misc_RNA (1)...(19): siRNA sense strand
gaaaggccuggaaauuguc

SEQ ID NO: 52672 - RNA, 19 nt, Homo sapiens
  misc_RNA (1)...(19): siRNA sense strand
uacaacgucucugauaaca

SEQ ID NO: 52673 - RNA, 19 nt, Homo sapiens
  misc_RNA (1)...(19): siRNA sense strand
uggcagagcacgugaccuu

SEQ ID NO: 52674 - RNA, 19 nt, Homo sapiens
  misc_RNA (1)...(19): siRNA sense strand
ggguguggaucagccugua

SEQ ID NO: 52675 - RNA, 19 nt, Homo sapiens
  misc_RNA (1)...(19): siRNA sense strand
gucuacaacgucucugaua

SEQ ID NO: 52676 - RNA, 19 nt, Homo sapiens
  misc_RNA (1)...(19): siRNA sense strand
cgcugcaggucaaguacua

SEQ ID NO: 52677 - RNA, 19 nt, Homo sapiens
  misc_RNA (1)...(19): siRNA sense strand
gcaccuccgagcaguacuu

SEQ ID NO: 52678 - RNA, 19 nt, Homo sapiens
  misc_RNA (1)...(19): siRNA sense strand
gccagcgcauggaggaguu

SEQ ID NO: 52679 - RNA, 19 nt, Homo sapiens
  misc_RNA (1)...(19): siRNA sense strand
gcaccuucagucugcacua

SEQ ID NO: 52680 - RNA, 19 nt, Homo sapiens
  misc_RNA (1)...(19): siRNA sense strand
ccuggcggaucccaacuuc

SEQ ID NO: 52681 - RNA, 19 nt, Homo sapiens
  misc_RNA (1)...(19): siRNA sense strand
gagcacgugaccuucaaca

SEQ ID NO: 52682 - RNA, 19 nt, Homo sapiens
  misc_RNA (1)...(19): siRNA sense strand
guacuacguggccuucuac

SEQ ID NO: 52683 - RNA, 19 nt, Homo sapiens
  misc_RNA (1)...(19): siRNA sense strand
ccuucagucugcacuacuu

SEQ ID NO: 52684 - RNA, 19 nt, Homo sapiens
  misc_RNA (1)...(19): siRNA sense strand
acacaccggacuaccaaga

SEQ ID NO: 52685 - RNA, 19 nt, Homo sapiens
  misc_RNA (1)...(19): siRNA sense strand
gcuccuaccuggucuggaa

SEQ ID NO: 52686 - RNA, 19 nt, Homo sapiens
  misc_RNA (1)...(19): siRNA sense strand
cgaccacacucaacuacug

SEQ ID NO: 52687 - RNA, 19 nt, Homo sapiens
  misc_RNA (1)...(19): siRNA sense strand
acacucaacuacugcguau

SEQ ID NO: 52688 - RNA, 19 nt, Homo sapiens
  misc_RNA (1)...(19): siRNA sense strand
cugggaggcuucacagaga

SEQ ID NO: 52689 - RNA, 19 nt, Homo sapiens
  misc_RNA (1)...(19): siRNA sense strand
ugggaggcuucacagagaa

SEQ ID NO: 52690 - RNA, 19 nt, Homo sapiens
  misc_RNA (1)...(19): siRNA sense strand
cgaccacacucaacuacug

SEQ ID NO: 52691 - RNA, 19 nt, Homo sapiens
  misc_RNA (1)...(19): siRNA sense strand
acacucaacuacugcguau

SEQ ID NO: 52692 - RNA, 19 nt, Homo sapiens
  misc_RNA (1)...(19): siRNA sense strand
ggccgucacgcuuucauga

SEQ ID NO: 52693 - RNA, 19 nt, Homo sapiens
  misc_RNA (1)...(19): siRNA sense strand
caggugccaucacgcuugu

SEQ ID NO: 52694 - RNA, 19 nt, Homo sapiens
  misc_RNA (1)...(19): siRNA sense strand
gagaacagauccuggcauu

SEQ ID NO: 52695 - RNA, 19 nt, Homo sapiens
  misc_RNA (1)...(19): siRNA sense strand
gaacagacagugagcauga

SEQ ID NO: 52696 - RNA, 19 nt, Homo sapiens
  misc_RNA (1)...(19): siRNA sense strand
gcacauaguacaugagaaa

SEQ ID NO: 52697 - RNA, 19 nt, Homo sapiens
  misc_RNA (1)...(19): siRNA sense strand
gaacaaggccagcauuucu

SEQ ID NO: 52698 - RNA, 19 nt, Homo sapiens
  misc_RNA (1)...(19): siRNA sense strand
gguccgacuugccauauaa

SEQ ID NO: 52699 - RNA, 19 nt, Homo sapiens
  misc_RNA (1)...(19): siRNA sense strand
gaacagauccuggcauucu

SEQ ID NO: 52700 - RNA, 19 nt, Homo sapiens
  misc_RNA (1)...(19): siRNA sense strand
ccauucagcuucacagaga

SEQ ID NO: 52701 - RNA, 19 nt, Homo sapiens
  misc_RNA (1)...(19): siRNA sense strand
gagaacaaggccagcauuu

SEQ ID NO: 52702 - RNA, 19 nt, Homo sapiens
  misc_RNA (1)...(19): siRNA sense strand
uggaggcacugucuaauau

SEQ ID NO: 52703 - RNA, 19 nt, Homo sapiens
  misc_RNA (1)...(19): siRNA sense strand
ccauggagaugcacauagu

SEQ ID NO: 52704 - RNA, 19 nt, Homo sapiens
  misc_RNA (1)...(19): siRNA sense strand
guggaggcacugucuaaua

SEQ ID NO: 52705 - RNA, 19 nt, Homo sapiens
  misc_RNA (1)...(19): siRNA sense strand
gggcagcgcacggugauaa

SEQ ID NO: 52706 - RNA, 19 nt, Homo sapiens
  misc_RNA (1)...(19): siRNA sense strand
gaaacugaggcacuacuuc

SEQ ID NO: 52707 - RNA, 19 nt, Homo sapiens
  misc_RNA (1)...(19): siRNA sense strand
ggagaacaaggccagcauu

SEQ ID NO: 52708 - RNA, 19 nt, Homo sapiens
  misc_RNA (1)...(19): siRNA sense strand
cucagaagcuguacuacga

SEQ ID NO: 52709 - RNA, 19 nt, Homo sapiens
  misc_RNA (1)...(19): siRNA sense strand
cauaguacaugagaaagag

SEQ ID NO: 52710 - RNA, 19 nt, Homo sapiens
  misc_RNA (1)...(19): siRNA sense strand
gacaaggaacagacaguga

SEQ ID NO: 52711 - RNA, 19 nt, Homo sapiens
  misc_RNA (1)...(19): siRNA sense strand
caucgaggaaugugaaaga

SEQ ID NO: 52712 - RNA, 19 nt, Homo sapiens
  misc_RNA (1)...(19): siRNA sense strand
aggagaaacugaggcacua

SEQ ID NO: 52713 - RNA, 19 nt, Homo sapiens
  misc_RNA (1)...(19): siRNA sense strand
acaccgaccugcgaugaga

SEQ ID NO: 52714 - RNA, 19 nt, Homo sapiens
  misc_RNA (1)...(19): siRNA sense strand
ggagaugcacauaguacau

SEQ ID NO: 52715 - RNA, 19 nt, Homo sapiens
  misc_RNA (1)...(19): siRNA sense strand
gcacuuugccauggagaug

SEQ ID NO: 52716 - RNA, 19 nt, Homo sapiens
  misc_RNA (1)...(19): siRNA sense strand
gagaugcacauaguacaug

SEQ ID NO: 52717 - RNA, 19 nt, Homo sapiens
  misc_RNA (1)...(19): siRNA sense strand
gggagcacuuugccaugga

SEQ ID NO: 52718 - RNA, 19 nt, Homo sapiens
  misc_RNA (1)...(19): siRNA sense strand
gaagcuguacuacgacaag

SEQ ID NO: 52719 - RNA, 19 nt, Homo sapiens
  misc_RNA (1)...(19): siRNA sense strand
ggacccugaagacgaaauu

SEQ ID NO: 52720 - RNA, 19 nt, Homo sapiens
  misc_RNA (1)...(19): siRNA sense strand
agaugcacauaguacauga

SEQ ID NO: 52721 - RNA, 19 nt, Homo sapiens
  misc_RNA (1)...(19): siRNA sense strand
gggagcccauucagcuuca

SEQ ID NO: 52722 - RNA, 19 nt, Homo sapiens
  misc_RNA (1)...(19): siRNA sense strand
ccacaccgaccugcgauga

SEQ ID NO: 52723 - RNA, 19 nt, Homo sapiens
  misc_RNA (1)...(19): siRNA sense strand
cuucuucucuggcuacgau

SEQ ID NO: 52724 - RNA, 19 nt, Homo sapiens
  misc_RNA (1)...(19): siRNA sense strand
gcuguacuacgacaaggaa

SEQ ID NO: 52725 - RNA, 19 nt, Homo sapiens
  misc_RNA (1)...(19): siRNA sense strand
cauaccaggccaaacaguu

SEQ ID NO: 52726 - RNA, 19 nt, Homo sapiens
  misc_RNA (1)...(19): siRNA sense strand
ucucucagaagcuguacua

SEQ ID NO: 52727 - RNA, 19 nt, Homo sapiens
  misc_RNA (1)...(19): siRNA sense strand
gaggcacugucuaauaucc

SEQ ID NO: 52728 - RNA, 19 nt, Homo sapiens
  misc_RNA (1)...(19): siRNA sense strand
ugaugauguugcuggagaa

SEQ ID NO: 52729 - RNA, 19 nt, Homo sapiens
  misc_RNA (1)...(19): siRNA sense strand
cauggagaugcacauagua

SEQ ID NO: 52730 - RNA, 19 nt, Homo sapiens
  misc_RNA (1)...(19): siRNA sense strand
cagugagcaugaaggacaa

SEQ ID NO: 52731 - RNA, 19 nt, Homo sapiens
  misc_RNA (1)...(19): siRNA sense strand
agacagugagcaugaagga

SEQ ID NO: 52732 - RNA, 19 nt, Homo sapiens
  misc_RNA (1)...(19): siRNA sense strand
caaggcaaagguggacaaa

SEQ ID NO: 52733 - RNA, 19 nt, Homo sapiens
  misc_RNA (1)...(19): siRNA sense strand
aaacugggacgcuucuucu

SEQ ID NO: 52734 - RNA, 19 nt, Homo sapiens
  misc_RNA (1)...(19): siRNA sense strand
ucaacaucgucaccaccaa

SEQ ID NO: 52735 - RNA, 19 nt, Homo sapiens
  misc_RNA (1)...(19): siRNA sense strand
aagccgaguccuccaacua

SEQ ID NO: 52736 - RNA, 19 nt, Homo sapiens
  misc_RNA (1)...(19): siRNA sense strand
acacuggugcuacgagguu

SEQ ID NO: 52737 - RNA, 19 nt, Homo sapiens
  misc_RNA (1)...(19): siRNA sense strand
auaccaggccaaacaguug

SEQ ID NO: 52738 - RNA, 19 nt, Homo sapiens
  misc_RNA (1)...(19): siRNA sense strand
aaaccugagaugagcacua

SEQ ID NO: 52739 - RNA, 19 nt, Homo sapiens
  misc_RNA (1)...(19): siRNA sense strand
acauaguacaugagaaaga

SEQ ID NO: 52740 - RNA, 19 nt, Homo sapiens
  misc_RNA (1)...(19): siRNA sense strand
ugguccgacuugccauaua

SEQ ID NO: 52741 - RNA, 19 nt, Homo sapiens
  misc_RNA (1)...(19): siRNA sense strand
gcucggagaucuucgaauu

SEQ ID NO: 52742 - RNA, 19 nt, Homo sapiens
  misc_RNA (1)...(19): siRNA sense strand
ggaagaagagggacuaucu

SEQ ID NO: 52743 - RNA, 19 nt, Homo sapiens
  misc_RNA (1)...(19): siRNA sense strand
ucggagaucuucgaauuca

SEQ ID NO: 52744 - RNA, 19 nt, Homo sapiens
  misc_RNA (1)...(19): siRNA sense strand
gaagaagagggacuaucug

SEQ ID NO: 52745 - RNA, 19 nt, Homo sapiens
  misc_RNA (1)...(19): siRNA sense strand
ggccaugacagccguggua

SEQ ID NO: 52746 - RNA, 19 nt, Homo sapiens
  misc_RNA (1)...(19): siRNA sense strand
guuccuacuucaggcauuu

SEQ ID NO: 52747 - RNA, 19 nt, Homo sapiens
  misc_RNA (1)...(19): siRNA sense strand
gugaagcgcaugauugaca

SEQ ID NO: 52748 - RNA, 19 nt, Homo sapiens
  misc_RNA (1)...(19): siRNA sense strand
cagaaggaguacagcaucu

SEQ ID NO: 52749 - RNA, 19 nt, Homo sapiens
  misc_RNA (1)...(19): siRNA sense strand
cgaauucaccacucagaag

SEQ ID NO: 52750 - RNA, 19 nt, Homo sapiens
  misc_RNA (1)...(19): siRNA sense strand
cggugaagcgcaugauuga

SEQ ID NO: 52751 - RNA, 19 nt, Homo sapiens
  misc_RNA (1)...(19): siRNA sense strand
cauguucuaugccuuugca

SEQ ID NO: 52752 - RNA, 19 nt, Homo sapiens
  misc_RNA (1)...(19): siRNA sense strand
ccgucuggaucgaguacua

SEQ ID NO: 52753 - RNA, 19 nt, Homo sapiens
  misc_RNA (1)...(19): siRNA sense strand
ccacauggagcaccacaac

SEQ ID NO: 52754 - RNA, 19 nt, Homo sapiens
  misc_RNA (1)...(19): siRNA sense strand
gcgugacccucuucugcau

SEQ ID NO: 52755 - RNA, 19 nt, Homo sapiens
  misc_RNA (1)...(19): siRNA sense strand
ccgcguccauguucuaugc

SEQ ID NO: 52756 - RNA, 19 nt, Homo sapiens
  misc_RNA (1)...(19): siRNA sense strand
guccauguucuaugccuuu

SEQ ID NO: 52757 - RNA, 19 nt, Homo sapiens
  misc_RNA (1)...(19): siRNA sense strand
gagcucggagaucuucgaa

SEQ ID NO: 52758 - RNA, 19 nt, Homo sapiens
  misc_RNA (1)...(19): siRNA sense strand
uauuacuccugguccuuug

SEQ ID NO: 52759 - RNA, 19 nt, Homo sapiens
  misc_RNA (1)...(19): siRNA sense strand
gaauguccaucguuaagaa

SEQ ID NO: 52760 - RNA, 19 nt, Homo sapiens
  misc_RNA (1)...(19): siRNA sense strand
gcgcccugcuggcaagaua

SEQ ID NO: 52761 - RNA, 19 nt, Homo sapiens
  misc_RNA (1)...(19): siRNA sense strand
uacaugggcuggauggauu

SEQ ID NO: 52762 - RNA, 19 nt, Homo sapiens
  misc_RNA (1)...(19): siRNA sense strand
gcagugccgaggaguauga

SEQ ID NO: 52763 - RNA, 19 nt, Homo sapiens
  misc_RNA (1)...(19): siRNA sense strand
guaggcagcugaggguauc

SEQ ID NO: 52764 - RNA, 19 nt, Homo sapiens
  misc_RNA (1)...(19): siRNA sense strand
uuaagaaccugcagaaccu

SEQ ID NO: 52765 - RNA, 19 nt, Homo sapiens
  misc_RNA (1)...(19): siRNA sense strand
uaagugaccgggacuacau

SEQ ID NO: 52766 - RNA, 19 nt, Homo sapiens
  misc_RNA (1)...(19): siRNA sense strand
gugccgaggaguaugagua

SEQ ID NO: 52767 - RNA, 19 nt, Homo sapiens
  misc_RNA (1)...(19): siRNA sense strand
cugaggguaucgcagagaa

SEQ ID NO: 52768 - RNA, 19 nt, Homo sapiens
  misc_RNA (1)...(19): siRNA sense strand
cgaauguccaucguuaaga

SEQ ID NO: 52769 - RNA, 19 nt, Homo sapiens
  misc_RNA (1)...(19): siRNA sense strand
gggacuacaugggcuggau

SEQ ID NO: 52770 - RNA, 19 nt, Homo sapiens
  misc_RNA (1)...(19): siRNA sense strand
ggauaagugaccgggacua

SEQ ID NO: 52771 - RNA, 19 nt, Homo sapiens
  misc_RNA (1)...(19): siRNA sense strand
gauaagugaccgggacuac

SEQ ID NO: 52772 - RNA, 19 nt, Homo sapiens
  misc_RNA (1)...(19): siRNA sense strand
gcucucagcugucaaugug

SEQ ID NO: 52773 - RNA, 19 nt, Homo sapiens
  misc_RNA (1)...(19): siRNA sense strand
cgucaacaccaccaucugu

SEQ ID NO: 52774 - RNA, 19 nt, Homo sapiens
  misc_RNA (1)...(19): siRNA sense strand
gaagaaagccucauugaca

SEQ ID NO: 52775 - RNA, 19 nt, Homo sapiens
  misc_RNA (1)...(19): siRNA sense strand
gaugaaaccuaccugauga

SEQ ID NO: 52776 - RNA, 19 nt, Homo sapiens
  misc_RNA (1)...(19): siRNA sense strand
gcaaggagcugcccgagau

SEQ ID NO: 52777 - RNA, 19 nt, Homo sapiens
  misc_RNA (1)...(19): siRNA sense strand
uaacagggauggccauuga

SEQ ID NO: 52778 - RNA, 19 nt, Homo sapiens
  misc_RNA (1)...(19): siRNA sense strand
uaaagaaccuugacuucau

SEQ ID NO: 52779 - RNA, 19 nt, Homo sapiens
  misc_RNA (1)...(19): siRNA sense strand
ggaaauucaaggccacuua

SEQ ID NO: 52780 - RNA, 19 nt, Homo sapiens
  misc_RNA (1)...(19): siRNA sense strand
ccaacugggugucugagua

SEQ ID NO: 52781 - RNA, 19 nt, Homo sapiens
  misc_RNA (1)...(19): siRNA sense strand
gcaaucaguucuuugucuu

SEQ ID NO: 52782 - RNA, 19 nt, Homo sapiens
  misc_RNA (1)...(19): siRNA sense strand
gaggagcaguucaggaaga

SEQ ID NO: 52783 - RNA, 19 nt, Homo sapiens
  misc_RNA (1)...(19): siRNA sense strand
aaaccuaccugaugagcaa

SEQ ID NO: 52784 - RNA, 19 nt, Homo sapiens
  misc_RNA (1)...(19): siRNA sense strand
gcaauacuaugggcucuuc

SEQ ID NO: 52785 - RNA, 19 nt, Homo sapiens
  misc_RNA (1)...(19): siRNA sense strand
gggaaaacauucauuaaga

SEQ ID NO: 52786 - RNA, 19 nt, Homo sapiens
  misc_RNA (1)...(19): siRNA sense strand
aaagaaccuugacuucauu

SEQ ID NO: 52787 - RNA, 19 nt, Homo sapiens
  misc_RNA (1)...(19): siRNA sense strand
ugaaugacauguaucucaa

SEQ ID NO: 52788 - RNA, 19 nt, Homo sapiens
  misc_RNA (1)...(19): siRNA sense strand
ggaugaaaccuaccugaug

SEQ ID NO: 52789 - RNA, 19 nt, Homo sapiens
  misc_RNA (1)...(19): siRNA sense strand
guaaagaaccuugacuuca

SEQ ID NO: 52790 - RNA, 19 nt, Homo sapiens
  misc_RNA (1)...(19): siRNA sense strand
gagauguucugcugcuaug

SEQ ID NO: 52791 - RNA, 19 nt, Homo sapiens
  misc_RNA (1)...(19): siRNA sense strand
ugucuuggauguugucauu

SEQ ID NO: 52792 - RNA, 19 nt, Homo sapiens
  misc_RNA (1)...(19): siRNA sense strand
uuucacagcugcaaagaga

SEQ ID NO: 52793 - RNA, 19 nt, Homo sapiens
  misc_RNA (1)...(19): siRNA sense strand
cgacaagucccugcaguuu

SEQ ID NO: 52794 - RNA, 19 nt, Homo sapiens
  misc_RNA (1)...(19): siRNA sense strand
gcucagaacagcagcauca

SEQ ID NO: 52795 - RNA, 19 nt, Homo sapiens
  misc_RNA (1)...(19): siRNA sense strand
ugacauguaucucaacaac

SEQ ID NO: 52796 - RNA, 19 nt, Homo sapiens
  misc_RNA (1)...(19): siRNA sense strand
gcaccaggacucaccaaga

SEQ ID NO: 52797 - RNA, 19 nt, Homo sapiens
  misc_RNA (1)...(19): siRNA sense strand
gggacucgcuggacaugau

SEQ ID NO: 52798 - RNA, 19 nt, Homo sapiens
  misc_RNA (1)...(19): siRNA sense strand
gcaugaagcaauacuaugg

SEQ ID NO: 52799 - RNA, 19 nt, Homo sapiens
  misc_RNA (1)...(19): siRNA sense strand
gaaauucaaggccacuuag

SEQ ID NO: 52800 - RNA, 19 nt, Homo sapiens
  misc_RNA (1)...(19): siRNA sense strand
ucuuggauguugucauuaa

SEQ ID NO: 52801 - RNA, 19 nt, Homo sapiens
  misc_RNA (1)...(19): siRNA sense strand
ggaagagccaggccauugu

SEQ ID NO: 52802 - RNA, 19 nt, Homo sapiens
  misc_RNA (1)...(19): siRNA sense strand
caucguagccugcugcaau

SEQ ID NO: 52803 - RNA, 19 nt, Homo sapiens
  misc_RNA (1)...(19): siRNA sense strand
ccacaaccacggagauguu

SEQ ID NO: 52804 - RNA, 19 nt, Homo sapiens
  misc_RNA (1)...(19): siRNA sense strand
aagaaagccucauugacau

SEQ ID NO: 52805 - RNA, 19 nt, Homo sapiens
  misc_RNA (1)...(19): siRNA sense strand
ccucaucucugguguacuc

SEQ ID NO: 52806 - RNA, 19 nt, Homo sapiens
  misc_RNA (1)...(19): siRNA sense strand
ggagauguucugcugcuau

SEQ ID NO: 52807 - RNA, 19 nt, Homo sapiens
  misc_RNA (1)...(19): siRNA sense strand
gagcguuugccuccaauug

SEQ ID NO: 52808 - RNA, 19 nt, Homo sapiens
  misc_RNA (1)...(19): siRNA sense strand
gacgagcguuugccuccaa

SEQ ID NO: 52809 - RNA, 19 nt, Homo sapiens
  misc_RNA (1)...(19): siRNA sense strand
gaagagccaggccauugug

SEQ ID NO: 52810 - RNA, 19 nt, Homo sapiens
  misc_RNA (1)...(19): siRNA sense strand
gaauaguaaagaaccuuga

SEQ ID NO: 52811 - RNA, 19 nt, Homo sapiens
  misc_RNA (1)...(19): siRNA sense strand
gaaaugcuccccggaaauu

SEQ ID NO: 52812 - RNA, 19 nt, Homo sapiens
  misc_RNA (1)...(19): siRNA sense strand
ugacuucauugucuauaag

SEQ ID NO: 52813 - RNA, 19 nt, Homo sapiens
  misc_RNA (1)...(19): siRNA sense strand
ggaagaaagccucauugac

SEQ ID NO: 52814 - RNA, 19 nt, Homo sapiens
  misc_RNA (1)...(19): siRNA sense strand
ggcggaggcuacagcaaga

SEQ ID NO: 52815 - RNA, 19 nt, Homo sapiens
  misc_RNA (1)...(19): siRNA sense strand
cuacugagagcaagccauu

SEQ ID NO: 52816 - RNA, 19 nt, Homo sapiens
  misc_RNA (1)...(19): siRNA sense strand
gaucuguucacucaguuga

SEQ ID NO: 52817 - RNA, 19 nt, Homo sapiens
  misc_RNA (1)...(19): siRNA sense strand
gaaccuugacuucauuguc

SEQ ID NO: 52818 - RNA, 19 nt, Homo sapiens
  misc_RNA (1)...(19): siRNA sense strand
gacaagucccugcaguuug

SEQ ID NO: 52819 - RNA, 19 nt, Homo sapiens
  misc_RNA (1)...(19): siRNA sense strand
gccacuccauucccacuga

SEQ ID NO: 52820 - RNA, 19 nt, Homo sapiens
  misc_RNA (1)...(19): siRNA sense strand
caaaagcuguggaagaaag

SEQ ID NO: 52821 - RNA, 19 nt, Homo sapiens
  misc_RNA (1)...(19): siRNA sense strand
ggauggccauugacaacca

SEQ ID NO: 52822 - RNA, 19 nt, Homo sapiens
  misc_RNA (1)...(19): siRNA sense strand
ccagggacaccaaccuuga

SEQ ID NO: 52823 - RNA, 19 nt, Homo sapiens
  misc_RNA (1)...(19): siRNA sense strand
gcagaaaugcagcccugau

SEQ ID NO: 52824 - RNA, 19 nt, Homo sapiens
  misc_RNA (1)...(19): siRNA sense strand
uggaagaaagccucauuga

SEQ ID NO: 52825 - RNA, 19 nt, Homo sapiens
  misc_RNA (1)...(19): siRNA sense strand
caccaggacucaccaagac

SEQ ID NO: 52826 - RNA, 19 nt, Homo sapiens
  misc_RNA (1)...(19): siRNA sense strand
gggaucuguucacucaguu

SEQ ID NO: 52827 - RNA, 19 nt, Homo sapiens
  misc_RNA (1)...(19): siRNA sense strand
cagaaaugcagcccugaug

SEQ ID NO: 52828 - RNA, 19 nt, Homo sapiens
  misc_RNA (1)...(19): siRNA sense strand
caagacgcccauccuggaa

SEQ ID NO: 52829 - RNA, 19 nt, Homo sapiens
  misc_RNA (1)...(19): siRNA sense strand
ucugaguacuggcugaaug

SEQ ID NO: 52830 - RNA, 19 nt, Homo sapiens
  misc_RNA (1)...(19): siRNA sense strand
gaugaccagcugagguuug

SEQ ID NO: 52831 - RNA, 19 nt, Homo sapiens
  misc_RNA (1)...(19): siRNA sense strand
gcgcugcaucugccuugua

SEQ ID NO: 52832 - RNA, 19 nt, Homo sapiens
  misc_RNA (1)...(19): siRNA sense strand
cugcugcaaucaguucuuu

SEQ ID NO: 52833 - RNA, 19 nt, Homo sapiens
  misc_RNA (1)...(19): siRNA sense strand
ucaguucuuugucuuggau

SEQ ID NO: 52834 - RNA, 19 nt, Homo sapiens
  misc_RNA (1)...(19): siRNA sense strand
gguuuguccucuccacuag

SEQ ID NO: 52835 - RNA, 19 nt, Homo sapiens
  misc_RNA (1)...(19): siRNA sense strand
aaccuugacuucauugucu

SEQ ID NO: 52836 - RNA, 19 nt, Homo sapiens
  misc_RNA (1)...(19): siRNA sense strand
agcagacccuggccacgua

SEQ ID NO: 52837 - RNA, 19 nt, Homo sapiens
  misc_RNA (1)...(19): siRNA sense strand
ggacucgcuggacaugauu

SEQ ID NO: 52838 - RNA, 19 nt, Homo sapiens
  misc_RNA (1)...(19): siRNA sense strand
guagccugcugcaaucagu

SEQ ID NO: 52839 - RNA, 19 nt, Homo sapiens
  misc_RNA (1)...(19): siRNA sense strand
gcugcaaucaguucuuugu

SEQ ID NO: 52840 - RNA, 19 nt, Homo sapiens
  misc_RNA (1)...(19): siRNA sense strand
ccgaugaccagcugagguu

SEQ ID NO: 52841 - RNA, 19 nt, Homo sapiens
  misc_RNA (1)...(19): siRNA sense strand
ugcaaaagcuguggaagaa

SEQ ID NO: 52842 - RNA, 19 nt, Homo sapiens
  misc_RNA (1)...(19): siRNA sense strand
acacgcugguggcucagaa

SEQ ID NO: 52843 - RNA, 19 nt, Homo sapiens
  misc_RNA (1)...(19): siRNA sense strand
ucucugguguacucagcua

SEQ ID NO: 52844 - RNA, 19 nt, Homo sapiens
  misc_RNA (1)...(19): siRNA sense strand
aaugacauguaucucaaca

SEQ ID NO: 52845 - RNA, 19 nt, Homo sapiens
  misc_RNA (1)...(19): siRNA sense strand
caacugggugucugaguac

SEQ ID NO: 52846 - RNA, 19 nt, Homo sapiens
  misc_RNA (1)...(19): siRNA sense strand
ugcaaucaguucuuugucu

SEQ ID NO: 52847 - RNA, 19 nt, Homo sapiens
  misc_RNA (1)...(19): siRNA sense strand
cugaaugacauguaucuca

SEQ ID NO: 52848 - RNA, 19 nt, Homo sapiens
  misc_RNA (1)...(19): siRNA sense strand
uaguaaagaaccuugacuu

SEQ ID NO: 52849 - RNA, 19 nt, Homo sapiens
  misc_RNA (1)...(19): siRNA sense strand
ggagcugcccgagauguuc

SEQ ID NO: 52850 - RNA, 19 nt, Homo sapiens
  misc_RNA (1)...(19): siRNA sense strand
caaucaguucuuugucuug

SEQ ID NO: 52851 - RNA, 19 nt, Homo sapiens
  misc_RNA (1)...(19): siRNA sense strand
guggaagaaagccucauug

SEQ ID NO: 52852 - RNA, 19 nt, Homo sapiens
  misc_RNA (1)...(19): siRNA sense strand
ugcccgagauguucaugga

SEQ ID NO: 52853 - RNA, 19 nt, Homo sapiens
  misc_RNA (1)...(19): siRNA sense strand
gagcugcccgagauguuca

SEQ ID NO: 52854 - RNA, 19 nt, Homo sapiens
  misc_RNA (1)...(19): siRNA sense strand
acacagucauggccauaac

SEQ ID NO: 52855 - RNA, 19 nt, Homo sapiens
  misc_RNA (1)...(19): siRNA sense strand
ggcacuggcuuuugugaga

SEQ ID NO: 52856 - RNA, 19 nt, Homo sapiens
  misc_RNA (1)...(19): siRNA sense strand
aguacuggcugaaugacau

SEQ ID NO: 52857 - RNA, 19 nt, Homo sapiens
  misc_RNA (1)...(19): siRNA sense strand
cgcugcaucugccuuguau

SEQ ID NO: 52858 - RNA, 19 nt, Homo sapiens
  misc_RNA (1)...(19): siRNA sense strand
aggaagagccaggccauug

SEQ ID NO: 52859 - RNA, 19 nt, Homo sapiens
  misc_RNA (1)...(19): siRNA sense strand
ucagaacagcagcaucaug

SEQ ID NO: 52860 - RNA, 19 nt, Homo sapiens
  misc_RNA (1)...(19): siRNA sense strand
guccuguggucccaaaugg

SEQ ID NO: 52861 - RNA, 19 nt, Homo sapiens
  misc_RNA (1)...(19): siRNA sense strand
cagaggcacuggcuuuugu

SEQ ID NO: 52862 - RNA, 19 nt, Homo sapiens
  misc_RNA (1)...(19): siRNA sense strand
cuacaggcuccaccgaaga

SEQ ID NO: 52863 - RNA, 19 nt, Homo sapiens
  misc_RNA (1)...(19): siRNA sense strand
aguaaagaaccuugacuuc

SEQ ID NO: 52864 - RNA, 19 nt, Homo sapiens
  misc_RNA (1)...(19): siRNA sense strand
ggauguugucauuaauuuc

SEQ ID NO: 52865 - RNA, 19 nt, Homo sapiens
  misc_RNA (1)...(19): siRNA sense strand
gaagaaagccucauugaca

SEQ ID NO: 52866 - RNA, 19 nt, Homo sapiens
  misc_RNA (1)...(19): siRNA sense strand
gaugaaaccuaccugauga

SEQ ID NO: 52867 - RNA, 19 nt, Homo sapiens
  misc_RNA (1)...(19): siRNA sense strand
gcaaggagcugcccgagau

SEQ ID NO: 52868 - RNA, 19 nt, Homo sapiens
  misc_RNA (1)...(19): siRNA sense strand
uaacagggauggccauuga

SEQ ID NO: 52869 - RNA, 19 nt, Homo sapiens
  misc_RNA (1)...(19): siRNA sense strand
uaaagaaccuugacuucau

SEQ ID NO: 52870 - RNA, 19 nt, Homo sapiens
  misc_RNA (1)...(19): siRNA sense strand
ggaaauucaaggccacuua

SEQ ID NO: 52871 - RNA, 19 nt, Homo sapiens
  misc_RNA (1)...(19): siRNA sense strand
ccaacugggugucugagua

SEQ ID NO: 52872 - RNA, 19 nt, Homo sapiens
  misc_RNA (1)...(19): siRNA sense strand
gcaaucaguucuuugucuu

SEQ ID NO: 52873 - RNA, 19 nt, Homo sapiens
  misc_RNA (1)...(19): siRNA sense strand
gaggagcaguucaggaaga

SEQ ID NO: 52874 - RNA, 19 nt, Homo sapiens
  misc_RNA (1)...(19): siRNA sense strand
aaaccuaccugaugagcaa

SEQ ID NO: 52875 - RNA, 19 nt, Homo sapiens
  misc_RNA (1)...(19): siRNA sense strand
gcaauacuaugggcucuuc

SEQ ID NO: 52876 - RNA, 19 nt, Homo sapiens
  misc_RNA (1)...(19): siRNA sense strand
gggaaaacauucauuaaga

SEQ ID NO: 52877 - RNA, 19 nt, Homo sapiens
  misc_RNA (1)...(19): siRNA sense strand
aaagaaccuugacuucauu

SEQ ID NO: 52878 - RNA, 19 nt, Homo sapiens
  misc_RNA (1)...(19): siRNA sense strand
ugaaugacauguaucucaa

SEQ ID NO: 52879 - RNA, 19 nt, Homo sapiens
  misc_RNA (1)...(19): siRNA sense strand
ggaugaaaccuaccugaug

SEQ ID NO: 52880 - RNA, 19 nt, Homo sapiens
  misc_RNA (1)...(19): siRNA sense strand
guaaagaaccuugacuuca

SEQ ID NO: 52881 - RNA, 19 nt, Homo sapiens
  misc_RNA (1)...(19): siRNA sense strand
gagauguucugcugcuaug

SEQ ID NO: 52882 - RNA, 19 nt, Homo sapiens
  misc_RNA (1)...(19): siRNA sense strand
ugucuuggauguugucauu

SEQ ID NO: 52883 - RNA, 19 nt, Homo sapiens
  misc_RNA (1)...(19): siRNA sense strand
uuucacagcugcaaagaga

SEQ ID NO: 52884 - RNA, 19 nt, Homo sapiens
  misc_RNA (1)...(19): siRNA sense strand
cgacaagucccugcaguuu

SEQ ID NO: 52885 - RNA, 19 nt, Homo sapiens
  misc_RNA (1)...(19): siRNA sense strand
gcucagaacagcagcauca

SEQ ID NO: 52886 - RNA, 19 nt, Homo sapiens
  misc_RNA (1)...(19): siRNA sense strand
ugacauguaucucaacaac

SEQ ID NO: 52887 - RNA, 19 nt, Homo sapiens
  misc_RNA (1)...(19): siRNA sense strand
gggacucgcuggacaugau

SEQ ID NO: 52888 - RNA, 19 nt, Homo sapiens
  misc_RNA (1)...(19): siRNA sense strand
gcaugaagcaauacuaugg

SEQ ID NO: 52889 - RNA, 19 nt, Homo sapiens
  misc_RNA (1)...(19): siRNA sense strand
gaaauucaaggccacuuag

SEQ ID NO: 52890 - RNA, 19 nt, Homo sapiens
  misc_RNA (1)...(19): siRNA sense strand
ucuuggauguugucauuaa

SEQ ID NO: 52891 - RNA, 19 nt, Homo sapiens
  misc_RNA (1)...(19): siRNA sense strand
caucguagccugcugcaau

SEQ ID NO: 52892 - RNA, 19 nt, Homo sapiens
  misc_RNA (1)...(19): siRNA sense strand
ggaagagccaggccauugu

SEQ ID NO: 52893 - RNA, 19 nt, Homo sapiens
  misc_RNA (1)...(19): siRNA sense strand
ccacaaccacggagauguu

SEQ ID NO: 52894 - RNA, 19 nt, Homo sapiens
  misc_RNA (1)...(19): siRNA sense strand
aagaaagccucauugacau

SEQ ID NO: 52895 - RNA, 19 nt, Homo sapiens
  misc_RNA (1)...(19): siRNA sense strand
ccucaucucugguguacuc

SEQ ID NO: 52896 - RNA, 19 nt, Homo sapiens
  misc_RNA (1)...(19): siRNA sense strand
ggagauguucugcugcuau

SEQ ID NO: 52897 - RNA, 19 nt, Homo sapiens
  misc_RNA (1)...(19): siRNA sense strand
gagcguuugccuccaauug

SEQ ID NO: 52898 - RNA, 19 nt, Homo sapiens
  misc_RNA (1)...(19): siRNA sense strand
gacgagcguuugccuccaa

SEQ ID NO: 52899 - RNA, 19 nt, Homo sapiens
  misc_RNA (1)...(19): siRNA sense strand
gaagagccaggccauugug

SEQ ID NO: 52900 - RNA, 19 nt, Homo sapiens
  misc_RNA (1)...(19): siRNA sense strand
gaauaguaaagaaccuuga

SEQ ID NO: 52901 - RNA, 19 nt, Homo sapiens
  misc_RNA (1)...(19): siRNA sense strand
gaaaugcuccccggaaauu

SEQ ID NO: 52902 - RNA, 19 nt, Homo sapiens
  misc_RNA (1)...(19): siRNA sense strand
ugacuucauugucuauaag

SEQ ID NO: 52903 - RNA, 19 nt, Homo sapiens
  misc_RNA (1)...(19): siRNA sense strand
ggaagaaagccucauugac

SEQ ID NO: 52904 - RNA, 19 nt, Homo sapiens
  misc_RNA (1)...(19): siRNA sense strand
ggcggaggcuacagcaaga

SEQ ID NO: 52905 - RNA, 19 nt, Homo sapiens
  misc_RNA (1)...(19): siRNA sense strand
cuacugagagcaagccauu

SEQ ID NO: 52906 - RNA, 19 nt, Homo sapiens
  misc_RNA (1)...(19): siRNA sense strand
gaucuguucacucaguuga

SEQ ID NO: 52907 - RNA, 19 nt, Homo sapiens
  misc_RNA (1)...(19): siRNA sense strand
gaaccuugacuucauuguc

SEQ ID NO: 52908 - RNA, 19 nt, Homo sapiens
  misc_RNA (1)...(19): siRNA sense strand
gacaagucccugcaguuug

SEQ ID NO: 52909 - RNA, 19 nt, Homo sapiens
  misc_RNA (1)...(19): siRNA sense strand
gccacuccauucccacuga

SEQ ID NO: 52910 - RNA, 19 nt, Homo sapiens
  misc_RNA (1)...(19): siRNA sense strand
caaaagcuguggaagaaag

SEQ ID NO: 52911 - RNA, 19 nt, Homo sapiens
  misc_RNA (1)...(19): siRNA sense strand
ggauggccauugacaacca

SEQ ID NO: 52912 - RNA, 19 nt, Homo sapiens
  misc_RNA (1)...(19): siRNA sense strand
ccagggacaccaaccuuga

SEQ ID NO: 52913 - RNA, 19 nt, Homo sapiens
  misc_RNA (1)...(19): siRNA sense strand
gcagaaaugcagcccugau

SEQ ID NO: 52914 - RNA, 19 nt, Homo sapiens
  misc_RNA (1)...(19): siRNA sense strand
uggaagaaagccucauuga

SEQ ID NO: 52915 - RNA, 19 nt, Homo sapiens
  misc_RNA (1)...(19): siRNA sense strand
gggaucuguucacucaguu

SEQ ID NO: 52916 - RNA, 19 nt, Homo sapiens
  misc_RNA (1)...(19): siRNA sense strand
cagaaaugcagcccugaug

SEQ ID NO: 52917 - RNA, 19 nt, Homo sapiens
  misc_RNA (1)...(19): siRNA sense strand
ucugaguacuggcugaaug

SEQ ID NO: 52918 - RNA, 19 nt, Homo sapiens
  misc_RNA (1)...(19): siRNA sense strand
gaugaccagcugagguuug

SEQ ID NO: 52919 - RNA, 19 nt, Homo sapiens
  misc_RNA (1)...(19): siRNA sense strand
gcgcugcaucugccuugua

SEQ ID NO: 52920 - RNA, 19 nt, Homo sapiens
  misc_RNA (1)...(19): siRNA sense strand
cugcugcaaucaguucuuu

SEQ ID NO: 52921 - RNA, 19 nt, Homo sapiens
  misc_RNA (1)...(19): siRNA sense strand
ucaguucuuugucuuggau

SEQ ID NO: 52922 - RNA, 19 nt, Homo sapiens
  misc_RNA (1)...(19): siRNA sense strand
gguuuguccucuccacuag

SEQ ID NO: 52923 - RNA, 19 nt, Homo sapiens
  misc_RNA (1)...(19): siRNA sense strand
agcagacccuggccacgua

SEQ ID NO: 52924 - RNA, 19 nt, Homo sapiens
  misc_RNA (1)...(19): siRNA sense strand
aaccuugacuucauugucu

SEQ ID NO: 52925 - RNA, 19 nt, Homo sapiens
  misc_RNA (1)...(19): siRNA sense strand
ggacucgcuggacaugauu

SEQ ID NO: 52926 - RNA, 19 nt, Homo sapiens
  misc_RNA (1)...(19): siRNA sense strand
guagccugcugcaaucagu

SEQ ID NO: 52927 - RNA, 19 nt, Homo sapiens
  misc_RNA (1)...(19): siRNA sense strand
gcugcaaucaguucuuugu

SEQ ID NO: 52928 - RNA, 19 nt, Homo sapiens
  misc_RNA (1)...(19): siRNA sense strand
ucucugguguacucagcua

SEQ ID NO: 52929 - RNA, 19 nt, Homo sapiens
  misc_RNA (1)...(19): siRNA sense strand
ugcaaaagcuguggaagaa

SEQ ID NO: 52930 - RNA, 19 nt, Homo sapiens
  misc_RNA (1)...(19): siRNA sense strand
ccgaugaccagcugagguu

SEQ ID NO: 52931 - RNA, 19 nt, Homo sapiens
  misc_RNA (1)...(19): siRNA sense strand
acacgcugguggcucagaa

SEQ ID NO: 52932 - RNA, 19 nt, Homo sapiens
  misc_RNA (1)...(19): siRNA sense strand
caacugggugucugaguac

SEQ ID NO: 52933 - RNA, 19 nt, Homo sapiens
  misc_RNA (1)...(19): siRNA sense strand
aaugacauguaucucaaca

SEQ ID NO: 52934 - RNA, 19 nt, Homo sapiens
  misc_RNA (1)...(19): siRNA sense strand
ugcaaucaguucuuugucu

SEQ ID NO: 52935 - RNA, 19 nt, Homo sapiens
  misc_RNA (1)...(19): siRNA sense strand
cugaaugacauguaucuca

SEQ ID NO: 52936 - RNA, 19 nt, Homo sapiens
  misc_RNA (1)...(19): siRNA sense strand
uaguaaagaaccuugacuu

SEQ ID NO: 52937 - RNA, 19 nt, Homo sapiens
  misc_RNA (1)...(19): siRNA sense strand
ggagcugcccgagauguuc

SEQ ID NO: 52938 - RNA, 19 nt, Homo sapiens
  misc_RNA (1)...(19): siRNA sense strand
aggaagagccaggccauug

SEQ ID NO: 52939 - RNA, 19 nt, Homo sapiens
  misc_RNA (1)...(19): siRNA sense strand
guggaagaaagccucauug

SEQ ID NO: 52940 - RNA, 19 nt, Homo sapiens
  misc_RNA (1)...(19): siRNA sense strand
ugcccgagauguucaugga

SEQ ID NO: 52941 - RNA, 19 nt, Homo sapiens
  misc_RNA (1)...(19): siRNA sense strand
gagcugcccgagauguuca

SEQ ID NO: 52942 - RNA, 19 nt, Homo sapiens
  misc_RNA (1)...(19): siRNA sense strand
acacagucauggccauaac

SEQ ID NO: 52943 - RNA, 19 nt, Homo sapiens
  misc_RNA (1)...(19): siRNA sense strand
ggcacuggcuuuugugaga

SEQ ID NO: 52944 - RNA, 19 nt, Homo sapiens
  misc_RNA (1)...(19): siRNA sense strand
aguacuggcugaaugacau

SEQ ID NO: 52945 - RNA, 19 nt, Homo sapiens
  misc_RNA (1)...(19): siRNA sense strand
cgcugcaucugccuuguau

SEQ ID NO: 52946 - RNA, 19 nt, Homo sapiens
  misc_RNA (1)...(19): siRNA sense strand
caaucaguucuuugucuug

SEQ ID NO: 52947 - RNA, 19 nt, Homo sapiens
  misc_RNA (1)...(19): siRNA sense strand
ucagaacagcagcaucaug

SEQ ID NO: 52948 - RNA, 19 nt, Homo sapiens
  misc_RNA (1)...(19): siRNA sense strand
guccuguggucccaaaugg

SEQ ID NO: 52949 - RNA, 19 nt, Homo sapiens
  misc_RNA (1)...(19): siRNA sense strand
cagaggcacuggcuuuugu

SEQ ID NO: 52950 - RNA, 19 nt, Homo sapiens
  misc_RNA (1)...(19): siRNA sense strand
cuacaggcuccaccgaaga

SEQ ID NO: 52951 - RNA, 19 nt, Homo sapiens
  misc_RNA (1)...(19): siRNA sense strand
aguaaagaaccuugacuuc

SEQ ID NO: 52952 - RNA, 19 nt, Homo sapiens
  misc_RNA (1)...(19): siRNA sense strand
ggauguugucauuaauuuc

SEQ ID NO: 52953 - RNA, 19 nt, Homo sapiens
  misc_RNA (1)...(19): siRNA sense strand
gaagaaagccucauugaca

SEQ ID NO: 52954 - RNA, 19 nt, Homo sapiens
  misc_RNA (1)...(19): siRNA sense strand
gaugaaaccuaccugauga

SEQ ID NO: 52955 - RNA, 19 nt, Homo sapiens
  misc_RNA (1)...(19): siRNA sense strand
gcaaggagcugcccgagau

SEQ ID NO: 52956 - RNA, 19 nt, Homo sapiens
  misc_RNA (1)...(19): siRNA sense strand
uaacagggauggccauuga

SEQ ID NO: 52957 - RNA, 19 nt, Homo sapiens
  misc_RNA (1)...(19): siRNA sense strand
uaaagaaccuugacuucau

SEQ ID NO: 52958 - RNA, 19 nt, Homo sapiens
  misc_RNA (1)...(19): siRNA sense strand
ggaaauucaaggccacuua

SEQ ID NO: 52959 - RNA, 19 nt, Homo sapiens
  misc_RNA (1)...(19): siRNA sense strand
ccaacugggugucugagua

SEQ ID NO: 52960 - RNA, 19 nt, Homo sapiens
  misc_RNA (1)...(19): siRNA sense strand
gcaaucaguucuuugucuu

SEQ ID NO: 52961 - RNA, 19 nt, Homo sapiens
  misc_RNA (1)...(19): siRNA sense strand
gaggagcaguucaggaaga

SEQ ID NO: 52962 - RNA, 19 nt, Homo sapiens
  misc_RNA (1)...(19): siRNA sense strand
aaaccuaccugaugagcaa

SEQ ID NO: 52963 - RNA, 19 nt, Homo sapiens
  misc_RNA (1)...(19): siRNA sense strand
gcaauacuaugggcucuuc

SEQ ID NO: 52964 - RNA, 19 nt, Homo sapiens
  misc_RNA (1)...(19): siRNA sense strand
gggaaaacauucauuaaga

SEQ ID NO: 52965 - RNA, 19 nt, Homo sapiens
  misc_RNA (1)...(19): siRNA sense strand
aaagaaccuugacuucauu

SEQ ID NO: 52966 - RNA, 19 nt, Homo sapiens
  misc_RNA (1)...(19): siRNA sense strand
ugaaugacauguaucucaa

SEQ ID NO: 52967 - RNA, 19 nt, Homo sapiens
  misc_RNA (1)...(19): siRNA sense strand
ggaugaaaccuaccugaug

SEQ ID NO: 52968 - RNA, 19 nt, Homo sapiens
  misc_RNA (1)...(19): siRNA sense strand
guaaagaaccuugacuuca

SEQ ID NO: 52969 - RNA, 19 nt, Homo sapiens
  misc_RNA (1)...(19): siRNA sense strand
gagauguucugcugcuaug

SEQ ID NO: 52970 - RNA, 19 nt, Homo sapiens
  misc_RNA (1)...(19): siRNA sense strand
ugucuuggauguugucauu

SEQ ID NO: 52971 - RNA, 19 nt, Homo sapiens
  misc_RNA (1)...(19): siRNA sense strand
uuucacagcugcaaagaga

SEQ ID NO: 52972 - RNA, 19 nt, Homo sapiens
  misc_RNA (1)...(19): siRNA sense strand
cgacaagucccugcaguuu

SEQ ID NO: 52973 - RNA, 19 nt, Homo sapiens
  misc_RNA (1)...(19): siRNA sense strand
gcucagaacagcagcauca

SEQ ID NO: 52974 - RNA, 19 nt, Homo sapiens
  misc_RNA (1)...(19): siRNA sense strand
ugacauguaucucaacaac

SEQ ID NO: 52975 - RNA, 19 nt, Homo sapiens
  misc_RNA (1)...(19): siRNA sense strand
gggacucgcuggacaugau

SEQ ID NO: 52976 - RNA, 19 nt, Homo sapiens
  misc_RNA (1)...(19): siRNA sense strand
gcaugaagcaauacuaugg

SEQ ID NO: 52977 - RNA, 19 nt, Homo sapiens
  misc_RNA (1)...(19): siRNA sense strand
gaaauucaaggccacuuag

SEQ ID NO: 52978 - RNA, 19 nt, Homo sapiens
  misc_RNA (1)...(19): siRNA sense strand
ucuuggauguugucauuaa

SEQ ID NO: 52979 - RNA, 19 nt, Homo sapiens
  misc_RNA (1)...(19): siRNA sense strand
caucguagccugcugcaau

SEQ ID NO: 52980 - RNA, 19 nt, Homo sapiens
  misc_RNA (1)...(19): siRNA sense strand
ggaagagccaggccauugu

SEQ ID NO: 52981 - RNA, 19 nt, Homo sapiens
  misc_RNA (1)...(19): siRNA sense strand
ccacaaccacggagauguu

SEQ ID NO: 52982 - RNA, 19 nt, Homo sapiens
  misc_RNA (1)...(19): siRNA sense strand
aagaaagccucauugacau

SEQ ID NO: 52983 - RNA, 19 nt, Homo sapiens
  misc_RNA (1)...(19): siRNA sense strand
ccucaucucugguguacuc

SEQ ID NO: 52984 - RNA, 19 nt, Homo sapiens
  misc_RNA (1)...(19): siRNA sense strand
ggagauguucugcugcuau

SEQ ID NO: 52985 - RNA, 19 nt, Homo sapiens
  misc_RNA (1)...(19): siRNA sense strand
gagcguuugccuccaauug

SEQ ID NO: 52986 - RNA, 19 nt, Homo sapiens
  misc_RNA (1)...(19): siRNA sense strand
gacgagcguuugccuccaa

SEQ ID NO: 52987 - RNA, 19 nt, Homo sapiens
  misc_RNA (1)...(19): siRNA sense strand
gaagagccaggccauugug

SEQ ID NO: 52988 - RNA, 19 nt, Homo sapiens
  misc_RNA (1)...(19): siRNA sense strand
gaauaguaaagaaccuuga

SEQ ID NO: 52989 - RNA, 19 nt, Homo sapiens
  misc_RNA (1)...(19): siRNA sense strand
gaaaugcuccccggaaauu

SEQ ID NO: 52990 - RNA, 19 nt, Homo sapiens
  misc_RNA (1)...(19): siRNA sense strand
ugacuucauugucuauaag

SEQ ID NO: 52991 - RNA, 19 nt, Homo sapiens
  misc_RNA (1)...(19): siRNA sense strand
ggaagaaagccucauugac

SEQ ID NO: 52992 - RNA, 19 nt, Homo sapiens
  misc_RNA (1)...(19): siRNA sense strand
ggcggaggcuacagcaaga

SEQ ID NO: 52993 - RNA, 19 nt, Homo sapiens
  misc_RNA (1)...(19): siRNA sense strand
cuacugagagcaagccauu

SEQ ID NO: 52994 - RNA, 19 nt, Homo sapiens
  misc_RNA (1)...(19): siRNA sense strand
gaucuguucacucaguuga

SEQ ID NO: 52995 - RNA, 19 nt, Homo sapiens
  misc_RNA (1)...(19): siRNA sense strand
gaaccuugacuucauuguc

SEQ ID NO: 52996 - RNA, 19 nt, Homo sapiens
  misc_RNA (1)...(19): siRNA sense strand
gacaagucccugcaguuug

SEQ ID NO: 52997 - RNA, 19 nt, Homo sapiens
  misc_RNA (1)...(19): siRNA sense strand
gccacuccauucccacuga

SEQ ID NO: 52998 - RNA, 19 nt, Homo sapiens
  misc_RNA (1)...(19): siRNA sense strand
caaaagcuguggaagaaag

SEQ ID NO: 52999 - RNA, 19 nt, Homo sapiens
  misc_RNA (1)...(19): siRNA sense strand
ggauggccauugacaacca

SEQ ID NO: 53000 - RNA, 19 nt, Homo sapiens
  misc_RNA (1)...(19): siRNA sense strand
ccagggacaccaaccuuga

SEQ ID NO: 53001 - RNA, 19 nt, Homo sapiens
  misc_RNA (1)...(19): siRNA sense strand
gcagaaaugcagcccugau

SEQ ID NO: 53002 - RNA, 19 nt, Homo sapiens
  misc_RNA (1)...(19): siRNA sense strand
uggaagaaagccucauuga

SEQ ID NO: 53003 - RNA, 19 nt, Homo sapiens
  misc_RNA (1)...(19): siRNA sense strand
gggaucuguucacucaguu

SEQ ID NO: 53004 - RNA, 19 nt, Homo sapiens
  misc_RNA (1)...(19): siRNA sense strand
cagaaaugcagcccugaug

SEQ ID NO: 53005 - RNA, 19 nt, Homo sapiens
  misc_RNA (1)...(19): siRNA sense strand
ucugaguacuggcugaaug

SEQ ID NO: 53006 - RNA, 19 nt, Homo sapiens
  misc_RNA (1)...(19): siRNA sense strand
gaugaccagcugagguuug

SEQ ID NO: 53007 - RNA, 19 nt, Homo sapiens
  misc_RNA (1)...(19): siRNA sense strand
gcgcugcaucugccuugua

SEQ ID NO: 53008 - RNA, 19 nt, Homo sapiens
  misc_RNA (1)...(19): siRNA sense strand
cugcugcaaucaguucuuu

SEQ ID NO: 53009 - RNA, 19 nt, Homo sapiens
  misc_RNA (1)...(19): siRNA sense strand
ucaguucuuugucuuggau

SEQ ID NO: 53010 - RNA, 19 nt, Homo sapiens
  misc_RNA (1)...(19): siRNA sense strand
gguuuguccucuccacuag

SEQ ID NO: 53011 - RNA, 19 nt, Homo sapiens
  misc_RNA (1)...(19): siRNA sense strand
agcagacccuggccacgua

SEQ ID NO: 53012 - RNA, 19 nt, Homo sapiens
  misc_RNA (1)...(19): siRNA sense strand
aaccuugacuucauugucu

SEQ ID NO: 53013 - RNA, 19 nt, Homo sapiens
  misc_RNA (1)...(19): siRNA sense strand
ggacucgcuggacaugauu

SEQ ID NO: 53014 - RNA, 19 nt, Homo sapiens
  misc_RNA (1)...(19): siRNA sense strand
guagccugcugcaaucagu

SEQ ID NO: 53015 - RNA, 19 nt, Homo sapiens
  misc_RNA (1)...(19): siRNA sense strand
gcugcaaucaguucuuugu

SEQ ID NO: 53016 - RNA, 19 nt, Homo sapiens
  misc_RNA (1)...(19): siRNA sense strand
ucucugguguacucagcua

SEQ ID NO: 53017 - RNA, 19 nt, Homo sapiens
  misc_RNA (1)...(19): siRNA sense strand
ugcaaaagcuguggaagaa

SEQ ID NO: 53018 - RNA, 19 nt, Homo sapiens
  misc_RNA (1)...(19): siRNA sense strand
ccgaugaccagcugagguu

SEQ ID NO: 53019 - RNA, 19 nt, Homo sapiens
  misc_RNA (1)...(19): siRNA sense strand
acacgcugguggcucagaa

SEQ ID NO: 53020 - RNA, 19 nt, Homo sapiens
  misc_RNA (1)...(19): siRNA sense strand
caacugggugucugaguac

SEQ ID NO: 53021 - RNA, 19 nt, Homo sapiens
  misc_RNA (1)...(19): siRNA sense strand
aaugacauguaucucaaca

SEQ ID NO: 53022 - RNA, 19 nt, Homo sapiens
  misc_RNA (1)...(19): siRNA sense strand
ugcaaucaguucuuugucu

SEQ ID NO: 53023 - RNA, 19 nt, Homo sapiens
  misc_RNA (1)...(19): siRNA sense strand
cugaaugacauguaucuca

SEQ ID NO: 53024 - RNA, 19 nt, Homo sapiens
  misc_RNA (1)...(19): siRNA sense strand
uaguaaagaaccuugacuu

SEQ ID NO: 53025 - RNA, 19 nt, Homo sapiens
  misc_RNA (1)...(19): siRNA sense strand
ggagcugcccgagauguuc

SEQ ID NO: 53026 - RNA, 19 nt, Homo sapiens
  misc_RNA (1)...(19): siRNA sense strand
aggaagagccaggccauug

SEQ ID NO: 53027 - RNA, 19 nt, Homo sapiens
  misc_RNA (1)...(19): siRNA sense strand
guggaagaaagccucauug

SEQ ID NO: 53028 - RNA, 19 nt, Homo sapiens
  misc_RNA (1)...(19): siRNA sense strand
ugcccgagauguucaugga

SEQ ID NO: 53029 - RNA, 19 nt, Homo sapiens
  misc_RNA (1)...(19): siRNA sense strand
gagcugcccgagauguuca

SEQ ID NO: 53030 - RNA, 19 nt, Homo sapiens
  misc_RNA (1)...(19): siRNA sense strand
acacagucauggccauaac

SEQ ID NO: 53031 - RNA, 19 nt, Homo sapiens
  misc_RNA (1)...(19): siRNA sense strand
ggcacuggcuuuugugaga

SEQ ID NO: 53032 - RNA, 19 nt, Homo sapiens
  misc_RNA (1)...(19): siRNA sense strand
aguacuggcugaaugacau

SEQ ID NO: 53033 - RNA, 19 nt, Homo sapiens
  misc_RNA (1)...(19): siRNA sense strand
cgcugcaucugccuuguau

SEQ ID NO: 53034 - RNA, 19 nt, Homo sapiens
  misc_RNA (1)...(19): siRNA sense strand
caaucaguucuuugucuug

SEQ ID NO: 53035 - RNA, 19 nt, Homo sapiens
  misc_RNA (1)...(19): siRNA sense strand
ucagaacagcagcaucaug

SEQ ID NO: 53036 - RNA, 19 nt, Homo sapiens
  misc_RNA (1)...(19): siRNA sense strand
guccuguggucccaaaugg

SEQ ID NO: 53037 - RNA, 19 nt, Homo sapiens
  misc_RNA (1)...(19): siRNA sense strand
cagaggcacuggcuuuugu

SEQ ID NO: 53038 - RNA, 19 nt, Homo sapiens
  misc_RNA (1)...(19): siRNA sense strand
cuacaggcuccaccgaaga

SEQ ID NO: 53039 - RNA, 19 nt, Homo sapiens
  misc_RNA (1)...(19): siRNA sense strand
aguaaagaaccuugacuuc

SEQ ID NO: 53040 - RNA, 19 nt, Homo sapiens
  misc_RNA (1)...(19): siRNA sense strand
ggauguugucauuaauuuc

SEQ ID NO: 53041 - RNA, 19 nt, Homo sapiens
  misc_RNA (1)...(19): siRNA sense strand
gaagaaagccucauugaca

SEQ ID NO: 53042 - RNA, 19 nt, Homo sapiens
  misc_RNA (1)...(19): siRNA sense strand
gaugaaaccuaccugauga

SEQ ID NO: 53043 - RNA, 19 nt, Homo sapiens
  misc_RNA (1)...(19): siRNA sense strand
gcaaggagcugcccgagau

SEQ ID NO: 53044 - RNA, 19 nt, Homo sapiens
  misc_RNA (1)...(19): siRNA sense strand
uaacagggauggccauuga

SEQ ID NO: 53045 - RNA, 19 nt, Homo sapiens
  misc_RNA (1)...(19): siRNA sense strand
uaaagaaccuugacuucau

SEQ ID NO: 53046 - RNA, 19 nt, Homo sapiens
  misc_RNA (1)...(19): siRNA sense strand
ggaaauucaaggccacuua

SEQ ID NO: 53047 - RNA, 19 nt, Homo sapiens
  misc_RNA (1)...(19): siRNA sense strand
ccaacugggugucugagua

SEQ ID NO: 53048 - RNA, 19 nt, Homo sapiens
  misc_RNA (1)...(19): siRNA sense strand
gcaaucaguucuuugucuu

SEQ ID NO: 53049 - RNA, 19 nt, Homo sapiens
  misc_RNA (1)...(19): siRNA sense strand
gaggagcaguucaggaaga

SEQ ID NO: 53050 - RNA, 19 nt, Homo sapiens
  misc_RNA (1)...(19): siRNA sense strand
aaaccuaccugaugagcaa

SEQ ID NO: 53051 - RNA, 19 nt, Homo sapiens
  misc_RNA (1)...(19): siRNA sense strand
gcaauacuaugggcucuuc

SEQ ID NO: 53052 - RNA, 19 nt, Homo sapiens
  misc_RNA (1)...(19): siRNA sense strand
gggaaaacauucauuaaga

SEQ ID NO: 53053 - RNA, 19 nt, Homo sapiens
  misc_RNA (1)...(19): siRNA sense strand
aaagaaccuugacuucauu

SEQ ID NO: 53054 - RNA, 19 nt, Homo sapiens
  misc_RNA (1)...(19): siRNA sense strand
ugaaugacauguaucucaa

SEQ ID NO: 53055 - RNA, 19 nt, Homo sapiens
  misc_RNA (1)...(19): siRNA sense strand
ggaugaaaccuaccugaug

SEQ ID NO: 53056 - RNA, 19 nt, Homo sapiens
  misc_RNA (1)...(19): siRNA sense strand
guaaagaaccuugacuuca

SEQ ID NO: 53057 - RNA, 19 nt, Homo sapiens
  misc_RNA (1)...(19): siRNA sense strand
gagauguucugcugcuaug

SEQ ID NO: 53058 - RNA, 19 nt, Homo sapiens
  misc_RNA (1)...(19): siRNA sense strand
ugucuuggauguugucauu

SEQ ID NO: 53059 - RNA, 19 nt, Homo sapiens
  misc_RNA (1)...(19): siRNA sense strand
uuucacagcugcaaagaga

SEQ ID NO: 53060 - RNA, 19 nt, Homo sapiens
  misc_RNA (1)...(19): siRNA sense strand
cgacaagucccugcaguuu

SEQ ID NO: 53061 - RNA, 19 nt, Homo sapiens
  misc_RNA (1)...(19): siRNA sense strand
gcucagaacagcagcauca

SEQ ID NO: 53062 - RNA, 19 nt, Homo sapiens
  misc_RNA (1)...(19): siRNA sense strand
ugacauguaucucaacaac

SEQ ID NO: 53063 - RNA, 19 nt, Homo sapiens
  misc_RNA (1)...(19): siRNA sense strand
gggacucgcuggacaugau

SEQ ID NO: 53064 - RNA, 19 nt, Homo sapiens
  misc_RNA (1)...(19): siRNA sense strand
gcaugaagcaauacuaugg

SEQ ID NO: 53065 - RNA, 19 nt, Homo sapiens
  misc_RNA (1)...(19): siRNA sense strand
gaaauucaaggccacuuag

SEQ ID NO: 53066 - RNA, 19 nt, Homo sapiens
  misc_RNA (1)...(19): siRNA sense strand
ucuuggauguugucauuaa

SEQ ID NO: 53067 - RNA, 19 nt, Homo sapiens
  misc_RNA (1)...(19): siRNA sense strand
caucguagccugcugcaau

SEQ ID NO: 53068 - RNA, 19 nt, Homo sapiens
  misc_RNA (1)...(19): siRNA sense strand
ggaagagccaggccauugu

SEQ ID NO: 53069 - RNA, 19 nt, Homo sapiens
  misc_RNA (1)...(19): siRNA sense strand
ccacaaccacggagauguu

SEQ ID NO: 53070 - RNA, 19 nt, Homo sapiens
  misc_RNA (1)...(19): siRNA sense strand
aagaaagccucauugacau

SEQ ID NO: 53071 - RNA, 19 nt, Homo sapiens
  misc_RNA (1)...(19): siRNA sense strand
ccucaucucugguguacuc

SEQ ID NO: 53072 - RNA, 19 nt, Homo sapiens
  misc_RNA (1)...(19): siRNA sense strand
ggagauguucugcugcuau

SEQ ID NO: 53073 - RNA, 19 nt, Homo sapiens
  misc_RNA (1)...(19): siRNA sense strand
gagcguuugccuccaauug

SEQ ID NO: 53074 - RNA, 19 nt, Homo sapiens
  misc_RNA (1)...(19): siRNA sense strand
gacgagcguuugccuccaa

SEQ ID NO: 53075 - RNA, 19 nt, Homo sapiens
  misc_RNA (1)...(19): siRNA sense strand
gaagagccaggccauugug

SEQ ID NO: 53076 - RNA, 19 nt, Homo sapiens
  misc_RNA (1)...(19): siRNA sense strand
gaauaguaaagaaccuuga

SEQ ID NO: 53077 - RNA, 19 nt, Homo sapiens
  misc_RNA (1)...(19): siRNA sense strand
gaaaugcuccccggaaauu

SEQ ID NO: 53078 - RNA, 19 nt, Homo sapiens
  misc_RNA (1)...(19): siRNA sense strand
ugacuucauugucuauaag

SEQ ID NO: 53079 - RNA, 19 nt, Homo sapiens
  misc_RNA (1)...(19): siRNA sense strand
ggaagaaagccucauugac

SEQ ID NO: 53080 - RNA, 19 nt, Homo sapiens
  misc_RNA (1)...(19): siRNA sense strand
ggcggaggcuacagcaaga

SEQ ID NO: 53081 - RNA, 19 nt, Homo sapiens
  misc_RNA (1)...(19): siRNA sense strand
cuacugagagcaagccauu

SEQ ID NO: 53082 - RNA, 19 nt, Homo sapiens
  misc_RNA (1)...(19): siRNA sense strand
gaucuguucacucaguuga

SEQ ID NO: 53083 - RNA, 19 nt, Homo sapiens
  misc_RNA (1)...(19): siRNA sense strand
gaaccuugacuucauuguc

SEQ ID NO: 53084 - RNA, 19 nt, Homo sapiens
  misc_RNA (1)...(19): siRNA sense strand
gacaagucccugcaguuug

SEQ ID NO: 53085 - RNA, 19 nt, Homo sapiens
  misc_RNA (1)...(19): siRNA sense strand
gccacuccauucccacuga

SEQ ID NO: 53086 - RNA, 19 nt, Homo sapiens
  misc_RNA (1)...(19): siRNA sense strand
caaaagcuguggaagaaag

SEQ ID NO: 53087 - RNA, 19 nt, Homo sapiens
  misc_RNA (1)...(19): siRNA sense strand
ggauggccauugacaacca

SEQ ID NO: 53088 - RNA, 19 nt, Homo sapiens
  misc_RNA (1)...(19): siRNA sense strand
ccagggacaccaaccuuga

SEQ ID NO: 53089 - RNA, 19 nt, Homo sapiens
  misc_RNA (1)...(19): siRNA sense strand
gcagaaaugcagcccugau

SEQ ID NO: 53090 - RNA, 19 nt, Homo sapiens
  misc_RNA (1)...(19): siRNA sense strand
uggaagaaagccucauuga

SEQ ID NO: 53091 - RNA, 19 nt, Homo sapiens
  misc_RNA (1)...(19): siRNA sense strand
gggaucuguucacucaguu

SEQ ID NO: 53092 - RNA, 19 nt, Homo sapiens
  misc_RNA (1)...(19): siRNA sense strand
cagaaaugcagcccugaug

SEQ ID NO: 53093 - RNA, 19 nt, Homo sapiens
  misc_RNA (1)...(19): siRNA sense strand
ucugaguacuggcugaaug

SEQ ID NO: 53094 - RNA, 19 nt, Homo sapiens
  misc_RNA (1)...(19): siRNA sense strand
gaugaccagcugagguuug

SEQ ID NO: 53095 - RNA, 19 nt, Homo sapiens
  misc_RNA (1)...(19): siRNA sense strand
gcgcugcaucugccuugua

SEQ ID NO: 53096 - RNA, 19 nt, Homo sapiens
  misc_RNA (1)...(19): siRNA sense strand
cugcugcaaucaguucuuu

SEQ ID NO: 53097 - RNA, 19 nt, Homo sapiens
  misc_RNA (1)...(19): siRNA sense strand
ucaguucuuugucuuggau

SEQ ID NO: 53098 - RNA, 19 nt, Homo sapiens
  misc_RNA (1)...(19): siRNA sense strand
gguuuguccucuccacuag

SEQ ID NO: 53099 - RNA, 19 nt, Homo sapiens
  misc_RNA (1)...(19): siRNA sense strand
agcagacccuggccacgua

SEQ ID NO: 53100 - RNA, 19 nt, Homo sapiens
  misc_RNA (1)...(19): siRNA sense strand
aaccuugacuucauugucu

SEQ ID NO: 53101 - RNA, 19 nt, Homo sapiens
  misc_RNA (1)...(19): siRNA sense strand
ggacucgcuggacaugauu

SEQ ID NO: 53102 - RNA, 19 nt, Homo sapiens
  misc_RNA (1)...(19): siRNA sense strand
guagccugcugcaaucagu

SEQ ID NO: 53103 - RNA, 19 nt, Homo sapiens
  misc_RNA (1)...(19): siRNA sense strand
gcugcaaucaguucuuugu

SEQ ID NO: 53104 - RNA, 19 nt, Homo sapiens
  misc_RNA (1)...(19): siRNA sense strand
ucucugguguacucagcua

SEQ ID NO: 53105 - RNA, 19 nt, Homo sapiens
  misc_RNA (1)...(19): siRNA sense strand
ugcaaaagcuguggaagaa

SEQ ID NO: 53106 - RNA, 19 nt, Homo sapiens
  misc_RNA (1)...(19): siRNA sense strand
ccgaugaccagcugagguu

SEQ ID NO: 53107 - RNA, 19 nt, Homo sapiens
  misc_RNA (1)...(19): siRNA sense strand
acacgcugguggcucagaa

SEQ ID NO: 53108 - RNA, 19 nt, Homo sapiens
  misc_RNA (1)...(19): siRNA sense strand
caacugggugucugaguac

SEQ ID NO: 53109 - RNA, 19 nt, Homo sapiens
  misc_RNA (1)...(19): siRNA sense strand
aaugacauguaucucaaca

SEQ ID NO: 53110 - RNA, 19 nt, Homo sapiens
  misc_RNA (1)...(19): siRNA sense strand
ugcaaucaguucuuugucu

SEQ ID NO: 53111 - RNA, 19 nt, Homo sapiens
  misc_RNA (1)...(19): siRNA sense strand
cugaaugacauguaucuca

SEQ ID NO: 53112 - RNA, 19 nt, Homo sapiens
  misc_RNA (1)...(19): siRNA sense strand
uaguaaagaaccuugacuu

SEQ ID NO: 53113 - RNA, 19 nt, Homo sapiens
  misc_RNA (1)...(19): siRNA sense strand
ggagcugcccgagauguuc

SEQ ID NO: 53114 - RNA, 19 nt, Homo sapiens
  misc_RNA (1)...(19): siRNA sense strand
aggaagagccaggccauug

SEQ ID NO: 53115 - RNA, 19 nt, Homo sapiens
  misc_RNA (1)...(19): siRNA sense strand
guggaagaaagccucauug

SEQ ID NO: 53116 - RNA, 19 nt, Homo sapiens
  misc_RNA (1)...(19): siRNA sense strand
ugcccgagauguucaugga

SEQ ID NO: 53117 - RNA, 19 nt, Homo sapiens
  misc_RNA (1)...(19): siRNA sense strand
gagcugcccgagauguuca

SEQ ID NO: 53118 - RNA, 19 nt, Homo sapiens
  misc_RNA (1)...(19): siRNA sense strand
acacagucauggccauaac

SEQ ID NO: 53119 - RNA, 19 nt, Homo sapiens
  misc_RNA (1)...(19): siRNA sense strand
ggcacuggcuuuugugaga

SEQ ID NO: 53120 - RNA, 19 nt, Homo sapiens
  misc_RNA (1)...(19): siRNA sense strand
aguacuggcugaaugacau

SEQ ID NO: 53121 - RNA, 19 nt, Homo sapiens
  misc_RNA (1)...(19): siRNA sense strand
cgcugcaucugccuuguau

SEQ ID NO: 53122 - RNA, 19 nt, Homo sapiens
  misc_RNA (1)...(19): siRNA sense strand
caaucaguucuuugucuug

SEQ ID NO: 53123 - RNA, 19 nt, Homo sapiens
  misc_RNA (1)...(19): siRNA sense strand
ucagaacagcagcaucaug

SEQ ID NO: 53124 - RNA, 19 nt, Homo sapiens
  misc_RNA (1)...(19): siRNA sense strand
guccuguggucccaaaugg

SEQ ID NO: 53125 - RNA, 19 nt, Homo sapiens
  misc_RNA (1)...(19): siRNA sense strand
cagaggcacuggcuuuugu

SEQ ID NO: 53126 - RNA, 19 nt, Homo sapiens
  misc_RNA (1)...(19): siRNA sense strand
cuacaggcuccaccgaaga

SEQ ID NO: 53127 - RNA, 19 nt, Homo sapiens
  misc_RNA (1)...(19): siRNA sense strand
aguaaagaaccuugacuuc

SEQ ID NO: 53128 - RNA, 19 nt, Homo sapiens
  misc_RNA (1)...(19): siRNA sense strand
ggauguugucauuaauuuc

SEQ ID NO: 53129 - RNA, 19 nt, Homo sapiens
  misc_RNA (1)...(19): siRNA sense strand
gaugagaacucuaagcaaa

SEQ ID NO: 53130 - RNA, 19 nt, Homo sapiens
  misc_RNA (1)...(19): siRNA sense strand
gcuguugccucuaauauga

SEQ ID NO: 53131 - RNA, 19 nt, Homo sapiens
  misc_RNA (1)...(19): siRNA sense strand
gaaauaacccaggaugaaa

SEQ ID NO: 53132 - RNA, 19 nt, Homo sapiens
  misc_RNA (1)...(19): siRNA sense strand
acaaacuccucuaacaaua

SEQ ID NO: 53133 - RNA, 19 nt, Homo sapiens
  misc_RNA (1)...(19): siRNA sense strand
ccaaagaugagaacucuaa

SEQ ID NO: 53134 - RNA, 19 nt, Homo sapiens
  misc_RNA (1)...(19): siRNA sense strand
caucaugacugugcuauau

SEQ ID NO: 53135 - RNA, 19 nt, Homo sapiens
  misc_RNA (1)...(19): siRNA sense strand
ggauaaagaaggacaagaa

SEQ ID NO: 53136 - RNA, 19 nt, Homo sapiens
  misc_RNA (1)...(19): siRNA sense strand
ucaacaaacuccucuaaca

SEQ ID NO: 53137 - RNA, 19 nt, Homo sapiens
  misc_RNA (1)...(19): siRNA sense strand
cauaggcgcuacaagguaa

SEQ ID NO: 53138 - RNA, 19 nt, Homo sapiens
  misc_RNA (1)...(19): siRNA sense strand
gaaggauagugaagccaaa

SEQ ID NO: 53139 - RNA, 19 nt, Homo sapiens
  misc_RNA (1)...(19): siRNA sense strand
gcaaacaugcaucagaauu

SEQ ID NO: 53140 - RNA, 19 nt, Homo sapiens
  misc_RNA (1)...(19): siRNA sense strand
caacaaacuccucuaacaa

SEQ ID NO: 53141 - RNA, 19 nt, Homo sapiens
  misc_RNA (1)...(19): siRNA sense strand
guacaaggaaggauaguga

SEQ ID NO: 53142 - RNA, 19 nt, Homo sapiens
  misc_RNA (1)...(19): siRNA sense strand
gcaaugccaccuucaagaa

SEQ ID NO: 53143 - RNA, 19 nt, Homo sapiens
  misc_RNA (1)...(19): siRNA sense strand
ggucagcaaugccucaguu

SEQ ID NO: 53144 - RNA, 19 nt, Homo sapiens
  misc_RNA (1)...(19): siRNA sense strand
aagcaaacaugcaucagaa

SEQ ID NO: 53145 - RNA, 19 nt, Homo sapiens
  misc_RNA (1)...(19): siRNA sense strand
gcucuuacaaguccuuaua

SEQ ID NO: 53146 - RNA, 19 nt, Homo sapiens
  misc_RNA (1)...(19): siRNA sense strand
aaucuuggcuauucuguug

SEQ ID NO: 53147 - RNA, 19 nt, Homo sapiens
  misc_RNA (1)...(19): siRNA sense strand
uuaaacaccuucucaugug

SEQ ID NO: 53148 - RNA, 19 nt, Homo sapiens
  misc_RNA (1)...(19): siRNA sense strand
ucaagaagaccuuuaaaca

SEQ ID NO: 53149 - RNA, 19 nt, Homo sapiens
  misc_RNA (1)...(19): siRNA sense strand
uaaagaaggacaagaagga

SEQ ID NO: 53150 - RNA, 19 nt, Homo sapiens
  misc_RNA (1)...(19): siRNA sense strand
uaucaacccugccugcuau

SEQ ID NO: 53151 - RNA, 19 nt, Homo sapiens
  misc_RNA (1)...(19): siRNA sense strand
ucagugcuguugccucuaa

SEQ ID NO: 53152 - RNA, 19 nt, Homo sapiens
  misc_RNA (1)...(19): siRNA sense strand
uccagaccgucaacaauua

SEQ ID NO: 53153 - RNA, 19 nt, Homo sapiens
  misc_RNA (1)...(19): siRNA sense strand
gcaagagcaggauaaagaa

SEQ ID NO: 53154 - RNA, 19 nt, Homo sapiens
  misc_RNA (1)...(19): siRNA sense strand
gaacauccuagucaugguu

SEQ ID NO: 53155 - RNA, 19 nt, Homo sapiens
  misc_RNA (1)...(19): siRNA sense strand
caaacaugcaucagaauug

SEQ ID NO: 53156 - RNA, 19 nt, Homo sapiens
  misc_RNA (1)...(19): siRNA sense strand
cuucucaugugucauuaua

SEQ ID NO: 53157 - RNA, 19 nt, Homo sapiens
  misc_RNA (1)...(19): siRNA sense strand
caaugcugcugucaccuuu

SEQ ID NO: 53158 - RNA, 19 nt, Homo sapiens
  misc_RNA (1)...(19): siRNA sense strand
ugaaauaacccaggaugaa

SEQ ID NO: 53159 - RNA, 19 nt, Homo sapiens
  misc_RNA (1)...(19): siRNA sense strand
uagugaagccaaacaauaa

SEQ ID NO: 53160 - RNA, 19 nt, Homo sapiens
  misc_RNA (1)...(19): siRNA sense strand
ggagugcuacauucaguuu

SEQ ID NO: 53161 - RNA, 19 nt, Homo sapiens
  misc_RNA (1)...(19): siRNA sense strand
ucaugacugugcuauauug

SEQ ID NO: 53162 - RNA, 19 nt, Homo sapiens
  misc_RNA (1)...(19): siRNA sense strand
cauuugaagugguguuuau

SEQ ID NO: 53163 - RNA, 19 nt, Homo sapiens
  misc_RNA (1)...(19): siRNA sense strand
gaagaccuuuaaacaccuu

SEQ ID NO: 53164 - RNA, 19 nt, Homo sapiens
  misc_RNA (1)...(19): siRNA sense strand
ggacaaucuuggcuauucu

SEQ ID NO: 53165 - RNA, 19 nt, Homo sapiens
  misc_RNA (1)...(19): siRNA sense strand
ggugagaacuguggaggau

SEQ ID NO: 53166 - RNA, 19 nt, Homo sapiens
  misc_RNA (1)...(19): siRNA sense strand
gccaaacaauaacaacaug

SEQ ID NO: 53167 - RNA, 19 nt, Homo sapiens
  misc_RNA (1)...(19): siRNA sense strand
gugcugaccuuaucauagg

SEQ ID NO: 53168 - RNA, 19 nt, Homo sapiens
  misc_RNA (1)...(19): siRNA sense strand
acaauugguuacuggcuuu

SEQ ID NO: 53169 - RNA, 19 nt, Homo sapiens
  misc_RNA (1)...(19): siRNA sense strand
ucuacacugugauugguua

SEQ ID NO: 53170 - RNA, 19 nt, Homo sapiens
  misc_RNA (1)...(19): siRNA sense strand
ccaggacaaucuuggcuau

SEQ ID NO: 53171 - RNA, 19 nt, Homo sapiens
  misc_RNA (1)...(19): siRNA sense strand
ccacuucccugggccauuc

SEQ ID NO: 53172 - RNA, 19 nt, Homo sapiens
  misc_RNA (1)...(19): siRNA sense strand
cagcaaugccucaguuaug

SEQ ID NO: 53173 - RNA, 19 nt, Homo sapiens
  misc_RNA (1)...(19): siRNA sense strand
gaccgucaacaauuacuuu

SEQ ID NO: 53174 - RNA, 19 nt, Homo sapiens
  misc_RNA (1)...(19): siRNA sense strand
uauuguagcccgcaagauu

SEQ ID NO: 53175 - RNA, 19 nt, Homo sapiens
  misc_RNA (1)...(19): siRNA sense strand
aaacaugcaucagaauugg

SEQ ID NO: 53176 - RNA, 19 nt, Homo sapiens
  misc_RNA (1)...(19): siRNA sense strand
auagugaagccaaacaaua

SEQ ID NO: 53177 - RNA, 19 nt, Homo sapiens
  misc_RNA (1)...(19): siRNA sense strand
ggcuagcccuggacuaugu

SEQ ID NO: 53178 - RNA, 19 nt, Homo sapiens
  misc_RNA (1)...(19): siRNA sense strand
gaacuuguacacccucuac

SEQ ID NO: 53179 - RNA, 19 nt, Homo sapiens
  misc_RNA (1)...(19): siRNA sense strand
gcuauucuguuggcuuuca

SEQ ID NO: 53180 - RNA, 19 nt, Homo sapiens
  misc_RNA (1)...(19): siRNA sense strand
uggcuauucuguuggcuuu

SEQ ID NO: 53181 - RNA, 19 nt, Homo sapiens
  misc_RNA (1)...(19): siRNA sense strand
gaaagucaccaggacaauc

SEQ ID NO: 53182 - RNA, 19 nt, Homo sapiens
  misc_RNA (1)...(19): siRNA sense strand
ugagaacucuaagcaaaca

SEQ ID NO: 53183 - RNA, 19 nt, Homo sapiens
  misc_RNA (1)...(19): siRNA sense strand
uaagcaaacaugcaucaga

SEQ ID NO: 53184 - RNA, 19 nt, Homo sapiens
  misc_RNA (1)...(19): siRNA sense strand
ucuguuggcuuucaucauc

SEQ ID NO: 53185 - RNA, 19 nt, Homo sapiens
  misc_RNA (1)...(19): siRNA sense strand
gauaaagaaggacaagaag

SEQ ID NO: 53186 - RNA, 19 nt, Homo sapiens
  misc_RNA (1)...(19): siRNA sense strand
caagaagaccuuuaaacac

SEQ ID NO: 53187 - RNA, 19 nt, Homo sapiens
  misc_RNA (1)...(19): siRNA sense strand
gcaagauugugaagaugac

SEQ ID NO: 53188 - RNA, 19 nt, Homo sapiens
  misc_RNA (1)...(19): siRNA sense strand
gagagaugaugaaauaacc

SEQ ID NO: 53189 - RNA, 19 nt, Homo sapiens
  misc_RNA (1)...(19): siRNA sense strand
ggccugugcugaccuuauc

SEQ ID NO: 53190 - RNA, 19 nt, Homo sapiens
  misc_RNA (1)...(19): siRNA sense strand
ucucaugugucauuauaag

SEQ ID NO: 53191 - RNA, 19 nt, Homo sapiens
  misc_RNA (1)...(19): siRNA sense strand
agcaaugccucaguuauga

SEQ ID NO: 53192 - RNA, 19 nt, Homo sapiens
  misc_RNA (1)...(19): siRNA sense strand
uacaaguccuuauaagaca

SEQ ID NO: 53193 - RNA, 19 nt, Homo sapiens
  misc_RNA (1)...(19): siRNA sense strand
gcaaugccucaguuaugaa

SEQ ID NO: 53194 - RNA, 19 nt, Homo sapiens
  misc_RNA (1)...(19): siRNA sense strand
gauagugaagccaaacaau

SEQ ID NO: 53195 - RNA, 19 nt, Homo sapiens
  misc_RNA (1)...(19): siRNA sense strand
gacaagaaggagccuguug

SEQ ID NO: 53196 - RNA, 19 nt, Homo sapiens
  misc_RNA (1)...(19): siRNA sense strand
ucacaaaaccucugaccua

SEQ ID NO: 53197 - RNA, 19 nt, Homo sapiens
  misc_RNA (1)...(19): siRNA sense strand
agcaagagcaggauaaaga

SEQ ID NO: 53198 - RNA, 19 nt, Homo sapiens
  misc_RNA (1)...(19): siRNA sense strand
caaacuccucuaacaauag

SEQ ID NO: 53199 - RNA, 19 nt, Homo sapiens
  misc_RNA (1)...(19): siRNA sense strand
uauugcagccuucuauuug

SEQ ID NO: 53200 - RNA, 19 nt, Homo sapiens
  misc_RNA (1)...(19): siRNA sense strand
gaugaaaagcagaauauug

SEQ ID NO: 53201 - RNA, 19 nt, Homo sapiens
  misc_RNA (1)...(19): siRNA sense strand
cugccuggguccucucuuu

SEQ ID NO: 53202 - RNA, 19 nt, Homo sapiens
  misc_RNA (1)...(19): siRNA sense strand
guuacuggcuuuguuacau

SEQ ID NO: 53203 - RNA, 19 nt, Homo sapiens
  misc_RNA (1)...(19): siRNA sense strand
ggaacauccuagucauggu

SEQ ID NO: 53204 - RNA, 19 nt, Homo sapiens
  misc_RNA (1)...(19): siRNA sense strand
ggauagugaagccaaacaa

SEQ ID NO: 53205 - RNA, 19 nt, Homo sapiens
  misc_RNA (1)...(19): siRNA sense strand
cuauugcagccuucuauuu

SEQ ID NO: 53206 - RNA, 19 nt, Homo sapiens
  misc_RNA (1)...(19): siRNA sense strand
ucauguaccccaacuaaua

SEQ ID NO: 53207 - RNA, 19 nt, Homo sapiens
  misc_RNA (1)...(19): siRNA sense strand
ggucagaauggagaugaaa

SEQ ID NO: 53208 - RNA, 19 nt, Homo sapiens
  misc_RNA (1)...(19): siRNA sense strand
aggacaaucuuggcuauuc

SEQ ID NO: 53209 - RNA, 19 nt, Homo sapiens
  misc_RNA (1)...(19): siRNA sense strand
gagaugaaaagcagaauau

SEQ ID NO: 53210 - RNA, 19 nt, Homo sapiens
  misc_RNA (1)...(19): siRNA sense strand
ccaagucugguacaaggaa

SEQ ID NO: 53211 - RNA, 19 nt, Homo sapiens
  misc_RNA (1)...(19): siRNA sense strand
guccuuauaagacauuuga

SEQ ID NO: 53212 - RNA, 19 nt, Homo sapiens
  misc_RNA (1)...(19): siRNA sense strand
uuacaaguccuuauaagac

SEQ ID NO: 53213 - RNA, 19 nt, Homo sapiens
  misc_RNA (1)...(19): siRNA sense strand
uugaagugguguuuauugu

SEQ ID NO: 53214 - RNA, 19 nt, Homo sapiens
  misc_RNA (1)...(19): siRNA sense strand
uggcuuucaucaucacuug

SEQ ID NO: 53215 - RNA, 19 nt, Homo sapiens
  misc_RNA (1)...(19): siRNA sense strand
gcuauugcagccuucuauu

SEQ ID NO: 53216 - RNA, 19 nt, Homo sapiens
  misc_RNA (1)...(19): siRNA sense strand
caccuucucaugugucauu

SEQ ID NO: 53217 - RNA, 19 nt, Homo sapiens
  misc_RNA (1)...(19): siRNA sense strand
uuacuggcuuuguuacauc

SEQ ID NO: 53218 - RNA, 19 nt, Homo sapiens
  misc_RNA (1)...(19): siRNA sense strand
ggacaagaaggagccuguu

SEQ ID NO: 53219 - RNA, 19 nt, Homo sapiens
  misc_RNA (1)...(19): siRNA sense strand
aacaaacuccucuaacaau

SEQ ID NO: 53220 - RNA, 19 nt, Homo sapiens
  misc_RNA (1)...(19): siRNA sense strand
agagcaggauaaagaagga

SEQ ID NO: 53221 - RNA, 19 nt, Homo sapiens
  misc_RNA (1)...(19): siRNA sense strand
ccaaugcugcugucaccuu

SEQ ID NO: 53222 - RNA, 19 nt, Homo sapiens
  misc_RNA (1)...(19): siRNA sense strand
guggcuggaucccucaguu

SEQ ID NO: 53223 - RNA, 19 nt, Homo sapiens
  misc_RNA (1)...(19): siRNA sense strand
ugaaucugcucaucaucag

SEQ ID NO: 53224 - RNA, 19 nt, Homo sapiens
  misc_RNA (1)...(19): siRNA sense strand
uuuaaacaccuucucaugu

SEQ ID NO: 53225 - RNA, 19 nt, Homo sapiens
  misc_RNA (1)...(19): siRNA sense strand
ggagaugaaaagcagaaua

SEQ ID NO: 53226 - RNA, 19 nt, Homo sapiens
  misc_RNA (1)...(19): siRNA sense strand
gccagcaagagcaggauaa

SEQ ID NO: 53227 - RNA, 19 nt, Homo sapiens
  misc_RNA (1)...(19): siRNA sense strand
gcugcugucaccuuuggua

SEQ ID NO: 53228 - RNA, 19 nt, Homo sapiens
  misc_RNA (1)...(19): siRNA sense strand
ucaucagcuuugacaggua

SEQ ID NO: 53229 - RNA, 19 nt, Homo sapiens
  misc_RNA (1)...(19): siRNA sense strand
caacaacuacuuccucuua

SEQ ID NO: 53230 - RNA, 19 nt, Homo sapiens
  misc_RNA (1)...(19): siRNA sense strand
ugaagacggucaacaacua

SEQ ID NO: 53231 - RNA, 19 nt, Homo sapiens
  misc_RNA (1)...(19): siRNA sense strand
ggagagugcuucauucagu

SEQ ID NO: 53232 - RNA, 19 nt, Homo sapiens
  misc_RNA (1)...(19): siRNA sense strand
ggacagaggcagagacaga

SEQ ID NO: 53233 - RNA, 19 nt, Homo sapiens
  misc_RNA (1)...(19): siRNA sense strand
gcaacauccugguaauugu

SEQ ID NO: 53234 - RNA, 19 nt, Homo sapiens
  misc_RNA (1)...(19): siRNA sense strand
ggaugucccuggucaagga

SEQ ID NO: 53235 - RNA, 19 nt, Homo sapiens
  misc_RNA (1)...(19): siRNA sense strand
ggcaauacuuuguuggaaa

SEQ ID NO: 53236 - RNA, 19 nt, Homo sapiens
  misc_RNA (1)...(19): siRNA sense strand
aaagagagccggugugaug

SEQ ID NO: 53237 - RNA, 19 nt, Homo sapiens
  misc_RNA (1)...(19): siRNA sense strand
guaauugugucauuuaagg

SEQ ID NO: 53238 - RNA, 19 nt, Homo sapiens
  misc_RNA (1)...(19): siRNA sense strand
cagaaccacuuucaagaug

SEQ ID NO: 53239 - RNA, 19 nt, Homo sapiens
  misc_RNA (1)...(19): siRNA sense strand
ggacacagcuaagacuucu

SEQ ID NO: 53240 - RNA, 19 nt, Homo sapiens
  misc_RNA (1)...(19): siRNA sense strand
ccagaagucagaucacuaa

SEQ ID NO: 53241 - RNA, 19 nt, Homo sapiens
  misc_RNA (1)...(19): siRNA sense strand
gagagugcuucauucaguu

SEQ ID NO: 53242 - RNA, 19 nt, Homo sapiens
  misc_RNA (1)...(19): siRNA sense strand
caucagcuccuccuggaua

SEQ ID NO: 53243 - RNA, 19 nt, Homo sapiens
  misc_RNA (1)...(19): siRNA sense strand
ggucuucaucgcuuucuua

SEQ ID NO: 53244 - RNA, 19 nt, Homo sapiens
  misc_RNA (1)...(19): siRNA sense strand
ucacgaggccgcucacgua

SEQ ID NO: 53245 - RNA, 19 nt, Homo sapiens
  misc_RNA (1)...(19): siRNA sense strand
gcuaugcucugugcaacaa

SEQ ID NO: 53246 - RNA, 19 nt, Homo sapiens
  misc_RNA (1)...(19): siRNA sense strand
caaugccucuguuaugaau

SEQ ID NO: 53247 - RNA, 19 nt, Homo sapiens
  misc_RNA (1)...(19): siRNA sense strand
uggaggaucuauaaggaaa

SEQ ID NO: 53248 - RNA, 19 nt, Homo sapiens
  misc_RNA (1)...(19): siRNA sense strand
cgggaaccgucacucauuu

SEQ ID NO: 53249 - RNA, 19 nt, Homo sapiens
  misc_RNA (1)...(19): siRNA sense strand
ucgagcagcuggcaauuuc

SEQ ID NO: 53250 - RNA, 19 nt, Homo sapiens
  misc_RNA (1)...(19): siRNA sense strand
gcaaugccucuguuaugaa

SEQ ID NO: 53251 - RNA, 19 nt, Homo sapiens
  misc_RNA (1)...(19): siRNA sense strand
ggucaucuccuuuguccuu

SEQ ID NO: 53252 - RNA, 19 nt, Homo sapiens
  misc_RNA (1)...(19): siRNA sense strand
cauuuaaggucaacaagca

SEQ ID NO: 53253 - RNA, 19 nt, Homo sapiens
  misc_RNA (1)...(19): siRNA sense strand
cagagacagucggucauuu

SEQ ID NO: 53254 - RNA, 19 nt, Homo sapiens
  misc_RNA (1)...(19): siRNA sense strand
gaucuugcuugccuucauc

SEQ ID NO: 53255 - RNA, 19 nt, Homo sapiens
  misc_RNA (1)...(19): siRNA sense strand
gaacuucaacagcaaagca

SEQ ID NO: 53256 - RNA, 19 nt, Homo sapiens
  misc_RNA (1)...(19): siRNA sense strand
uuauaugccugucaccauu

SEQ ID NO: 53257 - RNA, 19 nt, Homo sapiens
  misc_RNA (1)...(19): siRNA sense strand
gagccaaacgaacaacaaa

SEQ ID NO: 53258 - RNA, 19 nt, Homo sapiens
  misc_RNA (1)...(19): siRNA sense strand
caaacgaacaacaaagaga

SEQ ID NO: 53259 - RNA, 19 nt, Homo sapiens
  misc_RNA (1)...(19): siRNA sense strand
gcagagacagucggucauu

SEQ ID NO: 53260 - RNA, 19 nt, Homo sapiens
  misc_RNA (1)...(19): siRNA sense strand
ggcaacauccugguaauug

SEQ ID NO: 53261 - RNA, 19 nt, Homo sapiens
  misc_RNA (1)...(19): siRNA sense strand
ccgagcagauggaccaaga

SEQ ID NO: 53262 - RNA, 19 nt, Homo sapiens
  misc_RNA (1)...(19): siRNA sense strand
ucauucaguuccucaguga

SEQ ID NO: 53263 - RNA, 19 nt, Homo sapiens
  misc_RNA (1)...(19): siRNA sense strand
gccaaacgaacaacaaaga

SEQ ID NO: 53264 - RNA, 19 nt, Homo sapiens
  misc_RNA (1)...(19): siRNA sense strand
cagcaaugccucuguuaug

SEQ ID NO: 53265 - RNA, 19 nt, Homo sapiens
  misc_RNA (1)...(19): siRNA sense strand
guaccgagccaaacgaaca

SEQ ID NO: 53266 - RNA, 19 nt, Homo sapiens
  misc_RNA (1)...(19): siRNA sense strand
ucagaucacuaagcggaaa

SEQ ID NO: 53267 - RNA, 19 nt, Homo sapiens
  misc_RNA (1)...(19): siRNA sense strand
gaagagcguggacgaugga

SEQ ID NO: 53268 - RNA, 19 nt, Homo sapiens
  misc_RNA (1)...(19): siRNA sense strand
cuucaucgcuuucuuaacg

SEQ ID NO: 53269 - RNA, 19 nt, Homo sapiens
  misc_RNA (1)...(19): siRNA sense strand
uuacgaacuucaacagcaa

SEQ ID NO: 53270 - RNA, 19 nt, Homo sapiens
  misc_RNA (1)...(19): siRNA sense strand
ggaucuauaaggaaacuga

SEQ ID NO: 53271 - RNA, 19 nt, Homo sapiens
  misc_RNA (1)...(19): siRNA sense strand
caucagcuuugacagauac

SEQ ID NO: 53272 - RNA, 19 nt, Homo sapiens
  misc_RNA (1)...(19): siRNA sense strand
ucagugagcccaccauuac

SEQ ID NO: 53273 - RNA, 19 nt, Homo sapiens
  misc_RNA (1)...(19): siRNA sense strand
ugaaucuguuuacgaccua

SEQ ID NO: 53274 - RNA, 19 nt, Homo sapiens
  misc_RNA (1)...(19): siRNA sense strand
gaaccacuuucaagaugcu

SEQ ID NO: 53275 - RNA, 19 nt, Homo sapiens
  misc_RNA (1)...(19): siRNA sense strand
gaccacagcagcagugaca

SEQ ID NO: 53276 - RNA, 19 nt, Homo sapiens
  misc_RNA (1)...(19): siRNA sense strand
agcaaugccucuguuauga

SEQ ID NO: 53277 - RNA, 19 nt, Homo sapiens
  misc_RNA (1)...(19): siRNA sense strand
uagggaacuuggccuguga

SEQ ID NO: 53278 - RNA, 19 nt, Homo sapiens
  misc_RNA (1)...(19): siRNA sense strand
ccugguaauugugucauuu

SEQ ID NO: 53279 - RNA, 19 nt, Homo sapiens
  misc_RNA (1)...(19): siRNA sense strand
gaccagaagucagaucacu

SEQ ID NO: 53280 - RNA, 19 nt, Homo sapiens
  misc_RNA (1)...(19): siRNA sense strand
ccaccaaguuacccucauc

SEQ ID NO: 53281 - RNA, 19 nt, Homo sapiens
  misc_RNA (1)...(19): siRNA sense strand
cgagagccaucuacuccau

SEQ ID NO: 53282 - RNA, 19 nt, Homo sapiens
  misc_RNA (1)...(19): siRNA sense strand
aacaacuacuuccucuuaa

SEQ ID NO: 53283 - RNA, 19 nt, Homo sapiens
  misc_RNA (1)...(19): siRNA sense strand
ucaucagcuuugacagaua

SEQ ID NO: 53284 - RNA, 19 nt, Homo sapiens
  misc_RNA (1)...(19): siRNA sense strand
gcuacuggcugugcuacau

SEQ ID NO: 53285 - RNA, 19 nt, Homo sapiens
  misc_RNA (1)...(19): siRNA sense strand
ucaaugaaucuguuuacga

SEQ ID NO: 53286 - RNA, 19 nt, Homo sapiens
  misc_RNA (1)...(19): siRNA sense strand
acacagcuaagacuucuga

SEQ ID NO: 53287 - RNA, 19 nt, Homo sapiens
  misc_RNA (1)...(19): siRNA sense strand
acaaagagagccgguguga

SEQ ID NO: 53288 - RNA, 19 nt, Homo sapiens
  misc_RNA (1)...(19): siRNA sense strand
cagcuuugacagauacuuu

SEQ ID NO: 53289 - RNA, 19 nt, Homo sapiens
  misc_RNA (1)...(19): siRNA sense strand
cauacaacaucaugguucu

SEQ ID NO: 53290 - RNA, 19 nt, Homo sapiens
  misc_RNA (1)...(19): siRNA sense strand
uugcuugccuucaucauca

SEQ ID NO: 53291 - RNA, 19 nt, Homo sapiens
  misc_RNA (1)...(19): siRNA sense strand
uauaugccugucaccauua

SEQ ID NO: 53292 - RNA, 19 nt, Homo sapiens
  misc_RNA (1)...(19): siRNA sense strand
gagagccggugugaugauc

SEQ ID NO: 53293 - RNA, 19 nt, Homo sapiens
  misc_RNA (1)...(19): siRNA sense strand
ggccugugccgaucugauu

SEQ ID NO: 53294 - RNA, 19 nt, Homo sapiens
  misc_RNA (1)...(19): siRNA sense strand
ucagaaccacuuucaagau

SEQ ID NO: 53295 - RNA, 19 nt, Homo sapiens
  misc_RNA (1)...(19): siRNA sense strand
aaacauucagaaccacuuu

SEQ ID NO: 53296 - RNA, 19 nt, Homo sapiens
  misc_RNA (1)...(19): siRNA sense strand
uaagacuucugacgucaac

SEQ ID NO: 53297 - RNA, 19 nt, Homo sapiens
  misc_RNA (1)...(19): siRNA sense strand
gcagugacaguuggaacaa

SEQ ID NO: 53298 - RNA, 19 nt, Homo sapiens
  misc_RNA (1)...(19): siRNA sense strand
caacauccugguaauugug

SEQ ID NO: 53299 - RNA, 19 nt, Homo sapiens
  misc_RNA (1)...(19): siRNA sense strand
uggcaauacuuuguuggaa

SEQ ID NO: 53300 - RNA, 19 nt, Homo sapiens
  misc_RNA (1)...(19): siRNA sense strand
gaagacggucaacaacuac

SEQ ID NO: 53301 - RNA, 19 nt, Homo sapiens
  misc_RNA (1)...(19): siRNA sense strand
ucacucauuucggcagcua

SEQ ID NO: 53302 - RNA, 19 nt, Homo sapiens
  misc_RNA (1)...(19): siRNA sense strand
caacagcaaagcaugaaac

SEQ ID NO: 53303 - RNA, 19 nt, Homo sapiens
  misc_RNA (1)...(19): siRNA sense strand
gaggaucuauaaggaaacu

SEQ ID NO: 53304 - RNA, 19 nt, Homo sapiens
  misc_RNA (1)...(19): siRNA sense strand
acuggaggaucuauaagga

SEQ ID NO: 53305 - RNA, 19 nt, Homo sapiens
  misc_RNA (1)...(19): siRNA sense strand
uggcuugggucaucuccuu

SEQ ID NO: 53306 - RNA, 19 nt, Homo sapiens
  misc_RNA (1)...(19): siRNA sense strand
acaacuacuuccucuuaag

SEQ ID NO: 53307 - RNA, 19 nt, Homo sapiens
  misc_RNA (1)...(19): siRNA sense strand
cacccgagcaggccuugua

SEQ ID NO: 53308 - RNA, 19 nt, Homo sapiens
  misc_RNA (1)...(19): siRNA sense strand
ugacagcugcauacccaaa

SEQ ID NO: 53309 - RNA, 19 nt, Homo sapiens
  misc_RNA (1)...(19): siRNA sense strand
gccagcaaugccucuguua

SEQ ID NO: 53310 - RNA, 19 nt, Homo sapiens
  misc_RNA (1)...(19): siRNA sense strand
uucggcagcuacaauguuu

SEQ ID NO: 53311 - RNA, 19 nt, Homo sapiens
  misc_RNA (1)...(19): siRNA sense strand
gacccucagugcgaucuug

SEQ ID NO: 53312 - RNA, 19 nt, Homo sapiens
  misc_RNA (1)...(19): siRNA sense strand
gcuugccauugacuacgua

SEQ ID NO: 53313 - RNA, 19 nt, Homo sapiens
  misc_RNA (1)...(19): siRNA sense strand
ggagaggaaagccgacaag

SEQ ID NO: 53314 - RNA, 19 nt, Homo sapiens
  misc_RNA (1)...(19): siRNA sense strand
gcaugaaacgcuccaacag

SEQ ID NO: 53315 - RNA, 19 nt, Homo sapiens
  misc_RNA (1)...(19): siRNA sense strand
gacagaggcagagacagaa

SEQ ID NO: 53316 - RNA, 19 nt, Homo sapiens
  misc_RNA (1)...(19): siRNA sense strand
uuuacgaccuacaucauca

SEQ ID NO: 53317 - RNA, 19 nt, Homo sapiens
  misc_RNA (1)...(19): siRNA sense strand
caaccucgccuuuguuucc

SEQ ID NO: 53318 - RNA, 19 nt, Homo sapiens
  misc_RNA (1)...(19): siRNA sense strand
gugaacaccuuuugugaca

SEQ ID NO: 53319 - RNA, 19 nt, Homo sapiens
  misc_RNA (1)...(19): siRNA sense strand
ucuccaagcuucccaucca

SEQ ID NO: 53320 - RNA, 19 nt, Homo sapiens
  misc_RNA (1)...(19): siRNA sense strand
gugagcccaccauuacuuu

SEQ ID NO: 53321 - RNA, 19 nt, Homo sapiens
  misc_RNA (1)...(19): siRNA sense strand
ccagcaaugccucuguuau

SEQ ID NO: 53322 - RNA, 19 nt, Homo sapiens
  misc_RNA (1)...(19): siRNA sense strand
caucggcaacauccuggua

SEQ ID NO: 53323 - RNA, 19 nt, Homo sapiens
  misc_RNA (1)...(19): siRNA sense strand
gaucuauaaggaaacugaa

SEQ ID NO: 53324 - RNA, 19 nt, Homo sapiens
  misc_RNA (1)...(19): siRNA sense strand
cugguaauugugucauuua

SEQ ID NO: 53325 - RNA, 19 nt, Homo sapiens
  misc_RNA (1)...(19): siRNA sense strand
gacagauacuuuuccauca

SEQ ID NO: 53326 - RNA, 19 nt, Homo sapiens
  misc_RNA (1)...(19): siRNA sense strand
ccgggaaccgucacucauu

SEQ ID NO: 53327 - RNA, 19 nt, Homo sapiens
  misc_RNA (1)...(19): siRNA sense strand
ucaacaagcagcugaagac

SEQ ID NO: 53328 - RNA, 19 nt, Homo sapiens
  misc_RNA (1)...(19): siRNA sense strand
gaagaccagaagucagauc

SEQ ID NO: 53329 - RNA, 19 nt, Homo sapiens
  misc_RNA (1)...(19): siRNA sense strand
gagcaacgccuccgucaug

SEQ ID NO: 53330 - RNA, 19 nt, Homo sapiens
  misc_RNA (1)...(19): siRNA sense strand
gguccaagauccagauugu

SEQ ID NO: 53331 - RNA, 19 nt, Homo sapiens
  misc_RNA (1)...(19): siRNA sense strand
gcaaccaggugcgcaagaa

SEQ ID NO: 53332 - RNA, 19 nt, Homo sapiens
  misc_RNA (1)...(19): siRNA sense strand
caacaacuacuuccucuuc

SEQ ID NO: 53333 - RNA, 19 nt, Homo sapiens
  misc_RNA (1)...(19): siRNA sense strand
ugacagccauugagauugu

SEQ ID NO: 53334 - RNA, 19 nt, Homo sapiens
  misc_RNA (1)...(19): siRNA sense strand
gauaaggacacuuccaaug

SEQ ID NO: 53335 - RNA, 19 nt, Homo sapiens
  misc_RNA (1)...(19): siRNA sense strand
cgaacgaucuuugccauuc

SEQ ID NO: 53336 - RNA, 19 nt, Homo sapiens
  misc_RNA (1)...(19): siRNA sense strand
ucaccaagccucucaccua

SEQ ID NO: 53337 - RNA, 19 nt, Homo sapiens
  misc_RNA (1)...(19): siRNA sense strand
caagauggcaggccucaug

SEQ ID NO: 53338 - RNA, 19 nt, Homo sapiens
  misc_RNA (1)...(19): siRNA sense strand
cucaagagcccacuaauga

SEQ ID NO: 53339 - RNA, 19 nt, Homo sapiens
  misc_RNA (1)...(19): siRNA sense strand
gcuaugagacgguggaaau

SEQ ID NO: 53340 - RNA, 19 nt, Homo sapiens
  misc_RNA (1)...(19): siRNA sense strand
gaacgaucuuugccauucu

SEQ ID NO: 53341 - RNA, 19 nt, Homo sapiens
  misc_RNA (1)...(19): siRNA sense strand
gaucuuugccauucugcua

SEQ ID NO: 53342 - RNA, 19 nt, Homo sapiens
  misc_RNA (1)...(19): siRNA sense strand
gugcaacgccaccuuuaaa

SEQ ID NO: 53343 - RNA, 19 nt, Homo sapiens
  misc_RNA (1)...(19): siRNA sense strand
gauggcaggccucaugauu

SEQ ID NO: 53344 - RNA, 19 nt, Homo sapiens
  misc_RNA (1)...(19): siRNA sense strand
caacuucacaccugucaau

SEQ ID NO: 53345 - RNA, 19 nt, Homo sapiens
  misc_RNA (1)...(19): siRNA sense strand
uaaggacacuuccaaugag

SEQ ID NO: 53346 - RNA, 19 nt, Homo sapiens
  misc_RNA (1)...(19): siRNA sense strand
gcagacaggcaaugagugu

SEQ ID NO: 53347 - RNA, 19 nt, Homo sapiens
  misc_RNA (1)...(19): siRNA sense strand
auaaggacacuuccaauga

SEQ ID NO: 53348 - RNA, 19 nt, Homo sapiens
  misc_RNA (1)...(19): siRNA sense strand
acaggcagcugcagacagu

SEQ ID NO: 53349 - RNA, 19 nt, Homo sapiens
  misc_RNA (1)...(19): siRNA sense strand
ugaagcagagcgucaagaa

SEQ ID NO: 53350 - RNA, 19 nt, Homo sapiens
  misc_RNA (1)...(19): siRNA sense strand
caagagcccacuaaugaag

SEQ ID NO: 53351 - RNA, 19 nt, Homo sapiens
  misc_RNA (1)...(19): siRNA sense strand
ggcaguuugugguggguaa

SEQ ID NO: 53352 - RNA, 19 nt, Homo sapiens
  misc_RNA (1)...(19): siRNA sense strand
caacccagcagugaccuuu

SEQ ID NO: 53353 - RNA, 19 nt, Homo sapiens
  misc_RNA (1)...(19): siRNA sense strand
cgacaaccacugcuucauc

SEQ ID NO: 53354 - RNA, 19 nt, Homo sapiens
  misc_RNA (1)...(19): siRNA sense strand
ugcagacagucaacaacua

SEQ ID NO: 53355 - RNA, 19 nt, Homo sapiens
  misc_RNA (1)...(19): siRNA sense strand
ucaagagcccacuaaugaa

SEQ ID NO: 53356 - RNA, 19 nt, Homo sapiens
  misc_RNA (1)...(19): siRNA sense strand
ccaagacgcuggccuuccu

SEQ ID NO: 53357 - RNA, 19 nt, Homo sapiens
  misc_RNA (1)...(19): siRNA sense strand
cgaagcagacaggcaauga

SEQ ID NO: 53358 - RNA, 19 nt, Homo sapiens
  misc_RNA (1)...(19): siRNA sense strand
gcagacagucaacaacuac

SEQ ID NO: 53359 - RNA, 19 nt, Homo sapiens
  misc_RNA (1)...(19): siRNA sense strand
gagcgcaaagugacacgaa

SEQ ID NO: 53360 - RNA, 19 nt, Homo sapiens
  misc_RNA (1)...(19): siRNA sense strand
uccaagauccagauuguga

SEQ ID NO: 53361 - RNA, 19 nt, Homo sapiens
  misc_RNA (1)...(19): siRNA sense strand
ugacggugcuguacaucca

SEQ ID NO: 53362 - RNA, 19 nt, Homo sapiens
  misc_RNA (1)...(19): siRNA sense strand
acgcuggccuuccucaaga

SEQ ID NO: 53363 - RNA, 19 nt, Homo sapiens
  misc_RNA (1)...(19): siRNA sense strand
ugugacagccauugagauu

SEQ ID NO: 53364 - RNA, 19 nt, Homo sapiens
  misc_RNA (1)...(19): siRNA sense strand
ggcgugugcugaucucauc

SEQ ID NO: 53365 - RNA, 19 nt, Homo sapiens
  misc_RNA (1)...(19): siRNA sense strand
ccucaagagcccacuaaug

SEQ ID NO: 53366 - RNA, 19 nt, Homo sapiens
  misc_RNA (1)...(19): siRNA sense strand
auaggcgccuucuccauga

SEQ ID NO: 53367 - RNA, 19 nt, Homo sapiens
  misc_RNA (1)...(19): siRNA sense strand
ucaugacggugcuguacau

SEQ ID NO: 53368 - RNA, 19 nt, Homo sapiens
  misc_RNA (1)...(19): siRNA sense strand
gaagcagagcgucaagaag

SEQ ID NO: 53369 - RNA, 19 nt, Homo sapiens
  misc_RNA (1)...(19): siRNA sense strand
agauccagauugugacgaa

SEQ ID NO: 53370 - RNA, 19 nt, Homo sapiens
  misc_RNA (1)...(19): siRNA sense strand
gcaacgccuccgucaugaa

SEQ ID NO: 53371 - RNA, 19 nt, Homo sapiens
  misc_RNA (1)...(19): siRNA sense strand
uggcaggccucaugauugc

SEQ ID NO: 53372 - RNA, 19 nt, Homo sapiens
  misc_RNA (1)...(19): siRNA sense strand
gcagccgaguccacaagca

SEQ ID NO: 53373 - RNA, 19 nt, Homo sapiens
  misc_RNA (1)...(19): siRNA sense strand
gcuacuggcucugcuacgu

SEQ ID NO: 53374 - RNA, 19 nt, Homo sapiens
  misc_RNA (1)...(19): siRNA sense strand
gacagucaacaacuacuuc

SEQ ID NO: 53375 - RNA, 19 nt, Homo sapiens
  misc_RNA (1)...(19): siRNA sense strand
aaagugacacgaacgaucu

SEQ ID NO: 53376 - RNA, 19 nt, Homo sapiens
  misc_RNA (1)...(19): siRNA sense strand
gaagcagacaggcaaugag

SEQ ID NO: 53377 - RNA, 19 nt, Homo sapiens
  misc_RNA (1)...(19): siRNA sense strand
caacgccuccgucaugaac

SEQ ID NO: 53378 - RNA, 19 nt, Homo sapiens
  misc_RNA (1)...(19): siRNA sense strand
ucaccuggacgcccuacaa

SEQ ID NO: 53379 - RNA, 19 nt, Homo sapiens
  misc_RNA (1)...(19): siRNA sense strand
gcaaagugacacgaacgau

SEQ ID NO: 53380 - RNA, 19 nt, Homo sapiens
  misc_RNA (1)...(19): siRNA sense strand
uggacuacguggugagcaa

SEQ ID NO: 53381 - RNA, 19 nt, Homo sapiens
  misc_RNA (1)...(19): siRNA sense strand
ccacccagaacaccaagga

SEQ ID NO: 53382 - RNA, 19 nt, Homo sapiens
  misc_RNA (1)...(19): siRNA sense strand
cagcuuugaccgcuacuuc

SEQ ID NO: 53383 - RNA, 19 nt, Homo sapiens
  misc_RNA (1)...(19): siRNA sense strand
gcugcugccuggguacugu

SEQ ID NO: 53384 - RNA, 19 nt, Homo sapiens
  misc_RNA (1)...(19): siRNA sense strand
agacaggcaaugagugugu

SEQ ID NO: 53385 - RNA, 19 nt, Homo sapiens
  misc_RNA (1)...(19): siRNA sense strand
caucuuguucuggcaguuu

SEQ ID NO: 53386 - RNA, 19 nt, Homo sapiens
  misc_RNA (1)...(19): siRNA sense strand
gagaagaaccagaugauga

SEQ ID NO: 53387 - RNA, 19 nt, Homo sapiens
  misc_RNA (1)...(19): siRNA sense strand
ggacccagcugacuaugag

SEQ ID NO: 53388 - RNA, 19 nt, Homo sapiens
  misc_RNA (1)...(19): siRNA sense strand
ggaaguacguggccauggu

SEQ ID NO: 53389 - RNA, 19 nt, Homo sapiens
  misc_RNA (1)...(19): siRNA sense strand
gaacugcaccaugaaauuc

SEQ ID NO: 53390 - RNA, 19 nt, Homo sapiens
  misc_RNA (1)...(19): siRNA sense strand
gaccaaggcccaccuguuc

SEQ ID NO: 53391 - RNA, 19 nt, Homo sapiens
  misc_RNA (1)...(19): siRNA sense strand
guccaucgcucagcucauu

SEQ ID NO: 53392 - RNA, 19 nt, Homo sapiens
  misc_RNA (1)...(19): siRNA sense strand
ucaccgugcuggucuucua

SEQ ID NO: 53393 - RNA, 19 nt, Homo sapiens
  misc_RNA (1)...(19): siRNA sense strand
acacagacuucucggugaa

SEQ ID NO: 53394 - RNA, 19 nt, Homo sapiens
  misc_RNA (1)...(19): siRNA sense strand
gaugagaagaaccagauga

SEQ ID NO: 53395 - RNA, 19 nt, Homo sapiens
  misc_RNA (1)...(19): siRNA sense strand
ugaaggaggacuggaagua

SEQ ID NO: 53396 - RNA, 19 nt, Homo sapiens
  misc_RNA (1)...(19): siRNA sense strand
gcaucgacgucaccuucuu

SEQ ID NO: 53397 - RNA, 19 nt, Homo sapiens
  misc_RNA (1)...(19): siRNA sense strand
gcaccuacaacaccaggaa

SEQ ID NO: 53398 - RNA, 19 nt, Homo sapiens
  misc_RNA (1)...(19): siRNA sense strand
gaugaugaccacgaacgua

SEQ ID NO: 53399 - RNA, 19 nt, Homo sapiens
  misc_RNA (1)...(19): siRNA sense strand
gcgaguaccugcuguucac

SEQ ID NO: 53400 - RNA, 19 nt, Homo sapiens
  misc_RNA (1)...(19): siRNA sense strand
uaccugcuguucaccauga

SEQ ID NO: 53401 - RNA, 19 nt, Homo sapiens
  misc_RNA (1)...(19): siRNA sense strand
gagcauccaguacuguguu

SEQ ID NO: 53402 - RNA, 19 nt, Homo sapiens
  misc_RNA (1)...(19): siRNA sense strand
gaaggaggacuggaaguac

SEQ ID NO: 53403 - RNA, 19 nt, Homo sapiens
  misc_RNA (1)...(19): siRNA sense strand
ccacgaacguaugggugaa

SEQ ID NO: 53404 - RNA, 19 nt, Homo sapiens
  misc_RNA (1)...(19): siRNA sense strand
agaacugcaccaugaaauu

SEQ ID NO: 53405 - RNA, 19 nt, Homo sapiens
  misc_RNA (1)...(19): siRNA sense strand
ucgaguccaugcauaagau

SEQ ID NO: 53406 - RNA, 19 nt, Homo sapiens
  misc_RNA (1)...(19): siRNA sense strand
ggagggcguccaguacauu

SEQ ID NO: 53407 - RNA, 19 nt, Homo sapiens
  misc_RNA (1)...(19): siRNA sense strand
ggucucggagcauccagua

SEQ ID NO: 53408 - RNA, 19 nt, Homo sapiens
  misc_RNA (1)...(19): siRNA sense strand
gcucaucaccgagaucauc

SEQ ID NO: 53409 - RNA, 19 nt, Homo sapiens
  misc_RNA (1)...(19): siRNA sense strand
ucaucgaguccaugcauaa

SEQ ID NO: 53410 - RNA, 19 nt, Homo sapiens
  misc_RNA (1)...(19): siRNA sense strand
ggaguggcacgacuacaag

SEQ ID NO: 53411 - RNA, 19 nt, Homo sapiens
  misc_RNA (1)...(19): siRNA sense strand
ucacuggucaucccacuca

SEQ ID NO: 53412 - RNA, 19 nt, Homo sapiens
  misc_RNA (1)...(19): siRNA sense strand
aggcccaccuguuccauga

SEQ ID NO: 53413 - RNA, 19 nt, Homo sapiens
  misc_RNA (1)...(19): siRNA sense strand
ugacguggaugagaagaac

SEQ ID NO: 53414 - RNA, 19 nt, Homo sapiens
  misc_RNA (1)...(19): siRNA sense strand
ugaccaaggcccaccuguu

SEQ ID NO: 53415 - RNA, 19 nt, Homo sapiens
  misc_RNA (1)...(19): siRNA sense strand
gagggcguccaguacauug

SEQ ID NO: 53416 - RNA, 19 nt, Homo sapiens
  misc_RNA (1)...(19): siRNA sense strand
ccacgccugcuccucauga

SEQ ID NO: 53417 - RNA, 19 nt, Homo sapiens
  misc_RNA (1)...(19): siRNA sense strand
ccagcugacuaugagaaug

SEQ ID NO: 53418 - RNA, 19 nt, Homo sapiens
  misc_RNA (1)...(19): siRNA sense strand
ccugaaggccgaagacaca

SEQ ID NO: 53419 - RNA, 19 nt, Homo sapiens
  misc_RNA (1)...(19): siRNA sense strand
agaucgaccuggugaacau

SEQ ID NO: 53420 - RNA, 19 nt, Homo sapiens
  misc_RNA (1)...(19): siRNA sense strand
gacaucguccucuacaaca

SEQ ID NO: 53421 - RNA, 19 nt, Homo sapiens
  misc_RNA (1)...(19): siRNA sense strand
cagcugacuaugagaaugu

SEQ ID NO: 53422 - RNA, 19 nt, Homo sapiens
  misc_RNA (1)...(19): siRNA sense strand
gaaacucuucuccgguuac

SEQ ID NO: 53423 - RNA, 19 nt, Homo sapiens
  misc_RNA (1)...(19): siRNA sense strand
guacguggccauggucauc

SEQ ID NO: 53424 - RNA, 19 nt, Homo sapiens
  misc_RNA (1)...(19): siRNA sense strand
cagaacugcaccaugaaau

SEQ ID NO: 53425 - RNA, 19 nt, Homo sapiens
  misc_RNA (1)...(19): siRNA sense strand
gcucaucgaguccaugcau

SEQ ID NO: 53426 - RNA, 19 nt, Homo sapiens
  misc_RNA (1)...(19): siRNA sense strand
gggacccagcugacuauga

SEQ ID NO: 53427 - RNA, 19 nt, Homo sapiens
  misc_RNA (1)...(19): siRNA sense strand
gaguguggcgagaagauca

SEQ ID NO: 53428 - RNA, 19 nt, Homo sapiens
  misc_RNA (1)...(19): siRNA sense strand
ccuacaacaccaggaagua

SEQ ID NO: 53429 - RNA, 19 nt, Homo sapiens
  misc_RNA (1)...(19): siRNA sense strand
gcuccuggaccuacgacaa

SEQ ID NO: 53430 - RNA, 19 nt, Homo sapiens
  misc_RNA (1)...(19): siRNA sense strand
uggaccagcuggacuucug

SEQ ID NO: 53431 - RNA, 19 nt, Homo sapiens
  misc_RNA (1)...(19): siRNA sense strand
aaacucuucuccgguuaca

SEQ ID NO: 53432 - RNA, 19 nt, Homo sapiens
  misc_RNA (1)...(19): siRNA sense strand
caagacccgcagcaccaaa

SEQ ID NO: 53433 - RNA, 19 nt, Homo sapiens
  misc_RNA (1)...(19): siRNA sense strand
caagaucgaccuggugaac

SEQ ID NO: 53434 - RNA, 19 nt, Homo sapiens
  misc_RNA (1)...(19): siRNA sense strand
gcacaaagguguacuuaga

SEQ ID NO: 53435 - RNA, 19 nt, Homo sapiens
  misc_RNA (1)...(19): siRNA sense strand
gaacaacaaugaugggaau

SEQ ID NO: 53436 - RNA, 19 nt, Homo sapiens
  misc_RNA (1)...(19): siRNA sense strand
gaagggacuuucauugaga

SEQ ID NO: 53437 - RNA, 19 nt, Homo sapiens
  misc_RNA (1)...(19): siRNA sense strand
gggaacagaugaauauuuc

SEQ ID NO: 53438 - RNA, 19 nt, Homo sapiens
  misc_RNA (1)...(19): siRNA sense strand
gcugcuggcugacaaagua

SEQ ID NO: 53439 - RNA, 19 nt, Homo sapiens
  misc_RNA (1)...(19): siRNA sense strand
cgagaaggaugaagagaug

SEQ ID NO: 53440 - RNA, 19 nt, Homo sapiens
  misc_RNA (1)...(19): siRNA sense strand
ucaaguaccucauguuuac

SEQ ID NO: 53441 - RNA, 19 nt, Homo sapiens
  misc_RNA (1)...(19): siRNA sense strand
cgucagaucuucauucaca

SEQ ID NO: 53442 - RNA, 19 nt, Homo sapiens
  misc_RNA (1)...(19): siRNA sense strand
gaucuucauucacaaacuu

SEQ ID NO: 53443 - RNA, 19 nt, Homo sapiens
  misc_RNA (1)...(19): siRNA sense strand
ugacguggcucuggacauu

SEQ ID NO: 53444 - RNA, 19 nt, Homo sapiens
  misc_RNA (1)...(19): siRNA sense strand
ggaaauccacauucaugaa

SEQ ID NO: 53445 - RNA, 19 nt, Homo sapiens
  misc_RNA (1)...(19): siRNA sense strand
gagcacaaagguguacuua

SEQ ID NO: 53446 - RNA, 19 nt, Homo sapiens
  misc_RNA (1)...(19): siRNA sense strand
gcaagggcaucaggaaauc

SEQ ID NO: 53447 - RNA, 19 nt, Homo sapiens
  misc_RNA (1)...(19): siRNA sense strand
gaagagaugagcacaaagg

SEQ ID NO: 53448 - RNA, 19 nt, Homo sapiens
  misc_RNA (1)...(19): siRNA sense strand
gaauugcacuaugguguuc

SEQ ID NO: 53449 - RNA, 19 nt, Homo sapiens
  misc_RNA (1)...(19): siRNA sense strand
uaucaaguaccucauguuu

SEQ ID NO: 53450 - RNA, 19 nt, Homo sapiens
  misc_RNA (1)...(19): siRNA sense strand
ggucagcguuggucucauc

SEQ ID NO: 53451 - RNA, 19 nt, Homo sapiens
  misc_RNA (1)...(19): siRNA sense strand
ggaagccgccaagugauuu

SEQ ID NO: 53452 - RNA, 19 nt, Homo sapiens
  misc_RNA (1)...(19): siRNA sense strand
gaaauccacauucaugaag

SEQ ID NO: 53453 - RNA, 19 nt, Homo sapiens
  misc_RNA (1)...(19): siRNA sense strand
caacaaugaugggaauuuu

SEQ ID NO: 53454 - RNA, 19 nt, Homo sapiens
  misc_RNA (1)...(19): siRNA sense strand
ggacagcgccaggaaguca

SEQ ID NO: 53455 - RNA, 19 nt, Homo sapiens
  misc_RNA (1)...(19): siRNA sense strand
ggaaggacagcgccaggaa

SEQ ID NO: 53456 - RNA, 19 nt, Homo sapiens
  misc_RNA (1)...(19): siRNA sense strand
gcaagccucucuucuaccu

SEQ ID NO: 53457 - RNA, 19 nt, Homo sapiens
  misc_RNA (1)...(19): siRNA sense strand
ggacgccacguaccacuug

SEQ ID NO: 53458 - RNA, 19 nt, Homo sapiens
  misc_RNA (1)...(19): siRNA sense strand
gaacgagaaggaugaagag

SEQ ID NO: 53459 - RNA, 19 nt, Homo sapiens
  misc_RNA (1)...(19): siRNA sense strand
caggaaauccacauucaug

SEQ ID NO: 53460 - RNA, 19 nt, Homo sapiens
  misc_RNA (1)...(19): siRNA sense strand
ccgcaagccucucuucuac

SEQ ID NO: 53461 - RNA, 19 nt, Homo sapiens
  misc_RNA (1)...(19): siRNA sense strand
augaagagaugagcacaaa

SEQ ID NO: 53462 - RNA, 19 nt, Homo sapiens
  misc_RNA (1)...(19): siRNA sense strand
ucacuaucaguacccauua

SEQ ID NO: 53463 - RNA, 19 nt, Homo sapiens
  misc_RNA (1)...(19): siRNA sense strand
ccugaucugcggcgauuua

SEQ ID NO: 53464 - RNA, 19 nt, Homo sapiens
  misc_RNA (1)...(19): siRNA sense strand
ucaguacccauuauuauca

SEQ ID NO: 53465 - RNA, 19 nt, Homo sapiens
  misc_RNA (1)...(19): siRNA sense strand
gagcacgacggcaucgauu

SEQ ID NO: 53466 - RNA, 19 nt, Homo sapiens
  misc_RNA (1)...(19): siRNA sense strand
ggaccacgaugcgcugaag

SEQ ID NO: 53467 - RNA, 19 nt, Homo sapiens
  misc_RNA (1)...(19): siRNA sense strand
cuaucaguacccauuauua

SEQ ID NO: 53468 - RNA, 19 nt, Homo sapiens
  misc_RNA (1)...(19): siRNA sense strand
uggcagaauugcacuaugg

SEQ ID NO: 53469 - RNA, 19 nt, Homo sapiens
  misc_RNA (1)...(19): siRNA sense strand
gggcaagggcaucaggaaa

SEQ ID NO: 53470 - RNA, 19 nt, Homo sapiens
  misc_RNA (1)...(19): siRNA sense strand
ggcaagggcaucaggaaau

SEQ ID NO: 53471 - RNA, 19 nt, Homo sapiens
  misc_RNA (1)...(19): siRNA sense strand
cuacugaacaacaaugaug

SEQ ID NO: 53472 - RNA, 19 nt, Homo sapiens
  misc_RNA (1)...(19): siRNA sense strand
ugaacgagaaggaugaaga

SEQ ID NO: 53473 - RNA, 19 nt, Homo sapiens
  misc_RNA (1)...(19): siRNA sense strand
ccuguggacuuucaucauc

SEQ ID NO: 53474 - RNA, 19 nt, Homo sapiens
  misc_RNA (1)...(19): siRNA sense strand
gguaguggaccgccucuuc

SEQ ID NO: 53475 - RNA, 19 nt, Homo sapiens
  misc_RNA (1)...(19): siRNA sense strand
ucacaaacuuccgcuguac

SEQ ID NO: 53476 - RNA, 19 nt, Homo sapiens
  misc_RNA (1)...(19): siRNA sense strand
gccgcaagccucucuucua

SEQ ID NO: 53477 - RNA, 19 nt, Homo sapiens
  misc_RNA (1)...(19): siRNA sense strand
gcaguuuguggccauggua

SEQ ID NO: 53478 - RNA, 19 nt, Homo sapiens
  misc_RNA (1)...(19): siRNA sense strand
ggacuuucaucaucuucac

SEQ ID NO: 53479 - RNA, 19 nt, Homo sapiens
  misc_RNA (1)...(19): siRNA sense strand
ucacucuucuggccaucuu

SEQ ID NO: 53480 - RNA, 19 nt, Homo sapiens
  misc_RNA (1)...(19): siRNA sense strand
gaugaagagaugagcacaa

SEQ ID NO: 53481 - RNA, 19 nt, Homo sapiens
  misc_RNA (1)...(19): siRNA sense strand
acaacaaugaugggaauuu

SEQ ID NO: 53482 - RNA, 19 nt, Homo sapiens
  misc_RNA (1)...(19): siRNA sense strand
caucaggaaauccacauuc

SEQ ID NO: 53483 - RNA, 19 nt, Homo sapiens
  misc_RNA (1)...(19): siRNA sense strand
caguacccauuauuaucaa

SEQ ID NO: 53484 - RNA, 19 nt, Homo sapiens
  misc_RNA (1)...(19): siRNA sense strand
uucacaaacuuccgcugua

SEQ ID NO: 53485 - RNA, 19 nt, Homo sapiens
  misc_RNA (1)...(19): siRNA sense strand
gcugacaaaguaccugaga

SEQ ID NO: 53486 - RNA, 19 nt, Homo sapiens
  misc_RNA (1)...(19): siRNA sense strand
ggaacaggaggaccacgau

SEQ ID NO: 53487 - RNA, 19 nt, Homo sapiens
  misc_RNA (1)...(19): siRNA sense strand
cggaagccgccaagugauu

SEQ ID NO: 53488 - RNA, 19 nt, Homo sapiens
  misc_RNA (1)...(19): siRNA sense strand
ggcccaaacccgagagaga

SEQ ID NO: 53489 - RNA, 19 nt, Homo sapiens
  misc_RNA (1)...(19): siRNA sense strand
ucagaucuucauucacaaa

SEQ ID NO: 53490 - RNA, 19 nt, Homo sapiens
  misc_RNA (1)...(19): siRNA sense strand
ucucagucauccuuagugu

SEQ ID NO: 53491 - RNA, 19 nt, Homo sapiens
  misc_RNA (1)...(19): siRNA sense strand
ccgcuguaccugcgucuaa

SEQ ID NO: 53492 - RNA, 19 nt, Homo sapiens
  misc_RNA (1)...(19): siRNA sense strand
gaccuggaguggacugacu

SEQ ID NO: 53493 - RNA, 19 nt, Homo sapiens
  misc_RNA (1)...(19): siRNA sense strand
ggagcacgacggcaucgau

SEQ ID NO: 53494 - RNA, 19 nt, Homo sapiens
  misc_RNA (1)...(19): siRNA sense strand
cauccuuagugucgugguu

SEQ ID NO: 53495 - RNA, 19 nt, Homo sapiens
  misc_RNA (1)...(19): siRNA sense strand
ccaugguccucgucaccuu

SEQ ID NO: 53496 - RNA, 19 nt, Homo sapiens
  misc_RNA (1)...(19): siRNA sense strand
cacuaucaguacccauuau

SEQ ID NO: 53497 - RNA, 19 nt, Homo sapiens
  misc_RNA (1)...(19): siRNA sense strand
agaauugcacuaugguguu

SEQ ID NO: 53498 - RNA, 19 nt, Homo sapiens
  misc_RNA (1)...(19): siRNA sense strand
gcacgacggcaucgauucg

SEQ ID NO: 53499 - RNA, 19 nt, Homo sapiens
  misc_RNA (1)...(19): siRNA sense strand
cucgacagcugcaggaaca

SEQ ID NO: 53500 - RNA, 19 nt, Homo sapiens
  misc_RNA (1)...(19): siRNA sense strand
uccggaagccgccaaguga

SEQ ID NO: 53501 - RNA, 19 nt, Homo sapiens
  misc_RNA (1)...(19): siRNA sense strand
uccgucagaucuucauuca

SEQ ID NO: 53502 - RNA, 19 nt, Homo sapiens
  misc_RNA (1)...(19): siRNA sense strand
cugcugacccuuacugugu

SEQ ID NO: 53503 - RNA, 19 nt, Homo sapiens
  misc_RNA (1)...(19): siRNA sense strand
caucuucuaccucaucauc

SEQ ID NO: 53504 - RNA, 19 nt, Homo sapiens
  misc_RNA (1)...(19): siRNA sense strand
aagggacuuucauugagaa

SEQ ID NO: 53505 - RNA, 19 nt, Homo sapiens
  misc_RNA (1)...(19): siRNA sense strand
gcaucaggaaauccacauu

SEQ ID NO: 53506 - RNA, 19 nt, Homo sapiens
  misc_RNA (1)...(19): siRNA sense strand
gacguggcucuggacauua

SEQ ID NO: 53507 - RNA, 19 nt, Homo sapiens
  misc_RNA (1)...(19): siRNA sense strand
gaagauggggcucucaauc

SEQ ID NO: 53508 - RNA, 19 nt, Homo sapiens
  misc_RNA (1)...(19): siRNA sense strand
gccaagugauuuucucuuc

SEQ ID NO: 53509 - RNA, 19 nt, Homo sapiens
  misc_RNA (1)...(19): siRNA sense strand
gcugacccuuacuguguuc

SEQ ID NO: 53510 - RNA, 19 nt, Homo sapiens
  misc_RNA (1)...(19): siRNA sense strand
gagaaggaugaagagauga

SEQ ID NO: 53511 - RNA, 19 nt, Homo sapiens
  misc_RNA (1)...(19): siRNA sense strand
ggggaacagaugaauauuu

SEQ ID NO: 53512 - RNA, 19 nt, Homo sapiens
  misc_RNA (1)...(19): siRNA sense strand
gaaguggaaugcugaagaa

SEQ ID NO: 53513 - RNA, 19 nt, Homo sapiens
  misc_RNA (1)...(19): siRNA sense strand
guggaaugcugaagaauuu

SEQ ID NO: 53514 - RNA, 19 nt, Homo sapiens
  misc_RNA (1)...(19): siRNA sense strand
gggcaaacuucauuguuaa

SEQ ID NO: 53515 - RNA, 19 nt, Homo sapiens
  misc_RNA (1)...(19): siRNA sense strand
gcagugaccucauguucga

SEQ ID NO: 53516 - RNA, 19 nt, Homo sapiens
  misc_RNA (1)...(19): siRNA sense strand
ugagggaccagaacaauua

SEQ ID NO: 53517 - RNA, 19 nt, Homo sapiens
  misc_RNA (1)...(19): siRNA sense strand
gagcacggcuggacagaca

SEQ ID NO: 53518 - RNA, 19 nt, Homo sapiens
  misc_RNA (1)...(19): siRNA sense strand
ggacaagcgcuucaucuag

SEQ ID NO: 53519 - RNA, 19 nt, Homo sapiens
  misc_RNA (1)...(19): siRNA sense strand
gccaggacaucaccuucua

SEQ ID NO: 53520 - RNA, 19 nt, Homo sapiens
  misc_RNA (1)...(19): siRNA sense strand
ggggcaaacuucauuguua

SEQ ID NO: 53521 - RNA, 19 nt, Homo sapiens
  misc_RNA (1)...(19): siRNA sense strand
agcaggaacucuucaauga

SEQ ID NO: 53522 - RNA, 19 nt, Homo sapiens
  misc_RNA (1)...(19): siRNA sense strand
ugaagaauuuggaaacauc

SEQ ID NO: 53523 - RNA, 19 nt, Homo sapiens
  misc_RNA (1)...(19): siRNA sense strand
gcaacgugcuugucuacca

SEQ ID NO: 53524 - RNA, 19 nt, Homo sapiens
  misc_RNA (1)...(19): siRNA sense strand
ucaguucccucaaguauac

SEQ ID NO: 53525 - RNA, 19 nt, Homo sapiens
  misc_RNA (1)...(19): siRNA sense strand
ccaucucugucaccuauuu

SEQ ID NO: 53526 - RNA, 19 nt, Homo sapiens
  misc_RNA (1)...(19): siRNA sense strand
uggaguggaucaucauuga

SEQ ID NO: 53527 - RNA, 19 nt, Homo sapiens
  misc_RNA (1)...(19): siRNA sense strand
ucaaguauacggccaaaga

SEQ ID NO: 53528 - RNA, 19 nt, Homo sapiens
  misc_RNA (1)...(19): siRNA sense strand
gaccagaacaauuacaaug

SEQ ID NO: 53529 - RNA, 19 nt, Homo sapiens
  misc_RNA (1)...(19): siRNA sense strand
caauuacaaugaggagaaa

SEQ ID NO: 53530 - RNA, 19 nt, Homo sapiens
  misc_RNA (1)...(19): siRNA sense strand
caaguucaguucccucaag

SEQ ID NO: 53531 - RNA, 19 nt, Homo sapiens
  misc_RNA (1)...(19): siRNA sense strand
caacauccacuuccgaaca

SEQ ID NO: 53532 - RNA, 19 nt, Homo sapiens
  misc_RNA (1)...(19): siRNA sense strand
ccagaacaauuacaaugag

SEQ ID NO: 53533 - RNA, 19 nt, Homo sapiens
  misc_RNA (1)...(19): siRNA sense strand
gcugaagaauuuggaaaca

SEQ ID NO: 53534 - RNA, 19 nt, Homo sapiens
  misc_RNA (1)...(19): siRNA sense strand
gaccgccucugccuguuug

SEQ ID NO: 53535 - RNA, 19 nt, Homo sapiens
  misc_RNA (1)...(19): siRNA sense strand
gcaccuguuucaagagaag

SEQ ID NO: 53536 - RNA, 19 nt, Homo sapiens
  misc_RNA (1)...(19): siRNA sense strand
acaaccggcugaaguggaa

SEQ ID NO: 53537 - RNA, 19 nt, Homo sapiens
  misc_RNA (1)...(19): siRNA sense strand
gaacacccagcacccaugu

SEQ ID NO: 53538 - RNA, 19 nt, Homo sapiens
  misc_RNA (1)...(19): siRNA sense strand
gaagaauuuggaaacauca

SEQ ID NO: 53539 - RNA, 19 nt, Homo sapiens
  misc_RNA (1)...(19): siRNA sense strand
gggcacagccuggaucuuc

SEQ ID NO: 53540 - RNA, 19 nt, Homo sapiens
  misc_RNA (1)...(19): siRNA sense strand
caaccuggucuucuaccua

SEQ ID NO: 53541 - RNA, 19 nt, Homo sapiens
  misc_RNA (1)...(19): siRNA sense strand
ugaaacaggaugccaagga

SEQ ID NO: 53542 - RNA, 19 nt, Homo sapiens
  misc_RNA (1)...(19): siRNA sense strand
cagaacugcucccucaagu

SEQ ID NO: 53543 - RNA, 19 nt, Homo sapiens
  misc_RNA (1)...(19): siRNA sense strand
caagagaagggcuacaaca

SEQ ID NO: 53544 - RNA, 19 nt, Homo sapiens
  misc_RNA (1)...(19): siRNA sense strand
gcugccaccugccaucuuc

SEQ ID NO: 53545 - RNA, 19 nt, Homo sapiens
  misc_RNA (1)...(19): siRNA sense strand
ggaccgccucugccuguuu

SEQ ID NO: 53546 - RNA, 19 nt, Homo sapiens
  misc_RNA (1)...(19): siRNA sense strand
guucaguucccucaaguau

SEQ ID NO: 53547 - RNA, 19 nt, Homo sapiens
  misc_RNA (1)...(19): siRNA sense strand
caaacuucauuguuaacca

SEQ ID NO: 53548 - RNA, 19 nt, Homo sapiens
  misc_RNA (1)...(19): siRNA sense strand
ggacagacaaccggcugaa

SEQ ID NO: 53549 - RNA, 19 nt, Homo sapiens
  misc_RNA (1)...(19): siRNA sense strand
acaauuacaaugaggagaa

SEQ ID NO: 53550 - RNA, 19 nt, Homo sapiens
  misc_RNA (1)...(19): siRNA sense strand
cagcaggaacucuucaaug

SEQ ID NO: 53551 - RNA, 19 nt, Homo sapiens
  misc_RNA (1)...(19): siRNA sense strand
cagagauugugcuggagaa

SEQ ID NO: 53552 - RNA, 19 nt, Homo sapiens
  misc_RNA (1)...(19): siRNA sense strand
cuaccaauguguggauaga

SEQ ID NO: 53553 - RNA, 19 nt, Homo sapiens
  misc_RNA (1)...(19): siRNA sense strand
ggaccagaacaauuacaau

SEQ ID NO: 53554 - RNA, 19 nt, Homo sapiens
  misc_RNA (1)...(19): siRNA sense strand
cggcaccuguuucaagaga

SEQ ID NO: 53555 - RNA, 19 nt, Homo sapiens
  misc_RNA (1)...(19): siRNA sense strand
ugaaguggaaugcugaaga

SEQ ID NO: 53556 - RNA, 19 nt, Homo sapiens
  misc_RNA (1)...(19): siRNA sense strand
gcugauccggcaccuguuu

SEQ ID NO: 53557 - RNA, 19 nt, Homo sapiens
  misc_RNA (1)...(19): siRNA sense strand
caaccucaucucccugaaa

SEQ ID NO: 53558 - RNA, 19 nt, Homo sapiens
  misc_RNA (1)...(19): siRNA sense strand
gacccucacuaccaaugug

SEQ ID NO: 53559 - RNA, 19 nt, Homo sapiens
  misc_RNA (1)...(19): siRNA sense strand
ugacaguggugagaagaca

SEQ ID NO: 53560 - RNA, 19 nt, Homo sapiens
  misc_RNA (1)...(19): siRNA sense strand
ccaaggagaaccgcaccua

SEQ ID NO: 53561 - RNA, 19 nt, Homo sapiens
  misc_RNA (1)...(19): siRNA sense strand
ccucaucucccugaaagaa

SEQ ID NO: 53562 - RNA, 19 nt, Homo sapiens
  misc_RNA (1)...(19): siRNA sense strand
ccacuacggcuucguguac

SEQ ID NO: 53563 - RNA, 19 nt, Homo sapiens
  misc_RNA (1)...(19): siRNA sense strand
ccuacaacgugcaggacaa

SEQ ID NO: 53564 - RNA, 19 nt, Homo sapiens
  misc_RNA (1)...(19): siRNA sense strand
ugacggcuccuuccagauc

SEQ ID NO: 53565 - RNA, 19 nt, Homo sapiens
  misc_RNA (1)...(19): siRNA sense strand
aagagaagggcuacaacaa

SEQ ID NO: 53566 - RNA, 19 nt, Homo sapiens
  misc_RNA (1)...(19): siRNA sense strand
gcaggaacucuucaaugag

SEQ ID NO: 53567 - RNA, 19 nt, Homo sapiens
  misc_RNA (1)...(19): siRNA sense strand
gcaagccccucuucuacau

SEQ ID NO: 53568 - RNA, 19 nt, Homo sapiens
  misc_RNA (1)...(19): siRNA sense strand
gaacggggagugggagaua

SEQ ID NO: 53569 - RNA, 19 nt, Homo sapiens
  misc_RNA (1)...(19): siRNA sense strand
aggagacccucacuaccaa

SEQ ID NO: 53570 - RNA, 19 nt, Homo sapiens
  misc_RNA (1)...(19): siRNA sense strand
gggaccagaacaauuacaa

SEQ ID NO: 53571 - RNA, 19 nt, Homo sapiens
  misc_RNA (1)...(19): siRNA sense strand
agacaucaguggccaucuc

SEQ ID NO: 53572 - RNA, 19 nt, Homo sapiens
  misc_RNA (1)...(19): siRNA sense strand
uggucaaccuggucuucua

SEQ ID NO: 53573 - RNA, 19 nt, Homo sapiens
  misc_RNA (1)...(19): siRNA sense strand
ggaaugcugaagaauuugg

SEQ ID NO: 53574 - RNA, 19 nt, Homo sapiens
  misc_RNA (1)...(19): siRNA sense strand
ugccggagcuccugcacau

SEQ ID NO: 53575 - RNA, 19 nt, Homo sapiens
  misc_RNA (1)...(19): siRNA sense strand
ucaucucccugaaagaagu

SEQ ID NO: 53576 - RNA, 19 nt, Homo sapiens
  misc_RNA (1)...(19): siRNA sense strand
ccugcaacgugcuugucua

SEQ ID NO: 53577 - RNA, 19 nt, Homo sapiens
  misc_RNA (1)...(19): siRNA sense strand
aaccucaucucccugaaag

SEQ ID NO: 53578 - RNA, 19 nt, Homo sapiens
  misc_RNA (1)...(19): siRNA sense strand
cagacaaccggcugaagug

SEQ ID NO: 53579 - RNA, 19 nt, Homo sapiens
  misc_RNA (1)...(19): siRNA sense strand
guauacggccaaagagauc

SEQ ID NO: 53580 - RNA, 19 nt, Homo sapiens
  misc_RNA (1)...(19): siRNA sense strand
ccucaaguauacggccaaa

SEQ ID NO: 53581 - RNA, 19 nt, Homo sapiens
  misc_RNA (1)...(19): siRNA sense strand
gcaggacaagcgcuucauc

SEQ ID NO: 53582 - RNA, 19 nt, Homo sapiens
  misc_RNA (1)...(19): siRNA sense strand
agagaagggcuacaacaag

SEQ ID NO: 53583 - RNA, 19 nt, Homo sapiens
  misc_RNA (1)...(19): siRNA sense strand
acagacaaccggcugaagu

SEQ ID NO: 53584 - RNA, 19 nt, Homo sapiens
  misc_RNA (1)...(19): siRNA sense strand
uccggcaccuguuucaaga

SEQ ID NO: 53585 - RNA, 19 nt, Homo sapiens
  misc_RNA (1)...(19): siRNA sense strand
gagacccucacuaccaaug

SEQ ID NO: 53586 - RNA, 19 nt, Homo sapiens
  misc_RNA (1)...(19): siRNA sense strand
aggacaagcgcuucaucua

SEQ ID NO: 53587 - RNA, 19 nt, Homo sapiens
  misc_RNA (1)...(19): siRNA sense strand
ccaaggccgaggaguacuu

SEQ ID NO: 53588 - RNA, 19 nt, Homo sapiens
  misc_RNA (1)...(19): siRNA sense strand
cugaagaauuuggaaacau

SEQ ID NO: 53589 - RNA, 19 nt, Homo sapiens
  misc_RNA (1)...(19): siRNA sense strand
accagaacaauuacaauga

SEQ ID NO: 53590 - RNA, 19 nt, Homo sapiens
  misc_RNA (1)...(19): siRNA sense strand
gaaugcugaagaauuugga

SEQ ID NO: 53591 - RNA, 19 nt, Homo sapiens
  misc_RNA (1)...(19): siRNA sense strand
aguggaaugcugaagaauu

SEQ ID NO: 53592 - RNA, 19 nt, Homo sapiens
  misc_RNA (1)...(19): siRNA sense strand
gagauugugcuggagaaca

SEQ ID NO: 53593 - RNA, 19 nt, Homo sapiens
  misc_RNA (1)...(19): siRNA sense strand
gaacgugggcgacaagaaa

SEQ ID NO: 53594 - RNA, 19 nt, Homo sapiens
  misc_RNA (1)...(19): siRNA sense strand
gaucguggacgccgugauu

SEQ ID NO: 53595 - RNA, 19 nt, Homo sapiens
  misc_RNA (1)...(19): siRNA sense strand
gaagaagaaguaugaugug

SEQ ID NO: 53596 - RNA, 19 nt, Homo sapiens
  misc_RNA (1)...(19): siRNA sense strand
ggagaaggccaucuacaag

SEQ ID NO: 53597 - RNA, 19 nt, Homo sapiens
  misc_RNA (1)...(19): siRNA sense strand
ugaagaagaaguaugaugu

SEQ ID NO: 53598 - RNA, 19 nt, Homo sapiens
  misc_RNA (1)...(19): siRNA sense strand
cagaaggagugggccauga

SEQ ID NO: 53599 - RNA, 19 nt, Homo sapiens
  misc_RNA (1)...(19): siRNA sense strand
gcacacacuaccaaucguu

SEQ ID NO: 53600 - RNA, 19 nt, Homo sapiens
  misc_RNA (1)...(19): siRNA sense strand
ggccuacuguggcuacuca

SEQ ID NO: 53601 - RNA, 19 nt, Homo sapiens
  misc_RNA (1)...(19): siRNA sense strand
cccagcggaugguggauuu

SEQ ID NO: 53602 - RNA, 19 nt, Homo sapiens
  misc_RNA (1)...(19): siRNA sense strand
uggaggccauugacaccua

SEQ ID NO: 53603 - RNA, 19 nt, Homo sapiens
  misc_RNA (1)...(19): siRNA sense strand
uggagaaggccaucuacaa

SEQ ID NO: 53604 - RNA, 19 nt, Homo sapiens
  misc_RNA (1)...(19): siRNA sense strand
cgacaagaaaggcaagauc

SEQ ID NO: 53605 - RNA, 19 nt, Homo sapiens
  misc_RNA (1)...(19): siRNA sense strand
gugcugcugcugcuucuga

SEQ ID NO: 53606 - RNA, 19 nt, Homo sapiens
  misc_RNA (1)...(19): siRNA sense strand
agaaggagugggccaugaa

SEQ ID NO: 53607 - RNA, 19 nt, Homo sapiens
  misc_RNA (1)...(19): siRNA sense strand
ccaugaacgugggcgacaa

SEQ ID NO: 53608 - RNA, 19 nt, Homo sapiens
  misc_RNA (1)...(19): siRNA sense strand
gaaggagugggccaugaac

SEQ ID NO: 53609 - RNA, 19 nt, Homo sapiens
  misc_RNA (1)...(19): siRNA sense strand
gaacgugggcgacaagaaa

SEQ ID NO: 53610 - RNA, 19 nt, Homo sapiens
  misc_RNA (1)...(19): siRNA sense strand
gaucguggacgccgugauu

SEQ ID NO: 53611 - RNA, 19 nt, Homo sapiens
  misc_RNA (1)...(19): siRNA sense strand
gaagaagaaguaugaugug

SEQ ID NO: 53612 - RNA, 19 nt, Homo sapiens
  misc_RNA (1)...(19): siRNA sense strand
ggagaaggccaucuacaag

SEQ ID NO: 53613 - RNA, 19 nt, Homo sapiens
  misc_RNA (1)...(19): siRNA sense strand
ugaagaagaaguaugaugu

SEQ ID NO: 53614 - RNA, 19 nt, Homo sapiens
  misc_RNA (1)...(19): siRNA sense strand
cagaaggagugggccauga

SEQ ID NO: 53615 - RNA, 19 nt, Homo sapiens
  misc_RNA (1)...(19): siRNA sense strand
gcacacacuaccaaucguu

SEQ ID NO: 53616 - RNA, 19 nt, Homo sapiens
  misc_RNA (1)...(19): siRNA sense strand
ggccuacuguggcuacuca

SEQ ID NO: 53617 - RNA, 19 nt, Homo sapiens
  misc_RNA (1)...(19): siRNA sense strand
cccagcggaugguggauuu

SEQ ID NO: 53618 - RNA, 19 nt, Homo sapiens
  misc_RNA (1)...(19): siRNA sense strand
uggaggccauugacaccua

SEQ ID NO: 53619 - RNA, 19 nt, Homo sapiens
  misc_RNA (1)...(19): siRNA sense strand
uggagaaggccaucuacaa

SEQ ID NO: 53620 - RNA, 19 nt, Homo sapiens
  misc_RNA (1)...(19): siRNA sense strand
cgacaagaaaggcaagauc

SEQ ID NO: 53621 - RNA, 19 nt, Homo sapiens
  misc_RNA (1)...(19): siRNA sense strand
agaaggagugggccaugaa

SEQ ID NO: 53622 - RNA, 19 nt, Homo sapiens
  misc_RNA (1)...(19): siRNA sense strand
ccaugaacgugggcgacaa

SEQ ID NO: 53623 - RNA, 19 nt, Homo sapiens
  misc_RNA (1)...(19): siRNA sense strand
gaaggagugggccaugaac

SEQ ID NO: 53624 - RNA, 19 nt, Homo sapiens
  misc_RNA (1)...(19): siRNA sense strand
ggaaacucauggagauuau

SEQ ID NO: 53625 - RNA, 19 nt, Homo sapiens
  misc_RNA (1)...(19): siRNA sense strand
acaggaaacucauggagau

SEQ ID NO: 53626 - RNA, 19 nt, Homo sapiens
  misc_RNA (1)...(19): siRNA sense strand
aaacucauggagauuauug

SEQ ID NO: 53627 - RNA, 19 nt, Homo sapiens
  misc_RNA (1)...(19): siRNA sense strand
gaaacucauggagauuauu

SEQ ID NO: 53628 - RNA, 19 nt, Homo sapiens
  misc_RNA (1)...(19): siRNA sense strand
aggaaacucauggagauua

SEQ ID NO: 53629 - RNA, 19 nt, Homo sapiens
  misc_RNA (1)...(19): siRNA sense strand
cgggaagucuuggaaaugg

SEQ ID NO: 53630 - RNA, 19 nt, Homo sapiens
  misc_RNA (1)...(19): siRNA sense strand
gcaguuagcacagcaagcu

SEQ ID NO: 53631 - RNA, 19 nt, Homo sapiens
  misc_RNA (1)...(19): siRNA sense strand
ccucagcccuuggauuucu

SEQ ID NO: 53632 - RNA, 19 nt, Homo sapiens
  misc_RNA (1)...(19): siRNA sense strand
gcaacaggaaacucaugga

SEQ ID NO: 53633 - RNA, 19 nt, Homo sapiens
  misc_RNA (1)...(19): siRNA sense strand
cauggagauuauugggaaa

SEQ ID NO: 53634 - RNA, 19 nt, Homo sapiens
  misc_RNA (1)...(19): siRNA sense strand
acccucagcccuuggauuu

SEQ ID NO: 53635 - RNA, 19 nt, Homo sapiens
  misc_RNA (1)...(19): siRNA sense strand
ggaggcaccggagagagaa

SEQ ID NO: 53636 - RNA, 19 nt, Homo sapiens
  misc_RNA (1)...(19): siRNA sense strand
gcucacagcaacaggaaac

SEQ ID NO: 53637 - RNA, 19 nt, Homo sapiens
  misc_RNA (1)...(19): siRNA sense strand
gcaugggagaggaguacuu

SEQ ID NO: 53638 - RNA, 19 nt, Homo sapiens
  misc_RNA (1)...(19): siRNA sense strand
gaagucaucucagaaaugu

SEQ ID NO: 53639 - RNA, 19 nt, Homo sapiens
  misc_RNA (1)...(19): siRNA sense strand
ugagaugaaugaaacagua

SEQ ID NO: 53640 - RNA, 19 nt, Homo sapiens
  misc_RNA (1)...(19): siRNA sense strand
gagccgaccugccuacaga

SEQ ID NO: 53641 - RNA, 19 nt, Homo sapiens
  misc_RNA (1)...(19): siRNA sense strand
guagaagucaucucagaaa

SEQ ID NO: 53642 - RNA, 19 nt, Homo sapiens
  misc_RNA (1)...(19): siRNA sense strand
gaaugaaacaguagaaguc

SEQ ID NO: 53643 - RNA, 19 nt, Homo sapiens
  misc_RNA (1)...(19): siRNA sense strand
ucaaagagaaccugaagga

SEQ ID NO: 53644 - RNA, 19 nt, Homo sapiens
  misc_RNA (1)...(19): siRNA sense strand
caguagaagucaucucaga

SEQ ID NO: 53645 - RNA, 19 nt, Homo sapiens
  misc_RNA (1)...(19): siRNA sense strand
aagagaaccugaaggacuu

SEQ ID NO: 53646 - RNA, 19 nt, Homo sapiens
  misc_RNA (1)...(19): siRNA sense strand
agacacugcugcugagaug

SEQ ID NO: 53647 - RNA, 19 nt, Homo sapiens
  misc_RNA (1)...(19): siRNA sense strand
ugaaggacuuucugcuugu

SEQ ID NO: 53648 - RNA, 19 nt, Homo sapiens
  misc_RNA (1)...(19): siRNA sense strand
gccuggagcuguacaagca

SEQ ID NO: 53649 - RNA, 19 nt, Homo sapiens
  misc_RNA (1)...(19): siRNA sense strand
gaaccugaguagagacacu

SEQ ID NO: 53650 - RNA, 19 nt, Homo sapiens
  misc_RNA (1)...(19): siRNA sense strand
uagaagucaucucagaaau

SEQ ID NO: 53651 - RNA, 19 nt, Homo sapiens
  misc_RNA (1)...(19): siRNA sense strand
agucaucucagaaauguuu

SEQ ID NO: 53652 - RNA, 19 nt, Homo sapiens
  misc_RNA (1)...(19): siRNA sense strand
gaugaaugaaacaguagaa

SEQ ID NO: 53653 - RNA, 19 nt, Homo sapiens
  misc_RNA (1)...(19): siRNA sense strand
gaaggacuuucugcuuguc

SEQ ID NO: 53654 - RNA, 19 nt, Homo sapiens
  misc_RNA (1)...(19): siRNA sense strand
cugcugagaugaaugaaac

SEQ ID NO: 53655 - RNA, 19 nt, Homo sapiens
  misc_RNA (1)...(19): siRNA sense strand
ugaaugaaacaguagaagu

SEQ ID NO: 53656 - RNA, 19 nt, Homo sapiens
  misc_RNA (1)...(19): siRNA sense strand
agacccgccuggagcugua

SEQ ID NO: 53657 - RNA, 19 nt, Homo sapiens
  misc_RNA (1)...(19): siRNA sense strand
gagaugaaugaaacaguag

SEQ ID NO: 53658 - RNA, 19 nt, Homo sapiens
  misc_RNA (1)...(19): siRNA sense strand
gaaccugaaggacuuucug

SEQ ID NO: 53659 - RNA, 19 nt, Homo sapiens
  misc_RNA (1)...(19): siRNA sense strand
ugaaacaguagaagucauc

SEQ ID NO: 53660 - RNA, 19 nt, Homo sapiens
  misc_RNA (1)...(19): siRNA sense strand
agaagucaucucagaaaug

SEQ ID NO: 53661 - RNA, 19 nt, Homo sapiens
  misc_RNA (1)...(19): siRNA sense strand
acacugcugcugagaugaa

SEQ ID NO: 53662 - RNA, 19 nt, Homo sapiens
  misc_RNA (1)...(19): siRNA sense strand
ccugaaggacuuucugcuu

SEQ ID NO: 53663 - RNA, 19 nt, Homo sapiens
  misc_RNA (1)...(19): siRNA sense strand
gcacauaaaucagaagugu

SEQ ID NO: 53664 - RNA, 19 nt, Homo sapiens
  misc_RNA (1)...(19): siRNA sense strand
gauccaagguuaugugguu

SEQ ID NO: 53665 - RNA, 19 nt, Homo sapiens
  misc_RNA (1)...(19): siRNA sense strand
gcggacggauccaagguua

SEQ ID NO: 53666 - RNA, 19 nt, Homo sapiens
  misc_RNA (1)...(19): siRNA sense strand
caaccacacucaggccuuu

SEQ ID NO: 53667 - RNA, 19 nt, Homo sapiens
  misc_RNA (1)...(19): siRNA sense strand
uggaggcccuucaguauga

SEQ ID NO: 53668 - RNA, 19 nt, Homo sapiens
  misc_RNA (1)...(19): siRNA sense strand
ucccauggauguugugaaa

SEQ ID NO: 53669 - RNA, 19 nt, Homo sapiens
  misc_RNA (1)...(19): siRNA sense strand
aagguuaugugguuucuug

SEQ ID NO: 53670 - RNA, 19 nt, Homo sapiens
  misc_RNA (1)...(19): siRNA sense strand
guacaguccucacccugau

SEQ ID NO: 53671 - RNA, 19 nt, Homo sapiens
  misc_RNA (1)...(19): siRNA sense strand
cagugcagcuguucuggaa

SEQ ID NO: 53672 - RNA, 19 nt, Homo sapiens
  misc_RNA (1)...(19): siRNA sense strand
ccucagggcuaugugauug

SEQ ID NO: 53673 - RNA, 19 nt, Homo sapiens
  misc_RNA (1)...(19): siRNA sense strand
gaaacugcagccugacuug

SEQ ID NO: 53674 - RNA, 19 nt, Homo sapiens
  misc_RNA (1)...(19): siRNA sense strand
cagccaggccugcacauaa

SEQ ID NO: 53675 - RNA, 19 nt, Homo sapiens
  misc_RNA (1)...(19): siRNA sense strand
ggacggauccaagguuaug

SEQ ID NO: 53676 - RNA, 19 nt, Homo sapiens
  misc_RNA (1)...(19): siRNA sense strand
caucgugacucccuuguac

SEQ ID NO: 53677 - RNA, 19 nt, Homo sapiens
  misc_RNA (1)...(19): siRNA sense strand
acauaaaucagaaguguga

SEQ ID NO: 53678 - RNA, 19 nt, Homo sapiens
  misc_RNA (1)...(19): siRNA sense strand
gagaacaucaggcccuuuc

SEQ ID NO: 53679 - RNA, 19 nt, Homo sapiens
  misc_RNA (1)...(19): siRNA sense strand
ugccuacucucaagaaaug

SEQ ID NO: 53680 - RNA, 19 nt, Homo sapiens
  misc_RNA (1)...(19): siRNA sense strand
caaccucuccugccucaug

SEQ ID NO: 53681 - RNA, 19 nt, Homo sapiens
  misc_RNA (1)...(19): siRNA sense strand
cccaccagcuucacucuga

SEQ ID NO: 53682 - RNA, 19 nt, Homo sapiens
  misc_RNA (1)...(19): siRNA sense strand
ggaaacugcagccugacuu

SEQ ID NO: 53683 - RNA, 19 nt, Homo sapiens
  misc_RNA (1)...(19): siRNA sense strand
ccauggauguugugaaacu

SEQ ID NO: 53684 - RNA, 19 nt, Homo sapiens
  misc_RNA (1)...(19): siRNA sense strand
gcacgccacccaucaccaa

SEQ ID NO: 53685 - RNA, 19 nt, Homo sapiens
  misc_RNA (1)...(19): siRNA sense strand
agccaggccugcacauaaa

SEQ ID NO: 53686 - RNA, 19 nt, Homo sapiens
  misc_RNA (1)...(19): siRNA sense strand
ccuggaggauggaacagaa

SEQ ID NO: 53687 - RNA, 19 nt, Homo sapiens
  misc_RNA (1)...(19): siRNA sense strand
ggcagcagcgucugucuga

SEQ ID NO: 53688 - RNA, 19 nt, Homo sapiens
  misc_RNA (1)...(19): siRNA sense strand
gcaacaagaccuggaggau

SEQ ID NO: 53689 - RNA, 19 nt, Homo sapiens
  misc_RNA (1)...(19): siRNA sense strand
gcaacagccugcagauccu

SEQ ID NO: 53690 - RNA, 19 nt, Homo sapiens
  misc_RNA (1)...(19): siRNA sense strand
ccccagagcugcaucuaaa

SEQ ID NO: 53691 - RNA, 19 nt, Homo sapiens
  misc_RNA (1)...(19): siRNA sense strand
ccuuucagcucuaugagau

SEQ ID NO: 53692 - RNA, 19 nt, Homo sapiens
  misc_RNA (1)...(19): siRNA sense strand
gaacaucaggcccuuucag

SEQ ID NO: 53693 - RNA, 19 nt, Homo sapiens
  misc_RNA (1)...(19): siRNA sense strand
ggccuacacccugcagaua

SEQ ID NO: 53694 - RNA, 19 nt, Homo sapiens
  misc_RNA (1)...(19): siRNA sense strand
ggaggaggaugaaaagaag

SEQ ID NO: 53695 - RNA, 19 nt, Homo sapiens
  misc_RNA (1)...(19): siRNA sense strand
ggaccaacgcucagaacca

SEQ ID NO: 53696 - RNA, 19 nt, Homo sapiens
  misc_RNA (1)...(19): siRNA sense strand
ggacccggagccacagauu

SEQ ID NO: 53697 - RNA, 19 nt, Homo sapiens
  misc_RNA (1)...(19): siRNA sense strand
cagcagcgucugucugaug

SEQ ID NO: 53698 - RNA, 19 nt, Homo sapiens
  misc_RNA (1)...(19): siRNA sense strand
uaaagcacauuggcaagac

SEQ ID NO: 53699 - RNA, 19 nt, Homo sapiens
  misc_RNA (1)...(19): siRNA sense strand
ggccugcacauaaaucaga

SEQ ID NO: 53700 - RNA, 19 nt, Homo sapiens
  misc_RNA (1)...(19): siRNA sense strand
cuaaagcacauuggcaaga

SEQ ID NO: 53701 - RNA, 19 nt, Homo sapiens
  misc_RNA (1)...(19): siRNA sense strand
cugcuguuguaccagaaua

SEQ ID NO: 53702 - RNA, 19 nt, Homo sapiens
  misc_RNA (1)...(19): siRNA sense strand
acccaggaaucuaucauca

SEQ ID NO: 53703 - RNA, 19 nt, Homo sapiens
  misc_RNA (1)...(19): siRNA sense strand
gccuggagcugagaacuac

SEQ ID NO: 53704 - RNA, 19 nt, Homo sapiens
  misc_RNA (1)...(19): siRNA sense strand
ccuuggaggcccuucagua

SEQ ID NO: 53705 - RNA, 19 nt, Homo sapiens
  misc_RNA (1)...(19): siRNA sense strand
ggagaacaucaggcccuuu

SEQ ID NO: 53706 - RNA, 19 nt, Homo sapiens
  misc_RNA (1)...(19): siRNA sense strand
ucccauaacagcucagaga

SEQ ID NO: 53707 - RNA, 19 nt, Homo sapiens
  misc_RNA (1)...(19): siRNA sense strand
uaugccuacucucaagaaa

SEQ ID NO: 53708 - RNA, 19 nt, Homo sapiens
  misc_RNA (1)...(19): siRNA sense strand
cuuggaggcccuucaguau

SEQ ID NO: 53709 - RNA, 19 nt, Homo sapiens
  misc_RNA (1)...(19): siRNA sense strand
uuucagcucuaugagauca

SEQ ID NO: 53710 - RNA, 19 nt, Homo sapiens
  misc_RNA (1)...(19): siRNA sense strand
ccuuguggccuauaacuca

SEQ ID NO: 53711 - RNA, 19 nt, Homo sapiens
  misc_RNA (1)...(19): siRNA sense strand
ccaagguuaugugguuucu

SEQ ID NO: 53712 - RNA, 19 nt, Homo sapiens
  misc_RNA (1)...(19): siRNA sense strand
gcacauaaaucagaagugu

SEQ ID NO: 53713 - RNA, 19 nt, Homo sapiens
  misc_RNA (1)...(19): siRNA sense strand
gauccaagguuaugugguu

SEQ ID NO: 53714 - RNA, 19 nt, Homo sapiens
  misc_RNA (1)...(19): siRNA sense strand
gcggacggauccaagguua

SEQ ID NO: 53715 - RNA, 19 nt, Homo sapiens
  misc_RNA (1)...(19): siRNA sense strand
caaccacacucaggccuuu

SEQ ID NO: 53716 - RNA, 19 nt, Homo sapiens
  misc_RNA (1)...(19): siRNA sense strand
uggaggcccuucaguauga

SEQ ID NO: 53717 - RNA, 19 nt, Homo sapiens
  misc_RNA (1)...(19): siRNA sense strand
ucccauggauguugugaaa

SEQ ID NO: 53718 - RNA, 19 nt, Homo sapiens
  misc_RNA (1)...(19): siRNA sense strand
aagguuaugugguuucuug

SEQ ID NO: 53719 - RNA, 19 nt, Homo sapiens
  misc_RNA (1)...(19): siRNA sense strand
guacaguccucacccugau

SEQ ID NO: 53720 - RNA, 19 nt, Homo sapiens
  misc_RNA (1)...(19): siRNA sense strand
cagugcagcuguucuggaa

SEQ ID NO: 53721 - RNA, 19 nt, Homo sapiens
  misc_RNA (1)...(19): siRNA sense strand
ccucagggcuaugugauug

SEQ ID NO: 53722 - RNA, 19 nt, Homo sapiens
  misc_RNA (1)...(19): siRNA sense strand
gaaacugcagccugacuug

SEQ ID NO: 53723 - RNA, 19 nt, Homo sapiens
  misc_RNA (1)...(19): siRNA sense strand
cagccaggccugcacauaa

SEQ ID NO: 53724 - RNA, 19 nt, Homo sapiens
  misc_RNA (1)...(19): siRNA sense strand
ggacggauccaagguuaug

SEQ ID NO: 53725 - RNA, 19 nt, Homo sapiens
  misc_RNA (1)...(19): siRNA sense strand
caucgugacucccuuguac

SEQ ID NO: 53726 - RNA, 19 nt, Homo sapiens
  misc_RNA (1)...(19): siRNA sense strand
acauaaaucagaaguguga

SEQ ID NO: 53727 - RNA, 19 nt, Homo sapiens
  misc_RNA (1)...(19): siRNA sense strand
gagaacaucaggcccuuuc

SEQ ID NO: 53728 - RNA, 19 nt, Homo sapiens
  misc_RNA (1)...(19): siRNA sense strand
ugccuacucucaagaaaug

SEQ ID NO: 53729 - RNA, 19 nt, Homo sapiens
  misc_RNA (1)...(19): siRNA sense strand
caaccucuccugccucaug

SEQ ID NO: 53730 - RNA, 19 nt, Homo sapiens
  misc_RNA (1)...(19): siRNA sense strand
cccaccagcuucacucuga

SEQ ID NO: 53731 - RNA, 19 nt, Homo sapiens
  misc_RNA (1)...(19): siRNA sense strand
ggaaacugcagccugacuu

SEQ ID NO: 53732 - RNA, 19 nt, Homo sapiens
  misc_RNA (1)...(19): siRNA sense strand
ccauggauguugugaaacu

SEQ ID NO: 53733 - RNA, 19 nt, Homo sapiens
  misc_RNA (1)...(19): siRNA sense strand
gcacgccacccaucaccaa

SEQ ID NO: 53734 - RNA, 19 nt, Homo sapiens
  misc_RNA (1)...(19): siRNA sense strand
agccaggccugcacauaaa

SEQ ID NO: 53735 - RNA, 19 nt, Homo sapiens
  misc_RNA (1)...(19): siRNA sense strand
ccuggaggauggaacagaa

SEQ ID NO: 53736 - RNA, 19 nt, Homo sapiens
  misc_RNA (1)...(19): siRNA sense strand
ggcagcagcgucugucuga

SEQ ID NO: 53737 - RNA, 19 nt, Homo sapiens
  misc_RNA (1)...(19): siRNA sense strand
gcaacaagaccuggaggau

SEQ ID NO: 53738 - RNA, 19 nt, Homo sapiens
  misc_RNA (1)...(19): siRNA sense strand
gcaacagccugcagauccu

SEQ ID NO: 53739 - RNA, 19 nt, Homo sapiens
  misc_RNA (1)...(19): siRNA sense strand
ccccagagcugcaucuaaa

SEQ ID NO: 53740 - RNA, 19 nt, Homo sapiens
  misc_RNA (1)...(19): siRNA sense strand
ccuuucagcucuaugagau

SEQ ID NO: 53741 - RNA, 19 nt, Homo sapiens
  misc_RNA (1)...(19): siRNA sense strand
gaacaucaggcccuuucag

SEQ ID NO: 53742 - RNA, 19 nt, Homo sapiens
  misc_RNA (1)...(19): siRNA sense strand
ggccuacacccugcagaua

SEQ ID NO: 53743 - RNA, 19 nt, Homo sapiens
  misc_RNA (1)...(19): siRNA sense strand
ggaggaggaugaaaagaag

SEQ ID NO: 53744 - RNA, 19 nt, Homo sapiens
  misc_RNA (1)...(19): siRNA sense strand
ggaccaacgcucagaacca

SEQ ID NO: 53745 - RNA, 19 nt, Homo sapiens
  misc_RNA (1)...(19): siRNA sense strand
ggacccggagccacagauu

SEQ ID NO: 53746 - RNA, 19 nt, Homo sapiens
  misc_RNA (1)...(19): siRNA sense strand
cagcagcgucugucugaug

SEQ ID NO: 53747 - RNA, 19 nt, Homo sapiens
  misc_RNA (1)...(19): siRNA sense strand
uaaagcacauuggcaagac

SEQ ID NO: 53748 - RNA, 19 nt, Homo sapiens
  misc_RNA (1)...(19): siRNA sense strand
ggccugcacauaaaucaga

SEQ ID NO: 53749 - RNA, 19 nt, Homo sapiens
  misc_RNA (1)...(19): siRNA sense strand
cuaaagcacauuggcaaga

SEQ ID NO: 53750 - RNA, 19 nt, Homo sapiens
  misc_RNA (1)...(19): siRNA sense strand
cugcuguuguaccagaaua

SEQ ID NO: 53751 - RNA, 19 nt, Homo sapiens
  misc_RNA (1)...(19): siRNA sense strand
acccaggaaucuaucauca

SEQ ID NO: 53752 - RNA, 19 nt, Homo sapiens
  misc_RNA (1)...(19): siRNA sense strand
gccuggagcugagaacuac

SEQ ID NO: 53753 - RNA, 19 nt, Homo sapiens
  misc_RNA (1)...(19): siRNA sense strand
ccuuggaggcccuucagua

SEQ ID NO: 53754 - RNA, 19 nt, Homo sapiens
  misc_RNA (1)...(19): siRNA sense strand
ggagaacaucaggcccuuu

SEQ ID NO: 53755 - RNA, 19 nt, Homo sapiens
  misc_RNA (1)...(19): siRNA sense strand
ucccauaacagcucagaga

SEQ ID NO: 53756 - RNA, 19 nt, Homo sapiens
  misc_RNA (1)...(19): siRNA sense strand
uaugccuacucucaagaaa

SEQ ID NO: 53757 - RNA, 19 nt, Homo sapiens
  misc_RNA (1)...(19): siRNA sense strand
cuuggaggcccuucaguau

SEQ ID NO: 53758 - RNA, 19 nt, Homo sapiens
  misc_RNA (1)...(19): siRNA sense strand
uuucagcucuaugagauca

SEQ ID NO: 53759 - RNA, 19 nt, Homo sapiens
  misc_RNA (1)...(19): siRNA sense strand
ccuuguggccuauaacuca

SEQ ID NO: 53760 - RNA, 19 nt, Homo sapiens
  misc_RNA (1)...(19): siRNA sense strand
ccaagguuaugugguuucu

SEQ ID NO: 53761 - RNA, 19 nt, Homo sapiens
  misc_RNA (1)...(19): siRNA sense strand
gcacauaaaucagaagugu

SEQ ID NO: 53762 - RNA, 19 nt, Homo sapiens
  misc_RNA (1)...(19): siRNA sense strand
gauccaagguuaugugguu

SEQ ID NO: 53763 - RNA, 19 nt, Homo sapiens
  misc_RNA (1)...(19): siRNA sense strand
gcggacggauccaagguua

SEQ ID NO: 53764 - RNA, 19 nt, Homo sapiens
  misc_RNA (1)...(19): siRNA sense strand
caaccacacucaggccuuu

SEQ ID NO: 53765 - RNA, 19 nt, Homo sapiens
  misc_RNA (1)...(19): siRNA sense strand
uggaggcccuucaguauga

SEQ ID NO: 53766 - RNA, 19 nt, Homo sapiens
  misc_RNA (1)...(19): siRNA sense strand
ucccauggauguugugaaa

SEQ ID NO: 53767 - RNA, 19 nt, Homo sapiens
  misc_RNA (1)...(19): siRNA sense strand
aagguuaugugguuucuug

SEQ ID NO: 53768 - RNA, 19 nt, Homo sapiens
  misc_RNA (1)...(19): siRNA sense strand
guacaguccucacccugau

SEQ ID NO: 53769 - RNA, 19 nt, Homo sapiens
  misc_RNA (1)...(19): siRNA sense strand
cagugcagcuguucuggaa

SEQ ID NO: 53770 - RNA, 19 nt, Homo sapiens
  misc_RNA (1)...(19): siRNA sense strand
ccucagggcuaugugauug

SEQ ID NO: 53771 - RNA, 19 nt, Homo sapiens
  misc_RNA (1)...(19): siRNA sense strand
gaaacugcagccugacuug

SEQ ID NO: 53772 - RNA, 19 nt, Homo sapiens
  misc_RNA (1)...(19): siRNA sense strand
cagccaggccugcacauaa

SEQ ID NO: 53773 - RNA, 19 nt, Homo sapiens
  misc_RNA (1)...(19): siRNA sense strand
ggacggauccaagguuaug

SEQ ID NO: 53774 - RNA, 19 nt, Homo sapiens
  misc_RNA (1)...(19): siRNA sense strand
caucgugacucccuuguac

SEQ ID NO: 53775 - RNA, 19 nt, Homo sapiens
  misc_RNA (1)...(19): siRNA sense strand
acauaaaucagaaguguga

SEQ ID NO: 53776 - RNA, 19 nt, Homo sapiens
  misc_RNA (1)...(19): siRNA sense strand
gagaacaucaggcccuuuc

SEQ ID NO: 53777 - RNA, 19 nt, Homo sapiens
  misc_RNA (1)...(19): siRNA sense strand
ugccuacucucaagaaaug

SEQ ID NO: 53778 - RNA, 19 nt, Homo sapiens
  misc_RNA (1)...(19): siRNA sense strand
caaccucuccugccucaug

SEQ ID NO: 53779 - RNA, 19 nt, Homo sapiens
  misc_RNA (1)...(19): siRNA sense strand
cccaccagcuucacucuga

SEQ ID NO: 53780 - RNA, 19 nt, Homo sapiens
  misc_RNA (1)...(19): siRNA sense strand
ggaaacugcagccugacuu

SEQ ID NO: 53781 - RNA, 19 nt, Homo sapiens
  misc_RNA (1)...(19): siRNA sense strand
ccauggauguugugaaacu

SEQ ID NO: 53782 - RNA, 19 nt, Homo sapiens
  misc_RNA (1)...(19): siRNA sense strand
gcacgccacccaucaccaa

SEQ ID NO: 53783 - RNA, 19 nt, Homo sapiens
  misc_RNA (1)...(19): siRNA sense strand
agccaggccugcacauaaa

SEQ ID NO: 53784 - RNA, 19 nt, Homo sapiens
  misc_RNA (1)...(19): siRNA sense strand
ccuggaggauggaacagaa

SEQ ID NO: 53785 - RNA, 19 nt, Homo sapiens
  misc_RNA (1)...(19): siRNA sense strand
ggcagcagcgucugucuga

SEQ ID NO: 53786 - RNA, 19 nt, Homo sapiens
  misc_RNA (1)...(19): siRNA sense strand
gcaacaagaccuggaggau

SEQ ID NO: 53787 - RNA, 19 nt, Homo sapiens
  misc_RNA (1)...(19): siRNA sense strand
gcaacagccugcagauccu

SEQ ID NO: 53788 - RNA, 19 nt, Homo sapiens
  misc_RNA (1)...(19): siRNA sense strand
ccccagagcugcaucuaaa

SEQ ID NO: 53789 - RNA, 19 nt, Homo sapiens
  misc_RNA (1)...(19): siRNA sense strand
ccuuucagcucuaugagau

SEQ ID NO: 53790 - RNA, 19 nt, Homo sapiens
  misc_RNA (1)...(19): siRNA sense strand
gaacaucaggcccuuucag

SEQ ID NO: 53791 - RNA, 19 nt, Homo sapiens
  misc_RNA (1)...(19): siRNA sense strand
ggccuacacccugcagaua

SEQ ID NO: 53792 - RNA, 19 nt, Homo sapiens
  misc_RNA (1)...(19): siRNA sense strand
ggaggaggaugaaaagaag

SEQ ID NO: 53793 - RNA, 19 nt, Homo sapiens
  misc_RNA (1)...(19): siRNA sense strand
ggaccaacgcucagaacca

SEQ ID NO: 53794 - RNA, 19 nt, Homo sapiens
  misc_RNA (1)...(19): siRNA sense strand
ggacccggagccacagauu

SEQ ID NO: 53795 - RNA, 19 nt, Homo sapiens
  misc_RNA (1)...(19): siRNA sense strand
cagcagcgucugucugaug

SEQ ID NO: 53796 - RNA, 19 nt, Homo sapiens
  misc_RNA (1)...(19): siRNA sense strand
uaaagcacauuggcaagac

SEQ ID NO: 53797 - RNA, 19 nt, Homo sapiens
  misc_RNA (1)...(19): siRNA sense strand
ggccugcacauaaaucaga

SEQ ID NO: 53798 - RNA, 19 nt, Homo sapiens
  misc_RNA (1)...(19): siRNA sense strand
cuaaagcacauuggcaaga

SEQ ID NO: 53799 - RNA, 19 nt, Homo sapiens
  misc_RNA (1)...(19): siRNA sense strand
cugcuguuguaccagaaua

SEQ ID NO: 53800 - RNA, 19 nt, Homo sapiens
  misc_RNA (1)...(19): siRNA sense strand
acccaggaaucuaucauca

SEQ ID NO: 53801 - RNA, 19 nt, Homo sapiens
  misc_RNA (1)...(19): siRNA sense strand
gccuggagcugagaacuac

SEQ ID NO: 53802 - RNA, 19 nt, Homo sapiens
  misc_RNA (1)...(19): siRNA sense strand
ccuuggaggcccuucagua

SEQ ID NO: 53803 - RNA, 19 nt, Homo sapiens
  misc_RNA (1)...(19): siRNA sense strand
ggagaacaucaggcccuuu

SEQ ID NO: 53804 - RNA, 19 nt, Homo sapiens
  misc_RNA (1)...(19): siRNA sense strand
ucccauaacagcucagaga

SEQ ID NO: 53805 - RNA, 19 nt, Homo sapiens
  misc_RNA (1)...(19): siRNA sense strand
uaugccuacucucaagaaa

SEQ ID NO: 53806 - RNA, 19 nt, Homo sapiens
  misc_RNA (1)...(19): siRNA sense strand
cuuggaggcccuucaguau

SEQ ID NO: 53807 - RNA, 19 nt, Homo sapiens
  misc_RNA (1)...(19): siRNA sense strand
uuucagcucuaugagauca

SEQ ID NO: 53808 - RNA, 19 nt, Homo sapiens
  misc_RNA (1)...(19): siRNA sense strand
ccuuguggccuauaacuca

SEQ ID NO: 53809 - RNA, 19 nt, Homo sapiens
  misc_RNA (1)...(19): siRNA sense strand
ccaagguuaugugguuucu

SEQ ID NO: 53810 - RNA, 19 nt, Homo sapiens
  misc_RNA (1)...(19): siRNA sense strand
gcacauaaaucagaagugu

SEQ ID NO: 53811 - RNA, 19 nt, Homo sapiens
  misc_RNA (1)...(19): siRNA sense strand
gauccaagguuaugugguu

SEQ ID NO: 53812 - RNA, 19 nt, Homo sapiens
  misc_RNA (1)...(19): siRNA sense strand
gcggacggauccaagguua

SEQ ID NO: 53813 - RNA, 19 nt, Homo sapiens
  misc_RNA (1)...(19): siRNA sense strand
caggcgaucugcauacuuu

SEQ ID NO: 53814 - RNA, 19 nt, Homo sapiens
  misc_RNA (1)...(19): siRNA sense strand
caaccacacucaggccuuu

SEQ ID NO: 53815 - RNA, 19 nt, Homo sapiens
  misc_RNA (1)...(19): siRNA sense strand
uccuauaacuucaguauug

SEQ ID NO: 53816 - RNA, 19 nt, Homo sapiens
  misc_RNA (1)...(19): siRNA sense strand
uggaggcccuucaguauga

SEQ ID NO: 53817 - RNA, 19 nt, Homo sapiens
  misc_RNA (1)...(19): siRNA sense strand
ucccauggauguugugaaa

SEQ ID NO: 53818 - RNA, 19 nt, Homo sapiens
  misc_RNA (1)...(19): siRNA sense strand
aagguuaugugguuucuug

SEQ ID NO: 53819 - RNA, 19 nt, Homo sapiens
  misc_RNA (1)...(19): siRNA sense strand
guacaguccucacccugau

SEQ ID NO: 53820 - RNA, 19 nt, Homo sapiens
  misc_RNA (1)...(19): siRNA sense strand
cagugcagcuguucuggaa

SEQ ID NO: 53821 - RNA, 19 nt, Homo sapiens
  misc_RNA (1)...(19): siRNA sense strand
ccucagggcuaugugauug

SEQ ID NO: 53822 - RNA, 19 nt, Homo sapiens
  misc_RNA (1)...(19): siRNA sense strand
gaaacugcagccugacuug

SEQ ID NO: 53823 - RNA, 19 nt, Homo sapiens
  misc_RNA (1)...(19): siRNA sense strand
cagccaggccugcacauaa

SEQ ID NO: 53824 - RNA, 19 nt, Homo sapiens
  misc_RNA (1)...(19): siRNA sense strand
ggacggauccaagguuaug

SEQ ID NO: 53825 - RNA, 19 nt, Homo sapiens
  misc_RNA (1)...(19): siRNA sense strand
caucgugacucccuuguac

SEQ ID NO: 53826 - RNA, 19 nt, Homo sapiens
  misc_RNA (1)...(19): siRNA sense strand
acauaaaucagaaguguga

SEQ ID NO: 53827 - RNA, 19 nt, Homo sapiens
  misc_RNA (1)...(19): siRNA sense strand
gagaacaucaggcccuuuc

SEQ ID NO: 53828 - RNA, 19 nt, Homo sapiens
  misc_RNA (1)...(19): siRNA sense strand
ugccuacucucaagaaaug

SEQ ID NO: 53829 - RNA, 19 nt, Homo sapiens
  misc_RNA (1)...(19): siRNA sense strand
caaccucuccugccucaug

SEQ ID NO: 53830 - RNA, 19 nt, Homo sapiens
  misc_RNA (1)...(19): siRNA sense strand
cccaccagcuucacucuga

SEQ ID NO: 53831 - RNA, 19 nt, Homo sapiens
  misc_RNA (1)...(19): siRNA sense strand
ggaaacugcagccugacuu

SEQ ID NO: 53832 - RNA, 19 nt, Homo sapiens
  misc_RNA (1)...(19): siRNA sense strand
ccauggauguugugaaacu

SEQ ID NO: 53833 - RNA, 19 nt, Homo sapiens
  misc_RNA (1)...(19): siRNA sense strand
gcacgccacccaucaccaa

SEQ ID NO: 53834 - RNA, 19 nt, Homo sapiens
  misc_RNA (1)...(19): siRNA sense strand
agccaggccugcacauaaa

SEQ ID NO: 53835 - RNA, 19 nt, Homo sapiens
  misc_RNA (1)...(19): siRNA sense strand
ccuggaggauggaacagaa

SEQ ID NO: 53836 - RNA, 19 nt, Homo sapiens
  misc_RNA (1)...(19): siRNA sense strand
ggcagcagcgucugucuga

SEQ ID NO: 53837 - RNA, 19 nt, Homo sapiens
  misc_RNA (1)...(19): siRNA sense strand
gcaacaagaccuggaggau

SEQ ID NO: 53838 - RNA, 19 nt, Homo sapiens
  misc_RNA (1)...(19): siRNA sense strand
gcaacagccugcagauccu

SEQ ID NO: 53839 - RNA, 19 nt, Homo sapiens
  misc_RNA (1)...(19): siRNA sense strand
ccccagagcugcaucuaaa

SEQ ID NO: 53840 - RNA, 19 nt, Homo sapiens
  misc_RNA (1)...(19): siRNA sense strand
ccuuucagcucuaugagau

SEQ ID NO: 53841 - RNA, 19 nt, Homo sapiens
  misc_RNA (1)...(19): siRNA sense strand
gaacaucaggcccuuucag

SEQ ID NO: 53842 - RNA, 19 nt, Homo sapiens
  misc_RNA (1)...(19): siRNA sense strand
ggccuacacccugcagaua

SEQ ID NO: 53843 - RNA, 19 nt, Homo sapiens
  misc_RNA (1)...(19): siRNA sense strand
ggaggaggaugaaaagaag

SEQ ID NO: 53844 - RNA, 19 nt, Homo sapiens
  misc_RNA (1)...(19): siRNA sense strand
ggaccaacgcucagaacca

SEQ ID NO: 53845 - RNA, 19 nt, Homo sapiens
  misc_RNA (1)...(19): siRNA sense strand
gaucugcauacuuuaagga

SEQ ID NO: 53846 - RNA, 19 nt, Homo sapiens
  misc_RNA (1)...(19): siRNA sense strand
ggacccggagccacagauu

SEQ ID NO: 53847 - RNA, 19 nt, Homo sapiens
  misc_RNA (1)...(19): siRNA sense strand
ccuauaacuucaguauugu

SEQ ID NO: 53848 - RNA, 19 nt, Homo sapiens
  misc_RNA (1)...(19): siRNA sense strand
ccaauggccuuuugugcuu

SEQ ID NO: 53849 - RNA, 19 nt, Homo sapiens
  misc_RNA (1)...(19): siRNA sense strand
ggcgaucugcauacuuuaa

SEQ ID NO: 53850 - RNA, 19 nt, Homo sapiens
  misc_RNA (1)...(19): siRNA sense strand
cagcagcgucugucugaug

SEQ ID NO: 53851 - RNA, 19 nt, Homo sapiens
  misc_RNA (1)...(19): siRNA sense strand
uaaagcacauuggcaagac

SEQ ID NO: 53852 - RNA, 19 nt, Homo sapiens
  misc_RNA (1)...(19): siRNA sense strand
ggccugcacauaaaucaga

SEQ ID NO: 53853 - RNA, 19 nt, Homo sapiens
  misc_RNA (1)...(19): siRNA sense strand
cuaaagcacauuggcaaga

SEQ ID NO: 53854 - RNA, 19 nt, Homo sapiens
  misc_RNA (1)...(19): siRNA sense strand
gugcuuguuuccuauaacu

SEQ ID NO: 53855 - RNA, 19 nt, Homo sapiens
  misc_RNA (1)...(19): siRNA sense strand
cugcuguuguaccagaaua

SEQ ID NO: 53856 - RNA, 19 nt, Homo sapiens
  misc_RNA (1)...(19): siRNA sense strand
acccaggaaucuaucauca

SEQ ID NO: 53857 - RNA, 19 nt, Homo sapiens
  misc_RNA (1)...(19): siRNA sense strand
gccuggagcugagaacuac

SEQ ID NO: 53858 - RNA, 19 nt, Homo sapiens
  misc_RNA (1)...(19): siRNA sense strand
ccuuggaggcccuucagua

SEQ ID NO: 53859 - RNA, 19 nt, Homo sapiens
  misc_RNA (1)...(19): siRNA sense strand
ggagaacaucaggcccuuu

SEQ ID NO: 53860 - RNA, 19 nt, Homo sapiens
  misc_RNA (1)...(19): siRNA sense strand
ucccauaacagcucagaga

SEQ ID NO: 53861 - RNA, 19 nt, Homo sapiens
  misc_RNA (1)...(19): siRNA sense strand
uaugccuacucucaagaaa

SEQ ID NO: 53862 - RNA, 19 nt, Homo sapiens
  misc_RNA (1)...(19): siRNA sense strand
gcuuguuuccuauaacuuc

SEQ ID NO: 53863 - RNA, 19 nt, Homo sapiens
  misc_RNA (1)...(19): siRNA sense strand
cuuggaggcccuucaguau

SEQ ID NO: 53864 - RNA, 19 nt, Homo sapiens
  misc_RNA (1)...(19): siRNA sense strand
uuucagcucuaugagauca

SEQ ID NO: 53865 - RNA, 19 nt, Homo sapiens
  misc_RNA (1)...(19): siRNA sense strand
ccuuguggccuauaacuca

SEQ ID NO: 53866 - RNA, 19 nt, Homo sapiens
  misc_RNA (1)...(19): siRNA sense strand
ccaagguuaugugguuucu

SEQ ID NO: 53867 - RNA, 19 nt, Homo sapiens
  misc_RNA (1)...(19): siRNA sense strand
gcagagauaucuuguaaau

SEQ ID NO: 53868 - RNA, 19 nt, Homo sapiens
  misc_RNA (1)...(19): siRNA sense strand
guaaaugacuugguucuuc

SEQ ID NO: 53869 - RNA, 19 nt, Homo sapiens
  misc_RNA (1)...(19): siRNA sense strand
ggcuaaaccuguaccauuu

SEQ ID NO: 53870 - RNA, 19 nt, Homo sapiens
  misc_RNA (1)...(19): siRNA sense strand
gaaguguucaccacgauua

SEQ ID NO: 53871 - RNA, 19 nt, Homo sapiens
  misc_RNA (1)...(19): siRNA sense strand
cugcagagauaucuuguaa

SEQ ID NO: 53872 - RNA, 19 nt, Homo sapiens
  misc_RNA (1)...(19): siRNA sense strand
gauguggcccuucucuuua

SEQ ID NO: 53873 - RNA, 19 nt, Homo sapiens
  misc_RNA (1)...(19): siRNA sense strand
ucaauaugcuggagaacuu

SEQ ID NO: 53874 - RNA, 19 nt, Homo sapiens
  misc_RNA (1)...(19): siRNA sense strand
gaacuucuacugggaauug

SEQ ID NO: 53875 - RNA, 19 nt, Homo sapiens
  misc_RNA (1)...(19): siRNA sense strand
gaauugagacagaaaggaa

SEQ ID NO: 53876 - RNA, 19 nt, Homo sapiens
  misc_RNA (1)...(19): siRNA sense strand
acaagaacaucaccuacuu

SEQ ID NO: 53877 - RNA, 19 nt, Homo sapiens
  misc_RNA (1)...(19): siRNA sense strand
gcccagcgauucauugaug

SEQ ID NO: 53878 - RNA, 19 nt, Homo sapiens
  misc_RNA (1)...(19): siRNA sense strand
ccaagacacuggugcaagu

SEQ ID NO: 53879 - RNA, 19 nt, Homo sapiens
  misc_RNA (1)...(19): siRNA sense strand
ccagaaguauggcccgauu

SEQ ID NO: 53880 - RNA, 19 nt, Homo sapiens
  misc_RNA (1)...(19): siRNA sense strand
agaaguauggcccgauuua

SEQ ID NO: 53881 - RNA, 19 nt, Homo sapiens
  misc_RNA (1)...(19): siRNA sense strand
ggaagcaacccagcaguga

SEQ ID NO: 53882 - RNA, 19 nt, Homo sapiens
  misc_RNA (1)...(19): siRNA sense strand
gacaauggcuggcuaaacc

SEQ ID NO: 53883 - RNA, 19 nt, Homo sapiens
  misc_RNA (1)...(19): siRNA sense strand
gaugaccuguuccgcuuug

SEQ ID NO: 53884 - RNA, 19 nt, Homo sapiens
  misc_RNA (1)...(19): siRNA sense strand
ucgccuaucaccaguauua

SEQ ID NO: 53885 - RNA, 19 nt, Homo sapiens
  misc_RNA (1)...(19): siRNA sense strand
ggagucgguuuaugucauc

SEQ ID NO: 53886 - RNA, 19 nt, Homo sapiens
  misc_RNA (1)...(19): siRNA sense strand
uccagaauuuccagaagua

SEQ ID NO: 53887 - RNA, 19 nt, Homo sapiens
  misc_RNA (1)...(19): siRNA sense strand
gcaacguggagucgguuua

SEQ ID NO: 53888 - RNA, 19 nt, Homo sapiens
  misc_RNA (1)...(19): siRNA sense strand
gcucaguccuggucaaagg

SEQ ID NO: 53889 - RNA, 19 nt, Homo sapiens
  misc_RNA (1)...(19): siRNA sense strand
gggagaagcucggcaacgu

SEQ ID NO: 53890 - RNA, 19 nt, Homo sapiens
  misc_RNA (1)...(19): siRNA sense strand
ggaguccuguugaagaagu

SEQ ID NO: 53891 - RNA, 19 nt, Homo sapiens
  misc_RNA (1)...(19): siRNA sense strand
ucaccaguauuaccagaga

SEQ ID NO: 53892 - RNA, 19 nt, Homo sapiens
  misc_RNA (1)...(19): siRNA sense strand
ggucgccuaucaccaguau

SEQ ID NO: 53893 - RNA, 19 nt, Homo sapiens
  misc_RNA (1)...(19): siRNA sense strand
ggagacgggcacacacaaa

SEQ ID NO: 53894 - RNA, 19 nt, Homo sapiens
  misc_RNA (1)...(19): siRNA sense strand
ccaucuuccucaucaauau

SEQ ID NO: 53895 - RNA, 19 nt, Homo sapiens
  misc_RNA (1)...(19): siRNA sense strand
ugacuugguucuucgagau

SEQ ID NO: 53896 - RNA, 19 nt, Homo sapiens
  misc_RNA (1)...(19): siRNA sense strand
ccgugacccugcagagaua

SEQ ID NO: 53897 - RNA, 19 nt, Homo sapiens
  misc_RNA (1)...(19): siRNA sense strand
ggaccaagaccuggaagga

SEQ ID NO: 53898 - RNA, 19 nt, Homo sapiens
  misc_RNA (1)...(19): siRNA sense strand
gagcaaagacaagaacauc

SEQ ID NO: 53899 - RNA, 19 nt, Homo sapiens
  misc_RNA (1)...(19): siRNA sense strand
gcggaucgcugagcuagag

SEQ ID NO: 53900 - RNA, 19 nt, Homo sapiens
  misc_RNA (1)...(19): siRNA sense strand
agauguggcccuucucuuu

SEQ ID NO: 53901 - RNA, 19 nt, Homo sapiens
  misc_RNA (1)...(19): siRNA sense strand
ucaucaauaugcuggagaa
